United States Patent Application Publication US 2014/0004565 A1 - sequence listing, part 55

SEQ ID NO: 1306987 - RNA, 19 nt, Artificial Sequence
  Description of Artificial Sequence: Synthetic oligonucleotide
caaggauucuuggguaagc

SEQ ID NO: 1306988 - RNA, 19 nt, Artificial Sequence
  Description of Artificial Sequence: Synthetic oligonucleotide
uugugccuaggacauuaaa

SEQ ID NO: 1306989 - RNA, 19 nt, Artificial Sequence
  Description of Artificial Sequence: Synthetic oligonucleotide
ggacugauaugacuaccag

SEQ ID NO: 1306990 - RNA, 19 nt, Artificial Sequence
  Description of Artificial Sequence: Synthetic oligonucleotide
gaaucacuuagacgaaagu

SEQ ID NO: 1306991 - RNA, 19 nt, Artificial Sequence
  Description of Artificial Sequence: Synthetic oligonucleotide
cucggccuggaaaaccggc

SEQ ID NO: 1306992 - RNA, 19 nt, Artificial Sequence
  Description of Artificial Sequence: Synthetic oligonucleotide
accggggucugacagcugu

SEQ ID NO: 1306993 - RNA, 19 nt, Artificial Sequence
  Description of Artificial Sequence: Synthetic oligonucleotide
gacaccggaaugaaaucga

SEQ ID NO: 1306994 - RNA, 19 nt, Artificial Sequence
  Description of Artificial Sequence: Synthetic oligonucleotide
auaugacuaccaguuuuca

SEQ ID NO: 1306995 - RNA, 19 nt, Artificial Sequence
  Description of Artificial Sequence: Synthetic oligonucleotide
augcuauaauuucuccuuu

SEQ ID NO: 1306996 - RNA, 19 nt, Artificial Sequence
  Description of Artificial Sequence: Synthetic oligonucleotide
agacgaaaguucaucuacu

SEQ ID NO: 1306997 - RNA, 19 nt, Artificial Sequence
  Description of Artificial Sequence: Synthetic oligonucleotide
ggauacacacacaccgggg

SEQ ID NO: 1306998 - RNA, 19 nt, Artificial Sequence
  Description of Artificial Sequence: Synthetic oligonucleotide
uuuccccuccuaucuugug

SEQ ID NO: 1306999 - RNA, 19 nt, Artificial Sequence
  Description of Artificial Sequence: Synthetic oligonucleotide
auagagacucucaauuauu

SEQ ID NO: 1307000 - RNA, 19 nt, Artificial Sequence
  Description of Artificial Sequence: Synthetic oligonucleotide
gacuuacuaguuacuauua

SEQ ID NO: 1307001 - RNA, 19 nt, Artificial Sequence
  Description of Artificial Sequence: Synthetic oligonucleotide
ccuaucuugugccuaggac

SEQ ID NO: 1307002 - RNA, 19 nt, Artificial Sequence
  Description of Artificial Sequence: Synthetic oligonucleotide
aggcggauuucuccacguc

SEQ ID NO: 1307003 - RNA, 19 nt, Artificial Sequence
  Description of Artificial Sequence: Synthetic oligonucleotide
guugcuacucacaaaacuu

SEQ ID NO: 1307004 - RNA, 19 nt, Artificial Sequence
  Description of Artificial Sequence: Synthetic oligonucleotide
gugguagugcugacuuucg

SEQ ID NO: 1307005 - RNA, 19 nt, Artificial Sequence
  Description of Artificial Sequence: Synthetic oligonucleotide
gucugacagcugugcaacg

SEQ ID NO: 1307006 - RNA, 19 nt, Artificial Sequence
  Description of Artificial Sequence: Synthetic oligonucleotide
caauccguugcuacucaca

SEQ ID NO: 1307007 - RNA, 19 nt, Artificial Sequence
  Description of Artificial Sequence: Synthetic oligonucleotide
gcuacucacaaaacuuugc

SEQ ID NO: 1307008 - RNA, 19 nt, Artificial Sequence
  Description of Artificial Sequence: Synthetic oligonucleotide
ggcgaggagucgcugaggc

SEQ ID NO: 1307009 - RNA, 19 nt, Artificial Sequence
  Description of Artificial Sequence: Synthetic oligonucleotide
gaaaaccggcgaggagucg

SEQ ID NO: 1307010 - RNA, 19 nt, Artificial Sequence
  Description of Artificial Sequence: Synthetic oligonucleotide
ucguggaccgucucccggu

SEQ ID NO: 1307011 - RNA, 19 nt, Artificial Sequence
  Description of Artificial Sequence: Synthetic oligonucleotide
cgguugaucagguccaugc

SEQ ID NO: 1307012 - RNA, 19 nt, Artificial Sequence
  Description of Artificial Sequence: Synthetic oligonucleotide
cagccucaacuuaaucgac

SEQ ID NO: 1307013 - RNA, 19 nt, Artificial Sequence
  Description of Artificial Sequence: Synthetic oligonucleotide
acgucagaagacagcaugu

SEQ ID NO: 1307014 - RNA, 19 nt, Artificial Sequence
  Description of Artificial Sequence: Synthetic oligonucleotide
uccggguaguaaaccgggu

SEQ ID NO: 1307015 - RNA, 19 nt, Artificial Sequence
  Description of Artificial Sequence: Synthetic oligonucleotide
ggugguagugcugacuuuc

SEQ ID NO: 1307016 - RNA, 19 nt, Artificial Sequence
  Description of Artificial Sequence: Synthetic oligonucleotide
cggaaugaaaucgaugcgc

SEQ ID NO: 1307017 - RNA, 19 nt, Artificial Sequence
  Description of Artificial Sequence: Synthetic oligonucleotide
uccgcaggaaccugacaua

SEQ ID NO: 1307018 - RNA, 19 nt, Artificial Sequence
  Description of Artificial Sequence: Synthetic oligonucleotide
cgaggagucgcugaggccg

SEQ ID NO: 1307019 - RNA, 19 nt, Artificial Sequence
  Description of Artificial Sequence: Synthetic oligonucleotide
auagggcuuggaggcaauc

SEQ ID NO: 1307020 - RNA, 19 nt, Artificial Sequence
  Description of Artificial Sequence: Synthetic oligonucleotide
ccggaaugaaaucgaugcg

SEQ ID NO: 1307021 - RNA, 19 nt, Artificial Sequence
  Description of Artificial Sequence: Synthetic oligonucleotide
agccucaacuuaaucgaca

SEQ ID NO: 1307022 - RNA, 19 nt, Artificial Sequence
  Description of Artificial Sequence: Synthetic oligonucleotide
ugcggaccggcgaggccgg

SEQ ID NO: 1307023 - RNA, 19 nt, Artificial Sequence
  Description of Artificial Sequence: Synthetic oligonucleotide
caacuuaaucgacaaaguu

SEQ ID NO: 1307024 - RNA, 19 nt, Artificial Sequence
  Description of Artificial Sequence: Synthetic oligonucleotide
uuaagggcguccgcaggaa

SEQ ID NO: 1307025 - RNA, 19 nt, Artificial Sequence
  Description of Artificial Sequence: Synthetic oligonucleotide
ggauuucuccacgucguug

SEQ ID NO: 1307026 - RNA, 19 nt, Artificial Sequence
  Description of Artificial Sequence: Synthetic oligonucleotide
ggaagauccggcacugcug

SEQ ID NO: 1307027 - RNA, 19 nt, Artificial Sequence
  Description of Artificial Sequence: Synthetic oligonucleotide
guaaaccgggugguugggc

SEQ ID NO: 1307028 - RNA, 19 nt, Artificial Sequence
  Description of Artificial Sequence: Synthetic oligonucleotide
gguagugcugacuuucgcu

SEQ ID NO: 1307029 - RNA, 19 nt, Artificial Sequence
  Description of Artificial Sequence: Synthetic oligonucleotide
ggagagucggugguagugc

SEQ ID NO: 1307030 - RNA, 19 nt, Artificial Sequence
  Description of Artificial Sequence: Synthetic oligonucleotide
ggagacaccggaaugaaau

SEQ ID NO: 1307031 - RNA, 19 nt, Artificial Sequence
  Description of Artificial Sequence: Synthetic oligonucleotide
ggcgcuguuagaccuccgc

SEQ ID NO: 1307032 - RNA, 19 nt, Artificial Sequence
  Description of Artificial Sequence: Synthetic oligonucleotide
ucgaugcgcuuuggggagg

SEQ ID NO: 1307033 - RNA, 19 nt, Artificial Sequence
  Description of Artificial Sequence: Synthetic oligonucleotide
gaacgucgugcuguuccgc

SEQ ID NO: 1307034 - RNA, 19 nt, Artificial Sequence
  Description of Artificial Sequence: Synthetic oligonucleotide
caggaguggcuuaucugca

SEQ ID NO: 1307035 - RNA, 19 nt, Artificial Sequence
  Description of Artificial Sequence: Synthetic oligonucleotide
guaucggaggauacacaca

SEQ ID NO: 1307036 - RNA, 19 nt, Artificial Sequence
  Description of Artificial Sequence: Synthetic oligonucleotide
aaaccggcgaggagucgcu

SEQ ID NO: 1307037 - RNA, 19 nt, Artificial Sequence
  Description of Artificial Sequence: Synthetic oligonucleotide
agacaaccaauggacugau

SEQ ID NO: 1307038 - RNA, 19 nt, Artificial Sequence
  Description of Artificial Sequence: Synthetic oligonucleotide
ccuccuaucuugugccuag

SEQ ID NO: 1307039 - RNA, 19 nt, Artificial Sequence
  Description of Artificial Sequence: Synthetic oligonucleotide
ggugaguuacaggaagauc

SEQ ID NO: 1307040 - RNA, 19 nt, Artificial Sequence
  Description of Artificial Sequence: Synthetic oligonucleotide
gccuaggacauuaaacauc

SEQ ID NO: 1307041 - RNA, 19 nt, Artificial Sequence
  Description of Artificial Sequence: Synthetic oligonucleotide
gacuaccaguuuucauuaa

SEQ ID NO: 1307042 - RNA, 19 nt, Artificial Sequence
  Description of Artificial Sequence: Synthetic oligonucleotide
aauagggcuuggaggcaau

SEQ ID NO: 1307043 - RNA, 19 nt, Artificial Sequence
  Description of Artificial Sequence: Synthetic oligonucleotide
acacugaauuuaagggcgu

SEQ ID NO: 1307044 - RNA, 19 nt, Artificial Sequence
  Description of Artificial Sequence: Synthetic oligonucleotide
accggcgaggagucgcuga

SEQ ID NO: 1307045 - RNA, 19 nt, Artificial Sequence
  Description of Artificial Sequence: Synthetic oligonucleotide
gccucaacuuaaucgacaa

SEQ ID NO: 1307046 - RNA, 19 nt, Artificial Sequence
  Description of Artificial Sequence: Synthetic oligonucleotide
gugaaucacuuagacgaaa

SEQ ID NO: 1307047 - RNA, 19 nt, Artificial Sequence
  Description of Artificial Sequence: Synthetic oligonucleotide
cagcguaaaauguaugcuu

SEQ ID NO: 1307048 - RNA, 19 nt, Artificial Sequence
  Description of Artificial Sequence: Synthetic oligonucleotide
gugcaagcggcugcugugc

SEQ ID NO: 1307049 - RNA, 19 nt, Artificial Sequence
  Description of Artificial Sequence: Synthetic oligonucleotide
auccguugcuacucacaaa

SEQ ID NO: 1307050 - RNA, 19 nt, Artificial Sequence
  Description of Artificial Sequence: Synthetic oligonucleotide
ugacggugcuggagacacc

SEQ ID NO: 1307051 - RNA, 19 nt, Artificial Sequence
  Description of Artificial Sequence: Synthetic oligonucleotide
ggaaugaaaucgaugcgcu

SEQ ID NO: 1307052 - RNA, 19 nt, Artificial Sequence
  Description of Artificial Sequence: Synthetic oligonucleotide
ggccuggaaaaccggcgag

SEQ ID NO: 1307053 - RNA, 19 nt, Artificial Sequence
  Description of Artificial Sequence: Synthetic oligonucleotide
gugccaugaauuauggaau

SEQ ID NO: 1307054 - RNA, 19 nt, Artificial Sequence
  Description of Artificial Sequence: Synthetic oligonucleotide
ggcucaagacuggugaauc

SEQ ID NO: 1307055 - RNA, 19 nt, Artificial Sequence
  Description of Artificial Sequence: Synthetic oligonucleotide
cgcuguuagaccuccgcag

SEQ ID NO: 1307056 - RNA, 19 nt, Artificial Sequence
  Description of Artificial Sequence: Synthetic oligonucleotide
cuccuaucuugugccuagg

SEQ ID NO: 1307057 - RNA, 19 nt, Artificial Sequence
  Description of Artificial Sequence: Synthetic oligonucleotide
gccuggaaaaccggcgagg

SEQ ID NO: 1307058 - RNA, 19 nt, Artificial Sequence
  Description of Artificial Sequence: Synthetic oligonucleotide
ggaaaaccggcgaggaguc

SEQ ID NO: 1307059 - RNA, 19 nt, Artificial Sequence
  Description of Artificial Sequence: Synthetic oligonucleotide
ccggguaguaaaccgggug

SEQ ID NO: 1307060 - RNA, 19 nt, Artificial Sequence
  Description of Artificial Sequence: Synthetic oligonucleotide
gggauaacauauguauuua

SEQ ID NO: 1307061 - RNA, 19 nt, Artificial Sequence
  Description of Artificial Sequence: Synthetic oligonucleotide
acacuuggucugaugcagu

SEQ ID NO: 1307062 - RNA, 19 nt, Artificial Sequence
  Description of Artificial Sequence: Synthetic oligonucleotide
cuaggacauuaaacaucca

SEQ ID NO: 1307063 - RNA, 19 nt, Artificial Sequence
  Description of Artificial Sequence: Synthetic oligonucleotide
cuuucgcuggugaguuaca

SEQ ID NO: 1307064 - RNA, 19 nt, Artificial Sequence
  Description of Artificial Sequence: Synthetic oligonucleotide
cuuugcaaggacggugaaa

SEQ ID NO: 1307065 - RNA, 19 nt, Artificial Sequence
  Description of Artificial Sequence: Synthetic oligonucleotide
ggcugaaacuuuccuccca

SEQ ID NO: 1307066 - RNA, 19 nt, Artificial Sequence
  Description of Artificial Sequence: Synthetic oligonucleotide
caauuccccggguggguga

SEQ ID NO: 1307067 - RNA, 19 nt, Artificial Sequence
  Description of Artificial Sequence: Synthetic oligonucleotide
accggcgaggccgggagca

SEQ ID NO: 1307068 - RNA, 19 nt, Artificial Sequence
  Description of Artificial Sequence: Synthetic oligonucleotide
gucacucaggcugaaacuu

SEQ ID NO: 1307069 - RNA, 19 nt, Artificial Sequence
  Description of Artificial Sequence: Synthetic oligonucleotide
acaccggaaugaaaucgau

SEQ ID NO: 1307070 - RNA, 19 nt, Artificial Sequence
  Description of Artificial Sequence: Synthetic oligonucleotide
caggguaucggaggauaca

SEQ ID NO: 1307071 - RNA, 19 nt, Artificial Sequence
  Description of Artificial Sequence: Synthetic oligonucleotide
ccaggguaucggaggauac

SEQ ID NO: 1307072 - RNA, 19 nt, Artificial Sequence
  Description of Artificial Sequence: Synthetic oligonucleotide
ggcaauccguugcuacuca

SEQ ID NO: 1307073 - RNA, 19 nt, Artificial Sequence
  Description of Artificial Sequence: Synthetic oligonucleotide
cuugugccuaggacauuaa

SEQ ID NO: 1307074 - RNA, 19 nt, Artificial Sequence
  Description of Artificial Sequence: Synthetic oligonucleotide
gcaauccguugcuacucac

SEQ ID NO: 1307075 - RNA, 19 nt, Artificial Sequence
  Description of Artificial Sequence: Synthetic oligonucleotide
aaccggcgaggagucgcug

SEQ ID NO: 1307076 - RNA, 19 nt, Artificial Sequence
  Description of Artificial Sequence: Synthetic oligonucleotide
uaucugcauugcggucugc

SEQ ID NO: 1307077 - RNA, 19 nt, Artificial Sequence
  Description of Artificial Sequence: Synthetic oligonucleotide
gcagcguaaaauguaugcu

SEQ ID NO: 1307078 - RNA, 19 nt, Artificial Sequence
  Description of Artificial Sequence: Synthetic oligonucleotide
caggccguggcggcucggg

SEQ ID NO: 1307079 - RNA, 19 nt, Artificial Sequence
  Description of Artificial Sequence: Synthetic oligonucleotide
gcgcuguuagaccuccgca

SEQ ID NO: 1307080 - RNA, 19 nt, Artificial Sequence
  Description of Artificial Sequence: Synthetic oligonucleotide
auuccccgggugggugacg

SEQ ID NO: 1307081 - RNA, 19 nt, Artificial Sequence
  Description of Artificial Sequence: Synthetic oligonucleotide
ccguugcuacucacaaaac

SEQ ID NO: 1307082 - RNA, 19 nt, Artificial Sequence
  Description of Artificial Sequence: Synthetic oligonucleotide
gacuuucgcuggugaguua

SEQ ID NO: 1307083 - RNA, 19 nt, Artificial Sequence
  Description of Artificial Sequence: Synthetic oligonucleotide
ccucggccuggaaaaccgg

SEQ ID NO: 1307084 - RNA, 19 nt, Artificial Sequence
  Description of Artificial Sequence: Synthetic oligonucleotide
gcuagacaaccaauggacu

SEQ ID NO: 1307085 - RNA, 19 nt, Artificial Sequence
  Description of Artificial Sequence: Synthetic oligonucleotide
gcgaggagucgcugaggcc

SEQ ID NO: 1307086 - RNA, 19 nt, Artificial Sequence
  Description of Artificial Sequence: Synthetic oligonucleotide
gugugacuuacuaguuacu

SEQ ID NO: 1307087 - RNA, 19 nt, Artificial Sequence
  Description of Artificial Sequence: Synthetic oligonucleotide
cguugcuacucacaaaacu

SEQ ID NO: 1307088 - RNA, 19 nt, Artificial Sequence
  Description of Artificial Sequence: Synthetic oligonucleotide
ggguaucggaggauacaca

SEQ ID NO: 1307089 - RNA, 19 nt, Artificial Sequence
  Description of Artificial Sequence: Synthetic oligonucleotide
ccggcgaggagucgcugag

SEQ ID NO: 1307090 - RNA, 19 nt, Artificial Sequence
  Description of Artificial Sequence: Synthetic oligonucleotide
gacaaccaauggacugaua

SEQ ID NO: 1307091 - RNA, 19 nt, Artificial Sequence
  Description of Artificial Sequence: Synthetic oligonucleotide
gcaugcggaccggcgaggc

SEQ ID NO: 1307092 - RNA, 19 nt, Artificial Sequence
  Description of Artificial Sequence: Synthetic oligonucleotide
ggugacggugcuggagaca

SEQ ID NO: 1307093 - RNA, 19 nt, Artificial Sequence
  Description of Artificial Sequence: Synthetic oligonucleotide
ccacgucguugucacucag

SEQ ID NO: 1307094 - RNA, 19 nt, Artificial Sequence
  Description of Artificial Sequence: Synthetic oligonucleotide
ccgucucccgguugaucag

SEQ ID NO: 1307095 - RNA, 19 nt, Artificial Sequence
  Description of Artificial Sequence: Synthetic oligonucleotide
gcggauuucuccacgucgu

SEQ ID NO: 1307096 - RNA, 19 nt, Artificial Sequence
  Description of Artificial Sequence: Synthetic oligonucleotide
ggaaccugacauagaaauu

SEQ ID NO: 1307097 - RNA, 19 nt, Artificial Sequence
  Description of Artificial Sequence: Synthetic oligonucleotide
cgucgugcuguuccgccug

SEQ ID NO: 1307098 - RNA, 19 nt, Artificial Sequence
  Description of Artificial Sequence: Synthetic oligonucleotide
ggcguccgcaggaaccuga

SEQ ID NO: 1307099 - RNA, 19 nt, Artificial Sequence
  Description of Artificial Sequence: Synthetic oligonucleotide
ccucaacuuaaucgacaaa

SEQ ID NO: 1307100 - RNA, 19 nt, Artificial Sequence
  Description of Artificial Sequence: Synthetic oligonucleotide
gggcucgcgcccgccgucg

SEQ ID NO: 1307101 - RNA, 19 nt, Artificial Sequence
  Description of Artificial Sequence: Synthetic oligonucleotide
guggcggcucgggaacguc

SEQ ID NO: 1307102 - RNA, 19 nt, Artificial Sequence
  Description of Artificial Sequence: Synthetic oligonucleotide
cggcucgggaacgucgugc

SEQ ID NO: 1307103 - RNA, 19 nt, Artificial Sequence
  Description of Artificial Sequence: Synthetic oligonucleotide
gguaguaaaccgggugguu

SEQ ID NO: 1307104 - RNA, 19 nt, Artificial Sequence
  Description of Artificial Sequence: Synthetic oligonucleotide
auccggcacugcugcuguu

SEQ ID NO: 1307105 - RNA, 19 nt, Artificial Sequence
  Description of Artificial Sequence: Synthetic oligonucleotide
gcggcucgggaacgucgug

SEQ ID NO: 1307106 - RNA, 19 nt, Artificial Sequence
  Description of Artificial Sequence: Synthetic oligonucleotide
ccgguugaucagguccaug

SEQ ID NO: 1307107 - RNA, 19 nt, Artificial Sequence
  Description of Artificial Sequence: Synthetic oligonucleotide
gggcgcuguuagaccuccg

SEQ ID NO: 1307108 - RNA, 19 nt, Artificial Sequence
  Description of Artificial Sequence: Synthetic oligonucleotide
gcaagcggcugcugugcau

SEQ ID NO: 1307109 - RNA, 19 nt, Artificial Sequence
  Description of Artificial Sequence: Synthetic oligonucleotide
ccgggagcagcaggccgug

SEQ ID NO: 1307110 - RNA, 19 nt, Artificial Sequence
  Description of Artificial Sequence: Synthetic oligonucleotide
cccaauuccccgggugggu

SEQ ID NO: 1307111 - RNA, 19 nt, Artificial Sequence
  Description of Artificial Sequence: Synthetic oligonucleotide
gcggaccggcgaggccggg

SEQ ID NO: 1307112 - RNA, 19 nt, Artificial Sequence
  Description of Artificial Sequence: Synthetic oligonucleotide
gcgacacaggagagucggu

SEQ ID NO: 1307113 - RNA, 19 nt, Artificial Sequence
  Description of Artificial Sequence: Synthetic oligonucleotide
ggaccgucucccgguugau

SEQ ID NO: 1307114 - RNA, 19 nt, Artificial Sequence
  Description of Artificial Sequence: Synthetic oligonucleotide
caccgcccuccgccgggcu

SEQ ID NO: 1307115 - RNA, 19 nt, Artificial Sequence
  Description of Artificial Sequence: Synthetic oligonucleotide
cguugucacucaggcugaa

SEQ ID NO: 1307116 - RNA, 19 nt, Artificial Sequence
  Description of Artificial Sequence: Synthetic oligonucleotide
gcgcuuuggggaggcggau

SEQ ID NO: 1307117 - RNA, 19 nt, Artificial Sequence
  Description of Artificial Sequence: Synthetic oligonucleotide
cggaccggcgaggccggga

SEQ ID NO: 1307118 - RNA, 19 nt, Artificial Sequence
  Description of Artificial Sequence: Synthetic oligonucleotide
cguggaccgucucccgguu

SEQ ID NO: 1307119 - RNA, 19 nt, Artificial Sequence
  Description of Artificial Sequence: Synthetic oligonucleotide
aauuguuucaauuuguuag

SEQ ID NO: 1307120 - RNA, 19 nt, Artificial Sequence
  Description of Artificial Sequence: Synthetic oligonucleotide
aaaaugauagcuucuaguc

SEQ ID NO: 1307121 - RNA, 19 nt, Artificial Sequence
  Description of Artificial Sequence: Synthetic oligonucleotide
aauuuacuaagccuugccc

SEQ ID NO: 1307122 - RNA, 19 nt, Artificial Sequence
  Description of Artificial Sequence: Synthetic oligonucleotide
uuagagacaaaucuaacag

SEQ ID NO: 1307123 - RNA, 19 nt, Artificial Sequence
  Description of Artificial Sequence: Synthetic oligonucleotide
auaauguuuacguggaugc

SEQ ID NO: 1307124 - RNA, 19 nt, Artificial Sequence
  Description of Artificial Sequence: Synthetic oligonucleotide
ucaauuguaaguuuaaaug

SEQ ID NO: 1307125 - RNA, 19 nt, Artificial Sequence
  Description of Artificial Sequence: Synthetic oligonucleotide
cuugcuaccaauaagugcc

SEQ ID NO: 1307126 - RNA, 19 nt, Artificial Sequence
  Description of Artificial Sequence: Synthetic oligonucleotide
uacauuggauuucaaaugg

SEQ ID NO: 1307127 - RNA, 19 nt, Artificial Sequence
  Description of Artificial Sequence: Synthetic oligonucleotide
guuucaauuuguuagcugg

SEQ ID NO: 1307128 - RNA, 19 nt, Artificial Sequence
  Description of Artificial Sequence: Synthetic oligonucleotide
uccaauagagacuggaugg

SEQ ID NO: 1307129 - RNA, 19 nt, Artificial Sequence
  Description of Artificial Sequence: Synthetic oligonucleotide
uauacuaccaucugcguag

SEQ ID NO: 1307130 - RNA, 19 nt, Artificial Sequence
  Description of Artificial Sequence: Synthetic oligonucleotide
aguaaauucaauuguaagu

SEQ ID NO: 1307131 - RNA, 19 nt, Artificial Sequence
  Description of Artificial Sequence: Synthetic oligonucleotide
ugccaaauugaacacaagg

SEQ ID NO: 1307132 - RNA, 19 nt, Artificial Sequence
  Description of Artificial Sequence: Synthetic oligonucleotide
uauaaaacguacaguaacc

SEQ ID NO: 1307133 - RNA, 19 nt, Artificial Sequence
  Description of Artificial Sequence: Synthetic oligonucleotide
aauauuagaggaucuucag

SEQ ID NO: 1307134 - RNA, 19 nt, Artificial Sequence
  Description of Artificial Sequence: Synthetic oligonucleotide
ucuacuauugcagaaacgc

SEQ ID NO: 1307135 - RNA, 19 nt, Artificial Sequence
  Description of Artificial Sequence: Synthetic oligonucleotide
aaaugggguuccuucaggc

SEQ ID NO: 1307136 - RNA, 19 nt, Artificial Sequence
  Description of Artificial Sequence: Synthetic oligonucleotide
ugcguagacauuaggaugg

SEQ ID NO: 1307137 - RNA, 19 nt, Artificial Sequence
  Description of Artificial Sequence: Synthetic oligonucleotide
acaucuuagagacaaaucu

SEQ ID NO: 1307138 - RNA, 19 nt, Artificial Sequence
  Description of Artificial Sequence: Synthetic oligonucleotide
auugcuuacaaauugagua

SEQ ID NO: 1307139 - RNA, 19 nt, Artificial Sequence
  Description of Artificial Sequence: Synthetic oligonucleotide
agacaaaucuaacaguagg

SEQ ID NO: 1307140 - RNA, 19 nt, Artificial Sequence
  Description of Artificial Sequence: Synthetic oligonucleotide
ucuuguaaccucuugaagu

SEQ ID NO: 1307141 - RNA, 19 nt, Artificial Sequence
  Description of Artificial Sequence: Synthetic oligonucleotide
uuaggauggaacaucuuag

SEQ ID NO: 1307142 - RNA, 19 nt, Artificial Sequence
  Description of Artificial Sequence: Synthetic oligonucleotide
aguuuagcuagagauaggc

SEQ ID NO: 1307143 - RNA, 19 nt, Artificial Sequence
  Description of Artificial Sequence: Synthetic oligonucleotide
aguacauuggauuucaaau

SEQ ID NO: 1307144 - RNA, 19 nt, Artificial Sequence
  Description of Artificial Sequence: Synthetic oligonucleotide
uaaauguaaugaauuagga

SEQ ID NO: 1307145 - RNA, 19 nt, Artificial Sequence
  Description of Artificial Sequence: Synthetic oligonucleotide
ucuaaauacauuguuugcc

SEQ ID NO: 1307146 - RNA, 19 nt, Artificial Sequence
  Description of Artificial Sequence: Synthetic oligonucleotide
aaguaacccagguauacag

SEQ ID NO: 1307147 - RNA, 19 nt, Artificial Sequence
  Description of Artificial Sequence: Synthetic oligonucleotide
aaauguaaugaauuaggaa

SEQ ID NO: 1307148 - RNA, 19 nt, Artificial Sequence
  Description of Artificial Sequence: Synthetic oligonucleotide
ucugauguuccauuugagg

SEQ ID NO: 1307149 - RNA, 19 nt, Artificial Sequence
  Description of Artificial Sequence: Synthetic oligonucleotide
uuauguuguucuccgacgg

SEQ ID NO: 1307150 - RNA, 19 nt, Artificial Sequence
  Description of Artificial Sequence: Synthetic oligonucleotide
auaacucaggaucugaaug

SEQ ID NO: 1307151 - RNA, 19 nt, Artificial Sequence
  Description of Artificial Sequence: Synthetic oligonucleotide
cuauaaaacguacaguaac

SEQ ID NO: 1307152 - RNA, 19 nt, Artificial Sequence
  Description of Artificial Sequence: Synthetic oligonucleotide
uacuauugcagaaacgcgc

SEQ ID NO: 1307153 - RNA, 19 nt, Artificial Sequence
  Description of Artificial Sequence: Synthetic oligonucleotide
aaauugaacacaagggaag

SEQ ID NO: 1307154 - RNA, 19 nt, Artificial Sequence
  Description of Artificial Sequence: Synthetic oligonucleotide
aaaaugaccgcguuccaca

SEQ ID NO: 1307155 - RNA, 19 nt, Artificial Sequence
  Description of Artificial Sequence: Synthetic oligonucleotide
aaaugauagcuucuagucu

SEQ ID NO: 1307156 - RNA, 19 nt, Artificial Sequence
  Description of Artificial Sequence: Synthetic oligonucleotide
auguuaaaauggaagauac

SEQ ID NO: 1307157 - RNA, 19 nt, Artificial Sequence
  Description of Artificial Sequence: Synthetic oligonucleotide
acagauaacauccugguua

SEQ ID NO: 1307158 - RNA, 19 nt, Artificial Sequence
  Description of Artificial Sequence: Synthetic oligonucleotide
uauuagaggaucuucaguu

SEQ ID NO: 1307159 - RNA, 19 nt, Artificial Sequence
  Description of Artificial Sequence: Synthetic oligonucleotide
auuauguuguucuccgacg

SEQ ID NO: 1307160 - RNA, 19 nt, Artificial Sequence
  Description of Artificial Sequence: Synthetic oligonucleotide
uguauauuuaaaaguguaa

SEQ ID NO: 1307161 - RNA, 19 nt, Artificial Sequence
  Description of Artificial Sequence: Synthetic oligonucleotide
aguaauguuugcaaguaac

SEQ ID NO: 1307162 - RNA, 19 nt, Artificial Sequence
  Description of Artificial Sequence: Synthetic oligonucleotide
gacuauugggauuagguuc

SEQ ID NO: 1307163 - RNA, 19 nt, Artificial Sequence
  Description of Artificial Sequence: Synthetic oligonucleotide
uaccugacuauacauaaca

SEQ ID NO: 1307164 - RNA, 19 nt, Artificial Sequence
  Description of Artificial Sequence: Synthetic oligonucleotide
uugcaaguaacccagguau

SEQ ID NO: 1307165 - RNA, 19 nt, Artificial Sequence
  Description of Artificial Sequence: Synthetic oligonucleotide
aaaguaaauguaaugaauu

SEQ ID NO: 1307166 - RNA, 19 nt, Artificial Sequence
  Description of Artificial Sequence: Synthetic oligonucleotide
uuagcuagagauaggcuca

SEQ ID NO: 1307167 - RNA, 19 nt, Artificial Sequence
  Description of Artificial Sequence: Synthetic oligonucleotide
auuuacuaagccuugccca

SEQ ID NO: 1307168 - RNA, 19 nt, Artificial Sequence
  Description of Artificial Sequence: Synthetic oligonucleotide
uggacuauugggauuaggu

SEQ ID NO: 1307169 - RNA, 19 nt, Artificial Sequence
  Description of Artificial Sequence: Synthetic oligonucleotide
cauagguugggcuccagcg

SEQ ID NO: 1307170 - RNA, 19 nt, Artificial Sequence
  Description of Artificial Sequence: Synthetic oligonucleotide
aaaccuuacuauaaaacgu

SEQ ID NO: 1307171 - RNA, 19 nt, Artificial Sequence
  Description of Artificial Sequence: Synthetic oligonucleotide
aauguuccauccucaaaug

SEQ ID NO: 1307172 - RNA, 19 nt, Artificial Sequence
  Description of Artificial Sequence: Synthetic oligonucleotide
uaauguuugcaaguaaccc

SEQ ID NO: 1307173 - RNA, 19 nt, Artificial Sequence
  Description of Artificial Sequence: Synthetic oligonucleotide
uuagcuggguccuuuagca

SEQ ID NO: 1307174 - RNA, 19 nt, Artificial Sequence
  Description of Artificial Sequence: Synthetic oligonucleotide
aaauuagcagaugugggca

SEQ ID NO: 1307175 - RNA, 19 nt, Artificial Sequence
  Description of Artificial Sequence: Synthetic oligonucleotide
uguaaguuuaaauguucca

SEQ ID NO: 1307176 - RNA, 19 nt, Artificial Sequence
  Description of Artificial Sequence: Synthetic oligonucleotide
aaacaauuuacuaagccuu

SEQ ID NO: 1307177 - RNA, 19 nt, Artificial Sequence
  Description of Artificial Sequence: Synthetic oligonucleotide
uuuacguggaugcauuccu

SEQ ID NO: 1307178 - RNA, 19 nt, Artificial Sequence
  Description of Artificial Sequence: Synthetic oligonucleotide
ucaaaugguaucucugaug

SEQ ID NO: 1307179 - RNA, 19 nt, Artificial Sequence
  Description of Artificial Sequence: Synthetic oligonucleotide
ucaacuugcucuuuccuga

SEQ ID NO: 1307180 - RNA, 19 nt, Artificial Sequence
  Description of Artificial Sequence: Synthetic oligonucleotide
guacauuggauuucaaaug

SEQ ID NO: 1307181 - RNA, 19 nt, Artificial Sequence
  Description of Artificial Sequence: Synthetic oligonucleotide
agaggaacggcacugccuc

SEQ ID NO: 1307182 - RNA, 19 nt, Artificial Sequence
  Description of Artificial Sequence: Synthetic oligonucleotide
uguucgcuggacuauuggg

SEQ ID NO: 1307183 - RNA, 19 nt, Artificial Sequence
  Description of Artificial Sequence: Synthetic oligonucleotide
ugaaguaugucaguuauua

SEQ ID NO: 1307184 - RNA, 19 nt, Artificial Sequence
  Description of Artificial Sequence: Synthetic oligonucleotide
aaaugaccgcguuccacac

SEQ ID NO: 1307185 - RNA, 19 nt, Artificial Sequence
  Description of Artificial Sequence: Synthetic oligonucleotide
aggugguacauauaccagg

SEQ ID NO: 1307186 - RNA, 19 nt, Artificial Sequence
  Description of Artificial Sequence: Synthetic oligonucleotide
uggauuugcucuaugacua

SEQ ID NO: 1307187 - RNA, 19 nt, Artificial Sequence
  Description of Artificial Sequence: Synthetic oligonucleotide
ucgacaugucucuagcggg

SEQ ID NO: 1307188 - RNA, 19 nt, Artificial Sequence
  Description of Artificial Sequence: Synthetic oligonucleotide
ucucugauguuccauuuga

SEQ ID NO: 1307189 - RNA, 19 nt, Artificial Sequence
  Description of Artificial Sequence: Synthetic oligonucleotide
ugguacauauaccaggguc

SEQ ID NO: 1307190 - RNA, 19 nt, Artificial Sequence
  Description of Artificial Sequence: Synthetic oligonucleotide
uguaauucauauugcuuac

SEQ ID NO: 1307191 - RNA, 19 nt, Artificial Sequence
  Description of Artificial Sequence: Synthetic oligonucleotide
agugaaguaugucaguuau

SEQ ID NO: 1307192 - RNA, 19 nt, Artificial Sequence
  Description of Artificial Sequence: Synthetic oligonucleotide
uuuguucuacuauugcaga

SEQ ID NO: 1307193 - RNA, 19 nt, Artificial Sequence
  Description of Artificial Sequence: Synthetic oligonucleotide
cuuagagacaaaucuaaca

SEQ ID NO: 1307194 - RNA, 19 nt, Artificial Sequence
  Description of Artificial Sequence: Synthetic oligonucleotide
uucuacuauugcagaaacg

SEQ ID NO: 1307195 - RNA, 19 nt, Artificial Sequence
  Description of Artificial Sequence: Synthetic oligonucleotide
aauucauauugcuuacaaa

SEQ ID NO: 1307196 - RNA, 19 nt, Artificial Sequence
  Description of Artificial Sequence: Synthetic oligonucleotide
uauugcuuacaaauugagu

SEQ ID NO: 1307197 - RNA, 19 nt, Artificial Sequence
  Description of Artificial Sequence: Synthetic oligonucleotide
aaugaccgcguuccacacc

SEQ ID NO: 1307198 - RNA, 19 nt, Artificial Sequence
  Description of Artificial Sequence: Synthetic oligonucleotide
guuuaaauguuccauccuc

SEQ ID NO: 1307199 - RNA, 19 nt, Artificial Sequence
  Description of Artificial Sequence: Synthetic oligonucleotide
auuuaggucaacacuguuc

SEQ ID NO: 1307200 - RNA, 19 nt, Artificial Sequence
  Description of Artificial Sequence: Synthetic oligonucleotide
uuaggucauauucuaaaua

SEQ ID NO: 1307201 - RNA, 19 nt, Artificial Sequence
  Description of Artificial Sequence: Synthetic oligonucleotide
cuacuauugcagaaacgcg

SEQ ID NO: 1307202 - RNA, 19 nt, Artificial Sequence
  Description of Artificial Sequence: Synthetic oligonucleotide
uuccuugauucauaaaaga

SEQ ID NO: 1307203 - RNA, 19 nt, Artificial Sequence
  Description of Artificial Sequence: Synthetic oligonucleotide
auggaagauacaucauagg

SEQ ID NO: 1307204 - RNA, 19 nt, Artificial Sequence
  Description of Artificial Sequence: Synthetic oligonucleotide
uuauuuaggucaacacugu

SEQ ID NO: 1307205 - RNA, 19 nt, Artificial Sequence
  Description of Artificial Sequence: Synthetic oligonucleotide
gucgacaugucucuagcgg

SEQ ID NO: 1307206 - RNA, 19 nt, Artificial Sequence
  Description of Artificial Sequence: Synthetic oligonucleotide
aacccagguauacaguaca

SEQ ID NO: 1307207 - RNA, 19 nt, Artificial Sequence
  Description of Artificial Sequence: Synthetic oligonucleotide
aauugaacacaagggaaga

SEQ ID NO: 1307208 - RNA, 19 nt, Artificial Sequence
  Description of Artificial Sequence: Synthetic oligonucleotide
cuuguaaccucuugaaguc

SEQ ID NO: 1307209 - RNA, 19 nt, Artificial Sequence
  Description of Artificial Sequence: Synthetic oligonucleotide
cagguauacaguacauugg

SEQ ID NO: 1307210 - RNA, 19 nt, Artificial Sequence
  Description of Artificial Sequence: Synthetic oligonucleotide
agguauacaguacauugga

SEQ ID NO: 1307211 - RNA, 19 nt, Artificial Sequence
  Description of Artificial Sequence: Synthetic oligonucleotide
aauuggcaagggaagacag

SEQ ID NO: 1307212 - RNA, 19 nt, Artificial Sequence
  Description of Artificial Sequence: Synthetic oligonucleotide
agaaacgcgcuuuucauau

SEQ ID NO: 1307213 - RNA, 19 nt, Artificial Sequence
  Description of Artificial Sequence: Synthetic oligonucleotide
ucugcguagacauuaggau

SEQ ID NO: 1307214 - RNA, 19 nt, Artificial Sequence
  Description of Artificial Sequence: Synthetic oligonucleotide
gaaagcaugcagcaauaac

SEQ ID NO: 1307215 - RNA, 19 nt, Artificial Sequence
  Description of Artificial Sequence: Synthetic oligonucleotide
auauucuaaauacauuguu

SEQ ID NO: 1307216 - RNA, 19 nt, Artificial Sequence
  Description of Artificial Sequence: Synthetic oligonucleotide
aauuguaaguuuaaauguu

SEQ ID NO: 1307217 - RNA, 19 nt, Artificial Sequence
  Description of Artificial Sequence: Synthetic oligonucleotide
cauuauguuguucuccgac

SEQ ID NO: 1307218 - RNA, 19 nt, Artificial Sequence
  Description of Artificial Sequence: Synthetic oligonucleotide
agaugagauacaacaaagg

SEQ ID NO: 1307219 - RNA, 19 nt, Artificial Sequence
  Description of Artificial Sequence: Synthetic oligonucleotide
auauuagaggaucuucagu

SEQ ID NO: 1307220 - RNA, 19 nt, Artificial Sequence
  Description of Artificial Sequence: Synthetic oligonucleotide
agauacaucauagguuggg

SEQ ID NO: 1307221 - RNA, 19 nt, Artificial Sequence
  Description of Artificial Sequence: Synthetic oligonucleotide
cuuacaaauugaguauagg

SEQ ID NO: 1307222 - RNA, 19 nt, Artificial Sequence
  Description of Artificial Sequence: Synthetic oligonucleotide
ucuuagagacaaaucuaac

SEQ ID NO: 1307223 - RNA, 19 nt, Artificial Sequence
  Description of Artificial Sequence: Synthetic oligonucleotide
uccugauacagcugggcag

SEQ ID NO: 1307224 - RNA, 19 nt, Artificial Sequence
  Description of Artificial Sequence: Synthetic oligonucleotide
caauuuacuaagccuugcc

SEQ ID NO: 1307225 - RNA, 19 nt, Artificial Sequence
  Description of Artificial Sequence: Synthetic oligonucleotide
cuuauggucaacuugcucu

SEQ ID NO: 1307226 - RNA, 19 nt, Artificial Sequence
  Description of Artificial Sequence: Synthetic oligonucleotide
aaagugaaguaugucaguu

SEQ ID NO: 1307227 - RNA, 19 nt, Artificial Sequence
  Description of Artificial Sequence: Synthetic oligonucleotide
guuaccugacuauacauaa

SEQ ID NO: 1307228 - RNA, 19 nt, Artificial Sequence
  Description of Artificial Sequence: Synthetic oligonucleotide
acauaugcaguaguaaugu

SEQ ID NO: 1307229 - RNA, 19 nt, Artificial Sequence
  Description of Artificial Sequence: Synthetic oligonucleotide
uuugcaaguaacccaggua

SEQ ID NO: 1307230 - RNA, 19 nt, Artificial Sequence
  Description of Artificial Sequence: Synthetic oligonucleotide
agaaaaguuuagcuagaga

SEQ ID NO: 1307231 - RNA, 19 nt, Artificial Sequence
  Description of Artificial Sequence: Synthetic oligonucleotide
gccaaauugaacacaaggg

SEQ ID NO: 1307232 - RNA, 19 nt, Artificial Sequence
  Description of Artificial Sequence: Synthetic oligonucleotide
uuuacuaagccuugcccau

SEQ ID NO: 1307233 - RNA, 19 nt, Artificial Sequence
  Description of Artificial Sequence: Synthetic oligonucleotide
auucggauauucuucagua

SEQ ID NO: 1307234 - RNA, 19 nt, Artificial Sequence
  Description of Artificial Sequence: Synthetic oligonucleotide
acguacaguaaccucauaa

SEQ ID NO: 1307235 - RNA, 19 nt, Artificial Sequence
  Description of Artificial Sequence: Synthetic oligonucleotide
ugaaguauauccagacaua

SEQ ID NO: 1307236 - RNA, 19 nt, Artificial Sequence
  Description of Artificial Sequence: Synthetic oligonucleotide
uugcuuacaaauugaguau

SEQ ID NO: 1307237 - RNA, 19 nt, Artificial Sequence
  Description of Artificial Sequence: Synthetic oligonucleotide
gauguuaaaauggaagaua

SEQ ID NO: 1307238 - RNA, 19 nt, Artificial Sequence
  Description of Artificial Sequence: Synthetic oligonucleotide
gauacaucauagguugggc

SEQ ID NO: 1307239 - RNA, 19 nt, Artificial Sequence
  Description of Artificial Sequence: Synthetic oligonucleotide
aaaaguuuagcuagagaua

SEQ ID NO: 1307240 - RNA, 19 nt, Artificial Sequence
  Description of Artificial Sequence: Synthetic oligonucleotide
auaaaacguacaguaaccu

SEQ ID NO: 1307241 - RNA, 19 nt, Artificial Sequence
  Description of Artificial Sequence: Synthetic oligonucleotide
cuaagccuugcccauacug

SEQ ID NO: 1307242 - RNA, 19 nt, Artificial Sequence
  Description of Artificial Sequence: Synthetic oligonucleotide
uuagaggaucuucaguuuu

SEQ ID NO: 1307243 - RNA, 19 nt, Artificial Sequence
  Description of Artificial Sequence: Synthetic oligonucleotide
cauauugcuuacaaauuga

SEQ ID NO: 1307244 - RNA, 19 nt, Artificial Sequence
  Description of Artificial Sequence: Synthetic oligonucleotide
cuagagauaggcucacuuc

SEQ ID NO: 1307245 - RNA, 19 nt, Artificial Sequence
  Description of Artificial Sequence: Synthetic oligonucleotide
cagauaacauccugguuac

SEQ ID NO: 1307246 - RNA, 19 nt, Artificial Sequence
  Description of Artificial Sequence: Synthetic oligonucleotide
aucuuaaaaccuuacuaua

SEQ ID NO: 1307247 - RNA, 19 nt, Artificial Sequence
  Description of Artificial Sequence: Synthetic oligonucleotide
auacaucauagguugggcu

SEQ ID NO: 1307248 - RNA, 19 nt, Artificial Sequence
  Description of Artificial Sequence: Synthetic oligonucleotide
acgcgcuuuucauauuccc

SEQ ID NO: 1307249 - RNA, 19 nt, Artificial Sequence
  Description of Artificial Sequence: Synthetic oligonucleotide
uauaccagggucucugguc

SEQ ID NO: 1307250 - RNA, 19 nt, Artificial Sequence
  Description of Artificial Sequence: Synthetic oligonucleotide
auauugcuuacaaauugag

SEQ ID NO: 1307251 - RNA, 19 nt, Artificial Sequence
  Description of Artificial Sequence: Synthetic oligonucleotide
cugcguagacauuaggaug

SEQ ID NO: 1307252 - RNA, 19 nt, Artificial Sequence
  Description of Artificial Sequence: Synthetic oligonucleotide
uccuugcuaccaauaagug

SEQ ID NO: 1307253 - RNA, 19 nt, Artificial Sequence
  Description of Artificial Sequence: Synthetic oligonucleotide
uguuagcuggguccuuuag

SEQ ID NO: 1307254 - RNA, 19 nt, Artificial Sequence
  Description of Artificial Sequence: Synthetic oligonucleotide
guucuacuauugcagaaac

SEQ ID NO: 1307255 - RNA, 19 nt, Artificial Sequence
  Description of Artificial Sequence: Synthetic oligonucleotide
agacauauacuaccaucug

SEQ ID NO: 1307256 - RNA, 19 nt, Artificial Sequence
  Description of Artificial Sequence: Synthetic oligonucleotide
aacgcgcuuuucauauucc

SEQ ID NO: 1307257 - RNA, 19 nt, Artificial Sequence
  Description of Artificial Sequence: Synthetic oligonucleotide
aauuagcagaugugggcau

SEQ ID NO: 1307258 - RNA, 19 nt, Artificial Sequence
  Description of Artificial Sequence: Synthetic oligonucleotide
uguuguucuccgacggagc

SEQ ID NO: 1307259 - RNA, 19 nt, Artificial Sequence
  Description of Artificial Sequence: Synthetic oligonucleotide
uguuugcaaguaacccagg

SEQ ID NO: 1307260 - RNA, 19 nt, Artificial Sequence
  Description of Artificial Sequence: Synthetic oligonucleotide
gagacaaaucuaacaguag

SEQ ID NO: 1307261 - RNA, 19 nt, Artificial Sequence
  Description of Artificial Sequence: Synthetic oligonucleotide
uugggauuagguucaucca

SEQ ID NO: 1307262 - RNA, 19 nt, Artificial Sequence
  Description of Artificial Sequence: Synthetic oligonucleotide
ucauagguugggcuccagc

SEQ ID NO: 1307263 - RNA, 19 nt, Artificial Sequence
  Description of Artificial Sequence: Synthetic oligonucleotide
augaccgcguuccacacca

SEQ ID NO: 1307264 - RNA, 19 nt, Artificial Sequence
  Description of Artificial Sequence: Synthetic oligonucleotide
auauacuaccaucugcgua

SEQ ID NO: 1307265 - RNA, 19 nt, Artificial Sequence
  Description of Artificial Sequence: Synthetic oligonucleotide
aaccuuacuauaaaacgua

SEQ ID NO: 1307266 - RNA, 19 nt, Artificial Sequence
  Description of Artificial Sequence: Synthetic oligonucleotide
ggugguacauauaccaggg

SEQ ID NO: 1307267 - RNA, 19 nt, Artificial Sequence
  Description of Artificial Sequence: Synthetic oligonucleotide
ucuuauggucaacuugcuc

SEQ ID NO: 1307268 - RNA, 19 nt, Artificial Sequence
  Description of Artificial Sequence: Synthetic oligonucleotide
ucaacagucacgccagcuu

SEQ ID NO: 1307269 - RNA, 19 nt, Artificial Sequence
  Description of Artificial Sequence: Synthetic oligonucleotide
aagugaaguaugucaguua

SEQ ID NO: 1307270 - RNA, 19 nt, Artificial Sequence
  Description of Artificial Sequence: Synthetic oligonucleotide
gcgguucugaaguauaucc

SEQ ID NO: 1307271 - RNA, 19 nt, Artificial Sequence
  Description of Artificial Sequence: Synthetic oligonucleotide
guaaugaauuaggaauaag

SEQ ID NO: 1307272 - RNA, 19 nt, Artificial Sequence
  Description of Artificial Sequence: Synthetic oligonucleotide
uauguuguucuccgacgga

SEQ ID NO: 1307273 - RNA, 19 nt, Artificial Sequence
  Description of Artificial Sequence: Synthetic oligonucleotide
aacauccugguuaccugac

SEQ ID NO: 1307274 - RNA, 19 nt, Artificial Sequence
  Description of Artificial Sequence: Synthetic oligonucleotide
uuaccugacuauacauaac

SEQ ID NO: 1307275 - RNA, 19 nt, Artificial Sequence
  Description of Artificial Sequence: Synthetic oligonucleotide
acuguauauuuaaaagugu

SEQ ID NO: 1307276 - RNA, 19 nt, Artificial Sequence
  Description of Artificial Sequence: Synthetic oligonucleotide
agauaggcucacuuccuug

SEQ ID NO: 1307277 - RNA, 19 nt, Artificial Sequence
  Description of Artificial Sequence: Synthetic oligonucleotide
gauaacauccugguuaccu

SEQ ID NO: 1307278 - RNA, 19 nt, Artificial Sequence
  Description of Artificial Sequence: Synthetic oligonucleotide
uaacccagguauacaguac

SEQ ID NO: 1307279 - RNA, 19 nt, Artificial Sequence
  Description of Artificial Sequence: Synthetic oligonucleotide
ucuguucucacaccucuuu

SEQ ID NO: 1307280 - RNA, 19 nt, Artificial Sequence
  Description of Artificial Sequence: Synthetic oligonucleotide
ucucuagcggggucagagg

SEQ ID NO: 1307281 - RNA, 19 nt, Artificial Sequence
  Description of Artificial Sequence: Synthetic oligonucleotide
ugguuaccugacuauacau

SEQ ID NO: 1307282 - RNA, 19 nt, Artificial Sequence
  Description of Artificial Sequence: Synthetic oligonucleotide
uucgcuggacuauugggau

SEQ ID NO: 1307283 - RNA, 19 nt, Artificial Sequence
  Description of Artificial Sequence: Synthetic oligonucleotide
cuagcggggucagaggugg

SEQ ID NO: 1307284 - RNA, 19 nt, Artificial Sequence
  Description of Artificial Sequence: Synthetic oligonucleotide
gacuggauggauguuaaaa

SEQ ID NO: 1307285 - RNA, 19 nt, Artificial Sequence
  Description of Artificial Sequence: Synthetic oligonucleotide
uauuuaggucaacacuguu

SEQ ID NO: 1307286 - RNA, 19 nt, Artificial Sequence
  Description of Artificial Sequence: Synthetic oligonucleotide
uacguggaugcauuccugu

SEQ ID NO: 1307287 - RNA, 19 nt, Artificial Sequence
  Description of Artificial Sequence: Synthetic oligonucleotide
cauaacuggcuggagguug

SEQ ID NO: 1307288 - RNA, 19 nt, Artificial Sequence
  Description of Artificial Sequence: Synthetic oligonucleotide
auuagaggaucuucaguuu

SEQ ID NO: 1307289 - RNA, 19 nt, Artificial Sequence
  Description of Artificial Sequence: Synthetic oligonucleotide
aaccucauaacuggcugga

SEQ ID NO: 1307290 - RNA, 19 nt, Artificial Sequence
  Description of Artificial Sequence: Synthetic oligonucleotide
auaugcaguaguaauguuu

SEQ ID NO: 1307291 - RNA, 19 nt, Artificial Sequence
  Description of Artificial Sequence: Synthetic oligonucleotide
acuauugcagaaacgcgcu

SEQ ID NO: 1307292 - RNA, 19 nt, Artificial Sequence
  Description of Artificial Sequence: Synthetic oligonucleotide
cagacauauacuaccaucu

SEQ ID NO: 1307293 - RNA, 19 nt, Artificial Sequence
  Description of Artificial Sequence: Synthetic oligonucleotide
ucuagcggggucagaggug

SEQ ID NO: 1307294 - RNA, 19 nt, Artificial Sequence
  Description of Artificial Sequence: Synthetic oligonucleotide
guuuacguggaugcauucc

SEQ ID NO: 1307295 - RNA, 19 nt, Artificial Sequence
  Description of Artificial Sequence: Synthetic oligonucleotide
acauuaggauggaacaucu

SEQ ID NO: 1307296 - RNA, 19 nt, Artificial Sequence
  Description of Artificial Sequence: Synthetic oligonucleotide
guaacccagguauacagua

SEQ ID NO: 1307297 - RNA, 19 nt, Artificial Sequence
  Description of Artificial Sequence: Synthetic oligonucleotide
ccaaauugaacacaaggga

SEQ ID NO: 1307298 - RNA, 19 nt, Artificial Sequence
  Description of Artificial Sequence: Synthetic oligonucleotide
acuauaaaacguacaguaa

SEQ ID NO: 1307299 - RNA, 19 nt, Artificial Sequence
  Description of Artificial Sequence: Synthetic oligonucleotide
uaauguuuacguggaugca

SEQ ID NO: 1307300 - RNA, 19 nt, Artificial Sequence
  Description of Artificial Sequence: Synthetic oligonucleotide
cuguucgcuggacuauugg

SEQ ID NO: 1307301 - RNA, 19 nt, Artificial Sequence
  Description of Artificial Sequence: Synthetic oligonucleotide
ggagaugagauacaacaaa

SEQ ID NO: 1307302 - RNA, 19 nt, Artificial Sequence
  Description of Artificial Sequence: Synthetic oligonucleotide
aguaaccucauaacuggcu

SEQ ID NO: 1307303 - RNA, 19 nt, Artificial Sequence
  Description of Artificial Sequence: Synthetic oligonucleotide
gaaguaugucaguuauuaa

SEQ ID NO: 1307304 - RNA, 19 nt, Artificial Sequence
  Description of Artificial Sequence: Synthetic oligonucleotide
uaggaauaagaaguugaua

SEQ ID NO: 1307305 - RNA, 19 nt, Artificial Sequence
  Description of Artificial Sequence: Synthetic oligonucleotide
ugcuuacaaauugaguaua

SEQ ID NO: 1307306 - RNA, 19 nt, Artificial Sequence
  Description of Artificial Sequence: Synthetic oligonucleotide
aggaucugaaugagaaaag

SEQ ID NO: 1307307 - RNA, 19 nt, Artificial Sequence
  Description of Artificial Sequence: Synthetic oligonucleotide
ccuugcuaccaauaagugc

SEQ ID NO: 1307308 - RNA, 19 nt, Artificial Sequence
  Description of Artificial Sequence: Synthetic oligonucleotide
uacagauaacauccugguu

SEQ ID NO: 1307309 - RNA, 19 nt, Artificial Sequence
  Description of Artificial Sequence: Synthetic oligonucleotide
caguaaccucauaacuggc

SEQ ID NO: 1307310 - RNA, 19 nt, Artificial Sequence
  Description of Artificial Sequence: Synthetic oligonucleotide
caucugcguagacauuagg

SEQ ID NO: 1307311 - RNA, 19 nt, Artificial Sequence
  Description of Artificial Sequence: Synthetic oligonucleotide
guaaguuuaaauguuccau

SEQ ID NO: 1307312 - RNA, 19 nt, Artificial Sequence
  Description of Artificial Sequence: Synthetic oligonucleotide
agcucugaaggccaugauu

SEQ ID NO: 1307313 - RNA, 19 nt, Artificial Sequence
  Description of Artificial Sequence: Synthetic oligonucleotide
uguuuacguggaugcauuc

SEQ ID NO: 1307314 - RNA, 19 nt, Artificial Sequence
  Description of Artificial Sequence: Synthetic oligonucleotide
aaacguacaguaaccucau

SEQ ID NO: 1307315 - RNA, 19 nt, Artificial Sequence
  Description of Artificial Sequence: Synthetic oligonucleotide
uaggucaacacuguuccuu

SEQ ID NO: 1307316 - RNA, 19 nt, Artificial Sequence
  Description of Artificial Sequence: Synthetic oligonucleotide
cuccuugcuaccaauaagu

SEQ ID NO: 1307317 - RNA, 19 nt, Artificial Sequence
  Description of Artificial Sequence: Synthetic oligonucleotide
ugcaaguaacccagguaua

SEQ ID NO: 1307318 - RNA, 19 nt, Artificial Sequence
  Description of Artificial Sequence: Synthetic oligonucleotide
accugacuauacauaacag

SEQ ID NO: 1307319 - RNA, 19 nt, Artificial Sequence
  Description of Artificial Sequence: Synthetic oligonucleotide
agcgguucugaaguauauc

SEQ ID NO: 1307320 - RNA, 19 nt, Artificial Sequence
  Description of Artificial Sequence: Synthetic oligonucleotide
uccgacggagccccgcuca

SEQ ID NO: 1307321 - RNA, 19 nt, Artificial Sequence
  Description of Artificial Sequence: Synthetic oligonucleotide
gaaacggaggaagcugaac

SEQ ID NO: 1307322 - RNA, 19 nt, Artificial Sequence
  Description of Artificial Sequence: Synthetic oligonucleotide
ucccucaugaggcgccgcc

SEQ ID NO: 1307323 - RNA, 19 nt, Artificial Sequence
  Description of Artificial Sequence: Synthetic oligonucleotide
cuaccaauaagugccaucu

SEQ ID NO: 1307324 - RNA, 19 nt, Artificial Sequence
  Description of Artificial Sequence: Synthetic oligonucleotide
gauuugcucuaugacuauc

SEQ ID NO: 1307325 - RNA, 19 nt, Artificial Sequence
  Description of Artificial Sequence: Synthetic oligonucleotide
caaauugaguauaggauuu

SEQ ID NO: 1307326 - RNA, 19 nt, Artificial Sequence
  Description of Artificial Sequence: Synthetic oligonucleotide
aaguauauccagacauaua

SEQ ID NO: 1307327 - RNA, 19 nt, Artificial Sequence
  Description of Artificial Sequence: Synthetic oligonucleotide
accaucugcguagacauua

SEQ ID NO: 1307328 - RNA, 19 nt, Artificial Sequence
  Description of Artificial Sequence: Synthetic oligonucleotide
cguacaguaaccucauaac

SEQ ID NO: 1307329 - RNA, 19 nt, Artificial Sequence
  Description of Artificial Sequence: Synthetic oligonucleotide
cugguuaccugacuauaca

SEQ ID NO: 1307330 - RNA, 19 nt, Artificial Sequence
  Description of Artificial Sequence: Synthetic oligonucleotide
ggucgacaugucucuagcg

SEQ ID NO: 1307331 - RNA, 19 nt, Artificial Sequence
  Description of Artificial Sequence: Synthetic oligonucleotide
guucgcuggacuauuggga

SEQ ID NO: 1307332 - RNA, 19 nt, Artificial Sequence
  Description of Artificial Sequence: Synthetic oligonucleotide
cuaccaucugcguagacau

SEQ ID NO: 1307333 - RNA, 19 nt, Artificial Sequence
  Description of Artificial Sequence: Synthetic oligonucleotide
uguuccauuugaggaggac

SEQ ID NO: 1307334 - RNA, 19 nt, Artificial Sequence
  Description of Artificial Sequence: Synthetic oligonucleotide
cucuaugacuaucuugcaa

SEQ ID NO: 1307335 - RNA, 19 nt, Artificial Sequence
  Description of Artificial Sequence: Synthetic oligonucleotide
augaaacacagcaaucauu

SEQ ID NO: 1307336 - RNA, 19 nt, Artificial Sequence
  Description of Artificial Sequence: Synthetic oligonucleotide
cauaacaguucaucuuaaa

SEQ ID NO: 1307337 - RNA, 19 nt, Artificial Sequence
  Description of Artificial Sequence: Synthetic oligonucleotide
guacauauaccagggucuc

SEQ ID NO: 1307338 - RNA, 19 nt, Artificial Sequence
  Description of Artificial Sequence: Synthetic oligonucleotide
ugguaucucugauguucca

SEQ ID NO: 1307339 - RNA, 19 nt, Artificial Sequence
  Description of Artificial Sequence: Synthetic oligonucleotide
cuaugacuaucuugcaaaa

SEQ ID NO: 1307340 - RNA, 19 nt, Artificial Sequence
  Description of Artificial Sequence: Synthetic oligonucleotide
acauuggauuucaaauggu

SEQ ID NO: 1307341 - RNA, 19 nt, Artificial Sequence
  Description of Artificial Sequence: Synthetic oligonucleotide
agagauaggcucacuuccu

SEQ ID NO: 1307342 - RNA, 19 nt, Artificial Sequence
  Description of Artificial Sequence: Synthetic oligonucleotide
auccugguuaccugacuau

SEQ ID NO: 1307343 - RNA, 19 nt, Artificial Sequence
  Description of Artificial Sequence: Synthetic oligonucleotide
acauccugguuaccugacu

SEQ ID NO: 1307344 - RNA, 19 nt, Artificial Sequence
  Description of Artificial Sequence: Synthetic oligonucleotide
guuugcaaguaacccaggu

SEQ ID NO: 1307345 - RNA, 19 nt, Artificial Sequence
  Description of Artificial Sequence: Synthetic oligonucleotide
caugaggcgccgccgggcc

SEQ ID NO: 1307346 - RNA, 19 nt, Artificial Sequence
  Description of Artificial Sequence: Synthetic oligonucleotide
uauucccgcuuguucuccu

SEQ ID NO: 1307347 - RNA, 19 nt, Artificial Sequence
  Description of Artificial Sequence: Synthetic oligonucleotide
gcaaguaacccagguauac

SEQ ID NO: 1307348 - RNA, 19 nt, Artificial Sequence
  Description of Artificial Sequence: Synthetic oligonucleotide
cauccucaaaugggguucc

SEQ ID NO: 1307349 - RNA, 19 nt, Artificial Sequence
  Description of Artificial Sequence: Synthetic oligonucleotide
uacauauaccagggucucu

SEQ ID NO: 1307350 - RNA, 19 nt, Artificial Sequence
  Description of Artificial Sequence: Synthetic oligonucleotide
auaggcucacuuccuugau

SEQ ID NO: 1307351 - RNA, 19 nt, Artificial Sequence
  Description of Artificial Sequence: Synthetic oligonucleotide
gguacauauaccagggucu

SEQ ID NO: 1307352 - RNA, 19 nt, Artificial Sequence
  Description of Artificial Sequence: Synthetic oligonucleotide
agaacuggccaggaugaaa

SEQ ID NO: 1307353 - RNA, 19 nt, Artificial Sequence
  Description of Artificial Sequence: Synthetic oligonucleotide
ucuccgacggagccccgcu

SEQ ID NO: 1307354 - RNA, 19 nt, Artificial Sequence
  Description of Artificial Sequence: Synthetic oligonucleotide
gagacuggauggauguuaa

SEQ ID NO: 1307355 - RNA, 19 nt, Artificial Sequence
  Description of Artificial Sequence: Synthetic oligonucleotide
ucaugaggcgccgccgggc

SEQ ID NO: 1307356 - RNA, 19 nt, Artificial Sequence
  Description of Artificial Sequence: Synthetic oligonucleotide
ccugguuaccugacuauac

SEQ ID NO: 1307357 - RNA, 19 nt, Artificial Sequence
  Description of Artificial Sequence: Synthetic oligonucleotide
cucaugaggcgccgccggg

SEQ ID NO: 1307358 - RNA, 19 nt, Artificial Sequence
  Description of Artificial Sequence: Synthetic oligonucleotide
ggacauaugcaguaguaau

SEQ ID NO: 1307359 - RNA, 19 nt, Artificial Sequence
  Description of Artificial Sequence: Synthetic oligonucleotide
ccuuacuauaaaacguaca

SEQ ID NO: 1307360 - RNA, 19 nt, Artificial Sequence
  Description of Artificial Sequence: Synthetic oligonucleotide
cauccugguuaccugacua

SEQ ID NO: 1307361 - RNA, 19 nt, Artificial Sequence
  Description of Artificial Sequence: Synthetic oligonucleotide
agcugaaccagcggaggga

SEQ ID NO: 1307362 - RNA, 19 nt, Artificial Sequence
  Description of Artificial Sequence: Synthetic oligonucleotide
gagauacaacaaagggaca

SEQ ID NO: 1307363 - RNA, 19 nt, Artificial Sequence
  Description of Artificial Sequence: Synthetic oligonucleotide
gggucgacaugucucuagc

SEQ ID NO: 1307364 - RNA, 19 nt, Artificial Sequence
  Description of Artificial Sequence: Synthetic oligonucleotide
caaguaacccagguauaca

SEQ ID NO: 1307365 - RNA, 19 nt, Artificial Sequence
  Description of Artificial Sequence: Synthetic oligonucleotide
gcccauacuguauauuuaa

SEQ ID NO: 1307366 - RNA, 19 nt, Artificial Sequence
  Description of Artificial Sequence: Synthetic oligonucleotide
aacguacaguaaccucaua

SEQ ID NO: 1307367 - RNA, 19 nt, Artificial Sequence
  Description of Artificial Sequence: Synthetic oligonucleotide
gcuaccaauaagugccauc

SEQ ID NO: 1307368 - RNA, 19 nt, Artificial Sequence
  Description of Artificial Sequence: Synthetic oligonucleotide
ggggucgacaugucucuag

SEQ ID NO: 1307369 - RNA, 19 nt, Artificial Sequence
  Description of Artificial Sequence: Synthetic oligonucleotide
cgcgcuuuucauauucccg

SEQ ID NO: 1307370 - RNA, 19 nt, Artificial Sequence
  Description of Artificial Sequence: Synthetic oligonucleotide
uacuaccaucugcguagac

SEQ ID NO: 1307371 - RNA, 19 nt, Artificial Sequence
  Description of Artificial Sequence: Synthetic oligonucleotide
acggcacugccucugcgaa

SEQ ID NO: 1307372 - RNA, 19 nt, Artificial Sequence
  Description of Artificial Sequence: Synthetic oligonucleotide
uccagcgguucugaaguau

SEQ ID NO: 1307373 - RNA, 19 nt, Artificial Sequence
  Description of Artificial Sequence: Synthetic oligonucleotide
ugauacagcugggcagccu

SEQ ID NO: 1307374 - RNA, 19 nt, Artificial Sequence
  Description of Artificial Sequence: Synthetic oligonucleotide
acuaagccuugcccauacu

SEQ ID NO: 1307375 - RNA, 19 nt, Artificial Sequence
  Description of Artificial Sequence: Synthetic oligonucleotide
uagcuagagauaggcucac

SEQ ID NO: 1307376 - RNA, 19 nt, Artificial Sequence
  Description of Artificial Sequence: Synthetic oligonucleotide
ucauaacuggcuggagguu

SEQ ID NO: 1307377 - RNA, 19 nt, Artificial Sequence
  Description of Artificial Sequence: Synthetic oligonucleotide
acagucacgccagcuuugu

SEQ ID NO: 1307378 - RNA, 19 nt, Artificial Sequence
  Description of Artificial Sequence: Synthetic oligonucleotide
uuacuaagccuugcccaua

SEQ ID NO: 1307379 - RNA, 19 nt, Artificial Sequence
  Description of Artificial Sequence: Synthetic oligonucleotide
cauauacuaccaucugcgu

SEQ ID NO: 1307380 - RNA, 19 nt, Artificial Sequence
  Description of Artificial Sequence: Synthetic oligonucleotide
gggagcgccgagaggaacg

SEQ ID NO: 1307381 - RNA, 19 nt, Artificial Sequence
  Description of Artificial Sequence: Synthetic oligonucleotide
ggaagauacaucauagguu

SEQ ID NO: 1307382 - RNA, 19 nt, Artificial Sequence
  Description of Artificial Sequence: Synthetic oligonucleotide
cuggcuguucgcuggacua

SEQ ID NO: 1307383 - RNA, 19 nt, Artificial Sequence
  Description of Artificial Sequence: Synthetic oligonucleotide
cgacaugucucuagcgggg

SEQ ID NO: 1307384 - RNA, 19 nt, Artificial Sequence
  Description of Artificial Sequence: Synthetic oligonucleotide
gcuccagcgguucugaagu

SEQ ID NO: 1307385 - RNA, 19 nt, Artificial Sequence
  Description of Artificial Sequence: Synthetic oligonucleotide
uggaugcauuccuguuuuc

SEQ ID NO: 1307386 - RNA, 19 nt, Artificial Sequence
  Description of Artificial Sequence: Synthetic oligonucleotide
agacuggauggauguuaaa

SEQ ID NO: 1307387 - RNA, 19 nt, Artificial Sequence
  Description of Artificial Sequence: Synthetic oligonucleotide
uucuccgacggagccccgc

SEQ ID NO: 1307388 - RNA, 19 nt, Artificial Sequence
  Description of Artificial Sequence: Synthetic oligonucleotide
auacuaccaucugcguaga

SEQ ID NO: 1307389 - RNA, 19 nt, Artificial Sequence
  Description of Artificial Sequence: Synthetic oligonucleotide
gcucuuuccugagucaaca

SEQ ID NO: 1307390 - RNA, 19 nt, Artificial Sequence
  Description of Artificial Sequence: Synthetic oligonucleotide
gguuaccugacuauacaua

SEQ ID NO: 1307391 - RNA, 19 nt, Artificial Sequence
  Description of Artificial Sequence: Synthetic oligonucleotide
cucuagcggggucagaggu

SEQ ID NO: 1307392 - RNA, 19 nt, Artificial Sequence
  Description of Artificial Sequence: Synthetic oligonucleotide
ccaucugcguagacauuag

SEQ ID NO: 1307393 - RNA, 19 nt, Artificial Sequence
  Description of Artificial Sequence: Synthetic oligonucleotide
ggauuagguucauccaaua

SEQ ID NO: 1307394 - RNA, 19 nt, Artificial Sequence
  Description of Artificial Sequence: Synthetic oligonucleotide
gggacauaugcaguaguaa

SEQ ID NO: 1307395 - RNA, 19 nt, Artificial Sequence
  Description of Artificial Sequence: Synthetic oligonucleotide
uauggucaacuugcucuuu

SEQ ID NO: 1307396 - RNA, 19 nt, Artificial Sequence
  Description of Artificial Sequence: Synthetic oligonucleotide
ccucaugaggcgccgccgg

SEQ ID NO: 1307397 - RNA, 19 nt, Artificial Sequence
  Description of Artificial Sequence: Synthetic oligonucleotide
gagauaggcucacuuccuu

SEQ ID NO: 1307398 - RNA, 19 nt, Artificial Sequence
  Description of Artificial Sequence: Synthetic oligonucleotide
accgcguuccacaccauua

SEQ ID NO: 1307399 - RNA, 19 nt, Artificial Sequence
  Description of Artificial Sequence: Synthetic oligonucleotide
ggagcgccgagaggaacgg

SEQ ID NO: 1307400 - RNA, 19 nt, Artificial Sequence
  Description of Artificial Sequence: Synthetic oligonucleotide
uggcuguucgcuggacuau

SEQ ID NO: 1307401 - RNA, 19 nt, Artificial Sequence
  Description of Artificial Sequence: Synthetic oligonucleotide
aucauagguugggcuccag

SEQ ID NO: 1307402 - RNA, 19 nt, Artificial Sequence
  Description of Artificial Sequence: Synthetic oligonucleotide
cuggagggucuucuuguaa

SEQ ID NO: 1307403 - RNA, 19 nt, Artificial Sequence
  Description of Artificial Sequence: Synthetic oligonucleotide
gcuagagauaggcucacuu

SEQ ID NO: 1307404 - RNA, 19 nt, Artificial Sequence
  Description of Artificial Sequence: Synthetic oligonucleotide
auguuccauuugaggagga

SEQ ID NO: 1307405 - RNA, 19 nt, Artificial Sequence
  Description of Artificial Sequence: Synthetic oligonucleotide
agccuugcccauacuguau

SEQ ID NO: 1307406 - RNA, 19 nt, Artificial Sequence
  Description of Artificial Sequence: Synthetic oligonucleotide
caacagucacgccagcuuu

SEQ ID NO: 1307407 - RNA, 19 nt, Artificial Sequence
  Description of Artificial Sequence: Synthetic oligonucleotide
gugguacauauaccagggu

SEQ ID NO: 1307408 - RNA, 19 nt, Artificial Sequence
  Description of Artificial Sequence: Synthetic oligonucleotide
gacaugucucuagcggggu

SEQ ID NO: 1307409 - RNA, 19 nt, Artificial Sequence
  Description of Artificial Sequence: Synthetic oligonucleotide
accagcggagggagcgccg

SEQ ID NO: 1307410 - RNA, 19 nt, Artificial Sequence
  Description of Artificial Sequence: Synthetic oligonucleotide
cauaugcaguaguaauguu

SEQ ID NO: 1307411 - RNA, 19 nt, Artificial Sequence
  Description of Artificial Sequence: Synthetic oligonucleotide
ccaauagagacuggaugga

SEQ ID NO: 1307412 - RNA, 19 nt, Artificial Sequence
  Description of Artificial Sequence: Synthetic oligonucleotide
ugucucuagcggggucaga

SEQ ID NO: 1307413 - RNA, 19 nt, Artificial Sequence
  Description of Artificial Sequence: Synthetic oligonucleotide
ucacuccggcuggaggguc

SEQ ID NO: 1307414 - RNA, 19 nt, Artificial Sequence
  Description of Artificial Sequence: Synthetic oligonucleotide
gcuguucgcuggacuauug

SEQ ID NO: 1307415 - RNA, 19 nt, Artificial Sequence
  Description of Artificial Sequence: Synthetic oligonucleotide
caauagagacuggauggau

SEQ ID NO: 1307416 - RNA, 19 nt, Artificial Sequence
  Description of Artificial Sequence: Synthetic oligonucleotide
caucauagguugggcucca

SEQ ID NO: 1307417 - RNA, 19 nt, Artificial Sequence
  Description of Artificial Sequence: Synthetic oligonucleotide
gcguuccacaccauuaugu

SEQ ID NO: 1307418 - RNA, 19 nt, Artificial Sequence
  Description of Artificial Sequence: Synthetic oligonucleotide
gguauacaguacauuggau

SEQ ID NO: 1307419 - RNA, 19 nt, Artificial Sequence
  Description of Artificial Sequence: Synthetic oligonucleotide
cgguucugaaguauaucca

SEQ ID NO: 1307420 - RNA, 19 nt, Artificial Sequence
  Description of Artificial Sequence: Synthetic oligonucleotide
ugaccgcguuccacaccau

SEQ ID NO: 1307421 - RNA, 19 nt, Artificial Sequence
  Description of Artificial Sequence: Synthetic oligonucleotide
gagcgccgagaggaacggc

SEQ ID NO: 1307422 - RNA, 19 nt, Artificial Sequence
  Description of Artificial Sequence: Synthetic oligonucleotide
cauuaggauggaacaucuu

SEQ ID NO: 1307423 - RNA, 19 nt, Artificial Sequence
  Description of Artificial Sequence: Synthetic oligonucleotide
gcggggucagaggugguac

SEQ ID NO: 1307424 - RNA, 19 nt, Artificial Sequence
  Description of Artificial Sequence: Synthetic oligonucleotide
cggagccccgcucacuccg

SEQ ID NO: 1307425 - RNA, 19 nt, Artificial Sequence
  Description of Artificial Sequence: Synthetic oligonucleotide
cuccgacggagccccgcuc

SEQ ID NO: 1307426 - RNA, 19 nt, Artificial Sequence
  Description of Artificial Sequence: Synthetic oligonucleotide
cagcgguucugaaguauau

SEQ ID NO: 1307427 - RNA, 19 nt, Artificial Sequence
  Description of Artificial Sequence: Synthetic oligonucleotide
ggccaugauucugaaacau

SEQ ID NO: 1307428 - RNA, 19 nt, Artificial Sequence
  Description of Artificial Sequence: Synthetic oligonucleotide
ggauuugcucuaugacuau

SEQ ID NO: 1307429 - RNA, 19 nt, Artificial Sequence
  Description of Artificial Sequence: Synthetic oligonucleotide
gaccgcguuccacaccauu

SEQ ID NO: 1307430 - RNA, 19 nt, Artificial Sequence
  Description of Artificial Sequence: Synthetic oligonucleotide
ccagcgguucugaaguaua

SEQ ID NO: 1307431 - RNA, 19 nt, Artificial Sequence
  Description of Artificial Sequence: Synthetic oligonucleotide
gcuggagggucuucuugua

SEQ ID NO: 1307432 - RNA, 19 nt, Artificial Sequence
  Description of Artificial Sequence: Synthetic oligonucleotide
cuauugcagaaacgcgcuu

SEQ ID NO: 1307433 - RNA, 19 nt, Artificial Sequence
  Description of Artificial Sequence: Synthetic oligonucleotide
guucuccgacggagccccg

SEQ ID NO: 1307434 - RNA, 19 nt, Artificial Sequence
  Description of Artificial Sequence: Synthetic oligonucleotide
gugaaguaugucaguuauu

SEQ ID NO: 1307435 - RNA, 19 nt, Artificial Sequence
  Description of Artificial Sequence: Synthetic oligonucleotide
gagggagcgccgagaggaa

SEQ ID NO: 1307436 - RNA, 19 nt, Artificial Sequence
  Description of Artificial Sequence: Synthetic oligonucleotide
cuguuuucuuuaggucaua

SEQ ID NO: 1307437 - RNA, 19 nt, Artificial Sequence
  Description of Artificial Sequence: Synthetic oligonucleotide
cuccagcgguucugaagua

SEQ ID NO: 1307438 - RNA, 19 nt, Artificial Sequence
  Description of Artificial Sequence: Synthetic oligonucleotide
gcguagacauuaggaugga

SEQ ID NO: 1307439 - RNA, 19 nt, Artificial Sequence
  Description of Artificial Sequence: Synthetic oligonucleotide
cucacuccggcuggagggu

SEQ ID NO: 1307440 - RNA, 19 nt, Artificial Sequence
  Description of Artificial Sequence: Synthetic oligonucleotide
gggucagaggugguacaua

SEQ ID NO: 1307441 - RNA, 19 nt, Artificial Sequence
  Description of Artificial Sequence: Synthetic oligonucleotide
ccgacggagccccgcucac

SEQ ID NO: 1307442 - RNA, 19 nt, Artificial Sequence
  Description of Artificial Sequence: Synthetic oligonucleotide
cuauugggauuagguucau

SEQ ID NO: 1307443 - RNA, 19 nt, Artificial Sequence
  Description of Artificial Sequence: Synthetic oligonucleotide
ccggggucgacaugucucu

SEQ ID NO: 1307444 - RNA, 19 nt, Artificial Sequence
  Description of Artificial Sequence: Synthetic oligonucleotide
cguagacauuaggauggaa

SEQ ID NO: 1307445 - RNA, 19 nt, Artificial Sequence
  Description of Artificial Sequence: Synthetic oligonucleotide
ccgcguuccacaccauuau

SEQ ID NO: 1307446 - RNA, 19 nt, Artificial Sequence
  Description of Artificial Sequence: Synthetic oligonucleotide
ggcuguucgcuggacuauu

SEQ ID NO: 1307447 - RNA, 19 nt, Artificial Sequence
  Description of Artificial Sequence: Synthetic oligonucleotide
cccgcucacuccggcugga

SEQ ID NO: 1307448 - RNA, 19 nt, Artificial Sequence
  Description of Artificial Sequence: Synthetic oligonucleotide
cgccgagaggaacggcacu

SEQ ID NO: 1307449 - RNA, 19 nt, Artificial Sequence
  Description of Artificial Sequence: Synthetic oligonucleotide
cggggucgacaugucucua

SEQ ID NO: 1307450 - RNA, 19 nt, Artificial Sequence
  Description of Artificial Sequence: Synthetic oligonucleotide
cgacggagccccgcucacu

SEQ ID NO: 1307451 - RNA, 19 nt, Artificial Sequence
  Description of Artificial Sequence: Synthetic oligonucleotide
gacagagccaaacacagug

SEQ ID NO: 1307452 - RNA, 19 nt, Artificial Sequence
  Description of Artificial Sequence: Synthetic oligonucleotide
uccacagcuaucaacaccu

SEQ ID NO: 1307453 - RNA, 19 nt, Artificial Sequence
  Description of Artificial Sequence: Synthetic oligonucleotide
acuguccacagcuaucaac

SEQ ID NO: 1307454 - RNA, 19 nt, Artificial Sequence
  Description of Artificial Sequence: Synthetic oligonucleotide
uggaugacagagccaaaca

SEQ ID NO: 1307455 - RNA, 19 nt, Artificial Sequence
  Description of Artificial Sequence: Synthetic oligonucleotide
gaugacagagccaaacaca

SEQ ID NO: 1307456 - RNA, 19 nt, Artificial Sequence
  Description of Artificial Sequence: Synthetic oligonucleotide
augacagagccaaacacag

SEQ ID NO: 1307457 - RNA, 19 nt, Artificial Sequence
  Description of Artificial Sequence: Synthetic oligonucleotide
uacuggaugacagagccaa

SEQ ID NO: 1307458 - RNA, 19 nt, Artificial Sequence
  Description of Artificial Sequence: Synthetic oligonucleotide
ugcccuuuugaguugggga

SEQ ID NO: 1307459 - RNA, 19 nt, Artificial Sequence
  Description of Artificial Sequence: Synthetic oligonucleotide
cuguccacagcuaucaaca

SEQ ID NO: 1307460 - RNA, 19 nt, Artificial Sequence
  Description of Artificial Sequence: Synthetic oligonucleotide
uucucuguucggcccaccc

SEQ ID NO: 1307461 - RNA, 19 nt, Artificial Sequence
  Description of Artificial Sequence: Synthetic oligonucleotide
ggaugacagagccaaacac

SEQ ID NO: 1307462 - RNA, 19 nt, Artificial Sequence
  Description of Artificial Sequence: Synthetic oligonucleotide
cucuguucggcccacccug

SEQ ID NO: 1307463 - RNA, 19 nt, Artificial Sequence
  Description of Artificial Sequence: Synthetic oligonucleotide
guccacagcuaucaacacc

SEQ ID NO: 1307464 - RNA, 19 nt, Artificial Sequence
  Description of Artificial Sequence: Synthetic oligonucleotide
uuugcccuuuugaguuggg

SEQ ID NO: 1307465 - RNA, 19 nt, Artificial Sequence
  Description of Artificial Sequence: Synthetic oligonucleotide
cuuugcccuuuugaguugg

SEQ ID NO: 1307466 - RNA, 19 nt, Artificial Sequence
  Description of Artificial Sequence: Synthetic oligonucleotide
uggggacucaaagaagacu

SEQ ID NO: 1307467 - RNA, 19 nt, Artificial Sequence
  Description of Artificial Sequence: Synthetic oligonucleotide
uguucggcccacccugaga

SEQ ID NO: 1307468 - RNA, 19 nt, Artificial Sequence
  Description of Artificial Sequence: Synthetic oligonucleotide
ucggcccacccugagauca

SEQ ID NO: 1307469 - RNA, 19 nt, Artificial Sequence
  Description of Artificial Sequence: Synthetic oligonucleotide
agccccaccggcccguggg

SEQ ID NO: 1307470 - RNA, 19 nt, Artificial Sequence
  Description of Artificial Sequence: Synthetic oligonucleotide
ucuguucggcccacccuga

SEQ ID NO: 1307471 - RNA, 19 nt, Artificial Sequence
  Description of Artificial Sequence: Synthetic oligonucleotide
gauacuccccgccguguuc

SEQ ID NO: 1307472 - RNA, 19 nt, Artificial Sequence
  Description of Artificial Sequence: Synthetic oligonucleotide
agcgauacuccccgccgug

SEQ ID NO: 1307473 - RNA, 19 nt, Artificial Sequence
  Description of Artificial Sequence: Synthetic oligonucleotide
gcagcgauacuccccgccg

SEQ ID NO: 1307474 - RNA, 19 nt, Artificial Sequence
  Description of Artificial Sequence: Synthetic oligonucleotide
agccccaccacuguccaca

SEQ ID NO: 1307475 - RNA, 19 nt, Artificial Sequence
  Description of Artificial Sequence: Synthetic oligonucleotide
gccguguucuucauguucc

SEQ ID NO: 1307476 - RNA, 19 nt, Artificial Sequence
  Description of Artificial Sequence: Synthetic oligonucleotide
acagagccaaacacagugu

SEQ ID NO: 1307477 - RNA, 19 nt, Artificial Sequence
  Description of Artificial Sequence: Synthetic oligonucleotide
gagccaaacacaguguuuu

SEQ ID NO: 1307478 - RNA, 19 nt, Artificial Sequence
  Description of Artificial Sequence: Synthetic oligonucleotide
auacuccccgccguguucu

SEQ ID NO: 1307479 - RNA, 19 nt, Artificial Sequence
  Description of Artificial Sequence: Synthetic oligonucleotide
ggcccguggggacucaaag

SEQ ID NO: 1307480 - RNA, 19 nt, Artificial Sequence
  Description of Artificial Sequence: Synthetic oligonucleotide
guucggcccacccugagau

SEQ ID NO: 1307481 - RNA, 19 nt, Artificial Sequence
  Description of Artificial Sequence: Synthetic oligonucleotide
gcccuuuugaguuggggaa

SEQ ID NO: 1307482 - RNA, 19 nt, Artificial Sequence
  Description of Artificial Sequence: Synthetic oligonucleotide
agagccaaacacaguguuu

SEQ ID NO: 1307483 - RNA, 19 nt, Artificial Sequence
  Description of Artificial Sequence: Synthetic oligonucleotide
cguggggacucaaagaaga

SEQ ID NO: 1307484 - RNA, 19 nt, Artificial Sequence
  Description of Artificial Sequence: Synthetic oligonucleotide
guggggacucaaagaagac

SEQ ID NO: 1307485 - RNA, 19 nt, Artificial Sequence
  Description of Artificial Sequence: Synthetic oligonucleotide
cuguucggcccacccugag

SEQ ID NO: 1307486 - RNA, 19 nt, Artificial Sequence
  Description of Artificial Sequence: Synthetic oligonucleotide
cccguggggacucaaagaa

SEQ ID NO: 1307487 - RNA, 19 nt, Artificial Sequence
  Description of Artificial Sequence: Synthetic oligonucleotide
acuccccgccguguucuuc

SEQ ID NO: 1307488 - RNA, 19 nt, Artificial Sequence
  Description of Artificial Sequence: Synthetic oligonucleotide
ccguggggacucaaagaag

SEQ ID NO: 1307489 - RNA, 19 nt, Artificial Sequence
  Description of Artificial Sequence: Synthetic oligonucleotide
uucggcccacccugagauc

SEQ ID NO: 1307490 - RNA, 19 nt, Artificial Sequence
  Description of Artificial Sequence: Synthetic oligonucleotide
cagagccaaacacaguguu

SEQ ID NO: 1307491 - RNA, 19 nt, Artificial Sequence
  Description of Artificial Sequence: Synthetic oligonucleotide
cuucucuguucggcccacc

SEQ ID NO: 1307492 - RNA, 19 nt, Artificial Sequence
  Description of Artificial Sequence: Synthetic oligonucleotide
gagccccaccggcccgugg

SEQ ID NO: 1307493 - RNA, 19 nt, Artificial Sequence
  Description of Artificial Sequence: Synthetic oligonucleotide
cuuuugaguuggggaacaa

SEQ ID NO: 1307494 - RNA, 19 nt, Artificial Sequence
  Description of Artificial Sequence: Synthetic oligonucleotide
cccuuuugaguuggggaac

SEQ ID NO: 1307495 - RNA, 19 nt, Artificial Sequence
  Description of Artificial Sequence: Synthetic oligonucleotide
gcccguggggacucaaaga

SEQ ID NO: 1307496 - RNA, 19 nt, Artificial Sequence
  Description of Artificial Sequence: Synthetic oligonucleotide
ccuuuugaguuggggaaca

SEQ ID NO: 1307497 - RNA, 19 nt, Artificial Sequence
  Description of Artificial Sequence: Synthetic oligonucleotide
cgccguguucuucauguuc

SEQ ID NO: 1307498 - RNA, 19 nt, Artificial Sequence
  Description of Artificial Sequence: Synthetic oligonucleotide
caccacuguccacagcuau

SEQ ID NO: 1307499 - RNA, 19 nt, Artificial Sequence
  Description of Artificial Sequence: Synthetic oligonucleotide
cccgccguguucuucaugu

SEQ ID NO: 1307500 - RNA, 19 nt, Artificial Sequence
  Description of Artificial Sequence: Synthetic oligonucleotide
cacuguccacagcuaucaa

SEQ ID NO: 1307501 - RNA, 19 nt, Artificial Sequence
  Description of Artificial Sequence: Synthetic oligonucleotide
gccccaccacuguccacag

SEQ ID NO: 1307502 - RNA, 19 nt, Artificial Sequence
  Description of Artificial Sequence: Synthetic oligonucleotide
uccccgccguguucuucau

SEQ ID NO: 1307503 - RNA, 19 nt, Artificial Sequence
  Description of Artificial Sequence: Synthetic oligonucleotide
uacuccccgccguguucuu

SEQ ID NO: 1307504 - RNA, 19 nt, Artificial Sequence
  Description of Artificial Sequence: Synthetic oligonucleotide
gccccaccggcccgugggg

SEQ ID NO: 1307505 - RNA, 19 nt, Artificial Sequence
  Description of Artificial Sequence: Synthetic oligonucleotide
cagcgauacuccccgccgu

SEQ ID NO: 1307506 - RNA, 19 nt, Artificial Sequence
  Description of Artificial Sequence: Synthetic oligonucleotide
cccaccggcccguggggac

SEQ ID NO: 1307507 - RNA, 19 nt, Artificial Sequence
  Description of Artificial Sequence: Synthetic oligonucleotide
caccggcccguggggacuc

SEQ ID NO: 1307508 - RNA, 19 nt, Artificial Sequence
  Description of Artificial Sequence: Synthetic oligonucleotide
ccccaccacuguccacagc

SEQ ID NO: 1307509 - RNA, 19 nt, Artificial Sequence
  Description of Artificial Sequence: Synthetic oligonucleotide
ccaccacuguccacagcua

SEQ ID NO: 1307510 - RNA, 19 nt, Artificial Sequence
  Description of Artificial Sequence: Synthetic oligonucleotide
ccccgccguguucuucaug

SEQ ID NO: 1307511 - RNA, 19 nt, Artificial Sequence
  Description of Artificial Sequence: Synthetic oligonucleotide
cggcccacccugagaucag

SEQ ID NO: 1307512 - RNA, 19 nt, Artificial Sequence
  Description of Artificial Sequence: Synthetic oligonucleotide
gcgauacuccccgccgugu

SEQ ID NO: 1307513 - RNA, 19 nt, Artificial Sequence
  Description of Artificial Sequence: Synthetic oligonucleotide
accggcccguggggacuca

SEQ ID NO: 1307514 - RNA, 19 nt, Artificial Sequence
  Description of Artificial Sequence: Synthetic oligonucleotide
ggcccacccugagaucagu

SEQ ID NO: 1307515 - RNA, 19 nt, Artificial Sequence
  Description of Artificial Sequence: Synthetic oligonucleotide
ccacagcuaucaacaccuu

SEQ ID NO: 1307516 - RNA, 19 nt, Artificial Sequence
  Description of Artificial Sequence: Synthetic oligonucleotide
cgauacuccccgccguguu

SEQ ID NO: 1307517 - RNA, 19 nt, Artificial Sequence
  Description of Artificial Sequence: Synthetic oligonucleotide
ccccaccggcccgugggga

SEQ ID NO: 1307518 - RNA, 19 nt, Artificial Sequence
  Description of Artificial Sequence: Synthetic oligonucleotide
cggcccguggggacucaaa

SEQ ID NO: 1307519 - RNA, 19 nt, Artificial Sequence
  Description of Artificial Sequence: Synthetic oligonucleotide
ccaccggcccguggggacu

SEQ ID NO: 1307520 - RNA, 19 nt, Artificial Sequence
  Description of Artificial Sequence: Synthetic oligonucleotide
ccgccguguucuucauguu

SEQ ID NO: 1307521 - RNA, 19 nt, Artificial Sequence
  Description of Artificial Sequence: Synthetic oligonucleotide
ccggcccguggggacucaa

SEQ ID NO: 1307522 - RNA, 19 nt, Artificial Sequence
  Description of Artificial Sequence: Synthetic oligonucleotide
aagaguucaagguauuugc

SEQ ID NO: 1307523 - RNA, 19 nt, Artificial Sequence
  Description of Artificial Sequence: Synthetic oligonucleotide
aacaauuagacacugguca

SEQ ID NO: 1307524 - RNA, 19 nt, Artificial Sequence
  Description of Artificial Sequence: Synthetic oligonucleotide
uguuggaauauuuuaaggg

SEQ ID NO: 1307525 - RNA, 19 nt, Artificial Sequence
  Description of Artificial Sequence: Synthetic oligonucleotide
ucuaucauuaauauugcgc

SEQ ID NO: 1307526 - RNA, 19 nt, Artificial Sequence
  Description of Artificial Sequence: Synthetic oligonucleotide
acagguuucacaaauaccc

SEQ ID NO: 1307527 - RNA, 19 nt, Artificial Sequence
  Description of Artificial Sequence: Synthetic oligonucleotide
aauguuggaauauuuuaag

SEQ ID NO: 1307528 - RNA, 19 nt, Artificial Sequence
  Description of Artificial Sequence: Synthetic oligonucleotide
agacugagaaaccaaaagc

SEQ ID NO: 1307529 - RNA, 19 nt, Artificial Sequence
  Description of Artificial Sequence: Synthetic oligonucleotide
uugcauaugagagacaugg

SEQ ID NO: 1307530 - RNA, 19 nt, Artificial Sequence
  Description of Artificial Sequence: Synthetic oligonucleotide
uuaacaagcuuauuuauac

SEQ ID NO: 1307531 - RNA, 19 nt, Artificial Sequence
  Description of Artificial Sequence: Synthetic oligonucleotide
uuaauucugguuagaaggg

SEQ ID NO: 1307532 - RNA, 19 nt, Artificial Sequence
  Description of Artificial Sequence: Synthetic oligonucleotide
aaaauuuccguaauuguag

SEQ ID NO: 1307533 - RNA, 19 nt, Artificial Sequence
  Description of Artificial Sequence: Synthetic oligonucleotide
agauguguuuucuagguac

SEQ ID NO: 1307534 - RNA, 19 nt, Artificial Sequence
  Description of Artificial Sequence: Synthetic oligonucleotide
aauuagacacuggucagcc

SEQ ID NO: 1307535 - RNA, 19 nt, Artificial Sequence
  Description of Artificial Sequence: Synthetic oligonucleotide
uuacaugguugaaauaugg

SEQ ID NO: 1307536 - RNA, 19 nt, Artificial Sequence
  Description of Artificial Sequence: Synthetic oligonucleotide
aguagcacaaggaugauac

SEQ ID NO: 1307537 - RNA, 19 nt, Artificial Sequence
  Description of Artificial Sequence: Synthetic oligonucleotide
ucaaucagcgcauggacgg

SEQ ID NO: 1307538 - RNA, 19 nt, Artificial Sequence
  Description of Artificial Sequence: Synthetic oligonucleotide
uaagaguaaaagaauccag

SEQ ID NO: 1307539 - RNA, 19 nt, Artificial Sequence
  Description of Artificial Sequence: Synthetic oligonucleotide
cuaagcucuccuuacaugg

SEQ ID NO: 1307540 - RNA, 19 nt, Artificial Sequence
  Description of Artificial Sequence: Synthetic oligonucleotide
ugauaagaguaaaagaauc

SEQ ID NO: 1307541 - RNA, 19 nt, Artificial Sequence
  Description of Artificial Sequence: Synthetic oligonucleotide
aauuuccguaauuguagac

SEQ ID NO: 1307542 - RNA, 19 nt, Artificial Sequence
  Description of Artificial Sequence: Synthetic oligonucleotide
uacgaauccuacaaucugg

SEQ ID NO: 1307543 - RNA, 19 nt, Artificial Sequence
  Description of Artificial Sequence: Synthetic oligonucleotide
ugcaugauaagaguaaaag

SEQ ID NO: 1307544 - RNA, 19 nt, Artificial Sequence
  Description of Artificial Sequence: Synthetic oligonucleotide
aaugauucaagagucucag

SEQ ID NO: 1307545 - RNA, 19 nt, Artificial Sequence
  Description of Artificial Sequence: Synthetic oligonucleotide
auaagaucucugcagaaag

SEQ ID NO: 1307546 - RNA, 19 nt, Artificial Sequence
  Description of Artificial Sequence: Synthetic oligonucleotide
aacuuaccuuucuaguuac

SEQ ID NO: 1307547 - RNA, 19 nt, Artificial Sequence
  Description of Artificial Sequence: Synthetic oligonucleotide
uauaaccaguagcacaagg

SEQ ID NO: 1307548 - RNA, 19 nt, Artificial Sequence
  Description of Artificial Sequence: Synthetic oligonucleotide
gauaagaguaaaagaaucc

SEQ ID NO: 1307549 - RNA, 19 nt, Artificial Sequence
  Description of Artificial Sequence: Synthetic oligonucleotide
uuauacaauaagaucucug

SEQ ID NO: 1307550 - RNA, 19 nt, Artificial Sequence
  Description of Artificial Sequence: Synthetic oligonucleotide
uaccuuucuaguuacaaca

SEQ ID NO: 1307551 - RNA, 19 nt, Artificial Sequence
  Description of Artificial Sequence: Synthetic oligonucleotide
aguuccauaacuccuccgg

SEQ ID NO: 1307552 - RNA, 19 nt, Artificial Sequence
  Description of Artificial Sequence: Synthetic oligonucleotide
aaaacuuaccuuucuaguu

SEQ ID NO: 1307553 - RNA, 19 nt, Artificial Sequence
  Description of Artificial Sequence: Synthetic oligonucleotide
ugauucaagagucucagua

SEQ ID NO: 1307554 - RNA, 19 nt, Artificial Sequence
  Description of Artificial Sequence: Synthetic oligonucleotide
auuaccagcacugacagcu

SEQ ID NO: 1307555 - RNA, 19 nt, Artificial Sequence
  Description of Artificial Sequence: Synthetic oligonucleotide
ucuagcuguguauagguug

SEQ ID NO: 1307556 - RNA, 19 nt, Artificial Sequence
  Description of Artificial Sequence: Synthetic oligonucleotide
auguuggaauauuuuaagg

SEQ ID NO: 1307557 - RNA, 19 nt, Artificial Sequence
  Description of Artificial Sequence: Synthetic oligonucleotide
aucauuaauauugcgcugg

SEQ ID NO: 1307558 - RNA, 19 nt, Artificial Sequence
  Description of Artificial Sequence: Synthetic oligonucleotide
ucuguuguaugucugcaug

SEQ ID NO: 1307559 - RNA, 19 nt, Artificial Sequence
  Description of Artificial Sequence: Synthetic oligonucleotide
uccagcuauaaccaguagc

SEQ ID NO: 1307560 - RNA, 19 nt, Artificial Sequence
  Description of Artificial Sequence: Synthetic oligonucleotide
cucauggucacacacagug

SEQ ID NO: 1307561 - RNA, 19 nt, Artificial Sequence
  Description of Artificial Sequence: Synthetic oligonucleotide
aggaaguuugcaaaugugc

SEQ ID NO: 1307562 - RNA, 19 nt, Artificial Sequence
  Description of Artificial Sequence: Synthetic oligonucleotide
uuggggagcaaauugguca

SEQ ID NO: 1307563 - RNA, 19 nt, Artificial Sequence
  Description of Artificial Sequence: Synthetic oligonucleotide
ucaagagucucaguaagag

SEQ ID NO: 1307564 - RNA, 19 nt, Artificial Sequence
  Description of Artificial Sequence: Synthetic oligonucleotide
aucaucgcaguuuugcguc

SEQ ID NO: 1307565 - RNA, 19 nt, Artificial Sequence
  Description of Artificial Sequence: Synthetic oligonucleotide
aaacaauuagacacugguc

SEQ ID NO: 1307566 - RNA, 19 nt, Artificial Sequence
  Description of Artificial Sequence: Synthetic oligonucleotide
uuccuuauggcuucagugc

SEQ ID NO: 1307567 - RNA, 19 nt, Artificial Sequence
  Description of Artificial Sequence: Synthetic oligonucleotide
uucaugacaauaucaucgc

SEQ ID NO: 1307568 - RNA, 19 nt, Artificial Sequence
  Description of Artificial Sequence: Synthetic oligonucleotide
agguacgaauccuacaauc

SEQ ID NO: 1307569 - RNA, 19 nt, Artificial Sequence
  Description of Artificial Sequence: Synthetic oligonucleotide
aaauuuccguaauuguaga

SEQ ID NO: 1307570 - RNA, 19 nt, Artificial Sequence
  Description of Artificial Sequence: Synthetic oligonucleotide
ucuaguuacaacaggcuua

SEQ ID NO: 1307571 - RNA, 19 nt, Artificial Sequence
  Description of Artificial Sequence: Synthetic oligonucleotide
aaacuuaccuuucuaguua

SEQ ID NO: 1307572 - RNA, 19 nt, Artificial Sequence
  Description of Artificial Sequence: Synthetic oligonucleotide
uuuccguaauuguagacac

SEQ ID NO: 1307573 - RNA, 19 nt, Artificial Sequence
  Description of Artificial Sequence: Synthetic oligonucleotide
acaauaagaucucugcaga

SEQ ID NO: 1307574 - RNA, 19 nt, Artificial Sequence
  Description of Artificial Sequence: Synthetic oligonucleotide
uuguagauauuaacaagcu

SEQ ID NO: 1307575 - RNA, 19 nt, Artificial Sequence
  Description of Artificial Sequence: Synthetic oligonucleotide
auguuuacagguuucacaa

SEQ ID NO: 1307576 - RNA, 19 nt, Artificial Sequence
  Description of Artificial Sequence: Synthetic oligonucleotide
aacuaaugaguaugucauc

SEQ ID NO: 1307577 - RNA, 19 nt, Artificial Sequence
  Description of Artificial Sequence: Synthetic oligonucleotide
gaaaucauaauguuggaau

SEQ ID NO: 1307578 - RNA, 19 nt, Artificial Sequence
  Description of Artificial Sequence: Synthetic oligonucleotide
auuuauacaauaagaucuc

SEQ ID NO: 1307579 - RNA, 19 nt, Artificial Sequence
  Description of Artificial Sequence: Synthetic oligonucleotide
auaucaucgcaguuuugcg

SEQ ID NO: 1307580 - RNA, 19 nt, Artificial Sequence
  Description of Artificial Sequence: Synthetic oligonucleotide
uauucuagcuguguauagg

SEQ ID NO: 1307581 - RNA, 19 nt, Artificial Sequence
  Description of Artificial Sequence: Synthetic oligonucleotide
gguuagaagggccauaaag

SEQ ID NO: 1307582 - RNA, 19 nt, Artificial Sequence
  Description of Artificial Sequence: Synthetic oligonucleotide
aguaugucaucaucuauca

SEQ ID NO: 1307583 - RNA, 19 nt, Artificial Sequence
  Description of Artificial Sequence: Synthetic oligonucleotide
uguuuucuagguacgaauc

SEQ ID NO: 1307584 - RNA, 19 nt, Artificial Sequence
  Description of Artificial Sequence: Synthetic oligonucleotide
guagauauuaacaagcuua

SEQ ID NO: 1307585 - RNA, 19 nt, Artificial Sequence
  Description of Artificial Sequence: Synthetic oligonucleotide
uuuuauucuagcuguguau

SEQ ID NO: 1307586 - RNA, 19 nt, Artificial Sequence
  Description of Artificial Sequence: Synthetic oligonucleotide
auaagaguaaaagaaucca

SEQ ID NO: 1307587 - RNA, 19 nt, Artificial Sequence
  Description of Artificial Sequence: Synthetic oligonucleotide
uguauagguugcauaugag

SEQ ID NO: 1307588 - RNA, 19 nt, Artificial Sequence
  Description of Artificial Sequence: Synthetic oligonucleotide
aauuaccagcacugacagc

SEQ ID NO: 1307589 - RNA, 19 nt, Artificial Sequence
  Description of Artificial Sequence: Synthetic oligonucleotide
acaauuagacacuggucag

SEQ ID NO: 1307590 - RNA, 19 nt, Artificial Sequence
  Description of Artificial Sequence: Synthetic oligonucleotide
agaguuccauaacuccucc

SEQ ID NO: 1307591 - RNA, 19 nt, Artificial Sequence
  Description of Artificial Sequence: Synthetic oligonucleotide
ugcgcugguuuccaguucg

SEQ ID NO: 1307592 - RNA, 19 nt, Artificial Sequence
  Description of Artificial Sequence: Synthetic oligonucleotide
uagauauuaacaagcuuau

SEQ ID NO: 1307593 - RNA, 19 nt, Artificial Sequence
  Description of Artificial Sequence: Synthetic oligonucleotide
acuaaugaguaugucauca

SEQ ID NO: 1307594 - RNA, 19 nt, Artificial Sequence
  Description of Artificial Sequence: Synthetic oligonucleotide
uguacauucucauggucac

SEQ ID NO: 1307595 - RNA, 19 nt, Artificial Sequence
  Description of Artificial Sequence: Synthetic oligonucleotide
uuaauauugcgcugguuuc

SEQ ID NO: 1307596 - RNA, 19 nt, Artificial Sequence
  Description of Artificial Sequence: Synthetic oligonucleotide
uuauucuagcuguguauag

SEQ ID NO: 1307597 - RNA, 19 nt, Artificial Sequence
  Description of Artificial Sequence: Synthetic oligonucleotide
uugcacauuuuagugaucc

SEQ ID NO: 1307598 - RNA, 19 nt, Artificial Sequence
  Description of Artificial Sequence: Synthetic oligonucleotide
aagccuagcaguguuucgg

SEQ ID NO: 1307599 - RNA, 19 nt, Artificial Sequence
  Description of Artificial Sequence: Synthetic oligonucleotide
aucuaucauuaauauugcg

SEQ ID NO: 1307600 - RNA, 19 nt, Artificial Sequence
  Description of Artificial Sequence: Synthetic oligonucleotide
agcuauaaccaguagcaca

SEQ ID NO: 1307601 - RNA, 19 nt, Artificial Sequence
  Description of Artificial Sequence: Synthetic oligonucleotide
cugaaaaccacgcugguca

SEQ ID NO: 1307602 - RNA, 19 nt, Artificial Sequence
  Description of Artificial Sequence: Synthetic oligonucleotide
cuagcuguguauagguugc

SEQ ID NO: 1307603 - RNA, 19 nt, Artificial Sequence
  Description of Artificial Sequence: Synthetic oligonucleotide
uuugcgucucgucaaucag

SEQ ID NO: 1307604 - RNA, 19 nt, Artificial Sequence
  Description of Artificial Sequence: Synthetic oligonucleotide
cugcaguacaaaauuuccg

SEQ ID NO: 1307605 - RNA, 19 nt, Artificial Sequence
  Description of Artificial Sequence: Synthetic oligonucleotide
uucguuuguuuccuguuca

SEQ ID NO: 1307606 - RNA, 19 nt, Artificial Sequence
  Description of Artificial Sequence: Synthetic oligonucleotide
aaucauaauguuggaauau

SEQ ID NO: 1307607 - RNA, 19 nt, Artificial Sequence
  Description of Artificial Sequence: Synthetic oligonucleotide
gaauccagggcugaugugc

SEQ ID NO: 1307608 - RNA, 19 nt, Artificial Sequence
  Description of Artificial Sequence: Synthetic oligonucleotide
caucuaucauuaauauugc

SEQ ID NO: 1307609 - RNA, 19 nt, Artificial Sequence
  Description of Artificial Sequence: Synthetic oligonucleotide
augguugaaauauggaaaa

SEQ ID NO: 1307610 - RNA, 19 nt, Artificial Sequence
  Description of Artificial Sequence: Synthetic oligonucleotide
uaaccaguagcacaaggau

SEQ ID NO: 1307611 - RNA, 19 nt, Artificial Sequence
  Description of Artificial Sequence: Synthetic oligonucleotide
uacaugguugaaauaugga

SEQ ID NO: 1307612 - RNA, 19 nt, Artificial Sequence
  Description of Artificial Sequence: Synthetic oligonucleotide
aauaagaucucugcagaaa

SEQ ID NO: 1307613 - RNA, 19 nt, Artificial Sequence
  Description of Artificial Sequence: Synthetic oligonucleotide
uaucauuaauauugcgcug

SEQ ID NO: 1307614 - RNA, 19 nt, Artificial Sequence
  Description of Artificial Sequence: Synthetic oligonucleotide
ugaugaugaaauucaugac

SEQ ID NO: 1307615 - RNA, 19 nt, Artificial Sequence
  Description of Artificial Sequence: Synthetic oligonucleotide
uuuugcgucucgucaauca

SEQ ID NO: 1307616 - RNA, 19 nt, Artificial Sequence
  Description of Artificial Sequence: Synthetic oligonucleotide
cuaucauuaauauugcgcu

SEQ ID NO: 1307617 - RNA, 19 nt, Artificial Sequence
  Description of Artificial Sequence: Synthetic oligonucleotide
cagagaguuccauaacucc

SEQ ID NO: 1307618 - RNA, 19 nt, Artificial Sequence
  Description of Artificial Sequence: Synthetic oligonucleotide
auuggucaaagcuccagcu

SEQ ID NO: 1307619 - RNA, 19 nt, Artificial Sequence
  Description of Artificial Sequence: Synthetic oligonucleotide
gaaguuugcaaaugugcca

SEQ ID NO: 1307620 - RNA, 19 nt, Artificial Sequence
  Description of Artificial Sequence: Synthetic oligonucleotide
ugauccaugcaguguaggc

SEQ ID NO: 1307621 - RNA, 19 nt, Artificial Sequence
  Description of Artificial Sequence: Synthetic oligonucleotide
uguaugucugcaugauaag

SEQ ID NO: 1307622 - RNA, 19 nt, Artificial Sequence
  Description of Artificial Sequence: Synthetic oligonucleotide
ugcauaugagagacauggg

SEQ ID NO: 1307623 - RNA, 19 nt, Artificial Sequence
  Description of Artificial Sequence: Synthetic oligonucleotide
aaaugugccaaacccucau

SEQ ID NO: 1307624 - RNA, 19 nt, Artificial Sequence
  Description of Artificial Sequence: Synthetic oligonucleotide
ucuguucuguuguaugucu

SEQ ID NO: 1307625 - RNA, 19 nt, Artificial Sequence
  Description of Artificial Sequence: Synthetic oligonucleotide
ucauaauguuggaauauuu

SEQ ID NO: 1307626 - RNA, 19 nt, Artificial Sequence
  Description of Artificial Sequence: Synthetic oligonucleotide
uuguagacaccugauggag

SEQ ID NO: 1307627 - RNA, 19 nt, Artificial Sequence
  Description of Artificial Sequence: Synthetic oligonucleotide
aguacuggucaccgcuucc

SEQ ID NO: 1307628 - RNA, 19 nt, Artificial Sequence
  Description of Artificial Sequence: Synthetic oligonucleotide
uaauguacauucucauggu

SEQ ID NO: 1307629 - RNA, 19 nt, Artificial Sequence
  Description of Artificial Sequence: Synthetic oligonucleotide
auuuccguaauuguagaca

SEQ ID NO: 1307630 - RNA, 19 nt, Artificial Sequence
  Description of Artificial Sequence: Synthetic oligonucleotide
uuaccuuucuaguuacaac

SEQ ID NO: 1307631 - RNA, 19 nt, Artificial Sequence
  Description of Artificial Sequence: Synthetic oligonucleotide
uuacaacaggcuuaacaac

SEQ ID NO: 1307632 - RNA, 19 nt, Artificial Sequence
  Description of Artificial Sequence: Synthetic oligonucleotide
uuuucuagguacgaauccu

SEQ ID NO: 1307633 - RNA, 19 nt, Artificial Sequence
  Description of Artificial Sequence: Synthetic oligonucleotide
uucuaguuacaacaggcuu

SEQ ID NO: 1307634 - RNA, 19 nt, Artificial Sequence
  Description of Artificial Sequence: Synthetic oligonucleotide
cauggguugcacauuuuag

SEQ ID NO: 1307635 - RNA, 19 nt, Artificial Sequence
  Description of Artificial Sequence: Synthetic oligonucleotide
uuuaagggcaugccauugu

SEQ ID NO: 1307636 - RNA, 19 nt, Artificial Sequence
  Description of Artificial Sequence: Synthetic oligonucleotide
aaguuugcaaaugugccaa

SEQ ID NO: 1307637 - RNA, 19 nt, Artificial Sequence
  Description of Artificial Sequence: Synthetic oligonucleotide
ucaagguauuugcuguuga

SEQ ID NO: 1307638 - RNA, 19 nt, Artificial Sequence
  Description of Artificial Sequence: Synthetic oligonucleotide
guauagguugcauaugaga

SEQ ID NO: 1307639 - RNA, 19 nt, Artificial Sequence
  Description of Artificial Sequence: Synthetic oligonucleotide
acgggcucucucuuggugc

SEQ ID NO: 1307640 - RNA, 19 nt, Artificial Sequence
  Description of Artificial Sequence: Synthetic oligonucleotide
ggaacuaaugaguauguca

SEQ ID NO: 1307641 - RNA, 19 nt, Artificial Sequence
  Description of Artificial Sequence: Synthetic oligonucleotide
aagggccauguuuacaggu

SEQ ID NO: 1307642 - RNA, 19 nt, Artificial Sequence
  Description of Artificial Sequence: Synthetic oligonucleotide
uuuauucuagcuguguaua

SEQ ID NO: 1307643 - RNA, 19 nt, Artificial Sequence
  Description of Artificial Sequence: Synthetic oligonucleotide
uugcuuacaugguugaaau

SEQ ID NO: 1307644 - RNA, 19 nt, Artificial Sequence
  Description of Artificial Sequence: Synthetic oligonucleotide
uaucaucgcaguuuugcgu

SEQ ID NO: 1307645 - RNA, 19 nt, Artificial Sequence
  Description of Artificial Sequence: Synthetic oligonucleotide
uaagggcaugccauuguag

SEQ ID NO: 1307646 - RNA, 19 nt, Artificial Sequence
  Description of Artificial Sequence: Synthetic oligonucleotide
uaacaagcuuauuuauaca

SEQ ID NO: 1307647 - RNA, 19 nt, Artificial Sequence
  Description of Artificial Sequence: Synthetic oligonucleotide
auggguugcacauuuuagu

SEQ ID NO: 1307648 - RNA, 19 nt, Artificial Sequence
  Description of Artificial Sequence: Synthetic oligonucleotide
ucagacuaagcucuccuua

SEQ ID NO: 1307649 - RNA, 19 nt, Artificial Sequence
  Description of Artificial Sequence: Synthetic oligonucleotide
gaagaaggagacuccgaug

SEQ ID NO: 1307650 - RNA, 19 nt, Artificial Sequence
  Description of Artificial Sequence: Synthetic oligonucleotide
uccuuauggcuucagugcu

SEQ ID NO: 1307651 - RNA, 19 nt, Artificial Sequence
  Description of Artificial Sequence: Synthetic oligonucleotide
auagguugcauaugagaga

SEQ ID NO: 1307652 - RNA, 19 nt, Artificial Sequence
  Description of Artificial Sequence: Synthetic oligonucleotide
uucaagagucucaguaaga

SEQ ID NO: 1307653 - RNA, 19 nt, Artificial Sequence
  Description of Artificial Sequence: Synthetic oligonucleotide
uaaacacguucuguaaaag

SEQ ID NO: 1307654 - RNA, 19 nt, Artificial Sequence
  Description of Artificial Sequence: Synthetic oligonucleotide
ucggguuuguuuucguuug

SEQ ID NO: 1307655 - RNA, 19 nt, Artificial Sequence
  Description of Artificial Sequence: Synthetic oligonucleotide
cauguuuacagguuucaca

SEQ ID NO: 1307656 - RNA, 19 nt, Artificial Sequence
  Description of Artificial Sequence: Synthetic oligonucleotide
cauucucauggucacacac

SEQ ID NO: 1307657 - RNA, 19 nt, Artificial Sequence
  Description of Artificial Sequence: Synthetic oligonucleotide
uaauauugcgcugguuucc

SEQ ID NO: 1307658 - RNA, 19 nt, Artificial Sequence
  Description of Artificial Sequence: Synthetic oligonucleotide
cucugcaugggguucagac

SEQ ID NO: 1307659 - RNA, 19 nt, Artificial Sequence
  Description of Artificial Sequence: Synthetic oligonucleotide
guacgaauccuacaaucug

SEQ ID NO: 1307660 - RNA, 19 nt, Artificial Sequence
  Description of Artificial Sequence: Synthetic oligonucleotide
ucuagguacgaauccuaca

SEQ ID NO: 1307661 - RNA, 19 nt, Artificial Sequence
  Description of Artificial Sequence: Synthetic oligonucleotide
caaaauuuccguaauugua

SEQ ID NO: 1307662 - RNA, 19 nt, Artificial Sequence
  Description of Artificial Sequence: Synthetic oligonucleotide
ugccaaacccucauugugu

SEQ ID NO: 1307663 - RNA, 19 nt, Artificial Sequence
  Description of Artificial Sequence: Synthetic oligonucleotide
aggcuuaacaacaaaauua

SEQ ID NO: 1307664 - RNA, 19 nt, Artificial Sequence
  Description of Artificial Sequence: Synthetic oligonucleotide
ucaugacaauaucaucgca

SEQ ID NO: 1307665 - RNA, 19 nt, Artificial Sequence
  Description of Artificial Sequence: Synthetic oligonucleotide
gcagaaagugcucugcccg

SEQ ID NO: 1307666 - RNA, 19 nt, Artificial Sequence
  Description of Artificial Sequence: Synthetic oligonucleotide
uguuggggagcaaauuggu

SEQ ID NO: 1307667 - RNA, 19 nt, Artificial Sequence
  Description of Artificial Sequence: Synthetic oligonucleotide
ugucugcaugauaagagua

SEQ ID NO: 1307668 - RNA, 19 nt, Artificial Sequence
  Description of Artificial Sequence: Synthetic oligonucleotide
uauuccuuauggcuucagu

SEQ ID NO: 1307669 - RNA, 19 nt, Artificial Sequence
  Description of Artificial Sequence: Synthetic oligonucleotide
aaggagacuccgaugagca

SEQ ID NO: 1307670 - RNA, 19 nt, Artificial Sequence
  Description of Artificial Sequence: Synthetic oligonucleotide
uucuagguacgaauccuac

SEQ ID NO: 1307671 - RNA, 19 nt, Artificial Sequence
  Description of Artificial Sequence: Synthetic oligonucleotide
caaacccucauuguguuac

SEQ ID NO: 1307672 - RNA, 19 nt, Artificial Sequence
  Description of Artificial Sequence: Synthetic oligonucleotide
ugggaacuaaugaguaugu

SEQ ID NO: 1307673 - RNA, 19 nt, Artificial Sequence
  Description of Artificial Sequence: Synthetic oligonucleotide
cugggaacuaaugaguaug

SEQ ID NO: 1307674 - RNA, 19 nt, Artificial Sequence
  Description of Artificial Sequence: Synthetic oligonucleotide
aauauugcgcugguuucca

SEQ ID NO: 1307675 - RNA, 19 nt, Artificial Sequence
  Description of Artificial Sequence: Synthetic oligonucleotide
uaauucugguuagaagggc

SEQ ID NO: 1307676 - RNA, 19 nt, Artificial Sequence
  Description of Artificial Sequence: Synthetic oligonucleotide
auaaccaguagcacaagga

SEQ ID NO: 1307677 - RNA, 19 nt, Artificial Sequence
  Description of Artificial Sequence: Synthetic oligonucleotide
cuagguacgaauccuacaa

SEQ ID NO: 1307678 - RNA, 19 nt, Artificial Sequence
  Description of Artificial Sequence: Synthetic oligonucleotide
aaaguuaauucugguuaga

SEQ ID NO: 1307679 - RNA, 19 nt, Artificial Sequence
  Description of Artificial Sequence: Synthetic oligonucleotide
augucugcaugauaagagu

SEQ ID NO: 1307680 - RNA, 19 nt, Artificial Sequence
  Description of Artificial Sequence: Synthetic oligonucleotide
uguagacaccugauggagu

SEQ ID NO: 1307681 - RNA, 19 nt, Artificial Sequence
  Description of Artificial Sequence: Synthetic oligonucleotide
agguaagaaauaauguaca

SEQ ID NO: 1307682 - RNA, 19 nt, Artificial Sequence
  Description of Artificial Sequence: Synthetic oligonucleotide
gagccgauuccucauuuug

SEQ ID NO: 1307683 - RNA, 19 nt, Artificial Sequence
  Description of Artificial Sequence: Synthetic oligonucleotide
gcuuauuuauacaauaaga

SEQ ID NO: 1307684 - RNA, 19 nt, Artificial Sequence
  Description of Artificial Sequence: Synthetic oligonucleotide
gaaggagacuccgaugagc

SEQ ID NO: 1307685 - RNA, 19 nt, Artificial Sequence
  Description of Artificial Sequence: Synthetic oligonucleotide
ggaaguuugcaaaugugcc

SEQ ID NO: 1307686 - RNA, 19 nt, Artificial Sequence
  Description of Artificial Sequence: Synthetic oligonucleotide
gcaaauuggucaaagcucc

SEQ ID NO: 1307687 - RNA, 19 nt, Artificial Sequence
  Description of Artificial Sequence: Synthetic oligonucleotide
auguuggggagcaaauugg

SEQ ID NO: 1307688 - RNA, 19 nt, Artificial Sequence
  Description of Artificial Sequence: Synthetic oligonucleotide
uugcgucucgucaaucagc

SEQ ID NO: 1307689 - RNA, 19 nt, Artificial Sequence
  Description of Artificial Sequence: Synthetic oligonucleotide
cauggaguacuggucaccg

SEQ ID NO: 1307690 - RNA, 19 nt, Artificial Sequence
  Description of Artificial Sequence: Synthetic oligonucleotide
gcaaccaggaauuuuccug

SEQ ID NO: 1307691 - RNA, 19 nt, Artificial Sequence
  Description of Artificial Sequence: Synthetic oligonucleotide
guaaugauucaagagucuc

SEQ ID NO: 1307692 - RNA, 19 nt, Artificial Sequence
  Description of Artificial Sequence: Synthetic oligonucleotide
uuucuagguacgaauccua

SEQ ID NO: 1307693 - RNA, 19 nt, Artificial Sequence
  Description of Artificial Sequence: Synthetic oligonucleotide
gucaaucagcgcauggacg

SEQ ID NO: 1307694 - RNA, 19 nt, Artificial Sequence
  Description of Artificial Sequence: Synthetic oligonucleotide
uuagugauccaugcagugu

SEQ ID NO: 1307695 - RNA, 19 nt, Artificial Sequence
  Description of Artificial Sequence: Synthetic oligonucleotide
cagacuaagcucuccuuac

SEQ ID NO: 1307696 - RNA, 19 nt, Artificial Sequence
  Description of Artificial Sequence: Synthetic oligonucleotide
gaacuaaugaguaugucau

SEQ ID NO: 1307697 - RNA, 19 nt, Artificial Sequence
  Description of Artificial Sequence: Synthetic oligonucleotide
uuaagggcaugccauugua

SEQ ID NO: 1307698 - RNA, 19 nt, Artificial Sequence
  Description of Artificial Sequence: Synthetic oligonucleotide
cugguaaugauucaagagu

SEQ ID NO: 1307699 - RNA, 19 nt, Artificial Sequence
  Description of Artificial Sequence: Synthetic oligonucleotide
ccugguaaugauucaagag

SEQ ID NO: 1307700 - RNA, 19 nt, Artificial Sequence
  Description of Artificial Sequence: Synthetic oligonucleotide
uguguauagguugcauaug

SEQ ID NO: 1307701 - RNA, 19 nt, Artificial Sequence
  Description of Artificial Sequence: Synthetic oligonucleotide
aguaagaggucuguucugu

SEQ ID NO: 1307702 - RNA, 19 nt, Artificial Sequence
  Description of Artificial Sequence: Synthetic oligonucleotide
uauugcgcugguuuccagu

SEQ ID NO: 1307703 - RNA, 19 nt, Artificial Sequence
  Description of Artificial Sequence: Synthetic oligonucleotide
uucggguuuguuuucguuu

SEQ ID NO: 1307704 - RNA, 19 nt, Artificial Sequence
  Description of Artificial Sequence: Synthetic oligonucleotide
cugguuuccaguucgggga

SEQ ID NO: 1307705 - RNA, 19 nt, Artificial Sequence
  Description of Artificial Sequence: Synthetic oligonucleotide
guuccauaacuccuccggc

SEQ ID NO: 1307706 - RNA, 19 nt, Artificial Sequence
  Description of Artificial Sequence: Synthetic oligonucleotide
augaaaacuuaccuuucua

SEQ ID NO: 1307707 - RNA, 19 nt, Artificial Sequence
  Description of Artificial Sequence: Synthetic oligonucleotide
agccuagcaguguuucggg

SEQ ID NO: 1307708 - RNA, 19 nt, Artificial Sequence
  Description of Artificial Sequence: Synthetic oligonucleotide
caggaaauugcugccagac

SEQ ID NO: 1307709 - RNA, 19 nt, Artificial Sequence
  Description of Artificial Sequence: Synthetic oligonucleotide
agagaguuccauaacuccu

SEQ ID NO: 1307710 - RNA, 19 nt, Artificial Sequence
  Description of Artificial Sequence: Synthetic oligonucleotide
caauuagacacuggucagc

SEQ ID NO: 1307711 - RNA, 19 nt, Artificial Sequence
  Description of Artificial Sequence: Synthetic oligonucleotide
cauuccagaauggccauug

SEQ ID NO: 1307712 - RNA, 19 nt, Artificial Sequence
  Description of Artificial Sequence: Synthetic oligonucleotide
gaugacagggacaggguga

SEQ ID NO: 1307713 - RNA, 19 nt, Artificial Sequence
  Description of Artificial Sequence: Synthetic oligonucleotide
ccagcuauaaccaguagca

SEQ ID NO: 1307714 - RNA, 19 nt, Artificial Sequence
  Description of Artificial Sequence: Synthetic oligonucleotide
uuccccgugugcuugcuga

SEQ ID NO: 1307715 - RNA, 19 nt, Artificial Sequence
  Description of Artificial Sequence: Synthetic oligonucleotide
uuccguaauuguagacacc

SEQ ID NO: 1307716 - RNA, 19 nt, Artificial Sequence
  Description of Artificial Sequence: Synthetic oligonucleotide
ucgucaaucagcgcaugga

SEQ ID NO: 1307717 - RNA, 19 nt, Artificial Sequence
  Description of Artificial Sequence: Synthetic oligonucleotide
caguacaaaauuuccguaa

SEQ ID NO: 1307718 - RNA, 19 nt, Artificial Sequence
  Description of Artificial Sequence: Synthetic oligonucleotide
auaaagacacuggcaacca

SEQ ID NO: 1307719 - RNA, 19 nt, Artificial Sequence
  Description of Artificial Sequence: Synthetic oligonucleotide
acaaaauuaccagcacuga

SEQ ID NO: 1307720 - RNA, 19 nt, Artificial Sequence
  Description of Artificial Sequence: Synthetic oligonucleotide
uuugugguuugaagaugac

SEQ ID NO: 1307721 - RNA, 19 nt, Artificial Sequence
  Description of Artificial Sequence: Synthetic oligonucleotide
uggcaaccaggaauuuucc

SEQ ID NO: 1307722 - RNA, 19 nt, Artificial Sequence
  Description of Artificial Sequence: Synthetic oligonucleotide
acuuuuauucuagcugugu

SEQ ID NO: 1307723 - RNA, 19 nt, Artificial Sequence
  Description of Artificial Sequence: Synthetic oligonucleotide
uuguuuucguuuguuuccu

SEQ ID NO: 1307724 - RNA, 19 nt, Artificial Sequence
  Description of Artificial Sequence: Synthetic oligonucleotide
acuuugugcagguuuggua

SEQ ID NO: 1307725 - RNA, 19 nt, Artificial Sequence
  Description of Artificial Sequence: Synthetic oligonucleotide
gaauccccaugacucuucc

SEQ ID NO: 1307726 - RNA, 19 nt, Artificial Sequence
  Description of Artificial Sequence: Synthetic oligonucleotide
uauggcuucagugcuccac

SEQ ID NO: 1307727 - RNA, 19 nt, Artificial Sequence
  Description of Artificial Sequence: Synthetic oligonucleotide
auccaugcaguguaggcuu

SEQ ID NO: 1307728 - RNA, 19 nt, Artificial Sequence
  Description of Artificial Sequence: Synthetic oligonucleotide
caugccauuguagauauua

SEQ ID NO: 1307729 - RNA, 19 nt, Artificial Sequence
  Description of Artificial Sequence: Synthetic oligonucleotide
cucgucaaucagcgcaugg

SEQ ID NO: 1307730 - RNA, 19 nt, Artificial Sequence
  Description of Artificial Sequence: Synthetic oligonucleotide
aaugugccaaacccucauu

SEQ ID NO: 1307731 - RNA, 19 nt, Artificial Sequence
  Description of Artificial Sequence: Synthetic oligonucleotide
gaaauugcugccagacuga

SEQ ID NO: 1307732 - RNA, 19 nt, Artificial Sequence
  Description of Artificial Sequence: Synthetic oligonucleotide
uggggagcaaauuggucaa

SEQ ID NO: 1307733 - RNA, 19 nt, Artificial Sequence
  Description of Artificial Sequence: Synthetic oligonucleotide
accuuucuaguuacaacag

SEQ ID NO: 1307734 - RNA, 19 nt, Artificial Sequence
  Description of Artificial Sequence: Synthetic oligonucleotide
ugcacauuuuagugaucca

SEQ ID NO: 1307735 - RNA, 19 nt, Artificial Sequence
  Description of Artificial Sequence: Synthetic oligonucleotide
aggaaauugcugccagacu

SEQ ID NO: 1307736 - RNA, 19 nt, Artificial Sequence
  Description of Artificial Sequence: Synthetic oligonucleotide
ggagcaaauuggucaaagc

SEQ ID NO: 1307737 - RNA, 19 nt, Artificial Sequence
  Description of Artificial Sequence: Synthetic oligonucleotide
agacuaagcucuccuuaca

SEQ ID NO: 1307738 - RNA, 19 nt, Artificial Sequence
  Description of Artificial Sequence: Synthetic oligonucleotide
aaacccucauuguguuacu

SEQ ID NO: 1307739 - RNA, 19 nt, Artificial Sequence
  Description of Artificial Sequence: Synthetic oligonucleotide
ucugcccggugccacauuc

SEQ ID NO: 1307740 - RNA, 19 nt, Artificial Sequence
  Description of Artificial Sequence: Synthetic oligonucleotide
agcacaaggaugauaccca

SEQ ID NO: 1307741 - RNA, 19 nt, Artificial Sequence
  Description of Artificial Sequence: Synthetic oligonucleotide
uguuuucguuuguuuccug

SEQ ID NO: 1307742 - RNA, 19 nt, Artificial Sequence
  Description of Artificial Sequence: Synthetic oligonucleotide
aucgcaguuuugcgucucg

SEQ ID NO: 1307743 - RNA, 19 nt, Artificial Sequence
  Description of Artificial Sequence: Synthetic oligonucleotide
ggagacuccgaugagcacc

SEQ ID NO: 1307744 - RNA, 19 nt, Artificial Sequence
  Description of Artificial Sequence: Synthetic oligonucleotide
uagguacgaauccuacaau

SEQ ID NO: 1307745 - RNA, 19 nt, Artificial Sequence
  Description of Artificial Sequence: Synthetic oligonucleotide
uccuacaaucuggucagga

SEQ ID NO: 1307746 - RNA, 19 nt, Artificial Sequence
  Description of Artificial Sequence: Synthetic oligonucleotide
agaauggccauugguuucu

SEQ ID NO: 1307747 - RNA, 19 nt, Artificial Sequence
  Description of Artificial Sequence: Synthetic oligonucleotide
auugcgcugguuuccaguu

SEQ ID NO: 1307748 - RNA, 19 nt, Artificial Sequence
  Description of Artificial Sequence: Synthetic oligonucleotide
ugguugaaauauggaaaac

SEQ ID NO: 1307749 - RNA, 19 nt, Artificial Sequence
  Description of Artificial Sequence: Synthetic oligonucleotide
uuuuccuauccugcaggca

SEQ ID NO: 1307750 - RNA, 19 nt, Artificial Sequence
  Description of Artificial Sequence: Synthetic oligonucleotide
aaaccacgcuggucaaagu

SEQ ID NO: 1307751 - RNA, 19 nt, Artificial Sequence
  Description of Artificial Sequence: Synthetic oligonucleotide
aggaauuuuccuggcucuc

SEQ ID NO: 1307752 - RNA, 19 nt, Artificial Sequence
  Description of Artificial Sequence: Synthetic oligonucleotide
aucauaauguuggaauauu

SEQ ID NO: 1307753 - RNA, 19 nt, Artificial Sequence
  Description of Artificial Sequence: Synthetic oligonucleotide
cacguucuguaaaagguaa

SEQ ID NO: 1307754 - RNA, 19 nt, Artificial Sequence
  Description of Artificial Sequence: Synthetic oligonucleotide
uugugcagguuugguauug

SEQ ID NO: 1307755 - RNA, 19 nt, Artificial Sequence
  Description of Artificial Sequence: Synthetic oligonucleotide
ugccagacugagaaaccaa

SEQ ID NO: 1307756 - RNA, 19 nt, Artificial Sequence
  Description of Artificial Sequence: Synthetic oligonucleotide
cagugcuccacaggaacgg

SEQ ID NO: 1307757 - RNA, 19 nt, Artificial Sequence
  Description of Artificial Sequence: Synthetic oligonucleotide
uccugaaaaccacgcuggu

SEQ ID NO: 1307758 - RNA, 19 nt, Artificial Sequence
  Description of Artificial Sequence: Synthetic oligonucleotide
cuuaccuuucuaguuacaa

SEQ ID NO: 1307759 - RNA, 19 nt, Artificial Sequence
  Description of Artificial Sequence: Synthetic oligonucleotide
ucccacguuguuccacacc

SEQ ID NO: 1307760 - RNA, 19 nt, Artificial Sequence
  Description of Artificial Sequence: Synthetic oligonucleotide
agaguucaagguauuugcu

SEQ ID NO: 1307761 - RNA, 19 nt, Artificial Sequence
  Description of Artificial Sequence: Synthetic oligonucleotide
ugcccggugccacauucca

SEQ ID NO: 1307762 - RNA, 19 nt, Artificial Sequence
  Description of Artificial Sequence: Synthetic oligonucleotide
cuguuguaugucugcauga

SEQ ID NO: 1307763 - RNA, 19 nt, Artificial Sequence
  Description of Artificial Sequence: Synthetic oligonucleotide
uucuagcuguguauagguu

SEQ ID NO: 1307764 - RNA, 19 nt, Artificial Sequence
  Description of Artificial Sequence: Synthetic oligonucleotide
ucccagagaguuccauaac

SEQ ID NO: 1307765 - RNA, 19 nt, Artificial Sequence
  Description of Artificial Sequence: Synthetic oligonucleotide
gcaguuuugcgucucguca

SEQ ID NO: 1307766 - RNA, 19 nt, Artificial Sequence
  Description of Artificial Sequence: Synthetic oligonucleotide
gugauccaugcaguguagg

SEQ ID NO: 1307767 - RNA, 19 nt, Artificial Sequence
  Description of Artificial Sequence: Synthetic oligonucleotide
auauugcgcugguuuccag

SEQ ID NO: 1307768 - RNA, 19 nt, Artificial Sequence
  Description of Artificial Sequence: Synthetic oligonucleotide
augauucaagagucucagu

SEQ ID NO: 1307769 - RNA, 19 nt, Artificial Sequence
  Description of Artificial Sequence: Synthetic oligonucleotide
cuaguuacaacaggcuuaa

SEQ ID NO: 1307770 - RNA, 19 nt, Artificial Sequence
  Description of Artificial Sequence: Synthetic oligonucleotide
auucugguuagaagggcca

SEQ ID NO: 1307771 - RNA, 19 nt, Artificial Sequence
  Description of Artificial Sequence: Synthetic oligonucleotide
aguuuugcgucucgucaau

SEQ ID NO: 1307772 - RNA, 19 nt, Artificial Sequence
  Description of Artificial Sequence: Synthetic oligonucleotide
uugccugguaaugauucaa

SEQ ID NO: 1307773 - RNA, 19 nt, Artificial Sequence
  Description of Artificial Sequence: Synthetic oligonucleotide
acccucauuguguuacuaa

SEQ ID NO: 1307774 - RNA, 19 nt, Artificial Sequence
  Description of Artificial Sequence: Synthetic oligonucleotide
caauaagaucucugcagaa

SEQ ID NO: 1307775 - RNA, 19 nt, Artificial Sequence
  Description of Artificial Sequence: Synthetic oligonucleotide
ccacauuccagaauggcca

SEQ ID NO: 1307776 - RNA, 19 nt, Artificial Sequence
  Description of Artificial Sequence: Synthetic oligonucleotide
caucaucuaucauuaauau

SEQ ID NO: 1307777 - RNA, 19 nt, Artificial Sequence
  Description of Artificial Sequence: Synthetic oligonucleotide
cuguguauagguugcauau

SEQ ID NO: 1307778 - RNA, 19 nt, Artificial Sequence
  Description of Artificial Sequence: Synthetic oligonucleotide
uuugugcagguuugguauu

SEQ ID NO: 1307779 - RNA, 19 nt, Artificial Sequence
  Description of Artificial Sequence: Synthetic oligonucleotide
ggucaccgcuuccagaccc

SEQ ID NO: 1307780 - RNA, 19 nt, Artificial Sequence
  Description of Artificial Sequence: Synthetic oligonucleotide
acgaauccuacaaucuggu

SEQ ID NO: 1307781 - RNA, 19 nt, Artificial Sequence
  Description of Artificial Sequence: Synthetic oligonucleotide
uuuugcuuacaugguugaa

SEQ ID NO: 1307782 - RNA, 19 nt, Artificial Sequence
  Description of Artificial Sequence: Synthetic oligonucleotide
ucaucgcaguuuugcgucu

SEQ ID NO: 1307783 - RNA, 19 nt, Artificial Sequence
  Description of Artificial Sequence: Synthetic oligonucleotide
gcauaugagagacaugggu

SEQ ID NO: 1307784 - RNA, 19 nt, Artificial Sequence
  Description of Artificial Sequence: Synthetic oligonucleotide
aggaacgggcucucucuug

SEQ ID NO: 1307785 - RNA, 19 nt, Artificial Sequence
  Description of Artificial Sequence: Synthetic oligonucleotide
gagauguguuuucuaggua

SEQ ID NO: 1307786 - RNA, 19 nt, Artificial Sequence
  Description of Artificial Sequence: Synthetic oligonucleotide
guguuuucuagguacgaau

SEQ ID NO: 1307787 - RNA, 19 nt, Artificial Sequence
  Description of Artificial Sequence: Synthetic oligonucleotide
ucguuuguuuccuguucau

SEQ ID NO: 1307788 - RNA, 19 nt, Artificial Sequence
  Description of Artificial Sequence: Synthetic oligonucleotide
gcaaaugugccaaacccuc

SEQ ID NO: 1307789 - RNA, 19 nt, Artificial Sequence
  Description of Artificial Sequence: Synthetic oligonucleotide
ugcuuacaugguugaaaua

SEQ ID NO: 1307790 - RNA, 19 nt, Artificial Sequence
  Description of Artificial Sequence: Synthetic oligonucleotide
gcuuacaugguugaaauau

SEQ ID NO: 1307791 - RNA, 19 nt, Artificial Sequence
  Description of Artificial Sequence: Synthetic oligonucleotide
agugauccaugcaguguag

SEQ ID NO: 1307792 - RNA, 19 nt, Artificial Sequence
  Description of Artificial Sequence: Synthetic oligonucleotide
gacuaagcucuccuuacau

SEQ ID NO: 1307793 - RNA, 19 nt, Artificial Sequence
  Description of Artificial Sequence: Synthetic oligonucleotide
acguucuguaaaagguaag

SEQ ID NO: 1307794 - RNA, 19 nt, Artificial Sequence
  Description of Artificial Sequence: Synthetic oligonucleotide
caagguauuugcuguugaa

SEQ ID NO: 1307795 - RNA, 19 nt, Artificial Sequence
  Description of Artificial Sequence: Synthetic oligonucleotide
gauacccagggagaaccga

SEQ ID NO: 1307796 - RNA, 19 nt, Artificial Sequence
  Description of Artificial Sequence: Synthetic oligonucleotide
ucacaacaguauuccuuau

SEQ ID NO: 1307797 - RNA, 19 nt, Artificial Sequence
  Description of Artificial Sequence: Synthetic oligonucleotide
auguguuuucuagguacga

SEQ ID NO: 1307798 - RNA, 19 nt, Artificial Sequence
  Description of Artificial Sequence: Synthetic oligonucleotide
cuauaaccaguagcacaag

SEQ ID NO: 1307799 - RNA, 19 nt, Artificial Sequence
  Description of Artificial Sequence: Synthetic oligonucleotide
uggagccgauuccucauuu

SEQ ID NO: 1307800 - RNA, 19 nt, Artificial Sequence
  Description of Artificial Sequence: Synthetic oligonucleotide
ggaguagagauguguuuuc

SEQ ID NO: 1307801 - RNA, 19 nt, Artificial Sequence
  Description of Artificial Sequence: Synthetic oligonucleotide
uggucaccgcuuccagacc

SEQ ID NO: 1307802 - RNA, 19 nt, Artificial Sequence
  Description of Artificial Sequence: Synthetic oligonucleotide
gcuuaacaacaaaauuacc

SEQ ID NO: 1307803 - RNA, 19 nt, Artificial Sequence
  Description of Artificial Sequence: Synthetic oligonucleotide
ugguuagaagggccauaaa

SEQ ID NO: 1307804 - RNA, 19 nt, Artificial Sequence
  Description of Artificial Sequence: Synthetic oligonucleotide
ggaaaucauaauguuggaa

SEQ ID NO: 1307805 - RNA, 19 nt, Artificial Sequence
  Description of Artificial Sequence: Synthetic oligonucleotide
cguaauuguagacaccuga

SEQ ID NO: 1307806 - RNA, 19 nt, Artificial Sequence
  Description of Artificial Sequence: Synthetic oligonucleotide
ugcaugggguucagacuaa

SEQ ID NO: 1307807 - RNA, 19 nt, Artificial Sequence
  Description of Artificial Sequence: Synthetic oligonucleotide
aguuugcaaaugugccaaa

SEQ ID NO: 1307808 - RNA, 19 nt, Artificial Sequence
  Description of Artificial Sequence: Synthetic oligonucleotide
caguuuugcgucucgucaa

SEQ ID NO: 1307809 - RNA, 19 nt, Artificial Sequence
  Description of Artificial Sequence: Synthetic oligonucleotide
caaauuggucaaagcucca

SEQ ID NO: 1307810 - RNA, 19 nt, Artificial Sequence
  Description of Artificial Sequence: Synthetic oligonucleotide
agccgauuccucauuuugu

SEQ ID NO: 1307811 - RNA, 19 nt, Artificial Sequence
  Description of Artificial Sequence: Synthetic oligonucleotide
acacguucuguaaaaggua

SEQ ID NO: 1307812 - RNA, 19 nt, Artificial Sequence
  Description of Artificial Sequence: Synthetic oligonucleotide
agauauuaacaagcuuauu

SEQ ID NO: 1307813 - RNA, 19 nt, Artificial Sequence
  Description of Artificial Sequence: Synthetic oligonucleotide
guaauuguagacaccugau

SEQ ID NO: 1307814 - RNA, 19 nt, Artificial Sequence
  Description of Artificial Sequence: Synthetic oligonucleotide
cagcuauaaccaguagcac

SEQ ID NO: 1307815 - RNA, 19 nt, Artificial Sequence
  Description of Artificial Sequence: Synthetic oligonucleotide
cugguuagaagggccauaa

SEQ ID NO: 1307816 - RNA, 19 nt, Artificial Sequence
  Description of Artificial Sequence: Synthetic oligonucleotide
guauuccuuauggcuucag

SEQ ID NO: 1307817 - RNA, 19 nt, Artificial Sequence
  Description of Artificial Sequence: Synthetic oligonucleotide
agcgcauggacggcugcag

SEQ ID NO: 1307818 - RNA, 19 nt, Artificial Sequence
  Description of Artificial Sequence: Synthetic oligonucleotide
caaggaugauacccaggga

SEQ ID NO: 1307819 - RNA, 19 nt, Artificial Sequence
  Description of Artificial Sequence: Synthetic oligonucleotide
caaucagcgcauggacggc

SEQ ID NO: 1307820 - RNA, 19 nt, Artificial Sequence
  Description of Artificial Sequence: Synthetic oligonucleotide
gguugcauaugagagacau

SEQ ID NO: 1307821 - RNA, 19 nt, Artificial Sequence
  Description of Artificial Sequence: Synthetic oligonucleotide
gguacgaauccuacaaucu

SEQ ID NO: 1307822 - RNA, 19 nt, Artificial Sequence
  Description of Artificial Sequence: Synthetic oligonucleotide
ucucgucaaucagcgcaug

SEQ ID NO: 1307823 - RNA, 19 nt, Artificial Sequence
  Description of Artificial Sequence: Synthetic oligonucleotide
guacuggucaccgcuucca

SEQ ID NO: 1307824 - RNA, 19 nt, Artificial Sequence
  Description of Artificial Sequence: Synthetic oligonucleotide
cuaaugaguaugucaucau

SEQ ID NO: 1307825 - RNA, 19 nt, Artificial Sequence
  Description of Artificial Sequence: Synthetic oligonucleotide
gcaguacaaaauuuccgua

SEQ ID NO: 1307826 - RNA, 19 nt, Artificial Sequence
  Description of Artificial Sequence: Synthetic oligonucleotide
uggaauccccaugacucuu

SEQ ID NO: 1307827 - RNA, 19 nt, Artificial Sequence
  Description of Artificial Sequence: Synthetic oligonucleotide
cccacguuguuccacacca

SEQ ID NO: 1307828 - RNA, 19 nt, Artificial Sequence
  Description of Artificial Sequence: Synthetic oligonucleotide
cugcccggugccacauucc

SEQ ID NO: 1307829 - RNA, 19 nt, Artificial Sequence
  Description of Artificial Sequence: Synthetic oligonucleotide
ccacaaucacuuugugcag

SEQ ID NO: 1307830 - RNA, 19 nt, Artificial Sequence
  Description of Artificial Sequence: Synthetic oligonucleotide
uccuggcucucugcauggg

SEQ ID NO: 1307831 - RNA, 19 nt, Artificial Sequence
  Description of Artificial Sequence: Synthetic oligonucleotide
ccaaaagggccauguuuac

SEQ ID NO: 1307832 - RNA, 19 nt, Artificial Sequence
  Description of Artificial Sequence: Synthetic oligonucleotide
auggucacacacagugaca

SEQ ID NO: 1307833 - RNA, 19 nt, Artificial Sequence
  Description of Artificial Sequence: Synthetic oligonucleotide
guguuucggguuuguuuuc

SEQ ID NO: 1307834 - RNA, 19 nt, Artificial Sequence
  Description of Artificial Sequence: Synthetic oligonucleotide
gccugcaguacaaaauuuc

SEQ ID NO: 1307835 - RNA, 19 nt, Artificial Sequence
  Description of Artificial Sequence: Synthetic oligonucleotide
uagcuguguauagguugca

SEQ ID NO: 1307836 - RNA, 19 nt, Artificial Sequence
  Description of Artificial Sequence: Synthetic oligonucleotide
uccuauccugcaggcauua

SEQ ID NO: 1307837 - RNA, 19 nt, Artificial Sequence
  Description of Artificial Sequence: Synthetic oligonucleotide
cgucaaucagcgcauggac

SEQ ID NO: 1307838 - RNA, 19 nt, Artificial Sequence
  Description of Artificial Sequence: Synthetic oligonucleotide
cgucucgucaaucagcgca

SEQ ID NO: 1307839 - RNA, 19 nt, Artificial Sequence
  Description of Artificial Sequence: Synthetic oligonucleotide
ggccauaaagacacuggca

SEQ ID NO: 1307840 - RNA, 19 nt, Artificial Sequence
  Description of Artificial Sequence: Synthetic oligonucleotide
gaaaaccacgcuggucaaa

SEQ ID NO: 1307841 - RNA, 19 nt, Artificial Sequence
  Description of Artificial Sequence: Synthetic oligonucleotide
ucgcaguuuugcgucucgu

SEQ ID NO: 1307842 - RNA, 19 nt, Artificial Sequence
  Description of Artificial Sequence: Synthetic oligonucleotide
guuuugcgucucgucaauc

SEQ ID NO: 1307843 - RNA, 19 nt, Artificial Sequence
  Description of Artificial Sequence: Synthetic oligonucleotide
acuuaccuuucuaguuaca

SEQ ID NO: 1307844 - RNA, 19 nt, Artificial Sequence
  Description of Artificial Sequence: Synthetic oligonucleotide
cacuggaauccccaugacu

SEQ ID NO: 1307845 - RNA, 19 nt, Artificial Sequence
  Description of Artificial Sequence: Synthetic oligonucleotide
aucagcgcauggacggcug

SEQ ID NO: 1307846 - RNA, 19 nt, Artificial Sequence
  Description of Artificial Sequence: Synthetic oligonucleotide
guacauucucauggucaca

SEQ ID NO: 1307847 - RNA, 19 nt, Artificial Sequence
  Description of Artificial Sequence: Synthetic oligonucleotide
cuagcaguguuucggguuu

SEQ ID NO: 1307848 - RNA, 19 nt, Artificial Sequence
  Description of Artificial Sequence: Synthetic oligonucleotide
ccauguuuacagguuucac

SEQ ID NO: 1307849 - RNA, 19 nt, Artificial Sequence
  Description of Artificial Sequence: Synthetic oligonucleotide
gcgcauggacggcugcagg

SEQ ID NO: 1307850 - RNA, 19 nt, Artificial Sequence
  Description of Artificial Sequence: Synthetic oligonucleotide
guuucggguuuguuuucgu

SEQ ID NO: 1307851 - RNA, 19 nt, Artificial Sequence
  Description of Artificial Sequence: Synthetic oligonucleotide
caucgcaguuuugcgucuc

SEQ ID NO: 1307852 - RNA, 19 nt, Artificial Sequence
  Description of Artificial Sequence: Synthetic oligonucleotide
guaagaggucuguucuguu

SEQ ID NO: 1307853 - RNA, 19 nt, Artificial Sequence
  Description of Artificial Sequence: Synthetic oligonucleotide
gccagacugagaaaccaaa

SEQ ID NO: 1307854 - RNA, 19 nt, Artificial Sequence
  Description of Artificial Sequence: Synthetic oligonucleotide
ggcaaccaggaauuuuccu

SEQ ID NO: 1307855 - RNA, 19 nt, Artificial Sequence
  Description of Artificial Sequence: Synthetic oligonucleotide
gaggucuguucuguuguau

SEQ ID NO: 1307856 - RNA, 19 nt, Artificial Sequence
  Description of Artificial Sequence: Synthetic oligonucleotide
cccagagaguuccauaacu

SEQ ID NO: 1307857 - RNA, 19 nt, Artificial Sequence
  Description of Artificial Sequence: Synthetic oligonucleotide
gggcaugccauuguagaua

SEQ ID NO: 1307858 - RNA, 19 nt, Artificial Sequence
  Description of Artificial Sequence: Synthetic oligonucleotide
ggugcuugaaguguuucuu

SEQ ID NO: 1307859 - RNA, 19 nt, Artificial Sequence
  Description of Artificial Sequence: Synthetic oligonucleotide
caguagcacaaggaugaua

SEQ ID NO: 1307860 - RNA, 19 nt, Artificial Sequence
  Description of Artificial Sequence: Synthetic oligonucleotide
gcuccagcuauaaccagua

SEQ ID NO: 1307861 - RNA, 19 nt, Artificial Sequence
  Description of Artificial Sequence: Synthetic oligonucleotide
cgaauccuacaaucugguc

SEQ ID NO: 1307862 - RNA, 19 nt, Artificial Sequence
  Description of Artificial Sequence: Synthetic oligonucleotide
cgcaguuuugcgucucguc

SEQ ID NO: 1307863 - RNA, 19 nt, Artificial Sequence
  Description of Artificial Sequence: Synthetic oligonucleotide
gucucgucaaucagcgcau

SEQ ID NO: 1307864 - RNA, 19 nt, Artificial Sequence
  Description of Artificial Sequence: Synthetic oligonucleotide
ccacguuguuccacaccac

SEQ ID NO: 1307865 - RNA, 19 nt, Artificial Sequence
  Description of Artificial Sequence: Synthetic oligonucleotide
cccucauuguguuacuaau

SEQ ID NO: 1307866 - RNA, 19 nt, Artificial Sequence
  Description of Artificial Sequence: Synthetic oligonucleotide
ccgcuuccagacccugggg

SEQ ID NO: 1307867 - RNA, 19 nt, Artificial Sequence
  Description of Artificial Sequence: Synthetic oligonucleotide
cauuaauauugcgcugguu

SEQ ID NO: 1307868 - RNA, 19 nt, Artificial Sequence
  Description of Artificial Sequence: Synthetic oligonucleotide
cuuccagacccuggggccu

SEQ ID NO: 1307869 - RNA, 19 nt, Artificial Sequence
  Description of Artificial Sequence: Synthetic oligonucleotide
gcgucucgucaaucagcgc

SEQ ID NO: 1307870 - RNA, 19 nt, Artificial Sequence
  Description of Artificial Sequence: Synthetic oligonucleotide
gccaaacccucauuguguu

SEQ ID NO: 1307871 - RNA, 19 nt, Artificial Sequence
  Description of Artificial Sequence: Synthetic oligonucleotide
gggccauguuuacagguuu

SEQ ID NO: 1307872 - RNA, 19 nt, Artificial Sequence
  Description of Artificial Sequence: Synthetic oligonucleotide
ccucauuguguuacuaauu

SEQ ID NO: 1307873 - RNA, 19 nt, Artificial Sequence
  Description of Artificial Sequence: Synthetic oligonucleotide
gcgcugguuuccaguucgg

SEQ ID NO: 1307874 - RNA, 19 nt, Artificial Sequence
  Description of Artificial Sequence: Synthetic oligonucleotide
ccuagcaguguuucggguu

SEQ ID NO: 1307875 - RNA, 19 nt, Artificial Sequence
  Description of Artificial Sequence: Synthetic oligonucleotide
gacauggguugcacauuuu

SEQ ID NO: 1307876 - RNA, 19 nt, Artificial Sequence
  Description of Artificial Sequence: Synthetic oligonucleotide
ccugggaacuaaugaguau

SEQ ID NO: 1307877 - RNA, 19 nt, Artificial Sequence
  Description of Artificial Sequence: Synthetic oligonucleotide
gccuagcaguguuucgggu

SEQ ID NO: 1307878 - RNA, 19 nt, Artificial Sequence
  Description of Artificial Sequence: Synthetic oligonucleotide
ggagccgauuccucauuuu

SEQ ID NO: 1307879 - RNA, 19 nt, Artificial Sequence
  Description of Artificial Sequence: Synthetic oligonucleotide
caggaacgggcucucucuu

SEQ ID NO: 1307880 - RNA, 19 nt, Artificial Sequence
  Description of Artificial Sequence: Synthetic oligonucleotide
ccaaacccucauuguguua

SEQ ID NO: 1307881 - RNA, 19 nt, Artificial Sequence
  Description of Artificial Sequence: Synthetic oligonucleotide
cuggagccgauuccucauu

SEQ ID NO: 1307882 - RNA, 19 nt, Artificial Sequence
  Description of Artificial Sequence: Synthetic oligonucleotide
gaauggccauugguuucuu

SEQ ID NO: 1307883 - RNA, 19 nt, Artificial Sequence
  Description of Artificial Sequence: Synthetic oligonucleotide
cucuccuuacauggcuuuu

SEQ ID NO: 1307884 - RNA, 19 nt, Artificial Sequence
  Description of Artificial Sequence: Synthetic oligonucleotide
cguuuguuuccuguucaua

SEQ ID NO: 1307885 - RNA, 19 nt, Artificial Sequence
  Description of Artificial Sequence: Synthetic oligonucleotide
ccuauccugcaggcauuaa

SEQ ID NO: 1307886 - RNA, 19 nt, Artificial Sequence
  Description of Artificial Sequence: Synthetic oligonucleotide
ggaagaccuggagccgauu

SEQ ID NO: 1307887 - RNA, 19 nt, Artificial Sequence
  Description of Artificial Sequence: Synthetic oligonucleotide
cucugcccggugccacauu

SEQ ID NO: 1307888 - RNA, 19 nt, Artificial Sequence
  Description of Artificial Sequence: Synthetic oligonucleotide
gcaugccauuguagauauu

SEQ ID NO: 1307889 - RNA, 19 nt, Artificial Sequence
  Description of Artificial Sequence: Synthetic oligonucleotide
ccacaggaacgggcucucu

SEQ ID NO: 1307890 - RNA, 19 nt, Artificial Sequence
  Description of Artificial Sequence: Synthetic oligonucleotide
aauucuaucccucacauac

SEQ ID NO: 1307891 - RNA, 19 nt, Artificial Sequence
  Description of Artificial Sequence: Synthetic oligonucleotide
aauguauccauguagauuc

SEQ ID NO: 1307892 - RNA, 19 nt, Artificial Sequence
  Description of Artificial Sequence: Synthetic oligonucleotide
aguagaaugaauucuaucc

SEQ ID NO: 1307893 - RNA, 19 nt, Artificial Sequence
  Description of Artificial Sequence: Synthetic oligonucleotide
aaagcuguuaaaccaauac

SEQ ID NO: 1307894 - RNA, 19 nt, Artificial Sequence
  Description of Artificial Sequence: Synthetic oligonucleotide
cuuaguauaagccacaaag

SEQ ID NO: 1307895 - RNA, 19 nt, Artificial Sequence
  Description of Artificial Sequence: Synthetic oligonucleotide
caugcuuucaauuagacac

SEQ ID NO: 1307896 - RNA, 19 nt, Artificial Sequence
  Description of Artificial Sequence: Synthetic oligonucleotide
cucaacaucgcauugaugg

SEQ ID NO: 1307897 - RNA, 19 nt, Artificial Sequence
  Description of Artificial Sequence: Synthetic oligonucleotide
gaugauaggguauugauug

SEQ ID NO: 1307898 - RNA, 19 nt, Artificial Sequence
  Description of Artificial Sequence: Synthetic oligonucleotide
auaucuacugaauuuauuc

SEQ ID NO: 1307899 - RNA, 19 nt, Artificial Sequence
  Description of Artificial Sequence: Synthetic oligonucleotide
uucaauuagacacugagaa

SEQ ID NO: 1307900 - RNA, 19 nt, Artificial Sequence
  Description of Artificial Sequence: Synthetic oligonucleotide
uuuaaauuacccaaacaug

SEQ ID NO: 1307901 - RNA, 19 nt, Artificial Sequence
  Description of Artificial Sequence: Synthetic oligonucleotide
uaauaaacaagcaagcauc

SEQ ID NO: 1307902 - RNA, 19 nt, Artificial Sequence
  Description of Artificial Sequence: Synthetic oligonucleotide
aucugaaaugcucagcucc

SEQ ID NO: 1307903 - RNA, 19 nt, Artificial Sequence
  Description of Artificial Sequence: Synthetic oligonucleotide
uaguauaagccacaaagag

SEQ ID NO: 1307904 - RNA, 19 nt, Artificial Sequence
  Description of Artificial Sequence: Synthetic oligonucleotide
uuuucgauagcuccgaucu

SEQ ID NO: 1307905 - RNA, 19 nt, Artificial Sequence
  Description of Artificial Sequence: Synthetic oligonucleotide
uacugaaaagaacuaaucc

SEQ ID NO: 1307906 - RNA, 19 nt, Artificial Sequence
  Description of Artificial Sequence: Synthetic oligonucleotide
agcaucaguaagcagagac

SEQ ID NO: 1307907 - RNA, 19 nt, Artificial Sequence
  Description of Artificial Sequence: Synthetic oligonucleotide
cauuacugaacauuuaagc

SEQ ID NO: 1307908 - RNA, 19 nt, Artificial Sequence
  Description of Artificial Sequence: Synthetic oligonucleotide
aaaggaguuuugcuagugc

SEQ ID NO: 1307909 - RNA, 19 nt, Artificial Sequence
  Description of Artificial Sequence: Synthetic oligonucleotide
auuacagccuuuucgauag

SEQ ID NO: 1307910 - RNA, 19 nt, Artificial Sequence
  Description of Artificial Sequence: Synthetic oligonucleotide
acugaaaagaacuaaucca

SEQ ID NO: 1307911 - RNA, 19 nt, Artificial Sequence
  Description of Artificial Sequence: Synthetic oligonucleotide
auuacugaacauuuaagca

SEQ ID NO: 1307912 - RNA, 19 nt, Artificial Sequence
  Description of Artificial Sequence: Synthetic oligonucleotide
gaacuaauccaccauauac

SEQ ID NO: 1307913 - RNA, 19 nt, Artificial Sequence
  Description of Artificial Sequence: Synthetic oligonucleotide
cuuaaaggaguuuugcuag

SEQ ID NO: 1307914 - RNA, 19 nt, Artificial Sequence
  Description of Artificial Sequence: Synthetic oligonucleotide
caauugucauccaagagcc

SEQ ID NO: 1307915 - RNA, 19 nt, Artificial Sequence
  Description of Artificial Sequence: Synthetic oligonucleotide
aauuacccaaacaugacag

SEQ ID NO: 1307916 - RNA, 19 nt, Artificial Sequence
  Description of Artificial Sequence: Synthetic oligonucleotide
cuccuaauaaacaagcaag

SEQ ID NO: 1307917 - RNA, 19 nt, Artificial Sequence
  Description of Artificial Sequence: Synthetic oligonucleotide
aaagguugcaccaauuguc

SEQ ID NO: 1307918 - RNA, 19 nt, Artificial Sequence
  Description of Artificial Sequence: Synthetic oligonucleotide
uauacugccacugaguaca

SEQ ID NO: 1307919 - RNA, 19 nt, Artificial Sequence
  Description of Artificial Sequence: Synthetic oligonucleotide
aaauuacccaaacaugaca

SEQ ID NO: 1307920 - RNA, 19 nt, Artificial Sequence
  Description of Artificial Sequence: Synthetic oligonucleotide
aaagcugugaugagaaaac

SEQ ID NO: 1307921 - RNA, 19 nt, Artificial Sequence
  Description of Artificial Sequence: Synthetic oligonucleotide
uuaguauaagccacaaaga

SEQ ID NO: 1307922 - RNA, 19 nt, Artificial Sequence
  Description of Artificial Sequence: Synthetic oligonucleotide
cugaaaagaacuaauccac

SEQ ID NO: 1307923 - RNA, 19 nt, Artificial Sequence
  Description of Artificial Sequence: Synthetic oligonucleotide
uguuaagagccauugauuc

SEQ ID NO: 1307924 - RNA, 19 nt, Artificial Sequence
  Description of Artificial Sequence: Synthetic oligonucleotide
uauugauuguaccagcacu

SEQ ID NO: 1307925 - RNA, 19 nt, Artificial Sequence
  Description of Artificial Sequence: Synthetic oligonucleotide
uccuaauaaacaagcaagc

SEQ ID NO: 1307926 - RNA, 19 nt, Artificial Sequence
  Description of Artificial Sequence: Synthetic oligonucleotide
cauugauucuucgugaugg

SEQ ID NO: 1307927 - RNA, 19 nt, Artificial Sequence
  Description of Artificial Sequence: Synthetic oligonucleotide
agaaacauagaccccacug

SEQ ID NO: 1307928 - RNA, 19 nt, Artificial Sequence
  Description of Artificial Sequence: Synthetic oligonucleotide
uguuaaaccaauacucccu

SEQ ID NO: 1307929 - RNA, 19 nt, Artificial Sequence
  Description of Artificial Sequence: Synthetic oligonucleotide
auaggguauugauuguacc

SEQ ID NO: 1307930 - RNA, 19 nt, Artificial Sequence
  Description of Artificial Sequence: Synthetic oligonucleotide
agaaacuucucacugggug

SEQ ID NO: 1307931 - RNA, 19 nt, Artificial Sequence
  Description of Artificial Sequence: Synthetic oligonucleotide
aaccaauacucccugauaa

SEQ ID NO: 1307932 - RNA, 19 nt, Artificial Sequence
  Description of Artificial Sequence: Synthetic oligonucleotide
agcuguuaaaccaauacuc

SEQ ID NO: 1307933 - RNA, 19 nt, Artificial Sequence
  Description of Artificial Sequence: Synthetic oligonucleotide
uuacugaacauuuaagcau

SEQ ID NO: 1307934 - RNA, 19 nt, Artificial Sequence
  Description of Artificial Sequence: Synthetic oligonucleotide
acuaauccaccauauacug

SEQ ID NO: 1307935 - RNA, 19 nt, Artificial Sequence
  Description of Artificial Sequence: Synthetic oligonucleotide
aagcuguuaaaccaauacu

SEQ ID NO: 1307936 - RNA, 19 nt, Artificial Sequence
  Description of Artificial Sequence: Synthetic oligonucleotide
auguagauucucaacaucg

SEQ ID NO: 1307937 - RNA, 19 nt, Artificial Sequence
  Description of Artificial Sequence: Synthetic oligonucleotide
cauuuaagcauggugacag

SEQ ID NO: 1307938 - RNA, 19 nt, Artificial Sequence
  Description of Artificial Sequence: Synthetic oligonucleotide
aagccauaauagcacagag

SEQ ID NO: 1307939 - RNA, 19 nt, Artificial Sequence
  Description of Artificial Sequence: Synthetic oligonucleotide
guaguauauucccugcugg

SEQ ID NO: 1307940 - RNA, 19 nt, Artificial Sequence
  Description of Artificial Sequence: Synthetic oligonucleotide
ugcacguuugauuacuugc

SEQ ID NO: 1307941 - RNA, 19 nt, Artificial Sequence
  Description of Artificial Sequence: Synthetic oligonucleotide
aguauaagccacaaagagg

SEQ ID NO: 1307942 - RNA, 19 nt, Artificial Sequence
  Description of Artificial Sequence: Synthetic oligonucleotide
aaagugggcuggaaaaccc

SEQ ID NO: 1307943 - RNA, 19 nt, Artificial Sequence
  Description of Artificial Sequence: Synthetic oligonucleotide
aaggaguuuugcuagugca

SEQ ID NO: 1307944 - RNA, 19 nt, Artificial Sequence
  Description of Artificial Sequence: Synthetic oligonucleotide
agguguucuggcuaaugcc

SEQ ID NO: 1307945 - RNA, 19 nt, Artificial Sequence
  Description of Artificial Sequence: Synthetic oligonucleotide
ugucuugguaguauauucc

SEQ ID NO: 1307946 - RNA, 19 nt, Artificial Sequence
  Description of Artificial Sequence: Synthetic oligonucleotide
aaagaacuaauccaccaua

SEQ ID NO: 1307947 - RNA, 19 nt, Artificial Sequence
  Description of Artificial Sequence: Synthetic oligonucleotide
aacccuggaaggcaguguc

SEQ ID NO: 1307948 - RNA, 19 nt, Artificial Sequence
  Description of Artificial Sequence: Synthetic oligonucleotide
uaaauuacccaaacaugac

SEQ ID NO: 1307949 - RNA, 19 nt, Artificial Sequence
  Description of Artificial Sequence: Synthetic oligonucleotide
aguucauuacagcaggugu

SEQ ID NO: 1307950 - RNA, 19 nt, Artificial Sequence
  Description of Artificial Sequence: Synthetic oligonucleotide
cauggugggugauacaccg

SEQ ID NO: 1307951 - RNA, 19 nt, Artificial Sequence
  Description of Artificial Sequence: Synthetic oligonucleotide
acauagaccccacugaaga

SEQ ID NO: 1307952 - RNA, 19 nt, Artificial Sequence
  Description of Artificial Sequence: Synthetic oligonucleotide
auuucugcacguuugauua

SEQ ID NO: 1307953 - RNA, 19 nt, Artificial Sequence
  Description of Artificial Sequence: Synthetic oligonucleotide
gauacaccgguucacuaag

SEQ ID NO: 1307954 - RNA, 19 nt, Artificial Sequence
  Description of Artificial Sequence: Synthetic oligonucleotide
aauucuucacaagugggga

SEQ ID NO: 1307955 - RNA, 19 nt, Artificial Sequence
  Description of Artificial Sequence: Synthetic oligonucleotide
cuguuaaaccaauacuccc

SEQ ID NO: 1307956 - RNA, 19 nt, Artificial Sequence
  Description of Artificial Sequence: Synthetic oligonucleotide
uaggguauugauuguacca

SEQ ID NO: 1307957 - RNA, 19 nt, Artificial Sequence
  Description of Artificial Sequence: Synthetic oligonucleotide
uucuaucccucacauacug

SEQ ID NO: 1307958 - RNA, 19 nt, Artificial Sequence
  Description of Artificial Sequence: Synthetic oligonucleotide
ugaauucuaucccucacau

SEQ ID NO: 1307959 - RNA, 19 nt, Artificial Sequence
  Description of Artificial Sequence: Synthetic oligonucleotide
cuggcuaaugccaaugcag

SEQ ID NO: 1307960 - RNA, 19 nt, Artificial Sequence
  Description of Artificial Sequence: Synthetic oligonucleotide
ccuaaucuuaguauaagcc

SEQ ID NO: 1307961 - RNA, 19 nt, Artificial Sequence
  Description of Artificial Sequence: Synthetic oligonucleotide
auaguugcaacucgcauaa

SEQ ID NO: 1307962 - RNA, 19 nt, Artificial Sequence
  Description of Artificial Sequence: Synthetic oligonucleotide
ucaacaucgcauugauggg

SEQ ID NO: 1307963 - RNA, 19 nt, Artificial Sequence
  Description of Artificial Sequence: Synthetic oligonucleotide
aauaaacaagcaagcauca

SEQ ID NO: 1307964 - RNA, 19 nt, Artificial Sequence
  Description of Artificial Sequence: Synthetic oligonucleotide
cuaucccucacauacugag

SEQ ID NO: 1307965 - RNA, 19 nt, Artificial Sequence
  Description of Artificial Sequence: Synthetic oligonucleotide
gaucauacuuuugaacucc

SEQ ID NO: 1307966 - RNA, 19 nt, Artificial Sequence
  Description of Artificial Sequence: Synthetic oligonucleotide
auugauuguaccagcacuc

SEQ ID NO: 1307967 - RNA, 19 nt, Artificial Sequence
  Description of Artificial Sequence: Synthetic oligonucleotide
uuuugcuagugcaaacugu

SEQ ID NO: 1307968 - RNA, 19 nt, Artificial Sequence
  Description of Artificial Sequence: Synthetic oligonucleotide
agcaacaaaccaccuuccc

SEQ ID NO: 1307969 - RNA, 19 nt, Artificial Sequence
  Description of Artificial Sequence: Synthetic oligonucleotide
agagccuuucaucaugaag

SEQ ID NO: 1307970 - RNA, 19 nt, Artificial Sequence
  Description of Artificial Sequence: Synthetic oligonucleotide
cuagcauaguugcaacucg

SEQ ID NO: 1307971 - RNA, 19 nt, Artificial Sequence
  Description of Artificial Sequence: Synthetic oligonucleotide
uuggaagauaucuacugaa

SEQ ID NO: 1307972 - RNA, 19 nt, Artificial Sequence
  Description of Artificial Sequence: Synthetic oligonucleotide
uagauucucaacaucgcau

SEQ ID NO: 1307973 - RNA, 19 nt, Artificial Sequence
  Description of Artificial Sequence: Synthetic oligonucleotide
ugaacuccauacauuggug

SEQ ID NO: 1307974 - RNA, 19 nt, Artificial Sequence
  Description of Artificial Sequence: Synthetic oligonucleotide
gacagguuaucuucuaaac

SEQ ID NO: 1307975 - RNA, 19 nt, Artificial Sequence
  Description of Artificial Sequence: Synthetic oligonucleotide
aaaaggcaagccugaagga

SEQ ID NO: 1307976 - RNA, 19 nt, Artificial Sequence
  Description of Artificial Sequence: Synthetic oligonucleotide
aagauaucuacugaauuua

SEQ ID NO: 1307977 - RNA, 19 nt, Artificial Sequence
  Description of Artificial Sequence: Synthetic oligonucleotide
aucacaagcggccacuuca

SEQ ID NO: 1307978 - RNA, 19 nt, Artificial Sequence
  Description of Artificial Sequence: Synthetic oligonucleotide
cuaagaucgucagaggagc

SEQ ID NO: 1307979 - RNA, 19 nt, Artificial Sequence
  Description of Artificial Sequence: Synthetic oligonucleotide
acaaauuugcuguauuuua

SEQ ID NO: 1307980 - RNA, 19 nt, Artificial Sequence
  Description of Artificial Sequence: Synthetic oligonucleotide
gauagcuccgaucucauua

SEQ ID NO: 1307981 - RNA, 19 nt, Artificial Sequence
  Description of Artificial Sequence: Synthetic oligonucleotide
uuaucuucuaaaccuuaaa

SEQ ID NO: 1307982 - RNA, 19 nt, Artificial Sequence
  Description of Artificial Sequence: Synthetic oligonucleotide
aaugcucagcuccggucac

SEQ ID NO: 1307983 - RNA, 19 nt, Artificial Sequence
  Description of Artificial Sequence: Synthetic oligonucleotide
cugcuccuaauaaacaagc

SEQ ID NO: 1307984 - RNA, 19 nt, Artificial Sequence
  Description of Artificial Sequence: Synthetic oligonucleotide
ucuaccacgaggcuccccu

SEQ ID NO: 1307985 - RNA, 19 nt, Artificial Sequence
  Description of Artificial Sequence: Synthetic oligonucleotide
aagagccauugauucuucg

SEQ ID NO: 1307986 - RNA, 19 nt, Artificial Sequence
  Description of Artificial Sequence: Synthetic oligonucleotide
uugcaacucgcauaaauau

SEQ ID NO: 1307987 - RNA, 19 nt, Artificial Sequence
  Description of Artificial Sequence: Synthetic oligonucleotide
guugcaccaauugucaucc

SEQ ID NO: 1307988 - RNA, 19 nt, Artificial Sequence
  Description of Artificial Sequence: Synthetic oligonucleotide
auagcuccgaucucauuag

SEQ ID NO: 1307989 - RNA, 19 nt, Artificial Sequence
  Description of Artificial Sequence: Synthetic oligonucleotide
guauauucccugcugggug

SEQ ID NO: 1307990 - RNA, 19 nt, Artificial Sequence
  Description of Artificial Sequence: Synthetic oligonucleotide
gauuacuugcuguguauca

SEQ ID NO: 1307991 - RNA, 19 nt, Artificial Sequence
  Description of Artificial Sequence: Synthetic oligonucleotide
uguauauuuggaagauauc

SEQ ID NO: 1307992 - RNA, 19 nt, Artificial Sequence
  Description of Artificial Sequence: Synthetic oligonucleotide
aaauuacagccuuuucgau

SEQ ID NO: 1307993 - RNA, 19 nt, Artificial Sequence
  Description of Artificial Sequence: Synthetic oligonucleotide
caguugcuagcauaguugc

SEQ ID NO: 1307994 - RNA, 19 nt, Artificial Sequence
  Description of Artificial Sequence: Synthetic oligonucleotide
agaggccucccacaauacc

SEQ ID NO: 1307995 - RNA, 19 nt, Artificial Sequence
  Description of Artificial Sequence: Synthetic oligonucleotide
aguugcaacucgcauaaau

SEQ ID NO: 1307996 - RNA, 19 nt, Artificial Sequence
  Description of Artificial Sequence: Synthetic oligonucleotide
gaaagugggcuggaaaacc

SEQ ID NO: 1307997 - RNA, 19 nt, Artificial Sequence
  Description of Artificial Sequence: Synthetic oligonucleotide
ugauaaguacauguaagua

SEQ ID NO: 1307998 - RNA, 19 nt, Artificial Sequence
  Description of Artificial Sequence: Synthetic oligonucleotide
ucaauuagacacugagaaa

SEQ ID NO: 1307999 - RNA, 19 nt, Artificial Sequence
  Description of Artificial Sequence: Synthetic oligonucleotide
ucuugguaguauauucccu

SEQ ID NO: 1308000 - RNA, 19 nt, Artificial Sequence
  Description of Artificial Sequence: Synthetic oligonucleotide
ucccaagccauaauagcac

SEQ ID NO: 1308001 - RNA, 19 nt, Artificial Sequence
  Description of Artificial Sequence: Synthetic oligonucleotide
agccauaauagcacagagc

SEQ ID NO: 1308002 - RNA, 19 nt, Artificial Sequence
  Description of Artificial Sequence: Synthetic oligonucleotide
ugcuagugcaaacuguaau

SEQ ID NO: 1308003 - RNA, 19 nt, Artificial Sequence
  Description of Artificial Sequence: Synthetic oligonucleotide
uacaccgguucacuaagca

SEQ ID NO: 1308004 - RNA, 19 nt, Artificial Sequence
  Description of Artificial Sequence: Synthetic oligonucleotide
ugacagguuaucuucuaaa

SEQ ID NO: 1308005 - RNA, 19 nt, Artificial Sequence
  Description of Artificial Sequence: Synthetic oligonucleotide
ccugauaaguacauguaag

SEQ ID NO: 1308006 - RNA, 19 nt, Artificial Sequence
  Description of Artificial Sequence: Synthetic oligonucleotide
aggguauugauuguaccag

SEQ ID NO: 1308007 - RNA, 19 nt, Artificial Sequence
  Description of Artificial Sequence: Synthetic oligonucleotide
uucuggcuaaugccaaugc

SEQ ID NO: 1308008 - RNA, 19 nt, Artificial Sequence
  Description of Artificial Sequence: Synthetic oligonucleotide
auuuaagcauggugacagg

SEQ ID NO: 1308009 - RNA, 19 nt, Artificial Sequence
  Description of Artificial Sequence: Synthetic oligonucleotide
ugauacaccgguucacuaa

SEQ ID NO: 1308010 - RNA, 19 nt, Artificial Sequence
  Description of Artificial Sequence: Synthetic oligonucleotide
uacagaguggcaccagcca

SEQ ID NO: 1308011 - RNA, 19 nt, Artificial Sequence
  Description of Artificial Sequence: Synthetic oligonucleotide
uauccauguagauucucaa

SEQ ID NO: 1308012 - RNA, 19 nt, Artificial Sequence
  Description of Artificial Sequence: Synthetic oligonucleotide
accaauacucccugauaag

SEQ ID NO: 1308013 - RNA, 19 nt, Artificial Sequence
  Description of Artificial Sequence: Synthetic oligonucleotide
gcuagugcaaacuguaaug

SEQ ID NO: 1308014 - RNA, 19 nt, Artificial Sequence
  Description of Artificial Sequence: Synthetic oligonucleotide
gaugcuuagggacugggcu

SEQ ID NO: 1308015 - RNA, 19 nt, Artificial Sequence
  Description of Artificial Sequence: Synthetic oligonucleotide
ucgcauaaauauauuuaau

SEQ ID NO: 1308016 - RNA, 19 nt, Artificial Sequence
  Description of Artificial Sequence: Synthetic oligonucleotide
aaaccuuaaaggaguuuug

SEQ ID NO: 1308017 - RNA, 19 nt, Artificial Sequence
  Description of Artificial Sequence: Synthetic oligonucleotide
aagaaacauagaccccacu

SEQ ID NO: 1308018 - RNA, 19 nt, Artificial Sequence
  Description of Artificial Sequence: Synthetic oligonucleotide
uaauguauccauguagauu

SEQ ID NO: 1308019 - RNA, 19 nt, Artificial Sequence
  Description of Artificial Sequence: Synthetic oligonucleotide
uggguguuaagagccauug

SEQ ID NO: 1308020 - RNA, 19 nt, Artificial Sequence
  Description of Artificial Sequence: Synthetic oligonucleotide
uuaagcauggugacagguu

SEQ ID NO: 1308021 - RNA, 19 nt, Artificial Sequence
  Description of Artificial Sequence: Synthetic oligonucleotide
aguguccggagacacagga

SEQ ID NO: 1308022 - RNA, 19 nt, Artificial Sequence
  Description of Artificial Sequence: Synthetic oligonucleotide
uuaaaggaguuuugcuagu

SEQ ID NO: 1308023 - RNA, 19 nt, Artificial Sequence
  Description of Artificial Sequence: Synthetic oligonucleotide
ugaaaugcucagcuccggu

SEQ ID NO: 1308024 - RNA, 19 nt, Artificial Sequence
  Description of Artificial Sequence: Synthetic oligonucleotide
uaagaucgucagaggagcc

SEQ ID NO: 1308025 - RNA, 19 nt, Artificial Sequence
  Description of Artificial Sequence: Synthetic oligonucleotide
agagccauugauucuucgu

SEQ ID NO: 1308026 - RNA, 19 nt, Artificial Sequence
  Description of Artificial Sequence: Synthetic oligonucleotide
aagguugcaccaauuguca

SEQ ID NO: 1308027 - RNA, 19 nt, Artificial Sequence
  Description of Artificial Sequence: Synthetic oligonucleotide
gccauaauagcacagagcu

SEQ ID NO: 1308028 - RNA, 19 nt, Artificial Sequence
  Description of Artificial Sequence: Synthetic oligonucleotide
gcagagacaucacaagcgg

SEQ ID NO: 1308029 - RNA, 19 nt, Artificial Sequence
  Description of Artificial Sequence: Synthetic oligonucleotide
ugcaacucgcauaaauaua

SEQ ID NO: 1308030 - RNA, 19 nt, Artificial Sequence
  Description of Artificial Sequence: Synthetic oligonucleotide
cagguguucuggcuaaugc

SEQ ID NO: 1308031 - RNA, 19 nt, Artificial Sequence
  Description of Artificial Sequence: Synthetic oligonucleotide
ugggugauacaccgguuca

SEQ ID NO: 1308032 - RNA, 19 nt, Artificial Sequence
  Description of Artificial Sequence: Synthetic oligonucleotide
agauucucaacaucgcauu

SEQ ID NO: 1308033 - RNA, 19 nt, Artificial Sequence
  Description of Artificial Sequence: Synthetic oligonucleotide
acaccgguucacuaagcag

SEQ ID NO: 1308034 - RNA, 19 nt, Artificial Sequence
  Description of Artificial Sequence: Synthetic oligonucleotide
ugcaccaauugucauccaa

SEQ ID NO: 1308035 - RNA, 19 nt, Artificial Sequence
  Description of Artificial Sequence: Synthetic oligonucleotide
guauugauuguaccagcac

SEQ ID NO: 1308036 - RNA, 19 nt, Artificial Sequence
  Description of Artificial Sequence: Synthetic oligonucleotide
uggaaaacccuggaaggca

SEQ ID NO: 1308037 - RNA, 19 nt, Artificial Sequence
  Description of Artificial Sequence: Synthetic oligonucleotide
ugacuaucugcuccuaaua

SEQ ID NO: 1308038 - RNA, 19 nt, Artificial Sequence
  Description of Artificial Sequence: Synthetic oligonucleotide
uccggucaccucuaccacg

SEQ ID NO: 1308039 - RNA, 19 nt, Artificial Sequence
  Description of Artificial Sequence: Synthetic oligonucleotide
ugcgcacauggccacagca

SEQ ID NO: 1308040 - RNA, 19 nt, Artificial Sequence
  Description of Artificial Sequence: Synthetic oligonucleotide
ugguaguauauucccugcu

SEQ ID NO: 1308041 - RNA, 19 nt, Artificial Sequence
  Description of Artificial Sequence: Synthetic oligonucleotide
augacuaucugcuccuaau

SEQ ID NO: 1308042 - RNA, 19 nt, Artificial Sequence
  Description of Artificial Sequence: Synthetic oligonucleotide
uugauuguaccagcacucc

SEQ ID NO: 1308043 - RNA, 19 nt, Artificial Sequence
  Description of Artificial Sequence: Synthetic oligonucleotide
auccaagccagaugcuuag

SEQ ID NO: 1308044 - RNA, 19 nt, Artificial Sequence
  Description of Artificial Sequence: Synthetic oligonucleotide
uucacaaguggggaggccu

SEQ ID NO: 1308045 - RNA, 19 nt, Artificial Sequence
  Description of Artificial Sequence: Synthetic oligonucleotide
auuacccaaacaugacagu

SEQ ID NO: 1308046 - RNA, 19 nt, Artificial Sequence
  Description of Artificial Sequence: Synthetic oligonucleotide
ucuaucccucacauacuga

SEQ ID NO: 1308047 - RNA, 19 nt, Artificial Sequence
  Description of Artificial Sequence: Synthetic oligonucleotide
uacauguaaguagaaugaa

SEQ ID NO: 1308048 - RNA, 19 nt, Artificial Sequence
  Description of Artificial Sequence: Synthetic oligonucleotide
aggaacauacugaaaagaa

SEQ ID NO: 1308049 - RNA, 19 nt, Artificial Sequence
  Description of Artificial Sequence: Synthetic oligonucleotide
agccauugauucuucguga

SEQ ID NO: 1308050 - RNA, 19 nt, Artificial Sequence
  Description of Artificial Sequence: Synthetic oligonucleotide
cuuuucgauagcuccgauc

SEQ ID NO: 1308051 - RNA, 19 nt, Artificial Sequence
  Description of Artificial Sequence: Synthetic oligonucleotide
gcaagcaucaguaagcaga

SEQ ID NO: 1308052 - RNA, 19 nt, Artificial Sequence
  Description of Artificial Sequence: Synthetic oligonucleotide
uuucccacggugaauccua

SEQ ID NO: 1308053 - RNA, 19 nt, Artificial Sequence
  Description of Artificial Sequence: Synthetic oligonucleotide
aguauauucccugcugggu

SEQ ID NO: 1308054 - RNA, 19 nt, Artificial Sequence
  Description of Artificial Sequence: Synthetic oligonucleotide
auagaccccacugaagaca

SEQ ID NO: 1308055 - RNA, 19 nt, Artificial Sequence
  Description of Artificial Sequence: Synthetic oligonucleotide
caccgguucacuaagcaga

SEQ ID NO: 1308056 - RNA, 19 nt, Artificial Sequence
  Description of Artificial Sequence: Synthetic oligonucleotide
gaguuuugcuagugcaaac

SEQ ID NO: 1308057 - RNA, 19 nt, Artificial Sequence
  Description of Artificial Sequence: Synthetic oligonucleotide
cauaguugcaacucgcaua

SEQ ID NO: 1308058 - RNA, 19 nt, Artificial Sequence
  Description of Artificial Sequence: Synthetic oligonucleotide
cagagacaucacaagcggc

SEQ ID NO: 1308059 - RNA, 19 nt, Artificial Sequence
  Description of Artificial Sequence: Synthetic oligonucleotide
ccuaagaucgucagaggag

SEQ ID NO: 1308060 - RNA, 19 nt, Artificial Sequence
  Description of Artificial Sequence: Synthetic oligonucleotide
cuucgugauggaauucuuc

SEQ ID NO: 1308061 - RNA, 19 nt, Artificial Sequence
  Description of Artificial Sequence: Synthetic oligonucleotide
ggaagaaacauagacccca

SEQ ID NO: 1308062 - RNA, 19 nt, Artificial Sequence
  Description of Artificial Sequence: Synthetic oligonucleotide
caagcggccacuucacuuc

SEQ ID NO: 1308063 - RNA, 19 nt, Artificial Sequence
  Description of Artificial Sequence: Synthetic oligonucleotide
ugauuacuugcuguguauc

SEQ ID NO: 1308064 - RNA, 19 nt, Artificial Sequence
  Description of Artificial Sequence: Synthetic oligonucleotide
uugaugggaucauacuuuu

SEQ ID NO: 1308065 - RNA, 19 nt, Artificial Sequence
  Description of Artificial Sequence: Synthetic oligonucleotide
agcuccgaucucauuagac

SEQ ID NO: 1308066 - RNA, 19 nt, Artificial Sequence
  Description of Artificial Sequence: Synthetic oligonucleotide
cauagaccccacugaagac

SEQ ID NO: 1308067 - RNA, 19 nt, Artificial Sequence
  Description of Artificial Sequence: Synthetic oligonucleotide
ucacaagcggccacuucac

SEQ ID NO: 1308068 - RNA, 19 nt, Artificial Sequence
  Description of Artificial Sequence: Synthetic oligonucleotide
acugaacauuuaagcaugg

SEQ ID NO: 1308069 - RNA, 19 nt, Artificial Sequence
  Description of Artificial Sequence: Synthetic oligonucleotide
ggaacauacugaaaagaac

SEQ ID NO: 1308070 - RNA, 19 nt, Artificial Sequence
  Description of Artificial Sequence: Synthetic oligonucleotide
agcuccggucaccucuacc

SEQ ID NO: 1308071 - RNA, 19 nt, Artificial Sequence
  Description of Artificial Sequence: Synthetic oligonucleotide
uugcuagcauaguugcaac

SEQ ID NO: 1308072 - RNA, 19 nt, Artificial Sequence
  Description of Artificial Sequence: Synthetic oligonucleotide
agaacuaauccaccauaua

SEQ ID NO: 1308073 - RNA, 19 nt, Artificial Sequence
  Description of Artificial Sequence: Synthetic oligonucleotide
ugggcuggaaaacccugga

SEQ ID NO: 1308074 - RNA, 19 nt, Artificial Sequence
  Description of Artificial Sequence: Synthetic oligonucleotide
cacguuugauuacuugcug

SEQ ID NO: 1308075 - RNA, 19 nt, Artificial Sequence
  Description of Artificial Sequence: Synthetic oligonucleotide
ugauaggguauugauugua

SEQ ID NO: 1308076 - RNA, 19 nt, Artificial Sequence
  Description of Artificial Sequence: Synthetic oligonucleotide
uccgaugauaggguauuga

SEQ ID NO: 1308077 - RNA, 19 nt, Artificial Sequence
  Description of Artificial Sequence: Synthetic oligonucleotide
augggaucauacuuuugaa

SEQ ID NO: 1308078 - RNA, 19 nt, Artificial Sequence
  Description of Artificial Sequence: Synthetic oligonucleotide
cugauaaguacauguaagu

SEQ ID NO: 1308079 - RNA, 19 nt, Artificial Sequence
  Description of Artificial Sequence: Synthetic oligonucleotide
augauaggguauugauugu

SEQ ID NO: 1308080 - RNA, 19 nt, Artificial Sequence
  Description of Artificial Sequence: Synthetic oligonucleotide
gaagaaacauagaccccac

SEQ ID NO: 1308081 - RNA, 19 nt, Artificial Sequence
  Description of Artificial Sequence: Synthetic oligonucleotide
ugggcuccgaugauagggu

SEQ ID NO: 1308082 - RNA, 19 nt, Artificial Sequence
  Description of Artificial Sequence: Synthetic oligonucleotide
gaggccucccacaauacca

SEQ ID NO: 1308083 - RNA, 19 nt, Artificial Sequence
  Description of Artificial Sequence: Synthetic oligonucleotide
uaccacgaggcuccccucc

SEQ ID NO: 1308084 - RNA, 19 nt, Artificial Sequence
  Description of Artificial Sequence: Synthetic oligonucleotide
agcauggugacagguuauc

SEQ ID NO: 1308085 - RNA, 19 nt, Artificial Sequence
  Description of Artificial Sequence: Synthetic oligonucleotide
acauguaaguagaaugaau

SEQ ID NO: 1308086 - RNA, 19 nt, Artificial Sequence
  Description of Artificial Sequence: Synthetic oligonucleotide
gucaaagcugugaugagaa

SEQ ID NO: 1308087 - RNA, 19 nt, Artificial Sequence
  Description of Artificial Sequence: Synthetic oligonucleotide
acaagcggccacuucacuu

SEQ ID NO: 1308088 - RNA, 19 nt, Artificial Sequence
  Description of Artificial Sequence: Synthetic oligonucleotide
gauucuucgugauggaauu

SEQ ID NO: 1308089 - RNA, 19 nt, Artificial Sequence
  Description of Artificial Sequence: Synthetic oligonucleotide
gugggugauacaccgguuc

SEQ ID NO: 1308090 - RNA, 19 nt, Artificial Sequence
  Description of Artificial Sequence: Synthetic oligonucleotide
ggaucauacuuuugaacuc

SEQ ID NO: 1308091 - RNA, 19 nt, Artificial Sequence
  Description of Artificial Sequence: Synthetic oligonucleotide
acauuuaagcauggugaca

SEQ ID NO: 1308092 - RNA, 19 nt, Artificial Sequence
  Description of Artificial Sequence: Synthetic oligonucleotide
uggcugcaaagguugcacc

SEQ ID NO: 1308093 - RNA, 19 nt, Artificial Sequence
  Description of Artificial Sequence: Synthetic oligonucleotide
acgaggcuccccuccgggc

SEQ ID NO: 1308094 - RNA, 19 nt, Artificial Sequence
  Description of Artificial Sequence: Synthetic oligonucleotide
uccgaucucauuagacauu

SEQ ID NO: 1308095 - RNA, 19 nt, Artificial Sequence
  Description of Artificial Sequence: Synthetic oligonucleotide
accacgaggcuccccuccg

SEQ ID NO: 1308096 - RNA, 19 nt, Artificial Sequence
  Description of Artificial Sequence: Synthetic oligonucleotide
guugcaacucgcauaaaua

SEQ ID NO: 1308097 - RNA, 19 nt, Artificial Sequence
  Description of Artificial Sequence: Synthetic oligonucleotide
cucccugauaaguacaugu

SEQ ID NO: 1308098 - RNA, 19 nt, Artificial Sequence
  Description of Artificial Sequence: Synthetic oligonucleotide
auacaccgguucacuaagc

SEQ ID NO: 1308099 - RNA, 19 nt, Artificial Sequence
  Description of Artificial Sequence: Synthetic oligonucleotide
uccaagagccuuucaucau

SEQ ID NO: 1308100 - RNA, 19 nt, Artificial Sequence
  Description of Artificial Sequence: Synthetic oligonucleotide
ucaaagcugugaugagaaa

SEQ ID NO: 1308101 - RNA, 19 nt, Artificial Sequence
  Description of Artificial Sequence: Synthetic oligonucleotide
guuaagagccauugauucu

SEQ ID NO: 1308102 - RNA, 19 nt, Artificial Sequence
  Description of Artificial Sequence: Synthetic oligonucleotide
caauacucccugauaagua

SEQ ID NO: 1308103 - RNA, 19 nt, Artificial Sequence
  Description of Artificial Sequence: Synthetic oligonucleotide
aggcaguguccggagacac

SEQ ID NO: 1308104 - RNA, 19 nt, Artificial Sequence
  Description of Artificial Sequence: Synthetic oligonucleotide
ccaagccagaugcuuaggg

SEQ ID NO: 1308105 - RNA, 19 nt, Artificial Sequence
  Description of Artificial Sequence: Synthetic oligonucleotide
gugcaaacuguaaugacua

SEQ ID NO: 1308106 - RNA, 19 nt, Artificial Sequence
  Description of Artificial Sequence: Synthetic oligonucleotide
acaucgcauugaugggauc

SEQ ID NO: 1308107 - RNA, 19 nt, Artificial Sequence
  Description of Artificial Sequence: Synthetic oligonucleotide
caucgcauugaugggauca

SEQ ID NO: 1308108 - RNA, 19 nt, Artificial Sequence
  Description of Artificial Sequence: Synthetic oligonucleotide
uuucgauagcuccgaucuc

SEQ ID NO: 1308109 - RNA, 19 nt, Artificial Sequence
  Description of Artificial Sequence: Synthetic oligonucleotide
ugcagacaaagcuguuaaa

SEQ ID NO: 1308110 - RNA, 19 nt, Artificial Sequence
  Description of Artificial Sequence: Synthetic oligonucleotide
gguugcaccaauugucauc

SEQ ID NO: 1308111 - RNA, 19 nt, Artificial Sequence
  Description of Artificial Sequence: Synthetic oligonucleotide
aagcggccacuucacuucu

SEQ ID NO: 1308112 - RNA, 19 nt, Artificial Sequence
  Description of Artificial Sequence: Synthetic oligonucleotide
ugcaaacuguaaugacuau

SEQ ID NO: 1308113 - RNA, 19 nt, Artificial Sequence
  Description of Artificial Sequence: Synthetic oligonucleotide
cagaugcuuagggacuggg

SEQ ID NO: 1308114 - RNA, 19 nt, Artificial Sequence
  Description of Artificial Sequence: Synthetic oligonucleotide
agauaucuacugaauuuau

SEQ ID NO: 1308115 - RNA, 19 nt, Artificial Sequence
  Description of Artificial Sequence: Synthetic oligonucleotide
uguucuggcuaaugccaau

SEQ ID NO: 1308116 - RNA, 19 nt, Artificial Sequence
  Description of Artificial Sequence: Synthetic oligonucleotide
gcaccaauugucauccaag

SEQ ID NO: 1308117 - RNA, 19 nt, Artificial Sequence
  Description of Artificial Sequence: Synthetic oligonucleotide
caaagguugcaccaauugu

SEQ ID NO: 1308118 - RNA, 19 nt, Artificial Sequence
  Description of Artificial Sequence: Synthetic oligonucleotide
ucgauagcuccgaucucau

SEQ ID NO: 1308119 - RNA, 19 nt, Artificial Sequence
  Description of Artificial Sequence: Synthetic oligonucleotide
gguauugauuguaccagca

SEQ ID NO: 1308120 - RNA, 19 nt, Artificial Sequence
  Description of Artificial Sequence: Synthetic oligonucleotide
gcuccgaucucauuagaca

SEQ ID NO: 1308121 - RNA, 19 nt, Artificial Sequence
  Description of Artificial Sequence: Synthetic oligonucleotide
uccgggccagccaaaccga

SEQ ID NO: 1308122 - RNA, 19 nt, Artificial Sequence
  Description of Artificial Sequence: Synthetic oligonucleotide
auacucccugauaaguaca

SEQ ID NO: 1308123 - RNA, 19 nt, Artificial Sequence
  Description of Artificial Sequence: Synthetic oligonucleotide
gcuagcauaguugcaacuc

SEQ ID NO: 1308124 - RNA, 19 nt, Artificial Sequence
  Description of Artificial Sequence: Synthetic oligonucleotide
gaauucuaucccucacaua

SEQ ID NO: 1308125 - RNA, 19 nt, Artificial Sequence
  Description of Artificial Sequence: Synthetic oligonucleotide
aacucuugucuugguagua

SEQ ID NO: 1308126 - RNA, 19 nt, Artificial Sequence
  Description of Artificial Sequence: Synthetic oligonucleotide
gcuaaugccaaugcagaca

SEQ ID NO: 1308127 - RNA, 19 nt, Artificial Sequence
  Description of Artificial Sequence: Synthetic oligonucleotide
acugcacccaucacaccag

SEQ ID NO: 1308128 - RNA, 19 nt, Artificial Sequence
  Description of Artificial Sequence: Synthetic oligonucleotide
agugggcuggaaaacccug

SEQ ID NO: 1308129 - RNA, 19 nt, Artificial Sequence
  Description of Artificial Sequence: Synthetic oligonucleotide
caacaucgcauugauggga

SEQ ID NO: 1308130 - RNA, 19 nt, Artificial Sequence
  Description of Artificial Sequence: Synthetic oligonucleotide
gagcucacgaccucccucu

SEQ ID NO: 1308131 - RNA, 19 nt, Artificial Sequence
  Description of Artificial Sequence: Synthetic oligonucleotide
ggcuaaugccaaugcagac

SEQ ID NO: 1308132 - RNA, 19 nt, Artificial Sequence
  Description of Artificial Sequence: Synthetic oligonucleotide
agccaaaccgagagcucac

SEQ ID NO: 1308133 - RNA, 19 nt, Artificial Sequence
  Description of Artificial Sequence: Synthetic oligonucleotide
caucaguaagcagagacau

SEQ ID NO: 1308134 - RNA, 19 nt, Artificial Sequence
  Description of Artificial Sequence: Synthetic oligonucleotide
gugacagguuaucuucuaa

SEQ ID NO: 1308135 - RNA, 19 nt, Artificial Sequence
  Description of Artificial Sequence: Synthetic oligonucleotide
gcaugcuuucaauuagaca

SEQ ID NO: 1308136 - RNA, 19 nt, Artificial Sequence
  Description of Artificial Sequence: Synthetic oligonucleotide
aagcauggugacagguuau

SEQ ID NO: 1308137 - RNA, 19 nt, Artificial Sequence
  Description of Artificial Sequence: Synthetic oligonucleotide
cuuuugaacuccauacauu

SEQ ID NO: 1308138 - RNA, 19 nt, Artificial Sequence
  Description of Artificial Sequence: Synthetic oligonucleotide
aggaguuuugcuagugcaa

SEQ ID NO: 1308139 - RNA, 19 nt, Artificial Sequence
  Description of Artificial Sequence: Synthetic oligonucleotide
agcggugcucccauguuca

SEQ ID NO: 1308140 - RNA, 19 nt, Artificial Sequence
  Description of Artificial Sequence: Synthetic oligonucleotide
gauaucuacugaauuuauu

SEQ ID NO: 1308141 - RNA, 19 nt, Artificial Sequence
  Description of Artificial Sequence: Synthetic oligonucleotide
ggccaguuuucccacggug

SEQ ID NO: 1308142 - RNA, 19 nt, Artificial Sequence
  Description of Artificial Sequence: Synthetic oligonucleotide
cacggugaauccuaacucu

SEQ ID NO: 1308143 - RNA, 19 nt, Artificial Sequence
  Description of Artificial Sequence: Synthetic oligonucleotide
ucagcuccggucaccucua

SEQ ID NO: 1308144 - RNA, 19 nt, Artificial Sequence
  Description of Artificial Sequence: Synthetic oligonucleotide
auaauagcacagagcucca

SEQ ID NO: 1308145 - RNA, 19 nt, Artificial Sequence
  Description of Artificial Sequence: Synthetic oligonucleotide
agguugcaccaauugucau

SEQ ID NO: 1308146 - RNA, 19 nt, Artificial Sequence
  Description of Artificial Sequence: Synthetic oligonucleotide
guccggagacacaggagcc

SEQ ID NO: 1308147 - RNA, 19 nt, Artificial Sequence
  Description of Artificial Sequence: Synthetic oligonucleotide
cuccgaucucauuagacau

SEQ ID NO: 1308148 - RNA, 19 nt, Artificial Sequence
  Description of Artificial Sequence: Synthetic oligonucleotide
ggugaauccuaacucuugu

SEQ ID NO: 1308149 - RNA, 19 nt, Artificial Sequence
  Description of Artificial Sequence: Synthetic oligonucleotide
gaucgucagaggagccacc

SEQ ID NO: 1308150 - RNA, 19 nt, Artificial Sequence
  Description of Artificial Sequence: Synthetic oligonucleotide
ggaguuuugcuagugcaaa

SEQ ID NO: 1308151 - RNA, 19 nt, Artificial Sequence
  Description of Artificial Sequence: Synthetic oligonucleotide
ccacggugaauccuaacuc

SEQ ID NO: 1308152 - RNA, 19 nt, Artificial Sequence
  Description of Artificial Sequence: Synthetic oligonucleotide
guuugauuacuugcugugu

SEQ ID NO: 1308153 - RNA, 19 nt, Artificial Sequence
  Description of Artificial Sequence: Synthetic oligonucleotide
cagccaaaccgagagcuca

SEQ ID NO: 1308154 - RNA, 19 nt, Artificial Sequence
  Description of Artificial Sequence: Synthetic oligonucleotide
gguucacuaagcagaucug

SEQ ID NO: 1308155 - RNA, 19 nt, Artificial Sequence
  Description of Artificial Sequence: Synthetic oligonucleotide
caccauauacugccacuga

SEQ ID NO: 1308156 - RNA, 19 nt, Artificial Sequence
  Description of Artificial Sequence: Synthetic oligonucleotide
gcaacucgcauaaauauau

SEQ ID NO: 1308157 - RNA, 19 nt, Artificial Sequence
  Description of Artificial Sequence: Synthetic oligonucleotide
caucacaagcggccacuuc

SEQ ID NO: 1308158 - RNA, 19 nt, Artificial Sequence
  Description of Artificial Sequence: Synthetic oligonucleotide
cagcggugcucccauguuc

SEQ ID NO: 1308159 - RNA, 19 nt, Artificial Sequence
  Description of Artificial Sequence: Synthetic oligonucleotide
aagcaucaguaagcagaga

SEQ ID NO: 1308160 - RNA, 19 nt, Artificial Sequence
  Description of Artificial Sequence: Synthetic oligonucleotide
cccuaagaucgucagagga

SEQ ID NO: 1308161 - RNA, 19 nt, Artificial Sequence
  Description of Artificial Sequence: Synthetic oligonucleotide
aucgcauugaugggaucau

SEQ ID NO: 1308162 - RNA, 19 nt, Artificial Sequence
  Description of Artificial Sequence: Synthetic oligonucleotide
gacaucacaagcggccacu

SEQ ID NO: 1308163 - RNA, 19 nt, Artificial Sequence
  Description of Artificial Sequence: Synthetic oligonucleotide
cauggugacagguuaucuu

SEQ ID NO: 1308164 - RNA, 19 nt, Artificial Sequence
  Description of Artificial Sequence: Synthetic oligonucleotide
ccgaucucauuagacauuc

SEQ ID NO: 1308165 - RNA, 19 nt, Artificial Sequence
  Description of Artificial Sequence: Synthetic oligonucleotide
guucauuacagcagguguu

SEQ ID NO: 1308166 - RNA, 19 nt, Artificial Sequence
  Description of Artificial Sequence: Synthetic oligonucleotide
ccaccauauacugccacug

SEQ ID NO: 1308167 - RNA, 19 nt, Artificial Sequence
  Description of Artificial Sequence: Synthetic oligonucleotide
acggugaauccuaacucuu

SEQ ID NO: 1308168 - RNA, 19 nt, Artificial Sequence
  Description of Artificial Sequence: Synthetic oligonucleotide
uugcaccaauugucaucca

SEQ ID NO: 1308169 - RNA, 19 nt, Artificial Sequence
  Description of Artificial Sequence: Synthetic oligonucleotide
gacauucccaagccauaau

SEQ ID NO: 1308170 - RNA, 19 nt, Artificial Sequence
  Description of Artificial Sequence: Synthetic oligonucleotide
accgguucacuaagcagau

SEQ ID NO: 1308171 - RNA, 19 nt, Artificial Sequence
  Description of Artificial Sequence: Synthetic oligonucleotide
gcauugaugggaucauacu

SEQ ID NO: 1308172 - RNA, 19 nt, Artificial Sequence
  Description of Artificial Sequence: Synthetic oligonucleotide
cccugauaaguacauguaa

SEQ ID NO: 1308173 - RNA, 19 nt, Artificial Sequence
  Description of Artificial Sequence: Synthetic oligonucleotide
ucgcauugaugggaucaua

SEQ ID NO: 1308174 - RNA, 19 nt, Artificial Sequence
  Description of Artificial Sequence: Synthetic oligonucleotide
cuccgaugauaggguauug

SEQ ID NO: 1308175 - RNA, 19 nt, Artificial Sequence
  Description of Artificial Sequence: Synthetic oligonucleotide
gccaaaccgagagcucacg

SEQ ID NO: 1308176 - RNA, 19 nt, Artificial Sequence
  Description of Artificial Sequence: Synthetic oligonucleotide
ggguguuaagagccauuga

SEQ ID NO: 1308177 - RNA, 19 nt, Artificial Sequence
  Description of Artificial Sequence: Synthetic oligonucleotide
ccccuaagaucgucagagg

SEQ ID NO: 1308178 - RNA, 19 nt, Artificial Sequence
  Description of Artificial Sequence: Synthetic oligonucleotide
cuaccacgaggcuccccuc

SEQ ID NO: 1308179 - RNA, 19 nt, Artificial Sequence
  Description of Artificial Sequence: Synthetic oligonucleotide
ggugacagguuaucuucua

SEQ ID NO: 1308180 - RNA, 19 nt, Artificial Sequence
  Description of Artificial Sequence: Synthetic oligonucleotide
cagcagguguucuggcuaa

SEQ ID NO: 1308181 - RNA, 19 nt, Artificial Sequence
  Description of Artificial Sequence: Synthetic oligonucleotide
cuugucuugguaguauauu

SEQ ID NO: 1308182 - RNA, 19 nt, Artificial Sequence
  Description of Artificial Sequence: Synthetic oligonucleotide
ccauauacugccacugagu

SEQ ID NO: 1308183 - RNA, 19 nt, Artificial Sequence
  Description of Artificial Sequence: Synthetic oligonucleotide
gggugauacaccgguucac

SEQ ID NO: 1308184 - RNA, 19 nt, Artificial Sequence
  Description of Artificial Sequence: Synthetic oligonucleotide
cgguucacuaagcagaucu

SEQ ID NO: 1308185 - RNA, 19 nt, Artificial Sequence
  Description of Artificial Sequence: Synthetic oligonucleotide
ccaucugaucaauuuuaaa

SEQ ID NO: 1308186 - RNA, 19 nt, Artificial Sequence
  Description of Artificial Sequence: Synthetic oligonucleotide
cggugaauccuaacucuug

SEQ ID NO: 1308187 - RNA, 19 nt, Artificial Sequence
  Description of Artificial Sequence: Synthetic oligonucleotide
ggugauacaccgguucacu

SEQ ID NO: 1308188 - RNA, 19 nt, Artificial Sequence
  Description of Artificial Sequence: Synthetic oligonucleotide
gcagguguucuggcuaaug

SEQ ID NO: 1308189 - RNA, 19 nt, Artificial Sequence
  Description of Artificial Sequence: Synthetic oligonucleotide
gagagcucacgaccucccu

SEQ ID NO: 1308190 - RNA, 19 nt, Artificial Sequence
  Description of Artificial Sequence: Synthetic oligonucleotide
gcauaguugcaacucgcau

SEQ ID NO: 1308191 - RNA, 19 nt, Artificial Sequence
  Description of Artificial Sequence: Synthetic oligonucleotide
gcacguuugauuacuugcu

SEQ ID NO: 1308192 - RNA, 19 nt, Artificial Sequence
  Description of Artificial Sequence: Synthetic oligonucleotide
cacauacugaggccaaauu

SEQ ID NO: 1308193 - RNA, 19 nt, Artificial Sequence
  Description of Artificial Sequence: Synthetic oligonucleotide
cucuaccacgaggcucccc

SEQ ID NO: 1308194 - RNA, 19 nt, Artificial Sequence
  Description of Artificial Sequence: Synthetic oligonucleotide
cccaucugaucaauuuuaa

SEQ ID NO: 1308195 - RNA, 19 nt, Artificial Sequence
  Description of Artificial Sequence: Synthetic oligonucleotide
ccggucaccucuaccacga

SEQ ID NO: 1308196 - RNA, 19 nt, Artificial Sequence
  Description of Artificial Sequence: Synthetic oligonucleotide
cccacggugaauccuaacu

SEQ ID NO: 1308197 - RNA, 19 nt, Artificial Sequence
  Description of Artificial Sequence: Synthetic oligonucleotide
cugcacccaucacaccaga

SEQ ID NO: 1308198 - RNA, 19 nt, Artificial Sequence
  Description of Artificial Sequence: Synthetic oligonucleotide
ccaauacucccugauaagu

SEQ ID NO: 1308199 - RNA, 19 nt, Artificial Sequence
  Description of Artificial Sequence: Synthetic oligonucleotide
ccaaaccgagagcucacga

SEQ ID NO: 1308200 - RNA, 19 nt, Artificial Sequence
  Description of Artificial Sequence: Synthetic oligonucleotide
gccuuuucgauagcuccga

SEQ ID NO: 1308201 - RNA, 19 nt, Artificial Sequence
  Description of Artificial Sequence: Synthetic oligonucleotide
gacaagacccaggcccacu

SEQ ID NO: 1308202 - RNA, 19 nt, Artificial Sequence
  Description of Artificial Sequence: Synthetic oligonucleotide
uaguugcaacucgcauaaa

SEQ ID NO: 1308203 - RNA, 19 nt, Artificial Sequence
  Description of Artificial Sequence: Synthetic oligonucleotide
uggggaggccuuggugaaa

SEQ ID NO: 1308204 - RNA, 19 nt, Artificial Sequence
  Description of Artificial Sequence: Synthetic oligonucleotide
ccagccaaaccgagagcuc

SEQ ID NO: 1308205 - RNA, 19 nt, Artificial Sequence
  Description of Artificial Sequence: Synthetic oligonucleotide
ccauguagauucucaacau

SEQ ID NO: 1308206 - RNA, 19 nt, Artificial Sequence
  Description of Artificial Sequence: Synthetic oligonucleotide
gccauugauucuucgugau

SEQ ID NO: 1308207 - RNA, 19 nt, Artificial Sequence
  Description of Artificial Sequence: Synthetic oligonucleotide
cuaaaccuuaaaggaguuu

SEQ ID NO: 1308208 - RNA, 19 nt, Artificial Sequence
  Description of Artificial Sequence: Synthetic oligonucleotide
cucacauacugaggccaaa

SEQ ID NO: 1308209 - RNA, 19 nt, Artificial Sequence
  Description of Artificial Sequence: Synthetic oligonucleotide
cgaucucauuagacauucc

SEQ ID NO: 1308210 - RNA, 19 nt, Artificial Sequence
  Description of Artificial Sequence: Synthetic oligonucleotide
cuuucaguccuuggccagu

SEQ ID NO: 1308211 - RNA, 19 nt, Artificial Sequence
  Description of Artificial Sequence: Synthetic oligonucleotide
ccgaugauaggguauugau

SEQ ID NO: 1308212 - RNA, 19 nt, Artificial Sequence
  Description of Artificial Sequence: Synthetic oligonucleotide
ccacaauaccagcagugua

SEQ ID NO: 1308213 - RNA, 19 nt, Artificial Sequence
  Description of Artificial Sequence: Synthetic oligonucleotide
aggccaaauuacagccuuu

SEQ ID NO: 1308214 - RNA, 19 nt, Artificial Sequence
  Description of Artificial Sequence: Synthetic oligonucleotide
gcggugcucccauguucag

SEQ ID NO: 1308215 - RNA, 19 nt, Artificial Sequence
  Description of Artificial Sequence: Synthetic oligonucleotide
cuccagcaacaaaccaccu

SEQ ID NO: 1308216 - RNA, 19 nt, Artificial Sequence
  Description of Artificial Sequence: Synthetic oligonucleotide
cuggguguuaagagccauu

SEQ ID NO: 1308217 - RNA, 19 nt, Artificial Sequence
  Description of Artificial Sequence: Synthetic oligonucleotide
caggcccacucccagcggu

SEQ ID NO: 1308218 - RNA, 19 nt, Artificial Sequence
  Description of Artificial Sequence: Synthetic oligonucleotide
gcauggugacagguuaucu

SEQ ID NO: 1308219 - RNA, 19 nt, Artificial Sequence
  Description of Artificial Sequence: Synthetic oligonucleotide
ccgggccagccaaaccgag

SEQ ID NO: 1308220 - RNA, 19 nt, Artificial Sequence
  Description of Artificial Sequence: Synthetic oligonucleotide
cacaagcggccacuucacu

SEQ ID NO: 1308221 - RNA, 19 nt, Artificial Sequence
  Description of Artificial Sequence: Synthetic oligonucleotide
ggcaguguccggagacaca

SEQ ID NO: 1308222 - RNA, 19 nt, Artificial Sequence
  Description of Artificial Sequence: Synthetic oligonucleotide
gggcuccgaugauagggua

SEQ ID NO: 1308223 - RNA, 19 nt, Artificial Sequence
  Description of Artificial Sequence: Synthetic oligonucleotide
cccacaauaccagcagugu

SEQ ID NO: 1308224 - RNA, 19 nt, Artificial Sequence
  Description of Artificial Sequence: Synthetic oligonucleotide
gcuccgaugauaggguauu

SEQ ID NO: 1308225 - RNA, 19 nt, Artificial Sequence
  Description of Artificial Sequence: Synthetic oligonucleotide
cucccagcggugcucccau

SEQ ID NO: 1308226 - RNA, 19 nt, Artificial Sequence
  Description of Artificial Sequence: Synthetic oligonucleotide
ggcuccgaugauaggguau

SEQ ID NO: 1308227 - RNA, 19 nt, Artificial Sequence
  Description of Artificial Sequence: Synthetic oligonucleotide
gcggccacuucacuucuuu

SEQ ID NO: 1308228 - RNA, 19 nt, Artificial Sequence
  Description of Artificial Sequence: Synthetic oligonucleotide
agcggccacuucacuucuu

SEQ ID NO: 1308229 - RNA, 19 nt, Artificial Sequence
  Description of Artificial Sequence: Synthetic oligonucleotide
ccucuaccacgaggcuccc

SEQ ID NO: 1308230 - RNA, 19 nt, Artificial Sequence
  Description of Artificial Sequence: Synthetic oligonucleotide
ggugggugauacaccgguu

SEQ ID NO: 1308231 - RNA, 19 nt, Artificial Sequence
  Description of Artificial Sequence: Synthetic oligonucleotide
ccuuuucgauagcuccgau

SEQ ID NO: 1308232 - RNA, 19 nt, Artificial Sequence
  Description of Artificial Sequence: Synthetic oligonucleotide
cggugcucccauguucaga

SEQ ID NO: 1308233 - RNA, 19 nt, Artificial Sequence
  Description of Artificial Sequence: Synthetic oligonucleotide
ccggagacacaggagccuu

SEQ ID NO: 1308234 - RNA, 19 nt, Artificial Sequence
  Description of Artificial Sequence: Synthetic oligonucleotide
ccagcggugcucccauguu

SEQ ID NO: 1308235 - RNA, 19 nt, Artificial Sequence
  Description of Artificial Sequence: Synthetic oligonucleotide
aaauuggauuacuaaaugc

SEQ ID NO: 1308236 - RNA, 19 nt, Artificial Sequence
  Description of Artificial Sequence: Synthetic oligonucleotide
aaaaguguucauuucggac

SEQ ID NO: 1308237 - RNA, 19 nt, Artificial Sequence
  Description of Artificial Sequence: Synthetic oligonucleotide
auaagcaaaagguuuauuc

SEQ ID NO: 1308238 - RNA, 19 nt, Artificial Sequence
  Description of Artificial Sequence: Synthetic oligonucleotide
aaugguuaacagucaaugc

SEQ ID NO: 1308239 - RNA, 19 nt, Artificial Sequence
  Description of Artificial Sequence: Synthetic oligonucleotide
aaagcuaugcuguuuguag

SEQ ID NO: 1308240 - RNA, 19 nt, Artificial Sequence
  Description of Artificial Sequence: Synthetic oligonucleotide
uaagacccaaaccauaagg

SEQ ID NO: 1308241 - RNA, 19 nt, Artificial Sequence
  Description of Artificial Sequence: Synthetic oligonucleotide
cuucuaaucguucaaaccc

SEQ ID NO: 1308242 - RNA, 19 nt, Artificial Sequence
  Description of Artificial Sequence: Synthetic oligonucleotide
acuaaaugcacugggaacc

SEQ ID NO: 1308243 - RNA, 19 nt, Artificial Sequence
  Description of Artificial Sequence: Synthetic oligonucleotide
gauccuaucaucaacauuc

SEQ ID NO: 1308244 - RNA, 19 nt, Artificial Sequence
  Description of Artificial Sequence: Synthetic oligonucleotide
aaguuuagggcauuggaug

SEQ ID NO: 1308245 - RNA, 19 nt, Artificial Sequence
  Description of Artificial Sequence: Synthetic oligonucleotide
gauuacuaaaugcacuggg

SEQ ID NO: 1308246 - RNA, 19 nt, Artificial Sequence
  Description of Artificial Sequence: Synthetic oligonucleotide
aaauaaguuaaaguccuuc

SEQ ID NO: 1308247 - RNA, 19 nt, Artificial Sequence
  Description of Artificial Sequence: Synthetic oligonucleotide
acgacuaagacccaaacca

SEQ ID NO: 1308248 - RNA, 19 nt, Artificial Sequence
  Description of Artificial Sequence: Synthetic oligonucleotide
aaaugguuaacagucaaug

SEQ ID NO: 1308249 - RNA, 19 nt, Artificial Sequence
  Description of Artificial Sequence: Synthetic oligonucleotide
uuuauuccgaauagaaagc

SEQ ID NO: 1308250 - RNA, 19 nt, Artificial Sequence
  Description of Artificial Sequence: Synthetic oligonucleotide
uuucggacuucuaagaccc

SEQ ID NO: 1308251 - RNA, 19 nt, Artificial Sequence
  Description of Artificial Sequence: Synthetic oligonucleotide
uuuaguauaaagagggcuc

SEQ ID NO: 1308252 - RNA, 19 nt, Artificial Sequence
  Description of Artificial Sequence: Synthetic oligonucleotide
aucgugaacagguugaaag

SEQ ID NO: 1308253 - RNA, 19 nt, Artificial Sequence
  Description of Artificial Sequence: Synthetic oligonucleotide
aagauagugagguaaguau

SEQ ID NO: 1308254 - RNA, 19 nt, Artificial Sequence
  Description of Artificial Sequence: Synthetic oligonucleotide
aauuggauuacuaaaugca

SEQ ID NO: 1308255 - RNA, 19 nt, Artificial Sequence
  Description of Artificial Sequence: Synthetic oligonucleotide
ugaauuguccccaugguaa

SEQ ID NO: 1308256 - RNA, 19 nt, Artificial Sequence
  Description of Artificial Sequence: Synthetic oligonucleotide
aaauaauaguuuauuaggu

SEQ ID NO: 1308257 - RNA, 19 nt, Artificial Sequence
  Description of Artificial Sequence: Synthetic oligonucleotide
ucagaguagacacaagugu

SEQ ID NO: 1308258 - RNA, 19 nt, Artificial Sequence
  Description of Artificial Sequence: Synthetic oligonucleotide
uuucgaaagagaugaauug

SEQ ID NO: 1308259 - RNA, 19 nt, Artificial Sequence
  Description of Artificial Sequence: Synthetic oligonucleotide
aagucuaaauuccuggagu

SEQ ID NO: 1308260 - RNA, 19 nt, Artificial Sequence
  Description of Artificial Sequence: Synthetic oligonucleotide
agacccaaaccauaaggcc

SEQ ID NO: 1308261 - RNA, 19 nt, Artificial Sequence
  Description of Artificial Sequence: Synthetic oligonucleotide
ucuacagcaaaauaauuau

SEQ ID NO: 1308262 - RNA, 19 nt, Artificial Sequence
  Description of Artificial Sequence: Synthetic oligonucleotide
aauaacugggcucacguuu

SEQ ID NO: 1308263 - RNA, 19 nt, Artificial Sequence
  Description of Artificial Sequence: Synthetic oligonucleotide
agcaguuaaagcuaugcug

SEQ ID NO: 1308264 - RNA, 19 nt, Artificial Sequence
  Description of Artificial Sequence: Synthetic oligonucleotide
agaccguagaagcaaacac

SEQ ID NO: 1308265 - RNA, 19 nt, Artificial Sequence
  Description of Artificial Sequence: Synthetic oligonucleotide
auaauaguuuauuagguuu

SEQ ID NO: 1308266 - RNA, 19 nt, Artificial Sequence
  Description of Artificial Sequence: Synthetic oligonucleotide
gguauaaucccacacacgc

SEQ ID NO: 1308267 - RNA, 19 nt, Artificial Sequence
  Description of Artificial Sequence: Synthetic oligonucleotide
aauggauucaugcggggca

SEQ ID NO: 1308268 - RNA, 19 nt, Artificial Sequence
  Description of Artificial Sequence: Synthetic oligonucleotide
uggauuacuaaaugcacug

SEQ ID NO: 1308269 - RNA, 19 nt, Artificial Sequence
  Description of Artificial Sequence: Synthetic oligonucleotide
agagcugcaccacaugagc

SEQ ID NO: 1308270 - RNA, 19 nt, Artificial Sequence
  Description of Artificial Sequence: Synthetic oligonucleotide
uucuuacauguacugaucc

SEQ ID NO: 1308271 - RNA, 19 nt, Artificial Sequence
  Description of Artificial Sequence: Synthetic oligonucleotide
uucagaagaauaacugggc

SEQ ID NO: 1308272 - RNA, 19 nt, Artificial Sequence
  Description of Artificial Sequence: Synthetic oligonucleotide
ugcaaauuggauuacuaaa

SEQ ID NO: 1308273 - RNA, 19 nt, Artificial Sequence
  Description of Artificial Sequence: Synthetic oligonucleotide
ugaaaacucuggaggaggg

SEQ ID NO: 1308274 - RNA, 19 nt, Artificial Sequence
  Description of Artificial Sequence: Synthetic oligonucleotide
aauaugaacaagccugcaa

SEQ ID NO: 1308275 - RNA, 19 nt, Artificial Sequence
  Description of Artificial Sequence: Synthetic oligonucleotide
uaugugauggucugagaag

SEQ ID NO: 1308276 - RNA, 19 nt, Artificial Sequence
  Description of Artificial Sequence: Synthetic oligonucleotide
ugugacagggauccuauca

SEQ ID NO: 1308277 - RNA, 19 nt, Artificial Sequence
  Description of Artificial Sequence: Synthetic oligonucleotide
aucguucaaacccaaauga

SEQ ID NO: 1308278 - RNA, 19 nt, Artificial Sequence
  Description of Artificial Sequence: Synthetic oligonucleotide
aucuguuggucacaugagc

SEQ ID NO: 1308279 - RNA, 19 nt, Artificial Sequence
  Description of Artificial Sequence: Synthetic oligonucleotide
uuacuaaaugcacugggaa

SEQ ID NO: 1308280 - RNA, 19 nt, Artificial Sequence
  Description of Artificial Sequence: Synthetic oligonucleotide
uuccauaccuacuugguac

SEQ ID NO: 1308281 - RNA, 19 nt, Artificial Sequence
  Description of Artificial Sequence: Synthetic oligonucleotide
gguuucaugaaauaugaac

SEQ ID NO: 1308282 - RNA, 19 nt, Artificial Sequence
  Description of Artificial Sequence: Synthetic oligonucleotide
uaaucguucaaacccaaau

SEQ ID NO: 1308283 - RNA, 19 nt, Artificial Sequence
  Description of Artificial Sequence: Synthetic oligonucleotide
aacaggcccagacaguaag

SEQ ID NO: 1308284 - RNA, 19 nt, Artificial Sequence
  Description of Artificial Sequence: Synthetic oligonucleotide
ucagaagaauaacugggcu

SEQ ID NO: 1308285 - RNA, 19 nt, Artificial Sequence
  Description of Artificial Sequence: Synthetic oligonucleotide
acagguugaaagaaagagc

SEQ ID NO: 1308286 - RNA, 19 nt, Artificial Sequence
  Description of Artificial Sequence: Synthetic oligonucleotide
gauuaugugauggucugag

SEQ ID NO: 1308287 - RNA, 19 nt, Artificial Sequence
  Description of Artificial Sequence: Synthetic oligonucleotide
aacuaauaaucuucccgug

SEQ ID NO: 1308288 - RNA, 19 nt, Artificial Sequence
  Description of Artificial Sequence: Synthetic oligonucleotide
ugugccaagaccguagaag

SEQ ID NO: 1308289 - RNA, 19 nt, Artificial Sequence
  Description of Artificial Sequence: Synthetic oligonucleotide
cuaauaaucuucccgugug

SEQ ID NO: 1308290 - RNA, 19 nt, Artificial Sequence
  Description of Artificial Sequence: Synthetic oligonucleotide
uaccaacuaauaaucuucc

SEQ ID NO: 1308291 - RNA, 19 nt, Artificial Sequence
  Description of Artificial Sequence: Synthetic oligonucleotide
agaauaacugggcucacgu

SEQ ID NO: 1308292 - RNA, 19 nt, Artificial Sequence
  Description of Artificial Sequence: Synthetic oligonucleotide
agucagaguagacacaagu

SEQ ID NO: 1308293 - RNA, 19 nt, Artificial Sequence
  Description of Artificial Sequence: Synthetic oligonucleotide
uguuauacacagagcaaac

SEQ ID NO: 1308294 - RNA, 19 nt, Artificial Sequence
  Description of Artificial Sequence: Synthetic oligonucleotide
uucuaaucguucaaaccca

SEQ ID NO: 1308295 - RNA, 19 nt, Artificial Sequence
  Description of Artificial Sequence: Synthetic oligonucleotide
acacgcuucgacuaagguc

SEQ ID NO: 1308296 - RNA, 19 nt, Artificial Sequence
  Description of Artificial Sequence: Synthetic oligonucleotide
auaccuacuugguacaugu

SEQ ID NO: 1308297 - RNA, 19 nt, Artificial Sequence
  Description of Artificial Sequence: Synthetic oligonucleotide
uuaguauaaagagggcucc

SEQ ID NO: 1308298 - RNA, 19 nt, Artificial Sequence
  Description of Artificial Sequence: Synthetic oligonucleotide
agaagaauaacugggcuca

SEQ ID NO: 1308299 - RNA, 19 nt, Artificial Sequence
  Description of Artificial Sequence: Synthetic oligonucleotide
ugguauaaucccacacacg

SEQ ID NO: 1308300 - RNA, 19 nt, Artificial Sequence
  Description of Artificial Sequence: Synthetic oligonucleotide
auucaugcggggcaggaag

SEQ ID NO: 1308301 - RNA, 19 nt, Artificial Sequence
  Description of Artificial Sequence: Synthetic oligonucleotide
accaacuaauaaucuuccc

SEQ ID NO: 1308302 - RNA, 19 nt, Artificial Sequence
  Description of Artificial Sequence: Synthetic oligonucleotide
ucuaaauuccuggaguaac

SEQ ID NO: 1308303 - RNA, 19 nt, Artificial Sequence
  Description of Artificial Sequence: Synthetic oligonucleotide
uucuaagaccccauccaag

SEQ ID NO: 1308304 - RNA, 19 nt, Artificial Sequence
  Description of Artificial Sequence: Synthetic oligonucleotide
uaaagagggcucccaauug

SEQ ID NO: 1308305 - RNA, 19 nt, Artificial Sequence
  Description of Artificial Sequence: Synthetic oligonucleotide
aggucaaagauagugaggu

SEQ ID NO: 1308306 - RNA, 19 nt, Artificial Sequence
  Description of Artificial Sequence: Synthetic oligonucleotide
acuaauaaucuucccgugu

SEQ ID NO: 1308307 - RNA, 19 nt, Artificial Sequence
  Description of Artificial Sequence: Synthetic oligonucleotide
ucgaaagagaugaauuguc

SEQ ID NO: 1308308 - RNA, 19 nt, Artificial Sequence
  Description of Artificial Sequence: Synthetic oligonucleotide
cccaauugugccaagaccg

SEQ ID NO: 1308309 - RNA, 19 nt, Artificial Sequence
  Description of Artificial Sequence: Synthetic oligonucleotide
uacuaaaugcacugggaac

SEQ ID NO: 1308310 - RNA, 19 nt, Artificial Sequence
  Description of Artificial Sequence: Synthetic oligonucleotide
uuaacagucaaugcaaauu

SEQ ID NO: 1308311 - RNA, 19 nt, Artificial Sequence
  Description of Artificial Sequence: Synthetic oligonucleotide
ccaacuaauaaucuucccg

SEQ ID NO: 1308312 - RNA, 19 nt, Artificial Sequence
  Description of Artificial Sequence: Synthetic oligonucleotide
acaaauggauucaugcggg

SEQ ID NO: 1308313 - RNA, 19 nt, Artificial Sequence
  Description of Artificial Sequence: Synthetic oligonucleotide
ucauuggauacauggugcc

SEQ ID NO: 1308314 - RNA, 19 nt, Artificial Sequence
  Description of Artificial Sequence: Synthetic oligonucleotide
uuauuccgaauagaaagca

SEQ ID NO: 1308315 - RNA, 19 nt, Artificial Sequence
  Description of Artificial Sequence: Synthetic oligonucleotide
uguaugguguguguccacg

SEQ ID NO: 1308316 - RNA, 19 nt, Artificial Sequence
  Description of Artificial Sequence: Synthetic oligonucleotide
aauaggcagggcuaggcuu

SEQ ID NO: 1308317 - RNA, 19 nt, Artificial Sequence
  Description of Artificial Sequence: Synthetic oligonucleotide
uucgacuaaggucugccac

SEQ ID NO: 1308318 - RNA, 19 nt, Artificial Sequence
  Description of Artificial Sequence: Synthetic oligonucleotide
acuguacacacucauugga

SEQ ID NO: 1308319 - RNA, 19 nt, Artificial Sequence
  Description of Artificial Sequence: Synthetic oligonucleotide
aucauuacccaguagcuua

SEQ ID NO: 1308320 - RNA, 19 nt, Artificial Sequence
  Description of Artificial Sequence: Synthetic oligonucleotide
aaggucaaagauagugagg

SEQ ID NO: 1308321 - RNA, 19 nt, Artificial Sequence
  Description of Artificial Sequence: Synthetic oligonucleotide
aagaauaacugggcucacg

SEQ ID NO: 1308322 - RNA, 19 nt, Artificial Sequence
  Description of Artificial Sequence: Synthetic oligonucleotide
agcuaugcuguuuguagag

SEQ ID NO: 1308323 - RNA, 19 nt, Artificial Sequence
  Description of Artificial Sequence: Synthetic oligonucleotide
uguuguuuccauaccuacu

SEQ ID NO: 1308324 - RNA, 19 nt, Artificial Sequence
  Description of Artificial Sequence: Synthetic oligonucleotide
auuugcaucgcgucgaauu

SEQ ID NO: 1308325 - RNA, 19 nt, Artificial Sequence
  Description of Artificial Sequence: Synthetic oligonucleotide
aaagauagugagguaagua

SEQ ID NO: 1308326 - RNA, 19 nt, Artificial Sequence
  Description of Artificial Sequence: Synthetic oligonucleotide
uucgaaagagaugaauugu

SEQ ID NO: 1308327 - RNA, 19 nt, Artificial Sequence
  Description of Artificial Sequence: Synthetic oligonucleotide
caagucuaaauuccuggag

SEQ ID NO: 1308328 - RNA, 19 nt, Artificial Sequence
  Description of Artificial Sequence: Synthetic oligonucleotide
cguacuagcagcuucagag

SEQ ID NO: 1308329 - RNA, 19 nt, Artificial Sequence
  Description of Artificial Sequence: Synthetic oligonucleotide
aagcuaugcuguuuguaga

SEQ ID NO: 1308330 - RNA, 19 nt, Artificial Sequence
  Description of Artificial Sequence: Synthetic oligonucleotide
gacuucuaaucguucaaac

SEQ ID NO: 1308331 - RNA, 19 nt, Artificial Sequence
  Description of Artificial Sequence: Synthetic oligonucleotide
aagacuucuaaucguucaa

SEQ ID NO: 1308332 - RNA, 19 nt, Artificial Sequence
  Description of Artificial Sequence: Synthetic oligonucleotide
aagagaugaauugucccca

SEQ ID NO: 1308333 - RNA, 19 nt, Artificial Sequence
  Description of Artificial Sequence: Synthetic oligonucleotide
auuagguuucaugaaauau

SEQ ID NO: 1308334 - RNA, 19 nt, Artificial Sequence
  Description of Artificial Sequence: Synthetic oligonucleotide
augguaaggagccgaacug

SEQ ID NO: 1308335 - RNA, 19 nt, Artificial Sequence
  Description of Artificial Sequence: Synthetic oligonucleotide
uuacccaguagcuuauuaa

SEQ ID NO: 1308336 - RNA, 19 nt, Artificial Sequence
  Description of Artificial Sequence: Synthetic oligonucleotide
uuugcaucgcgucgaauuc

SEQ ID NO: 1308337 - RNA, 19 nt, Artificial Sequence
  Description of Artificial Sequence: Synthetic oligonucleotide
acaagucuaaauuccugga

SEQ ID NO: 1308338 - RNA, 19 nt, Artificial Sequence
  Description of Artificial Sequence: Synthetic oligonucleotide
gugccaagaccguagaagc

SEQ ID NO: 1308339 - RNA, 19 nt, Artificial Sequence
  Description of Artificial Sequence: Synthetic oligonucleotide
ucgugaacagguugaaaga

SEQ ID NO: 1308340 - RNA, 19 nt, Artificial Sequence
  Description of Artificial Sequence: Synthetic oligonucleotide
uguuggucacaugagcaag

SEQ ID NO: 1308341 - RNA, 19 nt, Artificial Sequence
  Description of Artificial Sequence: Synthetic oligonucleotide
cugaccaauaacaugaggu

SEQ ID NO: 1308342 - RNA, 19 nt, Artificial Sequence
  Description of Artificial Sequence: Synthetic oligonucleotide
agagaaggaucuuccagga

SEQ ID NO: 1308343 - RNA, 19 nt, Artificial Sequence
  Description of Artificial Sequence: Synthetic oligonucleotide
accguagaagcaaacacag

SEQ ID NO: 1308344 - RNA, 19 nt, Artificial Sequence
  Description of Artificial Sequence: Synthetic oligonucleotide
ugaacaagccugcaacaau

SEQ ID NO: 1308345 - RNA, 19 nt, Artificial Sequence
  Description of Artificial Sequence: Synthetic oligonucleotide
agcucguacuagcagcuuc

SEQ ID NO: 1308346 - RNA, 19 nt, Artificial Sequence
  Description of Artificial Sequence: Synthetic oligonucleotide
ucguucaaacccaaaugaa

SEQ ID NO: 1308347 - RNA, 19 nt, Artificial Sequence
  Description of Artificial Sequence: Synthetic oligonucleotide
aagaccguagaagcaaaca

SEQ ID NO: 1308348 - RNA, 19 nt, Artificial Sequence
  Description of Artificial Sequence: Synthetic oligonucleotide
aaugcaaauuggauuacua

SEQ ID NO: 1308349 - RNA, 19 nt, Artificial Sequence
  Description of Artificial Sequence: Synthetic oligonucleotide
agauaccucccugaucagc

SEQ ID NO: 1308350 - RNA, 19 nt, Artificial Sequence
  Description of Artificial Sequence: Synthetic oligonucleotide
augcaaauuggauuacuaa

SEQ ID NO: 1308351 - RNA, 19 nt, Artificial Sequence
  Description of Artificial Sequence: Synthetic oligonucleotide
auguuauacacagagcaaa

SEQ ID NO: 1308352 - RNA, 19 nt, Artificial Sequence
  Description of Artificial Sequence: Synthetic oligonucleotide
uguccccaugguaaggagc

SEQ ID NO: 1308353 - RNA, 19 nt, Artificial Sequence
  Description of Artificial Sequence: Synthetic oligonucleotide
aagguuuauuccgaauaga

SEQ ID NO: 1308354 - RNA, 19 nt, Artificial Sequence
  Description of Artificial Sequence: Synthetic oligonucleotide
aaggguccaaaaguguuca

SEQ ID NO: 1308355 - RNA, 19 nt, Artificial Sequence
  Description of Artificial Sequence: Synthetic oligonucleotide
auuacuaaaugcacuggga

SEQ ID NO: 1308356 - RNA, 19 nt, Artificial Sequence
  Description of Artificial Sequence: Synthetic oligonucleotide
caagccugcaacaaucuga

SEQ ID NO: 1308357 - RNA, 19 nt, Artificial Sequence
  Description of Artificial Sequence: Synthetic oligonucleotide
ccuacuugguacauguggg

SEQ ID NO: 1308358 - RNA, 19 nt, Artificial Sequence
  Description of Artificial Sequence: Synthetic oligonucleotide
cacgcuucgacuaaggucu

SEQ ID NO: 1308359 - RNA, 19 nt, Artificial Sequence
  Description of Artificial Sequence: Synthetic oligonucleotide
gauagugagguaaguauaa

SEQ ID NO: 1308360 - RNA, 19 nt, Artificial Sequence
  Description of Artificial Sequence: Synthetic oligonucleotide
agucuaaauuccuggagua

SEQ ID NO: 1308361 - RNA, 19 nt, Artificial Sequence
  Description of Artificial Sequence: Synthetic oligonucleotide
caaauggauucaugcgggg

SEQ ID NO: 1308362 - RNA, 19 nt, Artificial Sequence
  Description of Artificial Sequence: Synthetic oligonucleotide
uccaaggguccaaaagugu

SEQ ID NO: 1308363 - RNA, 19 nt, Artificial Sequence
  Description of Artificial Sequence: Synthetic oligonucleotide
gagggcucccaauugugcc

SEQ ID NO: 1308364 - RNA, 19 nt, Artificial Sequence
  Description of Artificial Sequence: Synthetic oligonucleotide
uaugguguguguccacgac

SEQ ID NO: 1308365 - RNA, 19 nt, Artificial Sequence
  Description of Artificial Sequence: Synthetic oligonucleotide
acagcacguugacugcacc

SEQ ID NO: 1308366 - RNA, 19 nt, Artificial Sequence
  Description of Artificial Sequence: Synthetic oligonucleotide
ugcuagguuuggcaggugu

SEQ ID NO: 1308367 - RNA, 19 nt, Artificial Sequence
  Description of Artificial Sequence: Synthetic oligonucleotide
aaacgccccagcaagguca

SEQ ID NO: 1308368 - RNA, 19 nt, Artificial Sequence
  Description of Artificial Sequence: Synthetic oligonucleotide
gagucgacauuccucauaa

SEQ ID NO: 1308369 - RNA, 19 nt, Artificial Sequence
  Description of Artificial Sequence: Synthetic oligonucleotide
uccauaccuacuugguaca

SEQ ID NO: 1308370 - RNA, 19 nt, Artificial Sequence
  Description of Artificial Sequence: Synthetic oligonucleotide
gucagaguagacacaagug

SEQ ID NO: 1308371 - RNA, 19 nt, Artificial Sequence
  Description of Artificial Sequence: Synthetic oligonucleotide
caucgcgucgaauucuuac

SEQ ID NO: 1308372 - RNA, 19 nt, Artificial Sequence
  Description of Artificial Sequence: Synthetic oligonucleotide
agacauaagcaaaagguuu

SEQ ID NO: 1308373 - RNA, 19 nt, Artificial Sequence
  Description of Artificial Sequence: Synthetic oligonucleotide
gaauucuuacauguacuga

SEQ ID NO: 1308374 - RNA, 19 nt, Artificial Sequence
  Description of Artificial Sequence: Synthetic oligonucleotide
aguccugguauaaucccac

SEQ ID NO: 1308375 - RNA, 19 nt, Artificial Sequence
  Description of Artificial Sequence: Synthetic oligonucleotide
cuaagacccaaaccauaag

SEQ ID NO: 1308376 - RNA, 19 nt, Artificial Sequence
  Description of Artificial Sequence: Synthetic oligonucleotide
uuaaagcuaugcuguuugu

SEQ ID NO: 1308377 - RNA, 19 nt, Artificial Sequence
  Description of Artificial Sequence: Synthetic oligonucleotide
caacuaauaaucuucccgu

SEQ ID NO: 1308378 - RNA, 19 nt, Artificial Sequence
  Description of Artificial Sequence: Synthetic oligonucleotide
auaaucuucccguguguau

SEQ ID NO: 1308379 - RNA, 19 nt, Artificial Sequence
  Description of Artificial Sequence: Synthetic oligonucleotide
agaggcauugggauuaugu

SEQ ID NO: 1308380 - RNA, 19 nt, Artificial Sequence
  Description of Artificial Sequence: Synthetic oligonucleotide
uugcucauuugcaucgcgu

SEQ ID NO: 1308381 - RNA, 19 nt, Artificial Sequence
  Description of Artificial Sequence: Synthetic oligonucleotide
guuggucacaugagcaagg

SEQ ID NO: 1308382 - RNA, 19 nt, Artificial Sequence
  Description of Artificial Sequence: Synthetic oligonucleotide
caagguagauaccucccug

SEQ ID NO: 1308383 - RNA, 19 nt, Artificial Sequence
  Description of Artificial Sequence: Synthetic oligonucleotide
ugguaaggagccgaacugc

SEQ ID NO: 1308384 - RNA, 19 nt, Artificial Sequence
  Description of Artificial Sequence: Synthetic oligonucleotide
ugcucauuugcaucgcguc

SEQ ID NO: 1308385 - RNA, 19 nt, Artificial Sequence
  Description of Artificial Sequence: Synthetic oligonucleotide
aucgcgucgaauucuuaca

SEQ ID NO: 1308386 - RNA, 19 nt, Artificial Sequence
  Description of Artificial Sequence: Synthetic oligonucleotide
ggguauuaaaugaaaacuc

SEQ ID NO: 1308387 - RNA, 19 nt, Artificial Sequence
  Description of Artificial Sequence: Synthetic oligonucleotide
augaauuguccccauggua

SEQ ID NO: 1308388 - RNA, 19 nt, Artificial Sequence
  Description of Artificial Sequence: Synthetic oligonucleotide
auagugagguaaguauaag

SEQ ID NO: 1308389 - RNA, 19 nt, Artificial Sequence
  Description of Artificial Sequence: Synthetic oligonucleotide
aguauaaagagggcuccca

SEQ ID NO: 1308390 - RNA, 19 nt, Artificial Sequence
  Description of Artificial Sequence: Synthetic oligonucleotide
cuucccguguguaucucag

SEQ ID NO: 1308391 - RNA, 19 nt, Artificial Sequence
  Description of Artificial Sequence: Synthetic oligonucleotide
acagucaaugcaaauugga

SEQ ID NO: 1308392 - RNA, 19 nt, Artificial Sequence
  Description of Artificial Sequence: Synthetic oligonucleotide
agguuuauuccgaauagaa

SEQ ID NO: 1308393 - RNA, 19 nt, Artificial Sequence
  Description of Artificial Sequence: Synthetic oligonucleotide
gaccguagaagcaaacaca

SEQ ID NO: 1308394 - RNA, 19 nt, Artificial Sequence
  Description of Artificial Sequence: Synthetic oligonucleotide
agagggcucccaauugugc

SEQ ID NO: 1308395 - RNA, 19 nt, Artificial Sequence
  Description of Artificial Sequence: Synthetic oligonucleotide
gacauaagcaaaagguuua

SEQ ID NO: 1308396 - RNA, 19 nt, Artificial Sequence
  Description of Artificial Sequence: Synthetic oligonucleotide
acuaagacccaaaccauaa

SEQ ID NO: 1308397 - RNA, 19 nt, Artificial Sequence
  Description of Artificial Sequence: Synthetic oligonucleotide
auuaugugauggucugaga

SEQ ID NO: 1308398 - RNA, 19 nt, Artificial Sequence
  Description of Artificial Sequence: Synthetic oligonucleotide
aucugaacagucagaguag

SEQ ID NO: 1308399 - RNA, 19 nt, Artificial Sequence
  Description of Artificial Sequence: Synthetic oligonucleotide
acaagccugcaacaaucug

SEQ ID NO: 1308400 - RNA, 19 nt, Artificial Sequence
  Description of Artificial Sequence: Synthetic oligonucleotide
gagaugaauuguccccaug

SEQ ID NO: 1308401 - RNA, 19 nt, Artificial Sequence
  Description of Artificial Sequence: Synthetic oligonucleotide
ucauuacccaguagcuuau

SEQ ID NO: 1308402 - RNA, 19 nt, Artificial Sequence
  Description of Artificial Sequence: Synthetic oligonucleotide
augguguguguccacgacu

SEQ ID NO: 1308403 - RNA, 19 nt, Artificial Sequence
  Description of Artificial Sequence: Synthetic oligonucleotide
agcugcuacaagucuaaau

SEQ ID NO: 1308404 - RNA, 19 nt, Artificial Sequence
  Description of Artificial Sequence: Synthetic oligonucleotide
gggauuaugugauggucug

SEQ ID NO: 1308405 - RNA, 19 nt, Artificial Sequence
  Description of Artificial Sequence: Synthetic oligonucleotide
guccccaugguaaggagcc

SEQ ID NO: 1308406 - RNA, 19 nt, Artificial Sequence
  Description of Artificial Sequence: Synthetic oligonucleotide
agccgaacugcucccgccg

SEQ ID NO: 1308407 - RNA, 19 nt, Artificial Sequence
  Description of Artificial Sequence: Synthetic oligonucleotide
cuuucgaaagagaugaauu

SEQ ID NO: 1308408 - RNA, 19 nt, Artificial Sequence
  Description of Artificial Sequence: Synthetic oligonucleotide
gcucauuugcaucgcgucg

SEQ ID NO: 1308409 - RNA, 19 nt, Artificial Sequence
  Description of Artificial Sequence: Synthetic oligonucleotide
uccacgacuaagacccaaa

SEQ ID NO: 1308410 - RNA, 19 nt, Artificial Sequence
  Description of Artificial Sequence: Synthetic oligonucleotide
agggauccuaucaucaaca

SEQ ID NO: 1308411 - RNA, 19 nt, Artificial Sequence
  Description of Artificial Sequence: Synthetic oligonucleotide
ggauuacuaaaugcacugg

SEQ ID NO: 1308412 - RNA, 19 nt, Artificial Sequence
  Description of Artificial Sequence: Synthetic oligonucleotide
ucgcgucgaauucuuacau

SEQ ID NO: 1308413 - RNA, 19 nt, Artificial Sequence
  Description of Artificial Sequence: Synthetic oligonucleotide
agggcuaggcuuccucauc

SEQ ID NO: 1308414 - RNA, 19 nt, Artificial Sequence
  Description of Artificial Sequence: Synthetic oligonucleotide
augaggacaaauggauuca

SEQ ID NO: 1308415 - RNA, 19 nt, Artificial Sequence
  Description of Artificial Sequence: Synthetic oligonucleotide
ucuucccguguguaucuca

SEQ ID NO: 1308416 - RNA, 19 nt, Artificial Sequence
  Description of Artificial Sequence: Synthetic oligonucleotide
guacugauccagccaauga

SEQ ID NO: 1308417 - RNA, 19 nt, Artificial Sequence
  Description of Artificial Sequence: Synthetic oligonucleotide
cgaaagagaugaauugucc

SEQ ID NO: 1308418 - RNA, 19 nt, Artificial Sequence
  Description of Artificial Sequence: Synthetic oligonucleotide
ucguacuagcagcuucaga

SEQ ID NO: 1308419 - RNA, 19 nt, Artificial Sequence
  Description of Artificial Sequence: Synthetic oligonucleotide
ucggacuucuaagacccca

SEQ ID NO: 1308420 - RNA, 19 nt, Artificial Sequence
  Description of Artificial Sequence: Synthetic oligonucleotide
ccgaauagaaagcaucgug

SEQ ID NO: 1308421 - RNA, 19 nt, Artificial Sequence
  Description of Artificial Sequence: Synthetic oligonucleotide
uucccguguguaucucagg

SEQ ID NO: 1308422 - RNA, 19 nt, Artificial Sequence
  Description of Artificial Sequence: Synthetic oligonucleotide
agauagugagguaaguaua

SEQ ID NO: 1308423 - RNA, 19 nt, Artificial Sequence
  Description of Artificial Sequence: Synthetic oligonucleotide
guguauacaaucuguuggu

SEQ ID NO: 1308424 - RNA, 19 nt, Artificial Sequence
  Description of Artificial Sequence: Synthetic oligonucleotide
cuugaagccagcucguacu

SEQ ID NO: 1308425 - RNA, 19 nt, Artificial Sequence
  Description of Artificial Sequence: Synthetic oligonucleotide
guauaaagagggcucccaa

SEQ ID NO: 1308426 - RNA, 19 nt, Artificial Sequence
  Description of Artificial Sequence: Synthetic oligonucleotide
auaaucccacacacgcuuc

SEQ ID NO: 1308427 - RNA, 19 nt, Artificial Sequence
  Description of Artificial Sequence: Synthetic oligonucleotide
guugaaagaaagagccaca

SEQ ID NO: 1308428 - RNA, 19 nt, Artificial Sequence
  Description of Artificial Sequence: Synthetic oligonucleotide
caagaccguagaagcaaac

SEQ ID NO: 1308429 - RNA, 19 nt, Artificial Sequence
  Description of Artificial Sequence: Synthetic oligonucleotide
guguguucagaagaauaac

SEQ ID NO: 1308430 - RNA, 19 nt, Artificial Sequence
  Description of Artificial Sequence: Synthetic oligonucleotide
gauaccucccugaucagcu

SEQ ID NO: 1308431 - RNA, 19 nt, Artificial Sequence
  Description of Artificial Sequence: Synthetic oligonucleotide
gggguauuaaaugaaaacu

SEQ ID NO: 1308432 - RNA, 19 nt, Artificial Sequence
  Description of Artificial Sequence: Synthetic oligonucleotide
cagacaguaaggcaggccu

SEQ ID NO: 1308433 - RNA, 19 nt, Artificial Sequence
  Description of Artificial Sequence: Synthetic oligonucleotide
ugcaaguccuuggccaagc

SEQ ID NO: 1308434 - RNA, 19 nt, Artificial Sequence
  Description of Artificial Sequence: Synthetic oligonucleotide
caugguaaggagccgaacu

SEQ ID NO: 1308435 - RNA, 19 nt, Artificial Sequence
  Description of Artificial Sequence: Synthetic oligonucleotide
ucaucagggcaauggcuau

SEQ ID NO: 1308436 - RNA, 19 nt, Artificial Sequence
  Description of Artificial Sequence: Synthetic oligonucleotide
ugugauggucugagaaguu

SEQ ID NO: 1308437 - RNA, 19 nt, Artificial Sequence
  Description of Artificial Sequence: Synthetic oligonucleotide
uaccuacuugguacaugug

SEQ ID NO: 1308438 - RNA, 19 nt, Artificial Sequence
  Description of Artificial Sequence: Synthetic oligonucleotide
cuaugcuguuuguagagcu

SEQ ID NO: 1308439 - RNA, 19 nt, Artificial Sequence
  Description of Artificial Sequence: Synthetic oligonucleotide
auggauucaugcggggcag

SEQ ID NO: 1308440 - RNA, 19 nt, Artificial Sequence
  Description of Artificial Sequence: Synthetic oligonucleotide
augugacagggauccuauc

SEQ ID NO: 1308441 - RNA, 19 nt, Artificial Sequence
  Description of Artificial Sequence: Synthetic oligonucleotide
cauaccuacuugguacaug

SEQ ID NO: 1308442 - RNA, 19 nt, Artificial Sequence
  Description of Artificial Sequence: Synthetic oligonucleotide
agagaugaauuguccccau

SEQ ID NO: 1308443 - RNA, 19 nt, Artificial Sequence
  Description of Artificial Sequence: Synthetic oligonucleotide
aaagcaucgugaacagguu

SEQ ID NO: 1308444 - RNA, 19 nt, Artificial Sequence
  Description of Artificial Sequence: Synthetic oligonucleotide
agacuucuaaucguucaaa

SEQ ID NO: 1308445 - RNA, 19 nt, Artificial Sequence
  Description of Artificial Sequence: Synthetic oligonucleotide
agccaaugagccaaaucca

SEQ ID NO: 1308446 - RNA, 19 nt, Artificial Sequence
  Description of Artificial Sequence: Synthetic oligonucleotide
ugcaucgcgucgaauucuu

SEQ ID NO: 1308447 - RNA, 19 nt, Artificial Sequence
  Description of Artificial Sequence: Synthetic oligonucleotide
gaauaggcagggcuaggcu

SEQ ID NO: 1308448 - RNA, 19 nt, Artificial Sequence
  Description of Artificial Sequence: Synthetic oligonucleotide
gauacugcugaguccuggu

SEQ ID NO: 1308449 - RNA, 19 nt, Artificial Sequence
  Description of Artificial Sequence: Synthetic oligonucleotide
ugaggacaaauggauucau

SEQ ID NO: 1308450 - RNA, 19 nt, Artificial Sequence
  Description of Artificial Sequence: Synthetic oligonucleotide
ugcggucagcugcuacaag

SEQ ID NO: 1308451 - RNA, 19 nt, Artificial Sequence
  Description of Artificial Sequence: Synthetic oligonucleotide
gcaguuaaagcuaugcugu

SEQ ID NO: 1308452 - RNA, 19 nt, Artificial Sequence
  Description of Artificial Sequence: Synthetic oligonucleotide
uugugccaagaccguagaa

SEQ ID NO: 1308453 - RNA, 19 nt, Artificial Sequence
  Description of Artificial Sequence: Synthetic oligonucleotide
uccuaucaucaacauucuu

SEQ ID NO: 1308454 - RNA, 19 nt, Artificial Sequence
  Description of Artificial Sequence: Synthetic oligonucleotide
guuaacagucaaugcaaau

SEQ ID NO: 1308455 - RNA, 19 nt, Artificial Sequence
  Description of Artificial Sequence: Synthetic oligonucleotide
agcaaacgccccagcaagg

SEQ ID NO: 1308456 - RNA, 19 nt, Artificial Sequence
  Description of Artificial Sequence: Synthetic oligonucleotide
uugcaucgcgucgaauucu

SEQ ID NO: 1308457 - RNA, 19 nt, Artificial Sequence
  Description of Artificial Sequence: Synthetic oligonucleotide
uucggacuucuaagacccc

SEQ ID NO: 1308458 - RNA, 19 nt, Artificial Sequence
  Description of Artificial Sequence: Synthetic oligonucleotide
caugagcaaggaccauuug

SEQ ID NO: 1308459 - RNA, 19 nt, Artificial Sequence
  Description of Artificial Sequence: Synthetic oligonucleotide
cuaaaugcacugggaacca

SEQ ID NO: 1308460 - RNA, 19 nt, Artificial Sequence
  Description of Artificial Sequence: Synthetic oligonucleotide
acacacgcuucgacuaagg

SEQ ID NO: 1308461 - RNA, 19 nt, Artificial Sequence
  Description of Artificial Sequence: Synthetic oligonucleotide
gguagauaccucccugauc

SEQ ID NO: 1308462 - RNA, 19 nt, Artificial Sequence
  Description of Artificial Sequence: Synthetic oligonucleotide
agcacguugacugcaccaa

SEQ ID NO: 1308463 - RNA, 19 nt, Artificial Sequence
  Description of Artificial Sequence: Synthetic oligonucleotide
auacugcugaguccuggua

SEQ ID NO: 1308464 - RNA, 19 nt, Artificial Sequence
  Description of Artificial Sequence: Synthetic oligonucleotide
agguugaaagaaagagcca

SEQ ID NO: 1308465 - RNA, 19 nt, Artificial Sequence
  Description of Artificial Sequence: Synthetic oligonucleotide
cuaaucguucaaacccaaa

SEQ ID NO: 1308466 - RNA, 19 nt, Artificial Sequence
  Description of Artificial Sequence: Synthetic oligonucleotide
cagugcacagcacguugac

SEQ ID NO: 1308467 - RNA, 19 nt, Artificial Sequence
  Description of Artificial Sequence: Synthetic oligonucleotide
caaacgccccagcaagguc

SEQ ID NO: 1308468 - RNA, 19 nt, Artificial Sequence
  Description of Artificial Sequence: Synthetic oligonucleotide
gggcugcuagguuuggcag

SEQ ID NO: 1308469 - RNA, 19 nt, Artificial Sequence
  Description of Artificial Sequence: Synthetic oligonucleotide
cagucaaugcaaauuggau

SEQ ID NO: 1308470 - RNA, 19 nt, Artificial Sequence
  Description of Artificial Sequence: Synthetic oligonucleotide
cuucgacuaaggucugcca

SEQ ID NO: 1308471 - RNA, 19 nt, Artificial Sequence
  Description of Artificial Sequence: Synthetic oligonucleotide
gcuucgacuaaggucugcc

SEQ ID NO: 1308472 - RNA, 19 nt, Artificial Sequence
  Description of Artificial Sequence: Synthetic oligonucleotide
agugcacagcacguugacu

SEQ ID NO: 1308473 - RNA, 19 nt, Artificial Sequence
  Description of Artificial Sequence: Synthetic oligonucleotide
ccuaucaucaacauucuuu

SEQ ID NO: 1308474 - RNA, 19 nt, Artificial Sequence
  Description of Artificial Sequence: Synthetic oligonucleotide
gaugugacagggauccuau

SEQ ID NO: 1308475 - RNA, 19 nt, Artificial Sequence
  Description of Artificial Sequence: Synthetic oligonucleotide
gcgucgaauucuuacaugu

SEQ ID NO: 1308476 - RNA, 19 nt, Artificial Sequence
  Description of Artificial Sequence: Synthetic oligonucleotide
gacuaaggucugccacaug

SEQ ID NO: 1308477 - RNA, 19 nt, Artificial Sequence
  Description of Artificial Sequence: Synthetic oligonucleotide
guaucucaggcugauccaa

SEQ ID NO: 1308478 - RNA, 19 nt, Artificial Sequence
  Description of Artificial Sequence: Synthetic oligonucleotide
gccagugcacagcacguug

SEQ ID NO: 1308479 - RNA, 19 nt, Artificial Sequence
  Description of Artificial Sequence: Synthetic oligonucleotide
gucuaaauuccuggaguaa

SEQ ID NO: 1308480 - RNA, 19 nt, Artificial Sequence
  Description of Artificial Sequence: Synthetic oligonucleotide
auccuaucaucaacauucu

SEQ ID NO: 1308481 - RNA, 19 nt, Artificial Sequence
  Description of Artificial Sequence: Synthetic oligonucleotide
cacacacgcuucgacuaag

SEQ ID NO: 1308482 - RNA, 19 nt, Artificial Sequence
  Description of Artificial Sequence: Synthetic oligonucleotide
uccccaugguaaggagccg

SEQ ID NO: 1308483 - RNA, 19 nt, Artificial Sequence
  Description of Artificial Sequence: Synthetic oligonucleotide
guaaggcaggccugaucca

SEQ ID NO: 1308484 - RNA, 19 nt, Artificial Sequence
  Description of Artificial Sequence: Synthetic oligonucleotide
cauuggauacauggugcca

SEQ ID NO: 1308485 - RNA, 19 nt, Artificial Sequence
  Description of Artificial Sequence: Synthetic oligonucleotide
uguguaucucaggcugauc

SEQ ID NO: 1308486 - RNA, 19 nt, Artificial Sequence
  Description of Artificial Sequence: Synthetic oligonucleotide
acauggugccaaaugucau

SEQ ID NO: 1308487 - RNA, 19 nt, Artificial Sequence
  Description of Artificial Sequence: Synthetic oligonucleotide
cucguacuagcagcuucag

SEQ ID NO: 1308488 - RNA, 19 nt, Artificial Sequence
  Description of Artificial Sequence: Synthetic oligonucleotide
gcuaugcuguuuguagagc

SEQ ID NO: 1308489 - RNA, 19 nt, Artificial Sequence
  Description of Artificial Sequence: Synthetic oligonucleotide
uguccacgacuaagaccca

SEQ ID NO: 1308490 - RNA, 19 nt, Artificial Sequence
  Description of Artificial Sequence: Synthetic oligonucleotide
aggaccgcuguggcuuucg

SEQ ID NO: 1308491 - RNA, 19 nt, Artificial Sequence
  Description of Artificial Sequence: Synthetic oligonucleotide
aucuucccguguguaucuc

SEQ ID NO: 1308492 - RNA, 19 nt, Artificial Sequence
  Description of Artificial Sequence: Synthetic oligonucleotide
cuguacacacucauuggau

SEQ ID NO: 1308493 - RNA, 19 nt, Artificial Sequence
  Description of Artificial Sequence: Synthetic oligonucleotide
gauucaugcggggcaggaa

SEQ ID NO: 1308494 - RNA, 19 nt, Artificial Sequence
  Description of Artificial Sequence: Synthetic oligonucleotide
ugcugaguccugguauaau

SEQ ID NO: 1308495 - RNA, 19 nt, Artificial Sequence
  Description of Artificial Sequence: Synthetic oligonucleotide
guauaaucccacacacgcu

SEQ ID NO: 1308496 - RNA, 19 nt, Artificial Sequence
  Description of Artificial Sequence: Synthetic oligonucleotide
uugguacaugugggaaggu

SEQ ID NO: 1308497 - RNA, 19 nt, Artificial Sequence
  Description of Artificial Sequence: Synthetic oligonucleotide
gguuaacagucaaugcaaa

SEQ ID NO: 1308498 - RNA, 19 nt, Artificial Sequence
  Description of Artificial Sequence: Synthetic oligonucleotide
ccuggccugcuccaacucc

SEQ ID NO: 1308499 - RNA, 19 nt, Artificial Sequence
  Description of Artificial Sequence: Synthetic oligonucleotide
cucaaucccuggccugcuc

SEQ ID NO: 1308500 - RNA, 19 nt, Artificial Sequence
  Description of Artificial Sequence: Synthetic oligonucleotide
caaagauagugagguaagu

SEQ ID NO: 1308501 - RNA, 19 nt, Artificial Sequence
  Description of Artificial Sequence: Synthetic oligonucleotide
ggagucgacauuccucaua

SEQ ID NO: 1308502 - RNA, 19 nt, Artificial Sequence
  Description of Artificial Sequence: Synthetic oligonucleotide
ccgcuguggcuuucgaaag

SEQ ID NO: 1308503 - RNA, 19 nt, Artificial Sequence
  Description of Artificial Sequence: Synthetic oligonucleotide
aacgccccagcaaggucaa

SEQ ID NO: 1308504 - RNA, 19 nt, Artificial Sequence
  Description of Artificial Sequence: Synthetic oligonucleotide
gccgaacugcucccgccgg

SEQ ID NO: 1308505 - RNA, 19 nt, Artificial Sequence
  Description of Artificial Sequence: Synthetic oligonucleotide
gcggucagcugcuacaagu

SEQ ID NO: 1308506 - RNA, 19 nt, Artificial Sequence
  Description of Artificial Sequence: Synthetic oligonucleotide
gcucguacuagcagcuuca

SEQ ID NO: 1308507 - RNA, 19 nt, Artificial Sequence
  Description of Artificial Sequence: Synthetic oligonucleotide
gguguagucuggagaagaa

SEQ ID NO: 1308508 - RNA, 19 nt, Artificial Sequence
  Description of Artificial Sequence: Synthetic oligonucleotide
ggauuaugugauggucuga

SEQ ID NO: 1308509 - RNA, 19 nt, Artificial Sequence
  Description of Artificial Sequence: Synthetic oligonucleotide
ccuguuguuuccauaccua

SEQ ID NO: 1308510 - RNA, 19 nt, Artificial Sequence
  Description of Artificial Sequence: Synthetic oligonucleotide
ggucaaagauagugaggua

SEQ ID NO: 1308511 - RNA, 19 nt, Artificial Sequence
  Description of Artificial Sequence: Synthetic oligonucleotide
cacacgcuucgacuaaggu

SEQ ID NO: 1308512 - RNA, 19 nt, Artificial Sequence
  Description of Artificial Sequence: Synthetic oligonucleotide
gguaaggagccgaacugcu

SEQ ID NO: 1308513 - RNA, 19 nt, Artificial Sequence
  Description of Artificial Sequence: Synthetic oligonucleotide
cccauccaagguagauacc

SEQ ID NO: 1308514 - RNA, 19 nt, Artificial Sequence
  Description of Artificial Sequence: Synthetic oligonucleotide
caucgugaacagguugaaa

SEQ ID NO: 1308515 - RNA, 19 nt, Artificial Sequence
  Description of Artificial Sequence: Synthetic oligonucleotide
gcuuucgaaagagaugaau

SEQ ID NO: 1308516 - RNA, 19 nt, Artificial Sequence
  Description of Artificial Sequence: Synthetic oligonucleotide
caggaagauacugcugagu

SEQ ID NO: 1308517 - RNA, 19 nt, Artificial Sequence
  Description of Artificial Sequence: Synthetic oligonucleotide
ggauccuaucaucaacauu

SEQ ID NO: 1308518 - RNA, 19 nt, Artificial Sequence
  Description of Artificial Sequence: Synthetic oligonucleotide
cgcgucgaauucuuacaug

SEQ ID NO: 1308519 - RNA, 19 nt, Artificial Sequence
  Description of Artificial Sequence: Synthetic oligonucleotide
guccacgacuaagacccaa

SEQ ID NO: 1308520 - RNA, 19 nt, Artificial Sequence
  Description of Artificial Sequence: Synthetic oligonucleotide
cccacacacgcuucgacua

SEQ ID NO: 1308521 - RNA, 19 nt, Artificial Sequence
  Description of Artificial Sequence: Synthetic oligonucleotide
ccaagaccguagaagcaaa

SEQ ID NO: 1308522 - RNA, 19 nt, Artificial Sequence
  Description of Artificial Sequence: Synthetic oligonucleotide
caguuaaagcuaugcuguu

SEQ ID NO: 1308523 - RNA, 19 nt, Artificial Sequence
  Description of Artificial Sequence: Synthetic oligonucleotide
cugcggucagcugcuacaa

SEQ ID NO: 1308524 - RNA, 19 nt, Artificial Sequence
  Description of Artificial Sequence: Synthetic oligonucleotide
gguguguguccacgacuaa

SEQ ID NO: 1308525 - RNA, 19 nt, Artificial Sequence
  Description of Artificial Sequence: Synthetic oligonucleotide
agaccccauccaagguaga

SEQ ID NO: 1308526 - RNA, 19 nt, Artificial Sequence
  Description of Artificial Sequence: Synthetic oligonucleotide
ccaagguagauaccucccu

SEQ ID NO: 1308527 - RNA, 19 nt, Artificial Sequence
  Description of Artificial Sequence: Synthetic oligonucleotide
caugcggggcaggaagaua

SEQ ID NO: 1308528 - RNA, 19 nt, Artificial Sequence
  Description of Artificial Sequence: Synthetic oligonucleotide
acgcuucgacuaaggucug

SEQ ID NO: 1308529 - RNA, 19 nt, Artificial Sequence
  Description of Artificial Sequence: Synthetic oligonucleotide
cagggcuaggcuuccucau

SEQ ID NO: 1308530 - RNA, 19 nt, Artificial Sequence
  Description of Artificial Sequence: Synthetic oligonucleotide
gcaucgugaacagguugaa

SEQ ID NO: 1308531 - RNA, 19 nt, Artificial Sequence
  Description of Artificial Sequence: Synthetic oligonucleotide
gcaaacgccccagcaaggu

SEQ ID NO: 1308532 - RNA, 19 nt, Artificial Sequence
  Description of Artificial Sequence: Synthetic oligonucleotide
ggcuuucgaaagagaugaa

SEQ ID NO: 1308533 - RNA, 19 nt, Artificial Sequence
  Description of Artificial Sequence: Synthetic oligonucleotide
ccacacacgcuucgacuaa

SEQ ID NO: 1308534 - RNA, 19 nt, Artificial Sequence
  Description of Artificial Sequence: Synthetic oligonucleotide
cauuugcaucgcgucgaau

SEQ ID NO: 1308535 - RNA, 19 nt, Artificial Sequence
  Description of Artificial Sequence: Synthetic oligonucleotide
cauuacccaguagcuuauu

SEQ ID NO: 1308536 - RNA, 19 nt, Artificial Sequence
  Description of Artificial Sequence: Synthetic oligonucleotide
gcaucgcgucgaauucuua

SEQ ID NO: 1308537 - RNA, 19 nt, Artificial Sequence
  Description of Artificial Sequence: Synthetic oligonucleotide
caaggaccauuugcucauu

SEQ ID NO: 1308538 - RNA, 19 nt, Artificial Sequence
  Description of Artificial Sequence: Synthetic oligonucleotide
acgccccagcaaggucaau

SEQ ID NO: 1308539 - RNA, 19 nt, Artificial Sequence
  Description of Artificial Sequence: Synthetic oligonucleotide
ccauaccuacuugguacau

SEQ ID NO: 1308540 - RNA, 19 nt, Artificial Sequence
  Description of Artificial Sequence: Synthetic oligonucleotide
cagcucguacuagcagcuu

SEQ ID NO: 1308541 - RNA, 19 nt, Artificial Sequence
  Description of Artificial Sequence: Synthetic oligonucleotide
cgacuaaggucugccacau

SEQ ID NO: 1308542 - RNA, 19 nt, Artificial Sequence
  Description of Artificial Sequence: Synthetic oligonucleotide
ccucaaucccuggccugcu

SEQ ID NO: 1308543 - RNA, 19 nt, Artificial Sequence
  Description of Artificial Sequence: Synthetic oligonucleotide
aauauuauguugcuggcag

SEQ ID NO: 1308544 - RNA, 19 nt, Artificial Sequence
  Description of Artificial Sequence: Synthetic oligonucleotide
aaaauaguucucccgaaag

SEQ ID NO: 1308545 - RNA, 19 nt, Artificial Sequence
  Description of Artificial Sequence: Synthetic oligonucleotide
agcgauuucccguaguacc

SEQ ID NO: 1308546 - RNA, 19 nt, Artificial Sequence
  Description of Artificial Sequence: Synthetic oligonucleotide
acagcuuugguacagccgg

SEQ ID NO: 1308547 - RNA, 19 nt, Artificial Sequence
  Description of Artificial Sequence: Synthetic oligonucleotide
uagacuagcccuacuagcg

SEQ ID NO: 1308548 - RNA, 19 nt, Artificial Sequence
  Description of Artificial Sequence: Synthetic oligonucleotide
uagaugucaaaacagggcu

SEQ ID NO: 1308549 - RNA, 19 nt, Artificial Sequence
  Description of Artificial Sequence: Synthetic oligonucleotide
agaauauuauguugcuggc

SEQ ID NO: 1308550 - RNA, 19 nt, Artificial Sequence
  Description of Artificial Sequence: Synthetic oligonucleotide
gaacuuaucugacaccagg

SEQ ID NO: 1308551 - RNA, 19 nt, Artificial Sequence
  Description of Artificial Sequence: Synthetic oligonucleotide
uggcauuagaaccagugcc

SEQ ID NO: 1308552 - RNA, 19 nt, Artificial Sequence
  Description of Artificial Sequence: Synthetic oligonucleotide
aauggaagcgauuucccgu

SEQ ID NO: 1308553 - RNA, 19 nt, Artificial Sequence
  Description of Artificial Sequence: Synthetic oligonucleotide
gaauccagaguuguuagcg

SEQ ID NO: 1308554 - RNA, 19 nt, Artificial Sequence
  Description of Artificial Sequence: Synthetic oligonucleotide
aaaguccgggucuagaacu

SEQ ID NO: 1308555 - RNA, 19 nt, Artificial Sequence
  Description of Artificial Sequence: Synthetic oligonucleotide
aaugggaugacagggaaca

SEQ ID NO: 1308556 - RNA, 19 nt, Artificial Sequence
  Description of Artificial Sequence: Synthetic oligonucleotide
aaauaguucucccgaaagu

SEQ ID NO: 1308557 - RNA, 19 nt, Artificial Sequence
  Description of Artificial Sequence: Synthetic oligonucleotide
uccagaacuuaucugacac

SEQ ID NO: 1308558 - RNA, 19 nt, Artificial Sequence
  Description of Artificial Sequence: Synthetic oligonucleotide
uguagacuagcccuacuag

SEQ ID NO: 1308559 - RNA, 19 nt, Artificial Sequence
  Description of Artificial Sequence: Synthetic oligonucleotide
gaccuuaagauccugccgc

SEQ ID NO: 1308560 - RNA, 19 nt, Artificial Sequence
  Description of Artificial Sequence: Synthetic oligonucleotide
uauggguaauccgucaugg

SEQ ID NO: 1308561 - RNA, 19 nt, Artificial Sequence
  Description of Artificial Sequence: Synthetic oligonucleotide
uuuaaggucgccaccccag

SEQ ID NO: 1308562 - RNA, 19 nt, Artificial Sequence
  Description of Artificial Sequence: Synthetic oligonucleotide
aacucucaaaguugaagug

SEQ ID NO: 1308563 - RNA, 19 nt, Artificial Sequence
  Description of Artificial Sequence: Synthetic oligonucleotide
auauccuggaccuuaagau

SEQ ID NO: 1308564 - RNA, 19 nt, Artificial Sequence
  Description of Artificial Sequence: Synthetic oligonucleotide
ugaguuagaugcucugagg

SEQ ID NO: 1308565 - RNA, 19 nt, Artificial Sequence
  Description of Artificial Sequence: Synthetic oligonucleotide
augcauuccgggcaaacac

SEQ ID NO: 1308566 - RNA, 19 nt, Artificial Sequence
  Description of Artificial Sequence: Synthetic oligonucleotide
ucugacaccaggaaccgcu

SEQ ID NO: 1308567 - RNA, 19 nt, Artificial Sequence
  Description of Artificial Sequence: Synthetic oligonucleotide
guuggagaauauuauguug

SEQ ID NO: 1308568 - RNA, 19 nt, Artificial Sequence
  Description of Artificial Sequence: Synthetic oligonucleotide
aguaggguauggguaaucc

SEQ ID NO: 1308569 - RNA, 19 nt, Artificial Sequence
  Description of Artificial Sequence: Synthetic oligonucleotide
aggcccaugauccucuggc

SEQ ID NO: 1308570 - RNA, 19 nt, Artificial Sequence
  Description of Artificial Sequence: Synthetic oligonucleotide
uuacgcaccuccacgacag

SEQ ID NO: 1308571 - RNA, 19 nt, Artificial Sequence
  Description of Artificial Sequence: Synthetic oligonucleotide
gaaaaugggccccuugccc

SEQ ID NO: 1308572 - RNA, 19 nt, Artificial Sequence
  Description of Artificial Sequence: Synthetic oligonucleotide
agaguuguuagcgaagguc

SEQ ID NO: 1308573 - RNA, 19 nt, Artificial Sequence
  Description of Artificial Sequence: Synthetic oligonucleotide
uggguaauccgucauggca

SEQ ID NO: 1308574 - RNA, 19 nt, Artificial Sequence
  Description of Artificial Sequence: Synthetic oligonucleotide
auauuauguugcuggcagc

SEQ ID NO: 1308575 - RNA, 19 nt, Artificial Sequence
  Description of Artificial Sequence: Synthetic oligonucleotide
uuagcuggaagaguguugc

SEQ ID NO: 1308576 - RNA, 19 nt, Artificial Sequence
  Description of Artificial Sequence: Synthetic oligonucleotide
ucuaagucaccguuggaga

SEQ ID NO: 1308577 - RNA, 19 nt, Artificial Sequence
  Description of Artificial Sequence: Synthetic oligonucleotide
auguacucagguuucuccg

SEQ ID NO: 1308578 - RNA, 19 nt, Artificial Sequence
  Description of Artificial Sequence: Synthetic oligonucleotide
aaacaagggaucucugagu

SEQ ID NO: 1308579 - RNA, 19 nt, Artificial Sequence
  Description of Artificial Sequence: Synthetic oligonucleotide
aguuagaugcucugagguc

SEQ ID NO: 1308580 - RNA, 19 nt, Artificial Sequence
  Description of Artificial Sequence: Synthetic oligonucleotide
gaguuguuagcgaaggucc

SEQ ID NO: 1308581 - RNA, 19 nt, Artificial Sequence
  Description of Artificial Sequence: Synthetic oligonucleotide
acucucaaaguugaagugg

SEQ ID NO: 1308582 - RNA, 19 nt, Artificial Sequence
  Description of Artificial Sequence: Synthetic oligonucleotide
agcuuuaaggucgccaccc

SEQ ID NO: 1308583 - RNA, 19 nt, Artificial Sequence
  Description of Artificial Sequence: Synthetic oligonucleotide
agaauugguaggauucacc

SEQ ID NO: 1308584 - RNA, 19 nt, Artificial Sequence
  Description of Artificial Sequence: Synthetic oligonucleotide
augaauccagaguuguuag

SEQ ID NO: 1308585 - RNA, 19 nt, Artificial Sequence
  Description of Artificial Sequence: Synthetic oligonucleotide
cuuaucugacaccaggaac

SEQ ID NO: 1308586 - RNA, 19 nt, Artificial Sequence
  Description of Artificial Sequence: Synthetic oligonucleotide
uguacucagguuucuccgg

SEQ ID NO: 1308587 - RNA, 19 nt, Artificial Sequence
  Description of Artificial Sequence: Synthetic oligonucleotide
auguaggcaguauuccugg

SEQ ID NO: 1308588 - RNA, 19 nt, Artificial Sequence
  Description of Artificial Sequence: Synthetic oligonucleotide
cugcaaaccgaauggaagc

SEQ ID NO: 1308589 - RNA, 19 nt, Artificial Sequence
  Description of Artificial Sequence: Synthetic oligonucleotide
ugcgacagcuaccacagga

SEQ ID NO: 1308590 - RNA, 19 nt, Artificial Sequence
  Description of Artificial Sequence: Synthetic oligonucleotide
gucagauugaucucuguac

SEQ ID NO: 1308591 - RNA, 19 nt, Artificial Sequence
  Description of Artificial Sequence: Synthetic oligonucleotide
agaguguugcuucucaggu

SEQ ID NO: 1308592 - RNA, 19 nt, Artificial Sequence
  Description of Artificial Sequence: Synthetic oligonucleotide
uuucccguaguaccggugc

SEQ ID NO: 1308593 - RNA, 19 nt, Artificial Sequence
  Description of Artificial Sequence: Synthetic oligonucleotide
ugugucuuagcuggaagag

SEQ ID NO: 1308594 - RNA, 19 nt, Artificial Sequence
  Description of Artificial Sequence: Synthetic oligonucleotide
ugccaaaacucucaaaguu

SEQ ID NO: 1308595 - RNA, 19 nt, Artificial Sequence
  Description of Artificial Sequence: Synthetic oligonucleotide
guagaugucaaaacagggc

SEQ ID NO: 1308596 - RNA, 19 nt, Artificial Sequence
  Description of Artificial Sequence: Synthetic oligonucleotide
agacuagcccuacuagcgc

SEQ ID NO: 1308597 - RNA, 19 nt, Artificial Sequence
  Description of Artificial Sequence: Synthetic oligonucleotide
gucgugagcuccuuggagg

SEQ ID NO: 1308598 - RNA, 19 nt, Artificial Sequence
  Description of Artificial Sequence: Synthetic oligonucleotide
ugguacagccgguagaugu

SEQ ID NO: 1308599 - RNA, 19 nt, Artificial Sequence
  Description of Artificial Sequence: Synthetic oligonucleotide
gucucggaagaauugguag

SEQ ID NO: 1308600 - RNA, 19 nt, Artificial Sequence
  Description of Artificial Sequence: Synthetic oligonucleotide
uggaccuuaagauccugcc

SEQ ID NO: 1308601 - RNA, 19 nt, Artificial Sequence
  Description of Artificial Sequence: Synthetic oligonucleotide
uauuauguugcuggcagcu

SEQ ID NO: 1308602 - RNA, 19 nt, Artificial Sequence
  Description of Artificial Sequence: Synthetic oligonucleotide
ucaccguuggagaauauua

SEQ ID NO: 1308603 - RNA, 19 nt, Artificial Sequence
  Description of Artificial Sequence: Synthetic oligonucleotide
guagacuagcccuacuagc

SEQ ID NO: 1308604 - RNA, 19 nt, Artificial Sequence
  Description of Artificial Sequence: Synthetic oligonucleotide
aauccagaguuguuagcga

SEQ ID NO: 1308605 - RNA, 19 nt, Artificial Sequence
  Description of Artificial Sequence: Synthetic oligonucleotide
ugcaaaccgaauggaagcg

SEQ ID NO: 1308606 - RNA, 19 nt, Artificial Sequence
  Description of Artificial Sequence: Synthetic oligonucleotide
aaagguuuuguugccaaaa

SEQ ID NO: 1308607 - RNA, 19 nt, Artificial Sequence
  Description of Artificial Sequence: Synthetic oligonucleotide
gaaagcgacuggcagguac

SEQ ID NO: 1308608 - RNA, 19 nt, Artificial Sequence
  Description of Artificial Sequence: Synthetic oligonucleotide
uuuacgcaccuccacgaca

SEQ ID NO: 1308609 - RNA, 19 nt, Artificial Sequence
  Description of Artificial Sequence: Synthetic oligonucleotide
ggugggaauauccuggacc

SEQ ID NO: 1308610 - RNA, 19 nt, Artificial Sequence
  Description of Artificial Sequence: Synthetic oligonucleotide
aagcgauuucccguaguac

SEQ ID NO: 1308611 - RNA, 19 nt, Artificial Sequence
  Description of Artificial Sequence: Synthetic oligonucleotide
aauugguaggauucaccaa

SEQ ID NO: 1308612 - RNA, 19 nt, Artificial Sequence
  Description of Artificial Sequence: Synthetic oligonucleotide
ugucgugagcuccuuggag

SEQ ID NO: 1308613 - RNA, 19 nt, Artificial Sequence
  Description of Artificial Sequence: Synthetic oligonucleotide
cauaacucccuccgaaggc

SEQ ID NO: 1308614 - RNA, 19 nt, Artificial Sequence
  Description of Artificial Sequence: Synthetic oligonucleotide
auucaccaaggccugcgac

SEQ ID NO: 1308615 - RNA, 19 nt, Artificial Sequence
  Description of Artificial Sequence: Synthetic oligonucleotide
guaggguauggguaauccg

SEQ ID NO: 1308616 - RNA, 19 nt, Artificial Sequence
  Description of Artificial Sequence: Synthetic oligonucleotide
uccagaguuguuagcgaag

SEQ ID NO: 1308617 - RNA, 19 nt, Artificial Sequence
  Description of Artificial Sequence: Synthetic oligonucleotide
ucuacccacucacggauga

SEQ ID NO: 1308618 - RNA, 19 nt, Artificial Sequence
  Description of Artificial Sequence: Synthetic oligonucleotide
gacgucucggaagaauugg

SEQ ID NO: 1308619 - RNA, 19 nt, Artificial Sequence
  Description of Artificial Sequence: Synthetic oligonucleotide
caguuuacgcaccuccacg

SEQ ID NO: 1308620 - RNA, 19 nt, Artificial Sequence
  Description of Artificial Sequence: Synthetic oligonucleotide
auggguaauccgucauggc

SEQ ID NO: 1308621 - RNA, 19 nt, Artificial Sequence
  Description of Artificial Sequence: Synthetic oligonucleotide
uguguggacugcaaaccga

SEQ ID NO: 1308622 - RNA, 19 nt, Artificial Sequence
  Description of Artificial Sequence: Synthetic oligonucleotide
uuguagacuagcccuacua

SEQ ID NO: 1308623 - RNA, 19 nt, Artificial Sequence
  Description of Artificial Sequence: Synthetic oligonucleotide
aguuuacgcaccuccacga

SEQ ID NO: 1308624 - RNA, 19 nt, Artificial Sequence
  Description of Artificial Sequence: Synthetic oligonucleotide
accguuggagaauauuaug

SEQ ID NO: 1308625 - RNA, 19 nt, Artificial Sequence
  Description of Artificial Sequence: Synthetic oligonucleotide
uaucugacaccaggaaccg

SEQ ID NO: 1308626 - RNA, 19 nt, Artificial Sequence
  Description of Artificial Sequence: Synthetic oligonucleotide
uaauccgucauggcaagca

SEQ ID NO: 1308627 - RNA, 19 nt, Artificial Sequence
  Description of Artificial Sequence: Synthetic oligonucleotide
uuccccguguagaagaaaa

SEQ ID NO: 1308628 - RNA, 19 nt, Artificial Sequence
  Description of Artificial Sequence: Synthetic oligonucleotide
guaggauucaccaaggccu

SEQ ID NO: 1308629 - RNA, 19 nt, Artificial Sequence
  Description of Artificial Sequence: Synthetic oligonucleotide
aaugcauuccgggcaaaca

SEQ ID NO: 1308630 - RNA, 19 nt, Artificial Sequence
  Description of Artificial Sequence: Synthetic oligonucleotide
cccguguagaagaaaaugg

SEQ ID NO: 1308631 - RNA, 19 nt, Artificial Sequence
  Description of Artificial Sequence: Synthetic oligonucleotide
agcgaugauugauguacuc

SEQ ID NO: 1308632 - RNA, 19 nt, Artificial Sequence
  Description of Artificial Sequence: Synthetic oligonucleotide
uuauguugcuggcagcuuu

SEQ ID NO: 1308633 - RNA, 19 nt, Artificial Sequence
  Description of Artificial Sequence: Synthetic oligonucleotide
acauaaaacaagggaucuc

SEQ ID NO: 1308634 - RNA, 19 nt, Artificial Sequence
  Description of Artificial Sequence: Synthetic oligonucleotide
ugacgucucggaagaauug

SEQ ID NO: 1308635 - RNA, 19 nt, Artificial Sequence
  Description of Artificial Sequence: Synthetic oligonucleotide
guaccaaaauucuuccuga

SEQ ID NO: 1308636 - RNA, 19 nt, Artificial Sequence
  Description of Artificial Sequence: Synthetic oligonucleotide
uguguauacccacgcugug

SEQ ID NO: 1308637 - RNA, 19 nt, Artificial Sequence
  Description of Artificial Sequence: Synthetic oligonucleotide
ugcucggcaaagacaagca

SEQ ID NO: 1308638 - RNA, 19 nt, Artificial Sequence
  Description of Artificial Sequence: Synthetic oligonucleotide
cagauugaucucuguacag

SEQ ID NO: 1308639 - RNA, 19 nt, Artificial Sequence
  Description of Artificial Sequence: Synthetic oligonucleotide
caagucccugaucuguugg

SEQ ID NO: 1308640 - RNA, 19 nt, Artificial Sequence
  Description of Artificial Sequence: Synthetic oligonucleotide
gaguuagaugcucugaggu

SEQ ID NO: 1308641 - RNA, 19 nt, Artificial Sequence
  Description of Artificial Sequence: Synthetic oligonucleotide
cuuagcuggaagaguguug

SEQ ID NO: 1308642 - RNA, 19 nt, Artificial Sequence
  Description of Artificial Sequence: Synthetic oligonucleotide
ggaucucugagucaugcug

SEQ ID NO: 1308643 - RNA, 19 nt, Artificial Sequence
  Description of Artificial Sequence: Synthetic oligonucleotide
uauacccacgcugugugga

SEQ ID NO: 1308644 - RNA, 19 nt, Artificial Sequence
  Description of Artificial Sequence: Synthetic oligonucleotide
aaaguccgccagugccugc

SEQ ID NO: 1308645 - RNA, 19 nt, Artificial Sequence
  Description of Artificial Sequence: Synthetic oligonucleotide
ugacagcgaugauugaugu

SEQ ID NO: 1308646 - RNA, 19 nt, Artificial Sequence
  Description of Artificial Sequence: Synthetic oligonucleotide
gcucacauaaaacaaggga

SEQ ID NO: 1308647 - RNA, 19 nt, Artificial Sequence
  Description of Artificial Sequence: Synthetic oligonucleotide
uccacgacagauugagggu

SEQ ID NO: 1308648 - RNA, 19 nt, Artificial Sequence
  Description of Artificial Sequence: Synthetic oligonucleotide
cucugagucaugcuguguc

SEQ ID NO: 1308649 - RNA, 19 nt, Artificial Sequence
  Description of Artificial Sequence: Synthetic oligonucleotide
aaaauccgcugugacgucu

SEQ ID NO: 1308650 - RNA, 19 nt, Artificial Sequence
  Description of Artificial Sequence: Synthetic oligonucleotide
ugauugauguacucagguu

SEQ ID NO: 1308651 - RNA, 19 nt, Artificial Sequence
  Description of Artificial Sequence: Synthetic oligonucleotide
uggcccuuacucagcaucc

SEQ ID NO: 1308652 - RNA, 19 nt, Artificial Sequence
  Description of Artificial Sequence: Synthetic oligonucleotide
aauccgcugugacgucucg

SEQ ID NO: 1308653 - RNA, 19 nt, Artificial Sequence
  Description of Artificial Sequence: Synthetic oligonucleotide
ccguguagaagaaaauggg

SEQ ID NO: 1308654 - RNA, 19 nt, Artificial Sequence
  Description of Artificial Sequence: Synthetic oligonucleotide
ugacaggguuggcaggaag

SEQ ID NO: 1308655 - RNA, 19 nt, Artificial Sequence
  Description of Artificial Sequence: Synthetic oligonucleotide
acacgccccauguauguag

SEQ ID NO: 1308656 - RNA, 19 nt, Artificial Sequence
  Description of Artificial Sequence: Synthetic oligonucleotide
cagaacuuaucugacacca

SEQ ID NO: 1308657 - RNA, 19 nt, Artificial Sequence
  Description of Artificial Sequence: Synthetic oligonucleotide
aguuguagacuagcccuac

SEQ ID NO: 1308658 - RNA, 19 nt, Artificial Sequence
  Description of Artificial Sequence: Synthetic oligonucleotide
uaccacaggagcacuggcu

SEQ ID NO: 1308659 - RNA, 19 nt, Artificial Sequence
  Description of Artificial Sequence: Synthetic oligonucleotide
ccuacuagcgcucguaggc

SEQ ID NO: 1308660 - RNA, 19 nt, Artificial Sequence
  Description of Artificial Sequence: Synthetic oligonucleotide
gaagaauugguaggauuca

SEQ ID NO: 1308661 - RNA, 19 nt, Artificial Sequence
  Description of Artificial Sequence: Synthetic oligonucleotide
auguaggcgcucagcaucc

SEQ ID NO: 1308662 - RNA, 19 nt, Artificial Sequence
  Description of Artificial Sequence: Synthetic oligonucleotide
uuaaggucgccaccccaga

SEQ ID NO: 1308663 - RNA, 19 nt, Artificial Sequence
  Description of Artificial Sequence: Synthetic oligonucleotide
guauggguaauccgucaug

SEQ ID NO: 1308664 - RNA, 19 nt, Artificial Sequence
  Description of Artificial Sequence: Synthetic oligonucleotide
ggaccuuaagauccugccg

SEQ ID NO: 1308665 - RNA, 19 nt, Artificial Sequence
  Description of Artificial Sequence: Synthetic oligonucleotide
ugguccgcagccagucugg

SEQ ID NO: 1308666 - RNA, 19 nt, Artificial Sequence
  Description of Artificial Sequence: Synthetic oligonucleotide
gcuguguauacccacgcug

SEQ ID NO: 1308667 - RNA, 19 nt, Artificial Sequence
  Description of Artificial Sequence: Synthetic oligonucleotide
aaauccgcugugacgucuc

SEQ ID NO: 1308668 - RNA, 19 nt, Artificial Sequence
  Description of Artificial Sequence: Synthetic oligonucleotide
agcucacauaaaacaaggg

SEQ ID NO: 1308669 - RNA, 19 nt, Artificial Sequence
  Description of Artificial Sequence: Synthetic oligonucleotide
uacuagcgcucguaggccc

SEQ ID NO: 1308670 - RNA, 19 nt, Artificial Sequence
  Description of Artificial Sequence: Synthetic oligonucleotide
gugacagcgaugauugaug

SEQ ID NO: 1308671 - RNA, 19 nt, Artificial Sequence
  Description of Artificial Sequence: Synthetic oligonucleotide
ucuguacaggccugguagu

SEQ ID NO: 1308672 - RNA, 19 nt, Artificial Sequence
  Description of Artificial Sequence: Synthetic oligonucleotide
uuucuccggaucccgcccc

SEQ ID NO: 1308673 - RNA, 19 nt, Artificial Sequence
  Description of Artificial Sequence: Synthetic oligonucleotide
auaacucccuccgaaggcu

SEQ ID NO: 1308674 - RNA, 19 nt, Artificial Sequence
  Description of Artificial Sequence: Synthetic oligonucleotide
uauguugcuggcagcuuua

SEQ ID NO: 1308675 - RNA, 19 nt, Artificial Sequence
  Description of Artificial Sequence: Synthetic oligonucleotide
uuacacagccccaguccca

SEQ ID NO: 1308676 - RNA, 19 nt, Artificial Sequence
  Description of Artificial Sequence: Synthetic oligonucleotide
gaagcgauuucccguagua

SEQ ID NO: 1308677 - RNA, 19 nt, Artificial Sequence
  Description of Artificial Sequence: Synthetic oligonucleotide
ggaguuguagacuagcccu

SEQ ID NO: 1308678 - RNA, 19 nt, Artificial Sequence
  Description of Artificial Sequence: Synthetic oligonucleotide
gcucguaggcccaugaucc

SEQ ID NO: 1308679 - RNA, 19 nt, Artificial Sequence
  Description of Artificial Sequence: Synthetic oligonucleotide
aaguccgggucuagaacuc

SEQ ID NO: 1308680 - RNA, 19 nt, Artificial Sequence
  Description of Artificial Sequence: Synthetic oligonucleotide
guuagaugcucugaggucu

SEQ ID NO: 1308681 - RNA, 19 nt, Artificial Sequence
  Description of Artificial Sequence: Synthetic oligonucleotide
guaaaugcauuccgggcaa

SEQ ID NO: 1308682 - RNA, 19 nt, Artificial Sequence
  Description of Artificial Sequence: Synthetic oligonucleotide
gaagggaccccauggucca

SEQ ID NO: 1308683 - RNA, 19 nt, Artificial Sequence
  Description of Artificial Sequence: Synthetic oligonucleotide
guuguuagcgaagguccag

SEQ ID NO: 1308684 - RNA, 19 nt, Artificial Sequence
  Description of Artificial Sequence: Synthetic oligonucleotide
gucuaggugaugugcuccc

SEQ ID NO: 1308685 - RNA, 19 nt, Artificial Sequence
  Description of Artificial Sequence: Synthetic oligonucleotide
cucaguaggguauggguaa

SEQ ID NO: 1308686 - RNA, 19 nt, Artificial Sequence
  Description of Artificial Sequence: Synthetic oligonucleotide
guauacccacgcugugugg

SEQ ID NO: 1308687 - RNA, 19 nt, Artificial Sequence
  Description of Artificial Sequence: Synthetic oligonucleotide
uaggcccaugauccucugg

SEQ ID NO: 1308688 - RNA, 19 nt, Artificial Sequence
  Description of Artificial Sequence: Synthetic oligonucleotide
uggaagcgauuucccguag

SEQ ID NO: 1308689 - RNA, 19 nt, Artificial Sequence
  Description of Artificial Sequence: Synthetic oligonucleotide
aaggucagauugaucucug

SEQ ID NO: 1308690 - RNA, 19 nt, Artificial Sequence
  Description of Artificial Sequence: Synthetic oligonucleotide
ccauaacucccuccgaagg

SEQ ID NO: 1308691 - RNA, 19 nt, Artificial Sequence
  Description of Artificial Sequence: Synthetic oligonucleotide
gugcucggcaaagacaagc

SEQ ID NO: 1308692 - RNA, 19 nt, Artificial Sequence
  Description of Artificial Sequence: Synthetic oligonucleotide
gccaaaacucucaaaguug

SEQ ID NO: 1308693 - RNA, 19 nt, Artificial Sequence
  Description of Artificial Sequence: Synthetic oligonucleotide
gguaauccgucauggcaag

SEQ ID NO: 1308694 - RNA, 19 nt, Artificial Sequence
  Description of Artificial Sequence: Synthetic oligonucleotide
agguccuuugagcuggaaa

SEQ ID NO: 1308695 - RNA, 19 nt, Artificial Sequence
  Description of Artificial Sequence: Synthetic oligonucleotide
auggaagcgauuucccgua

SEQ ID NO: 1308696 - RNA, 19 nt, Artificial Sequence
  Description of Artificial Sequence: Synthetic oligonucleotide
caaaauaguucucccgaaa

SEQ ID NO: 1308697 - RNA, 19 nt, Artificial Sequence
  Description of Artificial Sequence: Synthetic oligonucleotide
ggaagggaccccauggucc

SEQ ID NO: 1308698 - RNA, 19 nt, Artificial Sequence
  Description of Artificial Sequence: Synthetic oligonucleotide
aggguauggguaauccguc

SEQ ID NO: 1308699 - RNA, 19 nt, Artificial Sequence
  Description of Artificial Sequence: Synthetic oligonucleotide
cacgccccauguauguagg

SEQ ID NO: 1308700 - RNA, 19 nt, Artificial Sequence
  Description of Artificial Sequence: Synthetic oligonucleotide
ccaggaagggaccccaugg

SEQ ID NO: 1308701 - RNA, 19 nt, Artificial Sequence
  Description of Artificial Sequence: Synthetic oligonucleotide
acaagggaucucugaguca

SEQ ID NO: 1308702 - RNA, 19 nt, Artificial Sequence
  Description of Artificial Sequence: Synthetic oligonucleotide
ugguccauguauuguucaa

SEQ ID NO: 1308703 - RNA, 19 nt, Artificial Sequence
  Description of Artificial Sequence: Synthetic oligonucleotide
aaaugggccccuugcccau

SEQ ID NO: 1308704 - RNA, 19 nt, Artificial Sequence
  Description of Artificial Sequence: Synthetic oligonucleotide
ggcuauggugggaauaucc

SEQ ID NO: 1308705 - RNA, 19 nt, Artificial Sequence
  Description of Artificial Sequence: Synthetic oligonucleotide
uuagaugcucugaggucua

SEQ ID NO: 1308706 - RNA, 19 nt, Artificial Sequence
  Description of Artificial Sequence: Synthetic oligonucleotide
auggugggaauauccugga

SEQ ID NO: 1308707 - RNA, 19 nt, Artificial Sequence
  Description of Artificial Sequence: Synthetic oligonucleotide
cuuacucagcauccguuca

SEQ ID NO: 1308708 - RNA, 19 nt, Artificial Sequence
  Description of Artificial Sequence: Synthetic oligonucleotide
uccgggucuagaacucugu

SEQ ID NO: 1308709 - RNA, 19 nt, Artificial Sequence
  Description of Artificial Sequence: Synthetic oligonucleotide
cugucaaaggucagauuga

SEQ ID NO: 1308710 - RNA, 19 nt, Artificial Sequence
  Description of Artificial Sequence: Synthetic oligonucleotide
gaguguugcuucucagguc

SEQ ID NO: 1308711 - RNA, 19 nt, Artificial Sequence
  Description of Artificial Sequence: Synthetic oligonucleotide
ugagucaugcugugucuua

SEQ ID NO: 1308712 - RNA, 19 nt, Artificial Sequence
  Description of Artificial Sequence: Synthetic oligonucleotide
cagcuguguauacccacgc

SEQ ID NO: 1308713 - RNA, 19 nt, Artificial Sequence
  Description of Artificial Sequence: Synthetic oligonucleotide
acgccccauguauguaggc

SEQ ID NO: 1308714 - RNA, 19 nt, Artificial Sequence
  Description of Artificial Sequence: Synthetic oligonucleotide
uaaggucgccaccccagaa

SEQ ID NO: 1308715 - RNA, 19 nt, Artificial Sequence
  Description of Artificial Sequence: Synthetic oligonucleotide
cuacuagcgcucguaggcc

SEQ ID NO: 1308716 - RNA, 19 nt, Artificial Sequence
  Description of Artificial Sequence: Synthetic oligonucleotide
caaggccugcgacagcuac

SEQ ID NO: 1308717 - RNA, 19 nt, Artificial Sequence
  Description of Artificial Sequence: Synthetic oligonucleotide
ggcaaagacaagcagggcu

SEQ ID NO: 1308718 - RNA, 19 nt, Artificial Sequence
  Description of Artificial Sequence: Synthetic oligonucleotide
gaagguucccaaggaacuc

SEQ ID NO: 1308719 - RNA, 19 nt, Artificial Sequence
  Description of Artificial Sequence: Synthetic oligonucleotide
agcuguguauacccacgcu

SEQ ID NO: 1308720 - RNA, 19 nt, Artificial Sequence
  Description of Artificial Sequence: Synthetic oligonucleotide
cauccguucacaggccacc

SEQ ID NO: 1308721 - RNA, 19 nt, Artificial Sequence
  Description of Artificial Sequence: Synthetic oligonucleotide
uuagaaccagugccacauc

SEQ ID NO: 1308722 - RNA, 19 nt, Artificial Sequence
  Description of Artificial Sequence: Synthetic oligonucleotide
cauccaguggggucagcac

SEQ ID NO: 1308723 - RNA, 19 nt, Artificial Sequence
  Description of Artificial Sequence: Synthetic oligonucleotide
ggagaauauuauguugcug

SEQ ID NO: 1308724 - RNA, 19 nt, Artificial Sequence
  Description of Artificial Sequence: Synthetic oligonucleotide
guuuacgcaccuccacgac

SEQ ID NO: 1308725 - RNA, 19 nt, Artificial Sequence
  Description of Artificial Sequence: Synthetic oligonucleotide
aagucaccguuggagaaua

SEQ ID NO: 1308726 - RNA, 19 nt, Artificial Sequence
  Description of Artificial Sequence: Synthetic oligonucleotide
gaacaagucccugaucugu

SEQ ID NO: 1308727 - RNA, 19 nt, Artificial Sequence
  Description of Artificial Sequence: Synthetic oligonucleotide
uugauguacucagguuucu

SEQ ID NO: 1308728 - RNA, 19 nt, Artificial Sequence
  Description of Artificial Sequence: Synthetic oligonucleotide
ugucaaaacagggcuccau

SEQ ID NO: 1308729 - RNA, 19 nt, Artificial Sequence
  Description of Artificial Sequence: Synthetic oligonucleotide
ccgaauggaagcgauuucc

SEQ ID NO: 1308730 - RNA, 19 nt, Artificial Sequence
  Description of Artificial Sequence: Synthetic oligonucleotide
gccgguagaugucaaaaca

SEQ ID NO: 1308731 - RNA, 19 nt, Artificial Sequence
  Description of Artificial Sequence: Synthetic oligonucleotide
cagcuuuaaggucgccacc

SEQ ID NO: 1308732 - RNA, 19 nt, Artificial Sequence
  Description of Artificial Sequence: Synthetic oligonucleotide
ucuaggugaugugcucccc

SEQ ID NO: 1308733 - RNA, 19 nt, Artificial Sequence
  Description of Artificial Sequence: Synthetic oligonucleotide
aaguccgccagugccugcu

SEQ ID NO: 1308734 - RNA, 19 nt, Artificial Sequence
  Description of Artificial Sequence: Synthetic oligonucleotide
cugguccgcagccagucug

SEQ ID NO: 1308735 - RNA, 19 nt, Artificial Sequence
  Description of Artificial Sequence: Synthetic oligonucleotide
cuuuaaggucgccacccca

SEQ ID NO: 1308736 - RNA, 19 nt, Artificial Sequence
  Description of Artificial Sequence: Synthetic oligonucleotide
cucggaagaauugguagga

SEQ ID NO: 1308737 - RNA, 19 nt, Artificial Sequence
  Description of Artificial Sequence: Synthetic oligonucleotide
uggugggaauauccuggac

SEQ ID NO: 1308738 - RNA, 19 nt, Artificial Sequence
  Description of Artificial Sequence: Synthetic oligonucleotide
ggaagaguguugcuucuca

SEQ ID NO: 1308739 - RNA, 19 nt, Artificial Sequence
  Description of Artificial Sequence: Synthetic oligonucleotide
guacucagguuucuccgga

SEQ ID NO: 1308740 - RNA, 19 nt, Artificial Sequence
  Description of Artificial Sequence: Synthetic oligonucleotide
gauggugacagcgaugauu

SEQ ID NO: 1308741 - RNA, 19 nt, Artificial Sequence
  Description of Artificial Sequence: Synthetic oligonucleotide
uucccguaguaccggugcu

SEQ ID NO: 1308742 - RNA, 19 nt, Artificial Sequence
  Description of Artificial Sequence: Synthetic oligonucleotide
aguaccggugcucggcaaa

SEQ ID NO: 1308743 - RNA, 19 nt, Artificial Sequence
  Description of Artificial Sequence: Synthetic oligonucleotide
ggcggaguucaucagagaa

SEQ ID NO: 1308744 - RNA, 19 nt, Artificial Sequence
  Description of Artificial Sequence: Synthetic oligonucleotide
guauuccuggcggaguuca

SEQ ID NO: 1308745 - RNA, 19 nt, Artificial Sequence
  Description of Artificial Sequence: Synthetic oligonucleotide
aggaacucaguaggguaug

SEQ ID NO: 1308746 - RNA, 19 nt, Artificial Sequence
  Description of Artificial Sequence: Synthetic oligonucleotide
agcuuccaguuuacgcacc

SEQ ID NO: 1308747 - RNA, 19 nt, Artificial Sequence
  Description of Artificial Sequence: Synthetic oligonucleotide
uccccguguagaagaaaau

SEQ ID NO: 1308748 - RNA, 19 nt, Artificial Sequence
  Description of Artificial Sequence: Synthetic oligonucleotide
cuagcccuacuagcgcucg

SEQ ID NO: 1308749 - RNA, 19 nt, Artificial Sequence
  Description of Artificial Sequence: Synthetic oligonucleotide
acuagcccuacuagcgcuc

SEQ ID NO: 1308750 - RNA, 19 nt, Artificial Sequence
  Description of Artificial Sequence: Synthetic oligonucleotide
cauuagaaccagugccaca

SEQ ID NO: 1308751 - RNA, 19 nt, Artificial Sequence
  Description of Artificial Sequence: Synthetic oligonucleotide
gcuuugguacagccgguag

SEQ ID NO: 1308752 - RNA, 19 nt, Artificial Sequence
  Description of Artificial Sequence: Synthetic oligonucleotide
cuguguauacccacgcugu

SEQ ID NO: 1308753 - RNA, 19 nt, Artificial Sequence
  Description of Artificial Sequence: Synthetic oligonucleotide
gucgccaccccagaagcug

SEQ ID NO: 1308754 - RNA, 19 nt, Artificial Sequence
  Description of Artificial Sequence: Synthetic oligonucleotide
ccagaacuuaucugacacc

SEQ ID NO: 1308755 - RNA, 19 nt, Artificial Sequence
  Description of Artificial Sequence: Synthetic oligonucleotide
gggacacaaggcugaaagc

SEQ ID NO: 1308756 - RNA, 19 nt, Artificial Sequence
  Description of Artificial Sequence: Synthetic oligonucleotide
cacucacggaugagggcag

SEQ ID NO: 1308757 - RNA, 19 nt, Artificial Sequence
  Description of Artificial Sequence: Synthetic oligonucleotide
caaaguccgccagugccug

SEQ ID NO: 1308758 - RNA, 19 nt, Artificial Sequence
  Description of Artificial Sequence: Synthetic oligonucleotide
ggucuaggugaugugcucc

SEQ ID NO: 1308759 - RNA, 19 nt, Artificial Sequence
  Description of Artificial Sequence: Synthetic oligonucleotide
gacuagcccuacuagcgcu

SEQ ID NO: 1308760 - RNA, 19 nt, Artificial Sequence
  Description of Artificial Sequence: Synthetic oligonucleotide
guaguaccggugcucggca

SEQ ID NO: 1308761 - RNA, 19 nt, Artificial Sequence
  Description of Artificial Sequence: Synthetic oligonucleotide
gaagugguccauguauugu

SEQ ID NO: 1308762 - RNA, 19 nt, Artificial Sequence
  Description of Artificial Sequence: Synthetic oligonucleotide
gugagcuccuuggaggaac

SEQ ID NO: 1308763 - RNA, 19 nt, Artificial Sequence
  Description of Artificial Sequence: Synthetic oligonucleotide
uaacucccuccgaaggcua

SEQ ID NO: 1308764 - RNA, 19 nt, Artificial Sequence
  Description of Artificial Sequence: Synthetic oligonucleotide
ugguagucccaggccuugg

SEQ ID NO: 1308765 - RNA, 19 nt, Artificial Sequence
  Description of Artificial Sequence: Synthetic oligonucleotide
gucaugcugugucuuagcu

SEQ ID NO: 1308766 - RNA, 19 nt, Artificial Sequence
  Description of Artificial Sequence: Synthetic oligonucleotide
aagcgacuggcagguacca

SEQ ID NO: 1308767 - RNA, 19 nt, Artificial Sequence
  Description of Artificial Sequence: Synthetic oligonucleotide
uacucagguuucuccggau

SEQ ID NO: 1308768 - RNA, 19 nt, Artificial Sequence
  Description of Artificial Sequence: Synthetic oligonucleotide
ccuuacucagcauccguuc

SEQ ID NO: 1308769 - RNA, 19 nt, Artificial Sequence
  Description of Artificial Sequence: Synthetic oligonucleotide
ugcccaucuuccagaacuu

SEQ ID NO: 1308770 - RNA, 19 nt, Artificial Sequence
  Description of Artificial Sequence: Synthetic oligonucleotide
agcgcucguaggcccauga

SEQ ID NO: 1308771 - RNA, 19 nt, Artificial Sequence
  Description of Artificial Sequence: Synthetic oligonucleotide
uggaagaguguugcuucuc

SEQ ID NO: 1308772 - RNA, 19 nt, Artificial Sequence
  Description of Artificial Sequence: Synthetic oligonucleotide
aaaccgaauggaagcgauu

SEQ ID NO: 1308773 - RNA, 19 nt, Artificial Sequence
  Description of Artificial Sequence: Synthetic oligonucleotide
cccauaacucccuccgaag

SEQ ID NO: 1308774 - RNA, 19 nt, Artificial Sequence
  Description of Artificial Sequence: Synthetic oligonucleotide
caaaacucucaaaguugaa

SEQ ID NO: 1308775 - RNA, 19 nt, Artificial Sequence
  Description of Artificial Sequence: Synthetic oligonucleotide
guaccggugcucggcaaag

SEQ ID NO: 1308776 - RNA, 19 nt, Artificial Sequence
  Description of Artificial Sequence: Synthetic oligonucleotide
ucggaagaauugguaggau

SEQ ID NO: 1308777 - RNA, 19 nt, Artificial Sequence
  Description of Artificial Sequence: Synthetic oligonucleotide
gguagucccaggccuuggc

SEQ ID NO: 1308778 - RNA, 19 nt, Artificial Sequence
  Description of Artificial Sequence: Synthetic oligonucleotide
ucaguaggguauggguaau

SEQ ID NO: 1308779 - RNA, 19 nt, Artificial Sequence
  Description of Artificial Sequence: Synthetic oligonucleotide
cauguauguaggcaguauu

SEQ ID NO: 1308780 - RNA, 19 nt, Artificial Sequence
  Description of Artificial Sequence: Synthetic oligonucleotide
cuguacaggccugguaguc

SEQ ID NO: 1308781 - RNA, 19 nt, Artificial Sequence
  Description of Artificial Sequence: Synthetic oligonucleotide
uggcggaguucaucagaga

SEQ ID NO: 1308782 - RNA, 19 nt, Artificial Sequence
  Description of Artificial Sequence: Synthetic oligonucleotide
gauuucccguaguaccggu

SEQ ID NO: 1308783 - RNA, 19 nt, Artificial Sequence
  Description of Artificial Sequence: Synthetic oligonucleotide
gacagcgaugauugaugua

SEQ ID NO: 1308784 - RNA, 19 nt, Artificial Sequence
  Description of Artificial Sequence: Synthetic oligonucleotide
ggguaauccgucauggcaa

SEQ ID NO: 1308785 - RNA, 19 nt, Artificial Sequence
  Description of Artificial Sequence: Synthetic oligonucleotide
gggcaaagguuuuguugcc

SEQ ID NO: 1308786 - RNA, 19 nt, Artificial Sequence
  Description of Artificial Sequence: Synthetic oligonucleotide
auuauguugcuggcagcuu

SEQ ID NO: 1308787 - RNA, 19 nt, Artificial Sequence
  Description of Artificial Sequence: Synthetic oligonucleotide
gcgaugauugauguacuca

SEQ ID NO: 1308788 - RNA, 19 nt, Artificial Sequence
  Description of Artificial Sequence: Synthetic oligonucleotide
gcuuuaaggucgccacccc

SEQ ID NO: 1308789 - RNA, 19 nt, Artificial Sequence
  Description of Artificial Sequence: Synthetic oligonucleotide
ccaguuuacgcaccuccac

SEQ ID NO: 1308790 - RNA, 19 nt, Artificial Sequence
  Description of Artificial Sequence: Synthetic oligonucleotide
caaaccgaauggaagcgau

SEQ ID NO: 1308791 - RNA, 19 nt, Artificial Sequence
  Description of Artificial Sequence: Synthetic oligonucleotide
gcgacagcuaccacaggag

SEQ ID NO: 1308792 - RNA, 19 nt, Artificial Sequence
  Description of Artificial Sequence: Synthetic oligonucleotide
guaauccgucauggcaagc

SEQ ID NO: 1308793 - RNA, 19 nt, Artificial Sequence
  Description of Artificial Sequence: Synthetic oligonucleotide
gaguuguagacuagcccua

SEQ ID NO: 1308794 - RNA, 19 nt, Artificial Sequence
  Description of Artificial Sequence: Synthetic oligonucleotide
ccguucacaggccaccuug

SEQ ID NO: 1308795 - RNA, 19 nt, Artificial Sequence
  Description of Artificial Sequence: Synthetic oligonucleotide
acgucucggaagaauuggu

SEQ ID NO: 1308796 - RNA, 19 nt, Artificial Sequence
  Description of Artificial Sequence: Synthetic oligonucleotide
uccgaaggcuaugguggga

SEQ ID NO: 1308797 - RNA, 19 nt, Artificial Sequence
  Description of Artificial Sequence: Synthetic oligonucleotide
cccguggauggugacagcg

SEQ ID NO: 1308798 - RNA, 19 nt, Artificial Sequence
  Description of Artificial Sequence: Synthetic oligonucleotide
cccuacuagcgcucguagg

SEQ ID NO: 1308799 - RNA, 19 nt, Artificial Sequence
  Description of Artificial Sequence: Synthetic oligonucleotide
gccugcgacagcuaccaca

SEQ ID NO: 1308800 - RNA, 19 nt, Artificial Sequence
  Description of Artificial Sequence: Synthetic oligonucleotide
uggugacagcgaugauuga

SEQ ID NO: 1308801 - RNA, 19 nt, Artificial Sequence
  Description of Artificial Sequence: Synthetic oligonucleotide
caagggaucucugagucau

SEQ ID NO: 1308802 - RNA, 19 nt, Artificial Sequence
  Description of Artificial Sequence: Synthetic oligonucleotide
gugucgugagcuccuugga

SEQ ID NO: 1308803 - RNA, 19 nt, Artificial Sequence
  Description of Artificial Sequence: Synthetic oligonucleotide
uaguaccggugcucggcaa

SEQ ID NO: 1308804 - RNA, 19 nt, Artificial Sequence
  Description of Artificial Sequence: Synthetic oligonucleotide
gcgaagguccagauguccc

SEQ ID NO: 1308805 - RNA, 19 nt, Artificial Sequence
  Description of Artificial Sequence: Synthetic oligonucleotide
ucccguaguaccggugcuc

SEQ ID NO: 1308806 - RNA, 19 nt, Artificial Sequence
  Description of Artificial Sequence: Synthetic oligonucleotide
gggaauauccuggaccuua

SEQ ID NO: 1308807 - RNA, 19 nt, Artificial Sequence
  Description of Artificial Sequence: Synthetic oligonucleotide
ggaaccgcugggcaaaggu

SEQ ID NO: 1308808 - RNA, 19 nt, Artificial Sequence
  Description of Artificial Sequence: Synthetic oligonucleotide
ggguauggguaauccguca

SEQ ID NO: 1308809 - RNA, 19 nt, Artificial Sequence
  Description of Artificial Sequence: Synthetic oligonucleotide
ccguuggagaauauuaugu

SEQ ID NO: 1308810 - RNA, 19 nt, Artificial Sequence
  Description of Artificial Sequence: Synthetic oligonucleotide
aguccgggucuagaacucu

SEQ ID NO: 1308811 - RNA, 19 nt, Artificial Sequence
  Description of Artificial Sequence: Synthetic oligonucleotide
uacgcaccuccacgacaga

SEQ ID NO: 1308812 - RNA, 19 nt, Artificial Sequence
  Description of Artificial Sequence: Synthetic oligonucleotide
uccguucacaggccaccuu

SEQ ID NO: 1308813 - RNA, 19 nt, Artificial Sequence
  Description of Artificial Sequence: Synthetic oligonucleotide
aggaaccgcugggcaaagg

SEQ ID NO: 1308814 - RNA, 19 nt, Artificial Sequence
  Description of Artificial Sequence: Synthetic oligonucleotide
guaggcccaugauccucug

SEQ ID NO: 1308815 - RNA, 19 nt, Artificial Sequence
  Description of Artificial Sequence: Synthetic oligonucleotide
cccguaguaccggugcucg

SEQ ID NO: 1308816 - RNA, 19 nt, Artificial Sequence
  Description of Artificial Sequence: Synthetic oligonucleotide
gcgacuggcagguaccaaa

SEQ ID NO: 1308817 - RNA, 19 nt, Artificial Sequence
  Description of Artificial Sequence: Synthetic oligonucleotide
acgacagauugagggucug

SEQ ID NO: 1308818 - RNA, 19 nt, Artificial Sequence
  Description of Artificial Sequence: Synthetic oligonucleotide
cuacccacucacggaugag

SEQ ID NO: 1308819 - RNA, 19 nt, Artificial Sequence
  Description of Artificial Sequence: Synthetic oligonucleotide
gcccuacuagcgcucguag

SEQ ID NO: 1308820 - RNA, 19 nt, Artificial Sequence
  Description of Artificial Sequence: Synthetic oligonucleotide
gguacagccgguagauguc

SEQ ID NO: 1308821 - RNA, 19 nt, Artificial Sequence
  Description of Artificial Sequence: Synthetic oligonucleotide
guccgggucuagaacucug

SEQ ID NO: 1308822 - RNA, 19 nt, Artificial Sequence
  Description of Artificial Sequence: Synthetic oligonucleotide
aacucccuccgaaggcuau

SEQ ID NO: 1308823 - RNA, 19 nt, Artificial Sequence
  Description of Artificial Sequence: Synthetic oligonucleotide
ggccugguagucccaggcc

SEQ ID NO: 1308824 - RNA, 19 nt, Artificial Sequence
  Description of Artificial Sequence: Synthetic oligonucleotide
auccguucacaggccaccu

SEQ ID NO: 1308825 - RNA, 19 nt, Artificial Sequence
  Description of Artificial Sequence: Synthetic oligonucleotide
uugacaggguuggcaggaa

SEQ ID NO: 1308826 - RNA, 19 nt, Artificial Sequence
  Description of Artificial Sequence: Synthetic oligonucleotide
caccguuggagaauauuau

SEQ ID NO: 1308827 - RNA, 19 nt, Artificial Sequence
  Description of Artificial Sequence: Synthetic oligonucleotide
cgcugugacgucucggaag

SEQ ID NO: 1308828 - RNA, 19 nt, Artificial Sequence
  Description of Artificial Sequence: Synthetic oligonucleotide
caguaggguauggguaauc

SEQ ID NO: 1308829 - RNA, 19 nt, Artificial Sequence
  Description of Artificial Sequence: Synthetic oligonucleotide
uagcccuacuagcgcucgu

SEQ ID NO: 1308830 - RNA, 19 nt, Artificial Sequence
  Description of Artificial Sequence: Synthetic oligonucleotide
acuagcgcucguaggccca

SEQ ID NO: 1308831 - RNA, 19 nt, Artificial Sequence
  Description of Artificial Sequence: Synthetic oligonucleotide
agcuuugguacagccggua

SEQ ID NO: 1308832 - RNA, 19 nt, Artificial Sequence
  Description of Artificial Sequence: Synthetic oligonucleotide
cguaguaccggugcucggc

SEQ ID NO: 1308833 - RNA, 19 nt, Artificial Sequence
  Description of Artificial Sequence: Synthetic oligonucleotide
ggcaaagguuuuguugcca

SEQ ID NO: 1308834 - RNA, 19 nt, Artificial Sequence
  Description of Artificial Sequence: Synthetic oligonucleotide
gauugagggucugcugagu

SEQ ID NO: 1308835 - RNA, 19 nt, Artificial Sequence
  Description of Artificial Sequence: Synthetic oligonucleotide
uaccggugcucggcaaaga

SEQ ID NO: 1308836 - RNA, 19 nt, Artificial Sequence
  Description of Artificial Sequence: Synthetic oligonucleotide
ccacucacggaugagggca

SEQ ID NO: 1308837 - RNA, 19 nt, Artificial Sequence
  Description of Artificial Sequence: Synthetic oligonucleotide
gguauggguaauccgucau

SEQ ID NO: 1308838 - RNA, 19 nt, Artificial Sequence
  Description of Artificial Sequence: Synthetic oligonucleotide
ggcccuuacucagcauccg

SEQ ID NO: 1308839 - RNA, 19 nt, Artificial Sequence
  Description of Artificial Sequence: Synthetic oligonucleotide
auuccccguguagaagaaa

SEQ ID NO: 1308840 - RNA, 19 nt, Artificial Sequence
  Description of Artificial Sequence: Synthetic oligonucleotide
cugcgacagcuaccacagg

SEQ ID NO: 1308841 - RNA, 19 nt, Artificial Sequence
  Description of Artificial Sequence: Synthetic oligonucleotide
cacgacagauugagggucu

SEQ ID NO: 1308842 - RNA, 19 nt, Artificial Sequence
  Description of Artificial Sequence: Synthetic oligonucleotide
cccacucacggaugagggc

SEQ ID NO: 1308843 - RNA, 19 nt, Artificial Sequence
  Description of Artificial Sequence: Synthetic oligonucleotide
cucccgaaaguccgggucu

SEQ ID NO: 1308844 - RNA, 19 nt, Artificial Sequence
  Description of Artificial Sequence: Synthetic oligonucleotide
ucccgaaaguccgggucua

SEQ ID NO: 1308845 - RNA, 19 nt, Artificial Sequence
  Description of Artificial Sequence: Synthetic oligonucleotide
cuugggacucuggccauaa

SEQ ID NO: 1308846 - RNA, 19 nt, Artificial Sequence
  Description of Artificial Sequence: Synthetic oligonucleotide
cauuccgggcaaacacaaa

SEQ ID NO: 1308847 - RNA, 19 nt, Artificial Sequence
  Description of Artificial Sequence: Synthetic oligonucleotide
ggugacagcgaugauugau

SEQ ID NO: 1308848 - RNA, 19 nt, Artificial Sequence
  Description of Artificial Sequence: Synthetic oligonucleotide
gcaaaccgaauggaagcga

SEQ ID NO: 1308849 - RNA, 19 nt, Artificial Sequence
  Description of Artificial Sequence: Synthetic oligonucleotide
agcccuacuagcgcucgua

SEQ ID NO: 1308850 - RNA, 19 nt, Artificial Sequence
  Description of Artificial Sequence: Synthetic oligonucleotide
gugacgucucggaagaauu

SEQ ID NO: 1308851 - RNA, 19 nt, Artificial Sequence
  Description of Artificial Sequence: Synthetic oligonucleotide
ugggaauauccuggaccuu

SEQ ID NO: 1308852 - RNA, 19 nt, Artificial Sequence
  Description of Artificial Sequence: Synthetic oligonucleotide
ggaauauccuggaccuuaa

SEQ ID NO: 1308853 - RNA, 19 nt, Artificial Sequence
  Description of Artificial Sequence: Synthetic oligonucleotide
gcaaagacaagcagggcuu

SEQ ID NO: 1308854 - RNA, 19 nt, Artificial Sequence
  Description of Artificial Sequence: Synthetic oligonucleotide
cgcucguaggcccaugauc

SEQ ID NO: 1308855 - RNA, 19 nt, Artificial Sequence
  Description of Artificial Sequence: Synthetic oligonucleotide
gaaccgcugggcaaagguu

SEQ ID NO: 1308856 - RNA, 19 nt, Artificial Sequence
  Description of Artificial Sequence: Synthetic oligonucleotide
ccugauggugucgugagcu

SEQ ID NO: 1308857 - RNA, 19 nt, Artificial Sequence
  Description of Artificial Sequence: Synthetic oligonucleotide
caguuccaccaugaaucca

SEQ ID NO: 1308858 - RNA, 19 nt, Artificial Sequence
  Description of Artificial Sequence: Synthetic oligonucleotide
cgggucuagaacucuguca

SEQ ID NO: 1308859 - RNA, 19 nt, Artificial Sequence
  Description of Artificial Sequence: Synthetic oligonucleotide
ccuggcggaguucaucaga

SEQ ID NO: 1308860 - RNA, 19 nt, Artificial Sequence
  Description of Artificial Sequence: Synthetic oligonucleotide
cgaaaguccgggucuagaa

SEQ ID NO: 1308861 - RNA, 19 nt, Artificial Sequence
  Description of Artificial Sequence: Synthetic oligonucleotide
ggaagcgauuucccguagu

SEQ ID NO: 1308862 - RNA, 19 nt, Artificial Sequence
  Description of Artificial Sequence: Synthetic oligonucleotide
gucaccguuggagaauauu

SEQ ID NO: 1308863 - RNA, 19 nt, Artificial Sequence
  Description of Artificial Sequence: Synthetic oligonucleotide
ccgggucuagaacucuguc

SEQ ID NO: 1308864 - RNA, 19 nt, Artificial Sequence
  Description of Artificial Sequence: Synthetic oligonucleotide
agcgacuggcagguaccaa

SEQ ID NO: 1308865 - RNA, 19 nt, Artificial Sequence
  Description of Artificial Sequence: Synthetic oligonucleotide
gcauccguucacaggccac

SEQ ID NO: 1308866 - RNA, 19 nt, Artificial Sequence
  Description of Artificial Sequence: Synthetic oligonucleotide
ccggugcucggcaaagaca

SEQ ID NO: 1308867 - RNA, 19 nt, Artificial Sequence
  Description of Artificial Sequence: Synthetic oligonucleotide
uagcgcucguaggcccaug

SEQ ID NO: 1308868 - RNA, 19 nt, Artificial Sequence
  Description of Artificial Sequence: Synthetic oligonucleotide
accgcugggcaaagguuuu

SEQ ID NO: 1308869 - RNA, 19 nt, Artificial Sequence
  Description of Artificial Sequence: Synthetic oligonucleotide
ggcaucccgcacagccugg

SEQ ID NO: 1308870 - RNA, 19 nt, Artificial Sequence
  Description of Artificial Sequence: Synthetic oligonucleotide
ccccauaacucccuccgaa

SEQ ID NO: 1308871 - RNA, 19 nt, Artificial Sequence
  Description of Artificial Sequence: Synthetic oligonucleotide
ggggauacuucauccucau

SEQ ID NO: 1308872 - RNA, 19 nt, Artificial Sequence
  Description of Artificial Sequence: Synthetic oligonucleotide
cacggucagcagcugugua

SEQ ID NO: 1308873 - RNA, 19 nt, Artificial Sequence
  Description of Artificial Sequence: Synthetic oligonucleotide
gggaucucugagucaugcu

SEQ ID NO: 1308874 - RNA, 19 nt, Artificial Sequence
  Description of Artificial Sequence: Synthetic oligonucleotide
auggugucgugagcuccuu

SEQ ID NO: 1308875 - RNA, 19 nt, Artificial Sequence
  Description of Artificial Sequence: Synthetic oligonucleotide
ccaaggaacucaguagggu

SEQ ID NO: 1308876 - RNA, 19 nt, Artificial Sequence
  Description of Artificial Sequence: Synthetic oligonucleotide
cgacagauugagggucugc

SEQ ID NO: 1308877 - RNA, 19 nt, Artificial Sequence
  Description of Artificial Sequence: Synthetic oligonucleotide
cucacggaugagggcagcu

SEQ ID NO: 1308878 - RNA, 19 nt, Artificial Sequence
  Description of Artificial Sequence: Synthetic oligonucleotide
gcccuuacucagcauccgu

SEQ ID NO: 1308879 - RNA, 19 nt, Artificial Sequence
  Description of Artificial Sequence: Synthetic oligonucleotide
cacacgccccauguaugua

SEQ ID NO: 1308880 - RNA, 19 nt, Artificial Sequence
  Description of Artificial Sequence: Synthetic oligonucleotide
caugguccacagggacaca

SEQ ID NO: 1308881 - RNA, 19 nt, Artificial Sequence
  Description of Artificial Sequence: Synthetic oligonucleotide
ccgaaaguccgggucuaga

SEQ ID NO: 1308882 - RNA, 19 nt, Artificial Sequence
  Description of Artificial Sequence: Synthetic oligonucleotide
ccacacgccccauguaugu

SEQ ID NO: 1308883 - RNA, 19 nt, Artificial Sequence
  Description of Artificial Sequence: Synthetic oligonucleotide
cccgaaaguccgggucuag

SEQ ID NO: 1308884 - RNA, 19 nt, Artificial Sequence
  Description of Artificial Sequence: Synthetic oligonucleotide
acccaggaagggaccccau

SEQ ID NO: 1308885 - RNA, 19 nt, Artificial Sequence
  Description of Artificial Sequence: Synthetic oligonucleotide
cugucagcucuggccugga

SEQ ID NO: 1308886 - RNA, 19 nt, Artificial Sequence
  Description of Artificial Sequence: Synthetic oligonucleotide
cccuuacucagcauccguu

SEQ ID NO: 1308887 - RNA, 19 nt, Artificial Sequence
  Description of Artificial Sequence: Synthetic oligonucleotide
cugugacgucucggaagaa

SEQ ID NO: 1308888 - RNA, 19 nt, Artificial Sequence
  Description of Artificial Sequence: Synthetic oligonucleotide
gguucccaaggaacucagu

SEQ ID NO: 1308889 - RNA, 19 nt, Artificial Sequence
  Description of Artificial Sequence: Synthetic oligonucleotide
ggccugcgacagcuaccac

SEQ ID NO: 1308890 - RNA, 19 nt, Artificial Sequence
  Description of Artificial Sequence: Synthetic oligonucleotide
ccgccagugccugcuccac

SEQ ID NO: 1308891 - RNA, 19 nt, Artificial Sequence
  Description of Artificial Sequence: Synthetic oligonucleotide
gcuccaugccagaggaguu

SEQ ID NO: 1308892 - RNA, 19 nt, Artificial Sequence
  Description of Artificial Sequence: Synthetic oligonucleotide
ggucgccaccccagaagcu

SEQ ID NO: 1308893 - RNA, 19 nt, Artificial Sequence
  Description of Artificial Sequence: Synthetic oligonucleotide
cuagcgcucguaggcccau

SEQ ID NO: 1308894 - RNA, 19 nt, Artificial Sequence
  Description of Artificial Sequence: Synthetic oligonucleotide
ggaaagcgacuggcaggua

SEQ ID NO: 1308895 - RNA, 19 nt, Artificial Sequence
  Description of Artificial Sequence: Synthetic oligonucleotide
ccaugccagaggaguugua

SEQ ID NO: 1308896 - RNA, 19 nt, Artificial Sequence
  Description of Artificial Sequence: Synthetic oligonucleotide
gcgcucguaggcccaugau

SEQ ID NO: 1308897 - RNA, 19 nt, Artificial Sequence
  Description of Artificial Sequence: Synthetic oligonucleotide
ccgccaguuccaccaugaa

SEQ ID NO: 1308898 - RNA, 19 nt, Artificial Sequence
  Description of Artificial Sequence: Synthetic oligonucleotide
cgugagcuccuuggaggaa

SEQ ID NO: 1308899 - RNA, 19 nt, Artificial Sequence
  Description of Artificial Sequence: Synthetic oligonucleotide
ccgucauggcaagcacagu

SEQ ID NO: 1308900 - RNA, 19 nt, Artificial Sequence
  Description of Artificial Sequence: Synthetic oligonucleotide
gaugauaccauucacgagc

SEQ ID NO: 1308901 - RNA, 19 nt, Artificial Sequence
  Description of Artificial Sequence: Synthetic oligonucleotide
aaagcaaacuggcuguacc

SEQ ID NO: 1308902 - RNA, 19 nt, Artificial Sequence
  Description of Artificial Sequence: Synthetic oligonucleotide
aagcuaucgucaaagaugc

SEQ ID NO: 1308903 - RNA, 19 nt, Artificial Sequence
  Description of Artificial Sequence: Synthetic oligonucleotide
uuaaagacggacuggaggc

SEQ ID NO: 1308904 - RNA, 19 nt, Artificial Sequence
  Description of Artificial Sequence: Synthetic oligonucleotide
aaagcuaucgucaaagaug

SEQ ID NO: 1308905 - RNA, 19 nt, Artificial Sequence
  Description of Artificial Sequence: Synthetic oligonucleotide
uagguguuauuuuaaauag

SEQ ID NO: 1308906 - RNA, 19 nt, Artificial Sequence
  Description of Artificial Sequence: Synthetic oligonucleotide
aagcaaacuggcuguaccc

SEQ ID NO: 1308907 - RNA, 19 nt, Artificial Sequence
  Description of Artificial Sequence: Synthetic oligonucleotide
ugagguuaaagacggacug

SEQ ID NO: 1308908 - RNA, 19 nt, Artificial Sequence
  Description of Artificial Sequence: Synthetic oligonucleotide
ucugccguugaacauuugg

SEQ ID NO: 1308909 - RNA, 19 nt, Artificial Sequence
  Description of Artificial Sequence: Synthetic oligonucleotide
cauaccgaugccuagacug

SEQ ID NO: 1308910 - RNA, 19 nt, Artificial Sequence
  Description of Artificial Sequence: Synthetic oligonucleotide
gaacgugggaaucucaaag

SEQ ID NO: 1308911 - RNA, 19 nt, Artificial Sequence
  Description of Artificial Sequence: Synthetic oligonucleotide
cacacuuucaaauggcugc

SEQ ID NO: 1308912 - RNA, 19 nt, Artificial Sequence
  Description of Artificial Sequence: Synthetic oligonucleotide
agcaguuuguuccuggguc

SEQ ID NO: 1308913 - RNA, 19 nt, Artificial Sequence
  Description of Artificial Sequence: Synthetic oligonucleotide
uucaaagcaguaauaauuu

SEQ ID NO: 1308914 - RNA, 19 nt, Artificial Sequence
  Description of Artificial Sequence: Synthetic oligonucleotide
gauguaauccgguaggcga

SEQ ID NO: 1308915 - RNA, 19 nt, Artificial Sequence
  Description of Artificial Sequence: Synthetic oligonucleotide
aauccgguaggcgaggcac

SEQ ID NO: 1308916 - RNA, 19 nt, Artificial Sequence
  Description of Artificial Sequence: Synthetic oligonucleotide
aguccauuggguucgagug

SEQ ID NO: 1308917 - RNA, 19 nt, Artificial Sequence
  Description of Artificial Sequence: Synthetic oligonucleotide
cacaaugcagcugucaugg

SEQ ID NO: 1308918 - RNA, 19 nt, Artificial Sequence
  Description of Artificial Sequence: Synthetic oligonucleotide
acguccauuuauuucaaag

SEQ ID NO: 1308919 - RNA, 19 nt, Artificial Sequence
  Description of Artificial Sequence: Synthetic oligonucleotide
acgaucuccaccgagcagc

SEQ ID NO: 1308920 - RNA, 19 nt, Artificial Sequence
  Description of Artificial Sequence: Synthetic oligonucleotide
aaagacggacuggaggcgc

SEQ ID NO: 1308921 - RNA, 19 nt, Artificial Sequence
  Description of Artificial Sequence: Synthetic oligonucleotide
cacagaucaugcauggccg

SEQ ID NO: 1308922 - RNA, 19 nt, Artificial Sequence
  Description of Artificial Sequence: Synthetic oligonucleotide
aguaaggcgagcacggggc

SEQ ID NO: 1308923 - RNA, 19 nt, Artificial Sequence
  Description of Artificial Sequence: Synthetic oligonucleotide
cuugcggcagcguaaacag

SEQ ID NO: 1308924 - RNA, 19 nt, Artificial Sequence
  Description of Artificial Sequence: Synthetic oligonucleotide
gagggugagguuaaagacg

SEQ ID NO: 1308925 - RNA, 19 nt, Artificial Sequence
  Description of Artificial Sequence: Synthetic oligonucleotide
guagguguuauuuuaaaua

SEQ ID NO: 1308926 - RNA, 19 nt, Artificial Sequence
  Description of Artificial Sequence: Synthetic oligonucleotide
aagcaguaauaauuuaaaa

SEQ ID NO: 1308927 - RNA, 19 nt, Artificial Sequence
  Description of Artificial Sequence: Synthetic oligonucleotide
agaaguaccguccgggcug

SEQ ID NO: 1308928 - RNA, 19 nt, Artificial Sequence
  Description of Artificial Sequence: Synthetic oligonucleotide
gucgucuuugcacacgggg

SEQ ID NO: 1308929 - RNA, 19 nt, Artificial Sequence
  Description of Artificial Sequence: Synthetic oligonucleotide
ugcggcagcguaaacaggu

SEQ ID NO: 1308930 - RNA, 19 nt, Artificial Sequence
  Description of Artificial Sequence: Synthetic oligonucleotide
ugcuagggcaccuggggcg

SEQ ID NO: 1308931 - RNA, 19 nt, Artificial Sequence
  Description of Artificial Sequence: Synthetic oligonucleotide
acagaucaugcauggccgc

SEQ ID NO: 1308932 - RNA, 19 nt, Artificial Sequence
  Description of Artificial Sequence: Synthetic oligonucleotide
aacccuucugccguugaac

SEQ ID NO: 1308933 - RNA, 19 nt, Artificial Sequence
  Description of Artificial Sequence: Synthetic oligonucleotide
agacugguguucucucucc

SEQ ID NO: 1308934 - RNA, 19 nt, Artificial Sequence
  Description of Artificial Sequence: Synthetic oligonucleotide
agcuuuccagauaacacac

SEQ ID NO: 1308935 - RNA, 19 nt, Artificial Sequence
  Description of Artificial Sequence: Synthetic oligonucleotide
ucgucuuugcacacggggc

SEQ ID NO: 1308936 - RNA, 19 nt, Artificial Sequence
  Description of Artificial Sequence: Synthetic oligonucleotide
agggugagguuaaagacgg

SEQ ID NO: 1308937 - RNA, 19 nt, Artificial Sequence
  Description of Artificial Sequence: Synthetic oligonucleotide
uggguucgagugcaggacg

SEQ ID NO: 1308938 - RNA, 19 nt, Artificial Sequence
  Description of Artificial Sequence: Synthetic oligonucleotide
ggagaugauaccauucacg

SEQ ID NO: 1308939 - RNA, 19 nt, Artificial Sequence
  Description of Artificial Sequence: Synthetic oligonucleotide
cuggcgacaguucugcugc

SEQ ID NO: 1308940 - RNA, 19 nt, Artificial Sequence
  Description of Artificial Sequence: Synthetic oligonucleotide
augaggagaaggccacccc

SEQ ID NO: 1308941 - RNA, 19 nt, Artificial Sequence
  Description of Artificial Sequence: Synthetic oligonucleotide
gcuaucgucaaagaugccg

SEQ ID NO: 1308942 - RNA, 19 nt, Artificial Sequence
  Description of Artificial Sequence: Synthetic oligonucleotide
cucgaugaagccagacucg

SEQ ID NO: 1308943 - RNA, 19 nt, Artificial Sequence
  Description of Artificial Sequence: Synthetic oligonucleotide
aguaauaauuuaaaaucau

SEQ ID NO: 1308944 - RNA, 19 nt, Artificial Sequence
  Description of Artificial Sequence: Synthetic oligonucleotide
gcagauguaauccgguagg

SEQ ID NO: 1308945 - RNA, 19 nt, Artificial Sequence
  Description of Artificial Sequence: Synthetic oligonucleotide
gugacagaaguaccguccg

SEQ ID NO: 1308946 - RNA, 19 nt, Artificial Sequence
  Description of Artificial Sequence: Synthetic oligonucleotide
augccgaaagcaaacuggc

SEQ ID NO: 1308947 - RNA, 19 nt, Artificial Sequence
  Description of Artificial Sequence: Synthetic oligonucleotide
ugguccacacuuucaaaug

SEQ ID NO: 1308948 - RNA, 19 nt, Artificial Sequence
  Description of Artificial Sequence: Synthetic oligonucleotide
cuuguggcauucucguugc

SEQ ID NO: 1308949 - RNA, 19 nt, Artificial Sequence
  Description of Artificial Sequence: Synthetic oligonucleotide
caugcauggccgcacgugg

SEQ ID NO: 1308950 - RNA, 19 nt, Artificial Sequence
  Description of Artificial Sequence: Synthetic oligonucleotide
guuacagggcaacugccgc

SEQ ID NO: 1308951 - RNA, 19 nt, Artificial Sequence
  Description of Artificial Sequence: Synthetic oligonucleotide
ugacagaaguaccguccgg

SEQ ID NO: 1308952 - RNA, 19 nt, Artificial Sequence
  Description of Artificial Sequence: Synthetic oligonucleotide
agauguaauccgguaggcg

SEQ ID NO: 1308953 - RNA, 19 nt, Artificial Sequence
  Description of Artificial Sequence: Synthetic oligonucleotide
auuggguucgagugcagga

SEQ ID NO: 1308954 - RNA, 19 nt, Artificial Sequence
  Description of Artificial Sequence: Synthetic oligonucleotide
gaucaugcauggccgcacg

SEQ ID NO: 1308955 - RNA, 19 nt, Artificial Sequence
  Description of Artificial Sequence: Synthetic oligonucleotide
uugcuuguggcauucucgu

SEQ ID NO: 1308956 - RNA, 19 nt, Artificial Sequence
  Description of Artificial Sequence: Synthetic oligonucleotide
uaaagacggacuggaggcg

SEQ ID NO: 1308957 - RNA, 19 nt, Artificial Sequence
  Description of Artificial Sequence: Synthetic oligonucleotide
cuaguccacggccauggcg

SEQ ID NO: 1308958 - RNA, 19 nt, Artificial Sequence
  Description of Artificial Sequence: Synthetic oligonucleotide
ugguuacagggcaacugcc

SEQ ID NO: 1308959 - RNA, 19 nt, Artificial Sequence
  Description of Artificial Sequence: Synthetic oligonucleotide
gggaaucucaaagcuaucg

SEQ ID NO: 1308960 - RNA, 19 nt, Artificial Sequence
  Description of Artificial Sequence: Synthetic oligonucleotide
cuaucgucaaagaugccga

SEQ ID NO: 1308961 - RNA, 19 nt, Artificial Sequence
  Description of Artificial Sequence: Synthetic oligonucleotide
uucgagugcaggacgcccc

SEQ ID NO: 1308962 - RNA, 19 nt, Artificial Sequence
  Description of Artificial Sequence: Synthetic oligonucleotide
acgugggaaucucaaagcu

SEQ ID NO: 1308963 - RNA, 19 nt, Artificial Sequence
  Description of Artificial Sequence: Synthetic oligonucleotide
auggcguccaggccguugg

SEQ ID NO: 1308964 - RNA, 19 nt, Artificial Sequence
  Description of Artificial Sequence: Synthetic oligonucleotide
gccguugaacauuuggagg

SEQ ID NO: 1308965 - RNA, 19 nt, Artificial Sequence
  Description of Artificial Sequence: Synthetic oligonucleotide
cucuaguccacggccaugg

SEQ ID NO: 1308966 - RNA, 19 nt, Artificial Sequence
  Description of Artificial Sequence: Synthetic oligonucleotide
uguaauccgguaggcgagg

SEQ ID NO: 1308967 - RNA, 19 nt, Artificial Sequence
  Description of Artificial Sequence: Synthetic oligonucleotide
aaauagcuuuccagauaac

SEQ ID NO: 1308968 - RNA, 19 nt, Artificial Sequence
  Description of Artificial Sequence: Synthetic oligonucleotide
uagacugguguucucucuc

SEQ ID NO: 1308969 - RNA, 19 nt, Artificial Sequence
  Description of Artificial Sequence: Synthetic oligonucleotide
uccauuggguucgagugca

SEQ ID NO: 1308970 - RNA, 19 nt, Artificial Sequence
  Description of Artificial Sequence: Synthetic oligonucleotide
caguaaggcgagcacgggg

SEQ ID NO: 1308971 - RNA, 19 nt, Artificial Sequence
  Description of Artificial Sequence: Synthetic oligonucleotide
gccgaaagcaaacuggcug

SEQ ID NO: 1308972 - RNA, 19 nt, Artificial Sequence
  Description of Artificial Sequence: Synthetic oligonucleotide
aaaacccuucugccguuga

SEQ ID NO: 1308973 - RNA, 19 nt, Artificial Sequence
  Description of Artificial Sequence: Synthetic oligonucleotide
agcgcguagucgucuuugc

SEQ ID NO: 1308974 - RNA, 19 nt, Artificial Sequence
  Description of Artificial Sequence: Synthetic oligonucleotide
ggcagauguaauccgguag

SEQ ID NO: 1308975 - RNA, 19 nt, Artificial Sequence
  Description of Artificial Sequence: Synthetic oligonucleotide
ucgaugaagccagacucgc

SEQ ID NO: 1308976 - RNA, 19 nt, Artificial Sequence
  Description of Artificial Sequence: Synthetic oligonucleotide
gaagcuccucgaugaagcc

SEQ ID NO: 1308977 - RNA, 19 nt, Artificial Sequence
  Description of Artificial Sequence: Synthetic oligonucleotide
aagaugccgaaagcaaacu

SEQ ID NO: 1308978 - RNA, 19 nt, Artificial Sequence
  Description of Artificial Sequence: Synthetic oligonucleotide
ugggucuggcgacaguucu

SEQ ID NO: 1308979 - RNA, 19 nt, Artificial Sequence
  Description of Artificial Sequence: Synthetic oligonucleotide
uguucucucucccgucggc

SEQ ID NO: 1308980 - RNA, 19 nt, Artificial Sequence
  Description of Artificial Sequence: Synthetic oligonucleotide
aagacggacuggaggcgcc

SEQ ID NO: 1308981 - RNA, 19 nt, Artificial Sequence
  Description of Artificial Sequence: Synthetic oligonucleotide
uugcacacggggcacucca

SEQ ID NO: 1308982 - RNA, 19 nt, Artificial Sequence
  Description of Artificial Sequence: Synthetic oligonucleotide
uccaccgagcagcagugac

SEQ ID NO: 1308983 - RNA, 19 nt, Artificial Sequence
  Description of Artificial Sequence: Synthetic oligonucleotide
ucgcaccuugggcagaugu

SEQ ID NO: 1308984 - RNA, 19 nt, Artificial Sequence
  Description of Artificial Sequence: Synthetic oligonucleotide
agcguaaacaggugcuggu

SEQ ID NO: 1308985 - RNA, 19 nt, Artificial Sequence
  Description of Artificial Sequence: Synthetic oligonucleotide
auaccgaugccuagacugg

SEQ ID NO: 1308986 - RNA, 19 nt, Artificial Sequence
  Description of Artificial Sequence: Synthetic oligonucleotide
cguccauuuauuucaaagc

SEQ ID NO: 1308987 - RNA, 19 nt, Artificial Sequence
  Description of Artificial Sequence: Synthetic oligonucleotide
aaguccgagccugucgcag

SEQ ID NO: 1308988 - RNA, 19 nt, Artificial Sequence
  Description of Artificial Sequence: Synthetic oligonucleotide
ugccgguucuggucggugg

SEQ ID NO: 1308989 - RNA, 19 nt, Artificial Sequence
  Description of Artificial Sequence: Synthetic oligonucleotide
ugugccccaggagggaacg

SEQ ID NO: 1308990 - RNA, 19 nt, Artificial Sequence
  Description of Artificial Sequence: Synthetic oligonucleotide
uuggagggugagguuaaag

SEQ ID NO: 1308991 - RNA, 19 nt, Artificial Sequence
  Description of Artificial Sequence: Synthetic oligonucleotide
auguaauccgguaggcgag

SEQ ID NO: 1308992 - RNA, 19 nt, Artificial Sequence
  Description of Artificial Sequence: Synthetic oligonucleotide
gcggccauggccaaguccg

SEQ ID NO: 1308993 - RNA, 19 nt, Artificial Sequence
  Description of Artificial Sequence: Synthetic oligonucleotide
auggccaaguccgagccug

SEQ ID NO: 1308994 - RNA, 19 nt, Artificial Sequence
  Description of Artificial Sequence: Synthetic oligonucleotide
aaacccuucugccguugaa

SEQ ID NO: 1308995 - RNA, 19 nt, Artificial Sequence
  Description of Artificial Sequence: Synthetic oligonucleotide
gguuacagggcaacugccg

SEQ ID NO: 1308996 - RNA, 19 nt, Artificial Sequence
  Description of Artificial Sequence: Synthetic oligonucleotide
acagcggccggggagauga

SEQ ID NO: 1308997 - RNA, 19 nt, Artificial Sequence
  Description of Artificial Sequence: Synthetic oligonucleotide
uaauccgguaggcgaggca

SEQ ID NO: 1308998 - RNA, 19 nt, Artificial Sequence
  Description of Artificial Sequence: Synthetic oligonucleotide
gaaagcaaacuggcuguac

SEQ ID NO: 1308999 - RNA, 19 nt, Artificial Sequence
  Description of Artificial Sequence: Synthetic oligonucleotide
ggugagguuaaagacggac

SEQ ID NO: 1309000 - RNA, 19 nt, Artificial Sequence
  Description of Artificial Sequence: Synthetic oligonucleotide
uugcggcagcguaaacagg

SEQ ID NO: 1309001 - RNA, 19 nt, Artificial Sequence
  Description of Artificial Sequence: Synthetic oligonucleotide
caccgagcagcagugacag

SEQ ID NO: 1309002 - RNA, 19 nt, Artificial Sequence
  Description of Artificial Sequence: Synthetic oligonucleotide
cagauguaauccgguaggc

SEQ ID NO: 1309003 - RNA, 19 nt, Artificial Sequence
  Description of Artificial Sequence: Synthetic oligonucleotide
ugccgaaagcaaacuggcu

SEQ ID NO: 1309004 - RNA, 19 nt, Artificial Sequence
  Description of Artificial Sequence: Synthetic oligonucleotide
auggaacaggugguuacag

SEQ ID NO: 1309005 - RNA, 19 nt, Artificial Sequence
  Description of Artificial Sequence: Synthetic oligonucleotide
agggucccugccaucaucg

SEQ ID NO: 1309006 - RNA, 19 nt, Artificial Sequence
  Description of Artificial Sequence: Synthetic oligonucleotide
acggggaccguagggaggg

SEQ ID NO: 1309007 - RNA, 19 nt, Artificial Sequence
  Description of Artificial Sequence: Synthetic oligonucleotide
ggcaguaaggcgagcacgg

SEQ ID NO: 1309008 - RNA, 19 nt, Artificial Sequence
  Description of Artificial Sequence: Synthetic oligonucleotide
cagcccugagcccacgugc

SEQ ID NO: 1309009 - RNA, 19 nt, Artificial Sequence
  Description of Artificial Sequence: Synthetic oligonucleotide
cgaggcacgaucuccaccg

SEQ ID NO: 1309010 - RNA, 19 nt, Artificial Sequence
  Description of Artificial Sequence: Synthetic oligonucleotide
cagcguaaacaggugcugg

SEQ ID NO: 1309011 - RNA, 19 nt, Artificial Sequence
  Description of Artificial Sequence: Synthetic oligonucleotide
ugcauggccgcacguggcu

SEQ ID NO: 1309012 - RNA, 19 nt, Artificial Sequence
  Description of Artificial Sequence: Synthetic oligonucleotide
augauaccauucacgagcu

SEQ ID NO: 1309013 - RNA, 19 nt, Artificial Sequence
  Description of Artificial Sequence: Synthetic oligonucleotide
uaucgucaaagaugccgaa

SEQ ID NO: 1309014 - RNA, 19 nt, Artificial Sequence
  Description of Artificial Sequence: Synthetic oligonucleotide
guccacacuuucaaauggc

SEQ ID NO: 1309015 - RNA, 19 nt, Artificial Sequence
  Description of Artificial Sequence: Synthetic oligonucleotide
agcaaacuggcuguacccu

SEQ ID NO: 1309016 - RNA, 19 nt, Artificial Sequence
  Description of Artificial Sequence: Synthetic oligonucleotide
cagugacagaaguaccguc

SEQ ID NO: 1309017 - RNA, 19 nt, Artificial Sequence
  Description of Artificial Sequence: Synthetic oligonucleotide
guaccguccgggcugcggc

SEQ ID NO: 1309018 - RNA, 19 nt, Artificial Sequence
  Description of Artificial Sequence: Synthetic oligonucleotide
ucuaguccacggccauggc

SEQ ID NO: 1309019 - RNA, 19 nt, Artificial Sequence
  Description of Artificial Sequence: Synthetic oligonucleotide
acucucacccagcgcguag

SEQ ID NO: 1309020 - RNA, 19 nt, Artificial Sequence
  Description of Artificial Sequence: Synthetic oligonucleotide
ccaggcguaguccauuggg

SEQ ID NO: 1309021 - RNA, 19 nt, Artificial Sequence
  Description of Artificial Sequence: Synthetic oligonucleotide
ucggccugugccccaggag

SEQ ID NO: 1309022 - RNA, 19 nt, Artificial Sequence
  Description of Artificial Sequence: Synthetic oligonucleotide
ucgagugcaggacgcccca

SEQ ID NO: 1309023 - RNA, 19 nt, Artificial Sequence
  Description of Artificial Sequence: Synthetic oligonucleotide
gagccugucgcagccuggg

SEQ ID NO: 1309024 - RNA, 19 nt, Artificial Sequence
  Description of Artificial Sequence: Synthetic oligonucleotide
uugguggccguguucuguc

SEQ ID NO: 1309025 - RNA, 19 nt, Artificial Sequence
  Description of Artificial Sequence: Synthetic oligonucleotide
guagggagggccugaaucu

SEQ ID NO: 1309026 - RNA, 19 nt, Artificial Sequence
  Description of Artificial Sequence: Synthetic oligonucleotide
ggggagaugauaccauuca

SEQ ID NO: 1309027 - RNA, 19 nt, Artificial Sequence
  Description of Artificial Sequence: Synthetic oligonucleotide
aggcacgaucuccaccgag

SEQ ID NO: 1309028 - RNA, 19 nt, Artificial Sequence
  Description of Artificial Sequence: Synthetic oligonucleotide
ccuugggcagauguaaucc

SEQ ID NO: 1309029 - RNA, 19 nt, Artificial Sequence
  Description of Artificial Sequence: Synthetic oligonucleotide
auugguggccguguucugu

SEQ ID NO: 1309030 - RNA, 19 nt, Artificial Sequence
  Description of Artificial Sequence: Synthetic oligonucleotide
ccaaguccgagccugucgc

SEQ ID NO: 1309031 - RNA, 19 nt, Artificial Sequence
  Description of Artificial Sequence: Synthetic oligonucleotide
augcauggccgcacguggc

SEQ ID NO: 1309032 - RNA, 19 nt, Artificial Sequence
  Description of Artificial Sequence: Synthetic oligonucleotide
gauugguggccguguucug

SEQ ID NO: 1309033 - RNA, 19 nt, Artificial Sequence
  Description of Artificial Sequence: Synthetic oligonucleotide
acgccccagggaccaaggc

SEQ ID NO: 1309034 - RNA, 19 nt, Artificial Sequence
  Description of Artificial Sequence: Synthetic oligonucleotide
uucucucucccgucggcuc

SEQ ID NO: 1309035 - RNA, 19 nt, Artificial Sequence
  Description of Artificial Sequence: Synthetic oligonucleotide
ggggcgagugggaugaccg

SEQ ID NO: 1309036 - RNA, 19 nt, Artificial Sequence
  Description of Artificial Sequence: Synthetic oligonucleotide
guucgagugcaggacgccc

SEQ ID NO: 1309037 - RNA, 19 nt, Artificial Sequence
  Description of Artificial Sequence: Synthetic oligonucleotide
cguaaacaggugcuggucc

SEQ ID NO: 1309038 - RNA, 19 nt, Artificial Sequence
  Description of Artificial Sequence: Synthetic oligonucleotide
aguaccguccgggcugcgg

SEQ ID NO: 1309039 - RNA, 19 nt, Artificial Sequence
  Description of Artificial Sequence: Synthetic oligonucleotide
gggagaugauaccauucac

SEQ ID NO: 1309040 - RNA, 19 nt, Artificial Sequence
  Description of Artificial Sequence: Synthetic oligonucleotide
cacgugcuccucugugacg

SEQ ID NO: 1309041 - RNA, 19 nt, Artificial Sequence
  Description of Artificial Sequence: Synthetic oligonucleotide
gaaguaccguccgggcugc

SEQ ID NO: 1309042 - RNA, 19 nt, Artificial Sequence
  Description of Artificial Sequence: Synthetic oligonucleotide
gcguaguccauuggguucg

SEQ ID NO: 1309043 - RNA, 19 nt, Artificial Sequence
  Description of Artificial Sequence: Synthetic oligonucleotide
caucaucggccugugcccc

SEQ ID NO: 1309044 - RNA, 19 nt, Artificial Sequence
  Description of Artificial Sequence: Synthetic oligonucleotide
augccuagacugguguucu

SEQ ID NO: 1309045 - RNA, 19 nt, Artificial Sequence
  Description of Artificial Sequence: Synthetic oligonucleotide
gacucaggaguugcuugug

SEQ ID NO: 1309046 - RNA, 19 nt, Artificial Sequence
  Description of Artificial Sequence: Synthetic oligonucleotide
ccguguucuguccagugag

SEQ ID NO: 1309047 - RNA, 19 nt, Artificial Sequence
  Description of Artificial Sequence: Synthetic oligonucleotide
gggcaguaaggcgagcacg

SEQ ID NO: 1309048 - RNA, 19 nt, Artificial Sequence
  Description of Artificial Sequence: Synthetic oligonucleotide
ugggaugaccgagccccgg

SEQ ID NO: 1309049 - RNA, 19 nt, Artificial Sequence
  Description of Artificial Sequence: Synthetic oligonucleotide
ggaugaccgagccccgggg

SEQ ID NO: 1309050 - RNA, 19 nt, Artificial Sequence
  Description of Artificial Sequence: Synthetic oligonucleotide
uaccauucacgagcugcug

SEQ ID NO: 1309051 - RNA, 19 nt, Artificial Sequence
  Description of Artificial Sequence: Synthetic oligonucleotide
aucgucaaagaugccgaaa

SEQ ID NO: 1309052 - RNA, 19 nt, Artificial Sequence
  Description of Artificial Sequence: Synthetic oligonucleotide
ggcguaguccauuggguuc

SEQ ID NO: 1309053 - RNA, 19 nt, Artificial Sequence
  Description of Artificial Sequence: Synthetic oligonucleotide
cacgaucuccaccgagcag

SEQ ID NO: 1309054 - RNA, 19 nt, Artificial Sequence
  Description of Artificial Sequence: Synthetic oligonucleotide
gcacaaugcagcugucaug

SEQ ID NO: 1309055 - RNA, 19 nt, Artificial Sequence
  Description of Artificial Sequence: Synthetic oligonucleotide
ggucccugccaucaucggc

SEQ ID NO: 1309056 - RNA, 19 nt, Artificial Sequence
  Description of Artificial Sequence: Synthetic oligonucleotide
ggucuggcgacaguucugc

SEQ ID NO: 1309057 - RNA, 19 nt, Artificial Sequence
  Description of Artificial Sequence: Synthetic oligonucleotide
uccaaacaggagcggccau

SEQ ID NO: 1309058 - RNA, 19 nt, Artificial Sequence
  Description of Artificial Sequence: Synthetic oligonucleotide
uggcucaaacguccauuua

SEQ ID NO: 1309059 - RNA, 19 nt, Artificial Sequence
  Description of Artificial Sequence: Synthetic oligonucleotide
ccugucgcagccuggggcc

SEQ ID NO: 1309060 - RNA, 19 nt, Artificial Sequence
  Description of Artificial Sequence: Synthetic oligonucleotide
guaauccgguaggcgaggc

SEQ ID NO: 1309061 - RNA, 19 nt, Artificial Sequence
  Description of Artificial Sequence: Synthetic oligonucleotide
uccagcgugggaacaccuu

SEQ ID NO: 1309062 - RNA, 19 nt, Artificial Sequence
  Description of Artificial Sequence: Synthetic oligonucleotide
auuuggagggugagguuaa

SEQ ID NO: 1309063 - RNA, 19 nt, Artificial Sequence
  Description of Artificial Sequence: Synthetic oligonucleotide
agcuaucgucaaagaugcc

SEQ ID NO: 1309064 - RNA, 19 nt, Artificial Sequence
  Description of Artificial Sequence: Synthetic oligonucleotide
uaccgaugccuagacuggu

SEQ ID NO: 1309065 - RNA, 19 nt, Artificial Sequence
  Description of Artificial Sequence: Synthetic oligonucleotide
ggguacagcggccggggag

SEQ ID NO: 1309066 - RNA, 19 nt, Artificial Sequence
  Description of Artificial Sequence: Synthetic oligonucleotide
agcgugggaacaccuucau

SEQ ID NO: 1309067 - RNA, 19 nt, Artificial Sequence
  Description of Artificial Sequence: Synthetic oligonucleotide
aggcuggguacagcggccg

SEQ ID NO: 1309068 - RNA, 19 nt, Artificial Sequence
  Description of Artificial Sequence: Synthetic oligonucleotide
gagggaacgugggaaucuc

SEQ ID NO: 1309069 - RNA, 19 nt, Artificial Sequence
  Description of Artificial Sequence: Synthetic oligonucleotide
caggugguuacagggcaac

SEQ ID NO: 1309070 - RNA, 19 nt, Artificial Sequence
  Description of Artificial Sequence: Synthetic oligonucleotide
cugugacggggaccguagg

SEQ ID NO: 1309071 - RNA, 19 nt, Artificial Sequence
  Description of Artificial Sequence: Synthetic oligonucleotide
gcguagucgucuuugcaca

SEQ ID NO: 1309072 - RNA, 19 nt, Artificial Sequence
  Description of Artificial Sequence: Synthetic oligonucleotide
cguagggagggccugaauc

SEQ ID NO: 1309073 - RNA, 19 nt, Artificial Sequence
  Description of Artificial Sequence: Synthetic oligonucleotide
ugaggcucuugcggcagac

SEQ ID NO: 1309074 - RNA, 19 nt, Artificial Sequence
  Description of Artificial Sequence: Synthetic oligonucleotide
uggaggcgccugcugggga

SEQ ID NO: 1309075 - RNA, 19 nt, Artificial Sequence
  Description of Artificial Sequence: Synthetic oligonucleotide
cugggucuggcgacaguuc

SEQ ID NO: 1309076 - RNA, 19 nt, Artificial Sequence
  Description of Artificial Sequence: Synthetic oligonucleotide
agccugucgcagccugggg

SEQ ID NO: 1309077 - RNA, 19 nt, Artificial Sequence
  Description of Artificial Sequence: Synthetic oligonucleotide
uccgguaggcgaggcacga

SEQ ID NO: 1309078 - RNA, 19 nt, Artificial Sequence
  Description of Artificial Sequence: Synthetic oligonucleotide
ggcucaaacguccauuuau

SEQ ID NO: 1309079 - RNA, 19 nt, Artificial Sequence
  Description of Artificial Sequence: Synthetic oligonucleotide
ggccgguguucucaaacug

SEQ ID NO: 1309080 - RNA, 19 nt, Artificial Sequence
  Description of Artificial Sequence: Synthetic oligonucleotide
gccugucgcagccuggggc

SEQ ID NO: 1309081 - RNA, 19 nt, Artificial Sequence
  Description of Artificial Sequence: Synthetic oligonucleotide
uucugccguugaacauuug

SEQ ID NO: 1309082 - RNA, 19 nt, Artificial Sequence
  Description of Artificial Sequence: Synthetic oligonucleotide
uggcgggcugggucuggcg

SEQ ID NO: 1309083 - RNA, 19 nt, Artificial Sequence
  Description of Artificial Sequence: Synthetic oligonucleotide
cgcguagucgucuuugcac

SEQ ID NO: 1309084 - RNA, 19 nt, Artificial Sequence
  Description of Artificial Sequence: Synthetic oligonucleotide
agucgucuuugcacacggg

SEQ ID NO: 1309085 - RNA, 19 nt, Artificial Sequence
  Description of Artificial Sequence: Synthetic oligonucleotide
gccgguucuggucgguggg

SEQ ID NO: 1309086 - RNA, 19 nt, Artificial Sequence
  Description of Artificial Sequence: Synthetic oligonucleotide
ggggccgguguucucaaac

SEQ ID NO: 1309087 - RNA, 19 nt, Artificial Sequence
  Description of Artificial Sequence: Synthetic oligonucleotide
guacccuugcggcagcgua

SEQ ID NO: 1309088 - RNA, 19 nt, Artificial Sequence
  Description of Artificial Sequence: Synthetic oligonucleotide
ggcgagugggaugaccgag

SEQ ID NO: 1309089 - RNA, 19 nt, Artificial Sequence
  Description of Artificial Sequence: Synthetic oligonucleotide
auccgguaggcgaggcacg

SEQ ID NO: 1309090 - RNA, 19 nt, Artificial Sequence
  Description of Artificial Sequence: Synthetic oligonucleotide
ugcuuguggcauucucguu

SEQ ID NO: 1309091 - RNA, 19 nt, Artificial Sequence
  Description of Artificial Sequence: Synthetic oligonucleotide
ggcgagcuggacgaggaug

SEQ ID NO: 1309092 - RNA, 19 nt, Artificial Sequence
  Description of Artificial Sequence: Synthetic oligonucleotide
cagcgcguagucgucuuug

SEQ ID NO: 1309093 - RNA, 19 nt, Artificial Sequence
  Description of Artificial Sequence: Synthetic oligonucleotide
cauguggcgggcugggucu

SEQ ID NO: 1309094 - RNA, 19 nt, Artificial Sequence
  Description of Artificial Sequence: Synthetic oligonucleotide
cuagacugguguucucucu

SEQ ID NO: 1309095 - RNA, 19 nt, Artificial Sequence
  Description of Artificial Sequence: Synthetic oligonucleotide
aucaucggccugugcccca

SEQ ID NO: 1309096 - RNA, 19 nt, Artificial Sequence
  Description of Artificial Sequence: Synthetic oligonucleotide
accgaugccuagacuggug

SEQ ID NO: 1309097 - RNA, 19 nt, Artificial Sequence
  Description of Artificial Sequence: Synthetic oligonucleotide
ggaacgugggaaucucaaa

SEQ ID NO: 1309098 - RNA, 19 nt, Artificial Sequence
  Description of Artificial Sequence: Synthetic oligonucleotide
cauucucguugcugggcga

SEQ ID NO: 1309099 - RNA, 19 nt, Artificial Sequence
  Description of Artificial Sequence: Synthetic oligonucleotide
uggccaaguccgagccugu

SEQ ID NO: 1309100 - RNA, 19 nt, Artificial Sequence
  Description of Artificial Sequence: Synthetic oligonucleotide
gcauguggcgggcuggguc

SEQ ID NO: 1309101 - RNA, 19 nt, Artificial Sequence
  Description of Artificial Sequence: Synthetic oligonucleotide
gcagcguaaacaggugcug

SEQ ID NO: 1309102 - RNA, 19 nt, Artificial Sequence
  Description of Artificial Sequence: Synthetic oligonucleotide
gcggugcuagggcaccugg

SEQ ID NO: 1309103 - RNA, 19 nt, Artificial Sequence
  Description of Artificial Sequence: Synthetic oligonucleotide
uggcgacaguucugcugcc

SEQ ID NO: 1309104 - RNA, 19 nt, Artificial Sequence
  Description of Artificial Sequence: Synthetic oligonucleotide
ccagcgugggaacaccuuc

SEQ ID NO: 1309105 - RNA, 19 nt, Artificial Sequence
  Description of Artificial Sequence: Synthetic oligonucleotide
gcacgaucuccaccgagca

SEQ ID NO: 1309106 - RNA, 19 nt, Artificial Sequence
  Description of Artificial Sequence: Synthetic oligonucleotide
gucauggaacaggugguua

SEQ ID NO: 1309107 - RNA, 19 nt, Artificial Sequence
  Description of Artificial Sequence: Synthetic oligonucleotide
gguacagcggccggggaga

SEQ ID NO: 1309108 - RNA, 19 nt, Artificial Sequence
  Description of Artificial Sequence: Synthetic oligonucleotide
cccauaccgaugccuagac

SEQ ID NO: 1309109 - RNA, 19 nt, Artificial Sequence
  Description of Artificial Sequence: Synthetic oligonucleotide
ccauucacgagcugcugga

SEQ ID NO: 1309110 - RNA, 19 nt, Artificial Sequence
  Description of Artificial Sequence: Synthetic oligonucleotide
cagaucaugcauggccgca

SEQ ID NO: 1309111 - RNA, 19 nt, Artificial Sequence
  Description of Artificial Sequence: Synthetic oligonucleotide
ggguucgagugcaggacgc

SEQ ID NO: 1309112 - RNA, 19 nt, Artificial Sequence
  Description of Artificial Sequence: Synthetic oligonucleotide
cagaaguaccguccgggcu

SEQ ID NO: 1309113 - RNA, 19 nt, Artificial Sequence
  Description of Artificial Sequence: Synthetic oligonucleotide
guaguccauuggguucgag

SEQ ID NO: 1309114 - RNA, 19 nt, Artificial Sequence
  Description of Artificial Sequence: Synthetic oligonucleotide
gacggacuggaggcgccug

SEQ ID NO: 1309115 - RNA, 19 nt, Artificial Sequence
  Description of Artificial Sequence: Synthetic oligonucleotide
acguggcucaaacguccau

SEQ ID NO: 1309116 - RNA, 19 nt, Artificial Sequence
  Description of Artificial Sequence: Synthetic oligonucleotide
gugggaugaccgagccccg

SEQ ID NO: 1309117 - RNA, 19 nt, Artificial Sequence
  Description of Artificial Sequence: Synthetic oligonucleotide
agggaacgugggaaucuca

SEQ ID NO: 1309118 - RNA, 19 nt, Artificial Sequence
  Description of Artificial Sequence: Synthetic oligonucleotide
acagggcaacugccgcaca

SEQ ID NO: 1309119 - RNA, 19 nt, Artificial Sequence
  Description of Artificial Sequence: Synthetic oligonucleotide
cacguggcucaaacgucca

SEQ ID NO: 1309120 - RNA, 19 nt, Artificial Sequence
  Description of Artificial Sequence: Synthetic oligonucleotide
gggucccugccaucaucgg

SEQ ID NO: 1309121 - RNA, 19 nt, Artificial Sequence
  Description of Artificial Sequence: Synthetic oligonucleotide
aaguaccguccgggcugcg

SEQ ID NO: 1309122 - RNA, 19 nt, Artificial Sequence
  Description of Artificial Sequence: Synthetic oligonucleotide
gguucgagugcaggacgcc

SEQ ID NO: 1309123 - RNA, 19 nt, Artificial Sequence
  Description of Artificial Sequence: Synthetic oligonucleotide
gccccaggagggaacgugg

SEQ ID NO: 1309124 - RNA, 19 nt, Artificial Sequence
  Description of Artificial Sequence: Synthetic oligonucleotide
caaguccgagccugucgca

SEQ ID NO: 1309125 - RNA, 19 nt, Artificial Sequence
  Description of Artificial Sequence: Synthetic oligonucleotide
cucccucgccggccgacgc

SEQ ID NO: 1309126 - RNA, 19 nt, Artificial Sequence
  Description of Artificial Sequence: Synthetic oligonucleotide
guggucccgaggccggcac

SEQ ID NO: 1309127 - RNA, 19 nt, Artificial Sequence
  Description of Artificial Sequence: Synthetic oligonucleotide
gcgacaguucugcugccuc

SEQ ID NO: 1309128 - RNA, 19 nt, Artificial Sequence
  Description of Artificial Sequence: Synthetic oligonucleotide
ggccgcacguggcucaaac

SEQ ID NO: 1309129 - RNA, 19 nt, Artificial Sequence
  Description of Artificial Sequence: Synthetic oligonucleotide
ggcgacgccucggccaugg

SEQ ID NO: 1309130 - RNA, 19 nt, Artificial Sequence
  Description of Artificial Sequence: Synthetic oligonucleotide
gggauugguggccguguuc

SEQ ID NO: 1309131 - RNA, 19 nt, Artificial Sequence
  Description of Artificial Sequence: Synthetic oligonucleotide
ccaaacaggagcggccaug

SEQ ID NO: 1309132 - RNA, 19 nt, Artificial Sequence
  Description of Artificial Sequence: Synthetic oligonucleotide
ggacucaggaguugcuugu

SEQ ID NO: 1309133 - RNA, 19 nt, Artificial Sequence
  Description of Artificial Sequence: Synthetic oligonucleotide
gggcaacugccgcacacuc

SEQ ID NO: 1309134 - RNA, 19 nt, Artificial Sequence
  Description of Artificial Sequence: Synthetic oligonucleotide
ggcuggguacagcggccgg

SEQ ID NO: 1309135 - RNA, 19 nt, Artificial Sequence
  Description of Artificial Sequence: Synthetic oligonucleotide
gcggccggggagaugauac

SEQ ID NO: 1309136 - RNA, 19 nt, Artificial Sequence
  Description of Artificial Sequence: Synthetic oligonucleotide
gggaacgugggaaucucaa

SEQ ID NO: 1309137 - RNA, 19 nt, Artificial Sequence
  Description of Artificial Sequence: Synthetic oligonucleotide
cccgccgggcaguaaggcg

SEQ ID NO: 1309138 - RNA, 19 nt, Artificial Sequence
  Description of Artificial Sequence: Synthetic oligonucleotide
gccgguguucucaaacuga

SEQ ID NO: 1309139 - RNA, 19 nt, Artificial Sequence
  Description of Artificial Sequence: Synthetic oligonucleotide
ccuugcggcagcguaaaca

SEQ ID NO: 1309140 - RNA, 19 nt, Artificial Sequence
  Description of Artificial Sequence: Synthetic oligonucleotide
guaaggcgagcacggggcu

SEQ ID NO: 1309141 - RNA, 19 nt, Artificial Sequence
  Description of Artificial Sequence: Synthetic oligonucleotide
gccguguucuguccaguga

SEQ ID NO: 1309142 - RNA, 19 nt, Artificial Sequence
  Description of Artificial Sequence: Synthetic oligonucleotide
gguggguggauggguggcc

SEQ ID NO: 1309143 - RNA, 19 nt, Artificial Sequence
  Description of Artificial Sequence: Synthetic oligonucleotide
gaggcucuugcggcagaca

SEQ ID NO: 1309144 - RNA, 19 nt, Artificial Sequence
  Description of Artificial Sequence: Synthetic oligonucleotide
ccgaaagcaaacuggcugu

SEQ ID NO: 1309145 - RNA, 19 nt, Artificial Sequence
  Description of Artificial Sequence: Synthetic oligonucleotide
gcgugggaacaccuucaug

SEQ ID NO: 1309146 - RNA, 19 nt, Artificial Sequence
  Description of Artificial Sequence: Synthetic oligonucleotide
acucgcaccuugggcagau

SEQ ID NO: 1309147 - RNA, 19 nt, Artificial Sequence
  Description of Artificial Sequence: Synthetic oligonucleotide
agacggacuggaggcgccu

SEQ ID NO: 1309148 - RNA, 19 nt, Artificial Sequence
  Description of Artificial Sequence: Synthetic oligonucleotide
ggacuggaggcgccugcug

SEQ ID NO: 1309149 - RNA, 19 nt, Artificial Sequence
  Description of Artificial Sequence: Synthetic oligonucleotide
gcguaaacaggugcugguc

SEQ ID NO: 1309150 - RNA, 19 nt, Artificial Sequence
  Description of Artificial Sequence: Synthetic oligonucleotide
cacccagcgcguagucguc

SEQ ID NO: 1309151 - RNA, 19 nt, Artificial Sequence
  Description of Artificial Sequence: Synthetic oligonucleotide
cggggagaugauaccauuc

SEQ ID NO: 1309152 - RNA, 19 nt, Artificial Sequence
  Description of Artificial Sequence: Synthetic oligonucleotide
cugucgcagccuggggccc

SEQ ID NO: 1309153 - RNA, 19 nt, Artificial Sequence
  Description of Artificial Sequence: Synthetic oligonucleotide
cucgccggccgacgcgccc

SEQ ID NO: 1309154 - RNA, 19 nt, Artificial Sequence
  Description of Artificial Sequence: Synthetic oligonucleotide
gaccguagggagggccuga

SEQ ID NO: 1309155 - RNA, 19 nt, Artificial Sequence
  Description of Artificial Sequence: Synthetic oligonucleotide
cggcagcguaaacaggugc

SEQ ID NO: 1309156 - RNA, 19 nt, Artificial Sequence
  Description of Artificial Sequence: Synthetic oligonucleotide
ggcgggcugggucuggcga

SEQ ID NO: 1309157 - RNA, 19 nt, Artificial Sequence
  Description of Artificial Sequence: Synthetic oligonucleotide
uacagcggccggggagaug

SEQ ID NO: 1309158 - RNA, 19 nt, Artificial Sequence
  Description of Artificial Sequence: Synthetic oligonucleotide
ggggaccguagggagggcc

SEQ ID NO: 1309159 - RNA, 19 nt, Artificial Sequence
  Description of Artificial Sequence: Synthetic oligonucleotide
cguagucgucuuugcacac

SEQ ID NO: 1309160 - RNA, 19 nt, Artificial Sequence
  Description of Artificial Sequence: Synthetic oligonucleotide
ggccggggagaugauacca

SEQ ID NO: 1309161 - RNA, 19 nt, Artificial Sequence
  Description of Artificial Sequence: Synthetic oligonucleotide
acccagcgcguagucgucu

SEQ ID NO: 1309162 - RNA, 19 nt, Artificial Sequence
  Description of Artificial Sequence: Synthetic oligonucleotide
gggcagauguaauccggua

SEQ ID NO: 1309163 - RNA, 19 nt, Artificial Sequence
  Description of Artificial Sequence: Synthetic oligonucleotide
gcuguacccuugcggcagc

SEQ ID NO: 1309164 - RNA, 19 nt, Artificial Sequence
  Description of Artificial Sequence: Synthetic oligonucleotide
ccgucggcucucagggucc

SEQ ID NO: 1309165 - RNA, 19 nt, Artificial Sequence
  Description of Artificial Sequence: Synthetic oligonucleotide
cugcggcgacgccucggcc

SEQ ID NO: 1309166 - RNA, 19 nt, Artificial Sequence
  Description of Artificial Sequence: Synthetic oligonucleotide
ugcucccucgccggccgac

SEQ ID NO: 1309167 - RNA, 19 nt, Artificial Sequence
  Description of Artificial Sequence: Synthetic oligonucleotide
cugccgggccccauaccga

SEQ ID NO: 1309168 - RNA, 19 nt, Artificial Sequence
  Description of Artificial Sequence: Synthetic oligonucleotide
cugccgguucuggucggug

SEQ ID NO: 1309169 - RNA, 19 nt, Artificial Sequence
  Description of Artificial Sequence: Synthetic oligonucleotide
cccaggcguaguccauugg

SEQ ID NO: 1309170 - RNA, 19 nt, Artificial Sequence
  Description of Artificial Sequence: Synthetic oligonucleotide
ccgccgggcaguaaggcga

SEQ ID NO: 1309171 - RNA, 19 nt, Artificial Sequence
  Description of Artificial Sequence: Synthetic oligonucleotide
ccuggggcgagugggauga

SEQ ID NO: 1309172 - RNA, 19 nt, Artificial Sequence
  Description of Artificial Sequence: Synthetic oligonucleotide
ucucucccgucggcucuca

SEQ ID NO: 1309173 - RNA, 19 nt, Artificial Sequence
  Description of Artificial Sequence: Synthetic oligonucleotide
gguaggcgaggcacgaucu

SEQ ID NO: 1309174 - RNA, 19 nt, Artificial Sequence
  Description of Artificial Sequence: Synthetic oligonucleotide
ggcgaggcacgaucuccac

SEQ ID NO: 1309175 - RNA, 19 nt, Artificial Sequence
  Description of Artificial Sequence: Synthetic oligonucleotide
cucucccgucggcucucag

SEQ ID NO: 1309176 - RNA, 19 nt, Artificial Sequence
  Description of Artificial Sequence: Synthetic oligonucleotide
cucugugacggggaccgua

SEQ ID NO: 1309177 - RNA, 19 nt, Artificial Sequence
  Description of Artificial Sequence: Synthetic oligonucleotide
ggagggaacgugggaaucu

SEQ ID NO: 1309178 - RNA, 19 nt, Artificial Sequence
  Description of Artificial Sequence: Synthetic oligonucleotide
ccagcccugagcccacgug

SEQ ID NO: 1309179 - RNA, 19 nt, Artificial Sequence
  Description of Artificial Sequence: Synthetic oligonucleotide
cgacgccucggccauggcc

SEQ ID NO: 1309180 - RNA, 19 nt, Artificial Sequence
  Description of Artificial Sequence: Synthetic oligonucleotide
gcgcguagucgucuuugca

SEQ ID NO: 1309181 - RNA, 19 nt, Artificial Sequence
  Description of Artificial Sequence: Synthetic oligonucleotide
cuagggcaccuggggcgag

SEQ ID NO: 1309182 - RNA, 19 nt, Artificial Sequence
  Description of Artificial Sequence: Synthetic oligonucleotide
accguagggagggccugaa

SEQ ID NO: 1309183 - RNA, 19 nt, Artificial Sequence
  Description of Artificial Sequence: Synthetic oligonucleotide
ggacgccccagggaccaag

SEQ ID NO: 1309184 - RNA, 19 nt, Artificial Sequence
  Description of Artificial Sequence: Synthetic oligonucleotide
ccauuggguucgagugcag

SEQ ID NO: 1309185 - RNA, 19 nt, Artificial Sequence
  Description of Artificial Sequence: Synthetic oligonucleotide
ggaccguagggagggccug

SEQ ID NO: 1309186 - RNA, 19 nt, Artificial Sequence
  Description of Artificial Sequence: Synthetic oligonucleotide
ccggccaguggcccgccgg

SEQ ID NO: 1309187 - RNA, 19 nt, Artificial Sequence
  Description of Artificial Sequence: Synthetic oligonucleotide
cggugcuagggcaccuggg

SEQ ID NO: 1309188 - RNA, 19 nt, Artificial Sequence
  Description of Artificial Sequence: Synthetic oligonucleotide
uggcggugcuagggcaccu

SEQ ID NO: 1309189 - RNA, 19 nt, Artificial Sequence
  Description of Artificial Sequence: Synthetic oligonucleotide
cgguaggcgaggcacgauc

SEQ ID NO: 1309190 - RNA, 19 nt, Artificial Sequence
  Description of Artificial Sequence: Synthetic oligonucleotide
ccgagccugucgcagccug

SEQ ID NO: 1309191 - RNA, 19 nt, Artificial Sequence
  Description of Artificial Sequence: Synthetic oligonucleotide
cgugggaaucucaaagcua

SEQ ID NO: 1309192 - RNA, 19 nt, Artificial Sequence
  Description of Artificial Sequence: Synthetic oligonucleotide
gggccgguguucucaaacu

SEQ ID NO: 1309193 - RNA, 19 nt, Artificial Sequence
  Description of Artificial Sequence: Synthetic oligonucleotide
gcggcagcguaaacaggug

SEQ ID NO: 1309194 - RNA, 19 nt, Artificial Sequence
  Description of Artificial Sequence: Synthetic oligonucleotide
accguccgggcugcggcga

SEQ ID NO: 1309195 - RNA, 19 nt, Artificial Sequence
  Description of Artificial Sequence: Synthetic oligonucleotide
gcucaaacguccauuuauu

SEQ ID NO: 1309196 - RNA, 19 nt, Artificial Sequence
  Description of Artificial Sequence: Synthetic oligonucleotide
gggcgagugggaugaccga

SEQ ID NO: 1309197 - RNA, 19 nt, Artificial Sequence
  Description of Artificial Sequence: Synthetic oligonucleotide
ccgguucuggucggugggg

SEQ ID NO: 1309198 - RNA, 19 nt, Artificial Sequence
  Description of Artificial Sequence: Synthetic oligonucleotide
gccuagacugguguucucu

SEQ ID NO: 1309199 - RNA, 19 nt, Artificial Sequence
  Description of Artificial Sequence: Synthetic oligonucleotide
gcuagggcaccuggggcga

SEQ ID NO: 1309200 - RNA, 19 nt, Artificial Sequence
  Description of Artificial Sequence: Synthetic oligonucleotide
cauggccaaguccgagccu

SEQ ID NO: 1309201 - RNA, 19 nt, Artificial Sequence
  Description of Artificial Sequence: Synthetic oligonucleotide
gcucccucgccggccgacg

SEQ ID NO: 1309202 - RNA, 19 nt, Artificial Sequence
  Description of Artificial Sequence: Synthetic oligonucleotide
ggccccauaccgaugccua

SEQ ID NO: 1309203 - RNA, 19 nt, Artificial Sequence
  Description of Artificial Sequence: Synthetic oligonucleotide
ggcggugcuagggcaccug

SEQ ID NO: 1309204 - RNA, 19 nt, Artificial Sequence
  Description of Artificial Sequence: Synthetic oligonucleotide
cucgcaccuugggcagaug

SEQ ID NO: 1309205 - RNA, 19 nt, Artificial Sequence
  Description of Artificial Sequence: Synthetic oligonucleotide
ggcgagcacggggcugccg

SEQ ID NO: 1309206 - RNA, 19 nt, Artificial Sequence
  Description of Artificial Sequence: Synthetic oligonucleotide
gucuggcgacaguucugcu

SEQ ID NO: 1309207 - RNA, 19 nt, Artificial Sequence
  Description of Artificial Sequence: Synthetic oligonucleotide
cagagccauuuucuguguu

SEQ ID NO: 1309208 - RNA, 19 nt, Artificial Sequence
  Description of Artificial Sequence: Synthetic oligonucleotide
ccgaugccuagacuggugu

SEQ ID NO: 1309209 - RNA, 19 nt, Artificial Sequence
  Description of Artificial Sequence: Synthetic oligonucleotide
ccgggcaguaaggcgagca

SEQ ID NO: 1309210 - RNA, 19 nt, Artificial Sequence
  Description of Artificial Sequence: Synthetic oligonucleotide
cauucacgagcugcuggau

SEQ ID NO: 1309211 - RNA, 19 nt, Artificial Sequence
  Description of Artificial Sequence: Synthetic oligonucleotide
cuccaccgagcagcaguga

SEQ ID NO: 1309212 - RNA, 19 nt, Artificial Sequence
  Description of Artificial Sequence: Synthetic oligonucleotide
gcauggccgcacguggcuc

SEQ ID NO: 1309213 - RNA, 19 nt, Artificial Sequence
  Description of Artificial Sequence: Synthetic oligonucleotide
ugccggccaguggcccgcc

SEQ ID NO: 1309214 - RNA, 19 nt, Artificial Sequence
  Description of Artificial Sequence: Synthetic oligonucleotide
gcccgccgggcaguaaggc

SEQ ID NO: 1309215 - RNA, 19 nt, Artificial Sequence
  Description of Artificial Sequence: Synthetic oligonucleotide
cggccggggagaugauacc

SEQ ID NO: 1309216 - RNA, 19 nt, Artificial Sequence
  Description of Artificial Sequence: Synthetic oligonucleotide
ggccaaguccgagccuguc

SEQ ID NO: 1309217 - RNA, 19 nt, Artificial Sequence
  Description of Artificial Sequence: Synthetic oligonucleotide
gggaccguagggagggccu

SEQ ID NO: 1309218 - RNA, 19 nt, Artificial Sequence
  Description of Artificial Sequence: Synthetic oligonucleotide
ccuucugccguugaacauu

SEQ ID NO: 1309219 - RNA, 19 nt, Artificial Sequence
  Description of Artificial Sequence: Synthetic oligonucleotide
cggccguuuugcugcuccc

SEQ ID NO: 1309220 - RNA, 19 nt, Artificial Sequence
  Description of Artificial Sequence: Synthetic oligonucleotide
cgccgggcaguaaggcgag

SEQ ID NO: 1309221 - RNA, 19 nt, Artificial Sequence
  Description of Artificial Sequence: Synthetic oligonucleotide
cgggcugcggcgacgccuc

SEQ ID NO: 1309222 - RNA, 19 nt, Artificial Sequence
  Description of Artificial Sequence: Synthetic oligonucleotide
gggugagguuaaagacgga

SEQ ID NO: 1309223 - RNA, 19 nt, Artificial Sequence
  Description of Artificial Sequence: Synthetic oligonucleotide
uggccgcacguggcucaaa

SEQ ID NO: 1309224 - RNA, 19 nt, Artificial Sequence
  Description of Artificial Sequence: Synthetic oligonucleotide
gggcugcggcgacgccucg

SEQ ID NO: 1309225 - RNA, 19 nt, Artificial Sequence
  Description of Artificial Sequence: Synthetic oligonucleotide
ggccguuuugcugcucccu

SEQ ID NO: 1309226 - RNA, 19 nt, Artificial Sequence
  Description of Artificial Sequence: Synthetic oligonucleotide
cuggggcgagugggaugac

SEQ ID NO: 1309227 - RNA, 19 nt, Artificial Sequence
  Description of Artificial Sequence: Synthetic oligonucleotide
gccggccaguggcccgccg

SEQ ID NO: 1309228 - RNA, 19 nt, Artificial Sequence
  Description of Artificial Sequence: Synthetic oligonucleotide
ggcgacaguucugcugccu

SEQ ID NO: 1309229 - RNA, 19 nt, Artificial Sequence
  Description of Artificial Sequence: Synthetic oligonucleotide
gggccccauaccgaugccu

SEQ ID NO: 1309230 - RNA, 19 nt, Artificial Sequence
  Description of Artificial Sequence: Synthetic oligonucleotide
ccauaccgaugccuagacu

SEQ ID NO: 1309231 - RNA, 19 nt, Artificial Sequence
  Description of Artificial Sequence: Synthetic oligonucleotide
ccucgccggccgacgcgcc

SEQ ID NO: 1309232 - RNA, 19 nt, Artificial Sequence
  Description of Artificial Sequence: Synthetic oligonucleotide
cccuugcggcagcguaaac

SEQ ID NO: 1309233 - RNA, 19 nt, Artificial Sequence
  Description of Artificial Sequence: Synthetic oligonucleotide
gcgacgccucggccauggc

SEQ ID NO: 1309234 - RNA, 19 nt, Artificial Sequence
  Description of Artificial Sequence: Synthetic oligonucleotide
gccggggagaugauaccau

SEQ ID NO: 1309235 - RNA, 19 nt, Artificial Sequence
  Description of Artificial Sequence: Synthetic oligonucleotide
cccuucugccguugaacau

SEQ ID NO: 1309236 - RNA, 19 nt, Artificial Sequence
  Description of Artificial Sequence: Synthetic oligonucleotide
ggcgccugcuggggacaug

SEQ ID NO: 1309237 - RNA, 19 nt, Artificial Sequence
  Description of Artificial Sequence: Synthetic oligonucleotide
guacagcggccggggagau

SEQ ID NO: 1309238 - RNA, 19 nt, Artificial Sequence
  Description of Artificial Sequence: Synthetic oligonucleotide
gccggccucccagggcaug

SEQ ID NO: 1309239 - RNA, 19 nt, Artificial Sequence
  Description of Artificial Sequence: Synthetic oligonucleotide
cccuuccagcgugggaaca

SEQ ID NO: 1309240 - RNA, 19 nt, Artificial Sequence
  Description of Artificial Sequence: Synthetic oligonucleotide
cgucggcucucaggguccc

SEQ ID NO: 1309241 - RNA, 19 nt, Artificial Sequence
  Description of Artificial Sequence: Synthetic oligonucleotide
ccggggagaugauaccauu

SEQ ID NO: 1309242 - RNA, 19 nt, Artificial Sequence
  Description of Artificial Sequence: Synthetic oligonucleotide
ccguccgggcugcggcgac

SEQ ID NO: 1309243 - RNA, 19 nt, Artificial Sequence
  Description of Artificial Sequence: Synthetic oligonucleotide
cguccgggcugcggcgacg

SEQ ID NO: 1309244 - RNA, 19 nt, Artificial Sequence
  Description of Artificial Sequence: Synthetic oligonucleotide
cgaugccuagacugguguu

SEQ ID NO: 1309245 - RNA, 19 nt, Artificial Sequence
  Description of Artificial Sequence: Synthetic oligonucleotide
cccagcgcguagucgucuu

SEQ ID NO: 1309246 - RNA, 19 nt, Artificial Sequence
  Description of Artificial Sequence: Synthetic oligonucleotide
gccggccguuuugcugcuc

SEQ ID NO: 1309247 - RNA, 19 nt, Artificial Sequence
  Description of Artificial Sequence: Synthetic oligonucleotide
cggggaccguagggagggc

SEQ ID NO: 1309248 - RNA, 19 nt, Artificial Sequence
  Description of Artificial Sequence: Synthetic oligonucleotide
ccagcgcguagucgucuuu

SEQ ID NO: 1309249 - RNA, 19 nt, Artificial Sequence
  Description of Artificial Sequence: Synthetic oligonucleotide
ccguagggagggccugaau

SEQ ID NO: 1309250 - RNA, 19 nt, Artificial Sequence
  Description of Artificial Sequence: Synthetic oligonucleotide
cagcggccggggagaugau

SEQ ID NO: 1309251 - RNA, 19 nt, Artificial Sequence
  Description of Artificial Sequence: Synthetic oligonucleotide
ccggccucccagggcaugu

SEQ ID NO: 1309252 - RNA, 19 nt, Artificial Sequence
  Description of Artificial Sequence: Synthetic oligonucleotide
ccgguaggcgaggcacgau

SEQ ID NO: 1309253 - RNA, 19 nt, Artificial Sequence
  Description of Artificial Sequence: Synthetic oligonucleotide
cggcgacgccucggccaug

SEQ ID NO: 1309254 - RNA, 19 nt, Artificial Sequence
  Description of Artificial Sequence: Synthetic oligonucleotide
cgccggccguuuugcugcu

SEQ ID NO: 1309255 - RNA, 19 nt, Artificial Sequence
  Description of Artificial Sequence: Synthetic oligonucleotide
cgcccgccgccggccguuu

SEQ ID NO: 1309256 - RNA, 19 nt, Artificial Sequence
  Description of Artificial Sequence: Synthetic oligonucleotide
aauaugaagaaaaucgagc

SEQ ID NO: 1309257 - RNA, 19 nt, Artificial Sequence
  Description of Artificial Sequence: Synthetic oligonucleotide
uaaauaauggcacuggccu

SEQ ID NO: 1309258 - RNA, 19 nt, Artificial Sequence
  Description of Artificial Sequence: Synthetic oligonucleotide
aaaguagugauaccucugg

SEQ ID NO: 1309259 - RNA, 19 nt, Artificial Sequence
  Description of Artificial Sequence: Synthetic oligonucleotide
uaugcuaaugucuucauga

SEQ ID NO: 1309260 - RNA, 19 nt, Artificial Sequence
  Description of Artificial Sequence: Synthetic oligonucleotide
cuauauaccagggagaagg

SEQ ID NO: 1309261 - RNA, 19 nt, Artificial Sequence
  Description of Artificial Sequence: Synthetic oligonucleotide
aaucaaaagggcuuugaug

SEQ ID NO: 1309262 - RNA, 19 nt, Artificial Sequence
  Description of Artificial Sequence: Synthetic oligonucleotide
ugacguuuggaucuaagag

SEQ ID NO: 1309263 - RNA, 19 nt, Artificial Sequence
  Description of Artificial Sequence: Synthetic oligonucleotide
uauaccagggagaaggcag

SEQ ID NO: 1309264 - RNA, 19 nt, Artificial Sequence
  Description of Artificial Sequence: Synthetic oligonucleotide
auaugaagaaaaucgagcu

SEQ ID NO: 1309265 - RNA, 19 nt, Artificial Sequence
  Description of Artificial Sequence: Synthetic oligonucleotide
uucgaagaugccaagacug

SEQ ID NO: 1309266 - RNA, 19 nt, Artificial Sequence
  Description of Artificial Sequence: Synthetic oligonucleotide
guagacucgauuuccaugg

SEQ ID NO: 1309267 - RNA, 19 nt, Artificial Sequence
  Description of Artificial Sequence: Synthetic oligonucleotide
aaaggugcuagcauugagc

SEQ ID NO: 1309268 - RNA, 19 nt, Artificial Sequence
  Description of Artificial Sequence: Synthetic oligonucleotide
aaauaugaagaaaaucgag

SEQ ID NO: 1309269 - RNA, 19 nt, Artificial Sequence
  Description of Artificial Sequence: Synthetic oligonucleotide
ucaucaaugccgcuguggg

SEQ ID NO: 1309270 - RNA, 19 nt, Artificial Sequence
  Description of Artificial Sequence: Synthetic oligonucleotide
ucugguuugggccaagcag

SEQ ID NO: 1309271 - RNA, 19 nt, Artificial Sequence
  Description of Artificial Sequence: Synthetic oligonucleotide
aaaucgagcugcuccaguc

SEQ ID NO: 1309272 - RNA, 19 nt, Artificial Sequence
  Description of Artificial Sequence: Synthetic oligonucleotide
aguagugauaccucugggg

SEQ ID NO: 1309273 - RNA, 19 nt, Artificial Sequence
  Description of Artificial Sequence: Synthetic oligonucleotide
ugcacuauggaugggaggg

SEQ ID NO: 1309274 - RNA, 19 nt, Artificial Sequence
  Description of Artificial Sequence: Synthetic oligonucleotide
uucaguggcacguucacag

SEQ ID NO: 1309275 - RNA, 19 nt, Artificial Sequence
  Description of Artificial Sequence: Synthetic oligonucleotide
ucaaccagggcacaagccc

SEQ ID NO: 1309276 - RNA, 19 nt, Artificial Sequence
  Description of Artificial Sequence: Synthetic oligonucleotide
ucuaagaggccuuccuucg

SEQ ID NO: 1309277 - RNA, 19 nt, Artificial Sequence
  Description of Artificial Sequence: Synthetic oligonucleotide
uggcaagccuaaauaaugg

SEQ ID NO: 1309278 - RNA, 19 nt, Artificial Sequence
  Description of Artificial Sequence: Synthetic oligonucleotide
cuccuuacuucgaagaugc

SEQ ID NO: 1309279 - RNA, 19 nt, Artificial Sequence
  Description of Artificial Sequence: Synthetic oligonucleotide
aagaugccaagacuggcag

SEQ ID NO: 1309280 - RNA, 19 nt, Artificial Sequence
  Description of Artificial Sequence: Synthetic oligonucleotide
aaauaagugggagcccagc

SEQ ID NO: 1309281 - RNA, 19 nt, Artificial Sequence
  Description of Artificial Sequence: Synthetic oligonucleotide
acguuuggaucuaagaggc

SEQ ID NO: 1309282 - RNA, 19 nt, Artificial Sequence
  Description of Artificial Sequence: Synthetic oligonucleotide
caagccuaaauaauggcac

SEQ ID NO: 1309283 - RNA, 19 nt, Artificial Sequence
  Description of Artificial Sequence: Synthetic oligonucleotide
ugaaagguagacucgauuu

SEQ ID NO: 1309284 - RNA, 19 nt, Artificial Sequence
  Description of Artificial Sequence: Synthetic oligonucleotide
aauaagugggagcccagca

SEQ ID NO: 1309285 - RNA, 19 nt, Artificial Sequence
  Description of Artificial Sequence: Synthetic oligonucleotide
aucuaagaggccuuccuuc

SEQ ID NO: 1309286 - RNA, 19 nt, Artificial Sequence
  Description of Artificial Sequence: Synthetic oligonucleotide
cuugaaugaucccagugag

SEQ ID NO: 1309287 - RNA, 19 nt, Artificial Sequence
  Description of Artificial Sequence: Synthetic oligonucleotide
acauacaugugaaagguag

SEQ ID NO: 1309288 - RNA, 19 nt, Artificial Sequence
  Description of Artificial Sequence: Synthetic oligonucleotide
auugccgccauugacgcgc

SEQ ID NO: 1309289 - RNA, 19 nt, Artificial Sequence
  Description of Artificial Sequence: Synthetic oligonucleotide
aaguagugauaccucuggg

SEQ ID NO: 1309290 - RNA, 19 nt, Artificial Sequence
  Description of Artificial Sequence: Synthetic oligonucleotide
uccggaacaccacagggag

SEQ ID NO: 1309291 - RNA, 19 nt, Artificial Sequence
  Description of Artificial Sequence: Synthetic oligonucleotide
uuaauccacugcuugaagu

SEQ ID NO: 1309292 - RNA, 19 nt, Artificial Sequence
  Description of Artificial Sequence: Synthetic oligonucleotide
ugacuugacguuuggaucu

SEQ ID NO: 1309293 - RNA, 19 nt, Artificial Sequence
  Description of Artificial Sequence: Synthetic oligonucleotide
agcagaagccuauauacca

SEQ ID NO: 1309294 - RNA, 19 nt, Artificial Sequence
  Description of Artificial Sequence: Synthetic oligonucleotide
uggaacagaacuccggaac

SEQ ID NO: 1309295 - RNA, 19 nt, Artificial Sequence
  Description of Artificial Sequence: Synthetic oligonucleotide
cucuugaaaguaaauauga

SEQ ID NO: 1309296 - RNA, 19 nt, Artificial Sequence
  Description of Artificial Sequence: Synthetic oligonucleotide
ucgaagaugccaagacugg

SEQ ID NO: 1309297 - RNA, 19 nt, Artificial Sequence
  Description of Artificial Sequence: Synthetic oligonucleotide
gacuuuauucaguggcacg

SEQ ID NO: 1309298 - RNA, 19 nt, Artificial Sequence
  Description of Artificial Sequence: Synthetic oligonucleotide
ugacuuucaagucccaguc

SEQ ID NO: 1309299 - RNA, 19 nt, Artificial Sequence
  Description of Artificial Sequence: Synthetic oligonucleotide
ucuugaaaguaaauaugaa

SEQ ID NO: 1309300 - RNA, 19 nt, Artificial Sequence
  Description of Artificial Sequence: Synthetic oligonucleotide
gagcaugacuuucaagucc

SEQ ID NO: 1309301 - RNA, 19 nt, Artificial Sequence
  Description of Artificial Sequence: Synthetic oligonucleotide
cuggacauacaugugaaag

SEQ ID NO: 1309302 - RNA, 19 nt, Artificial Sequence
  Description of Artificial Sequence: Synthetic oligonucleotide
acuuggugaacccagcaga

SEQ ID NO: 1309303 - RNA, 19 nt, Artificial Sequence
  Description of Artificial Sequence: Synthetic oligonucleotide
gaaagggcaccauugccgc

SEQ ID NO: 1309304 - RNA, 19 nt, Artificial Sequence
  Description of Artificial Sequence: Synthetic oligonucleotide
cuggcaagccuaaauaaug

SEQ ID NO: 1309305 - RNA, 19 nt, Artificial Sequence
  Description of Artificial Sequence: Synthetic oligonucleotide
ucagcaagcgcuuggggca

SEQ ID NO: 1309306 - RNA, 19 nt, Artificial Sequence
  Description of Artificial Sequence: Synthetic oligonucleotide
acuccggaacaccacaggg

SEQ ID NO: 1309307 - RNA, 19 nt, Artificial Sequence
  Description of Artificial Sequence: Synthetic oligonucleotide
agaaaaucgagcugcucca

SEQ ID NO: 1309308 - RNA, 19 nt, Artificial Sequence
  Description of Artificial Sequence: Synthetic oligonucleotide
gacucgauuuccauggugc

SEQ ID NO: 1309309 - RNA, 19 nt, Artificial Sequence
  Description of Artificial Sequence: Synthetic oligonucleotide
aacuccggaacaccacagg

SEQ ID NO: 1309310 - RNA, 19 nt, Artificial Sequence
  Description of Artificial Sequence: Synthetic oligonucleotide
uugacuugacguuuggauc

SEQ ID NO: 1309311 - RNA, 19 nt, Artificial Sequence
  Description of Artificial Sequence: Synthetic oligonucleotide
gaaaauaagugggagccca

SEQ ID NO: 1309312 - RNA, 19 nt, Artificial Sequence
  Description of Artificial Sequence: Synthetic oligonucleotide
ucuguaaaggugcuagcau

SEQ ID NO: 1309313 - RNA, 19 nt, Artificial Sequence
  Description of Artificial Sequence: Synthetic oligonucleotide
aacucuccuuacuucgaag

SEQ ID NO: 1309314 - RNA, 19 nt, Artificial Sequence
  Description of Artificial Sequence: Synthetic oligonucleotide
agugauaccucuggggagg

SEQ ID NO: 1309315 - RNA, 19 nt, Artificial Sequence
  Description of Artificial Sequence: Synthetic oligonucleotide
ugcuaaugucuucaugaug

SEQ ID NO: 1309316 - RNA, 19 nt, Artificial Sequence
  Description of Artificial Sequence: Synthetic oligonucleotide
guagugauaccucugggga

SEQ ID NO: 1309317 - RNA, 19 nt, Artificial Sequence
  Description of Artificial Sequence: Synthetic oligonucleotide
cuuacuucgaagaugccaa

SEQ ID NO: 1309318 - RNA, 19 nt, Artificial Sequence
  Description of Artificial Sequence: Synthetic oligonucleotide
agauuaauccacugcuuga

SEQ ID NO: 1309319 - RNA, 19 nt, Artificial Sequence
  Description of Artificial Sequence: Synthetic oligonucleotide
aagccuaaauaauggcacu

SEQ ID NO: 1309320 - RNA, 19 nt, Artificial Sequence
  Description of Artificial Sequence: Synthetic oligonucleotide
ucgauuuccauggugcggc

SEQ ID NO: 1309321 - RNA, 19 nt, Artificial Sequence
  Description of Artificial Sequence: Synthetic oligonucleotide
uuuauucaguggcacguuc

SEQ ID NO: 1309322 - RNA, 19 nt, Artificial Sequence
  Description of Artificial Sequence: Synthetic oligonucleotide
uguuuccccgacuuuauuc

SEQ ID NO: 1309323 - RNA, 19 nt, Artificial Sequence
  Description of Artificial Sequence: Synthetic oligonucleotide
cauugacgcgccaaagccg

SEQ ID NO: 1309324 - RNA, 19 nt, Artificial Sequence
  Description of Artificial Sequence: Synthetic oligonucleotide
aaccucgguaugcuaaugu

SEQ ID NO: 1309325 - RNA, 19 nt, Artificial Sequence
  Description of Artificial Sequence: Synthetic oligonucleotide
aaaaucgagcugcuccagu

SEQ ID NO: 1309326 - RNA, 19 nt, Artificial Sequence
  Description of Artificial Sequence: Synthetic oligonucleotide
acugagacugaggaguggg

SEQ ID NO: 1309327 - RNA, 19 nt, Artificial Sequence
  Description of Artificial Sequence: Synthetic oligonucleotide
ugguggauauggaacagaa

SEQ ID NO: 1309328 - RNA, 19 nt, Artificial Sequence
  Description of Artificial Sequence: Synthetic oligonucleotide
uugaaugaucccagugagc

SEQ ID NO: 1309329 - RNA, 19 nt, Artificial Sequence
  Description of Artificial Sequence: Synthetic oligonucleotide
uaauccacugcuugaagua

SEQ ID NO: 1309330 - RNA, 19 nt, Artificial Sequence
  Description of Artificial Sequence: Synthetic oligonucleotide
accauugccgccauugacg

SEQ ID NO: 1309331 - RNA, 19 nt, Artificial Sequence
  Description of Artificial Sequence: Synthetic oligonucleotide
acuuuauucaguggcacgu

SEQ ID NO: 1309332 - RNA, 19 nt, Artificial Sequence
  Description of Artificial Sequence: Synthetic oligonucleotide
aaucgagcugcuccagucu

SEQ ID NO: 1309333 - RNA, 19 nt, Artificial Sequence
  Description of Artificial Sequence: Synthetic oligonucleotide
guuugggccaagcagcuac

SEQ ID NO: 1309334 - RNA, 19 nt, Artificial Sequence
  Description of Artificial Sequence: Synthetic oligonucleotide
acucgauuuccauggugcg

SEQ ID NO: 1309335 - RNA, 19 nt, Artificial Sequence
  Description of Artificial Sequence: Synthetic oligonucleotide
agaggcaucuaaaacucuc

SEQ ID NO: 1309336 - RNA, 19 nt, Artificial Sequence
  Description of Artificial Sequence: Synthetic oligonucleotide
caaacccucaaccagggca

SEQ ID NO: 1309337 - RNA, 19 nt, Artificial Sequence
  Description of Artificial Sequence: Synthetic oligonucleotide
augucuaggaguccauucu

SEQ ID NO: 1309338 - RNA, 19 nt, Artificial Sequence
  Description of Artificial Sequence: Synthetic oligonucleotide
auauggaacagaacuccgg

SEQ ID NO: 1309339 - RNA, 19 nt, Artificial Sequence
  Description of Artificial Sequence: Synthetic oligonucleotide
accucgguaugcuaauguc

SEQ ID NO: 1309340 - RNA, 19 nt, Artificial Sequence
  Description of Artificial Sequence: Synthetic oligonucleotide
uagugauaccucuggggag

SEQ ID NO: 1309341 - RNA, 19 nt, Artificial Sequence
  Description of Artificial Sequence: Synthetic oligonucleotide
cauggugcggccauuuaac

SEQ ID NO: 1309342 - RNA, 19 nt, Artificial Sequence
  Description of Artificial Sequence: Synthetic oligonucleotide
ucuugcucuugaaaguaaa

SEQ ID NO: 1309343 - RNA, 19 nt, Artificial Sequence
  Description of Artificial Sequence: Synthetic oligonucleotide
aagcgcuuggggcaguuga

SEQ ID NO: 1309344 - RNA, 19 nt, Artificial Sequence
  Description of Artificial Sequence: Synthetic oligonucleotide
caagggagcguaagggagg

SEQ ID NO: 1309345 - RNA, 19 nt, Artificial Sequence
  Description of Artificial Sequence: Synthetic oligonucleotide
aggggagacuuggugaacc

SEQ ID NO: 1309346 - RNA, 19 nt, Artificial Sequence
  Description of Artificial Sequence: Synthetic oligonucleotide
cuuucaagucccagucucc

SEQ ID NO: 1309347 - RNA, 19 nt, Artificial Sequence
  Description of Artificial Sequence: Synthetic oligonucleotide
ggaaagggcaccauugccg

SEQ ID NO: 1309348 - RNA, 19 nt, Artificial Sequence
  Description of Artificial Sequence: Synthetic oligonucleotide
agaugccaagacuggcagc

SEQ ID NO: 1309349 - RNA, 19 nt, Artificial Sequence
  Description of Artificial Sequence: Synthetic oligonucleotide
uacuggacugagacugagg

SEQ ID NO: 1309350 - RNA, 19 nt, Artificial Sequence
  Description of Artificial Sequence: Synthetic oligonucleotide
acguucacagcagggaugg

SEQ ID NO: 1309351 - RNA, 19 nt, Artificial Sequence
  Description of Artificial Sequence: Synthetic oligonucleotide
cagucuguaaaggugcuag

SEQ ID NO: 1309352 - RNA, 19 nt, Artificial Sequence
  Description of Artificial Sequence: Synthetic oligonucleotide
auagggaacucaaugauuu

SEQ ID NO: 1309353 - RNA, 19 nt, Artificial Sequence
  Description of Artificial Sequence: Synthetic oligonucleotide
aaacucuccuuacuucgaa

SEQ ID NO: 1309354 - RNA, 19 nt, Artificial Sequence
  Description of Artificial Sequence: Synthetic oligonucleotide
ucagauuaauccacugcuu

SEQ ID NO: 1309355 - RNA, 19 nt, Artificial Sequence
  Description of Artificial Sequence: Synthetic oligonucleotide
cuagcccaggcccauaaug

SEQ ID NO: 1309356 - RNA, 19 nt, Artificial Sequence
  Description of Artificial Sequence: Synthetic oligonucleotide
agcuacccuguccugcccc

SEQ ID NO: 1309357 - RNA, 19 nt, Artificial Sequence
  Description of Artificial Sequence: Synthetic oligonucleotide
cacacaccaugcacuaugg

SEQ ID NO: 1309358 - RNA, 19 nt, Artificial Sequence
  Description of Artificial Sequence: Synthetic oligonucleotide
aguaauccgccacuggcaa

SEQ ID NO: 1309359 - RNA, 19 nt, Artificial Sequence
  Description of Artificial Sequence: Synthetic oligonucleotide
guuuccccgacuuuauuca

SEQ ID NO: 1309360 - RNA, 19 nt, Artificial Sequence
  Description of Artificial Sequence: Synthetic oligonucleotide
aaguaauccgccacuggca

SEQ ID NO: 1309361 - RNA, 19 nt, Artificial Sequence
  Description of Artificial Sequence: Synthetic oligonucleotide
cuugacguuuggaucuaag

SEQ ID NO: 1309362 - RNA, 19 nt, Artificial Sequence
  Description of Artificial Sequence: Synthetic oligonucleotide
guccaagggagcguaaggg

SEQ ID NO: 1309363 - RNA, 19 nt, Artificial Sequence
  Description of Artificial Sequence: Synthetic oligonucleotide
agcagcuacccuguccugc

SEQ ID NO: 1309364 - RNA, 19 nt, Artificial Sequence
  Description of Artificial Sequence: Synthetic oligonucleotide
cucgggcccauccaggucc

SEQ ID NO: 1309365 - RNA, 19 nt, Artificial Sequence
  Description of Artificial Sequence: Synthetic oligonucleotide
augcacuauggaugggagg

SEQ ID NO: 1309366 - RNA, 19 nt, Artificial Sequence
  Description of Artificial Sequence: Synthetic oligonucleotide
gaggcaucuaaaacucucc

SEQ ID NO: 1309367 - RNA, 19 nt, Artificial Sequence
  Description of Artificial Sequence: Synthetic oligonucleotide
guaugcuaaugucuucaug

SEQ ID NO: 1309368 - RNA, 19 nt, Artificial Sequence
  Description of Artificial Sequence: Synthetic oligonucleotide
gauuaauccacugcuugaa

SEQ ID NO: 1309369 - RNA, 19 nt, Artificial Sequence
  Description of Artificial Sequence: Synthetic oligonucleotide
uuacuucgaagaugccaag

SEQ ID NO: 1309370 - RNA, 19 nt, Artificial Sequence
  Description of Artificial Sequence: Synthetic oligonucleotide
uggcacguucacagcaggg

SEQ ID NO: 1309371 - RNA, 19 nt, Artificial Sequence
  Description of Artificial Sequence: Synthetic oligonucleotide
uuuccccgacuuuauucag

SEQ ID NO: 1309372 - RNA, 19 nt, Artificial Sequence
  Description of Artificial Sequence: Synthetic oligonucleotide
agcgcggcaggcucucucc

SEQ ID NO: 1309373 - RNA, 19 nt, Artificial Sequence
  Description of Artificial Sequence: Synthetic oligonucleotide
gguagacucgauuuccaug

SEQ ID NO: 1309374 - RNA, 19 nt, Artificial Sequence
  Description of Artificial Sequence: Synthetic oligonucleotide
ggugcuagcauugagcauc

SEQ ID NO: 1309375 - RNA, 19 nt, Artificial Sequence
  Description of Artificial Sequence: Synthetic oligonucleotide
uuuggaucuaagaggccuu

SEQ ID NO: 1309376 - RNA, 19 nt, Artificial Sequence
  Description of Artificial Sequence: Synthetic oligonucleotide
uucgccauccacucaucga

SEQ ID NO: 1309377 - RNA, 19 nt, Artificial Sequence
  Description of Artificial Sequence: Synthetic oligonucleotide
gacuacaggcuggacauac

SEQ ID NO: 1309378 - RNA, 19 nt, Artificial Sequence
  Description of Artificial Sequence: Synthetic oligonucleotide
agacucgauuuccauggug

SEQ ID NO: 1309379 - RNA, 19 nt, Artificial Sequence
  Description of Artificial Sequence: Synthetic oligonucleotide
cccgacuuuauucaguggc

SEQ ID NO: 1309380 - RNA, 19 nt, Artificial Sequence
  Description of Artificial Sequence: Synthetic oligonucleotide
uuugggccaagcagcuacc

SEQ ID NO: 1309381 - RNA, 19 nt, Artificial Sequence
  Description of Artificial Sequence: Synthetic oligonucleotide
cucaucgacccucuccagc

SEQ ID NO: 1309382 - RNA, 19 nt, Artificial Sequence
  Description of Artificial Sequence: Synthetic oligonucleotide
caucaaugccgcugugggg

SEQ ID NO: 1309383 - RNA, 19 nt, Artificial Sequence
  Description of Artificial Sequence: Synthetic oligonucleotide
guggacuacaggcuggaca

SEQ ID NO: 1309384 - RNA, 19 nt, Artificial Sequence
  Description of Artificial Sequence: Synthetic oligonucleotide
gaaaaucgagcugcuccag

SEQ ID NO: 1309385 - RNA, 19 nt, Artificial Sequence
  Description of Artificial Sequence: Synthetic oligonucleotide
ugucuaggaguccauucuu

SEQ ID NO: 1309386 - RNA, 19 nt, Artificial Sequence
  Description of Artificial Sequence: Synthetic oligonucleotide
gcuugaaugaucccaguga

SEQ ID NO: 1309387 - RNA, 19 nt, Artificial Sequence
  Description of Artificial Sequence: Synthetic oligonucleotide
ugugaaagguagacucgau

SEQ ID NO: 1309388 - RNA, 19 nt, Artificial Sequence
  Description of Artificial Sequence: Synthetic oligonucleotide
gaaagccccaaugcccagg

SEQ ID NO: 1309389 - RNA, 19 nt, Artificial Sequence
  Description of Artificial Sequence: Synthetic oligonucleotide
uucaagucccagucuccgc

SEQ ID NO: 1309390 - RNA, 19 nt, Artificial Sequence
  Description of Artificial Sequence: Synthetic oligonucleotide
gcaucuaaaacucuccuua

SEQ ID NO: 1309391 - RNA, 19 nt, Artificial Sequence
  Description of Artificial Sequence: Synthetic oligonucleotide
agccuaaauaauggcacug

SEQ ID NO: 1309392 - RNA, 19 nt, Artificial Sequence
  Description of Artificial Sequence: Synthetic oligonucleotide
ccauugacgcgccaaagcc

SEQ ID NO: 1309393 - RNA, 19 nt, Artificial Sequence
  Description of Artificial Sequence: Synthetic oligonucleotide
ggaggauucugguuugggc

SEQ ID NO: 1309394 - RNA, 19 nt, Artificial Sequence
  Description of Artificial Sequence: Synthetic oligonucleotide
ucccagucuccgcagguga

SEQ ID NO: 1309395 - RNA, 19 nt, Artificial Sequence
  Description of Artificial Sequence: Synthetic oligonucleotide
cucgauuuccauggugcgg

SEQ ID NO: 1309396 - RNA, 19 nt, Artificial Sequence
  Description of Artificial Sequence: Synthetic oligonucleotide
uaagcuguggguggacuac

SEQ ID NO: 1309397 - RNA, 19 nt, Artificial Sequence
  Description of Artificial Sequence: Synthetic oligonucleotide
aggaugaaucuguggcuug

SEQ ID NO: 1309398 - RNA, 19 nt, Artificial Sequence
  Description of Artificial Sequence: Synthetic oligonucleotide
auucugguuugggccaagc

SEQ ID NO: 1309399 - RNA, 19 nt, Artificial Sequence
  Description of Artificial Sequence: Synthetic oligonucleotide
ccuaaauaauggcacuggc

SEQ ID NO: 1309400 - RNA, 19 nt, Artificial Sequence
  Description of Artificial Sequence: Synthetic oligonucleotide
gaacagaacuccggaacac

SEQ ID NO: 1309401 - RNA, 19 nt, Artificial Sequence
  Description of Artificial Sequence: Synthetic oligonucleotide
cuaagaggccuuccuucgc

SEQ ID NO: 1309402 - RNA, 19 nt, Artificial Sequence
  Description of Artificial Sequence: Synthetic oligonucleotide
ugacgcgccaaagccgugg

SEQ ID NO: 1309403 - RNA, 19 nt, Artificial Sequence
  Description of Artificial Sequence: Synthetic oligonucleotide
aauacuggacugagacuga

SEQ ID NO: 1309404 - RNA, 19 nt, Artificial Sequence
  Description of Artificial Sequence: Synthetic oligonucleotide
ggcaagccuaaauaauggc

SEQ ID NO: 1309405 - RNA, 19 nt, Artificial Sequence
  Description of Artificial Sequence: Synthetic oligonucleotide
cacguucacagcagggaug

SEQ ID NO: 1309406 - RNA, 19 nt, Artificial Sequence
  Description of Artificial Sequence: Synthetic oligonucleotide
aagguagacucgauuucca

SEQ ID NO: 1309407 - RNA, 19 nt, Artificial Sequence
  Description of Artificial Sequence: Synthetic oligonucleotide
cagaccugugccacucucc

SEQ ID NO: 1309408 - RNA, 19 nt, Artificial Sequence
  Description of Artificial Sequence: Synthetic oligonucleotide
ucugggcgcagaccugugc

SEQ ID NO: 1309409 - RNA, 19 nt, Artificial Sequence
  Description of Artificial Sequence: Synthetic oligonucleotide
cacucaucgacccucucca

SEQ ID NO: 1309410 - RNA, 19 nt, Artificial Sequence
  Description of Artificial Sequence: Synthetic oligonucleotide
gguccaagggagcguaagg

SEQ ID NO: 1309411 - RNA, 19 nt, Artificial Sequence
  Description of Artificial Sequence: Synthetic oligonucleotide
gucuguaaaggugcuagca

SEQ ID NO: 1309412 - RNA, 19 nt, Artificial Sequence
  Description of Artificial Sequence: Synthetic oligonucleotide
gccgccagcuuucuggugg

SEQ ID NO: 1309413 - RNA, 19 nt, Artificial Sequence
  Description of Artificial Sequence: Synthetic oligonucleotide
gccuaaauaauggcacugg

SEQ ID NO: 1309414 - RNA, 19 nt, Artificial Sequence
  Description of Artificial Sequence: Synthetic oligonucleotide
aggaggauucugguuuggg

SEQ ID NO: 1309415 - RNA, 19 nt, Artificial Sequence
  Description of Artificial Sequence: Synthetic oligonucleotide
gacgcgccaaagccguggg

SEQ ID NO: 1309416 - RNA, 19 nt, Artificial Sequence
  Description of Artificial Sequence: Synthetic oligonucleotide
ggcuugaaugaucccagug

SEQ ID NO: 1309417 - RNA, 19 nt, Artificial Sequence
  Description of Artificial Sequence: Synthetic oligonucleotide
agugaguaccuggguuccc

SEQ ID NO: 1309418 - RNA, 19 nt, Artificial Sequence
  Description of Artificial Sequence: Synthetic oligonucleotide
uggcgaagcuguaagccuu

SEQ ID NO: 1309419 - RNA, 19 nt, Artificial Sequence
  Description of Artificial Sequence: Synthetic oligonucleotide
auggugcggccauuuaacu

SEQ ID NO: 1309420 - RNA, 19 nt, Artificial Sequence
  Description of Artificial Sequence: Synthetic oligonucleotide
ucccucuugugagggagag

SEQ ID NO: 1309421 - RNA, 19 nt, Artificial Sequence
  Description of Artificial Sequence: Synthetic oligonucleotide
gucgcacguggccucaaag

SEQ ID NO: 1309422 - RNA, 19 nt, Artificial Sequence
  Description of Artificial Sequence: Synthetic oligonucleotide
ucaaugccgcuguggggcc

SEQ ID NO: 1309423 - RNA, 19 nt, Artificial Sequence
  Description of Artificial Sequence: Synthetic oligonucleotide
uggaucuaagaggccuucc

SEQ ID NO: 1309424 - RNA, 19 nt, Artificial Sequence
  Description of Artificial Sequence: Synthetic oligonucleotide
acuggcaagccuaaauaau

SEQ ID NO: 1309425 - RNA, 19 nt, Artificial Sequence
  Description of Artificial Sequence: Synthetic oligonucleotide
cacaaagugucugcuccag

SEQ ID NO: 1309426 - RNA, 19 nt, Artificial Sequence
  Description of Artificial Sequence: Synthetic oligonucleotide
guaauccgccacuggcaag

SEQ ID NO: 1309427 - RNA, 19 nt, Artificial Sequence
  Description of Artificial Sequence: Synthetic oligonucleotide
cuuggugaacccagcagaa

SEQ ID NO: 1309428 - RNA, 19 nt, Artificial Sequence
  Description of Artificial Sequence: Synthetic oligonucleotide
caccauugccgccauugac

SEQ ID NO: 1309429 - RNA, 19 nt, Artificial Sequence
  Description of Artificial Sequence: Synthetic oligonucleotide
guggggccggccuaugugc

SEQ ID NO: 1309430 - RNA, 19 nt, Artificial Sequence
  Description of Artificial Sequence: Synthetic oligonucleotide
agaccagcccuccuuccca

SEQ ID NO: 1309431 - RNA, 19 nt, Artificial Sequence
  Description of Artificial Sequence: Synthetic oligonucleotide
caagucccagucuccgcag

SEQ ID NO: 1309432 - RNA, 19 nt, Artificial Sequence
  Description of Artificial Sequence: Synthetic oligonucleotide
uagacucgauuuccauggu

SEQ ID NO: 1309433 - RNA, 19 nt, Artificial Sequence
  Description of Artificial Sequence: Synthetic oligonucleotide
gaugaaaccucgguaugcu

SEQ ID NO: 1309434 - RNA, 19 nt, Artificial Sequence
  Description of Artificial Sequence: Synthetic oligonucleotide
gagcguaagggaggggcag

SEQ ID NO: 1309435 - RNA, 19 nt, Artificial Sequence
  Description of Artificial Sequence: Synthetic oligonucleotide
aguggcacguucacagcag

SEQ ID NO: 1309436 - RNA, 19 nt, Artificial Sequence
  Description of Artificial Sequence: Synthetic oligonucleotide
gaugggguggauacaaggu

SEQ ID NO: 1309437 - RNA, 19 nt, Artificial Sequence
  Description of Artificial Sequence: Synthetic oligonucleotide
agguagacucgauuuccau

SEQ ID NO: 1309438 - RNA, 19 nt, Artificial Sequence
  Description of Artificial Sequence: Synthetic oligonucleotide
agaugcugaagggucugug

SEQ ID NO: 1309439 - RNA, 19 nt, Artificial Sequence
  Description of Artificial Sequence: Synthetic oligonucleotide
auaauggcacuggccuggg

SEQ ID NO: 1309440 - RNA, 19 nt, Artificial Sequence
  Description of Artificial Sequence: Synthetic oligonucleotide
cacguggccucaaagucca

SEQ ID NO: 1309441 - RNA, 19 nt, Artificial Sequence
  Description of Artificial Sequence: Synthetic oligonucleotide
gccuaugugcugcaggcug

SEQ ID NO: 1309442 - RNA, 19 nt, Artificial Sequence
  Description of Artificial Sequence: Synthetic oligonucleotide
gcaagccuaaauaauggca

SEQ ID NO: 1309443 - RNA, 19 nt, Artificial Sequence
  Description of Artificial Sequence: Synthetic oligonucleotide
uccuuacuucgaagaugcc

SEQ ID NO: 1309444 - RNA, 19 nt, Artificial Sequence
  Description of Artificial Sequence: Synthetic oligonucleotide
cugccggagaggcugucgc

SEQ ID NO: 1309445 - RNA, 19 nt, Artificial Sequence
  Description of Artificial Sequence: Synthetic oligonucleotide
gccauugacgcgccaaagc

SEQ ID NO: 1309446 - RNA, 19 nt, Artificial Sequence
  Description of Artificial Sequence: Synthetic oligonucleotide
gcggccauuuaacuucagg

SEQ ID NO: 1309447 - RNA, 19 nt, Artificial Sequence
  Description of Artificial Sequence: Synthetic oligonucleotide
gccauuuaacuucaggaua

SEQ ID NO: 1309448 - RNA, 19 nt, Artificial Sequence
  Description of Artificial Sequence: Synthetic oligonucleotide
uggugcggccauuuaacuu

SEQ ID NO: 1309449 - RNA, 19 nt, Artificial Sequence
  Description of Artificial Sequence: Synthetic oligonucleotide
cauagggcaacuggggaca

SEQ ID NO: 1309450 - RNA, 19 nt, Artificial Sequence
  Description of Artificial Sequence: Synthetic oligonucleotide
cagugaguaccuggguucc

SEQ ID NO: 1309451 - RNA, 19 nt, Artificial Sequence
  Description of Artificial Sequence: Synthetic oligonucleotide
ggcaccauugccgccauug

SEQ ID NO: 1309452 - RNA, 19 nt, Artificial Sequence
  Description of Artificial Sequence: Synthetic oligonucleotide
acucaucgacccucuccag

SEQ ID NO: 1309453 - RNA, 19 nt, Artificial Sequence
  Description of Artificial Sequence: Synthetic oligonucleotide
ucgguaugcuaaugucuuc

SEQ ID NO: 1309454 - RNA, 19 nt, Artificial Sequence
  Description of Artificial Sequence: Synthetic oligonucleotide
ccauugccgccauugacgc

SEQ ID NO: 1309455 - RNA, 19 nt, Artificial Sequence
  Description of Artificial Sequence: Synthetic oligonucleotide
agccuauauaccagggaga

SEQ ID NO: 1309456 - RNA, 19 nt, Artificial Sequence
  Description of Artificial Sequence: Synthetic oligonucleotide
ggcaacuggggacacucug

SEQ ID NO: 1309457 - RNA, 19 nt, Artificial Sequence
  Description of Artificial Sequence: Synthetic oligonucleotide
cauugagcauccagaggca

SEQ ID NO: 1309458 - RNA, 19 nt, Artificial Sequence
  Description of Artificial Sequence: Synthetic oligonucleotide
agcguaagggaggggcagg

SEQ ID NO: 1309459 - RNA, 19 nt, Artificial Sequence
  Description of Artificial Sequence: Synthetic oligonucleotide
gggagcguaagggaggggc

SEQ ID NO: 1309460 - RNA, 19 nt, Artificial Sequence
  Description of Artificial Sequence: Synthetic oligonucleotide
cuccggaacaccacaggga

SEQ ID NO: 1309461 - RNA, 19 nt, Artificial Sequence
  Description of Artificial Sequence: Synthetic oligonucleotide
auagggcaacuggggacac

SEQ ID NO: 1309462 - RNA, 19 nt, Artificial Sequence
  Description of Artificial Sequence: Synthetic oligonucleotide
uggggccugaucuguccug

SEQ ID NO: 1309463 - RNA, 19 nt, Artificial Sequence
  Description of Artificial Sequence: Synthetic oligonucleotide
caguggcacguucacagca

SEQ ID NO: 1309464 - RNA, 19 nt, Artificial Sequence
  Description of Artificial Sequence: Synthetic oligonucleotide
agcgcuuggggcaguugac

SEQ ID NO: 1309465 - RNA, 19 nt, Artificial Sequence
  Description of Artificial Sequence: Synthetic oligonucleotide
ugggcgcagaccugugcca

SEQ ID NO: 1309466 - RNA, 19 nt, Artificial Sequence
  Description of Artificial Sequence: Synthetic oligonucleotide
ugccaaucaaaagggcuuu

SEQ ID NO: 1309467 - RNA, 19 nt, Artificial Sequence
  Description of Artificial Sequence: Synthetic oligonucleotide
gcuccagucuguaaaggug

SEQ ID NO: 1309468 - RNA, 19 nt, Artificial Sequence
  Description of Artificial Sequence: Synthetic oligonucleotide
ccauagggcaacuggggac

SEQ ID NO: 1309469 - RNA, 19 nt, Artificial Sequence
  Description of Artificial Sequence: Synthetic oligonucleotide
cauugccgccauugacgcg

SEQ ID NO: 1309470 - RNA, 19 nt, Artificial Sequence
  Description of Artificial Sequence: Synthetic oligonucleotide
agcucgggcccauccaggu

SEQ ID NO: 1309471 - RNA, 19 nt, Artificial Sequence
  Description of Artificial Sequence: Synthetic oligonucleotide
gaaaccucgguaugcuaau

SEQ ID NO: 1309472 - RNA, 19 nt, Artificial Sequence
  Description of Artificial Sequence: Synthetic oligonucleotide
acgcgccaaagccgugggc

SEQ ID NO: 1309473 - RNA, 19 nt, Artificial Sequence
  Description of Artificial Sequence: Synthetic oligonucleotide
aagccgugggccgccagcu

SEQ ID NO: 1309474 - RNA, 19 nt, Artificial Sequence
  Description of Artificial Sequence: Synthetic oligonucleotide
uuccuucgccauccacuca

SEQ ID NO: 1309475 - RNA, 19 nt, Artificial Sequence
  Description of Artificial Sequence: Synthetic oligonucleotide
uggggcaguugacggcagc

SEQ ID NO: 1309476 - RNA, 19 nt, Artificial Sequence
  Description of Artificial Sequence: Synthetic oligonucleotide
augaaaccucgguaugcua

SEQ ID NO: 1309477 - RNA, 19 nt, Artificial Sequence
  Description of Artificial Sequence: Synthetic oligonucleotide
gauacaagguggggccuga

SEQ ID NO: 1309478 - RNA, 19 nt, Artificial Sequence
  Description of Artificial Sequence: Synthetic oligonucleotide
cuucgaagaugccaagacu

SEQ ID NO: 1309479 - RNA, 19 nt, Artificial Sequence
  Description of Artificial Sequence: Synthetic oligonucleotide
auaccagggagaaggcagu

SEQ ID NO: 1309480 - RNA, 19 nt, Artificial Sequence
  Description of Artificial Sequence: Synthetic oligonucleotide
aggggccaaauggccaaac

SEQ ID NO: 1309481 - RNA, 19 nt, Artificial Sequence
  Description of Artificial Sequence: Synthetic oligonucleotide
auaauggcaggggcuaaua

SEQ ID NO: 1309482 - RNA, 19 nt, Artificial Sequence
  Description of Artificial Sequence: Synthetic oligonucleotide
cagugagcucuguacagaa

SEQ ID NO: 1309483 - RNA, 19 nt, Artificial Sequence
  Description of Artificial Sequence: Synthetic oligonucleotide
gucuccgcaggugacaaaa

SEQ ID NO: 1309484 - RNA, 19 nt, Artificial Sequence
  Description of Artificial Sequence: Synthetic oligonucleotide
gacauacaugugaaaggua

SEQ ID NO: 1309485 - RNA, 19 nt, Artificial Sequence
  Description of Artificial Sequence: Synthetic oligonucleotide
uaauggcacuggccuggga

SEQ ID NO: 1309486 - RNA, 19 nt, Artificial Sequence
  Description of Artificial Sequence: Synthetic oligonucleotide
agacccuuguucaugucua

SEQ ID NO: 1309487 - RNA, 19 nt, Artificial Sequence
  Description of Artificial Sequence: Synthetic oligonucleotide
cucgguaugcuaaugucuu

SEQ ID NO: 1309488 - RNA, 19 nt, Artificial Sequence
  Description of Artificial Sequence: Synthetic oligonucleotide
gauuuccauggugcggcca

SEQ ID NO: 1309489 - RNA, 19 nt, Artificial Sequence
  Description of Artificial Sequence: Synthetic oligonucleotide
ggauagggaacucaaugau

SEQ ID NO: 1309490 - RNA, 19 nt, Artificial Sequence
  Description of Artificial Sequence: Synthetic oligonucleotide
ccucaaccagggcacaagc

SEQ ID NO: 1309491 - RNA, 19 nt, Artificial Sequence
  Description of Artificial Sequence: Synthetic oligonucleotide
cccagugagcucuguacag

SEQ ID NO: 1309492 - RNA, 19 nt, Artificial Sequence
  Description of Artificial Sequence: Synthetic oligonucleotide
ggggccaaauggccaaacc

SEQ ID NO: 1309493 - RNA, 19 nt, Artificial Sequence
  Description of Artificial Sequence: Synthetic oligonucleotide
ugcggccauuuaacuucag

SEQ ID NO: 1309494 - RNA, 19 nt, Artificial Sequence
  Description of Artificial Sequence: Synthetic oligonucleotide
gggcuaauacuggacugag

SEQ ID NO: 1309495 - RNA, 19 nt, Artificial Sequence
  Description of Artificial Sequence: Synthetic oligonucleotide
ggccauuuaacuucaggau

SEQ ID NO: 1309496 - RNA, 19 nt, Artificial Sequence
  Description of Artificial Sequence: Synthetic oligonucleotide
gugaaagguagacucgauu

SEQ ID NO: 1309497 - RNA, 19 nt, Artificial Sequence
  Description of Artificial Sequence: Synthetic oligonucleotide
uugacgcgccaaagccgug

SEQ ID NO: 1309498 - RNA, 19 nt, Artificial Sequence
  Description of Artificial Sequence: Synthetic oligonucleotide
ugucgcacguggccucaaa

SEQ ID NO: 1309499 - RNA, 19 nt, Artificial Sequence
  Description of Artificial Sequence: Synthetic oligonucleotide
cugccaaucaaaagggcuu

SEQ ID NO: 1309500 - RNA, 19 nt, Artificial Sequence
  Description of Artificial Sequence: Synthetic oligonucleotide
gcacguggccucaaagucc

SEQ ID NO: 1309501 - RNA, 19 nt, Artificial Sequence
  Description of Artificial Sequence: Synthetic oligonucleotide
gcuuggggcaguugacggc

SEQ ID NO: 1309502 - RNA, 19 nt, Artificial Sequence
  Description of Artificial Sequence: Synthetic oligonucleotide
cugucgccauggcaacgcc

SEQ ID NO: 1309503 - RNA, 19 nt, Artificial Sequence
  Description of Artificial Sequence: Synthetic oligonucleotide
gccuauauaccagggagaa

SEQ ID NO: 1309504 - RNA, 19 nt, Artificial Sequence
  Description of Artificial Sequence: Synthetic oligonucleotide
cugagacccuuguucaugu

SEQ ID NO: 1309505 - RNA, 19 nt, Artificial Sequence
  Description of Artificial Sequence: Synthetic oligonucleotide
cuacaggcuggacauacau

SEQ ID NO: 1309506 - RNA, 19 nt, Artificial Sequence
  Description of Artificial Sequence: Synthetic oligonucleotide
ccaggugcaggccccgacg

SEQ ID NO: 1309507 - RNA, 19 nt, Artificial Sequence
  Description of Artificial Sequence: Synthetic oligonucleotide
ggccccgacgucucccucg

SEQ ID NO: 1309508 - RNA, 19 nt, Artificial Sequence
  Description of Artificial Sequence: Synthetic oligonucleotide
caucgacccucuccagcac

SEQ ID NO: 1309509 - RNA, 19 nt, Artificial Sequence
  Description of Artificial Sequence: Synthetic oligonucleotide
gcugucgccauggcaacgc

SEQ ID NO: 1309510 - RNA, 19 nt, Artificial Sequence
  Description of Artificial Sequence: Synthetic oligonucleotide
ggguggggcacaaaguguc

SEQ ID NO: 1309511 - RNA, 19 nt, Artificial Sequence
  Description of Artificial Sequence: Synthetic oligonucleotide
cccgacgucucccucggcc

SEQ ID NO: 1309512 - RNA, 19 nt, Artificial Sequence
  Description of Artificial Sequence: Synthetic oligonucleotide
ggaaagccccaaugcccag

SEQ ID NO: 1309513 - RNA, 19 nt, Artificial Sequence
  Description of Artificial Sequence: Synthetic oligonucleotide
caggggcuaauacuggacu

SEQ ID NO: 1309514 - RNA, 19 nt, Artificial Sequence
  Description of Artificial Sequence: Synthetic oligonucleotide
ggcaggggcuaauacugga

SEQ ID NO: 1309515 - RNA, 19 nt, Artificial Sequence
  Description of Artificial Sequence: Synthetic oligonucleotide
gcacuauggaugggagggg

SEQ ID NO: 1309516 - RNA, 19 nt, Artificial Sequence
  Description of Artificial Sequence: Synthetic oligonucleotide
ccgacuuuauucaguggca

SEQ ID NO: 1309517 - RNA, 19 nt, Artificial Sequence
  Description of Artificial Sequence: Synthetic oligonucleotide
cggccuaugugcugcaggc

SEQ ID NO: 1309518 - RNA, 19 nt, Artificial Sequence
  Description of Artificial Sequence: Synthetic oligonucleotide
ccggccuaugugcugcagg

SEQ ID NO: 1309519 - RNA, 19 nt, Artificial Sequence
  Description of Artificial Sequence: Synthetic oligonucleotide
gcgcuuggggcaguugacg

SEQ ID NO: 1309520 - RNA, 19 nt, Artificial Sequence
  Description of Artificial Sequence: Synthetic oligonucleotide
cagcuacccuguccugccc

SEQ ID NO: 1309521 - RNA, 19 nt, Artificial Sequence
  Description of Artificial Sequence: Synthetic oligonucleotide
cccgucagcugccggagag

SEQ ID NO: 1309522 - RNA, 19 nt, Artificial Sequence
  Description of Artificial Sequence: Synthetic oligonucleotide
ccuauauaccagggagaag

SEQ ID NO: 1309523 - RNA, 19 nt, Artificial Sequence
  Description of Artificial Sequence: Synthetic oligonucleotide
auccgccacuggcaagccu

SEQ ID NO: 1309524 - RNA, 19 nt, Artificial Sequence
  Description of Artificial Sequence: Synthetic oligonucleotide
cgcacguggccucaaaguc

SEQ ID NO: 1309525 - RNA, 19 nt, Artificial Sequence
  Description of Artificial Sequence: Synthetic oligonucleotide
gcaggggcuaauacuggac

SEQ ID NO: 1309526 - RNA, 19 nt, Artificial Sequence
  Description of Artificial Sequence: Synthetic oligonucleotide
ugauaccucuggggaggaa

SEQ ID NO: 1309527 - RNA, 19 nt, Artificial Sequence
  Description of Artificial Sequence: Synthetic oligonucleotide
gugaacccagcagaagccu

SEQ ID NO: 1309528 - RNA, 19 nt, Artificial Sequence
  Description of Artificial Sequence: Synthetic oligonucleotide
agucuccgcaggugacaaa

SEQ ID NO: 1309529 - RNA, 19 nt, Artificial Sequence
  Description of Artificial Sequence: Synthetic oligonucleotide
gacgucucccucggccuca

SEQ ID NO: 1309530 - RNA, 19 nt, Artificial Sequence
  Description of Artificial Sequence: Synthetic oligonucleotide
acuugacguuuggaucuaa

SEQ ID NO: 1309531 - RNA, 19 nt, Artificial Sequence
  Description of Artificial Sequence: Synthetic oligonucleotide
ccuaugugcugcaggcuga

SEQ ID NO: 1309532 - RNA, 19 nt, Artificial Sequence
  Description of Artificial Sequence: Synthetic oligonucleotide
cgacuuuauucaguggcac

SEQ ID NO: 1309533 - RNA, 19 nt, Artificial Sequence
  Description of Artificial Sequence: Synthetic oligonucleotide
gacuugacguuuggaucua

SEQ ID NO: 1309534 - RNA, 19 nt, Artificial Sequence
  Description of Artificial Sequence: Synthetic oligonucleotide
gcuggacauacaugugaaa

SEQ ID NO: 1309535 - RNA, 19 nt, Artificial Sequence
  Description of Artificial Sequence: Synthetic oligonucleotide
gcugccggagaggcugucg

SEQ ID NO: 1309536 - RNA, 19 nt, Artificial Sequence
  Description of Artificial Sequence: Synthetic oligonucleotide
ccaagacuggcagcuggag

SEQ ID NO: 1309537 - RNA, 19 nt, Artificial Sequence
  Description of Artificial Sequence: Synthetic oligonucleotide
gguaugcuaaugucuucau

SEQ ID NO: 1309538 - RNA, 19 nt, Artificial Sequence
  Description of Artificial Sequence: Synthetic oligonucleotide
ccacuggcaagccuaaaua

SEQ ID NO: 1309539 - RNA, 19 nt, Artificial Sequence
  Description of Artificial Sequence: Synthetic oligonucleotide
ccccgacuuuauucagugg

SEQ ID NO: 1309540 - RNA, 19 nt, Artificial Sequence
  Description of Artificial Sequence: Synthetic oligonucleotide
gcuugucgcacguggccuc

SEQ ID NO: 1309541 - RNA, 19 nt, Artificial Sequence
  Description of Artificial Sequence: Synthetic oligonucleotide
ccucgguaugcuaaugucu

SEQ ID NO: 1309542 - RNA, 19 nt, Artificial Sequence
  Description of Artificial Sequence: Synthetic oligonucleotide
gccccaucccauccucugc

SEQ ID NO: 1309543 - RNA, 19 nt, Artificial Sequence
  Description of Artificial Sequence: Synthetic oligonucleotide
ggcugucgccauggcaacg

SEQ ID NO: 1309544 - RNA, 19 nt, Artificial Sequence
  Description of Artificial Sequence: Synthetic oligonucleotide
cuugucgcacguggccuca

SEQ ID NO: 1309545 - RNA, 19 nt, Artificial Sequence
  Description of Artificial Sequence: Synthetic oligonucleotide
gugauaccucuggggagga

SEQ ID NO: 1309546 - RNA, 19 nt, Artificial Sequence
  Description of Artificial Sequence: Synthetic oligonucleotide
augaucccagugagcucug

SEQ ID NO: 1309547 - RNA, 19 nt, Artificial Sequence
  Description of Artificial Sequence: Synthetic oligonucleotide
gugcggccauuuaacuuca

SEQ ID NO: 1309548 - RNA, 19 nt, Artificial Sequence
  Description of Artificial Sequence: Synthetic oligonucleotide
gggccggccuaugugcugc

SEQ ID NO: 1309549 - RNA, 19 nt, Artificial Sequence
  Description of Artificial Sequence: Synthetic oligonucleotide
cagucuccgcaggugacaa

SEQ ID NO: 1309550 - RNA, 19 nt, Artificial Sequence
  Description of Artificial Sequence: Synthetic oligonucleotide
ccauggugcggccauuuaa

SEQ ID NO: 1309551 - RNA, 19 nt, Artificial Sequence
  Description of Artificial Sequence: Synthetic oligonucleotide
ggaugaaucuguggcuugu

SEQ ID NO: 1309552 - RNA, 19 nt, Artificial Sequence
  Description of Artificial Sequence: Synthetic oligonucleotide
gccacuggcaagccuaaau

SEQ ID NO: 1309553 - RNA, 19 nt, Artificial Sequence
  Description of Artificial Sequence: Synthetic oligonucleotide
cgucagcugccggagaggc

SEQ ID NO: 1309554 - RNA, 19 nt, Artificial Sequence
  Description of Artificial Sequence: Synthetic oligonucleotide
cgccauccacucaucgacc

SEQ ID NO: 1309555 - RNA, 19 nt, Artificial Sequence
  Description of Artificial Sequence: Synthetic oligonucleotide
cuuuauucaguggcacguu

SEQ ID NO: 1309556 - RNA, 19 nt, Artificial Sequence
  Description of Artificial Sequence: Synthetic oligonucleotide
ccagugagcucuguacaga

SEQ ID NO: 1309557 - RNA, 19 nt, Artificial Sequence
  Description of Artificial Sequence: Synthetic oligonucleotide
cgauuuccauggugcggcc

SEQ ID NO: 1309558 - RNA, 19 nt, Artificial Sequence
  Description of Artificial Sequence: Synthetic oligonucleotide
uugucgcacguggccucaa

SEQ ID NO: 1309559 - RNA, 19 nt, Artificial Sequence
  Description of Artificial Sequence: Synthetic oligonucleotide
ggggccggccuaugugcug

SEQ ID NO: 1309560 - RNA, 19 nt, Artificial Sequence
  Description of Artificial Sequence: Synthetic oligonucleotide
cccauaauggcaggggcua

SEQ ID NO: 1309561 - RNA, 19 nt, Artificial Sequence
  Description of Artificial Sequence: Synthetic oligonucleotide
gggcgcagaccugugccac

SEQ ID NO: 1309562 - RNA, 19 nt, Artificial Sequence
  Description of Artificial Sequence: Synthetic oligonucleotide
gguggacuacaggcuggac

SEQ ID NO: 1309563 - RNA, 19 nt, Artificial Sequence
  Description of Artificial Sequence: Synthetic oligonucleotide
gcaggccccgacgucuccc

SEQ ID NO: 1309564 - RNA, 19 nt, Artificial Sequence
  Description of Artificial Sequence: Synthetic oligonucleotide
ggauucugguuugggccaa

SEQ ID NO: 1309565 - RNA, 19 nt, Artificial Sequence
  Description of Artificial Sequence: Synthetic oligonucleotide
ccgucagcugccggagagg

SEQ ID NO: 1309566 - RNA, 19 nt, Artificial Sequence
  Description of Artificial Sequence: Synthetic oligonucleotide
agcaagcgcuuggggcagu

SEQ ID NO: 1309567 - RNA, 19 nt, Artificial Sequence
  Description of Artificial Sequence: Synthetic oligonucleotide
cagguccaagggagcguaa

SEQ ID NO: 1309568 - RNA, 19 nt, Artificial Sequence
  Description of Artificial Sequence: Synthetic oligonucleotide
ggcuugucgcacguggccu

SEQ ID NO: 1309569 - RNA, 19 nt, Artificial Sequence
  Description of Artificial Sequence: Synthetic oligonucleotide
ggccgccagcuuucuggug

SEQ ID NO: 1309570 - RNA, 19 nt, Artificial Sequence
  Description of Artificial Sequence: Synthetic oligonucleotide
gccgccauugacgcgccaa

SEQ ID NO: 1309571 - RNA, 19 nt, Artificial Sequence
  Description of Artificial Sequence: Synthetic oligonucleotide
ccgugggccgccagcuuuc

SEQ ID NO: 1309572 - RNA, 19 nt, Artificial Sequence
  Description of Artificial Sequence: Synthetic oligonucleotide
acguggccucaaaguccag

SEQ ID NO: 1309573 - RNA, 19 nt, Artificial Sequence
  Description of Artificial Sequence: Synthetic oligonucleotide
cgccauugacgcgccaaag

SEQ ID NO: 1309574 - RNA, 19 nt, Artificial Sequence
  Description of Artificial Sequence: Synthetic oligonucleotide
ccggaacaccacagggaga

SEQ ID NO: 1309575 - RNA, 19 nt, Artificial Sequence
  Description of Artificial Sequence: Synthetic oligonucleotide
ccagucuccgcaggugaca

SEQ ID NO: 1309576 - RNA, 19 nt, Artificial Sequence
  Description of Artificial Sequence: Synthetic oligonucleotide
ggcugagacccuuguucau

SEQ ID NO: 1309577 - RNA, 19 nt, Artificial Sequence
  Description of Artificial Sequence: Synthetic oligonucleotide
gccggccuaugugcugcag

SEQ ID NO: 1309578 - RNA, 19 nt, Artificial Sequence
  Description of Artificial Sequence: Synthetic oligonucleotide
gcccauggcgaagcuguaa

SEQ ID NO: 1309579 - RNA, 19 nt, Artificial Sequence
  Description of Artificial Sequence: Synthetic oligonucleotide
gcgcggcaggcucucucca

SEQ ID NO: 1309580 - RNA, 19 nt, Artificial Sequence
  Description of Artificial Sequence: Synthetic oligonucleotide
ggcgcagaccugugccacu

SEQ ID NO: 1309581 - RNA, 19 nt, Artificial Sequence
  Description of Artificial Sequence: Synthetic oligonucleotide
ccgacgucucccucggccu

SEQ ID NO: 1309582 - RNA, 19 nt, Artificial Sequence
  Description of Artificial Sequence: Synthetic oligonucleotide
ccgccauugacgcgccaaa

SEQ ID NO: 1309583 - RNA, 19 nt, Artificial Sequence
  Description of Artificial Sequence: Synthetic oligonucleotide
ccgccagcuuucuggugga

SEQ ID NO: 1309584 - RNA, 19 nt, Artificial Sequence
  Description of Artificial Sequence: Synthetic oligonucleotide
ggccuaugugcugcaggcu

SEQ ID NO: 1309585 - RNA, 19 nt, Artificial Sequence
  Description of Artificial Sequence: Synthetic oligonucleotide
cgacgucucccucggccuc

SEQ ID NO: 1309586 - RNA, 19 nt, Artificial Sequence
  Description of Artificial Sequence: Synthetic oligonucleotide
cguucacagcagggauggg

SEQ ID NO: 1309587 - RNA, 19 nt, Artificial Sequence
  Description of Artificial Sequence: Synthetic oligonucleotide
ggacuacaggcuggacaua

SEQ ID NO: 1309588 - RNA, 19 nt, Artificial Sequence
  Description of Artificial Sequence: Synthetic oligonucleotide
ggcgaagcuguaagccuuu

SEQ ID NO: 1309589 - RNA, 19 nt, Artificial Sequence
  Description of Artificial Sequence: Synthetic oligonucleotide
ccgccacuggcaagccuaa

SEQ ID NO: 1309590 - RNA, 19 nt, Artificial Sequence
  Description of Artificial Sequence: Synthetic oligonucleotide
gggcaacuggggacacucu

SEQ ID NO: 1309591 - RNA, 19 nt, Artificial Sequence
  Description of Artificial Sequence: Synthetic oligonucleotide
cuacccuguccugccccau

SEQ ID NO: 1309592 - RNA, 19 nt, Artificial Sequence
  Description of Artificial Sequence: Synthetic oligonucleotide
ccgggccagcgcggcaggc

SEQ ID NO: 1309593 - RNA, 19 nt, Artificial Sequence
  Description of Artificial Sequence: Synthetic oligonucleotide
ccuagcccaggcccauaau

SEQ ID NO: 1309594 - RNA, 19 nt, Artificial Sequence
  Description of Artificial Sequence: Synthetic oligonucleotide
gcaagcgcuuggggcaguu

SEQ ID NO: 1309595 - RNA, 19 nt, Artificial Sequence
  Description of Artificial Sequence: Synthetic oligonucleotide
ccgcuguggggccggccua

SEQ ID NO: 1309596 - RNA, 19 nt, Artificial Sequence
  Description of Artificial Sequence: Synthetic oligonucleotide
cgcagaccugugccacucu

SEQ ID NO: 1309597 - RNA, 19 nt, Artificial Sequence
  Description of Artificial Sequence: Synthetic oligonucleotide
gggcaccauugccgccauu

SEQ ID NO: 1309598 - RNA, 19 nt, Artificial Sequence
  Description of Artificial Sequence: Synthetic oligonucleotide
ccccaaugcccaggguguu

SEQ ID NO: 1309599 - RNA, 19 nt, Artificial Sequence
  Description of Artificial Sequence: Synthetic oligonucleotide
uguagaacaauucaaaccg

SEQ ID NO: 1309600 - RNA, 19 nt, Artificial Sequence
  Description of Artificial Sequence: Synthetic oligonucleotide
auuagguuaaucuugaugg

SEQ ID NO: 1309601 - RNA, 19 nt, Artificial Sequence
  Description of Artificial Sequence: Synthetic oligonucleotide
aaaacuuucaagucuaggg

SEQ ID NO: 1309602 - RNA, 19 nt, Artificial Sequence
  Description of Artificial Sequence: Synthetic oligonucleotide
aaaucuacagcuuagaccu

SEQ ID NO: 1309603 - RNA, 19 nt, Artificial Sequence
  Description of Artificial Sequence: Synthetic oligonucleotide
aagucuaggguuuacagcc

SEQ ID NO: 1309604 - RNA, 19 nt, Artificial Sequence
  Description of Artificial Sequence: Synthetic oligonucleotide
uugaauacauuuuauaugg

SEQ ID NO: 1309605 - RNA, 19 nt, Artificial Sequence
  Description of Artificial Sequence: Synthetic oligonucleotide
aacuauccaagauagaugg

SEQ ID NO: 1309606 - RNA, 19 nt, Artificial Sequence
  Description of Artificial Sequence: Synthetic oligonucleotide
uuaacuggugacaagaagg

SEQ ID NO: 1309607 - RNA, 19 nt, Artificial Sequence
  Description of Artificial Sequence: Synthetic oligonucleotide
ucuaaacuauccaagauag

SEQ ID NO: 1309608 - RNA, 19 nt, Artificial Sequence
  Description of Artificial Sequence: Synthetic oligonucleotide
uuuuauauggaaagguugg

SEQ ID NO: 1309609 - RNA, 19 nt, Artificial Sequence
  Description of Artificial Sequence: Synthetic oligonucleotide
agauagaugggucugagac

SEQ ID NO: 1309610 - RNA, 19 nt, Artificial Sequence
  Description of Artificial Sequence: Synthetic oligonucleotide
aacaagcuaacauaggcuc

SEQ ID NO: 1309611 - RNA, 19 nt, Artificial Sequence
  Description of Artificial Sequence: Synthetic oligonucleotide
guugucaucacauaccugg

SEQ ID NO: 1309612 - RNA, 19 nt, Artificial Sequence
  Description of Artificial Sequence: Synthetic oligonucleotide
aauuuugacagcuuguggu

SEQ ID NO: 1309613 - RNA, 19 nt, Artificial Sequence
  Description of Artificial Sequence: Synthetic oligonucleotide
ugaauacuuaaauacuugg

SEQ ID NO: 1309614 - RNA, 19 nt, Artificial Sequence
  Description of Artificial Sequence: Synthetic oligonucleotide
aauuuguguugauaaaauc

SEQ ID NO: 1309615 - RNA, 19 nt, Artificial Sequence
  Description of Artificial Sequence: Synthetic oligonucleotide
aagccuaaguuaaauaucc

SEQ ID NO: 1309616 - RNA, 19 nt, Artificial Sequence
  Description of Artificial Sequence: Synthetic oligonucleotide
uuguugaauacuuaaauac

SEQ ID NO: 1309617 - RNA, 19 nt, Artificial Sequence
  Description of Artificial Sequence: Synthetic oligonucleotide
ucacuaagaagaaucaugc

SEQ ID NO: 1309618 - RNA, 19 nt, Artificial Sequence
  Description of Artificial Sequence: Synthetic oligonucleotide
ucagauuggguuuaacugg

SEQ ID NO: 1309619 - RNA, 19 nt, Artificial Sequence
  Description of Artificial Sequence: Synthetic oligonucleotide
uauuccuuaaacuggacug

SEQ ID NO: 1309620 - RNA, 19 nt, Artificial Sequence
  Description of Artificial Sequence: Synthetic oligonucleotide
uuaaucuucagcuuuggcu

SEQ ID NO: 1309621 - RNA, 19 nt, Artificial Sequence
  Description of Artificial Sequence: Synthetic oligonucleotide
uuauuguauuccaacaagc

SEQ ID NO: 1309622 - RNA, 19 nt, Artificial Sequence
  Description of Artificial Sequence: Synthetic oligonucleotide
gacuguuugucuuaggugc

SEQ ID NO: 1309623 - RNA, 19 nt, Artificial Sequence
  Description of Artificial Sequence: Synthetic oligonucleotide
uuguuuauagaacggauac

SEQ ID NO: 1309624 - RNA, 19 nt, Artificial Sequence
  Description of Artificial Sequence: Synthetic oligonucleotide
uucagauuggguuuaacug

SEQ ID NO: 1309625 - RNA, 19 nt, Artificial Sequence
  Description of Artificial Sequence: Synthetic oligonucleotide
caucauaagcaccauaucc

SEQ ID NO: 1309626 - RNA, 19 nt, Artificial Sequence
  Description of Artificial Sequence: Synthetic oligonucleotide
aacaauucaaaccggcucu

SEQ ID NO: 1309627 - RNA, 19 nt, Artificial Sequence
  Description of Artificial Sequence: Synthetic oligonucleotide
auucaaaucuaaacuaucc

SEQ ID NO: 1309628 - RNA, 19 nt, Artificial Sequence
  Description of Artificial Sequence: Synthetic oligonucleotide
aaacuuucaagucuagggu

SEQ ID NO: 1309629 - RNA, 19 nt, Artificial Sequence
  Description of Artificial Sequence: Synthetic oligonucleotide
uuauagaacggauacgucu

SEQ ID NO: 1309630 - RNA, 19 nt, Artificial Sequence
  Description of Artificial Sequence: Synthetic oligonucleotide
cauugaaccauaagaaugc

SEQ ID NO: 1309631 - RNA, 19 nt, Artificial Sequence
  Description of Artificial Sequence: Synthetic oligonucleotide
aagaaucaugccuucaaug

SEQ ID NO: 1309632 - RNA, 19 nt, Artificial Sequence
  Description of Artificial Sequence: Synthetic oligonucleotide
ugaacauugaacacacccc

SEQ ID NO: 1309633 - RNA, 19 nt, Artificial Sequence
  Description of Artificial Sequence: Synthetic oligonucleotide
agagacucggcacagcagc

SEQ ID NO: 1309634 - RNA, 19 nt, Artificial Sequence
  Description of Artificial Sequence: Synthetic oligonucleotide
aaugcuauaaacaguuuug

SEQ ID NO: 1309635 - RNA, 19 nt, Artificial Sequence
  Description of Artificial Sequence: Synthetic oligonucleotide
uucaaaccggcucucaggg

SEQ ID NO: 1309636 - RNA, 19 nt, Artificial Sequence
  Description of Artificial Sequence: Synthetic oligonucleotide
agcuauggaucuuacauuc

SEQ ID NO: 1309637 - RNA, 19 nt, Artificial Sequence
  Description of Artificial Sequence: Synthetic oligonucleotide
cugaacauugaacacaccc

SEQ ID NO: 1309638 - RNA, 19 nt, Artificial Sequence
  Description of Artificial Sequence: Synthetic oligonucleotide
uguugaauacuuaaauacu

SEQ ID NO: 1309639 - RNA, 19 nt, Artificial Sequence
  Description of Artificial Sequence: Synthetic oligonucleotide
ugagacugcaugcuuaaag

SEQ ID NO: 1309640 - RNA, 19 nt, Artificial Sequence
  Description of Artificial Sequence: Synthetic oligonucleotide
uuaggauugcucuuuaaga

SEQ ID NO: 1309641 - RNA, 19 nt, Artificial Sequence
  Description of Artificial Sequence: Synthetic oligonucleotide
ugugaaacagcugacagga

SEQ ID NO: 1309642 - RNA, 19 nt, Artificial Sequence
  Description of Artificial Sequence: Synthetic oligonucleotide
uuuaacuggugacaagaag

SEQ ID NO: 1309643 - RNA, 19 nt, Artificial Sequence
  Description of Artificial Sequence: Synthetic oligonucleotide
agauaauuagggucugagc

SEQ ID NO: 1309644 - RNA, 19 nt, Artificial Sequence
  Description of Artificial Sequence: Synthetic oligonucleotide
ugcucuuuaagauuugucu

SEQ ID NO: 1309645 - RNA, 19 nt, Artificial Sequence
  Description of Artificial Sequence: Synthetic oligonucleotide
aaacuggacuguuuucuac

SEQ ID NO: 1309646 - RNA, 19 nt, Artificial Sequence
  Description of Artificial Sequence: Synthetic oligonucleotide
guuauuguauuccaacaag

SEQ ID NO: 1309647 - RNA, 19 nt, Artificial Sequence
  Description of Artificial Sequence: Synthetic oligonucleotide
aaccauagcaggcuacuuc

SEQ ID NO: 1309648 - RNA, 19 nt, Artificial Sequence
  Description of Artificial Sequence: Synthetic oligonucleotide
ucaaaucuaaacuauccaa

SEQ ID NO: 1309649 - RNA, 19 nt, Artificial Sequence
  Description of Artificial Sequence: Synthetic oligonucleotide
uaaacuauccaagauagau

SEQ ID NO: 1309650 - RNA, 19 nt, Artificial Sequence
  Description of Artificial Sequence: Synthetic oligonucleotide
uauuguauuccaacaagcu

SEQ ID NO: 1309651 - RNA, 19 nt, Artificial Sequence
  Description of Artificial Sequence: Synthetic oligonucleotide
uuugauguuugcuugaaua

SEQ ID NO: 1309652 - RNA, 19 nt, Artificial Sequence
  Description of Artificial Sequence: Synthetic oligonucleotide
auuguuaaugaguacuucu

SEQ ID NO: 1309653 - RNA, 19 nt, Artificial Sequence
  Description of Artificial Sequence: Synthetic oligonucleotide
uguguugauaaaaucuaca

SEQ ID NO: 1309654 - RNA, 19 nt, Artificial Sequence
  Description of Artificial Sequence: Synthetic oligonucleotide
agaaugccaauccaugaac

SEQ ID NO: 1309655 - RNA, 19 nt, Artificial Sequence
  Description of Artificial Sequence: Synthetic oligonucleotide
ugccaauccaugaacauca

SEQ ID NO: 1309656 - RNA, 19 nt, Artificial Sequence
  Description of Artificial Sequence: Synthetic oligonucleotide
auaagcaccauauccaggu

SEQ ID NO: 1309657 - RNA, 19 nt, Artificial Sequence
  Description of Artificial Sequence: Synthetic oligonucleotide
auauccagguuucuuguac

SEQ ID NO: 1309658 - RNA, 19 nt, Artificial Sequence
  Description of Artificial Sequence: Synthetic oligonucleotide
agaaucaugccuucaaugu

SEQ ID NO: 1309659 - RNA, 19 nt, Artificial Sequence
  Description of Artificial Sequence: Synthetic oligonucleotide
aauucaaaccggcucucag

SEQ ID NO: 1309660 - RNA, 19 nt, Artificial Sequence
  Description of Artificial Sequence: Synthetic oligonucleotide
ucccucauaaccauagcag

SEQ ID NO: 1309661 - RNA, 19 nt, Artificial Sequence
  Description of Artificial Sequence: Synthetic oligonucleotide
aaugaguacuucucguuca

SEQ ID NO: 1309662 - RNA, 19 nt, Artificial Sequence
  Description of Artificial Sequence: Synthetic oligonucleotide
aaagccuaauuuuaggauu

SEQ ID NO: 1309663 - RNA, 19 nt, Artificial Sequence
  Description of Artificial Sequence: Synthetic oligonucleotide
uaaaaucuacagcuuagac

SEQ ID NO: 1309664 - RNA, 19 nt, Artificial Sequence
  Description of Artificial Sequence: Synthetic oligonucleotide
agaagccuaaguuaaauau

SEQ ID NO: 1309665 - RNA, 19 nt, Artificial Sequence
  Description of Artificial Sequence: Synthetic oligonucleotide
uguuauuguauuccaacaa

SEQ ID NO: 1309666 - RNA, 19 nt, Artificial Sequence
  Description of Artificial Sequence: Synthetic oligonucleotide
aaacugaaagccuaauuuu

SEQ ID NO: 1309667 - RNA, 19 nt, Artificial Sequence
  Description of Artificial Sequence: Synthetic oligonucleotide
uauucuaauaccucagcaa

SEQ ID NO: 1309668 - RNA, 19 nt, Artificial Sequence
  Description of Artificial Sequence: Synthetic oligonucleotide
uagaacaauucaaaccggc

SEQ ID NO: 1309669 - RNA, 19 nt, Artificial Sequence
  Description of Artificial Sequence: Synthetic oligonucleotide
acuucuaacauagaaagau

SEQ ID NO: 1309670 - RNA, 19 nt, Artificial Sequence
  Description of Artificial Sequence: Synthetic oligonucleotide
uuagguuaaucuugauggg

SEQ ID NO: 1309671 - RNA, 19 nt, Artificial Sequence
  Description of Artificial Sequence: Synthetic oligonucleotide
aucugugaccacuuugggc

SEQ ID NO: 1309672 - RNA, 19 nt, Artificial Sequence
  Description of Artificial Sequence: Synthetic oligonucleotide
uuuauauggaaagguuggg

SEQ ID NO: 1309673 - RNA, 19 nt, Artificial Sequence
  Description of Artificial Sequence: Synthetic oligonucleotide
auauucuaauaccucagca

SEQ ID NO: 1309674 - RNA, 19 nt, Artificial Sequence
  Description of Artificial Sequence: Synthetic oligonucleotide
uuuguuuauagaacggaua

SEQ ID NO: 1309675 - RNA, 19 nt, Artificial Sequence
  Description of Artificial Sequence: Synthetic oligonucleotide
ucaucacauaccugggugg

SEQ ID NO: 1309676 - RNA, 19 nt, Artificial Sequence
  Description of Artificial Sequence: Synthetic oligonucleotide
ucauucaaaucuaaacuau

SEQ ID NO: 1309677 - RNA, 19 nt, Artificial Sequence
  Description of Artificial Sequence: Synthetic oligonucleotide
aagaaugcuauaaacaguu

SEQ ID NO: 1309678 - RNA, 19 nt, Artificial Sequence
  Description of Artificial Sequence: Synthetic oligonucleotide
auucagauuggguuuaacu

SEQ ID NO: 1309679 - RNA, 19 nt, Artificial Sequence
  Description of Artificial Sequence: Synthetic oligonucleotide
uggugaaucucauggaggc

SEQ ID NO: 1309680 - RNA, 19 nt, Artificial Sequence
  Description of Artificial Sequence: Synthetic oligonucleotide
uucaauacuggaaaacuuu

SEQ ID NO: 1309681 - RNA, 19 nt, Artificial Sequence
  Description of Artificial Sequence: Synthetic oligonucleotide
aaaucaagccacuccauua

SEQ ID NO: 1309682 - RNA, 19 nt, Artificial Sequence
  Description of Artificial Sequence: Synthetic oligonucleotide
caucacuacaucuuccacc

SEQ ID NO: 1309683 - RNA, 19 nt, Artificial Sequence
  Description of Artificial Sequence: Synthetic oligonucleotide
ucaauacuggaaaacuuuc

SEQ ID NO: 1309684 - RNA, 19 nt, Artificial Sequence
  Description of Artificial Sequence: Synthetic oligonucleotide
auucaaaccggcucucagg

SEQ ID NO: 1309685 - RNA, 19 nt, Artificial Sequence
  Description of Artificial Sequence: Synthetic oligonucleotide
gaacggauacgucuucugg

SEQ ID NO: 1309686 - RNA, 19 nt, Artificial Sequence
  Description of Artificial Sequence: Synthetic oligonucleotide
cugauugagaacagagagg

SEQ ID NO: 1309687 - RNA, 19 nt, Artificial Sequence
  Description of Artificial Sequence: Synthetic oligonucleotide
aacgaagagacucggcaca

SEQ ID NO: 1309688 - RNA, 19 nt, Artificial Sequence
  Description of Artificial Sequence: Synthetic oligonucleotide
uguuuauagaacggauacg

SEQ ID NO: 1309689 - RNA, 19 nt, Artificial Sequence
  Description of Artificial Sequence: Synthetic oligonucleotide
guaucugugaccacuuugg

SEQ ID NO: 1309690 - RNA, 19 nt, Artificial Sequence
  Description of Artificial Sequence: Synthetic oligonucleotide
uaacuggugacaagaagga

SEQ ID NO: 1309691 - RNA, 19 nt, Artificial Sequence
  Description of Artificial Sequence: Synthetic oligonucleotide
gaacaauucaaaccggcuc

SEQ ID NO: 1309692 - RNA, 19 nt, Artificial Sequence
  Description of Artificial Sequence: Synthetic oligonucleotide
gauauuguuaaugaguacu

SEQ ID NO: 1309693 - RNA, 19 nt, Artificial Sequence
  Description of Artificial Sequence: Synthetic oligonucleotide
ugaaucccgaacuaggguc

SEQ ID NO: 1309694 - RNA, 19 nt, Artificial Sequence
  Description of Artificial Sequence: Synthetic oligonucleotide
aacggauacgucuucugga

SEQ ID NO: 1309695 - RNA, 19 nt, Artificial Sequence
  Description of Artificial Sequence: Synthetic oligonucleotide
aguuguucauccuugguau

SEQ ID NO: 1309696 - RNA, 19 nt, Artificial Sequence
  Description of Artificial Sequence: Synthetic oligonucleotide
ucuggauaauucacuaaga

SEQ ID NO: 1309697 - RNA, 19 nt, Artificial Sequence
  Description of Artificial Sequence: Synthetic oligonucleotide
uuguuaaugaguacuucuc

SEQ ID NO: 1309698 - RNA, 19 nt, Artificial Sequence
  Description of Artificial Sequence: Synthetic oligonucleotide
aaacuauccaagauagaug

SEQ ID NO: 1309699 - RNA, 19 nt, Artificial Sequence
  Description of Artificial Sequence: Synthetic oligonucleotide
uauggaaagguugggacug

SEQ ID NO: 1309700 - RNA, 19 nt, Artificial Sequence
  Description of Artificial Sequence: Synthetic oligonucleotide
uucccucauaaccauagca

SEQ ID NO: 1309701 - RNA, 19 nt, Artificial Sequence
  Description of Artificial Sequence: Synthetic oligonucleotide
agggaauuuguguugauaa

SEQ ID NO: 1309702 - RNA, 19 nt, Artificial Sequence
  Description of Artificial Sequence: Synthetic oligonucleotide
uuacuuacccuuuuacuuc

SEQ ID NO: 1309703 - RNA, 19 nt, Artificial Sequence
  Description of Artificial Sequence: Synthetic oligonucleotide
agcaacaugucgaagaaug

SEQ ID NO: 1309704 - RNA, 19 nt, Artificial Sequence
  Description of Artificial Sequence: Synthetic oligonucleotide
aagguugggacuguuuguc

SEQ ID NO: 1309705 - RNA, 19 nt, Artificial Sequence
  Description of Artificial Sequence: Synthetic oligonucleotide
cuacacauucauuucugcc

SEQ ID NO: 1309706 - RNA, 19 nt, Artificial Sequence
  Description of Artificial Sequence: Synthetic oligonucleotide
aacuggacuguuuucuaca

SEQ ID NO: 1309707 - RNA, 19 nt, Artificial Sequence
  Description of Artificial Sequence: Synthetic oligonucleotide
ucuaacauagaaagauaau

SEQ ID NO: 1309708 - RNA, 19 nt, Artificial Sequence
  Description of Artificial Sequence: Synthetic oligonucleotide
uauagaacggauacgucuu

SEQ ID NO: 1309709 - RNA, 19 nt, Artificial Sequence
  Description of Artificial Sequence: Synthetic oligonucleotide
auguuauuguauuccaaca

SEQ ID NO: 1309710 - RNA, 19 nt, Artificial Sequence
  Description of Artificial Sequence: Synthetic oligonucleotide
aucuaaacuauccaagaua

SEQ ID NO: 1309711 - RNA, 19 nt, Artificial Sequence
  Description of Artificial Sequence: Synthetic oligonucleotide
uucuaauaccucagcaaca

SEQ ID NO: 1309712 - RNA, 19 nt, Artificial Sequence
  Description of Artificial Sequence: Synthetic oligonucleotide
uaggauugcucuuuaagau

SEQ ID NO: 1309713 - RNA, 19 nt, Artificial Sequence
  Description of Artificial Sequence: Synthetic oligonucleotide
ugcuuaaaggcaucauaag

SEQ ID NO: 1309714 - RNA, 19 nt, Artificial Sequence
  Description of Artificial Sequence: Synthetic oligonucleotide
uaggugugaaucccgaacu

SEQ ID NO: 1309715 - RNA, 19 nt, Artificial Sequence
  Description of Artificial Sequence: Synthetic oligonucleotide
agguguuaaagcuucugug

SEQ ID NO: 1309716 - RNA, 19 nt, Artificial Sequence
  Description of Artificial Sequence: Synthetic oligonucleotide
augggcauaguuucuguag

SEQ ID NO: 1309717 - RNA, 19 nt, Artificial Sequence
  Description of Artificial Sequence: Synthetic oligonucleotide
aucugaacauugaacacac

SEQ ID NO: 1309718 - RNA, 19 nt, Artificial Sequence
  Description of Artificial Sequence: Synthetic oligonucleotide
aaugccaauccaugaacau

SEQ ID NO: 1309719 - RNA, 19 nt, Artificial Sequence
  Description of Artificial Sequence: Synthetic oligonucleotide
uaucugugaccacuuuggg

SEQ ID NO: 1309720 - RNA, 19 nt, Artificial Sequence
  Description of Artificial Sequence: Synthetic oligonucleotide
uuauuugauguuugcuuga

SEQ ID NO: 1309721 - RNA, 19 nt, Artificial Sequence
  Description of Artificial Sequence: Synthetic oligonucleotide
auaccucagcaacaugucg

SEQ ID NO: 1309722 - RNA, 19 nt, Artificial Sequence
  Description of Artificial Sequence: Synthetic oligonucleotide
auugaaccauaagaaugcc

SEQ ID NO: 1309723 - RNA, 19 nt, Artificial Sequence
  Description of Artificial Sequence: Synthetic oligonucleotide
gaacuagggucccacgccg

SEQ ID NO: 1309724 - RNA, 19 nt, Artificial Sequence
  Description of Artificial Sequence: Synthetic oligonucleotide
caagucuaggguuuacagc

SEQ ID NO: 1309725 - RNA, 19 nt, Artificial Sequence
  Description of Artificial Sequence: Synthetic oligonucleotide
uauaaacaguuuuggauuu

SEQ ID NO: 1309726 - RNA, 19 nt, Artificial Sequence
  Description of Artificial Sequence: Synthetic oligonucleotide
gcuuaaaggcaucauaagc

SEQ ID NO: 1309727 - RNA, 19 nt, Artificial Sequence
  Description of Artificial Sequence: Synthetic oligonucleotide
aucugcucgaauuuugaca

SEQ ID NO: 1309728 - RNA, 19 nt, Artificial Sequence
  Description of Artificial Sequence: Synthetic oligonucleotide
uuuaaucgcuuccucugga

SEQ ID NO: 1309729 - RNA, 19 nt, Artificial Sequence
  Description of Artificial Sequence: Synthetic oligonucleotide
uucucucuaguguaguugu

SEQ ID NO: 1309730 - RNA, 19 nt, Artificial Sequence
  Description of Artificial Sequence: Synthetic oligonucleotide
ccugauugagaacagagag

SEQ ID NO: 1309731 - RNA, 19 nt, Artificial Sequence
  Description of Artificial Sequence: Synthetic oligonucleotide
augcuauaaacaguuuugg

SEQ ID NO: 1309732 - RNA, 19 nt, Artificial Sequence
  Description of Artificial Sequence: Synthetic oligonucleotide
ugucaaacgucuauugaua

SEQ ID NO: 1309733 - RNA, 19 nt, Artificial Sequence
  Description of Artificial Sequence: Synthetic oligonucleotide
auauggaaagguugggacu

SEQ ID NO: 1309734 - RNA, 19 nt, Artificial Sequence
  Description of Artificial Sequence: Synthetic oligonucleotide
cauucaaaucuaaacuauc

SEQ ID NO: 1309735 - RNA, 19 nt, Artificial Sequence
  Description of Artificial Sequence: Synthetic oligonucleotide
uuaaucgcuuccucuggag

SEQ ID NO: 1309736 - RNA, 19 nt, Artificial Sequence
  Description of Artificial Sequence: Synthetic oligonucleotide
uugaaccauaagaaugcca

SEQ ID NO: 1309737 - RNA, 19 nt, Artificial Sequence
  Description of Artificial Sequence: Synthetic oligonucleotide
gacaacuacacauucauuu

SEQ ID NO: 1309738 - RNA, 19 nt, Artificial Sequence
  Description of Artificial Sequence: Synthetic oligonucleotide
auaucccagacauuuauuu

SEQ ID NO: 1309739 - RNA, 19 nt, Artificial Sequence
  Description of Artificial Sequence: Synthetic oligonucleotide
auaagaaugccaauccaug

SEQ ID NO: 1309740 - RNA, 19 nt, Artificial Sequence
  Description of Artificial Sequence: Synthetic oligonucleotide
guuguugucaucacauacc

SEQ ID NO: 1309741 - RNA, 19 nt, Artificial Sequence
  Description of Artificial Sequence: Synthetic oligonucleotide
uuuauagaacggauacguc

SEQ ID NO: 1309742 - RNA, 19 nt, Artificial Sequence
  Description of Artificial Sequence: Synthetic oligonucleotide
uguauuccaacaagcuaac

SEQ ID NO: 1309743 - RNA, 19 nt, Artificial Sequence
  Description of Artificial Sequence: Synthetic oligonucleotide
ucgaauuuugacagcuugu

SEQ ID NO: 1309744 - RNA, 19 nt, Artificial Sequence
  Description of Artificial Sequence: Synthetic oligonucleotide
aagccuaauuuuaggauug

SEQ ID NO: 1309745 - RNA, 19 nt, Artificial Sequence
  Description of Artificial Sequence: Synthetic oligonucleotide
guauauucuaauaccucag

SEQ ID NO: 1309746 - RNA, 19 nt, Artificial Sequence
  Description of Artificial Sequence: Synthetic oligonucleotide
uauccaagauagauggguc

SEQ ID NO: 1309747 - RNA, 19 nt, Artificial Sequence
  Description of Artificial Sequence: Synthetic oligonucleotide
auaauuagggucugagcau

SEQ ID NO: 1309748 - RNA, 19 nt, Artificial Sequence
  Description of Artificial Sequence: Synthetic oligonucleotide
uugucuuaggugccccugg

SEQ ID NO: 1309749 - RNA, 19 nt, Artificial Sequence
  Description of Artificial Sequence: Synthetic oligonucleotide
uagguuaaucuugaugggc

SEQ ID NO: 1309750 - RNA, 19 nt, Artificial Sequence
  Description of Artificial Sequence: Synthetic oligonucleotide
auaggcucccaucucagcu

SEQ ID NO: 1309751 - RNA, 19 nt, Artificial Sequence
  Description of Artificial Sequence: Synthetic oligonucleotide
aauggaaacugaaagccua

SEQ ID NO: 1309752 - RNA, 19 nt, Artificial Sequence
  Description of Artificial Sequence: Synthetic oligonucleotide
cuaaguuaaauaucccaga

SEQ ID NO: 1309753 - RNA, 19 nt, Artificial Sequence
  Description of Artificial Sequence: Synthetic oligonucleotide
agcuauuagguuaaucuug

SEQ ID NO: 1309754 - RNA, 19 nt, Artificial Sequence
  Description of Artificial Sequence: Synthetic oligonucleotide
agaagaaucaugccuucaa

SEQ ID NO: 1309755 - RNA, 19 nt, Artificial Sequence
  Description of Artificial Sequence: Synthetic oligonucleotide
acaagcuaacauaggcucc

SEQ ID NO: 1309756 - RNA, 19 nt, Artificial Sequence
  Description of Artificial Sequence: Synthetic oligonucleotide
gaucuuacauucaccauca

SEQ ID NO: 1309757 - RNA, 19 nt, Artificial Sequence
  Description of Artificial Sequence: Synthetic oligonucleotide
cgaagaaugcuauaaacag

SEQ ID NO: 1309758 - RNA, 19 nt, Artificial Sequence
  Description of Artificial Sequence: Synthetic oligonucleotide
ucuuuaagauuugucucug

SEQ ID NO: 1309759 - RNA, 19 nt, Artificial Sequence
  Description of Artificial Sequence: Synthetic oligonucleotide
ccaacaagcuaacauaggc

SEQ ID NO: 1309760 - RNA, 19 nt, Artificial Sequence
  Description of Artificial Sequence: Synthetic oligonucleotide
aagcuucugugugaaacag

SEQ ID NO: 1309761 - RNA, 19 nt, Artificial Sequence
  Description of Artificial Sequence: Synthetic oligonucleotide
aguuuguuuauagaacgga

SEQ ID NO: 1309762 - RNA, 19 nt, Artificial Sequence
  Description of Artificial Sequence: Synthetic oligonucleotide
acugccauagccugauuga

SEQ ID NO: 1309763 - RNA, 19 nt, Artificial Sequence
  Description of Artificial Sequence: Synthetic oligonucleotide
guaggugugaaucccgaac

SEQ ID NO: 1309764 - RNA, 19 nt, Artificial Sequence
  Description of Artificial Sequence: Synthetic oligonucleotide
ugauauuguuaaugaguac

SEQ ID NO: 1309765 - RNA, 19 nt, Artificial Sequence
  Description of Artificial Sequence: Synthetic oligonucleotide
augcggaucaguuuguuua

SEQ ID NO: 1309766 - RNA, 19 nt, Artificial Sequence
  Description of Artificial Sequence: Synthetic oligonucleotide
gaagccuaaguuaaauauc

SEQ ID NO: 1309767 - RNA, 19 nt, Artificial Sequence
  Description of Artificial Sequence: Synthetic oligonucleotide
ggaucuuacauucaccauc

SEQ ID NO: 1309768 - RNA, 19 nt, Artificial Sequence
  Description of Artificial Sequence: Synthetic oligonucleotide
guuuauagaacggauacgu

SEQ ID NO: 1309769 - RNA, 19 nt, Artificial Sequence
  Description of Artificial Sequence: Synthetic oligonucleotide
acgccgaaccuccucagcg

SEQ ID NO: 1309770 - RNA, 19 nt, Artificial Sequence
  Description of Artificial Sequence: Synthetic oligonucleotide
uuacccuuuuacuucuaac

SEQ ID NO: 1309771 - RNA, 19 nt, Artificial Sequence
  Description of Artificial Sequence: Synthetic oligonucleotide
auagaacggauacgucuuc

SEQ ID NO: 1309772 - RNA, 19 nt, Artificial Sequence
  Description of Artificial Sequence: Synthetic oligonucleotide
aaucaugccuucaauguua

SEQ ID NO: 1309773 - RNA, 19 nt, Artificial Sequence
  Description of Artificial Sequence: Synthetic oligonucleotide
guuuucuacaagguuaauc

SEQ ID NO: 1309774 - RNA, 19 nt, Artificial Sequence
  Description of Artificial Sequence: Synthetic oligonucleotide
ggagcuauuagguuaaucu

SEQ ID NO: 1309775 - RNA, 19 nt, Artificial Sequence
  Description of Artificial Sequence: Synthetic oligonucleotide
gaacauugaacacaccccu

SEQ ID NO: 1309776 - RNA, 19 nt, Artificial Sequence
  Description of Artificial Sequence: Synthetic oligonucleotide
uccaagauagaugggucug

SEQ ID NO: 1309777 - RNA, 19 nt, Artificial Sequence
  Description of Artificial Sequence: Synthetic oligonucleotide
guagaacaauucaaaccgg

SEQ ID NO: 1309778 - RNA, 19 nt, Artificial Sequence
  Description of Artificial Sequence: Synthetic oligonucleotide
gauucugguuuguugaaua

SEQ ID NO: 1309779 - RNA, 19 nt, Artificial Sequence
  Description of Artificial Sequence: Synthetic oligonucleotide
uacuuacccuuuuacuucu

SEQ ID NO: 1309780 - RNA, 19 nt, Artificial Sequence
  Description of Artificial Sequence: Synthetic oligonucleotide
uauccagguuucuuguacu

SEQ ID NO: 1309781 - RNA, 19 nt, Artificial Sequence
  Description of Artificial Sequence: Synthetic oligonucleotide
accaucacuacaucuucca

SEQ ID NO: 1309782 - RNA, 19 nt, Artificial Sequence
  Description of Artificial Sequence: Synthetic oligonucleotide
aacugaaagccuaauuuua

SEQ ID NO: 1309783 - RNA, 19 nt, Artificial Sequence
  Description of Artificial Sequence: Synthetic oligonucleotide
caagcuaacauaggcuccc

SEQ ID NO: 1309784 - RNA, 19 nt, Artificial Sequence
  Description of Artificial Sequence: Synthetic oligonucleotide
gugugaaucccgaacuagg

SEQ ID NO: 1309785 - RNA, 19 nt, Artificial Sequence
  Description of Artificial Sequence: Synthetic oligonucleotide
ggguuuacagccaggaagg

SEQ ID NO: 1309786 - RNA, 19 nt, Artificial Sequence
  Description of Artificial Sequence: Synthetic oligonucleotide
aaucccgaacuaggguccc

SEQ ID NO: 1309787 - RNA, 19 nt, Artificial Sequence
  Description of Artificial Sequence: Synthetic oligonucleotide
ucacauaccuggguggagc

SEQ ID NO: 1309788 - RNA, 19 nt, Artificial Sequence
  Description of Artificial Sequence: Synthetic oligonucleotide
ugcucgaauuuugacagcu

SEQ ID NO: 1309789 - RNA, 19 nt, Artificial Sequence
  Description of Artificial Sequence: Synthetic oligonucleotide
aagauuugucucuggucaa

SEQ ID NO: 1309790 - RNA, 19 nt, Artificial Sequence
  Description of Artificial Sequence: Synthetic oligonucleotide
aguucagucucaucuguau

SEQ ID NO: 1309791 - RNA, 19 nt, Artificial Sequence
  Description of Artificial Sequence: Synthetic oligonucleotide
aacaugucgaagaaugcua

SEQ ID NO: 1309792 - RNA, 19 nt, Artificial Sequence
  Description of Artificial Sequence: Synthetic oligonucleotide
acccuuuuacuucuaacau

SEQ ID NO: 1309793 - RNA, 19 nt, Artificial Sequence
  Description of Artificial Sequence: Synthetic oligonucleotide
acagcuuagaccuggcauu

SEQ ID NO: 1309794 - RNA, 19 nt, Artificial Sequence
  Description of Artificial Sequence: Synthetic oligonucleotide
ccuaauuuuaggauugcuc

SEQ ID NO: 1309795 - RNA, 19 nt, Artificial Sequence
  Description of Artificial Sequence: Synthetic oligonucleotide
aacgucuauugauauuguu

SEQ ID NO: 1309796 - RNA, 19 nt, Artificial Sequence
  Description of Artificial Sequence: Synthetic oligonucleotide
augccaauccaugaacauc

SEQ ID NO: 1309797 - RNA, 19 nt, Artificial Sequence
  Description of Artificial Sequence: Synthetic oligonucleotide
cuauaaacaguuuuggauu

SEQ ID NO: 1309798 - RNA, 19 nt, Artificial Sequence
  Description of Artificial Sequence: Synthetic oligonucleotide
aaugcggaucaguuuguuu

SEQ ID NO: 1309799 - RNA, 19 nt, Artificial Sequence
  Description of Artificial Sequence: Synthetic oligonucleotide
agcuuguggugucaaacgu

SEQ ID NO: 1309800 - RNA, 19 nt, Artificial Sequence
  Description of Artificial Sequence: Synthetic oligonucleotide
ccuugguauauucuaauac

SEQ ID NO: 1309801 - RNA, 19 nt, Artificial Sequence
  Description of Artificial Sequence: Synthetic oligonucleotide
agcaggcuacuucaauauc

SEQ ID NO: 1309802 - RNA, 19 nt, Artificial Sequence
  Description of Artificial Sequence: Synthetic oligonucleotide
ucugagacugcaugcuuaa

SEQ ID NO: 1309803 - RNA, 19 nt, Artificial Sequence
  Description of Artificial Sequence: Synthetic oligonucleotide
uugcuugaauacauuuuau

SEQ ID NO: 1309804 - RNA, 19 nt, Artificial Sequence
  Description of Artificial Sequence: Synthetic oligonucleotide
ucuacagcuuagaccuggc

SEQ ID NO: 1309805 - RNA, 19 nt, Artificial Sequence
  Description of Artificial Sequence: Synthetic oligonucleotide
uagcaggcuacuucaauau

SEQ ID NO: 1309806 - RNA, 19 nt, Artificial Sequence
  Description of Artificial Sequence: Synthetic oligonucleotide
ugccauagccugauugaga

SEQ ID NO: 1309807 - RNA, 19 nt, Artificial Sequence
  Description of Artificial Sequence: Synthetic oligonucleotide
uucaagucuaggguuuaca

SEQ ID NO: 1309808 - RNA, 19 nt, Artificial Sequence
  Description of Artificial Sequence: Synthetic oligonucleotide
agguuaaucuugaugggca

SEQ ID NO: 1309809 - RNA, 19 nt, Artificial Sequence
  Description of Artificial Sequence: Synthetic oligonucleotide
caauacuggaaaacuuuca

SEQ ID NO: 1309810 - RNA, 19 nt, Artificial Sequence
  Description of Artificial Sequence: Synthetic oligonucleotide
uuugucuuaggugccccug

SEQ ID NO: 1309811 - RNA, 19 nt, Artificial Sequence
  Description of Artificial Sequence: Synthetic oligonucleotide
agccuaaguuaaauauccc

SEQ ID NO: 1309812 - RNA, 19 nt, Artificial Sequence
  Description of Artificial Sequence: Synthetic oligonucleotide
ucugagcauucagauuggg

SEQ ID NO: 1309813 - RNA, 19 nt, Artificial Sequence
  Description of Artificial Sequence: Synthetic oligonucleotide
augucgaagaaugcuauaa

SEQ ID NO: 1309814 - RNA, 19 nt, Artificial Sequence
  Description of Artificial Sequence: Synthetic oligonucleotide
cacuacaucuuccaccuca

SEQ ID NO: 1309815 - RNA, 19 nt, Artificial Sequence
  Description of Artificial Sequence: Synthetic oligonucleotide
agaacaauucaaaccggcu

SEQ ID NO: 1309816 - RNA, 19 nt, Artificial Sequence
  Description of Artificial Sequence: Synthetic oligonucleotide
acuagggucccacgccgcg

SEQ ID NO: 1309817 - RNA, 19 nt, Artificial Sequence
  Description of Artificial Sequence: Synthetic oligonucleotide
auaaccauagcaggcuacu

SEQ ID NO: 1309818 - RNA, 19 nt, Artificial Sequence
  Description of Artificial Sequence: Synthetic oligonucleotide
acaauucaaaccggcucuc

SEQ ID NO: 1309819 - RNA, 19 nt, Artificial Sequence
  Description of Artificial Sequence: Synthetic oligonucleotide
uggguuuaacuggugacaa

SEQ ID NO: 1309820 - RNA, 19 nt, Artificial Sequence
  Description of Artificial Sequence: Synthetic oligonucleotide
ucugaacauugaacacacc

SEQ ID NO: 1309821 - RNA, 19 nt, Artificial Sequence
  Description of Artificial Sequence: Synthetic oligonucleotide
gcucuuuaagauuugucuc

SEQ ID NO: 1309822 - RNA, 19 nt, Artificial Sequence
  Description of Artificial Sequence: Synthetic oligonucleotide
agucucaucuguaucugug

SEQ ID NO: 1309823 - RNA, 19 nt, Artificial Sequence
  Description of Artificial Sequence: Synthetic oligonucleotide
cuaacauagaaagauaauu

SEQ ID NO: 1309824 - RNA, 19 nt, Artificial Sequence
  Description of Artificial Sequence: Synthetic oligonucleotide
ucccagacauuuauuugau

SEQ ID NO: 1309825 - RNA, 19 nt, Artificial Sequence
  Description of Artificial Sequence: Synthetic oligonucleotide
agccuaauuuuaggauugc

SEQ ID NO: 1309826 - RNA, 19 nt, Artificial Sequence
  Description of Artificial Sequence: Synthetic oligonucleotide
uuguucauccuugguauau

SEQ ID NO: 1309827 - RNA, 19 nt, Artificial Sequence
  Description of Artificial Sequence: Synthetic oligonucleotide
gucuaggguuuacagccag

SEQ ID NO: 1309828 - RNA, 19 nt, Artificial Sequence
  Description of Artificial Sequence: Synthetic oligonucleotide
ugcaugcuuaaaggcauca

SEQ ID NO: 1309829 - RNA, 19 nt, Artificial Sequence
  Description of Artificial Sequence: Synthetic oligonucleotide
cauaagaaugccaauccau

SEQ ID NO: 1309830 - RNA, 19 nt, Artificial Sequence
  Description of Artificial Sequence: Synthetic oligonucleotide
ccccuggugaaucucaugg

SEQ ID NO: 1309831 - RNA, 19 nt, Artificial Sequence
  Description of Artificial Sequence: Synthetic oligonucleotide
caagauagaugggucugag

SEQ ID NO: 1309832 - RNA, 19 nt, Artificial Sequence
  Description of Artificial Sequence: Synthetic oligonucleotide
gccuaaguuaaauauccca

SEQ ID NO: 1309833 - RNA, 19 nt, Artificial Sequence
  Description of Artificial Sequence: Synthetic oligonucleotide
ugucuuaggugccccuggu

SEQ ID NO: 1309834 - RNA, 19 nt, Artificial Sequence
  Description of Artificial Sequence: Synthetic oligonucleotide
caugcuuaaaggcaucaua

SEQ ID NO: 1309835 - RNA, 19 nt, Artificial Sequence
  Description of Artificial Sequence: Synthetic oligonucleotide
cuuguggugucaaacgucu

SEQ ID NO: 1309836 - RNA, 19 nt, Artificial Sequence
  Description of Artificial Sequence: Synthetic oligonucleotide
uguaggugugaaucccgaa

SEQ ID NO: 1309837 - RNA, 19 nt, Artificial Sequence
  Description of Artificial Sequence: Synthetic oligonucleotide
gauguuugcuugaauacau

SEQ ID NO: 1309838 - RNA, 19 nt, Artificial Sequence
  Description of Artificial Sequence: Synthetic oligonucleotide
acgccgcgcuccuuaaugg

SEQ ID NO: 1309839 - RNA, 19 nt, Artificial Sequence
  Description of Artificial Sequence: Synthetic oligonucleotide
cuaauaccucagcaacaug

SEQ ID NO: 1309840 - RNA, 19 nt, Artificial Sequence
  Description of Artificial Sequence: Synthetic oligonucleotide
ucaaaccggcucucagggc

SEQ ID NO: 1309841 - RNA, 19 nt, Artificial Sequence
  Description of Artificial Sequence: Synthetic oligonucleotide
ucucagcuauggaucuuac

SEQ ID NO: 1309842 - RNA, 19 nt, Artificial Sequence
  Description of Artificial Sequence: Synthetic oligonucleotide
aggaagggcugcuuuguau

SEQ ID NO: 1309843 - RNA, 19 nt, Artificial Sequence
  Description of Artificial Sequence: Synthetic oligonucleotide
uggcaacgaagagacucgg

SEQ ID NO: 1309844 - RNA, 19 nt, Artificial Sequence
  Description of Artificial Sequence: Synthetic oligonucleotide
ggauacgucuucuggauaa

SEQ ID NO: 1309845 - RNA, 19 nt, Artificial Sequence
  Description of Artificial Sequence: Synthetic oligonucleotide
gugucaaacgucuauugau

SEQ ID NO: 1309846 - RNA, 19 nt, Artificial Sequence
  Description of Artificial Sequence: Synthetic oligonucleotide
ugcggaucaguuuguuuau

SEQ ID NO: 1309847 - RNA, 19 nt, Artificial Sequence
  Description of Artificial Sequence: Synthetic oligonucleotide
uagaacggauacgucuucu

SEQ ID NO: 1309848 - RNA, 19 nt, Artificial Sequence
  Description of Artificial Sequence: Synthetic oligonucleotide
uccuuaaacuggacuguuu

SEQ ID NO: 1309849 - RNA, 19 nt, Artificial Sequence
  Description of Artificial Sequence: Synthetic oligonucleotide
gcuaacauaggcucccauc

SEQ ID NO: 1309850 - RNA, 19 nt, Artificial Sequence
  Description of Artificial Sequence: Synthetic oligonucleotide
ggugugaaucccgaacuag

SEQ ID NO: 1309851 - RNA, 19 nt, Artificial Sequence
  Description of Artificial Sequence: Synthetic oligonucleotide
ggugucaaacgucuauuga

SEQ ID NO: 1309852 - RNA, 19 nt, Artificial Sequence
  Description of Artificial Sequence: Synthetic oligonucleotide
caacaagcuaacauaggcu

SEQ ID NO: 1309853 - RNA, 19 nt, Artificial Sequence
  Description of Artificial Sequence: Synthetic oligonucleotide
ugggacuguuugucuuagg

SEQ ID NO: 1309854 - RNA, 19 nt, Artificial Sequence
  Description of Artificial Sequence: Synthetic oligonucleotide
cucuaguguaguuguuguc

SEQ ID NO: 1309855 - RNA, 19 nt, Artificial Sequence
  Description of Artificial Sequence: Synthetic oligonucleotide
cuaggguuuacagccagga

SEQ ID NO: 1309856 - RNA, 19 nt, Artificial Sequence
  Description of Artificial Sequence: Synthetic oligonucleotide
cuaaacuauccaagauaga

SEQ ID NO: 1309857 - RNA, 19 nt, Artificial Sequence
  Description of Artificial Sequence: Synthetic oligonucleotide
uaguuguugucaucacaua

SEQ ID NO: 1309858 - RNA, 19 nt, Artificial Sequence
  Description of Artificial Sequence: Synthetic oligonucleotide
gguuaaucuucagcuuugg

SEQ ID NO: 1309859 - RNA, 19 nt, Artificial Sequence
  Description of Artificial Sequence: Synthetic oligonucleotide
gguguaggugugaaucccg

SEQ ID NO: 1309860 - RNA, 19 nt, Artificial Sequence
  Description of Artificial Sequence: Synthetic oligonucleotide
agaggccuucuguucucuc

SEQ ID NO: 1309861 - RNA, 19 nt, Artificial Sequence
  Description of Artificial Sequence: Synthetic oligonucleotide
uuaaagcuucugugugaaa

SEQ ID NO: 1309862 - RNA, 19 nt, Artificial Sequence
  Description of Artificial Sequence: Synthetic oligonucleotide
cuuugggcuccaucugaac

SEQ ID NO: 1309863 - RNA, 19 nt, Artificial Sequence
  Description of Artificial Sequence: Synthetic oligonucleotide
gaagaagccuaaguuaaau

SEQ ID NO: 1309864 - RNA, 19 nt, Artificial Sequence
  Description of Artificial Sequence: Synthetic oligonucleotide
gcuauuagguuaaucuuga

SEQ ID NO: 1309865 - RNA, 19 nt, Artificial Sequence
  Description of Artificial Sequence: Synthetic oligonucleotide
gcucccaucucagcuaugg

SEQ ID NO: 1309866 - RNA, 19 nt, Artificial Sequence
  Description of Artificial Sequence: Synthetic oligonucleotide
cacgccgcgcuccuuaaug

SEQ ID NO: 1309867 - RNA, 19 nt, Artificial Sequence
  Description of Artificial Sequence: Synthetic oligonucleotide
gagcuauuagguuaaucuu

SEQ ID NO: 1309868 - RNA, 19 nt, Artificial Sequence
  Description of Artificial Sequence: Synthetic oligonucleotide
acgaagagacucggcacag

SEQ ID NO: 1309869 - RNA, 19 nt, Artificial Sequence
  Description of Artificial Sequence: Synthetic oligonucleotide
acaugucgaagaaugcuau

SEQ ID NO: 1309870 - RNA, 19 nt, Artificial Sequence
  Description of Artificial Sequence: Synthetic oligonucleotide
cugccauagccugauugag

SEQ ID NO: 1309871 - RNA, 19 nt, Artificial Sequence
  Description of Artificial Sequence: Synthetic oligonucleotide
cuguuugucuuaggugccc

SEQ ID NO: 1309872 - RNA, 19 nt, Artificial Sequence
  Description of Artificial Sequence: Synthetic oligonucleotide
ucugcgguguaggugugaa

SEQ ID NO: 1309873 - RNA, 19 nt, Artificial Sequence
  Description of Artificial Sequence: Synthetic oligonucleotide
uggagcuauuagguuaauc

SEQ ID NO: 1309874 - RNA, 19 nt, Artificial Sequence
  Description of Artificial Sequence: Synthetic oligonucleotide
gcuuagaccuggcauucug

SEQ ID NO: 1309875 - RNA, 19 nt, Artificial Sequence
  Description of Artificial Sequence: Synthetic oligonucleotide
uaagcaccauauccagguu

SEQ ID NO: 1309876 - RNA, 19 nt, Artificial Sequence
  Description of Artificial Sequence: Synthetic oligonucleotide
gucuuaggugccccuggug

SEQ ID NO: 1309877 - RNA, 19 nt, Artificial Sequence
  Description of Artificial Sequence: Synthetic oligonucleotide
uagaugggucugagacugc

SEQ ID NO: 1309878 - RNA, 19 nt, Artificial Sequence
  Description of Artificial Sequence: Synthetic oligonucleotide
caaaccggcucucagggcu

SEQ ID NO: 1309879 - RNA, 19 nt, Artificial Sequence
  Description of Artificial Sequence: Synthetic oligonucleotide
aucacauaccuggguggag

SEQ ID NO: 1309880 - RNA, 19 nt, Artificial Sequence
  Description of Artificial Sequence: Synthetic oligonucleotide
cuggcauucugcgguguag

SEQ ID NO: 1309881 - RNA, 19 nt, Artificial Sequence
  Description of Artificial Sequence: Synthetic oligonucleotide
guccacucuaaugacaacu

SEQ ID NO: 1309882 - RNA, 19 nt, Artificial Sequence
  Description of Artificial Sequence: Synthetic oligonucleotide
uggguggagcuauuagguu

SEQ ID NO: 1309883 - RNA, 19 nt, Artificial Sequence
  Description of Artificial Sequence: Synthetic oligonucleotide
uggaggcauugaaccauaa

SEQ ID NO: 1309884 - RNA, 19 nt, Artificial Sequence
  Description of Artificial Sequence: Synthetic oligonucleotide
aaguucagucucaucugua

SEQ ID NO: 1309885 - RNA, 19 nt, Artificial Sequence
  Description of Artificial Sequence: Synthetic oligonucleotide
uaaucuugaugggcauagu

SEQ ID NO: 1309886 - RNA, 19 nt, Artificial Sequence
  Description of Artificial Sequence: Synthetic oligonucleotide
uagccugauugagaacaga

SEQ ID NO: 1309887 - RNA, 19 nt, Artificial Sequence
  Description of Artificial Sequence: Synthetic oligonucleotide
aggugugaaucccgaacua

SEQ ID NO: 1309888 - RNA, 19 nt, Artificial Sequence
  Description of Artificial Sequence: Synthetic oligonucleotide
ggguuuaacuggugacaag

SEQ ID NO: 1309889 - RNA, 19 nt, Artificial Sequence
  Description of Artificial Sequence: Synthetic oligonucleotide
aucucagcuauggaucuua

SEQ ID NO: 1309890 - RNA, 19 nt, Artificial Sequence
  Description of Artificial Sequence: Synthetic oligonucleotide
ggaaaacuuucaagucuag

SEQ ID NO: 1309891 - RNA, 19 nt, Artificial Sequence
  Description of Artificial Sequence: Synthetic oligonucleotide
ggcauaguuucuguagaac

SEQ ID NO: 1309892 - RNA, 19 nt, Artificial Sequence
  Description of Artificial Sequence: Synthetic oligonucleotide
cauccacuucugcauuuuc

SEQ ID NO: 1309893 - RNA, 19 nt, Artificial Sequence
  Description of Artificial Sequence: Synthetic oligonucleotide
cucagcuauggaucuuaca

SEQ ID NO: 1309894 - RNA, 19 nt, Artificial Sequence
  Description of Artificial Sequence: Synthetic oligonucleotide
agcuaacauaggcucccau

SEQ ID NO: 1309895 - RNA, 19 nt, Artificial Sequence
  Description of Artificial Sequence: Synthetic oligonucleotide
gugaaucccgaacuagggu

SEQ ID NO: 1309896 - RNA, 19 nt, Artificial Sequence
  Description of Artificial Sequence: Synthetic oligonucleotide
ccgaacuagggucccacgc

SEQ ID NO: 1309897 - RNA, 19 nt, Artificial Sequence
  Description of Artificial Sequence: Synthetic oligonucleotide
agcauucagauuggguuua

SEQ ID NO: 1309898 - RNA, 19 nt, Artificial Sequence
  Description of Artificial Sequence: Synthetic oligonucleotide
aucgcuuccucuggagaca

SEQ ID NO: 1309899 - RNA, 19 nt, Artificial Sequence
  Description of Artificial Sequence: Synthetic oligonucleotide
gguuuacagccaggaaggg

SEQ ID NO: 1309900 - RNA, 19 nt, Artificial Sequence
  Description of Artificial Sequence: Synthetic oligonucleotide
caacaugucgaagaaugcu

SEQ ID NO: 1309901 - RNA, 19 nt, Artificial Sequence
  Description of Artificial Sequence: Synthetic oligonucleotide
ucccgaacuagggucccac

SEQ ID NO: 1309902 - RNA, 19 nt, Artificial Sequence
  Description of Artificial Sequence: Synthetic oligonucleotide
guuaaucuugaugggcaua

SEQ ID NO: 1309903 - RNA, 19 nt, Artificial Sequence
  Description of Artificial Sequence: Synthetic oligonucleotide
cucggcacagcagccccgg

SEQ ID NO: 1309904 - RNA, 19 nt, Artificial Sequence
  Description of Artificial Sequence: Synthetic oligonucleotide
ggcauugaaccauaagaau

SEQ ID NO: 1309905 - RNA, 19 nt, Artificial Sequence
  Description of Artificial Sequence: Synthetic oligonucleotide
cgaacuagggucccacgcc

SEQ ID NO: 1309906 - RNA, 19 nt, Artificial Sequence
  Description of Artificial Sequence: Synthetic oligonucleotide
ucgcuuccucuggagacac

SEQ ID NO: 1309907 - RNA, 19 nt, Artificial Sequence
  Description of Artificial Sequence: Synthetic oligonucleotide
cuaguguaguuguugucau

SEQ ID NO: 1309908 - RNA, 19 nt, Artificial Sequence
  Description of Artificial Sequence: Synthetic oligonucleotide
guuguucauccuugguaua

SEQ ID NO: 1309909 - RNA, 19 nt, Artificial Sequence
  Description of Artificial Sequence: Synthetic oligonucleotide
agauuggguuuaacuggug

SEQ ID NO: 1309910 - RNA, 19 nt, Artificial Sequence
  Description of Artificial Sequence: Synthetic oligonucleotide
ccacucuaaugacaacuac

SEQ ID NO: 1309911 - RNA, 19 nt, Artificial Sequence
  Description of Artificial Sequence: Synthetic oligonucleotide
agucuaggguuuacagcca

SEQ ID NO: 1309912 - RNA, 19 nt, Artificial Sequence
  Description of Artificial Sequence: Synthetic oligonucleotide
ucacuacaucuuccaccuc

SEQ ID NO: 1309913 - RNA, 19 nt, Artificial Sequence
  Description of Artificial Sequence: Synthetic oligonucleotide
cagccccggacgccgaacc

SEQ ID NO: 1309914 - RNA, 19 nt, Artificial Sequence
  Description of Artificial Sequence: Synthetic oligonucleotide
auacgucuucuggauaauu

SEQ ID NO: 1309915 - RNA, 19 nt, Artificial Sequence
  Description of Artificial Sequence: Synthetic oligonucleotide
caccucagggaauuugugu

SEQ ID NO: 1309916 - RNA, 19 nt, Artificial Sequence
  Description of Artificial Sequence: Synthetic oligonucleotide
ccauaagaaugccaaucca

SEQ ID NO: 1309917 - RNA, 19 nt, Artificial Sequence
  Description of Artificial Sequence: Synthetic oligonucleotide
ugccccuggugaaucucau

SEQ ID NO: 1309918 - RNA, 19 nt, Artificial Sequence
  Description of Artificial Sequence: Synthetic oligonucleotide
caugucgaagaaugcuaua

SEQ ID NO: 1309919 - RNA, 19 nt, Artificial Sequence
  Description of Artificial Sequence: Synthetic oligonucleotide
guguaggugugaaucccga

SEQ ID NO: 1309920 - RNA, 19 nt, Artificial Sequence
  Description of Artificial Sequence: Synthetic oligonucleotide
gguggagcuauuagguuaa

SEQ ID NO: 1309921 - RNA, 19 nt, Artificial Sequence
  Description of Artificial Sequence: Synthetic oligonucleotide
ggaaacugaaagccuaauu

SEQ ID NO: 1309922 - RNA, 19 nt, Artificial Sequence
  Description of Artificial Sequence: Synthetic oligonucleotide
ggccuucuguucucucuag

SEQ ID NO: 1309923 - RNA, 19 nt, Artificial Sequence
  Description of Artificial Sequence: Synthetic oligonucleotide
gaaccuccucagcgugcgc

SEQ ID NO: 1309924 - RNA, 19 nt, Artificial Sequence
  Description of Artificial Sequence: Synthetic oligonucleotide
gcuuguggugucaaacguc

SEQ ID NO: 1309925 - RNA, 19 nt, Artificial Sequence
  Description of Artificial Sequence: Synthetic oligonucleotide
gccgaaccuccucagcgug

SEQ ID NO: 1309926 - RNA, 19 nt, Artificial Sequence
  Description of Artificial Sequence: Synthetic oligonucleotide
acucggcacagcagccccg

SEQ ID NO: 1309927 - RNA, 19 nt, Artificial Sequence
  Description of Artificial Sequence: Synthetic oligonucleotide
agcuuagaccuggcauucu

SEQ ID NO: 1309928 - RNA, 19 nt, Artificial Sequence
  Description of Artificial Sequence: Synthetic oligonucleotide
aaaccggcucucagggcuu

SEQ ID NO: 1309929 - RNA, 19 nt, Artificial Sequence
  Description of Artificial Sequence: Synthetic oligonucleotide
cauaccuggguggagcuau

SEQ ID NO: 1309930 - RNA, 19 nt, Artificial Sequence
  Description of Artificial Sequence: Synthetic oligonucleotide
ggacgccgaaccuccucag

SEQ ID NO: 1309931 - RNA, 19 nt, Artificial Sequence
  Description of Artificial Sequence: Synthetic oligonucleotide
gguuaaucuugaugggcau

SEQ ID NO: 1309932 - RNA, 19 nt, Artificial Sequence
  Description of Artificial Sequence: Synthetic oligonucleotide
cacauaccuggguggagcu

SEQ ID NO: 1309933 - RNA, 19 nt, Artificial Sequence
  Description of Artificial Sequence: Synthetic oligonucleotide
ggugaaucucauggaggca

SEQ ID NO: 1309934 - RNA, 19 nt, Artificial Sequence
  Description of Artificial Sequence: Synthetic oligonucleotide
uucugccaaugcggaucag

SEQ ID NO: 1309935 - RNA, 19 nt, Artificial Sequence
  Description of Artificial Sequence: Synthetic oligonucleotide
agccccggacgccgaaccu

SEQ ID NO: 1309936 - RNA, 19 nt, Artificial Sequence
  Description of Artificial Sequence: Synthetic oligonucleotide
gcgcuccuuaauggcaacg

SEQ ID NO: 1309937 - RNA, 19 nt, Artificial Sequence
  Description of Artificial Sequence: Synthetic oligonucleotide
gauacgucuucuggauaau

SEQ ID NO: 1309938 - RNA, 19 nt, Artificial Sequence
  Description of Artificial Sequence: Synthetic oligonucleotide
cccgaacuagggucccacg

SEQ ID NO: 1309939 - RNA, 19 nt, Artificial Sequence
  Description of Artificial Sequence: Synthetic oligonucleotide
cgaaccuccucagcgugcg

SEQ ID NO: 1309940 - RNA, 19 nt, Artificial Sequence
  Description of Artificial Sequence: Synthetic oligonucleotide
auucugcgguguaggugug

SEQ ID NO: 1309941 - RNA, 19 nt, Artificial Sequence
  Description of Artificial Sequence: Synthetic oligonucleotide
ccauagccugauugagaac

SEQ ID NO: 1309942 - RNA, 19 nt, Artificial Sequence
  Description of Artificial Sequence: Synthetic oligonucleotide
ccgaaccuccucagcgugc

SEQ ID NO: 1309943 - RNA, 19 nt, Artificial Sequence
  Description of Artificial Sequence: Synthetic oligonucleotide
ccccggacgccgaaccucc

SEQ ID NO: 1309944 - RNA, 19 nt, Artificial Sequence
  Description of Artificial Sequence: Synthetic oligonucleotide
gguugggacuguuugucuu

SEQ ID NO: 1309945 - RNA, 19 nt, Artificial Sequence
  Description of Artificial Sequence: Synthetic oligonucleotide
acauaccuggguggagcua

SEQ ID NO: 1309946 - RNA, 19 nt, Artificial Sequence
  Description of Artificial Sequence: Synthetic oligonucleotide
cgguguaggugugaauccc

SEQ ID NO: 1309947 - RNA, 19 nt, Artificial Sequence
  Description of Artificial Sequence: Synthetic oligonucleotide
ccaagauagaugggucuga

SEQ ID NO: 1309948 - RNA, 19 nt, Artificial Sequence
  Description of Artificial Sequence: Synthetic oligonucleotide
gccccuggugaaucucaug

SEQ ID NO: 1309949 - RNA, 19 nt, Artificial Sequence
  Description of Artificial Sequence: Synthetic oligonucleotide
aucccgaacuaggguccca

SEQ ID NO: 1309950 - RNA, 19 nt, Artificial Sequence
  Description of Artificial Sequence: Synthetic oligonucleotide
ccaucucagcuauggaucu

SEQ ID NO: 1309951 - RNA, 19 nt, Artificial Sequence
  Description of Artificial Sequence: Synthetic oligonucleotide
acuuacccuuuuacuucua

SEQ ID NO: 1309952 - RNA, 19 nt, Artificial Sequence
  Description of Artificial Sequence: Synthetic oligonucleotide
gccuaauuuuaggauugcu

SEQ ID NO: 1309953 - RNA, 19 nt, Artificial Sequence
  Description of Artificial Sequence: Synthetic oligonucleotide
cagccguuccaucugccuu

SEQ ID NO: 1309954 - RNA, 19 nt, Artificial Sequence
  Description of Artificial Sequence: Synthetic oligonucleotide
ugaccacuuugggcuccau

SEQ ID NO: 1309955 - RNA, 19 nt, Artificial Sequence
  Description of Artificial Sequence: Synthetic oligonucleotide
cgcuccuuaauggcaacga

SEQ ID NO: 1309956 - RNA, 19 nt, Artificial Sequence
  Description of Artificial Sequence: Synthetic oligonucleotide
ccgcgcuccuuaauggcaa

SEQ ID NO: 1309957 - RNA, 19 nt, Artificial Sequence
  Description of Artificial Sequence: Synthetic oligonucleotide
caaugcggaucaguuuguu

SEQ ID NO: 1309958 - RNA, 19 nt, Artificial Sequence
  Description of Artificial Sequence: Synthetic oligonucleotide
gcaugcuuaaaggcaucau

SEQ ID NO: 1309959 - RNA, 19 nt, Artificial Sequence
  Description of Artificial Sequence: Synthetic oligonucleotide
gccccggacgccgaaccuc

SEQ ID NO: 1309960 - RNA, 19 nt, Artificial Sequence
  Description of Artificial Sequence: Synthetic oligonucleotide
cugcgguguaggugugaau

SEQ ID NO: 1309961 - RNA, 19 nt, Artificial Sequence
  Description of Artificial Sequence: Synthetic oligonucleotide
gcagccccggacgccgaac

SEQ ID NO: 1309962 - RNA, 19 nt, Artificial Sequence
  Description of Artificial Sequence: Synthetic oligonucleotide
caucucagcuauggaucuu

SEQ ID NO: 1309963 - RNA, 19 nt, Artificial Sequence
  Description of Artificial Sequence: Synthetic oligonucleotide
gcucgaauuuugacagcuu

SEQ ID NO: 1309964 - RNA, 19 nt, Artificial Sequence
  Description of Artificial Sequence: Synthetic oligonucleotide
cggauacgucuucuggaua

SEQ ID NO: 1309965 - RNA, 19 nt, Artificial Sequence
  Description of Artificial Sequence: Synthetic oligonucleotide
cccacgccgcgcuccuuaa

SEQ ID NO: 1309966 - RNA, 19 nt, Artificial Sequence
  Description of Artificial Sequence: Synthetic oligonucleotide
cccggacgccgaaccuccu

SEQ ID NO: 1309967 - RNA, 19 nt, Artificial Sequence
  Description of Artificial Sequence: Synthetic oligonucleotide
ccguuccaucugccuugua

SEQ ID NO: 1309968 - RNA, 19 nt, Artificial Sequence
  Description of Artificial Sequence: Synthetic oligonucleotide
ccacgccgcgcuccuuaau

SEQ ID NO: 1309969 - RNA, 19 nt, Artificial Sequence
  Description of Artificial Sequence: Synthetic oligonucleotide
gucccacgccgcgcuccuu

SEQ ID NO: 1309970 - RNA, 19 nt, Artificial Sequence
  Description of Artificial Sequence: Synthetic oligonucleotide
aaaggcauuuauuauaggg

SEQ ID NO: 1309971 - RNA, 19 nt, Artificial Sequence
  Description of Artificial Sequence: Synthetic oligonucleotide
aagaucucugcuuuuauag

SEQ ID NO: 1309972 - RNA, 19 nt, Artificial Sequence
  Description of Artificial Sequence: Synthetic oligonucleotide
gauaguauuuacuggagag

SEQ ID NO: 1309973 - RNA, 19 nt, Artificial Sequence
  Description of Artificial Sequence: Synthetic oligonucleotide
uuuacuggagagaucauag

SEQ ID NO: 1309974 - RNA, 19 nt, Artificial Sequence
  Description of Artificial Sequence: Synthetic oligonucleotide
aaagcauggguccuguacg

SEQ ID NO: 1309975 - RNA, 19 nt, Artificial Sequence
  Description of Artificial Sequence: Synthetic oligonucleotide
aggaguaccccuuucaccc

SEQ ID NO: 1309976 - RNA, 19 nt, Artificial Sequence
  Description of Artificial Sequence: Synthetic oligonucleotide
agaaacaccaaguacucgg

SEQ ID NO: 1309977 - RNA, 19 nt, Artificial Sequence
  Description of Artificial Sequence: Synthetic oligonucleotide
uuuuauagcaagaacaguu

SEQ ID NO: 1309978 - RNA, 19 nt, Artificial Sequence
  Description of Artificial Sequence: Synthetic oligonucleotide
aggcauuuauuauaggggc

SEQ ID NO: 1309979 - RNA, 19 nt, Artificial Sequence
  Description of Artificial Sequence: Synthetic oligonucleotide
aucaaugaaagaucucugc

SEQ ID NO: 1309980 - RNA, 19 nt, Artificial Sequence
  Description of Artificial Sequence: Synthetic oligonucleotide
auuaggaucagucaucugu

SEQ ID NO: 1309981 - RNA, 19 nt, Artificial Sequence
  Description of Artificial Sequence: Synthetic oligonucleotide
uuuauaguaggaugcgugg

SEQ ID NO: 1309982 - RNA, 19 nt, Artificial Sequence
  Description of Artificial Sequence: Synthetic oligonucleotide
ucugauaguauuuacugga

SEQ ID NO: 1309983 - RNA, 19 nt, Artificial Sequence
  Description of Artificial Sequence: Synthetic oligonucleotide
augaagaauuauuucuacc

SEQ ID NO: 1309984 - RNA, 19 nt, Artificial Sequence
  Description of Artificial Sequence: Synthetic oligonucleotide
uacgaaaucaagcaccuga

SEQ ID NO: 1309985 - RNA, 19 nt, Artificial Sequence
  Description of Artificial Sequence: Synthetic oligonucleotide
aaggcauuuauuauagggg

SEQ ID NO: 1309986 - RNA, 19 nt, Artificial Sequence
  Description of Artificial Sequence: Synthetic oligonucleotide
aaaagugaguugucugugg

SEQ ID NO: 1309987 - RNA, 19 nt, Artificial Sequence
  Description of Artificial Sequence: Synthetic oligonucleotide
ugcuaagucaggcugcugg

SEQ ID NO: 1309988 - RNA, 19 nt, Artificial Sequence
  Description of Artificial Sequence: Synthetic oligonucleotide
agugaauuuggguggagac

SEQ ID NO: 1309989 - RNA, 19 nt, Artificial Sequence
  Description of Artificial Sequence: Synthetic oligonucleotide
aaguaagagccacauuagg

SEQ ID NO: 1309990 - RNA, 19 nt, Artificial Sequence
  Description of Artificial Sequence: Synthetic oligonucleotide
gaagaauuauuucuaccag

SEQ ID NO: 1309991 - RNA, 19 nt, Artificial Sequence
  Description of Artificial Sequence: Synthetic oligonucleotide
uauaggggcauucucagac

SEQ ID NO: 1309992 - RNA, 19 nt, Artificial Sequence
  Description of Artificial Sequence: Synthetic oligonucleotide
aaaggauuuacccuguguu

SEQ ID NO: 1309993 - RNA, 19 nt, Artificial Sequence
  Description of Artificial Sequence: Synthetic oligonucleotide
agaauuauuucuaccaggg

SEQ ID NO: 1309994 - RNA, 19 nt, Artificial Sequence
  Description of Artificial Sequence: Synthetic oligonucleotide
aguuccuauucuuagcggg

SEQ ID NO: 1309995 - RNA, 19 nt, Artificial Sequence
  Description of Artificial Sequence: Synthetic oligonucleotide
uuauagcaagaacaguucc

SEQ ID NO: 1309996 - RNA, 19 nt, Artificial Sequence
  Description of Artificial Sequence: Synthetic oligonucleotide
aacggugccaaacggcggc

SEQ ID NO: 1309997 - RNA, 19 nt, Artificial Sequence
  Description of Artificial Sequence: Synthetic oligonucleotide
aacgacugugaacugaugu

SEQ ID NO: 1309998 - RNA, 19 nt, Artificial Sequence
  Description of Artificial Sequence: Synthetic oligonucleotide
cuuuauaguaggaugcgug

SEQ ID NO: 1309999 - RNA, 19 nt, Artificial Sequence
  Description of Artificial Sequence: Synthetic oligonucleotide
cuguacgaaaucaagcacc

SEQ ID NO: 1310000 - RNA, 19 nt, Artificial Sequence
  Description of Artificial Sequence: Synthetic oligonucleotide
auuauaggggcauucucag

SEQ ID NO: 1310001 - RNA, 19 nt, Artificial Sequence
  Description of Artificial Sequence: Synthetic oligonucleotide
ucgugugaaagucaucucc

SEQ ID NO: 1310002 - RNA, 19 nt, Artificial Sequence
  Description of Artificial Sequence: Synthetic oligonucleotide
ugucacaccagggagauug

SEQ ID NO: 1310003 - RNA, 19 nt, Artificial Sequence
  Description of Artificial Sequence: Synthetic oligonucleotide
uacagagugucgaucagcc

SEQ ID NO: 1310004 - RNA, 19 nt, Artificial Sequence
  Description of Artificial Sequence: Synthetic oligonucleotide
uaagaaggccggcacaucc

SEQ ID NO: 1310005 - RNA, 19 nt, Artificial Sequence
  Description of Artificial Sequence: Synthetic oligonucleotide
aacauggggcacuagguga

SEQ ID NO: 1310006 - RNA, 19 nt, Artificial Sequence
  Description of Artificial Sequence: Synthetic oligonucleotide
cuggagagaucauagaaac

SEQ ID NO: 1310007 - RNA, 19 nt, Artificial Sequence
  Description of Artificial Sequence: Synthetic oligonucleotide
caaacggugccaaacggcg

SEQ ID NO: 1310008 - RNA, 19 nt, Artificial Sequence
  Description of Artificial Sequence: Synthetic oligonucleotide
gagaucauagaaacgacug

SEQ ID NO: 1310009 - RNA, 19 nt, Artificial Sequence
  Description of Artificial Sequence: Synthetic oligonucleotide
agagcgucuuuauaguagg

SEQ ID NO: 1310010 - RNA, 19 nt, Artificial Sequence
  Description of Artificial Sequence: Synthetic oligonucleotide
aacuggaucuuccucagaa

SEQ ID NO: 1310011 - RNA, 19 nt, Artificial Sequence
  Description of Artificial Sequence: Synthetic oligonucleotide
acccaggucauaugaaccc

SEQ ID NO: 1310012 - RNA, 19 nt, Artificial Sequence
  Description of Artificial Sequence: Synthetic oligonucleotide
uguacgaaaucaagcaccu

SEQ ID NO: 1310013 - RNA, 19 nt, Artificial Sequence
  Description of Artificial Sequence: Synthetic oligonucleotide
aagucaucuccauaaggca

SEQ ID NO: 1310014 - RNA, 19 nt, Artificial Sequence
  Description of Artificial Sequence: Synthetic oligonucleotide
uccgauagcuguuuuacac

SEQ ID NO: 1310015 - RNA, 19 nt, Artificial Sequence
  Description of Artificial Sequence: Synthetic oligonucleotide
aaagugaguugucuguggu

SEQ ID NO: 1310016 - RNA, 19 nt, Artificial Sequence
  Description of Artificial Sequence: Synthetic oligonucleotide
ucaccaaccccaccgagag

SEQ ID NO: 1310017 - RNA, 19 nt, Artificial Sequence
  Description of Artificial Sequence: Synthetic oligonucleotide
cacaauaacuggaucuucc

SEQ ID NO: 1310018 - RNA, 19 nt, Artificial Sequence
  Description of Artificial Sequence: Synthetic oligonucleotide
aauucaauacagaucucug

SEQ ID NO: 1310019 - RNA, 19 nt, Artificial Sequence
  Description of Artificial Sequence: Synthetic oligonucleotide
ugauaguauuuacuggaga

SEQ ID NO: 1310020 - RNA, 19 nt, Artificial Sequence
  Description of Artificial Sequence: Synthetic oligonucleotide
uuuaauuuuagagcuccga

SEQ ID NO: 1310021 - RNA, 19 nt, Artificial Sequence
  Description of Artificial Sequence: Synthetic oligonucleotide
uacuggagagaucauagaa

SEQ ID NO: 1310022 - RNA, 19 nt, Artificial Sequence
  Description of Artificial Sequence: Synthetic oligonucleotide
aucaccacuauugaaagca

SEQ ID NO: 1310023 - RNA, 19 nt, Artificial Sequence
  Description of Artificial Sequence: Synthetic oligonucleotide
uccaaacggugccaaacgg

SEQ ID NO: 1310024 - RNA, 19 nt, Artificial Sequence
  Description of Artificial Sequence: Synthetic oligonucleotide
agcuuaaugagaccaucuc

SEQ ID NO: 1310025 - RNA, 19 nt, Artificial Sequence
  Description of Artificial Sequence: Synthetic oligonucleotide
cuugcaggcuacaaaacac

SEQ ID NO: 1310026 - RNA, 19 nt, Artificial Sequence
  Description of Artificial Sequence: Synthetic oligonucleotide
uacacaagaucacugcuuc

SEQ ID NO: 1310027 - RNA, 19 nt, Artificial Sequence
  Description of Artificial Sequence: Synthetic oligonucleotide
ugaaagucaucuccauaag

SEQ ID NO: 1310028 - RNA, 19 nt, Artificial Sequence
  Description of Artificial Sequence: Synthetic oligonucleotide
uggcagauccuuaauguca

SEQ ID NO: 1310029 - RNA, 19 nt, Artificial Sequence
  Description of Artificial Sequence: Synthetic oligonucleotide
gaaaucaagcaccugaagu

SEQ ID NO: 1310030 - RNA, 19 nt, Artificial Sequence
  Description of Artificial Sequence: Synthetic oligonucleotide
uuuaccuucucacgagucu

SEQ ID NO: 1310031 - RNA, 19 nt, Artificial Sequence
  Description of Artificial Sequence: Synthetic oligonucleotide
guacaacuccuccaaacgg

SEQ ID NO: 1310032 - RNA, 19 nt, Artificial Sequence
  Description of Artificial Sequence: Synthetic oligonucleotide
aaguacucggaaccggcag

SEQ ID NO: 1310033 - RNA, 19 nt, Artificial Sequence
  Description of Artificial Sequence: Synthetic oligonucleotide
auaugaacccgcuugucca

SEQ ID NO: 1310034 - RNA, 19 nt, Artificial Sequence
  Description of Artificial Sequence: Synthetic oligonucleotide
acuggcagauccuuaaugu

SEQ ID NO: 1310035 - RNA, 19 nt, Artificial Sequence
  Description of Artificial Sequence: Synthetic oligonucleotide
cauagaaacgacugugaac

SEQ ID NO: 1310036 - RNA, 19 nt, Artificial Sequence
  Description of Artificial Sequence: Synthetic oligonucleotide
caugagaagcucuccaaag

SEQ ID NO: 1310037 - RNA, 19 nt, Artificial Sequence
  Description of Artificial Sequence: Synthetic oligonucleotide
uacagggugcaugagaagc

SEQ ID NO: 1310038 - RNA, 19 nt, Artificial Sequence
  Description of Artificial Sequence: Synthetic oligonucleotide
acgacugugaacugauguc

SEQ ID NO: 1310039 - RNA, 19 nt, Artificial Sequence
  Description of Artificial Sequence: Synthetic oligonucleotide
uuuauuauaggggcauucu

SEQ ID NO: 1310040 - RNA, 19 nt, Artificial Sequence
  Description of Artificial Sequence: Synthetic oligonucleotide
uuauuauaggggcauucuc

SEQ ID NO: 1310041 - RNA, 19 nt, Artificial Sequence
  Description of Artificial Sequence: Synthetic oligonucleotide
uggcggacggaaaugcucg

SEQ ID NO: 1310042 - RNA, 19 nt, Artificial Sequence
  Description of Artificial Sequence: Synthetic oligonucleotide
uaauuuuagagcuccgaua

SEQ ID NO: 1310043 - RNA, 19 nt, Artificial Sequence
  Description of Artificial Sequence: Synthetic oligonucleotide
uuaggaucagucaucuguc

SEQ ID NO: 1310044 - RNA, 19 nt, Artificial Sequence
  Description of Artificial Sequence: Synthetic oligonucleotide
gaugucuugagccuggugu

SEQ ID NO: 1310045 - RNA, 19 nt, Artificial Sequence
  Description of Artificial Sequence: Synthetic oligonucleotide
uacaacuccuccaaacggu

SEQ ID NO: 1310046 - RNA, 19 nt, Artificial Sequence
  Description of Artificial Sequence: Synthetic oligonucleotide
gaaagcauacagagugucg

SEQ ID NO: 1310047 - RNA, 19 nt, Artificial Sequence
  Description of Artificial Sequence: Synthetic oligonucleotide
uaagucaggcugcuggccc

SEQ ID NO: 1310048 - RNA, 19 nt, Artificial Sequence
  Description of Artificial Sequence: Synthetic oligonucleotide
uuuagagcuccgauagcug

SEQ ID NO: 1310049 - RNA, 19 nt, Artificial Sequence
  Description of Artificial Sequence: Synthetic oligonucleotide
uugcaggcuacaaaacacc

SEQ ID NO: 1310050 - RNA, 19 nt, Artificial Sequence
  Description of Artificial Sequence: Synthetic oligonucleotide
uccuuaaugucaacacagc

SEQ ID NO: 1310051 - RNA, 19 nt, Artificial Sequence
  Description of Artificial Sequence: Synthetic oligonucleotide
ucuccauaaggcacaauaa

SEQ ID NO: 1310052 - RNA, 19 nt, Artificial Sequence
  Description of Artificial Sequence: Synthetic oligonucleotide
uccaucccaauucaauaca

SEQ ID NO: 1310053 - RNA, 19 nt, Artificial Sequence
  Description of Artificial Sequence: Synthetic oligonucleotide
aguacucggaaccggcagg

SEQ ID NO: 1310054 - RNA, 19 nt, Artificial Sequence
  Description of Artificial Sequence: Synthetic oligonucleotide
uuagagcuccgauagcugu

SEQ ID NO: 1310055 - RNA, 19 nt, Artificial Sequence
  Description of Artificial Sequence: Synthetic oligonucleotide
uuagcgggaucccaaacuc

SEQ ID NO: 1310056 - RNA, 19 nt, Artificial Sequence
  Description of Artificial Sequence: Synthetic oligonucleotide
agacaauguuggaaaaggc

SEQ ID NO: 1310057 - RNA, 19 nt, Artificial Sequence
  Description of Artificial Sequence: Synthetic oligonucleotide
ucagacaauguuggaaaag

SEQ ID NO: 1310058 - RNA, 19 nt, Artificial Sequence
  Description of Artificial Sequence: Synthetic oligonucleotide
aaagaucucugcuuuuaua

SEQ ID NO: 1310059 - RNA, 19 nt, Artificial Sequence
  Description of Artificial Sequence: Synthetic oligonucleotide
auacagagugucgaucagc

SEQ ID NO: 1310060 - RNA, 19 nt, Artificial Sequence
  Description of Artificial Sequence: Synthetic oligonucleotide
cauaaagcuuaaugagacc

SEQ ID NO: 1310061 - RNA, 19 nt, Artificial Sequence
  Description of Artificial Sequence: Synthetic oligonucleotide
uucuaccagggacaaagga

SEQ ID NO: 1310062 - RNA, 19 nt, Artificial Sequence
  Description of Artificial Sequence: Synthetic oligonucleotide
uguagauccccgauguuua

SEQ ID NO: 1310063 - RNA, 19 nt, Artificial Sequence
  Description of Artificial Sequence: Synthetic oligonucleotide
acuauugaaagcauacaga

SEQ ID NO: 1310064 - RNA, 19 nt, Artificial Sequence
  Description of Artificial Sequence: Synthetic oligonucleotide
uguuggaaaaggcccacuc

SEQ ID NO: 1310065 - RNA, 19 nt, Artificial Sequence
  Description of Artificial Sequence: Synthetic oligonucleotide
uccaguacagggugcauga

SEQ ID NO: 1310066 - RNA, 19 nt, Artificial Sequence
  Description of Artificial Sequence: Synthetic oligonucleotide
cuuuucacaucagugcacc

SEQ ID NO: 1310067 - RNA, 19 nt, Artificial Sequence
  Description of Artificial Sequence: Synthetic oligonucleotide
aguaagagccacauuagga

SEQ ID NO: 1310068 - RNA, 19 nt, Artificial Sequence
  Description of Artificial Sequence: Synthetic oligonucleotide
gaugcgugguuuccaauug

SEQ ID NO: 1310069 - RNA, 19 nt, Artificial Sequence
  Description of Artificial Sequence: Synthetic oligonucleotide
ugugaacugaugucacacc

SEQ ID NO: 1310070 - RNA, 19 nt, Artificial Sequence
  Description of Artificial Sequence: Synthetic oligonucleotide
aacccgcuuguccaccucg

SEQ ID NO: 1310071 - RNA, 19 nt, Artificial Sequence
  Description of Artificial Sequence: Synthetic oligonucleotide
uucuucguguacaacuccu

SEQ ID NO: 1310072 - RNA, 19 nt, Artificial Sequence
  Description of Artificial Sequence: Synthetic oligonucleotide
aguaggaugcgugguuucc

SEQ ID NO: 1310073 - RNA, 19 nt, Artificial Sequence
  Description of Artificial Sequence: Synthetic oligonucleotide
caaagcauggguccuguac

SEQ ID NO: 1310074 - RNA, 19 nt, Artificial Sequence
  Description of Artificial Sequence: Synthetic oligonucleotide
caucaaugaaagaucucug

SEQ ID NO: 1310075 - RNA, 19 nt, Artificial Sequence
  Description of Artificial Sequence: Synthetic oligonucleotide
cuuaaugagaccaucuccu

SEQ ID NO: 1310076 - RNA, 19 nt, Artificial Sequence
  Description of Artificial Sequence: Synthetic oligonucleotide
uguagccuguagauccccg

SEQ ID NO: 1310077 - RNA, 19 nt, Artificial Sequence
  Description of Artificial Sequence: Synthetic oligonucleotide
caaugugaaggcucucucc

SEQ ID NO: 1310078 - RNA, 19 nt, Artificial Sequence
  Description of Artificial Sequence: Synthetic oligonucleotide
uauaguaggaugcgugguu

SEQ ID NO: 1310079 - RNA, 19 nt, Artificial Sequence
  Description of Artificial Sequence: Synthetic oligonucleotide
cuucguguacaacuccucc

SEQ ID NO: 1310080 - RNA, 19 nt, Artificial Sequence
  Description of Artificial Sequence: Synthetic oligonucleotide
uucguguacaacuccucca

SEQ ID NO: 1310081 - RNA, 19 nt, Artificial Sequence
  Description of Artificial Sequence: Synthetic oligonucleotide
aauacagaucucugcugau

SEQ ID NO: 1310082 - RNA, 19 nt, Artificial Sequence
  Description of Artificial Sequence: Synthetic oligonucleotide
aauugucugauaguauuua

SEQ ID NO: 1310083 - RNA, 19 nt, Artificial Sequence
  Description of Artificial Sequence: Synthetic oligonucleotide
uacagagacuaccccauuc

SEQ ID NO: 1310084 - RNA, 19 nt, Artificial Sequence
  Description of Artificial Sequence: Synthetic oligonucleotide
cuccaucccaauucaauac

SEQ ID NO: 1310085 - RNA, 19 nt, Artificial Sequence
  Description of Artificial Sequence: Synthetic oligonucleotide
gcuuaaugagaccaucucc

SEQ ID NO: 1310086 - RNA, 19 nt, Artificial Sequence
  Description of Artificial Sequence: Synthetic oligonucleotide
gucuuuauaguaggaugcg

SEQ ID NO: 1310087 - RNA, 19 nt, Artificial Sequence
  Description of Artificial Sequence: Synthetic oligonucleotide
accaaccccaccgagagug

SEQ ID NO: 1310088 - RNA, 19 nt, Artificial Sequence
  Description of Artificial Sequence: Synthetic oligonucleotide
uuucacaucagugcaccac

SEQ ID NO: 1310089 - RNA, 19 nt, Artificial Sequence
  Description of Artificial Sequence: Synthetic oligonucleotide
cacauuaggaucagucauc

SEQ ID NO: 1310090 - RNA, 19 nt, Artificial Sequence
  Description of Artificial Sequence: Synthetic oligonucleotide
caagaucacugcuucauca

SEQ ID NO: 1310091 - RNA, 19 nt, Artificial Sequence
  Description of Artificial Sequence: Synthetic oligonucleotide
aaggccggcacauccuuca

SEQ ID NO: 1310092 - RNA, 19 nt, Artificial Sequence
  Description of Artificial Sequence: Synthetic oligonucleotide
cacccaggucauaugaacc

SEQ ID NO: 1310093 - RNA, 19 nt, Artificial Sequence
  Description of Artificial Sequence: Synthetic oligonucleotide
ugccacaacuucuucgugu

SEQ ID NO: 1310094 - RNA, 19 nt, Artificial Sequence
  Description of Artificial Sequence: Synthetic oligonucleotide
caaacggcggccuggcccg

SEQ ID NO: 1310095 - RNA, 19 nt, Artificial Sequence
  Description of Artificial Sequence: Synthetic oligonucleotide
aaugccuugcaaggugaag

SEQ ID NO: 1310096 - RNA, 19 nt, Artificial Sequence
  Description of Artificial Sequence: Synthetic oligonucleotide
gaauuauuucuaccaggga

SEQ ID NO: 1310097 - RNA, 19 nt, Artificial Sequence
  Description of Artificial Sequence: Synthetic oligonucleotide
aagugaauuuggguggaga

SEQ ID NO: 1310098 - RNA, 19 nt, Artificial Sequence
  Description of Artificial Sequence: Synthetic oligonucleotide
uuauaguaggaugcguggu

SEQ ID NO: 1310099 - RNA, 19 nt, Artificial Sequence
  Description of Artificial Sequence: Synthetic oligonucleotide
accucgucuaugcugccuc

SEQ ID NO: 1310100 - RNA, 19 nt, Artificial Sequence
  Description of Artificial Sequence: Synthetic oligonucleotide
uuacuggagagaucauaga

SEQ ID NO: 1310101 - RNA, 19 nt, Artificial Sequence
  Description of Artificial Sequence: Synthetic oligonucleotide
aagcauggguccuguacga

SEQ ID NO: 1310102 - RNA, 19 nt, Artificial Sequence
  Description of Artificial Sequence: Synthetic oligonucleotide
uccuucaugauugcagaga

SEQ ID NO: 1310103 - RNA, 19 nt, Artificial Sequence
  Description of Artificial Sequence: Synthetic oligonucleotide
ucuuuauaguaggaugcgu

SEQ ID NO: 1310104 - RNA, 19 nt, Artificial Sequence
  Description of Artificial Sequence: Synthetic oligonucleotide
cacaccagggagauuguug

SEQ ID NO: 1310105 - RNA, 19 nt, Artificial Sequence
  Description of Artificial Sequence: Synthetic oligonucleotide
gauugcagagagcugggaa

SEQ ID NO: 1310106 - RNA, 19 nt, Artificial Sequence
  Description of Artificial Sequence: Synthetic oligonucleotide
caggaguaccccuuucacc

SEQ ID NO: 1310107 - RNA, 19 nt, Artificial Sequence
  Description of Artificial Sequence: Synthetic oligonucleotide
gaugccacaacuucuucgu

SEQ ID NO: 1310108 - RNA, 19 nt, Artificial Sequence
  Description of Artificial Sequence: Synthetic oligonucleotide
uccccgauguuuaauuuua

SEQ ID NO: 1310109 - RNA, 19 nt, Artificial Sequence
  Description of Artificial Sequence: Synthetic oligonucleotide
guuuaauuuuagagcuccg

SEQ ID NO: 1310110 - RNA, 19 nt, Artificial Sequence
  Description of Artificial Sequence: Synthetic oligonucleotide
uauucuuagcgggauccca

SEQ ID NO: 1310111 - RNA, 19 nt, Artificial Sequence
  Description of Artificial Sequence: Synthetic oligonucleotide
cugugaacugaugucacac

SEQ ID NO: 1310112 - RNA, 19 nt, Artificial Sequence
  Description of Artificial Sequence: Synthetic oligonucleotide
ugcaugagaagcucuccaa

SEQ ID NO: 1310113 - RNA, 19 nt, Artificial Sequence
  Description of Artificial Sequence: Synthetic oligonucleotide
ucgucuaugcugccucuca

SEQ ID NO: 1310114 - RNA, 19 nt, Artificial Sequence
  Description of Artificial Sequence: Synthetic oligonucleotide
caaaagugaguugucugug

SEQ ID NO: 1310115 - RNA, 19 nt, Artificial Sequence
  Description of Artificial Sequence: Synthetic oligonucleotide
aguauuuacuggagagauc

SEQ ID NO: 1310116 - RNA, 19 nt, Artificial Sequence
  Description of Artificial Sequence: Synthetic oligonucleotide
guaagagccacauuaggau

SEQ ID NO: 1310117 - RNA, 19 nt, Artificial Sequence
  Description of Artificial Sequence: Synthetic oligonucleotide
ucuuagcgggaucccaaac

SEQ ID NO: 1310118 - RNA, 19 nt, Artificial Sequence
  Description of Artificial Sequence: Synthetic oligonucleotide
agaaacgacugugaacuga

SEQ ID NO: 1310119 - RNA, 19 nt, Artificial Sequence
  Description of Artificial Sequence: Synthetic oligonucleotide
accuaucuacaucaccacu

SEQ ID NO: 1310120 - RNA, 19 nt, Artificial Sequence
  Description of Artificial Sequence: Synthetic oligonucleotide
ucuucguguacaacuccuc

SEQ ID NO: 1310121 - RNA, 19 nt, Artificial Sequence
  Description of Artificial Sequence: Synthetic oligonucleotide
auccuucaugauugcagag

SEQ ID NO: 1310122 - RNA, 19 nt, Artificial Sequence
  Description of Artificial Sequence: Synthetic oligonucleotide
aacuccaucccaauucaau

SEQ ID NO: 1310123 - RNA, 19 nt, Artificial Sequence
  Description of Artificial Sequence: Synthetic oligonucleotide
cgucuuuauaguaggaugc

SEQ ID NO: 1310124 - RNA, 19 nt, Artificial Sequence
  Description of Artificial Sequence: Synthetic oligonucleotide
guuggaaaaggcccacuca

SEQ ID NO: 1310125 - RNA, 19 nt, Artificial Sequence
  Description of Artificial Sequence: Synthetic oligonucleotide
cuucaugauugcagagagc

SEQ ID NO: 1310126 - RNA, 19 nt, Artificial Sequence
  Description of Artificial Sequence: Synthetic oligonucleotide
ccguagagcgucuuuauag

SEQ ID NO: 1310127 - RNA, 19 nt, Artificial Sequence
  Description of Artificial Sequence: Synthetic oligonucleotide
ugcgugguuuccaauuguc

SEQ ID NO: 1310128 - RNA, 19 nt, Artificial Sequence
  Description of Artificial Sequence: Synthetic oligonucleotide
guccuguacgaaaucaagc

SEQ ID NO: 1310129 - RNA, 19 nt, Artificial Sequence
  Description of Artificial Sequence: Synthetic oligonucleotide
uuauaggggcauucucaga

SEQ ID NO: 1310130 - RNA, 19 nt, Artificial Sequence
  Description of Artificial Sequence: Synthetic oligonucleotide
ccuucaugauugcagagag

SEQ ID NO: 1310131 - RNA, 19 nt, Artificial Sequence
  Description of Artificial Sequence: Synthetic oligonucleotide
uucucacgagucuuuucca

SEQ ID NO: 1310132 - RNA, 19 nt, Artificial Sequence
  Description of Artificial Sequence: Synthetic oligonucleotide
gaaccggcagggauggcgg

SEQ ID NO: 1310133 - RNA, 19 nt, Artificial Sequence
  Description of Artificial Sequence: Synthetic oligonucleotide
uaugaacccgcuuguccac

SEQ ID NO: 1310134 - RNA, 19 nt, Artificial Sequence
  Description of Artificial Sequence: Synthetic oligonucleotide
aaccguagagcgucuuuau

SEQ ID NO: 1310135 - RNA, 19 nt, Artificial Sequence
  Description of Artificial Sequence: Synthetic oligonucleotide
aaacggugccaaacggcgg

SEQ ID NO: 1310136 - RNA, 19 nt, Artificial Sequence
  Description of Artificial Sequence: Synthetic oligonucleotide
cagagacuaccccauuccc

SEQ ID NO: 1310137 - RNA, 19 nt, Artificial Sequence
  Description of Artificial Sequence: Synthetic oligonucleotide
gagagaucauagaaacgac

SEQ ID NO: 1310138 - RNA, 19 nt, Artificial Sequence
  Description of Artificial Sequence: Synthetic oligonucleotide
ucggaaccggcagggaugg

SEQ ID NO: 1310139 - RNA, 19 nt, Artificial Sequence
  Description of Artificial Sequence: Synthetic oligonucleotide
gacacuggcagauccuuaa

SEQ ID NO: 1310140 - RNA, 19 nt, Artificial Sequence
  Description of Artificial Sequence: Synthetic oligonucleotide
agaacauggggcacuaggu

SEQ ID NO: 1310141 - RNA, 19 nt, Artificial Sequence
  Description of Artificial Sequence: Synthetic oligonucleotide
aaaccguagagcgucuuua

SEQ ID NO: 1310142 - RNA, 19 nt, Artificial Sequence
  Description of Artificial Sequence: Synthetic oligonucleotide
cauacagagugucgaucag

SEQ ID NO: 1310143 - RNA, 19 nt, Artificial Sequence
  Description of Artificial Sequence: Synthetic oligonucleotide
cauccuucaugauugcaga

SEQ ID NO: 1310144 - RNA, 19 nt, Artificial Sequence
  Description of Artificial Sequence: Synthetic oligonucleotide
accuaggccaggaguaccc

SEQ ID NO: 1310145 - RNA, 19 nt, Artificial Sequence
  Description of Artificial Sequence: Synthetic oligonucleotide
aaaacgcccucgccaagaa

SEQ ID NO: 1310146 - RNA, 19 nt, Artificial Sequence
  Description of Artificial Sequence: Synthetic oligonucleotide
cucgccaagaaguccagca

SEQ ID NO: 1310147 - RNA, 19 nt, Artificial Sequence
  Description of Artificial Sequence: Synthetic oligonucleotide
uuuucacaucagugcacca

SEQ ID NO: 1310148 - RNA, 19 nt, Artificial Sequence
  Description of Artificial Sequence: Synthetic oligonucleotide
agauccccgauguuuaauu

SEQ ID NO: 1310149 - RNA, 19 nt, Artificial Sequence
  Description of Artificial Sequence: Synthetic oligonucleotide
auacagaucucugcugaug

SEQ ID NO: 1310150 - RNA, 19 nt, Artificial Sequence
  Description of Artificial Sequence: Synthetic oligonucleotide
cucggaaccggcagggaug

SEQ ID NO: 1310151 - RNA, 19 nt, Artificial Sequence
  Description of Artificial Sequence: Synthetic oligonucleotide
caggcuacaaaacacccaa

SEQ ID NO: 1310152 - RNA, 19 nt, Artificial Sequence
  Description of Artificial Sequence: Synthetic oligonucleotide
caucagugcaccacagcuc

SEQ ID NO: 1310153 - RNA, 19 nt, Artificial Sequence
  Description of Artificial Sequence: Synthetic oligonucleotide
cuggcagauccuuaauguc

SEQ ID NO: 1310154 - RNA, 19 nt, Artificial Sequence
  Description of Artificial Sequence: Synthetic oligonucleotide
cucguuggcugcuaaguca

SEQ ID NO: 1310155 - RNA, 19 nt, Artificial Sequence
  Description of Artificial Sequence: Synthetic oligonucleotide
ugcuguaagaaggccggca

SEQ ID NO: 1310156 - RNA, 19 nt, Artificial Sequence
  Description of Artificial Sequence: Synthetic oligonucleotide
ugaguugucugugguuggc

SEQ ID NO: 1310157 - RNA, 19 nt, Artificial Sequence
  Description of Artificial Sequence: Synthetic oligonucleotide
cagcacucgaggcugcacc

SEQ ID NO: 1310158 - RNA, 19 nt, Artificial Sequence
  Description of Artificial Sequence: Synthetic oligonucleotide
guacucggaaccggcaggg

SEQ ID NO: 1310159 - RNA, 19 nt, Artificial Sequence
  Description of Artificial Sequence: Synthetic oligonucleotide
gacggaaaugcucgcucac

SEQ ID NO: 1310160 - RNA, 19 nt, Artificial Sequence
  Description of Artificial Sequence: Synthetic oligonucleotide
ccuauucuuagcgggaucc

SEQ ID NO: 1310161 - RNA, 19 nt, Artificial Sequence
  Description of Artificial Sequence: Synthetic oligonucleotide
auggcggacggaaaugcuc

SEQ ID NO: 1310162 - RNA, 19 nt, Artificial Sequence
  Description of Artificial Sequence: Synthetic oligonucleotide
gguuucaggggccacagaa

SEQ ID NO: 1310163 - RNA, 19 nt, Artificial Sequence
  Description of Artificial Sequence: Synthetic oligonucleotide
cuaagucaggcugcuggcc

SEQ ID NO: 1310164 - RNA, 19 nt, Artificial Sequence
  Description of Artificial Sequence: Synthetic oligonucleotide
uccaugcuuuucacaucag

SEQ ID NO: 1310165 - RNA, 19 nt, Artificial Sequence
  Description of Artificial Sequence: Synthetic oligonucleotide
ugacuccaguacagggugc

SEQ ID NO: 1310166 - RNA, 19 nt, Artificial Sequence
  Description of Artificial Sequence: Synthetic oligonucleotide
acuacagagacuaccccau

SEQ ID NO: 1310167 - RNA, 19 nt, Artificial Sequence
  Description of Artificial Sequence: Synthetic oligonucleotide
ugcacccaggucauaugaa

SEQ ID NO: 1310168 - RNA, 19 nt, Artificial Sequence
  Description of Artificial Sequence: Synthetic oligonucleotide
augauugcagagagcuggg

SEQ ID NO: 1310169 - RNA, 19 nt, Artificial Sequence
  Description of Artificial Sequence: Synthetic oligonucleotide
ccuuucaccccuugcaggc

SEQ ID NO: 1310170 - RNA, 19 nt, Artificial Sequence
  Description of Artificial Sequence: Synthetic oligonucleotide
uccuauucuuagcgggauc

SEQ ID NO: 1310171 - RNA, 19 nt, Artificial Sequence
  Description of Artificial Sequence: Synthetic oligonucleotide
caauucaauacagaucucu

SEQ ID NO: 1310172 - RNA, 19 nt, Artificial Sequence
  Description of Artificial Sequence: Synthetic oligonucleotide
ggaaccggcagggauggcg

SEQ ID NO: 1310173 - RNA, 19 nt, Artificial Sequence
  Description of Artificial Sequence: Synthetic oligonucleotide
gagacuaccccauucccau

SEQ ID NO: 1310174 - RNA, 19 nt, Artificial Sequence
  Description of Artificial Sequence: Synthetic oligonucleotide
cuauucuuagcgggauccc

SEQ ID NO: 1310175 - RNA, 19 nt, Artificial Sequence
  Description of Artificial Sequence: Synthetic oligonucleotide
agagacuaccccauuccca

SEQ ID NO: 1310176 - RNA, 19 nt, Artificial Sequence
  Description of Artificial Sequence: Synthetic oligonucleotide
ccaaacggugccaaacggc

SEQ ID NO: 1310177 - RNA, 19 nt, Artificial Sequence
  Description of Artificial Sequence: Synthetic oligonucleotide
acagaucucugcugauggu

SEQ ID NO: 1310178 - RNA, 19 nt, Artificial Sequence
  Description of Artificial Sequence: Synthetic oligonucleotide
cacaacuucuucguguaca

SEQ ID NO: 1310179 - RNA, 19 nt, Artificial Sequence
  Description of Artificial Sequence: Synthetic oligonucleotide
acucggaaccggcagggau

SEQ ID NO: 1310180 - RNA, 19 nt, Artificial Sequence
  Description of Artificial Sequence: Synthetic oligonucleotide
uaguaggaugcgugguuuc

SEQ ID NO: 1310181 - RNA, 19 nt, Artificial Sequence
  Description of Artificial Sequence: Synthetic oligonucleotide
auaguaggaugcgugguuu

SEQ ID NO: 1310182 - RNA, 19 nt, Artificial Sequence
  Description of Artificial Sequence: Synthetic oligonucleotide
ucauaugaacccgcuuguc

SEQ ID NO: 1310183 - RNA, 19 nt, Artificial Sequence
  Description of Artificial Sequence: Synthetic oligonucleotide
caagcaccugaagugugag

SEQ ID NO: 1310184 - RNA, 19 nt, Artificial Sequence
  Description of Artificial Sequence: Synthetic oligonucleotide
ccaucccaauucaauacag

SEQ ID NO: 1310185 - RNA, 19 nt, Artificial Sequence
  Description of Artificial Sequence: Synthetic oligonucleotide
cccacucaagugaauuugg

SEQ ID NO: 1310186 - RNA, 19 nt, Artificial Sequence
  Description of Artificial Sequence: Synthetic oligonucleotide
cuccagacgguccuucauc

SEQ ID NO: 1310187 - RNA, 19 nt, Artificial Sequence
  Description of Artificial Sequence: Synthetic oligonucleotide
gcuguaagaaggccggcac

SEQ ID NO: 1310188 - RNA, 19 nt, Artificial Sequence
  Description of Artificial Sequence: Synthetic oligonucleotide
augcgugguuuccaauugu

SEQ ID NO: 1310189 - RNA, 19 nt, Artificial Sequence
  Description of Artificial Sequence: Synthetic oligonucleotide
ccacucaagugaauuuggg

SEQ ID NO: 1310190 - RNA, 19 nt, Artificial Sequence
  Description of Artificial Sequence: Synthetic oligonucleotide
ccagaaaaguaagagccac

SEQ ID NO: 1310191 - RNA, 19 nt, Artificial Sequence
  Description of Artificial Sequence: Synthetic oligonucleotide
ugccggucagugcuccuca

SEQ ID NO: 1310192 - RNA, 19 nt, Artificial Sequence
  Description of Artificial Sequence: Synthetic oligonucleotide
agggucuggaaccuaucua

SEQ ID NO: 1310193 - RNA, 19 nt, Artificial Sequence
  Description of Artificial Sequence: Synthetic oligonucleotide
gucuugagccugguguucc

SEQ ID NO: 1310194 - RNA, 19 nt, Artificial Sequence
  Description of Artificial Sequence: Synthetic oligonucleotide
gcuaagucaggcugcuggc

SEQ ID NO: 1310195 - RNA, 19 nt, Artificial Sequence
  Description of Artificial Sequence: Synthetic oligonucleotide
ccuguacgaaaucaagcac

SEQ ID NO: 1310196 - RNA, 19 nt, Artificial Sequence
  Description of Artificial Sequence: Synthetic oligonucleotide
agcgggaucccaaacucca

SEQ ID NO: 1310197 - RNA, 19 nt, Artificial Sequence
  Description of Artificial Sequence: Synthetic oligonucleotide
gccacauuaggaucaguca

SEQ ID NO: 1310198 - RNA, 19 nt, Artificial Sequence
  Description of Artificial Sequence: Synthetic oligonucleotide
aaacgacugugaacugaug

SEQ ID NO: 1310199 - RNA, 19 nt, Artificial Sequence
  Description of Artificial Sequence: Synthetic oligonucleotide
cauuaggaucagucaucug

SEQ ID NO: 1310200 - RNA, 19 nt, Artificial Sequence
  Description of Artificial Sequence: Synthetic oligonucleotide
augaaagaucucugcuuuu

SEQ ID NO: 1310201 - RNA, 19 nt, Artificial Sequence
  Description of Artificial Sequence: Synthetic oligonucleotide
guagagcgucuuuauagua

SEQ ID NO: 1310202 - RNA, 19 nt, Artificial Sequence
  Description of Artificial Sequence: Synthetic oligonucleotide
uuccuauucuuagcgggau

SEQ ID NO: 1310203 - RNA, 19 nt, Artificial Sequence
  Description of Artificial Sequence: Synthetic oligonucleotide
acgaaaucaagcaccugaa

SEQ ID NO: 1310204 - RNA, 19 nt, Artificial Sequence
  Description of Artificial Sequence: Synthetic oligonucleotide
ccaaacggcggccuggccc

SEQ ID NO: 1310205 - RNA, 19 nt, Artificial Sequence
  Description of Artificial Sequence: Synthetic oligonucleotide
cugcaaauccagcacucga

SEQ ID NO: 1310206 - RNA, 19 nt, Artificial Sequence
  Description of Artificial Sequence: Synthetic oligonucleotide
agcugaugccacaacuucu

SEQ ID NO: 1310207 - RNA, 19 nt, Artificial Sequence
  Description of Artificial Sequence: Synthetic oligonucleotide
cagugcuccucagugacuc

SEQ ID NO: 1310208 - RNA, 19 nt, Artificial Sequence
  Description of Artificial Sequence: Synthetic oligonucleotide
cuuagcgggaucccaaacu

SEQ ID NO: 1310209 - RNA, 19 nt, Artificial Sequence
  Description of Artificial Sequence: Synthetic oligonucleotide
caguacagggugcaugaga

SEQ ID NO: 1310210 - RNA, 19 nt, Artificial Sequence
  Description of Artificial Sequence: Synthetic oligonucleotide
gaaacgacugugaacugau

SEQ ID NO: 1310211 - RNA, 19 nt, Artificial Sequence
  Description of Artificial Sequence: Synthetic oligonucleotide
guuccuauucuuagcggga

SEQ ID NO: 1310212 - RNA, 19 nt, Artificial Sequence
  Description of Artificial Sequence: Synthetic oligonucleotide
ccagaaaccguagagcguc

SEQ ID NO: 1310213 - RNA, 19 nt, Artificial Sequence
  Description of Artificial Sequence: Synthetic oligonucleotide
gugcaccacagcuccagac

SEQ ID NO: 1310214 - RNA, 19 nt, Artificial Sequence
  Description of Artificial Sequence: Synthetic oligonucleotide
acacccaacacaggagccu

SEQ ID NO: 1310215 - RNA, 19 nt, Artificial Sequence
  Description of Artificial Sequence: Synthetic oligonucleotide
uugcucugacacuggcaga

SEQ ID NO: 1310216 - RNA, 19 nt, Artificial Sequence
  Description of Artificial Sequence: Synthetic oligonucleotide
auucuuagcgggaucccaa

SEQ ID NO: 1310217 - RNA, 19 nt, Artificial Sequence
  Description of Artificial Sequence: Synthetic oligonucleotide
cacucgaggcugcacccag

SEQ ID NO: 1310218 - RNA, 19 nt, Artificial Sequence
  Description of Artificial Sequence: Synthetic oligonucleotide
ucaccuaggccaggaguac

SEQ ID NO: 1310219 - RNA, 19 nt, Artificial Sequence
  Description of Artificial Sequence: Synthetic oligonucleotide
ggaucccaaacuccauccc

SEQ ID NO: 1310220 - RNA, 19 nt, Artificial Sequence
  Description of Artificial Sequence: Synthetic oligonucleotide
ggucgugugaaagucaucu

SEQ ID NO: 1310221 - RNA, 19 nt, Artificial Sequence
  Description of Artificial Sequence: Synthetic oligonucleotide
cacucaagugaauuugggu

SEQ ID NO: 1310222 - RNA, 19 nt, Artificial Sequence
  Description of Artificial Sequence: Synthetic oligonucleotide
agaaggccggcacauccuu

SEQ ID NO: 1310223 - RNA, 19 nt, Artificial Sequence
  Description of Artificial Sequence: Synthetic oligonucleotide
uucaccccuugcaggcuac

SEQ ID NO: 1310224 - RNA, 19 nt, Artificial Sequence
  Description of Artificial Sequence: Synthetic oligonucleotide
cugcacccaggucauauga

SEQ ID NO: 1310225 - RNA, 19 nt, Artificial Sequence
  Description of Artificial Sequence: Synthetic oligonucleotide
uggagacuacagagacuac

SEQ ID NO: 1310226 - RNA, 19 nt, Artificial Sequence
  Description of Artificial Sequence: Synthetic oligonucleotide
gcacccaggucauaugaac

SEQ ID NO: 1310227 - RNA, 19 nt, Artificial Sequence
  Description of Artificial Sequence: Synthetic oligonucleotide
gucgugugaaagucaucuc

SEQ ID NO: 1310228 - RNA, 19 nt, Artificial Sequence
  Description of Artificial Sequence: Synthetic oligonucleotide
ccuaucuacaucaccacua

SEQ ID NO: 1310229 - RNA, 19 nt, Artificial Sequence
  Description of Artificial Sequence: Synthetic oligonucleotide
gaugucacaccagggagau

SEQ ID NO: 1310230 - RNA, 19 nt, Artificial Sequence
  Description of Artificial Sequence: Synthetic oligonucleotide
cuguaagaaggccggcaca

SEQ ID NO: 1310231 - RNA, 19 nt, Artificial Sequence
  Description of Artificial Sequence: Synthetic oligonucleotide
accguagagcgucuuuaua

SEQ ID NO: 1310232 - RNA, 19 nt, Artificial Sequence
  Description of Artificial Sequence: Synthetic oligonucleotide
caagugaauuuggguggag

SEQ ID NO: 1310233 - RNA, 19 nt, Artificial Sequence
  Description of Artificial Sequence: Synthetic oligonucleotide
uagauccccgauguuuaau

SEQ ID NO: 1310234 - RNA, 19 nt, Artificial Sequence
  Description of Artificial Sequence: Synthetic oligonucleotide
ggcacuuuuggcaauuucu

SEQ ID NO: 1310235 - RNA, 19 nt, Artificial Sequence
  Description of Artificial Sequence: Synthetic oligonucleotide
aaccggcagggauggcgga

SEQ ID NO: 1310236 - RNA, 19 nt, Artificial Sequence
  Description of Artificial Sequence: Synthetic oligonucleotide
aaccccaccgagagugccu

SEQ ID NO: 1310237 - RNA, 19 nt, Artificial Sequence
  Description of Artificial Sequence: Synthetic oligonucleotide
guaggaugcgugguuucca

SEQ ID NO: 1310238 - RNA, 19 nt, Artificial Sequence
  Description of Artificial Sequence: Synthetic oligonucleotide
caccuaggccaggaguacc

SEQ ID NO: 1310239 - RNA, 19 nt, Artificial Sequence
  Description of Artificial Sequence: Synthetic oligonucleotide
cuaucuacaucaccacuau

SEQ ID NO: 1310240 - RNA, 19 nt, Artificial Sequence
  Description of Artificial Sequence: Synthetic oligonucleotide
cagcaagccccaaugugaa

SEQ ID NO: 1310241 - RNA, 19 nt, Artificial Sequence
  Description of Artificial Sequence: Synthetic oligonucleotide
cuccgauagcuguuuuaca

SEQ ID NO: 1310242 - RNA, 19 nt, Artificial Sequence
  Description of Artificial Sequence: Synthetic oligonucleotide
gcccacucaagugaauuug

SEQ ID NO: 1310243 - RNA, 19 nt, Artificial Sequence
  Description of Artificial Sequence: Synthetic oligonucleotide
caaccccaccgagagugcc

SEQ ID NO: 1310244 - RNA, 19 nt, Artificial Sequence
  Description of Artificial Sequence: Synthetic oligonucleotide
ggacggaaaugcucgcuca

SEQ ID NO: 1310245 - RNA, 19 nt, Artificial Sequence
  Description of Artificial Sequence: Synthetic oligonucleotide
guacgaaaucaagcaccug

SEQ ID NO: 1310246 - RNA, 19 nt, Artificial Sequence
  Description of Artificial Sequence: Synthetic oligonucleotide
gagugucgaucagccacug

SEQ ID NO: 1310247 - RNA, 19 nt, Artificial Sequence
  Description of Artificial Sequence: Synthetic oligonucleotide
ccaaugugaaggcucucuc

SEQ ID NO: 1310248 - RNA, 19 nt, Artificial Sequence
  Description of Artificial Sequence: Synthetic oligonucleotide
cagggugcaugagaagcuc

SEQ ID NO: 1310249 - RNA, 19 nt, Artificial Sequence
  Description of Artificial Sequence: Synthetic oligonucleotide
ggcaggucgugugaaaguc

SEQ ID NO: 1310250 - RNA, 19 nt, Artificial Sequence
  Description of Artificial Sequence: Synthetic oligonucleotide
ggaguaccccuuucacccc

SEQ ID NO: 1310251 - RNA, 19 nt, Artificial Sequence
  Description of Artificial Sequence: Synthetic oligonucleotide
guagauccccgauguuuaa

SEQ ID NO: 1310252 - RNA, 19 nt, Artificial Sequence
  Description of Artificial Sequence: Synthetic oligonucleotide
gauccccgauguuuaauuu

SEQ ID NO: 1310253 - RNA, 19 nt, Artificial Sequence
  Description of Artificial Sequence: Synthetic oligonucleotide
cgaaaucaagcaccugaag

SEQ ID NO: 1310254 - RNA, 19 nt, Artificial Sequence
  Description of Artificial Sequence: Synthetic oligonucleotide
agacgguccuucauccccu

SEQ ID NO: 1310255 - RNA, 19 nt, Artificial Sequence
  Description of Artificial Sequence: Synthetic oligonucleotide
gaaaccguagagcgucuuu

SEQ ID NO: 1310256 - RNA, 19 nt, Artificial Sequence
  Description of Artificial Sequence: Synthetic oligonucleotide
acuccuccaaacggugcca

SEQ ID NO: 1310257 - RNA, 19 nt, Artificial Sequence
  Description of Artificial Sequence: Synthetic oligonucleotide
aggcccacucaagugaauu

SEQ ID NO: 1310258 - RNA, 19 nt, Artificial Sequence
  Description of Artificial Sequence: Synthetic oligonucleotide
agggugcaugagaagcucu

SEQ ID NO: 1310259 - RNA, 19 nt, Artificial Sequence
  Description of Artificial Sequence: Synthetic oligonucleotide
cgaggcugcacccagguca

SEQ ID NO: 1310260 - RNA, 19 nt, Artificial Sequence
  Description of Artificial Sequence: Synthetic oligonucleotide
uggccccacgcagacuuca

SEQ ID NO: 1310261 - RNA, 19 nt, Artificial Sequence
  Description of Artificial Sequence: Synthetic oligonucleotide
cccaggucauaugaacccg

SEQ ID NO: 1310262 - RNA, 19 nt, Artificial Sequence
  Description of Artificial Sequence: Synthetic oligonucleotide
guaagaaggccggcacauc

SEQ ID NO: 1310263 - RNA, 19 nt, Artificial Sequence
  Description of Artificial Sequence: Synthetic oligonucleotide
ggcugcuaagucaggcugc

SEQ ID NO: 1310264 - RNA, 19 nt, Artificial Sequence
  Description of Artificial Sequence: Synthetic oligonucleotide
caccgagagugccuucauc

SEQ ID NO: 1310265 - RNA, 19 nt, Artificial Sequence
  Description of Artificial Sequence: Synthetic oligonucleotide
acucgaggcugcacccagg

SEQ ID NO: 1310266 - RNA, 19 nt, Artificial Sequence
  Description of Artificial Sequence: Synthetic oligonucleotide
ccgauagcuguuuuacaca

SEQ ID NO: 1310267 - RNA, 19 nt, Artificial Sequence
  Description of Artificial Sequence: Synthetic oligonucleotide
cacuaggugaggaugucuu

SEQ ID NO: 1310268 - RNA, 19 nt, Artificial Sequence
  Description of Artificial Sequence: Synthetic oligonucleotide
cugugguuggcaggucgug

SEQ ID NO: 1310269 - RNA, 19 nt, Artificial Sequence
  Description of Artificial Sequence: Synthetic oligonucleotide
gaaggccggcacauccuuc

SEQ ID NO: 1310270 - RNA, 19 nt, Artificial Sequence
  Description of Artificial Sequence: Synthetic oligonucleotide
cacugccggucagugcucc

SEQ ID NO: 1310271 - RNA, 19 nt, Artificial Sequence
  Description of Artificial Sequence: Synthetic oligonucleotide
uacucggaaccggcaggga

SEQ ID NO: 1310272 - RNA, 19 nt, Artificial Sequence
  Description of Artificial Sequence: Synthetic oligonucleotide
gcauggguccuguacgaaa

SEQ ID NO: 1310273 - RNA, 19 nt, Artificial Sequence
  Description of Artificial Sequence: Synthetic oligonucleotide
ccgagagugccuucaucac

SEQ ID NO: 1310274 - RNA, 19 nt, Artificial Sequence
  Description of Artificial Sequence: Synthetic oligonucleotide
gccccacgcagacuucagg

SEQ ID NO: 1310275 - RNA, 19 nt, Artificial Sequence
  Description of Artificial Sequence: Synthetic oligonucleotide
cuguagauccccgauguuu

SEQ ID NO: 1310276 - RNA, 19 nt, Artificial Sequence
  Description of Artificial Sequence: Synthetic oligonucleotide
agacuaccccauucccauu

SEQ ID NO: 1310277 - RNA, 19 nt, Artificial Sequence
  Description of Artificial Sequence: Synthetic oligonucleotide
agaaaccguagagcgucuu

SEQ ID NO: 1310278 - RNA, 19 nt, Artificial Sequence
  Description of Artificial Sequence: Synthetic oligonucleotide
cagggucuggaaccuaucu

SEQ ID NO: 1310279 - RNA, 19 nt, Artificial Sequence
  Description of Artificial Sequence: Synthetic oligonucleotide
ggucuggaaccuaucuaca

SEQ ID NO: 1310280 - RNA, 19 nt, Artificial Sequence
  Description of Artificial Sequence: Synthetic oligonucleotide
ccaauucaauacagaucuc

SEQ ID NO: 1310281 - RNA, 19 nt, Artificial Sequence
  Description of Artificial Sequence: Synthetic oligonucleotide
ccuuuguagccuguagauc

SEQ ID NO: 1310282 - RNA, 19 nt, Artificial Sequence
  Description of Artificial Sequence: Synthetic oligonucleotide
ccccgauguuuaauuuuag

SEQ ID NO: 1310283 - RNA, 19 nt, Artificial Sequence
  Description of Artificial Sequence: Synthetic oligonucleotide
aaacggcggccuggcccgg

SEQ ID NO: 1310284 - RNA, 19 nt, Artificial Sequence
  Description of Artificial Sequence: Synthetic oligonucleotide
cccuugcaggcuacaaaac

SEQ ID NO: 1310285 - RNA, 19 nt, Artificial Sequence
  Description of Artificial Sequence: Synthetic oligonucleotide
ccucguuggcugcuaaguc

SEQ ID NO: 1310286 - RNA, 19 nt, Artificial Sequence
  Description of Artificial Sequence: Synthetic oligonucleotide
caggucauaugaacccgcu

SEQ ID NO: 1310287 - RNA, 19 nt, Artificial Sequence
  Description of Artificial Sequence: Synthetic oligonucleotide
agcauggguccuguacgaa

SEQ ID NO: 1310288 - RNA, 19 nt, Artificial Sequence
  Description of Artificial Sequence: Synthetic oligonucleotide
gauggcggacggaaaugcu

SEQ ID NO: 1310289 - RNA, 19 nt, Artificial Sequence
  Description of Artificial Sequence: Synthetic oligonucleotide
gugugagcugaugccacaa

SEQ ID NO: 1310290 - RNA, 19 nt, Artificial Sequence
  Description of Artificial Sequence: Synthetic oligonucleotide
ggccucguuggcugcuaag

SEQ ID NO: 1310291 - RNA, 19 nt, Artificial Sequence
  Description of Artificial Sequence: Synthetic oligonucleotide
ccacauuaggaucagucau

SEQ ID NO: 1310292 - RNA, 19 nt, Artificial Sequence
  Description of Artificial Sequence: Synthetic oligonucleotide
ggccggcacauccuucaug

SEQ ID NO: 1310293 - RNA, 19 nt, Artificial Sequence
  Description of Artificial Sequence: Synthetic oligonucleotide
ggcggacggaaaugcucgc

SEQ ID NO: 1310294 - RNA, 19 nt, Artificial Sequence
  Description of Artificial Sequence: Synthetic oligonucleotide
ccacuauugaaagcauaca

SEQ ID NO: 1310295 - RNA, 19 nt, Artificial Sequence
  Description of Artificial Sequence: Synthetic oligonucleotide
ccccaucaaugaaagaucu

SEQ ID NO: 1310296 - RNA, 19 nt, Artificial Sequence
  Description of Artificial Sequence: Synthetic oligonucleotide
cucgaggcugcacccaggu

SEQ ID NO: 1310297 - RNA, 19 nt, Artificial Sequence
  Description of Artificial Sequence: Synthetic oligonucleotide
gggagauuguugagcaucu

SEQ ID NO: 1310298 - RNA, 19 nt, Artificial Sequence
  Description of Artificial Sequence: Synthetic oligonucleotide
gcccucgccaagaagucca

SEQ ID NO: 1310299 - RNA, 19 nt, Artificial Sequence
  Description of Artificial Sequence: Synthetic oligonucleotide
cagaucucugcugaugguu

SEQ ID NO: 1310300 - RNA, 19 nt, Artificial Sequence
  Description of Artificial Sequence: Synthetic oligonucleotide
gucuaaccacaugaagaau

SEQ ID NO: 1310301 - RNA, 19 nt, Artificial Sequence
  Description of Artificial Sequence: Synthetic oligonucleotide
ccaaccccaccgagagugc

SEQ ID NO: 1310302 - RNA, 19 nt, Artificial Sequence
  Description of Artificial Sequence: Synthetic oligonucleotide
aggccggcacauccuucau

SEQ ID NO: 1310303 - RNA, 19 nt, Artificial Sequence
  Description of Artificial Sequence: Synthetic oligonucleotide
cagggauggcggacggaaa

SEQ ID NO: 1310304 - RNA, 19 nt, Artificial Sequence
  Description of Artificial Sequence: Synthetic oligonucleotide
cggacggaaaugcucgcuc

SEQ ID NO: 1310305 - RNA, 19 nt, Artificial Sequence
  Description of Artificial Sequence: Synthetic oligonucleotide
cgucuaugcugccucucac

SEQ ID NO: 1310306 - RNA, 19 nt, Artificial Sequence
  Description of Artificial Sequence: Synthetic oligonucleotide
ccuaggccaggaguacccc

SEQ ID NO: 1310307 - RNA, 19 nt, Artificial Sequence
  Description of Artificial Sequence: Synthetic oligonucleotide
cauuuauuauaggggcauu

SEQ ID NO: 1310308 - RNA, 19 nt, Artificial Sequence
  Description of Artificial Sequence: Synthetic oligonucleotide
ggcacuaggugaggauguc

SEQ ID NO: 1310309 - RNA, 19 nt, Artificial Sequence
  Description of Artificial Sequence: Synthetic oligonucleotide
cagaaaccguagagcgucu

SEQ ID NO: 1310310 - RNA, 19 nt, Artificial Sequence
  Description of Artificial Sequence: Synthetic oligonucleotide
cguagagcgucuuuauagu

SEQ ID NO: 1310311 - RNA, 19 nt, Artificial Sequence
  Description of Artificial Sequence: Synthetic oligonucleotide
gaaguccagcaagccccaa

SEQ ID NO: 1310312 - RNA, 19 nt, Artificial Sequence
  Description of Artificial Sequence: Synthetic oligonucleotide
cuccuccaaacggugccaa

SEQ ID NO: 1310313 - RNA, 19 nt, Artificial Sequence
  Description of Artificial Sequence: Synthetic oligonucleotide
ccaugcuuuucacaucagu

SEQ ID NO: 1310314 - RNA, 19 nt, Artificial Sequence
  Description of Artificial Sequence: Synthetic oligonucleotide
cguuggcugcuaagucagg

SEQ ID NO: 1310315 - RNA, 19 nt, Artificial Sequence
  Description of Artificial Sequence: Synthetic oligonucleotide
aguaccccuuucaccccuu

SEQ ID NO: 1310316 - RNA, 19 nt, Artificial Sequence
  Description of Artificial Sequence: Synthetic oligonucleotide
ugggccucguuggcugcua

SEQ ID NO: 1310317 - RNA, 19 nt, Artificial Sequence
  Description of Artificial Sequence: Synthetic oligonucleotide
caccacagcuccagacggu

SEQ ID NO: 1310318 - RNA, 19 nt, Artificial Sequence
  Description of Artificial Sequence: Synthetic oligonucleotide
cuuucaccccuugcaggcu

SEQ ID NO: 1310319 - RNA, 19 nt, Artificial Sequence
  Description of Artificial Sequence: Synthetic oligonucleotide
gcgugguuuccaauugucu

SEQ ID NO: 1310320 - RNA, 19 nt, Artificial Sequence
  Description of Artificial Sequence: Synthetic oligonucleotide
gcugcuaagucaggcugcu

SEQ ID NO: 1310321 - RNA, 19 nt, Artificial Sequence
  Description of Artificial Sequence: Synthetic oligonucleotide
ggcccacucaagugaauuu

SEQ ID NO: 1310322 - RNA, 19 nt, Artificial Sequence
  Description of Artificial Sequence: Synthetic oligonucleotide
ggccccacgcagacuucag

SEQ ID NO: 1310323 - RNA, 19 nt, Artificial Sequence
  Description of Artificial Sequence: Synthetic oligonucleotide
ggcaaagcauggguccugu

SEQ ID NO: 1310324 - RNA, 19 nt, Artificial Sequence
  Description of Artificial Sequence: Synthetic oligonucleotide
cccggcccggaguucuggc

SEQ ID NO: 1310325 - RNA, 19 nt, Artificial Sequence
  Description of Artificial Sequence: Synthetic oligonucleotide
cagggagauuguugagcau

SEQ ID NO: 1310326 - RNA, 19 nt, Artificial Sequence
  Description of Artificial Sequence: Synthetic oligonucleotide
ccagcacucgaggcugcac

SEQ ID NO: 1310327 - RNA, 19 nt, Artificial Sequence
  Description of Artificial Sequence: Synthetic oligonucleotide
gagccacauuaggaucagu

SEQ ID NO: 1310328 - RNA, 19 nt, Artificial Sequence
  Description of Artificial Sequence: Synthetic oligonucleotide
cacccaacacaggagccuu

SEQ ID NO: 1310329 - RNA, 19 nt, Artificial Sequence
  Description of Artificial Sequence: Synthetic oligonucleotide
augucacaccagggagauu

SEQ ID NO: 1310330 - RNA, 19 nt, Artificial Sequence
  Description of Artificial Sequence: Synthetic oligonucleotide
cauucccauucuugcucuu

SEQ ID NO: 1310331 - RNA, 19 nt, Artificial Sequence
  Description of Artificial Sequence: Synthetic oligonucleotide
ccacugccggucagugcuc

SEQ ID NO: 1310332 - RNA, 19 nt, Artificial Sequence
  Description of Artificial Sequence: Synthetic oligonucleotide
caccucgucuaugcugccu

SEQ ID NO: 1310333 - RNA, 19 nt, Artificial Sequence
  Description of Artificial Sequence: Synthetic oligonucleotide
cgcccucgccaagaagucc

SEQ ID NO: 1310334 - RNA, 19 nt, Artificial Sequence
  Description of Artificial Sequence: Synthetic oligonucleotide
cuggcccggcccggaguuc

SEQ ID NO: 1310335 - RNA, 19 nt, Artificial Sequence
  Description of Artificial Sequence: Synthetic oligonucleotide
ccccuugaucugcugcaaa

SEQ ID NO: 1310336 - RNA, 19 nt, Artificial Sequence
  Description of Artificial Sequence: Synthetic oligonucleotide
gggccucguuggcugcuaa

SEQ ID NO: 1310337 - RNA, 19 nt, Artificial Sequence
  Description of Artificial Sequence: Synthetic oligonucleotide
caccaaccccaccgagagu

SEQ ID NO: 1310338 - RNA, 19 nt, Artificial Sequence
  Description of Artificial Sequence: Synthetic oligonucleotide
gcggacggaaaugcucgcu

SEQ ID NO: 1310339 - RNA, 19 nt, Artificial Sequence
  Description of Artificial Sequence: Synthetic oligonucleotide
ccccaaugugaaggcucuc

SEQ ID NO: 1310340 - RNA, 19 nt, Artificial Sequence
  Description of Artificial Sequence: Synthetic oligonucleotide
caucuccauaaggcacaau

SEQ ID NO: 1310341 - RNA, 19 nt, Artificial Sequence
  Description of Artificial Sequence: Synthetic oligonucleotide
ccccaccgagagugccuuc

SEQ ID NO: 1310342 - RNA, 19 nt, Artificial Sequence
  Description of Artificial Sequence: Synthetic oligonucleotide
gcgggaucccaaacuccau

SEQ ID NO: 1310343 - RNA, 19 nt, Artificial Sequence
  Description of Artificial Sequence: Synthetic oligonucleotide
cggaaccggcagggauggc

SEQ ID NO: 1310344 - RNA, 19 nt, Artificial Sequence
  Description of Artificial Sequence: Synthetic oligonucleotide
aguuauaucacaaauaucc

SEQ ID NO: 1310345 - RNA, 19 nt, Artificial Sequence
  Description of Artificial Sequence: Synthetic oligonucleotide
uuacacuuuaguuuuacgg

SEQ ID NO: 1310346 - RNA, 19 nt, Artificial Sequence
  Description of Artificial Sequence: Synthetic oligonucleotide
augauauugauauacaugu

SEQ ID NO: 1310347 - RNA, 19 nt, Artificial Sequence
  Description of Artificial Sequence: Synthetic oligonucleotide
uuuaguuugggagagaaag

SEQ ID NO: 1310348 - RNA, 19 nt, Artificial Sequence
  Description of Artificial Sequence: Synthetic oligonucleotide
auuacuggagauucaaccc

SEQ ID NO: 1310349 - RNA, 19 nt, Artificial Sequence
  Description of Artificial Sequence: Synthetic oligonucleotide
uguaucuaggauuuuacag

SEQ ID NO: 1310350 - RNA, 19 nt, Artificial Sequence
  Description of Artificial Sequence: Synthetic oligonucleotide
auaagauucaauucuguag

SEQ ID NO: 1310351 - RNA, 19 nt, Artificial Sequence
  Description of Artificial Sequence: Synthetic oligonucleotide
aagaugauaagaucuagca

SEQ ID NO: 1310352 - RNA, 19 nt, Artificial Sequence
  Description of Artificial Sequence: Synthetic oligonucleotide
aauucauauuuccaccaac

SEQ ID NO: 1310353 - RNA, 19 nt, Artificial Sequence
  Description of Artificial Sequence: Synthetic oligonucleotide
uuuaauuuaguuugggaga

SEQ ID NO: 1310354 - RNA, 19 nt, Artificial Sequence
  Description of Artificial Sequence: Synthetic oligonucleotide
ucaguuauaucacaaauau

SEQ ID NO: 1310355 - RNA, 19 nt, Artificial Sequence
  Description of Artificial Sequence: Synthetic oligonucleotide
ugagcaauggcugagagcc

SEQ ID NO: 1310356 - RNA, 19 nt, Artificial Sequence
  Description of Artificial Sequence: Synthetic oligonucleotide
gauuacuggagauucaacc

SEQ ID NO: 1310357 - RNA, 19 nt, Artificial Sequence
  Description of Artificial Sequence: Synthetic oligonucleotide
uuuauuucuccuaaauggc

SEQ ID NO: 1310358 - RNA, 19 nt, Artificial Sequence
  Description of Artificial Sequence: Synthetic oligonucleotide
cagaauauaucauucacag

SEQ ID NO: 1310359 - RNA, 19 nt, Artificial Sequence
  Description of Artificial Sequence: Synthetic oligonucleotide
auugauauacauguuugcc

SEQ ID NO: 1310360 - RNA, 19 nt, Artificial Sequence
  Description of Artificial Sequence: Synthetic oligonucleotide
uuuacggucacuugucugg

SEQ ID NO: 1310361 - RNA, 19 nt, Artificial Sequence
  Description of Artificial Sequence: Synthetic oligonucleotide
uaaaacuccagauguaggc

SEQ ID NO: 1310362 - RNA, 19 nt, Artificial Sequence
  Description of Artificial Sequence: Synthetic oligonucleotide
uggcauauauacaucacag

SEQ ID NO: 1310363 - RNA, 19 nt, Artificial Sequence
  Description of Artificial Sequence: Synthetic oligonucleotide
auagcaauagguuugugga

SEQ ID NO: 1310364 - RNA, 19 nt, Artificial Sequence
  Description of Artificial Sequence: Synthetic oligonucleotide
caugcuuagacucaggaug

SEQ ID NO: 1310365 - RNA, 19 nt, Artificial Sequence
  Description of Artificial Sequence: Synthetic oligonucleotide
gaugauaagaucuagcagu

SEQ ID NO: 1310366 - RNA, 19 nt, Artificial Sequence
  Description of Artificial Sequence: Synthetic oligonucleotide
aaauagugguuccaaaagu

SEQ ID NO: 1310367 - RNA, 19 nt, Artificial Sequence
  Description of Artificial Sequence: Synthetic oligonucleotide
uauaaaacuccagauguag

SEQ ID NO: 1310368 - RNA, 19 nt, Artificial Sequence
  Description of Artificial Sequence: Synthetic oligonucleotide
ugauuggcagaauauauca

SEQ ID NO: 1310369 - RNA, 19 nt, Artificial Sequence
  Description of Artificial Sequence: Synthetic oligonucleotide
ucgaauauguuuuccauga

SEQ ID NO: 1310370 - RNA, 19 nt, Artificial Sequence
  Description of Artificial Sequence: Synthetic oligonucleotide
uuuaaauggagauccgggc

SEQ ID NO: 1310371 - RNA, 19 nt, Artificial Sequence
  Description of Artificial Sequence: Synthetic oligonucleotide
uccagauguaggcagagag

SEQ ID NO: 1310372 - RNA, 19 nt, Artificial Sequence
  Description of Artificial Sequence: Synthetic oligonucleotide
ucugaaucuguauuuagga

SEQ ID NO: 1310373 - RNA, 19 nt, Artificial Sequence
  Description of Artificial Sequence: Synthetic oligonucleotide
aaugugacaccauccugac

SEQ ID NO: 1310374 - RNA, 19 nt, Artificial Sequence
  Description of Artificial Sequence: Synthetic oligonucleotide
gaggauuucaugcuuagac

SEQ ID NO: 1310375 - RNA, 19 nt, Artificial Sequence
  Description of Artificial Sequence: Synthetic oligonucleotide
acaggagaggcucugaauc

SEQ ID NO: 1310376 - RNA, 19 nt, Artificial Sequence
  Description of Artificial Sequence: Synthetic oligonucleotide
uuaauuuaguuugggagag

SEQ ID NO: 1310377 - RNA, 19 nt, Artificial Sequence
  Description of Artificial Sequence: Synthetic oligonucleotide
auucauauuuccaccaacc

SEQ ID NO: 1310378 - RNA, 19 nt, Artificial Sequence
  Description of Artificial Sequence: Synthetic oligonucleotide
agcaguaagagccacuaag

SEQ ID NO: 1310379 - RNA, 19 nt, Artificial Sequence
  Description of Artificial Sequence: Synthetic oligonucleotide
uuaaauggagauccgggca

SEQ ID NO: 1310380 - RNA, 19 nt, Artificial Sequence
  Description of Artificial Sequence: Synthetic oligonucleotide
aauaagauucaauucugua

SEQ ID NO: 1310381 - RNA, 19 nt, Artificial Sequence
  Description of Artificial Sequence: Synthetic oligonucleotide
auauucacaaguuguaacu

SEQ ID NO: 1310382 - RNA, 19 nt, Artificial Sequence
  Description of Artificial Sequence: Synthetic oligonucleotide
cacaguaacagcaugagga

SEQ ID NO: 1310383 - RNA, 19 nt, Artificial Sequence
  Description of Artificial Sequence: Synthetic oligonucleotide
uaaauggagauccgggcag

SEQ ID NO: 1310384 - RNA, 19 nt, Artificial Sequence
  Description of Artificial Sequence: Synthetic oligonucleotide
ucuuuauauaaaacuccag

SEQ ID NO: 1310385 - RNA, 19 nt, Artificial Sequence
  Description of Artificial Sequence: Synthetic oligonucleotide
uacacuuuaguuuuacggu

SEQ ID NO: 1310386 - RNA, 19 nt, Artificial Sequence
  Description of Artificial Sequence: Synthetic oligonucleotide
aaaguggugucaaaaugac

SEQ ID NO: 1310387 - RNA, 19 nt, Artificial Sequence
  Description of Artificial Sequence: Synthetic oligonucleotide
aguccaauaagauucaauu

SEQ ID NO: 1310388 - RNA, 19 nt, Artificial Sequence
  Description of Artificial Sequence: Synthetic oligonucleotide
uacaagguguaccauuucc

SEQ ID NO: 1310389 - RNA, 19 nt, Artificial Sequence
  Description of Artificial Sequence: Synthetic oligonucleotide
uauacuggcaggagugagg

SEQ ID NO: 1310390 - RNA, 19 nt, Artificial Sequence
  Description of Artificial Sequence: Synthetic oligonucleotide
gugugagggguuuaaaugg

SEQ ID NO: 1310391 - RNA, 19 nt, Artificial Sequence
  Description of Artificial Sequence: Synthetic oligonucleotide
acacuuuaguuuuacgguc

SEQ ID NO: 1310392 - RNA, 19 nt, Artificial Sequence
  Description of Artificial Sequence: Synthetic oligonucleotide
agaugauaagaucuagcag

SEQ ID NO: 1310393 - RNA, 19 nt, Artificial Sequence
  Description of Artificial Sequence: Synthetic oligonucleotide
uguauuuaggaugacugca

SEQ ID NO: 1310394 - RNA, 19 nt, Artificial Sequence
  Description of Artificial Sequence: Synthetic oligonucleotide
uuuacacuuuaguuuuacg

SEQ ID NO: 1310395 - RNA, 19 nt, Artificial Sequence
  Description of Artificial Sequence: Synthetic oligonucleotide
uauauggguuguuccaacg

SEQ ID NO: 1310396 - RNA, 19 nt, Artificial Sequence
  Description of Artificial Sequence: Synthetic oligonucleotide
cuucauaaguccaauaaga

SEQ ID NO: 1310397 - RNA, 19 nt, Artificial Sequence
  Description of Artificial Sequence: Synthetic oligonucleotide
ugauauacauguuugccau

SEQ ID NO: 1310398 - RNA, 19 nt, Artificial Sequence
  Description of Artificial Sequence: Synthetic oligonucleotide
aaaugugacaccauccuga

SEQ ID NO: 1310399 - RNA, 19 nt, Artificial Sequence
  Description of Artificial Sequence: Synthetic oligonucleotide
cauauucacaaguuguaac

SEQ ID NO: 1310400 - RNA, 19 nt, Artificial Sequence
  Description of Artificial Sequence: Synthetic oligonucleotide
ucauauuuccaccaaccaa

SEQ ID NO: 1310401 - RNA, 19 nt, Artificial Sequence
  Description of Artificial Sequence: Synthetic oligonucleotide
uuagccaacauauucccaa

SEQ ID NO: 1310402 - RNA, 19 nt, Artificial Sequence
  Description of Artificial Sequence: Synthetic oligonucleotide
uguuucagacuacaaggug

SEQ ID NO: 1310403 - RNA, 19 nt, Artificial Sequence
  Description of Artificial Sequence: Synthetic oligonucleotide
uaguuuuacggucacuugu

SEQ ID NO: 1310404 - RNA, 19 nt, Artificial Sequence
  Description of Artificial Sequence: Synthetic oligonucleotide
cucugaaucuguauuuagg

SEQ ID NO: 1310405 - RNA, 19 nt, Artificial Sequence
  Description of Artificial Sequence: Synthetic oligonucleotide
uuaugugcaguugucauga

SEQ ID NO: 1310406 - RNA, 19 nt, Artificial Sequence
  Description of Artificial Sequence: Synthetic oligonucleotide
uucauaaguccaauaagau

SEQ ID NO: 1310407 - RNA, 19 nt, Artificial Sequence
  Description of Artificial Sequence: Synthetic oligonucleotide
cuaaggaacuccuuuauga

SEQ ID NO: 1310408 - RNA, 19 nt, Artificial Sequence
  Description of Artificial Sequence: Synthetic oligonucleotide
agaggaaguauacauuugu

SEQ ID NO: 1310409 - RNA, 19 nt, Artificial Sequence
  Description of Artificial Sequence: Synthetic oligonucleotide
guaucuaggauuuuacaga

SEQ ID NO: 1310410 - RNA, 19 nt, Artificial Sequence
  Description of Artificial Sequence: Synthetic oligonucleotide
cuuagcccauucaacaugc

SEQ ID NO: 1310411 - RNA, 19 nt, Artificial Sequence
  Description of Artificial Sequence: Synthetic oligonucleotide
aggacuuugaaucaucuuu

SEQ ID NO: 1310412 - RNA, 19 nt, Artificial Sequence
  Description of Artificial Sequence: Synthetic oligonucleotide
uucaugcuuagacucagga

SEQ ID NO: 1310413 - RNA, 19 nt, Artificial Sequence
  Description of Artificial Sequence: Synthetic oligonucleotide
auauugauauacauguuug

SEQ ID NO: 1310414 - RNA, 19 nt, Artificial Sequence
  Description of Artificial Sequence: Synthetic oligonucleotide
auauauggguuguuccaac

SEQ ID NO: 1310415 - RNA, 19 nt, Artificial Sequence
  Description of Artificial Sequence: Synthetic oligonucleotide
agaauauacuggcaggagu

SEQ ID NO: 1310416 - RNA, 19 nt, Artificial Sequence
  Description of Artificial Sequence: Synthetic oligonucleotide
auauacauguuugccauag

SEQ ID NO: 1310417 - RNA, 19 nt, Artificial Sequence
  Description of Artificial Sequence: Synthetic oligonucleotide
aggaugacugcacaaaagu

SEQ ID NO: 1310418 - RNA, 19 nt, Artificial Sequence
  Description of Artificial Sequence: Synthetic oligonucleotide
uuggcagaauauaucauuc

SEQ ID NO: 1310419 - RNA, 19 nt, Artificial Sequence
  Description of Artificial Sequence: Synthetic oligonucleotide
ggguuugucaguuauauca

SEQ ID NO: 1310420 - RNA, 19 nt, Artificial Sequence
  Description of Artificial Sequence: Synthetic oligonucleotide
aagauaguauucaugaaua

SEQ ID NO: 1310421 - RNA, 19 nt, Artificial Sequence
  Description of Artificial Sequence: Synthetic oligonucleotide
aguggugucaaaaugacaa

SEQ ID NO: 1310422 - RNA, 19 nt, Artificial Sequence
  Description of Artificial Sequence: Synthetic oligonucleotide
uccuaaauggcacccucag

SEQ ID NO: 1310423 - RNA, 19 nt, Artificial Sequence
  Description of Artificial Sequence: Synthetic oligonucleotide
uaggauuuuacagauuacu

SEQ ID NO: 1310424 - RNA, 19 nt, Artificial Sequence
  Description of Artificial Sequence: Synthetic oligonucleotide
acaacuucauauucacaag

SEQ ID NO: 1310425 - RNA, 19 nt, Artificial Sequence
  Description of Artificial Sequence: Synthetic oligonucleotide
uagugguuccaaaaguucu

SEQ ID NO: 1310426 - RNA, 19 nt, Artificial Sequence
  Description of Artificial Sequence: Synthetic oligonucleotide
auacuggcaggagugaggc

SEQ ID NO: 1310427 - RNA, 19 nt, Artificial Sequence
  Description of Artificial Sequence: Synthetic oligonucleotide
uuaguuugggagagaaaga

SEQ ID NO: 1310428 - RNA, 19 nt, Artificial Sequence
  Description of Artificial Sequence: Synthetic oligonucleotide
ugucacaagaggaaguaua

SEQ ID NO: 1310429 - RNA, 19 nt, Artificial Sequence
  Description of Artificial Sequence: Synthetic oligonucleotide
uuuaaauagugguuccaaa

SEQ ID NO: 1310430 - RNA, 19 nt, Artificial Sequence
  Description of Artificial Sequence: Synthetic oligonucleotide
aauagguuuguggauggcu

SEQ ID NO: 1310431 - RNA, 19 nt, Artificial Sequence
  Description of Artificial Sequence: Synthetic oligonucleotide
gagaaucugacucuuuaca

SEQ ID NO: 1310432 - RNA, 19 nt, Artificial Sequence
  Description of Artificial Sequence: Synthetic oligonucleotide
ugucaaaucuuccucuuua

SEQ ID NO: 1310433 - RNA, 19 nt, Artificial Sequence
  Description of Artificial Sequence: Synthetic oligonucleotide
uacagauuacuggagauuc

SEQ ID NO: 1310434 - RNA, 19 nt, Artificial Sequence
  Description of Artificial Sequence: Synthetic oligonucleotide
ugaggcucgagcauauaca

SEQ ID NO: 1310435 - RNA, 19 nt, Artificial Sequence
  Description of Artificial Sequence: Synthetic oligonucleotide
ucagacuacaagguguacc

SEQ ID NO: 1310436 - RNA, 19 nt, Artificial Sequence
  Description of Artificial Sequence: Synthetic oligonucleotide
uauggguuguuccaacggu

SEQ ID NO: 1310437 - RNA, 19 nt, Artificial Sequence
  Description of Artificial Sequence: Synthetic oligonucleotide
ucauaaguccaauaagauu

SEQ ID NO: 1310438 - RNA, 19 nt, Artificial Sequence
  Description of Artificial Sequence: Synthetic oligonucleotide
auggcauauauacaucaca

SEQ ID NO: 1310439 - RNA, 19 nt, Artificial Sequence
  Description of Artificial Sequence: Synthetic oligonucleotide
aauagugguuccaaaaguu

SEQ ID NO: 1310440 - RNA, 19 nt, Artificial Sequence
  Description of Artificial Sequence: Synthetic oligonucleotide
uuuuacggucacuugucug

SEQ ID NO: 1310441 - RNA, 19 nt, Artificial Sequence
  Description of Artificial Sequence: Synthetic oligonucleotide
cuguauuuaggaugacugc

SEQ ID NO: 1310442 - RNA, 19 nt, Artificial Sequence
  Description of Artificial Sequence: Synthetic oligonucleotide
cuguuuaaauagugguucc

SEQ ID NO: 1310443 - RNA, 19 nt, Artificial Sequence
  Description of Artificial Sequence: Synthetic oligonucleotide
aggauuucaugcuuagacu

SEQ ID NO: 1310444 - RNA, 19 nt, Artificial Sequence
  Description of Artificial Sequence: Synthetic oligonucleotide
uugcagaugucaaaucuuc

SEQ ID NO: 1310445 - RNA, 19 nt, Artificial Sequence
  Description of Artificial Sequence: Synthetic oligonucleotide
cuaaauggcacccucagua

SEQ ID NO: 1310446 - RNA, 19 nt, Artificial Sequence
  Description of Artificial Sequence: Synthetic oligonucleotide
uuuaggaugacugcacaaa

SEQ ID NO: 1310447 - RNA, 19 nt, Artificial Sequence
  Description of Artificial Sequence: Synthetic oligonucleotide
uccaaaaguucucuuggau

SEQ ID NO: 1310448 - RNA, 19 nt, Artificial Sequence
  Description of Artificial Sequence: Synthetic oligonucleotide
uuaucuuuguccucaugau

SEQ ID NO: 1310449 - RNA, 19 nt, Artificial Sequence
  Description of Artificial Sequence: Synthetic oligonucleotide
auagugguuccaaaaguuc

SEQ ID NO: 1310450 - RNA, 19 nt, Artificial Sequence
  Description of Artificial Sequence: Synthetic oligonucleotide
agcaauagguuuguggaug

SEQ ID NO: 1310451 - RNA, 19 nt, Artificial Sequence
  Description of Artificial Sequence: Synthetic oligonucleotide
gucgaauauguuuuccaug

SEQ ID NO: 1310452 - RNA, 19 nt, Artificial Sequence
  Description of Artificial Sequence: Synthetic oligonucleotide
aguuuuacggucacuuguc

SEQ ID NO: 1310453 - RNA, 19 nt, Artificial Sequence
  Description of Artificial Sequence: Synthetic oligonucleotide
uuucaugcuuagacucagg

SEQ ID NO: 1310454 - RNA, 19 nt, Artificial Sequence
  Description of Artificial Sequence: Synthetic oligonucleotide
gagaggauuucaugcuuag

SEQ ID NO: 1310455 - RNA, 19 nt, Artificial Sequence
  Description of Artificial Sequence: Synthetic oligonucleotide
uuaguggggaucucacuga

SEQ ID NO: 1310456 - RNA, 19 nt, Artificial Sequence
  Description of Artificial Sequence: Synthetic oligonucleotide
ugucgaauauguuuuccau

SEQ ID NO: 1310457 - RNA, 19 nt, Artificial Sequence
  Description of Artificial Sequence: Synthetic oligonucleotide
uauacaucacagugcuuga

SEQ ID NO: 1310458 - RNA, 19 nt, Artificial Sequence
  Description of Artificial Sequence: Synthetic oligonucleotide
uguuuaaauagugguucca

SEQ ID NO: 1310459 - RNA, 19 nt, Artificial Sequence
  Description of Artificial Sequence: Synthetic oligonucleotide
auaguagggugucaucuga

SEQ ID NO: 1310460 - RNA, 19 nt, Artificial Sequence
  Description of Artificial Sequence: Synthetic oligonucleotide
uggugucaaaaugacaacu

SEQ ID NO: 1310461 - RNA, 19 nt, Artificial Sequence
  Description of Artificial Sequence: Synthetic oligonucleotide
uugucaugaugacauaauu

SEQ ID NO: 1310462 - RNA, 19 nt, Artificial Sequence
  Description of Artificial Sequence: Synthetic oligonucleotide
uauucccaagauaguauuc

SEQ ID NO: 1310463 - RNA, 19 nt, Artificial Sequence
  Description of Artificial Sequence: Synthetic oligonucleotide
uuuguggauggcuggaaau

SEQ ID NO: 1310464 - RNA, 19 nt, Artificial Sequence
  Description of Artificial Sequence: Synthetic oligonucleotide
ugagagccaauagcaauag

SEQ ID NO: 1310465 - RNA, 19 nt, Artificial Sequence
  Description of Artificial Sequence: Synthetic oligonucleotide
acugcacaaaagugguguc

SEQ ID NO: 1310466 - RNA, 19 nt, Artificial Sequence
  Description of Artificial Sequence: Synthetic oligonucleotide
aaggggaugucgucgcuga

SEQ ID NO: 1310467 - RNA, 19 nt, Artificial Sequence
  Description of Artificial Sequence: Synthetic oligonucleotide
accgcacaggaccagcaac

SEQ ID NO: 1310468 - RNA, 19 nt, Artificial Sequence
  Description of Artificial Sequence: Synthetic oligonucleotide
auauucccaagauaguauu

SEQ ID NO: 1310469 - RNA, 19 nt, Artificial Sequence
  Description of Artificial Sequence: Synthetic oligonucleotide
uguuccaacggugagcaau

SEQ ID NO: 1310470 - RNA, 19 nt, Artificial Sequence
  Description of Artificial Sequence: Synthetic oligonucleotide
caugacauacuucauaagu

SEQ ID NO: 1310471 - RNA, 19 nt, Artificial Sequence
  Description of Artificial Sequence: Synthetic oligonucleotide
uggguuguuccaacgguga

SEQ ID NO: 1310472 - RNA, 19 nt, Artificial Sequence
  Description of Artificial Sequence: Synthetic oligonucleotide
augcuuagacucaggaugg

SEQ ID NO: 1310473 - RNA, 19 nt, Artificial Sequence
  Description of Artificial Sequence: Synthetic oligonucleotide
auuuuacagauuacuggag

SEQ ID NO: 1310474 - RNA, 19 nt, Artificial Sequence
  Description of Artificial Sequence: Synthetic oligonucleotide
ucgagcauauacacaguaa

SEQ ID NO: 1310475 - RNA, 19 nt, Artificial Sequence
  Description of Artificial Sequence: Synthetic oligonucleotide
gauaagaucuagcaguguu

SEQ ID NO: 1310476 - RNA, 19 nt, Artificial Sequence
  Description of Artificial Sequence: Synthetic oligonucleotide
agauaguauucaugaauau

SEQ ID NO: 1310477 - RNA, 19 nt, Artificial Sequence
  Description of Artificial Sequence: Synthetic oligonucleotide
aacggugagcaauggcuga

SEQ ID NO: 1310478 - RNA, 19 nt, Artificial Sequence
  Description of Artificial Sequence: Synthetic oligonucleotide
aggaccagcaacagcggcc

SEQ ID NO: 1310479 - RNA, 19 nt, Artificial Sequence
  Description of Artificial Sequence: Synthetic oligonucleotide
caaccccaagaauauacug

SEQ ID NO: 1310480 - RNA, 19 nt, Artificial Sequence
  Description of Artificial Sequence: Synthetic oligonucleotide
cagacuacaagguguacca

SEQ ID NO: 1310481 - RNA, 19 nt, Artificial Sequence
  Description of Artificial Sequence: Synthetic oligonucleotide
gguuuaaauggagauccgg

SEQ ID NO: 1310482 - RNA, 19 nt, Artificial Sequence
  Description of Artificial Sequence: Synthetic oligonucleotide
uuucuccuaaauggcaccc

SEQ ID NO: 1310483 - RNA, 19 nt, Artificial Sequence
  Description of Artificial Sequence: Synthetic oligonucleotide
auagguuuguggauggcug

SEQ ID NO: 1310484 - RNA, 19 nt, Artificial Sequence
  Description of Artificial Sequence: Synthetic oligonucleotide
gaaucugacucuuuacacu

SEQ ID NO: 1310485 - RNA, 19 nt, Artificial Sequence
  Description of Artificial Sequence: Synthetic oligonucleotide
ucuccuaaauggcacccuc

SEQ ID NO: 1310486 - RNA, 19 nt, Artificial Sequence
  Description of Artificial Sequence: Synthetic oligonucleotide
uagccaacauauucccaag

SEQ ID NO: 1310487 - RNA, 19 nt, Artificial Sequence
  Description of Artificial Sequence: Synthetic oligonucleotide
uucaugguacugucgaaua

SEQ ID NO: 1310488 - RNA, 19 nt, Artificial Sequence
  Description of Artificial Sequence: Synthetic oligonucleotide
cuaggauuuuacagauuac

SEQ ID NO: 1310489 - RNA, 19 nt, Artificial Sequence
  Description of Artificial Sequence: Synthetic oligonucleotide
ucaugcuuagacucaggau

SEQ ID NO: 1310490 - RNA, 19 nt, Artificial Sequence
  Description of Artificial Sequence: Synthetic oligonucleotide
gagaacucggugccgggcc

SEQ ID NO: 1310491 - RNA, 19 nt, Artificial Sequence
  Description of Artificial Sequence: Synthetic oligonucleotide
agccaauagcaauagguuu

SEQ ID NO: 1310492 - RNA, 19 nt, Artificial Sequence
  Description of Artificial Sequence: Synthetic oligonucleotide
uaaauggcacccucaguau

SEQ ID NO: 1310493 - RNA, 19 nt, Artificial Sequence
  Description of Artificial Sequence: Synthetic oligonucleotide
guaggcagagagaacucgg

SEQ ID NO: 1310494 - RNA, 19 nt, Artificial Sequence
  Description of Artificial Sequence: Synthetic oligonucleotide
aggauaguagggugucauc

SEQ ID NO: 1310495 - RNA, 19 nt, Artificial Sequence
  Description of Artificial Sequence: Synthetic oligonucleotide
uccaacggugagcaauggc

SEQ ID NO: 1310496 - RNA, 19 nt, Artificial Sequence
  Description of Artificial Sequence: Synthetic oligonucleotide
ucugucagcuuggauauau

SEQ ID NO: 1310497 - RNA, 19 nt, Artificial Sequence
  Description of Artificial Sequence: Synthetic oligonucleotide
uguuugccauagcagaauu

SEQ ID NO: 1310498 - RNA, 19 nt, Artificial Sequence
  Description of Artificial Sequence: Synthetic oligonucleotide
auccccacuugucacaaga

SEQ ID NO: 1310499 - RNA, 19 nt, Artificial Sequence
  Description of Artificial Sequence: Synthetic oligonucleotide
gauggcauauauacaucac

SEQ ID NO: 1310500 - RNA, 19 nt, Artificial Sequence
  Description of Artificial Sequence: Synthetic oligonucleotide
ucaugguacugucgaauau

SEQ ID NO: 1310501 - RNA, 19 nt, Artificial Sequence
  Description of Artificial Sequence: Synthetic oligonucleotide
agauuacuggagauucaac

SEQ ID NO: 1310502 - RNA, 19 nt, Artificial Sequence
  Description of Artificial Sequence: Synthetic oligonucleotide
agcaacagcggcccuccgg

SEQ ID NO: 1310503 - RNA, 19 nt, Artificial Sequence
  Description of Artificial Sequence: Synthetic oligonucleotide
uucaauucuguaggaacaa

SEQ ID NO: 1310504 - RNA, 19 nt, Artificial Sequence
  Description of Artificial Sequence: Synthetic oligonucleotide
guauuuaggaugacugcac

SEQ ID NO: 1310505 - RNA, 19 nt, Artificial Sequence
  Description of Artificial Sequence: Synthetic oligonucleotide
gcaguaagagccacuaagg

SEQ ID NO: 1310506 - RNA, 19 nt, Artificial Sequence
  Description of Artificial Sequence: Synthetic oligonucleotide
guuugggagagaaagaagu

SEQ ID NO: 1310507 - RNA, 19 nt, Artificial Sequence
  Description of Artificial Sequence: Synthetic oligonucleotide
caguuauaucacaaauauc

SEQ ID NO: 1310508 - RNA, 19 nt, Artificial Sequence
  Description of Artificial Sequence: Synthetic oligonucleotide
gagcauauacacaguaaca

SEQ ID NO: 1310509 - RNA, 19 nt, Artificial Sequence
  Description of Artificial Sequence: Synthetic oligonucleotide
gucacaagaggaaguauac

SEQ ID NO: 1310510 - RNA, 19 nt, Artificial Sequence
  Description of Artificial Sequence: Synthetic oligonucleotide
agagaacucggugccgggc

SEQ ID NO: 1310511 - RNA, 19 nt, Artificial Sequence
  Description of Artificial Sequence: Synthetic oligonucleotide
aaggacuuugaaucaucuu

SEQ ID NO: 1310512 - RNA, 19 nt, Artificial Sequence
  Description of Artificial Sequence: Synthetic oligonucleotide
uuacggucacuugucuggg

SEQ ID NO: 1310513 - RNA, 19 nt, Artificial Sequence
  Description of Artificial Sequence: Synthetic oligonucleotide
cccaagauaguauucauga

SEQ ID NO: 1310514 - RNA, 19 nt, Artificial Sequence
  Description of Artificial Sequence: Synthetic oligonucleotide
gauauauggguuguuccaa

SEQ ID NO: 1310515 - RNA, 19 nt, Artificial Sequence
  Description of Artificial Sequence: Synthetic oligonucleotide
uauucacaaguuguaacuu

SEQ ID NO: 1310516 - RNA, 19 nt, Artificial Sequence
  Description of Artificial Sequence: Synthetic oligonucleotide
gagauccgggcagugauug

SEQ ID NO: 1310517 - RNA, 19 nt, Artificial Sequence
  Description of Artificial Sequence: Synthetic oligonucleotide
caagauaguauucaugaau

SEQ ID NO: 1310518 - RNA, 19 nt, Artificial Sequence
  Description of Artificial Sequence: Synthetic oligonucleotide
ggauggcauauauacauca

SEQ ID NO: 1310519 - RNA, 19 nt, Artificial Sequence
  Description of Artificial Sequence: Synthetic oligonucleotide
ggauauauggguuguucca

SEQ ID NO: 1310520 - RNA, 19 nt, Artificial Sequence
  Description of Artificial Sequence: Synthetic oligonucleotide
aguuugggagagaaagaag

SEQ ID NO: 1310521 - RNA, 19 nt, Artificial Sequence
  Description of Artificial Sequence: Synthetic oligonucleotide
gacgcggaaggggaugucg

SEQ ID NO: 1310522 - RNA, 19 nt, Artificial Sequence
  Description of Artificial Sequence: Synthetic oligonucleotide
aacaacugcucuguuuaaa

SEQ ID NO: 1310523 - RNA, 19 nt, Artificial Sequence
  Description of Artificial Sequence: Synthetic oligonucleotide
ggccaguugacgcggaagg

SEQ ID NO: 1310524 - RNA, 19 nt, Artificial Sequence
  Description of Artificial Sequence: Synthetic oligonucleotide
agguguaccauuucccauu

SEQ ID NO: 1310525 - RNA, 19 nt, Artificial Sequence
  Description of Artificial Sequence: Synthetic oligonucleotide
guuuaaauagugguuccaa

SEQ ID NO: 1310526 - RNA, 19 nt, Artificial Sequence
  Description of Artificial Sequence: Synthetic oligonucleotide
gccaauagcaauagguuug

SEQ ID NO: 1310527 - RNA, 19 nt, Artificial Sequence
  Description of Artificial Sequence: Synthetic oligonucleotide
gagagaacucggugccggg

SEQ ID NO: 1310528 - RNA, 19 nt, Artificial Sequence
  Description of Artificial Sequence: Synthetic oligonucleotide
cugacucuuuacacuuuag

SEQ ID NO: 1310529 - RNA, 19 nt, Artificial Sequence
  Description of Artificial Sequence: Synthetic oligonucleotide
caaaaguucucuuggauuu

SEQ ID NO: 1310530 - RNA, 19 nt, Artificial Sequence
  Description of Artificial Sequence: Synthetic oligonucleotide
gcaacagcggcccuccggg

SEQ ID NO: 1310531 - RNA, 19 nt, Artificial Sequence
  Description of Artificial Sequence: Synthetic oligonucleotide
uuguggauggcuggaaauc

SEQ ID NO: 1310532 - RNA, 19 nt, Artificial Sequence
  Description of Artificial Sequence: Synthetic oligonucleotide
agggugucaucugaccuuc

SEQ ID NO: 1310533 - RNA, 19 nt, Artificial Sequence
  Description of Artificial Sequence: Synthetic oligonucleotide
cagaagucuucccauuauc

SEQ ID NO: 1310534 - RNA, 19 nt, Artificial Sequence
  Description of Artificial Sequence: Synthetic oligonucleotide
auaaguccaauaagauuca

SEQ ID NO: 1310535 - RNA, 19 nt, Artificial Sequence
  Description of Artificial Sequence: Synthetic oligonucleotide
cuguaucuaggauuuuaca

SEQ ID NO: 1310536 - RNA, 19 nt, Artificial Sequence
  Description of Artificial Sequence: Synthetic oligonucleotide
caggauggcauauauacau

SEQ ID NO: 1310537 - RNA, 19 nt, Artificial Sequence
  Description of Artificial Sequence: Synthetic oligonucleotide
aggauggcauauauacauc

SEQ ID NO: 1310538 - RNA, 19 nt, Artificial Sequence
  Description of Artificial Sequence: Synthetic oligonucleotide
uagcaauagguuuguggau

SEQ ID NO: 1310539 - RNA, 19 nt, Artificial Sequence
  Description of Artificial Sequence: Synthetic oligonucleotide
augguacugucgaauaugu

SEQ ID NO: 1310540 - RNA, 19 nt, Artificial Sequence
  Description of Artificial Sequence: Synthetic oligonucleotide
aaguggugucaaaaugaca

SEQ ID NO: 1310541 - RNA, 19 nt, Artificial Sequence
  Description of Artificial Sequence: Synthetic oligonucleotide
auacuucauaaguccaaua

SEQ ID NO: 1310542 - RNA, 19 nt, Artificial Sequence
  Description of Artificial Sequence: Synthetic oligonucleotide
acuugucacaagaggaagu

SEQ ID NO: 1310543 - RNA, 19 nt, Artificial Sequence
  Description of Artificial Sequence: Synthetic oligonucleotide
ggaaguauacauuuguauu

SEQ ID NO: 1310544 - RNA, 19 nt, Artificial Sequence
  Description of Artificial Sequence: Synthetic oligonucleotide
uucagcuacugagaggauu

SEQ ID NO: 1310545 - RNA, 19 nt, Artificial Sequence
  Description of Artificial Sequence: Synthetic oligonucleotide
ucgucgcugagcuggggca

SEQ ID NO: 1310546 - RNA, 19 nt, Artificial Sequence
  Description of Artificial Sequence: Synthetic oligonucleotide
ugauaagaucuagcagugu

SEQ ID NO: 1310547 - RNA, 19 nt, Artificial Sequence
  Description of Artificial Sequence: Synthetic oligonucleotide
cugagagccaauagcaaua

SEQ ID NO: 1310548 - RNA, 19 nt, Artificial Sequence
  Description of Artificial Sequence: Synthetic oligonucleotide
aguuguaacuucagcuacu

SEQ ID NO: 1310549 - RNA, 19 nt, Artificial Sequence
  Description of Artificial Sequence: Synthetic oligonucleotide
cccaugaaagcaguaagag

SEQ ID NO: 1310550 - RNA, 19 nt, Artificial Sequence
  Description of Artificial Sequence: Synthetic oligonucleotide
uacugucgaauauguuuuc

SEQ ID NO: 1310551 - RNA, 19 nt, Artificial Sequence
  Description of Artificial Sequence: Synthetic oligonucleotide
uuugggccuuuguaauccu

SEQ ID NO: 1310552 - RNA, 19 nt, Artificial Sequence
  Description of Artificial Sequence: Synthetic oligonucleotide
cauauucccaagauaguau

SEQ ID NO: 1310553 - RNA, 19 nt, Artificial Sequence
  Description of Artificial Sequence: Synthetic oligonucleotide
auggguuguuccaacggug

SEQ ID NO: 1310554 - RNA, 19 nt, Artificial Sequence
  Description of Artificial Sequence: Synthetic oligonucleotide
gucgucgcugagcuggggc

SEQ ID NO: 1310555 - RNA, 19 nt, Artificial Sequence
  Description of Artificial Sequence: Synthetic oligonucleotide
cuuuaugugcaguugucau

SEQ ID NO: 1310556 - RNA, 19 nt, Artificial Sequence
  Description of Artificial Sequence: Synthetic oligonucleotide
auauaaaacuccagaugua

SEQ ID NO: 1310557 - RNA, 19 nt, Artificial Sequence
  Description of Artificial Sequence: Synthetic oligonucleotide
gguuugucaguuauaucac

SEQ ID NO: 1310558 - RNA, 19 nt, Artificial Sequence
  Description of Artificial Sequence: Synthetic oligonucleotide
cuuagacucaggauggcau

SEQ ID NO: 1310559 - RNA, 19 nt, Artificial Sequence
  Description of Artificial Sequence: Synthetic oligonucleotide
caauaagauucaauucugu

SEQ ID NO: 1310560 - RNA, 19 nt, Artificial Sequence
  Description of Artificial Sequence: Synthetic oligonucleotide
uggguuugucaguuauauc

SEQ ID NO: 1310561 - RNA, 19 nt, Artificial Sequence
  Description of Artificial Sequence: Synthetic oligonucleotide
uuagcccauucaacaugcu

SEQ ID NO: 1310562 - RNA, 19 nt, Artificial Sequence
  Description of Artificial Sequence: Synthetic oligonucleotide
uuccaacggugagcaaugg

SEQ ID NO: 1310563 - RNA, 19 nt, Artificial Sequence
  Description of Artificial Sequence: Synthetic oligonucleotide
cacccucaguaucucuucc

SEQ ID NO: 1310564 - RNA, 19 nt, Artificial Sequence
  Description of Artificial Sequence: Synthetic oligonucleotide
caguugacgcggaagggga

SEQ ID NO: 1310565 - RNA, 19 nt, Artificial Sequence
  Description of Artificial Sequence: Synthetic oligonucleotide
caacugucucagugugagg

SEQ ID NO: 1310566 - RNA, 19 nt, Artificial Sequence
  Description of Artificial Sequence: Synthetic oligonucleotide
acggucacuugucuggguu

SEQ ID NO: 1310567 - RNA, 19 nt, Artificial Sequence
  Description of Artificial Sequence: Synthetic oligonucleotide
agcuacugagaggauuuca

SEQ ID NO: 1310568 - RNA, 19 nt, Artificial Sequence
  Description of Artificial Sequence: Synthetic oligonucleotide
cccacuugucacaagagga

SEQ ID NO: 1310569 - RNA, 19 nt, Artificial Sequence
  Description of Artificial Sequence: Synthetic oligonucleotide
uccucuacccuuggagaac

SEQ ID NO: 1310570 - RNA, 19 nt, Artificial Sequence
  Description of Artificial Sequence: Synthetic oligonucleotide
cuguuucagacuacaaggu

SEQ ID NO: 1310571 - RNA, 19 nt, Artificial Sequence
  Description of Artificial Sequence: Synthetic oligonucleotide
uucuccuaaauggcacccu

SEQ ID NO: 1310572 - RNA, 19 nt, Artificial Sequence
  Description of Artificial Sequence: Synthetic oligonucleotide
gacuacaagguguaccauu

SEQ ID NO: 1310573 - RNA, 19 nt, Artificial Sequence
  Description of Artificial Sequence: Synthetic oligonucleotide
gcuguaucuaggauuuuac

SEQ ID NO: 1310574 - RNA, 19 nt, Artificial Sequence
  Description of Artificial Sequence: Synthetic oligonucleotide
agaacucggugccgggcca

SEQ ID NO: 1310575 - RNA, 19 nt, Artificial Sequence
  Description of Artificial Sequence: Synthetic oligonucleotide
guugacgcggaaggggaug

SEQ ID NO: 1310576 - RNA, 19 nt, Artificial Sequence
  Description of Artificial Sequence: Synthetic oligonucleotide
gaugucaaaucuuccucuu

SEQ ID NO: 1310577 - RNA, 19 nt, Artificial Sequence
  Description of Artificial Sequence: Synthetic oligonucleotide
uugacgcggaaggggaugu

SEQ ID NO: 1310578 - RNA, 19 nt, Artificial Sequence
  Description of Artificial Sequence: Synthetic oligonucleotide
cucgagcauauacacagua

SEQ ID NO: 1310579 - RNA, 19 nt, Artificial Sequence
  Description of Artificial Sequence: Synthetic oligonucleotide
guaggaacaacugcucugu

SEQ ID NO: 1310580 - RNA, 19 nt, Artificial Sequence
  Description of Artificial Sequence: Synthetic oligonucleotide
uccucaugauauugauaua

SEQ ID NO: 1310581 - RNA, 19 nt, Artificial Sequence
  Description of Artificial Sequence: Synthetic oligonucleotide
cagauuacuggagauucaa

SEQ ID NO: 1310582 - RNA, 19 nt, Artificial Sequence
  Description of Artificial Sequence: Synthetic oligonucleotide
acagauuacuggagauuca

SEQ ID NO: 1310583 - RNA, 19 nt, Artificial Sequence
  Description of Artificial Sequence: Synthetic oligonucleotide
cuccuaaauggcacccuca

SEQ ID NO: 1310584 - RNA, 19 nt, Artificial Sequence
  Description of Artificial Sequence: Synthetic oligonucleotide
ucccauuaucuuuguccuc

SEQ ID NO: 1310585 - RNA, 19 nt, Artificial Sequence
  Description of Artificial Sequence: Synthetic oligonucleotide
ccaguugacgcggaagggg

SEQ ID NO: 1310586 - RNA, 19 nt, Artificial Sequence
  Description of Artificial Sequence: Synthetic oligonucleotide
uucagacuacaagguguac

SEQ ID NO: 1310587 - RNA, 19 nt, Artificial Sequence
  Description of Artificial Sequence: Synthetic oligonucleotide
ccucaguaucucuuccugc

SEQ ID NO: 1310588 - RNA, 19 nt, Artificial Sequence
  Description of Artificial Sequence: Synthetic oligonucleotide
gucaucugaccuucaauau

SEQ ID NO: 1310589 - RNA, 19 nt, Artificial Sequence
  Description of Artificial Sequence: Synthetic oligonucleotide
ugguacugucgaauauguu

SEQ ID NO: 1310590 - RNA, 19 nt, Artificial Sequence
  Description of Artificial Sequence: Synthetic oligonucleotide
cucauccccacuugucaca

SEQ ID NO: 1310591 - RNA, 19 nt, Artificial Sequence
  Description of Artificial Sequence: Synthetic oligonucleotide
gguguaccauuucccauuc

SEQ ID NO: 1310592 - RNA, 19 nt, Artificial Sequence
  Description of Artificial Sequence: Synthetic oligonucleotide
guuuuacggucacuugucu

SEQ ID NO: 1310593 - RNA, 19 nt, Artificial Sequence
  Description of Artificial Sequence: Synthetic oligonucleotide
ggguuguuccaacggugag

SEQ ID NO: 1310594 - RNA, 19 nt, Artificial Sequence
  Description of Artificial Sequence: Synthetic oligonucleotide
ccaugacauacuucauaag

SEQ ID NO: 1310595 - RNA, 19 nt, Artificial Sequence
  Description of Artificial Sequence: Synthetic oligonucleotide
gagccaauagcaauagguu

SEQ ID NO: 1310596 - RNA, 19 nt, Artificial Sequence
  Description of Artificial Sequence: Synthetic oligonucleotide
ggaccagcaacagcggccc

SEQ ID NO: 1310597 - RNA, 19 nt, Artificial Sequence
  Description of Artificial Sequence: Synthetic oligonucleotide
agguuuguggauggcugga

SEQ ID NO: 1310598 - RNA, 19 nt, Artificial Sequence
  Description of Artificial Sequence: Synthetic oligonucleotide
uccuccgucgccgcguccu

SEQ ID NO: 1310599 - RNA, 19 nt, Artificial Sequence
  Description of Artificial Sequence: Synthetic oligonucleotide
ggcauauauacaucacagu

SEQ ID NO: 1310600 - RNA, 19 nt, Artificial Sequence
  Description of Artificial Sequence: Synthetic oligonucleotide
cugcacaaaagugguguca

SEQ ID NO: 1310601 - RNA, 19 nt, Artificial Sequence
  Description of Artificial Sequence: Synthetic oligonucleotide
gucaaaucuuccucuuuau

SEQ ID NO: 1310602 - RNA, 19 nt, Artificial Sequence
  Description of Artificial Sequence: Synthetic oligonucleotide
ggucacuugucuggguuug

SEQ ID NO: 1310603 - RNA, 19 nt, Artificial Sequence
  Description of Artificial Sequence: Synthetic oligonucleotide
cuggaaaucucucuuccuu

SEQ ID NO: 1310604 - RNA, 19 nt, Artificial Sequence
  Description of Artificial Sequence: Synthetic oligonucleotide
gaacucggugccgggccag

SEQ ID NO: 1310605 - RNA, 19 nt, Artificial Sequence
  Description of Artificial Sequence: Synthetic oligonucleotide
aggggaugucgucgcugag

SEQ ID NO: 1310606 - RNA, 19 nt, Artificial Sequence
  Description of Artificial Sequence: Synthetic oligonucleotide
ugucgucgcugagcugggg

SEQ ID NO: 1310607 - RNA, 19 nt, Artificial Sequence
  Description of Artificial Sequence: Synthetic oligonucleotide
cuggguuugucaguuauau

SEQ ID NO: 1310608 - RNA, 19 nt, Artificial Sequence
  Description of Artificial Sequence: Synthetic oligonucleotide
gggaugucgucgcugagcu

SEQ ID NO: 1310609 - RNA, 19 nt, Artificial Sequence
  Description of Artificial Sequence: Synthetic oligonucleotide
auccuccgucgccgcgucc

SEQ ID NO: 1310610 - RNA, 19 nt, Artificial Sequence
  Description of Artificial Sequence: Synthetic oligonucleotide
caggagaggcucugaaucu

SEQ ID NO: 1310611 - RNA, 19 nt, Artificial Sequence
  Description of Artificial Sequence: Synthetic oligonucleotide
ggugucaucugaccuucaa

SEQ ID NO: 1310612 - RNA, 19 nt, Artificial Sequence
  Description of Artificial Sequence: Synthetic oligonucleotide
aggagaccgcacaggacca

SEQ ID NO: 1310613 - RNA, 19 nt, Artificial Sequence
  Description of Artificial Sequence: Synthetic oligonucleotide
agacuacaagguguaccau

SEQ ID NO: 1310614 - RNA, 19 nt, Artificial Sequence
  Description of Artificial Sequence: Synthetic oligonucleotide
ccaacauauucccaagaua

SEQ ID NO: 1310615 - RNA, 19 nt, Artificial Sequence
  Description of Artificial Sequence: Synthetic oligonucleotide
gggucuguucuguuucaga

SEQ ID NO: 1310616 - RNA, 19 nt, Artificial Sequence
  Description of Artificial Sequence: Synthetic oligonucleotide
cuucaugguacugucgaau

SEQ ID NO: 1310617 - RNA, 19 nt, Artificial Sequence
  Description of Artificial Sequence: Synthetic oligonucleotide
gccaacauauucccaagau

SEQ ID NO: 1310618 - RNA, 19 nt, Artificial Sequence
  Description of Artificial Sequence: Synthetic oligonucleotide
augucgucgcugagcuggg

SEQ ID NO: 1310619 - RNA, 19 nt, Artificial Sequence
  Description of Artificial Sequence: Synthetic oligonucleotide
gcuuagacucaggauggca

SEQ ID NO: 1310620 - RNA, 19 nt, Artificial Sequence
  Description of Artificial Sequence: Synthetic oligonucleotide
cucagugugagggguuuaa

SEQ ID NO: 1310621 - RNA, 19 nt, Artificial Sequence
  Description of Artificial Sequence: Synthetic oligonucleotide
gagccacuaaggaacuccu

SEQ ID NO: 1310622 - RNA, 19 nt, Artificial Sequence
  Description of Artificial Sequence: Synthetic oligonucleotide
ggugucaaaaugacaacuu

SEQ ID NO: 1310623 - RNA, 19 nt, Artificial Sequence
  Description of Artificial Sequence: Synthetic oligonucleotide
gccacuaaggaacuccuuu

SEQ ID NO: 1310624 - RNA, 19 nt, Artificial Sequence
  Description of Artificial Sequence: Synthetic oligonucleotide
ugggugccgucaucuugaa

SEQ ID NO: 1310625 - RNA, 19 nt, Artificial Sequence
  Description of Artificial Sequence: Synthetic oligonucleotide
ccggacgccuccaggagac

SEQ ID NO: 1310626 - RNA, 19 nt, Artificial Sequence
  Description of Artificial Sequence: Synthetic oligonucleotide
gcacccucaguaucucuuc

SEQ ID NO: 1310627 - RNA, 19 nt, Artificial Sequence
  Description of Artificial Sequence: Synthetic oligonucleotide
gggccaguugacgcggaag

SEQ ID NO: 1310628 - RNA, 19 nt, Artificial Sequence
  Description of Artificial Sequence: Synthetic oligonucleotide
aguugacgcggaaggggau

SEQ ID NO: 1310629 - RNA, 19 nt, Artificial Sequence
  Description of Artificial Sequence: Synthetic oligonucleotide
ccacuaaggaacuccuuua

SEQ ID NO: 1310630 - RNA, 19 nt, Artificial Sequence
  Description of Artificial Sequence: Synthetic oligonucleotide
cagcuacugagaggauuuc

SEQ ID NO: 1310631 - RNA, 19 nt, Artificial Sequence
  Description of Artificial Sequence: Synthetic oligonucleotide
gcuacugagaggauuucau

SEQ ID NO: 1310632 - RNA, 19 nt, Artificial Sequence
  Description of Artificial Sequence: Synthetic oligonucleotide
caggauaguagggugucau

SEQ ID NO: 1310633 - RNA, 19 nt, Artificial Sequence
  Description of Artificial Sequence: Synthetic oligonucleotide
gugccgucaucuugaagau

SEQ ID NO: 1310634 - RNA, 19 nt, Artificial Sequence
  Description of Artificial Sequence: Synthetic oligonucleotide
cugucucagugugaggggu

SEQ ID NO: 1310635 - RNA, 19 nt, Artificial Sequence
  Description of Artificial Sequence: Synthetic oligonucleotide
ggaugucgucgcugagcug

SEQ ID NO: 1310636 - RNA, 19 nt, Artificial Sequence
  Description of Artificial Sequence: Synthetic oligonucleotide
caguugucaugaugacaua

SEQ ID NO: 1310637 - RNA, 19 nt, Artificial Sequence
  Description of Artificial Sequence: Synthetic oligonucleotide
cuccgucgccgcguccucc

SEQ ID NO: 1310638 - RNA, 19 nt, Artificial Sequence
  Description of Artificial Sequence: Synthetic oligonucleotide
gcacaaaaguggugucaaa

SEQ ID NO: 1310639 - RNA, 19 nt, Artificial Sequence
  Description of Artificial Sequence: Synthetic oligonucleotide
ugacgcggaaggggauguc

SEQ ID NO: 1310640 - RNA, 19 nt, Artificial Sequence
  Description of Artificial Sequence: Synthetic oligonucleotide
gccgggccaguugacgcgg

SEQ ID NO: 1310641 - RNA, 19 nt, Artificial Sequence
  Description of Artificial Sequence: Synthetic oligonucleotide
ggagagaaagaaguccauu

SEQ ID NO: 1310642 - RNA, 19 nt, Artificial Sequence
  Description of Artificial Sequence: Synthetic oligonucleotide
agccacuaaggaacuccuu

SEQ ID NO: 1310643 - RNA, 19 nt, Artificial Sequence
  Description of Artificial Sequence: Synthetic oligonucleotide
ccccaagaauauacuggca

SEQ ID NO: 1310644 - RNA, 19 nt, Artificial Sequence
  Description of Artificial Sequence: Synthetic oligonucleotide
gccgucacagccuccucua

SEQ ID NO: 1310645 - RNA, 19 nt, Artificial Sequence
  Description of Artificial Sequence: Synthetic oligonucleotide
gccggacgccuccaggaga

SEQ ID NO: 1310646 - RNA, 19 nt, Artificial Sequence
  Description of Artificial Sequence: Synthetic oligonucleotide
ccuaaauggcacccucagu

SEQ ID NO: 1310647 - RNA, 19 nt, Artificial Sequence
  Description of Artificial Sequence: Synthetic oligonucleotide
ccgggcagugauuggcaga

SEQ ID NO: 1310648 - RNA, 19 nt, Artificial Sequence
  Description of Artificial Sequence: Synthetic oligonucleotide
ggcccuccggggaccaggc

SEQ ID NO: 1310649 - RNA, 19 nt, Artificial Sequence
  Description of Artificial Sequence: Synthetic oligonucleotide
acucggugccgggccaguu

SEQ ID NO: 1310650 - RNA, 19 nt, Artificial Sequence
  Description of Artificial Sequence: Synthetic oligonucleotide
cuucagcuacugagaggau

SEQ ID NO: 1310651 - RNA, 19 nt, Artificial Sequence
  Description of Artificial Sequence: Synthetic oligonucleotide
ccgccggacgccuccagga

SEQ ID NO: 1310652 - RNA, 19 nt, Artificial Sequence
  Description of Artificial Sequence: Synthetic oligonucleotide
agcggcccuccggggacca

SEQ ID NO: 1310653 - RNA, 19 nt, Artificial Sequence
  Description of Artificial Sequence: Synthetic oligonucleotide
cgcggaaggggaugucguc

SEQ ID NO: 1310654 - RNA, 19 nt, Artificial Sequence
  Description of Artificial Sequence: Synthetic oligonucleotide
cgucgccgcguccuccagc

SEQ ID NO: 1310655 - RNA, 19 nt, Artificial Sequence
  Description of Artificial Sequence: Synthetic oligonucleotide
cggcccuccggggaccagg

SEQ ID NO: 1310656 - RNA, 19 nt, Artificial Sequence
  Description of Artificial Sequence: Synthetic oligonucleotide
ccuccgucgccgcguccuc

SEQ ID NO: 1310657 - RNA, 19 nt, Artificial Sequence
  Description of Artificial Sequence: Synthetic oligonucleotide
gcaauggcugagagccaau

SEQ ID NO: 1310658 - RNA, 19 nt, Artificial Sequence
  Description of Artificial Sequence: Synthetic oligonucleotide
ccgucaucuugaagaugau

SEQ ID NO: 1310659 - RNA, 19 nt, Artificial Sequence
  Description of Artificial Sequence: Synthetic oligonucleotide
ccgggccaguugacgcgga

SEQ ID NO: 1310660 - RNA, 19 nt, Artificial Sequence
  Description of Artificial Sequence: Synthetic oligonucleotide
cggacgccuccaggagacc

SEQ ID NO: 1310661 - RNA, 19 nt, Artificial Sequence
  Description of Artificial Sequence: Synthetic oligonucleotide
gcggcccuccggggaccag

SEQ ID NO: 1310662 - RNA, 19 nt, Artificial Sequence
  Description of Artificial Sequence: Synthetic oligonucleotide
gcuccgcacgccgccgccu

SEQ ID NO: 1310663 - RNA, 19 nt, Artificial Sequence
  Description of Artificial Sequence: Synthetic oligonucleotide
cgccgccggacgccuccag

SEQ ID NO: 1310664 - RNA, 19 nt, Artificial Sequence
  Description of Artificial Sequence: Synthetic oligonucleotide
cgggccaguugacgcggaa

SEQ ID NO: 1310665 - RNA, 19 nt, Artificial Sequence
  Description of Artificial Sequence: Synthetic oligonucleotide
cgcguccuccagccgccgu

SEQ ID NO: 1310666 - RNA, 19 nt, Artificial Sequence
  Description of Artificial Sequence: Synthetic oligonucleotide
aaucaugugaauuaaaucu

SEQ ID NO: 1310667 - RNA, 19 nt, Artificial Sequence
  Description of Artificial Sequence: Synthetic oligonucleotide
aauuaaugaaacuuaggag

SEQ ID NO: 1310668 - RNA, 19 nt, Artificial Sequence
  Description of Artificial Sequence: Synthetic oligonucleotide
auuaaugaaacuuaggagu

SEQ ID NO: 1310669 - RNA, 19 nt, Artificial Sequence
  Description of Artificial Sequence: Synthetic oligonucleotide
aaugccgcacuauucaugc

SEQ ID NO: 1310670 - RNA, 19 nt, Artificial Sequence
  Description of Artificial Sequence: Synthetic oligonucleotide
aguuuuagaccuuacgagc

SEQ ID NO: 1310671 - RNA, 19 nt, Artificial Sequence
  Description of Artificial Sequence: Synthetic oligonucleotide
aaaccucgaaaucagcacc

SEQ ID NO: 1310672 - RNA, 19 nt, Artificial Sequence
  Description of Artificial Sequence: Synthetic oligonucleotide
gaauuaaugaaacuuagga

SEQ ID NO: 1310673 - RNA, 19 nt, Artificial Sequence
  Description of Artificial Sequence: Synthetic oligonucleotide
uauaagauuuaccagauuu

SEQ ID NO: 1310674 - RNA, 19 nt, Artificial Sequence
  Description of Artificial Sequence: Synthetic oligonucleotide
ugugaauuaaaucuucugu

SEQ ID NO: 1310675 - RNA, 19 nt, Artificial Sequence
  Description of Artificial Sequence: Synthetic oligonucleotide
ucuguuuuguguaucuugg

SEQ ID NO: 1310676 - RNA, 19 nt, Artificial Sequence
  Description of Artificial Sequence: Synthetic oligonucleotide
auagggaaaagguaguuuc

SEQ ID NO: 1310677 - RNA, 19 nt, Artificial Sequence
  Description of Artificial Sequence: Synthetic oligonucleotide
uguuguaccauuuccaucu

SEQ ID NO: 1310678 - RNA, 19 nt, Artificial Sequence
  Description of Artificial Sequence: Synthetic oligonucleotide
ugaauuaaugaaacuuagg

SEQ ID NO: 1310679 - RNA, 19 nt, Artificial Sequence
  Description of Artificial Sequence: Synthetic oligonucleotide
gauguaaugcuucguaagg

SEQ ID NO: 1310680 - RNA, 19 nt, Artificial Sequence
  Description of Artificial Sequence: Synthetic oligonucleotide
auaauuauugggaagaaug

SEQ ID NO: 1310681 - RNA, 19 nt, Artificial Sequence
  Description of Artificial Sequence: Synthetic oligonucleotide
acugauguugucuguaggc

SEQ ID NO: 1310682 - RNA, 19 nt, Artificial Sequence
  Description of Artificial Sequence: Synthetic oligonucleotide
auuagcaugguccauauau

SEQ ID NO: 1310683 - RNA, 19 nt, Artificial Sequence
  Description of Artificial Sequence: Synthetic oligonucleotide
aacuuugucguacucagcu

SEQ ID NO: 1310684 - RNA, 19 nt, Artificial Sequence
  Description of Artificial Sequence: Synthetic oligonucleotide
auacauuuagcauaucuug

SEQ ID NO: 1310685 - RNA, 19 nt, Artificial Sequence
  Description of Artificial Sequence: Synthetic oligonucleotide
ucugcaaauagggaaaagg

SEQ ID NO: 1310686 - RNA, 19 nt, Artificial Sequence
  Description of Artificial Sequence: Synthetic oligonucleotide
ucgaagaagagaaacuugc

SEQ ID NO: 1310687 - RNA, 19 nt, Artificial Sequence
  Description of Artificial Sequence: Synthetic oligonucleotide
uaaacuuugucguacucag

SEQ ID NO: 1310688 - RNA, 19 nt, Artificial Sequence
  Description of Artificial Sequence: Synthetic oligonucleotide
ugaacuaguauuaccaggu

SEQ ID NO: 1310689 - RNA, 19 nt, Artificial Sequence
  Description of Artificial Sequence: Synthetic oligonucleotide
caucauuuggguaauaaac

SEQ ID NO: 1310690 - RNA, 19 nt, Artificial Sequence
  Description of Artificial Sequence: Synthetic oligonucleotide
ucuauuuucauccgaggga

SEQ ID NO: 1310691 - RNA, 19 nt, Artificial Sequence
  Description of Artificial Sequence: Synthetic oligonucleotide
aaacuuaggaguuggauua

SEQ ID NO: 1310692 - RNA, 19 nt, Artificial Sequence
  Description of Artificial Sequence: Synthetic oligonucleotide
ucauuuggguaauaaacag

SEQ ID NO: 1310693 - RNA, 19 nt, Artificial Sequence
  Description of Artificial Sequence: Synthetic oligonucleotide
ucauaguaaacuuugucgu

SEQ ID NO: 1310694 - RNA, 19 nt, Artificial Sequence
  Description of Artificial Sequence: Synthetic oligonucleotide
gaguuuuagaccuuacgag

SEQ ID NO: 1310695 - RNA, 19 nt, Artificial Sequence
  Description of Artificial Sequence: Synthetic oligonucleotide
uggguuaucgguuuugugc

SEQ ID NO: 1310696 - RNA, 19 nt, Artificial Sequence
  Description of Artificial Sequence: Synthetic oligonucleotide
uuuaggaagacucgaagaa

SEQ ID NO: 1310697 - RNA, 19 nt, Artificial Sequence
  Description of Artificial Sequence: Synthetic oligonucleotide
aagguaguuucuccuagac

SEQ ID NO: 1310698 - RNA, 19 nt, Artificial Sequence
  Description of Artificial Sequence: Synthetic oligonucleotide
uuuugggaguuuuagaccu

SEQ ID NO: 1310699 - RNA, 19 nt, Artificial Sequence
  Description of Artificial Sequence: Synthetic oligonucleotide
uucuccuagacaaugguga

SEQ ID NO: 1310700 - RNA, 19 nt, Artificial Sequence
  Description of Artificial Sequence: Synthetic oligonucleotide
acuaguuagcuguguagcc

SEQ ID NO: 1310701 - RNA, 19 nt, Artificial Sequence
  Description of Artificial Sequence: Synthetic oligonucleotide
ucugaaucuaggaugcuca

SEQ ID NO: 1310702 - RNA, 19 nt, Artificial Sequence
  Description of Artificial Sequence: Synthetic oligonucleotide
ucaaucaugugaauuaaau

SEQ ID NO: 1310703 - RNA, 19 nt, Artificial Sequence
  Description of Artificial Sequence: Synthetic oligonucleotide
aaggagauguaaugcuucg

SEQ ID NO: 1310704 - RNA, 19 nt, Artificial Sequence
  Description of Artificial Sequence: Synthetic oligonucleotide
uccucuuucaagcucauaa

SEQ ID NO: 1310705 - RNA, 19 nt, Artificial Sequence
  Description of Artificial Sequence: Synthetic oligonucleotide
acagauuccagugccaagc

SEQ ID NO: 1310706 - RNA, 19 nt, Artificial Sequence
  Description of Artificial Sequence: Synthetic oligonucleotide
uuuuguguaucuuggcucc

SEQ ID NO: 1310707 - RNA, 19 nt, Artificial Sequence
  Description of Artificial Sequence: Synthetic oligonucleotide
agauuacagauuccagugc

SEQ ID NO: 1310708 - RNA, 19 nt, Artificial Sequence
  Description of Artificial Sequence: Synthetic oligonucleotide
auaguaaacuuugucguac

SEQ ID NO: 1310709 - RNA, 19 nt, Artificial Sequence
  Description of Artificial Sequence: Synthetic oligonucleotide
gaaucuaggaugcucacca

SEQ ID NO: 1310710 - RNA, 19 nt, Artificial Sequence
  Description of Artificial Sequence: Synthetic oligonucleotide
uuuagcauaucuuguaaaa

SEQ ID NO: 1310711 - RNA, 19 nt, Artificial Sequence
  Description of Artificial Sequence: Synthetic oligonucleotide
auuagcagaaccuggaaau

SEQ ID NO: 1310712 - RNA, 19 nt, Artificial Sequence
  Description of Artificial Sequence: Synthetic oligonucleotide
uguuuuguguaucuuggcu

SEQ ID NO: 1310713 - RNA, 19 nt, Artificial Sequence
  Description of Artificial Sequence: Synthetic oligonucleotide
agauguaaugcuucguaag

SEQ ID NO: 1310714 - RNA, 19 nt, Artificial Sequence
  Description of Artificial Sequence: Synthetic oligonucleotide
uaacuaacggaagacaccc

SEQ ID NO: 1310715 - RNA, 19 nt, Artificial Sequence
  Description of Artificial Sequence: Synthetic oligonucleotide
aaggcuuuaggugaacuag

SEQ ID NO: 1310716 - RNA, 19 nt, Artificial Sequence
  Description of Artificial Sequence: Synthetic oligonucleotide
aucauaaaaccaaaccucg

SEQ ID NO: 1310717 - RNA, 19 nt, Artificial Sequence
  Description of Artificial Sequence: Synthetic oligonucleotide
ugugcagucauaguaaacu

SEQ ID NO: 1310718 - RNA, 19 nt, Artificial Sequence
  Description of Artificial Sequence: Synthetic oligonucleotide
uuacgagcugaauaaaucu

SEQ ID NO: 1310719 - RNA, 19 nt, Artificial Sequence
  Description of Artificial Sequence: Synthetic oligonucleotide
uuuaggugaacuaguauua

SEQ ID NO: 1310720 - RNA, 19 nt, Artificial Sequence
  Description of Artificial Sequence: Synthetic oligonucleotide
uacauuuagcauaucuugu

SEQ ID NO: 1310721 - RNA, 19 nt, Artificial Sequence
  Description of Artificial Sequence: Synthetic oligonucleotide
agacaauggugauuggaac

SEQ ID NO: 1310722 - RNA, 19 nt, Artificial Sequence
  Description of Artificial Sequence: Synthetic oligonucleotide
uccuagacaauggugauug

SEQ ID NO: 1310723 - RNA, 19 nt, Artificial Sequence
  Description of Artificial Sequence: Synthetic oligonucleotide
ugaacauuagcagaaccug

SEQ ID NO: 1310724 - RNA, 19 nt, Artificial Sequence
  Description of Artificial Sequence: Synthetic oligonucleotide
agaaggauuguguaguggu

SEQ ID NO: 1310725 - RNA, 19 nt, Artificial Sequence
  Description of Artificial Sequence: Synthetic oligonucleotide
ugucugauugguuuuaauc

SEQ ID NO: 1310726 - RNA, 19 nt, Artificial Sequence
  Description of Artificial Sequence: Synthetic oligonucleotide
aaucugugagcaaucaaag

SEQ ID NO: 1310727 - RNA, 19 nt, Artificial Sequence
  Description of Artificial Sequence: Synthetic oligonucleotide
ggugauguguaacuaacgg

SEQ ID NO: 1310728 - RNA, 19 nt, Artificial Sequence
  Description of Artificial Sequence: Synthetic oligonucleotide
uuuugugcucauuaguuuc

SEQ ID NO: 1310729 - RNA, 19 nt, Artificial Sequence
  Description of Artificial Sequence: Synthetic oligonucleotide
gugaacuaguauuaccagg

SEQ ID NO: 1310730 - RNA, 19 nt, Artificial Sequence
  Description of Artificial Sequence: Synthetic oligonucleotide
uccuauaauuauugggaag

SEQ ID NO: 1310731 - RNA, 19 nt, Artificial Sequence
  Description of Artificial Sequence: Synthetic oligonucleotide
uauugggaagaaugaagag

SEQ ID NO: 1310732 - RNA, 19 nt, Artificial Sequence
  Description of Artificial Sequence: Synthetic oligonucleotide
ggugauaaggcuuuaggug

SEQ ID NO: 1310733 - RNA, 19 nt, Artificial Sequence
  Description of Artificial Sequence: Synthetic oligonucleotide
uaaucucagguuuacuaug

SEQ ID NO: 1310734 - RNA, 19 nt, Artificial Sequence
  Description of Artificial Sequence: Synthetic oligonucleotide
ugauauuuccgccaguauu

SEQ ID NO: 1310735 - RNA, 19 nt, Artificial Sequence
  Description of Artificial Sequence: Synthetic oligonucleotide
uauuaccagguuuucuucc

SEQ ID NO: 1310736 - RNA, 19 nt, Artificial Sequence
  Description of Artificial Sequence: Synthetic oligonucleotide
cugcgaaccaucauuaaac

SEQ ID NO: 1310737 - RNA, 19 nt, Artificial Sequence
  Description of Artificial Sequence: Synthetic oligonucleotide
uguagcccaaccaacauuu

SEQ ID NO: 1310738 - RNA, 19 nt, Artificial Sequence
  Description of Artificial Sequence: Synthetic oligonucleotide
ucguaaggaagguuucugg

SEQ ID NO: 1310739 - RNA, 19 nt, Artificial Sequence
  Description of Artificial Sequence: Synthetic oligonucleotide
uuagcuguguagcccaacc

SEQ ID NO: 1310740 - RNA, 19 nt, Artificial Sequence
  Description of Artificial Sequence: Synthetic oligonucleotide
uuuacaggaugaacauuag

SEQ ID NO: 1310741 - RNA, 19 nt, Artificial Sequence
  Description of Artificial Sequence: Synthetic oligonucleotide
agcuccacuaguuagcugu

SEQ ID NO: 1310742 - RNA, 19 nt, Artificial Sequence
  Description of Artificial Sequence: Synthetic oligonucleotide
uuugucguacucagcuugg

SEQ ID NO: 1310743 - RNA, 19 nt, Artificial Sequence
  Description of Artificial Sequence: Synthetic oligonucleotide
ugguuuuaaucugugagca

SEQ ID NO: 1310744 - RNA, 19 nt, Artificial Sequence
  Description of Artificial Sequence: Synthetic oligonucleotide
auaccuaguugucugacca

SEQ ID NO: 1310745 - RNA, 19 nt, Artificial Sequence
  Description of Artificial Sequence: Synthetic oligonucleotide
cuuacgagcugaauaaauc

SEQ ID NO: 1310746 - RNA, 19 nt, Artificial Sequence
  Description of Artificial Sequence: Synthetic oligonucleotide
guagcuuagguccacagga

SEQ ID NO: 1310747 - RNA, 19 nt, Artificial Sequence
  Description of Artificial Sequence: Synthetic oligonucleotide
uacgagcugaauaaaucug

SEQ ID NO: 1310748 - RNA, 19 nt, Artificial Sequence
  Description of Artificial Sequence: Synthetic oligonucleotide
aggauuguguaguggugcc

SEQ ID NO: 1310749 - RNA, 19 nt, Artificial Sequence
  Description of Artificial Sequence: Synthetic oligonucleotide
aaagcugugcugauuuagg

SEQ ID NO: 1310750 - RNA, 19 nt, Artificial Sequence
  Description of Artificial Sequence: Synthetic oligonucleotide
uaucuacugauguugucug

SEQ ID NO: 1310751 - RNA, 19 nt, Artificial Sequence
  Description of Artificial Sequence: Synthetic oligonucleotide
gaagacucgaagaagagaa

SEQ ID NO: 1310752 - RNA, 19 nt, Artificial Sequence
  Description of Artificial Sequence: Synthetic oligonucleotide
uucaagcucauaauuucac

SEQ ID NO: 1310753 - RNA, 19 nt, Artificial Sequence
  Description of Artificial Sequence: Synthetic oligonucleotide
aguagcuuagguccacagg

SEQ ID NO: 1310754 - RNA, 19 nt, Artificial Sequence
  Description of Artificial Sequence: Synthetic oligonucleotide
uuucuccuagacaauggug

SEQ ID NO: 1310755 - RNA, 19 nt, Artificial Sequence
  Description of Artificial Sequence: Synthetic oligonucleotide
ucgaaaucagcaccaggag

SEQ ID NO: 1310756 - RNA, 19 nt, Artificial Sequence
  Description of Artificial Sequence: Synthetic oligonucleotide
ugaugugcagucauaguaa

SEQ ID NO: 1310757 - RNA, 19 nt, Artificial Sequence
  Description of Artificial Sequence: Synthetic oligonucleotide
aacuaguauuaccagguuu

SEQ ID NO: 1310758 - RNA, 19 nt, Artificial Sequence
  Description of Artificial Sequence: Synthetic oligonucleotide
aauuauugggaagaaugaa

SEQ ID NO: 1310759 - RNA, 19 nt, Artificial Sequence
  Description of Artificial Sequence: Synthetic oligonucleotide
ugcaaauagggaaaaggua

SEQ ID NO: 1310760 - RNA, 19 nt, Artificial Sequence
  Description of Artificial Sequence: Synthetic oligonucleotide
uggugauaaggcuuuaggu

SEQ ID NO: 1310761 - RNA, 19 nt, Artificial Sequence
  Description of Artificial Sequence: Synthetic oligonucleotide
uguaaugcuucguaaggaa

SEQ ID NO: 1310762 - RNA, 19 nt, Artificial Sequence
  Description of Artificial Sequence: Synthetic oligonucleotide
uacuugaaagccaaccaaa

SEQ ID NO: 1310763 - RNA, 19 nt, Artificial Sequence
  Description of Artificial Sequence: Synthetic oligonucleotide
uucuuccuauaauuauugg

SEQ ID NO: 1310764 - RNA, 19 nt, Artificial Sequence
  Description of Artificial Sequence: Synthetic oligonucleotide
guggugauaaggcuuuagg

SEQ ID NO: 1310765 - RNA, 19 nt, Artificial Sequence
  Description of Artificial Sequence: Synthetic oligonucleotide
auuaaacugaacccacaca

SEQ ID NO: 1310766 - RNA, 19 nt, Artificial Sequence
  Description of Artificial Sequence: Synthetic oligonucleotide
augugaauuaaaucuucug

SEQ ID NO: 1310767 - RNA, 19 nt, Artificial Sequence
  Description of Artificial Sequence: Synthetic oligonucleotide
aaggaagguuucuggugac

SEQ ID NO: 1310768 - RNA, 19 nt, Artificial Sequence
  Description of Artificial Sequence: Synthetic oligonucleotide
ucacuuuacuugaaagcca

SEQ ID NO: 1310769 - RNA, 19 nt, Artificial Sequence
  Description of Artificial Sequence: Synthetic oligonucleotide
uggguaauaaacagugauc

SEQ ID NO: 1310770 - RNA, 19 nt, Artificial Sequence
  Description of Artificial Sequence: Synthetic oligonucleotide
auaaaaccaaaccucgaaa

SEQ ID NO: 1310771 - RNA, 19 nt, Artificial Sequence
  Description of Artificial Sequence: Synthetic oligonucleotide
cuuguugaauaaucucagg

SEQ ID NO: 1310772 - RNA, 19 nt, Artificial Sequence
  Description of Artificial Sequence: Synthetic oligonucleotide
acuauucaugcucaaucug

SEQ ID NO: 1310773 - RNA, 19 nt, Artificial Sequence
  Description of Artificial Sequence: Synthetic oligonucleotide
ucauaaaaccaaaccucga

SEQ ID NO: 1310774 - RNA, 19 nt, Artificial Sequence
  Description of Artificial Sequence: Synthetic oligonucleotide
gaaaucagcaccaggagaa

SEQ ID NO: 1310775 - RNA, 19 nt, Artificial Sequence
  Description of Artificial Sequence: Synthetic oligonucleotide
guuuuguguaucuuggcuc

SEQ ID NO: 1310776 - RNA, 19 nt, Artificial Sequence
  Description of Artificial Sequence: Synthetic oligonucleotide
ugagcaaucaaaggagaug

SEQ ID NO: 1310777 - RNA, 19 nt, Artificial Sequence
  Description of Artificial Sequence: Synthetic oligonucleotide
uaggugaacuaguauuacc

SEQ ID NO: 1310778 - RNA, 19 nt, Artificial Sequence
  Description of Artificial Sequence: Synthetic oligonucleotide
auacugauauuuccgccag

SEQ ID NO: 1310779 - RNA, 19 nt, Artificial Sequence
  Description of Artificial Sequence: Synthetic oligonucleotide
uaacggaagacaccccugc

SEQ ID NO: 1310780 - RNA, 19 nt, Artificial Sequence
  Description of Artificial Sequence: Synthetic oligonucleotide
guaaggaagguuucuggug

SEQ ID NO: 1310781 - RNA, 19 nt, Artificial Sequence
  Description of Artificial Sequence: Synthetic oligonucleotide
agaagagaaacuugcuccu

SEQ ID NO: 1310782 - RNA, 19 nt, Artificial Sequence
  Description of Artificial Sequence: Synthetic oligonucleotide
cuuugucguacucagcuug

SEQ ID NO: 1310783 - RNA, 19 nt, Artificial Sequence
  Description of Artificial Sequence: Synthetic oligonucleotide
acuaacggaagacaccccu

SEQ ID NO: 1310784 - RNA, 19 nt, Artificial Sequence
  Description of Artificial Sequence: Synthetic oligonucleotide
uuugaguagcuuaggucca

SEQ ID NO: 1310785 - RNA, 19 nt, Artificial Sequence
  Description of Artificial Sequence: Synthetic oligonucleotide
ucauagucccgucacuaga

SEQ ID NO: 1310786 - RNA, 19 nt, Artificial Sequence
  Description of Artificial Sequence: Synthetic oligonucleotide
aggaaagccucuuccauca

SEQ ID NO: 1310787 - RNA, 19 nt, Artificial Sequence
  Description of Artificial Sequence: Synthetic oligonucleotide
cagcuguagcaguagaagg

SEQ ID NO: 1310788 - RNA, 19 nt, Artificial Sequence
  Description of Artificial Sequence: Synthetic oligonucleotide
acuagauaucugaagaacu

SEQ ID NO: 1310789 - RNA, 19 nt, Artificial Sequence
  Description of Artificial Sequence: Synthetic oligonucleotide
ggaguuuuagaccuuacga

SEQ ID NO: 1310790 - RNA, 19 nt, Artificial Sequence
  Description of Artificial Sequence: Synthetic oligonucleotide
uuccuauaauuauugggaa

SEQ ID NO: 1310791 - RNA, 19 nt, Artificial Sequence
  Description of Artificial Sequence: Synthetic oligonucleotide
cuaugaugugcagucauag

SEQ ID NO: 1310792 - RNA, 19 nt, Artificial Sequence
  Description of Artificial Sequence: Synthetic oligonucleotide
uuaaucugugagcaaucaa

SEQ ID NO: 1310793 - RNA, 19 nt, Artificial Sequence
  Description of Artificial Sequence: Synthetic oligonucleotide
gauguugucuguaggcaag

SEQ ID NO: 1310794 - RNA, 19 nt, Artificial Sequence
  Description of Artificial Sequence: Synthetic oligonucleotide
uggacaaccagcugcgaac

SEQ ID NO: 1310795 - RNA, 19 nt, Artificial Sequence
  Description of Artificial Sequence: Synthetic oligonucleotide
uguaucuuggcuccaucau

SEQ ID NO: 1310796 - RNA, 19 nt, Artificial Sequence
  Description of Artificial Sequence: Synthetic oligonucleotide
uguaguggugccuguguug

SEQ ID NO: 1310797 - RNA, 19 nt, Artificial Sequence
  Description of Artificial Sequence: Synthetic oligonucleotide
ucgguuuugugcucauuag

SEQ ID NO: 1310798 - RNA, 19 nt, Artificial Sequence
  Description of Artificial Sequence: Synthetic oligonucleotide
ucccaaaugagcauucauu

SEQ ID NO: 1310799 - RNA, 19 nt, Artificial Sequence
  Description of Artificial Sequence: Synthetic oligonucleotide
ucacuagauaucugaagaa

SEQ ID NO: 1310800 - RNA, 19 nt, Artificial Sequence
  Description of Artificial Sequence: Synthetic oligonucleotide
uagaaggauuguguagugg

SEQ ID NO: 1310801 - RNA, 19 nt, Artificial Sequence
  Description of Artificial Sequence: Synthetic oligonucleotide
cucgaagaagagaaacuug

SEQ ID NO: 1310802 - RNA, 19 nt, Artificial Sequence
  Description of Artificial Sequence: Synthetic oligonucleotide
cuggugauguguaacuaac

SEQ ID NO: 1310803 - RNA, 19 nt, Artificial Sequence
  Description of Artificial Sequence: Synthetic oligonucleotide
accuggaaaucucugcuug

SEQ ID NO: 1310804 - RNA, 19 nt, Artificial Sequence
  Description of Artificial Sequence: Synthetic oligonucleotide
gaccuuacgagcugaauaa

SEQ ID NO: 1310805 - RNA, 19 nt, Artificial Sequence
  Description of Artificial Sequence: Synthetic oligonucleotide
aauagggaaaagguaguuu

SEQ ID NO: 1310806 - RNA, 19 nt, Artificial Sequence
  Description of Artificial Sequence: Synthetic oligonucleotide
uacuaugaugugcagucau

SEQ ID NO: 1310807 - RNA, 19 nt, Artificial Sequence
  Description of Artificial Sequence: Synthetic oligonucleotide
aaucucagguuuacuauga

SEQ ID NO: 1310808 - RNA, 19 nt, Artificial Sequence
  Description of Artificial Sequence: Synthetic oligonucleotide
ugaaaggacuugaauuaau

SEQ ID NO: 1310809 - RNA, 19 nt, Artificial Sequence
  Description of Artificial Sequence: Synthetic oligonucleotide
augaacauuagcagaaccu

SEQ ID NO: 1310810 - RNA, 19 nt, Artificial Sequence
  Description of Artificial Sequence: Synthetic oligonucleotide
uugcagauucccaaaccac

SEQ ID NO: 1310811 - RNA, 19 nt, Artificial Sequence
  Description of Artificial Sequence: Synthetic oligonucleotide
cuaguuagcuguguagccc

SEQ ID NO: 1310812 - RNA, 19 nt, Artificial Sequence
  Description of Artificial Sequence: Synthetic oligonucleotide
auuaccagguuuucuuccu

SEQ ID NO: 1310813 - RNA, 19 nt, Artificial Sequence
  Description of Artificial Sequence: Synthetic oligonucleotide
aggugaacuaguauuacca

SEQ ID NO: 1310814 - RNA, 19 nt, Artificial Sequence
  Description of Artificial Sequence: Synthetic oligonucleotide
cacuaguuagcuguguagc

SEQ ID NO: 1310815 - RNA, 19 nt, Artificial Sequence
  Description of Artificial Sequence: Synthetic oligonucleotide
agaccuuacgagcugaaua

SEQ ID NO: 1310816 - RNA, 19 nt, Artificial Sequence
  Description of Artificial Sequence: Synthetic oligonucleotide
aucauagucccgucacuag

SEQ ID NO: 1310817 - RNA, 19 nt, Artificial Sequence
  Description of Artificial Sequence: Synthetic oligonucleotide
uauaauuauugggaagaau

SEQ ID NO: 1310818 - RNA, 19 nt, Artificial Sequence
  Description of Artificial Sequence: Synthetic oligonucleotide
cagguuuacuaugaugugc

SEQ ID NO: 1310819 - RNA, 19 nt, Artificial Sequence
  Description of Artificial Sequence: Synthetic oligonucleotide
ugcgaaccaucauuaaacu

SEQ ID NO: 1310820 - RNA, 19 nt, Artificial Sequence
  Description of Artificial Sequence: Synthetic oligonucleotide
uuagcaugguccauauaua

SEQ ID NO: 1310821 - RNA, 19 nt, Artificial Sequence
  Description of Artificial Sequence: Synthetic oligonucleotide
acuaguauuaccagguuuu

SEQ ID NO: 1310822 - RNA, 19 nt, Artificial Sequence
  Description of Artificial Sequence: Synthetic oligonucleotide
ggguaauaaacagugauca

SEQ ID NO: 1310823 - RNA, 19 nt, Artificial Sequence
  Description of Artificial Sequence: Synthetic oligonucleotide
gugacccucauuagcaugg

SEQ ID NO: 1310824 - RNA, 19 nt, Artificial Sequence
  Description of Artificial Sequence: Synthetic oligonucleotide
uaugaugugcagucauagu

SEQ ID NO: 1310825 - RNA, 19 nt, Artificial Sequence
  Description of Artificial Sequence: Synthetic oligonucleotide
cauaccuaguugucugacc

SEQ ID NO: 1310826 - RNA, 19 nt, Artificial Sequence
  Description of Artificial Sequence: Synthetic oligonucleotide
cauaaaaccaaaccucgaa

SEQ ID NO: 1310827 - RNA, 19 nt, Artificial Sequence
  Description of Artificial Sequence: Synthetic oligonucleotide
uucacauguccuucagaug

SEQ ID NO: 1310828 - RNA, 19 nt, Artificial Sequence
  Description of Artificial Sequence: Synthetic oligonucleotide
gugauuggaacuucuuuuc

SEQ ID NO: 1310829 - RNA, 19 nt, Artificial Sequence
  Description of Artificial Sequence: Synthetic oligonucleotide
cacuagauaucugaagaac

SEQ ID NO: 1310830 - RNA, 19 nt, Artificial Sequence
  Description of Artificial Sequence: Synthetic oligonucleotide
aggacuugaauuaaugaaa

SEQ ID NO: 1310831 - RNA, 19 nt, Artificial Sequence
  Description of Artificial Sequence: Synthetic oligonucleotide
ugucugaccaucuggugau

SEQ ID NO: 1310832 - RNA, 19 nt, Artificial Sequence
  Description of Artificial Sequence: Synthetic oligonucleotide
uaaugaaacuuaggaguug

SEQ ID NO: 1310833 - RNA, 19 nt, Artificial Sequence
  Description of Artificial Sequence: Synthetic oligonucleotide
gaaaucucugcuuggguua

SEQ ID NO: 1310834 - RNA, 19 nt, Artificial Sequence
  Description of Artificial Sequence: Synthetic oligonucleotide
uucguaaggaagguuucug

SEQ ID NO: 1310835 - RNA, 19 nt, Artificial Sequence
  Description of Artificial Sequence: Synthetic oligonucleotide
aguuucuccuagacaaugg

SEQ ID NO: 1310836 - RNA, 19 nt, Artificial Sequence
  Description of Artificial Sequence: Synthetic oligonucleotide
agugaucauagucccguca

SEQ ID NO: 1310837 - RNA, 19 nt, Artificial Sequence
  Description of Artificial Sequence: Synthetic oligonucleotide
uuggaaaugccgcacuauu

SEQ ID NO: 1310838 - RNA, 19 nt, Artificial Sequence
  Description of Artificial Sequence: Synthetic oligonucleotide
caucauuaaacugaaccca

SEQ ID NO: 1310839 - RNA, 19 nt, Artificial Sequence
  Description of Artificial Sequence: Synthetic oligonucleotide
ugcucguugaugcuugcuc

SEQ ID NO: 1310840 - RNA, 19 nt, Artificial Sequence
  Description of Artificial Sequence: Synthetic oligonucleotide
uuuagaccuuacgagcuga

SEQ ID NO: 1310841 - RNA, 19 nt, Artificial Sequence
  Description of Artificial Sequence: Synthetic oligonucleotide
aacuaacggaagacacccc

SEQ ID NO: 1310842 - RNA, 19 nt, Artificial Sequence
  Description of Artificial Sequence: Synthetic oligonucleotide
aucgguuuugugcucauua

SEQ ID NO: 1310843 - RNA, 19 nt, Artificial Sequence
  Description of Artificial Sequence: Synthetic oligonucleotide
ugcagucauaguaaacuuu

SEQ ID NO: 1310844 - RNA, 19 nt, Artificial Sequence
  Description of Artificial Sequence: Synthetic oligonucleotide
aguauaagauuuaccagau

SEQ ID NO: 1310845 - RNA, 19 nt, Artificial Sequence
  Description of Artificial Sequence: Synthetic oligonucleotide
gacaauggugauuggaacu

SEQ ID NO: 1310846 - RNA, 19 nt, Artificial Sequence
  Description of Artificial Sequence: Synthetic oligonucleotide
acaucacaaggauggaaga

SEQ ID NO: 1310847 - RNA, 19 nt, Artificial Sequence
  Description of Artificial Sequence: Synthetic oligonucleotide
ugccgcacuauucaugcuc

SEQ ID NO: 1310848 - RNA, 19 nt, Artificial Sequence
  Description of Artificial Sequence: Synthetic oligonucleotide
agguuuacuaugaugugca

SEQ ID NO: 1310849 - RNA, 19 nt, Artificial Sequence
  Description of Artificial Sequence: Synthetic oligonucleotide
gagauguaaugcuucguaa

SEQ ID NO: 1310850 - RNA, 19 nt, Artificial Sequence
  Description of Artificial Sequence: Synthetic oligonucleotide
ucacccuuugaguagcuua

SEQ ID NO: 1310851 - RNA, 19 nt, Artificial Sequence
  Description of Artificial Sequence: Synthetic oligonucleotide
ggugaacuaguauuaccag

SEQ ID NO: 1310852 - RNA, 19 nt, Artificial Sequence
  Description of Artificial Sequence: Synthetic oligonucleotide
uaguaaacuuugucguacu

SEQ ID NO: 1310853 - RNA, 19 nt, Artificial Sequence
  Description of Artificial Sequence: Synthetic oligonucleotide
gggaguuuuagaccuuacg

SEQ ID NO: 1310854 - RNA, 19 nt, Artificial Sequence
  Description of Artificial Sequence: Synthetic oligonucleotide
uaaggcuuuaggugaacua

SEQ ID NO: 1310855 - RNA, 19 nt, Artificial Sequence
  Description of Artificial Sequence: Synthetic oligonucleotide
uuaggugaacuaguauuac

SEQ ID NO: 1310856 - RNA, 19 nt, Artificial Sequence
  Description of Artificial Sequence: Synthetic oligonucleotide
uguguagcccaaccaacau

SEQ ID NO: 1310857 - RNA, 19 nt, Artificial Sequence
  Description of Artificial Sequence: Synthetic oligonucleotide
aaauagggaaaagguaguu

SEQ ID NO: 1310858 - RNA, 19 nt, Artificial Sequence
  Description of Artificial Sequence: Synthetic oligonucleotide
agcaguagaaggauugugu

SEQ ID NO: 1310859 - RNA, 19 nt, Artificial Sequence
  Description of Artificial Sequence: Synthetic oligonucleotide
ggaaaugccgcacuauuca

SEQ ID NO: 1310860 - RNA, 19 nt, Artificial Sequence
  Description of Artificial Sequence: Synthetic oligonucleotide
gcaagggugguuuaucagc

SEQ ID NO: 1310861 - RNA, 19 nt, Artificial Sequence
  Description of Artificial Sequence: Synthetic oligonucleotide
guagaaggauuguguagug

SEQ ID NO: 1310862 - RNA, 19 nt, Artificial Sequence
  Description of Artificial Sequence: Synthetic oligonucleotide
gagcaaucaaaggagaugu

SEQ ID NO: 1310863 - RNA, 19 nt, Artificial Sequence
  Description of Artificial Sequence: Synthetic oligonucleotide
ucauuagcaugguccauau

SEQ ID NO: 1310864 - RNA, 19 nt, Artificial Sequence
  Description of Artificial Sequence: Synthetic oligonucleotide
gaaggauuguguaguggug

SEQ ID NO: 1310865 - RNA, 19 nt, Artificial Sequence
  Description of Artificial Sequence: Synthetic oligonucleotide
agcuguguagcccaaccaa

SEQ ID NO: 1310866 - RNA, 19 nt, Artificial Sequence
  Description of Artificial Sequence: Synthetic oligonucleotide
uggaagcauacugauauuu

SEQ ID NO: 1310867 - RNA, 19 nt, Artificial Sequence
  Description of Artificial Sequence: Synthetic oligonucleotide
uccacuaguuagcugugua

SEQ ID NO: 1310868 - RNA, 19 nt, Artificial Sequence
  Description of Artificial Sequence: Synthetic oligonucleotide
aacggaagacaccccugcu

SEQ ID NO: 1310869 - RNA, 19 nt, Artificial Sequence
  Description of Artificial Sequence: Synthetic oligonucleotide
ugaccaucuggugaugugu

SEQ ID NO: 1310870 - RNA, 19 nt, Artificial Sequence
  Description of Artificial Sequence: Synthetic oligonucleotide
uguaucuacugauguuguc

SEQ ID NO: 1310871 - RNA, 19 nt, Artificial Sequence
  Description of Artificial Sequence: Synthetic oligonucleotide
agguaguuucuccuagaca

SEQ ID NO: 1310872 - RNA, 19 nt, Artificial Sequence
  Description of Artificial Sequence: Synthetic oligonucleotide
gcagucauaguaaacuuug

SEQ ID NO: 1310873 - RNA, 19 nt, Artificial Sequence
  Description of Artificial Sequence: Synthetic oligonucleotide
cuaacggaagacaccccug

SEQ ID NO: 1310874 - RNA, 19 nt, Artificial Sequence
  Description of Artificial Sequence: Synthetic oligonucleotide
uguuggaaaugccgcacua

SEQ ID NO: 1310875 - RNA, 19 nt, Artificial Sequence
  Description of Artificial Sequence: Synthetic oligonucleotide
gggaagaaugaagagcucc

SEQ ID NO: 1310876 - RNA, 19 nt, Artificial Sequence
  Description of Artificial Sequence: Synthetic oligonucleotide
aguugucugaccaucuggu

SEQ ID NO: 1310877 - RNA, 19 nt, Artificial Sequence
  Description of Artificial Sequence: Synthetic oligonucleotide
aaccucgaaaucagcacca

SEQ ID NO: 1310878 - RNA, 19 nt, Artificial Sequence
  Description of Artificial Sequence: Synthetic oligonucleotide
gcacuauucaugcucaauc

SEQ ID NO: 1310879 - RNA, 19 nt, Artificial Sequence
  Description of Artificial Sequence: Synthetic oligonucleotide
gcugauuuaggaagacucg

SEQ ID NO: 1310880 - RNA, 19 nt, Artificial Sequence
  Description of Artificial Sequence: Synthetic oligonucleotide
aggaagguuucuggugacc

SEQ ID NO: 1310881 - RNA, 19 nt, Artificial Sequence
  Description of Artificial Sequence: Synthetic oligonucleotide
cgaaccaucauuaaacuga

SEQ ID NO: 1310882 - RNA, 19 nt, Artificial Sequence
  Description of Artificial Sequence: Synthetic oligonucleotide
gauauuuccgccaguauuu

SEQ ID NO: 1310883 - RNA, 19 nt, Artificial Sequence
  Description of Artificial Sequence: Synthetic oligonucleotide
uccauaccuaguugucuga

SEQ ID NO: 1310884 - RNA, 19 nt, Artificial Sequence
  Description of Artificial Sequence: Synthetic oligonucleotide
gaaccuggaaaucucugcu

SEQ ID NO: 1310885 - RNA, 19 nt, Artificial Sequence
  Description of Artificial Sequence: Synthetic oligonucleotide
cauuuagcauaucuuguaa

SEQ ID NO: 1310886 - RNA, 19 nt, Artificial Sequence
  Description of Artificial Sequence: Synthetic oligonucleotide
gaagagaaacuugcuccug

SEQ ID NO: 1310887 - RNA, 19 nt, Artificial Sequence
  Description of Artificial Sequence: Synthetic oligonucleotide
acugauauuuccgccagua

SEQ ID NO: 1310888 - RNA, 19 nt, Artificial Sequence
  Description of Artificial Sequence: Synthetic oligonucleotide
uagucccgucacuagauau

SEQ ID NO: 1310889 - RNA, 19 nt, Artificial Sequence
  Description of Artificial Sequence: Synthetic oligonucleotide
uuagcagaaccuggaaauc

SEQ ID NO: 1310890 - RNA, 19 nt, Artificial Sequence
  Description of Artificial Sequence: Synthetic oligonucleotide
ggugguuuaucagcaagag

SEQ ID NO: 1310891 - RNA, 19 nt, Artificial Sequence
  Description of Artificial Sequence: Synthetic oligonucleotide
cuucacauguccuucagau

SEQ ID NO: 1310892 - RNA, 19 nt, Artificial Sequence
  Description of Artificial Sequence: Synthetic oligonucleotide
cuguuguaccauuuccauc

SEQ ID NO: 1310893 - RNA, 19 nt, Artificial Sequence
  Description of Artificial Sequence: Synthetic oligonucleotide
ucguacucagcuugguuua

SEQ ID NO: 1310894 - RNA, 19 nt, Artificial Sequence
  Description of Artificial Sequence: Synthetic oligonucleotide
accaaaccucgaaaucagc

SEQ ID NO: 1310895 - RNA, 19 nt, Artificial Sequence
  Description of Artificial Sequence: Synthetic oligonucleotide
cacuuuacuugaaagccaa

SEQ ID NO: 1310896 - RNA, 19 nt, Artificial Sequence
  Description of Artificial Sequence: Synthetic oligonucleotide
agucccgucacuagauauc

SEQ ID NO: 1310897 - RNA, 19 nt, Artificial Sequence
  Description of Artificial Sequence: Synthetic oligonucleotide
agcucuuguugaauaaucu

SEQ ID NO: 1310898 - RNA, 19 nt, Artificial Sequence
  Description of Artificial Sequence: Synthetic oligonucleotide
uuagaccuuacgagcugaa

SEQ ID NO: 1310899 - RNA, 19 nt, Artificial Sequence
  Description of Artificial Sequence: Synthetic oligonucleotide
gaagguuucuggugaccca

SEQ ID NO: 1310900 - RNA, 19 nt, Artificial Sequence
  Description of Artificial Sequence: Synthetic oligonucleotide
gcauacugauauuuccgcc

SEQ ID NO: 1310901 - RNA, 19 nt, Artificial Sequence
  Description of Artificial Sequence: Synthetic oligonucleotide
guaucuacugauguugucu

SEQ ID NO: 1310902 - RNA, 19 nt, Artificial Sequence
  Description of Artificial Sequence: Synthetic oligonucleotide
auaagugauuuugggaguu

SEQ ID NO: 1310903 - RNA, 19 nt, Artificial Sequence
  Description of Artificial Sequence: Synthetic oligonucleotide
ggaagguuucuggugaccc

SEQ ID NO: 1310904 - RNA, 19 nt, Artificial Sequence
  Description of Artificial Sequence: Synthetic oligonucleotide
cucguugaugcuugcucac

SEQ ID NO: 1310905 - RNA, 19 nt, Artificial Sequence
  Description of Artificial Sequence: Synthetic oligonucleotide
gaaccaucauuaaacugaa

SEQ ID NO: 1310906 - RNA, 19 nt, Artificial Sequence
  Description of Artificial Sequence: Synthetic oligonucleotide
ugcucacccuuugaguagc

SEQ ID NO: 1310907 - RNA, 19 nt, Artificial Sequence
  Description of Artificial Sequence: Synthetic oligonucleotide
ucugaccaucuggugaugu

SEQ ID NO: 1310908 - RNA, 19 nt, Artificial Sequence
  Description of Artificial Sequence: Synthetic oligonucleotide
ugucguacucagcuugguu

SEQ ID NO: 1310909 - RNA, 19 nt, Artificial Sequence
  Description of Artificial Sequence: Synthetic oligonucleotide
acggugacccucauuagca

SEQ ID NO: 1310910 - RNA, 19 nt, Artificial Sequence
  Description of Artificial Sequence: Synthetic oligonucleotide
guuuuagaccuuacgagcu

SEQ ID NO: 1310911 - RNA, 19 nt, Artificial Sequence
  Description of Artificial Sequence: Synthetic oligonucleotide
ugggaguuuuagaccuuac

SEQ ID NO: 1310912 - RNA, 19 nt, Artificial Sequence
  Description of Artificial Sequence: Synthetic oligonucleotide
agcuguaucuacugauguu

SEQ ID NO: 1310913 - RNA, 19 nt, Artificial Sequence
  Description of Artificial Sequence: Synthetic oligonucleotide
guuaucgguuuugugcuca

SEQ ID NO: 1310914 - RNA, 19 nt, Artificial Sequence
  Description of Artificial Sequence: Synthetic oligonucleotide
ugaugcuugcucacccuuu

SEQ ID NO: 1310915 - RNA, 19 nt, Artificial Sequence
  Description of Artificial Sequence: Synthetic oligonucleotide
ccaaaugagcauucauuug

SEQ ID NO: 1310916 - RNA, 19 nt, Artificial Sequence
  Description of Artificial Sequence: Synthetic oligonucleotide
aagggugguuuaucagcaa

SEQ ID NO: 1310917 - RNA, 19 nt, Artificial Sequence
  Description of Artificial Sequence: Synthetic oligonucleotide
gcucuuguugaauaaucuc

SEQ ID NO: 1310918 - RNA, 19 nt, Artificial Sequence
  Description of Artificial Sequence: Synthetic oligonucleotide
ucguugaugcuugcucacc

SEQ ID NO: 1310919 - RNA, 19 nt, Artificial Sequence
  Description of Artificial Sequence: Synthetic oligonucleotide
cuaguauuaccagguuuuc

SEQ ID NO: 1310920 - RNA, 19 nt, Artificial Sequence
  Description of Artificial Sequence: Synthetic oligonucleotide
caaauagggaaaagguagu

SEQ ID NO: 1310921 - RNA, 19 nt, Artificial Sequence
  Description of Artificial Sequence: Synthetic oligonucleotide
cuagauaucugaagaacuu

SEQ ID NO: 1310922 - RNA, 19 nt, Artificial Sequence
  Description of Artificial Sequence: Synthetic oligonucleotide
ugccuguguuggaaaugcc

SEQ ID NO: 1310923 - RNA, 19 nt, Artificial Sequence
  Description of Artificial Sequence: Synthetic oligonucleotide
acacggugacccucauuag

SEQ ID NO: 1310924 - RNA, 19 nt, Artificial Sequence
  Description of Artificial Sequence: Synthetic oligonucleotide
gcuuggacaaccagcugcg

SEQ ID NO: 1310925 - RNA, 19 nt, Artificial Sequence
  Description of Artificial Sequence: Synthetic oligonucleotide
gccuguguuggaaaugccg

SEQ ID NO: 1310926 - RNA, 19 nt, Artificial Sequence
  Description of Artificial Sequence: Synthetic oligonucleotide
cacuauucaugcucaaucu

SEQ ID NO: 1310927 - RNA, 19 nt, Artificial Sequence
  Description of Artificial Sequence: Synthetic oligonucleotide
ggagauguaaugcuucgua

SEQ ID NO: 1310928 - RNA, 19 nt, Artificial Sequence
  Description of Artificial Sequence: Synthetic oligonucleotide
ggcaagggugguuuaucag

SEQ ID NO: 1310929 - RNA, 19 nt, Artificial Sequence
  Description of Artificial Sequence: Synthetic oligonucleotide
ggugacccaguguugacuc

SEQ ID NO: 1310930 - RNA, 19 nt, Artificial Sequence
  Description of Artificial Sequence: Synthetic oligonucleotide
ggugacccucauuagcaug

SEQ ID NO: 1310931 - RNA, 19 nt, Artificial Sequence
  Description of Artificial Sequence: Synthetic oligonucleotide
gauaaggcuuuaggugaac

SEQ ID NO: 1310932 - RNA, 19 nt, Artificial Sequence
  Description of Artificial Sequence: Synthetic oligonucleotide
agcuugguuuacaggauga

SEQ ID NO: 1310933 - RNA, 19 nt, Artificial Sequence
  Description of Artificial Sequence: Synthetic oligonucleotide
acuuugucguacucagcuu

SEQ ID NO: 1310934 - RNA, 19 nt, Artificial Sequence
  Description of Artificial Sequence: Synthetic oligonucleotide
gguuuacuaugaugugcag

SEQ ID NO: 1310935 - RNA, 19 nt, Artificial Sequence
  Description of Artificial Sequence: Synthetic oligonucleotide
acggaagacaccccugcuu

SEQ ID NO: 1310936 - RNA, 19 nt, Artificial Sequence
  Description of Artificial Sequence: Synthetic oligonucleotide
gcgaaccaucauuaaacug

SEQ ID NO: 1310937 - RNA, 19 nt, Artificial Sequence
  Description of Artificial Sequence: Synthetic oligonucleotide
uuuguguaucuuggcucca

SEQ ID NO: 1310938 - RNA, 19 nt, Artificial Sequence
  Description of Artificial Sequence: Synthetic oligonucleotide
ugaguagcuuagguccaca

SEQ ID NO: 1310939 - RNA, 19 nt, Artificial Sequence
  Description of Artificial Sequence: Synthetic oligonucleotide
aagacaccugaaaggacuu

SEQ ID NO: 1310940 - RNA, 19 nt, Artificial Sequence
  Description of Artificial Sequence: Synthetic oligonucleotide
uuugggaguuuuagaccuu

SEQ ID NO: 1310941 - RNA, 19 nt, Artificial Sequence
  Description of Artificial Sequence: Synthetic oligonucleotide
ggaagagagacacuguaau

SEQ ID NO: 1310942 - RNA, 19 nt, Artificial Sequence
  Description of Artificial Sequence: Synthetic oligonucleotide
uggugacccaguguugacu

SEQ ID NO: 1310943 - RNA, 19 nt, Artificial Sequence
  Description of Artificial Sequence: Synthetic oligonucleotide
guugucuguaggcaagggu

SEQ ID NO: 1310944 - RNA, 19 nt, Artificial Sequence
  Description of Artificial Sequence: Synthetic oligonucleotide
acuuaggaguuggauuaga

SEQ ID NO: 1310945 - RNA, 19 nt, Artificial Sequence
  Description of Artificial Sequence: Synthetic oligonucleotide
gucguacucagcuugguuu

SEQ ID NO: 1310946 - RNA, 19 nt, Artificial Sequence
  Description of Artificial Sequence: Synthetic oligonucleotide
uugaguagcuuagguccac

SEQ ID NO: 1310947 - RNA, 19 nt, Artificial Sequence
  Description of Artificial Sequence: Synthetic oligonucleotide
uugggaguuuuagaccuua

SEQ ID NO: 1310948 - RNA, 19 nt, Artificial Sequence
  Description of Artificial Sequence: Synthetic oligonucleotide
ggaagcauacugauauuuc

SEQ ID NO: 1310949 - RNA, 19 nt, Artificial Sequence
  Description of Artificial Sequence: Synthetic oligonucleotide
auacuuccucugaaucuag

SEQ ID NO: 1310950 - RNA, 19 nt, Artificial Sequence
  Description of Artificial Sequence: Synthetic oligonucleotide
gcaaucaaaggagauguaa

SEQ ID NO: 1310951 - RNA, 19 nt, Artificial Sequence
  Description of Artificial Sequence: Synthetic oligonucleotide
uaggcaagggugguuuauc

SEQ ID NO: 1310952 - RNA, 19 nt, Artificial Sequence
  Description of Artificial Sequence: Synthetic oligonucleotide
gcgucuggucugcaaauag

SEQ ID NO: 1310953 - RNA, 19 nt, Artificial Sequence
  Description of Artificial Sequence: Synthetic oligonucleotide
acuccauacuccucuucuu

SEQ ID NO: 1310954 - RNA, 19 nt, Artificial Sequence
  Description of Artificial Sequence: Synthetic oligonucleotide
uuaucgguuuugugcucau

SEQ ID NO: 1310955 - RNA, 19 nt, Artificial Sequence
  Description of Artificial Sequence: Synthetic oligonucleotide
aggcuuuaggugaacuagu

SEQ ID NO: 1310956 - RNA, 19 nt, Artificial Sequence
  Description of Artificial Sequence: Synthetic oligonucleotide
aggagauguaaugcuucgu

SEQ ID NO: 1310957 - RNA, 19 nt, Artificial Sequence
  Description of Artificial Sequence: Synthetic oligonucleotide
gaaaugccgcacuauucau

SEQ ID NO: 1310958 - RNA, 19 nt, Artificial Sequence
  Description of Artificial Sequence: Synthetic oligonucleotide
auagucccgucacuagaua

SEQ ID NO: 1310959 - RNA, 19 nt, Artificial Sequence
  Description of Artificial Sequence: Synthetic oligonucleotide
caucuggugauguguaacu

SEQ ID NO: 1310960 - RNA, 19 nt, Artificial Sequence
  Description of Artificial Sequence: Synthetic oligonucleotide
ggguuaucgguuuugugcu

SEQ ID NO: 1310961 - RNA, 19 nt, Artificial Sequence
  Description of Artificial Sequence: Synthetic oligonucleotide
ugaggcgucuggucugcaa

SEQ ID NO: 1310962 - RNA, 19 nt, Artificial Sequence
  Description of Artificial Sequence: Synthetic oligonucleotide
gcucguugaugcuugcuca

SEQ ID NO: 1310963 - RNA, 19 nt, Artificial Sequence
  Description of Artificial Sequence: Synthetic oligonucleotide
cuucagcuguagcaguaga

SEQ ID NO: 1310964 - RNA, 19 nt, Artificial Sequence
  Description of Artificial Sequence: Synthetic oligonucleotide
uaagugauuuugggaguuu

SEQ ID NO: 1310965 - RNA, 19 nt, Artificial Sequence
  Description of Artificial Sequence: Synthetic oligonucleotide
ggacaaccagcugcgaacc

SEQ ID NO: 1310966 - RNA, 19 nt, Artificial Sequence
  Description of Artificial Sequence: Synthetic oligonucleotide
gguggugauaaggcuuuag

SEQ ID NO: 1310967 - RNA, 19 nt, Artificial Sequence
  Description of Artificial Sequence: Synthetic oligonucleotide
cgucacuagauaucugaag

SEQ ID NO: 1310968 - RNA, 19 nt, Artificial Sequence
  Description of Artificial Sequence: Synthetic oligonucleotide
cuuccucugaaucuaggau

SEQ ID NO: 1310969 - RNA, 19 nt, Artificial Sequence
  Description of Artificial Sequence: Synthetic oligonucleotide
cugaaaggacuugaauuaa

SEQ ID NO: 1310970 - RNA, 19 nt, Artificial Sequence
  Description of Artificial Sequence: Synthetic oligonucleotide
gcugcgaaccaucauuaaa

SEQ ID NO: 1310971 - RNA, 19 nt, Artificial Sequence
  Description of Artificial Sequence: Synthetic oligonucleotide
uuguguaucuuggcuccau

SEQ ID NO: 1310972 - RNA, 19 nt, Artificial Sequence
  Description of Artificial Sequence: Synthetic oligonucleotide
uagaccuuacgagcugaau

SEQ ID NO: 1310973 - RNA, 19 nt, Artificial Sequence
  Description of Artificial Sequence: Synthetic oligonucleotide
caauggugauuggaacuuc

SEQ ID NO: 1310974 - RNA, 19 nt, Artificial Sequence
  Description of Artificial Sequence: Synthetic oligonucleotide
accucgaaaucagcaccag

SEQ ID NO: 1310975 - RNA, 19 nt, Artificial Sequence
  Description of Artificial Sequence: Synthetic oligonucleotide
agacaccugaaaggacuug

SEQ ID NO: 1310976 - RNA, 19 nt, Artificial Sequence
  Description of Artificial Sequence: Synthetic oligonucleotide
ccucgaaaucagcaccagg

SEQ ID NO: 1310977 - RNA, 19 nt, Artificial Sequence
  Description of Artificial Sequence: Synthetic oligonucleotide
aaccacuguuguaccauuu

SEQ ID NO: 1310978 - RNA, 19 nt, Artificial Sequence
  Description of Artificial Sequence: Synthetic oligonucleotide
uugucguacucagcuuggu

SEQ ID NO: 1310979 - RNA, 19 nt, Artificial Sequence
  Description of Artificial Sequence: Synthetic oligonucleotide
gacaaccagcugcgaacca

SEQ ID NO: 1310980 - RNA, 19 nt, Artificial Sequence
  Description of Artificial Sequence: Synthetic oligonucleotide
gacccucauuagcaugguc

SEQ ID NO: 1310981 - RNA, 19 nt, Artificial Sequence
  Description of Artificial Sequence: Synthetic oligonucleotide
auauuuccgccaguauuuu

SEQ ID NO: 1310982 - RNA, 19 nt, Artificial Sequence
  Description of Artificial Sequence: Synthetic oligonucleotide
cccgucacuagauaucuga

SEQ ID NO: 1310983 - RNA, 19 nt, Artificial Sequence
  Description of Artificial Sequence: Synthetic oligonucleotide
cuguaucuacugauguugu

SEQ ID NO: 1310984 - RNA, 19 nt, Artificial Sequence
  Description of Artificial Sequence: Synthetic oligonucleotide
agcugcgaaccaucauuaa

SEQ ID NO: 1310985 - RNA, 19 nt, Artificial Sequence
  Description of Artificial Sequence: Synthetic oligonucleotide
cguugaugcuugcucaccc

SEQ ID NO: 1310986 - RNA, 19 nt, Artificial Sequence
  Description of Artificial Sequence: Synthetic oligonucleotide
guuucucccaaaugagcau

SEQ ID NO: 1310987 - RNA, 19 nt, Artificial Sequence
  Description of Artificial Sequence: Synthetic oligonucleotide
guugaugcuugcucacccu

SEQ ID NO: 1310988 - RNA, 19 nt, Artificial Sequence
  Description of Artificial Sequence: Synthetic oligonucleotide
ggaugaacauuagcagaac

SEQ ID NO: 1310989 - RNA, 19 nt, Artificial Sequence
  Description of Artificial Sequence: Synthetic oligonucleotide
guuagcuguguagcccaac

SEQ ID NO: 1310990 - RNA, 19 nt, Artificial Sequence
  Description of Artificial Sequence: Synthetic oligonucleotide
accagcugcgaaccaucau

SEQ ID NO: 1310991 - RNA, 19 nt, Artificial Sequence
  Description of Artificial Sequence: Synthetic oligonucleotide
cagcugcgaaccaucauua

SEQ ID NO: 1310992 - RNA, 19 nt, Artificial Sequence
  Description of Artificial Sequence: Synthetic oligonucleotide
gaacuaguauuaccagguu

SEQ ID NO: 1310993 - RNA, 19 nt, Artificial Sequence
  Description of Artificial Sequence: Synthetic oligonucleotide
ugacccucauuagcauggu

SEQ ID NO: 1310994 - RNA, 19 nt, Artificial Sequence
  Description of Artificial Sequence: Synthetic oligonucleotide
agugccaagcagacacggu

SEQ ID NO: 1310995 - RNA, 19 nt, Artificial Sequence
  Description of Artificial Sequence: Synthetic oligonucleotide
aguggcuguguggccaagu

SEQ ID NO: 1310996 - RNA, 19 nt, Artificial Sequence
  Description of Artificial Sequence: Synthetic oligonucleotide
accuuacgagcugaauaaa

SEQ ID NO: 1310997 - RNA, 19 nt, Artificial Sequence
  Description of Artificial Sequence: Synthetic oligonucleotide
gaguuggauuagaaaacau

SEQ ID NO: 1310998 - RNA, 19 nt, Artificial Sequence
  Description of Artificial Sequence: Synthetic oligonucleotide
ccuagacaauggugauugg

SEQ ID NO: 1310999 - RNA, 19 nt, Artificial Sequence
  Description of Artificial Sequence: Synthetic oligonucleotide
gguuaucgguuuugugcuc

SEQ ID NO: 1311000 - RNA, 19 nt, Artificial Sequence
  Description of Artificial Sequence: Synthetic oligonucleotide
gugcagucauaguaaacuu

SEQ ID NO: 1311001 - RNA, 19 nt, Artificial Sequence
  Description of Artificial Sequence: Synthetic oligonucleotide
guagcaguagaaggauugu

SEQ ID NO: 1311002 - RNA, 19 nt, Artificial Sequence
  Description of Artificial Sequence: Synthetic oligonucleotide
augccgcacuauucaugcu

SEQ ID NO: 1311003 - RNA, 19 nt, Artificial Sequence
  Description of Artificial Sequence: Synthetic oligonucleotide
cagucauaguaaacuuugu

SEQ ID NO: 1311004 - RNA, 19 nt, Artificial Sequence
  Description of Artificial Sequence: Synthetic oligonucleotide
auggugauuggaacuucuu

SEQ ID NO: 1311005 - RNA, 19 nt, Artificial Sequence
  Description of Artificial Sequence: Synthetic oligonucleotide
gucccgucacuagauaucu

SEQ ID NO: 1311006 - RNA, 19 nt, Artificial Sequence
  Description of Artificial Sequence: Synthetic oligonucleotide
gcuucguaaggaagguuuc

SEQ ID NO: 1311007 - RNA, 19 nt, Artificial Sequence
  Description of Artificial Sequence: Synthetic oligonucleotide
aggauggaagagagacacu

SEQ ID NO: 1311008 - RNA, 19 nt, Artificial Sequence
  Description of Artificial Sequence: Synthetic oligonucleotide
guuggaaaugccgcacuau

SEQ ID NO: 1311009 - RNA, 19 nt, Artificial Sequence
  Description of Artificial Sequence: Synthetic oligonucleotide
cuucguaaggaagguuucu

SEQ ID NO: 1311010 - RNA, 19 nt, Artificial Sequence
  Description of Artificial Sequence: Synthetic oligonucleotide
ccauaccuaguugucugac

SEQ ID NO: 1311011 - RNA, 19 nt, Artificial Sequence
  Description of Artificial Sequence: Synthetic oligonucleotide
guguagcccaaccaacauu

SEQ ID NO: 1311012 - RNA, 19 nt, Artificial Sequence
  Description of Artificial Sequence: Synthetic oligonucleotide
ggcuuuaggugaacuagua

SEQ ID NO: 1311013 - RNA, 19 nt, Artificial Sequence
  Description of Artificial Sequence: Synthetic oligonucleotide
cucccaaaugagcauucau

SEQ ID NO: 1311014 - RNA, 19 nt, Artificial Sequence
  Description of Artificial Sequence: Synthetic oligonucleotide
gccgcacuauucaugcuca

SEQ ID NO: 1311015 - RNA, 19 nt, Artificial Sequence
  Description of Artificial Sequence: Synthetic oligonucleotide
gcuuagguccacaggaggu

SEQ ID NO: 1311016 - RNA, 19 nt, Artificial Sequence
  Description of Artificial Sequence: Synthetic oligonucleotide
ccaagcagacacggugacc

SEQ ID NO: 1311017 - RNA, 19 nt, Artificial Sequence
  Description of Artificial Sequence: Synthetic oligonucleotide
aguuagcuguguagcccaa

SEQ ID NO: 1311018 - RNA, 19 nt, Artificial Sequence
  Description of Artificial Sequence: Synthetic oligonucleotide
cauuagcaugguccauaua

SEQ ID NO: 1311019 - RNA, 19 nt, Artificial Sequence
  Description of Artificial Sequence: Synthetic oligonucleotide
ggagguggugauaaggcuu

SEQ ID NO: 1311020 - RNA, 19 nt, Artificial Sequence
  Description of Artificial Sequence: Synthetic oligonucleotide
ccuuacgagcugaauaaau

SEQ ID NO: 1311021 - RNA, 19 nt, Artificial Sequence
  Description of Artificial Sequence: Synthetic oligonucleotide
cuuggacaaccagcugcga

SEQ ID NO: 1311022 - RNA, 19 nt, Artificial Sequence
  Description of Artificial Sequence: Synthetic oligonucleotide
gcuccacuaguuagcugug

SEQ ID NO: 1311023 - RNA, 19 nt, Artificial Sequence
  Description of Artificial Sequence: Synthetic oligonucleotide
ccgucacuagauaucugaa

SEQ ID NO: 1311024 - RNA, 19 nt, Artificial Sequence
  Description of Artificial Sequence: Synthetic oligonucleotide
gagcauucauuugcagauu

SEQ ID NO: 1311025 - RNA, 19 nt, Artificial Sequence
  Description of Artificial Sequence: Synthetic oligonucleotide
cuggaagcauacugauauu

SEQ ID NO: 1311026 - RNA, 19 nt, Artificial Sequence
  Description of Artificial Sequence: Synthetic oligonucleotide
cccuuugaguagcuuaggu

SEQ ID NO: 1311027 - RNA, 19 nt, Artificial Sequence
  Description of Artificial Sequence: Synthetic oligonucleotide
cuccacuaguuagcugugu

SEQ ID NO: 1311028 - RNA, 19 nt, Artificial Sequence
  Description of Artificial Sequence: Synthetic oligonucleotide
gacccaguguugacuccau

SEQ ID NO: 1311029 - RNA, 19 nt, Artificial Sequence
  Description of Artificial Sequence: Synthetic oligonucleotide
cgguuuugugcucauuagu

SEQ ID NO: 1311030 - RNA, 19 nt, Artificial Sequence
  Description of Artificial Sequence: Synthetic oligonucleotide
cugcucguugaugcuugcu

SEQ ID NO: 1311031 - RNA, 19 nt, Artificial Sequence
  Description of Artificial Sequence: Synthetic oligonucleotide
cucacccuuugaguagcuu

SEQ ID NO: 1311032 - RNA, 19 nt, Artificial Sequence
  Description of Artificial Sequence: Synthetic oligonucleotide
ccgcacuauucaugcucaa

SEQ ID NO: 1311033 - RNA, 19 nt, Artificial Sequence
  Description of Artificial Sequence: Synthetic oligonucleotide
gcucacccuuugaguagcu

SEQ ID NO: 1311034 - RNA, 19 nt, Artificial Sequence
  Description of Artificial Sequence: Synthetic oligonucleotide
cgcacuauucaugcucaau

SEQ ID NO: 1311035 - RNA, 19 nt, Artificial Sequence
  Description of Artificial Sequence: Synthetic oligonucleotide
aaaagcaggaaagcuaacc

SEQ ID NO: 1311036 - RNA, 19 nt, Artificial Sequence
  Description of Artificial Sequence: Synthetic oligonucleotide
acaacugaaauucugcggg

SEQ ID NO: 1311037 - RNA, 19 nt, Artificial Sequence
  Description of Artificial Sequence: Synthetic oligonucleotide
aggaaagcuaaccuaaccc

SEQ ID NO: 1311038 - RNA, 19 nt, Artificial Sequence
  Description of Artificial Sequence: Synthetic oligonucleotide
aaugguugaagacaggcga

SEQ ID NO: 1311039 - RNA, 19 nt, Artificial Sequence
  Description of Artificial Sequence: Synthetic oligonucleotide
uguugcuacagugagaagg

SEQ ID NO: 1311040 - RNA, 19 nt, Artificial Sequence
  Description of Artificial Sequence: Synthetic oligonucleotide
uugaucaugcgucucaggg

SEQ ID NO: 1311041 - RNA, 19 nt, Artificial Sequence
  Description of Artificial Sequence: Synthetic oligonucleotide
ugauggucgauccacauug

SEQ ID NO: 1311042 - RNA, 19 nt, Artificial Sequence
  Description of Artificial Sequence: Synthetic oligonucleotide
aguaacgucugguaggugg

SEQ ID NO: 1311043 - RNA, 19 nt, Artificial Sequence
  Description of Artificial Sequence: Synthetic oligonucleotide
uuuacagggguguuuaaag

SEQ ID NO: 1311044 - RNA, 19 nt, Artificial Sequence
  Description of Artificial Sequence: Synthetic oligonucleotide
auugggaaugcucugccgc

SEQ ID NO: 1311045 - RNA, 19 nt, Artificial Sequence
  Description of Artificial Sequence: Synthetic oligonucleotide
cuuaguaacgucugguagg

SEQ ID NO: 1311046 - RNA, 19 nt, Artificial Sequence
  Description of Artificial Sequence: Synthetic oligonucleotide
acggacaaauuucagcugc

SEQ ID NO: 1311047 - RNA, 19 nt, Artificial Sequence
  Description of Artificial Sequence: Synthetic oligonucleotide
aaagcaggaaagcuaaccu

SEQ ID NO: 1311048 - RNA, 19 nt, Artificial Sequence
  Description of Artificial Sequence: Synthetic oligonucleotide
agcacggacaaauuucagc

SEQ ID NO: 1311049 - RNA, 19 nt, Artificial Sequence
  Description of Artificial Sequence: Synthetic oligonucleotide
acgaaugugcgguacaggg

SEQ ID NO: 1311050 - RNA, 19 nt, Artificial Sequence
  Description of Artificial Sequence: Synthetic oligonucleotide
gaucaugcgucucaggggc

SEQ ID NO: 1311051 - RNA, 19 nt, Artificial Sequence
  Description of Artificial Sequence: Synthetic oligonucleotide
uuacagggguguuuaaagg

SEQ ID NO: 1311052 - RNA, 19 nt, Artificial Sequence
  Description of Artificial Sequence: Synthetic oligonucleotide
uguugggcagcauacagca

SEQ ID NO: 1311053 - RNA, 19 nt, Artificial Sequence
  Description of Artificial Sequence: Synthetic oligonucleotide
uucgcuaggcggcugagag

SEQ ID NO: 1311054 - RNA, 19 nt, Artificial Sequence
  Description of Artificial Sequence: Synthetic oligonucleotide
aagacaggcgaacggaugu

SEQ ID NO: 1311055 - RNA, 19 nt, Artificial Sequence
  Description of Artificial Sequence: Synthetic oligonucleotide
acauugggaaugcucugcc

SEQ ID NO: 1311056 - RNA, 19 nt, Artificial Sequence
  Description of Artificial Sequence: Synthetic oligonucleotide
uuuaaaggguccagggaga

SEQ ID NO: 1311057 - RNA, 19 nt, Artificial Sequence
  Description of Artificial Sequence: Synthetic oligonucleotide
gaaggguccaaguucacca

SEQ ID NO: 1311058 - RNA, 19 nt, Artificial Sequence
  Description of Artificial Sequence: Synthetic oligonucleotide
aaguucagguucgcuaggc

SEQ ID NO: 1311059 - RNA, 19 nt, Artificial Sequence
  Description of Artificial Sequence: Synthetic oligonucleotide
uccgggaacacaccacugg

SEQ ID NO: 1311060 - RNA, 19 nt, Artificial Sequence
  Description of Artificial Sequence: Synthetic oligonucleotide
cuuuggcugaccuggacgc

SEQ ID NO: 1311061 - RNA, 19 nt, Artificial Sequence
  Description of Artificial Sequence: Synthetic oligonucleotide
ugauugcugggccugaggu

SEQ ID NO: 1311062 - RNA, 19 nt, Artificial Sequence
  Description of Artificial Sequence: Synthetic oligonucleotide
uggucgauccacauugggc

SEQ ID NO: 1311063 - RNA, 19 nt, Artificial Sequence
  Description of Artificial Sequence: Synthetic oligonucleotide
guugcuacagugagaaggg

SEQ ID NO: 1311064 - RNA, 19 nt, Artificial Sequence
  Description of Artificial Sequence: Synthetic oligonucleotide
ugugccugugacaccaaag

SEQ ID NO: 1311065 - RNA, 19 nt, Artificial Sequence
  Description of Artificial Sequence: Synthetic oligonucleotide
aggcgaacggauguuagcc

SEQ ID NO: 1311066 - RNA, 19 nt, Artificial Sequence
  Description of Artificial Sequence: Synthetic oligonucleotide
ggugguguaaaaucuguag

SEQ ID NO: 1311067 - RNA, 19 nt, Artificial Sequence
  Description of Artificial Sequence: Synthetic oligonucleotide
ugcgcuuccgggaacacac

SEQ ID NO: 1311068 - RNA, 19 nt, Artificial Sequence
  Description of Artificial Sequence: Synthetic oligonucleotide
uuguugaucaugcgucuca

SEQ ID NO: 1311069 - RNA, 19 nt, Artificial Sequence
  Description of Artificial Sequence: Synthetic oligonucleotide
ugcaucuaggaguggcugg

SEQ ID NO: 1311070 - RNA, 19 nt, Artificial Sequence
  Description of Artificial Sequence: Synthetic oligonucleotide
ggagcuaccaucugggcag

SEQ ID NO: 1311071 - RNA, 19 nt, Artificial Sequence
  Description of Artificial Sequence: Synthetic oligonucleotide
gcuaaccuaacccaggccc

SEQ ID NO: 1311072 - RNA, 19 nt, Artificial Sequence
  Description of Artificial Sequence: Synthetic oligonucleotide
gaaugugcgguacagggaa

SEQ ID NO: 1311073 - RNA, 19 nt, Artificial Sequence
  Description of Artificial Sequence: Synthetic oligonucleotide
ugguaggugguguaaaauc

SEQ ID NO: 1311074 - RNA, 19 nt, Artificial Sequence
  Description of Artificial Sequence: Synthetic oligonucleotide
ugaugcaucugcugcagcu

SEQ ID NO: 1311075 - RNA, 19 nt, Artificial Sequence
  Description of Artificial Sequence: Synthetic oligonucleotide
agaaggguccaaguucacc

SEQ ID NO: 1311076 - RNA, 19 nt, Artificial Sequence
  Description of Artificial Sequence: Synthetic oligonucleotide
ccauggauggccaucauag

SEQ ID NO: 1311077 - RNA, 19 nt, Artificial Sequence
  Description of Artificial Sequence: Synthetic oligonucleotide
uuaguaacgucugguaggu

SEQ ID NO: 1311078 - RNA, 19 nt, Artificial Sequence
  Description of Artificial Sequence: Synthetic oligonucleotide
ugcagaaagggguuggcau

SEQ ID NO: 1311079 - RNA, 19 nt, Artificial Sequence
  Description of Artificial Sequence: Synthetic oligonucleotide
ugcggugaggggacuaggg

SEQ ID NO: 1311080 - RNA, 19 nt, Artificial Sequence
  Description of Artificial Sequence: Synthetic oligonucleotide
guuguugcuacagugagaa

SEQ ID NO: 1311081 - RNA, 19 nt, Artificial Sequence
  Description of Artificial Sequence: Synthetic oligonucleotide
ugcuacagugagaaggguc

SEQ ID NO: 1311082 - RNA, 19 nt, Artificial Sequence
  Description of Artificial Sequence: Synthetic oligonucleotide
uguuugguugggagaacug

SEQ ID NO: 1311083 - RNA, 19 nt, Artificial Sequence
  Description of Artificial Sequence: Synthetic oligonucleotide
caggaaagcuaaccuaacc

SEQ ID NO: 1311084 - RNA, 19 nt, Artificial Sequence
  Description of Artificial Sequence: Synthetic oligonucleotide
ugagcaacuggugauugcu

SEQ ID NO: 1311085 - RNA, 19 nt, Artificial Sequence
  Description of Artificial Sequence: Synthetic oligonucleotide
guaaaagcaggaaagcuaa

SEQ ID NO: 1311086 - RNA, 19 nt, Artificial Sequence
  Description of Artificial Sequence: Synthetic oligonucleotide
caaugcuuaguaacgucug

SEQ ID NO: 1311087 - RNA, 19 nt, Artificial Sequence
  Description of Artificial Sequence: Synthetic oligonucleotide
aguaaaguaaaagcaggaa

SEQ ID NO: 1311088 - RNA, 19 nt, Artificial Sequence
  Description of Artificial Sequence: Synthetic oligonucleotide
uugggguccaaccuggcua

SEQ ID NO: 1311089 - RNA, 19 nt, Artificial Sequence
  Description of Artificial Sequence: Synthetic oligonucleotide
aacggauguuagccaggac

SEQ ID NO: 1311090 - RNA, 19 nt, Artificial Sequence
  Description of Artificial Sequence: Synthetic oligonucleotide
caacugaaauucugcgggg

SEQ ID NO: 1311091 - RNA, 19 nt, Artificial Sequence
  Description of Artificial Sequence: Synthetic oligonucleotide
gcuuaguaacgucugguag

SEQ ID NO: 1311092 - RNA, 19 nt, Artificial Sequence
  Description of Artificial Sequence: Synthetic oligonucleotide
guagccagaaggaaguuca

SEQ ID NO: 1311093 - RNA, 19 nt, Artificial Sequence
  Description of Artificial Sequence: Synthetic oligonucleotide
gaucagguggacagugccg

SEQ ID NO: 1311094 - RNA, 19 nt, Artificial Sequence
  Description of Artificial Sequence: Synthetic oligonucleotide
ggaaagcuaaccuaaccca

SEQ ID NO: 1311095 - RNA, 19 nt, Artificial Sequence
  Description of Artificial Sequence: Synthetic oligonucleotide
aaaccugcgcuuccgggaa

SEQ ID NO: 1311096 - RNA, 19 nt, Artificial Sequence
  Description of Artificial Sequence: Synthetic oligonucleotide
caguaaaguaaaagcagga

SEQ ID NO: 1311097 - RNA, 19 nt, Artificial Sequence
  Description of Artificial Sequence: Synthetic oligonucleotide
ugugcgguacagggaaugg

SEQ ID NO: 1311098 - RNA, 19 nt, Artificial Sequence
  Description of Artificial Sequence: Synthetic oligonucleotide
gguguuuaaaggguccagg

SEQ ID NO: 1311099 - RNA, 19 nt, Artificial Sequence
  Description of Artificial Sequence: Synthetic oligonucleotide
ucugagcaacuggugauug

SEQ ID NO: 1311100 - RNA, 19 nt, Artificial Sequence
  Description of Artificial Sequence: Synthetic oligonucleotide
agggguguuuaaagggucc

SEQ ID NO: 1311101 - RNA, 19 nt, Artificial Sequence
  Description of Artificial Sequence: Synthetic oligonucleotide
uuucaggggacaccgcuua

SEQ ID NO: 1311102 - RNA, 19 nt, Artificial Sequence
  Description of Artificial Sequence: Synthetic oligonucleotide
aaggcugcggugaggggac

SEQ ID NO: 1311103 - RNA, 19 nt, Artificial Sequence
  Description of Artificial Sequence: Synthetic oligonucleotide
ugcuuaguaacgucuggua

SEQ ID NO: 1311104 - RNA, 19 nt, Artificial Sequence
  Description of Artificial Sequence: Synthetic oligonucleotide
ugcgguacagggaaugguu

SEQ ID NO: 1311105 - RNA, 19 nt, Artificial Sequence
  Description of Artificial Sequence: Synthetic oligonucleotide
aaauucugcgggguacgug

SEQ ID NO: 1311106 - RNA, 19 nt, Artificial Sequence
  Description of Artificial Sequence: Synthetic oligonucleotide
uuggcugaccuggacgccg

SEQ ID NO: 1311107 - RNA, 19 nt, Artificial Sequence
  Description of Artificial Sequence: Synthetic oligonucleotide
uacgugcugucacugggcu

SEQ ID NO: 1311108 - RNA, 19 nt, Artificial Sequence
  Description of Artificial Sequence: Synthetic oligonucleotide
gcuacagugagaagggucc

SEQ ID NO: 1311109 - RNA, 19 nt, Artificial Sequence
  Description of Artificial Sequence: Synthetic oligonucleotide
aggggacuagggcaggaag

SEQ ID NO: 1311110 - RNA, 19 nt, Artificial Sequence
  Description of Artificial Sequence: Synthetic oligonucleotide
agugccguuguugcuacag

SEQ ID NO: 1311111 - RNA, 19 nt, Artificial Sequence
  Description of Artificial Sequence: Synthetic oligonucleotide
cauacagcauugguccagg

SEQ ID NO: 1311112 - RNA, 19 nt, Artificial Sequence
  Description of Artificial Sequence: Synthetic oligonucleotide
cauggauggccaucauagc

SEQ ID NO: 1311113 - RNA, 19 nt, Artificial Sequence
  Description of Artificial Sequence: Synthetic oligonucleotide
gauguuagccaggacugca

SEQ ID NO: 1311114 - RNA, 19 nt, Artificial Sequence
  Description of Artificial Sequence: Synthetic oligonucleotide
cacugaucuccaguggugg

SEQ ID NO: 1311115 - RNA, 19 nt, Artificial Sequence
  Description of Artificial Sequence: Synthetic oligonucleotide
gagggcuugugccugugac

SEQ ID NO: 1311116 - RNA, 19 nt, Artificial Sequence
  Description of Artificial Sequence: Synthetic oligonucleotide
cacauugggaaugcucugc

SEQ ID NO: 1311117 - RNA, 19 nt, Artificial Sequence
  Description of Artificial Sequence: Synthetic oligonucleotide
gaugcaucugcugcagcug

SEQ ID NO: 1311118 - RNA, 19 nt, Artificial Sequence
  Description of Artificial Sequence: Synthetic oligonucleotide
ugggguugcaccugcggcu

SEQ ID NO: 1311119 - RNA, 19 nt, Artificial Sequence
  Description of Artificial Sequence: Synthetic oligonucleotide
guggaugaugcaucugcug

SEQ ID NO: 1311120 - RNA, 19 nt, Artificial Sequence
  Description of Artificial Sequence: Synthetic oligonucleotide
uguagccagaaggaaguuc

SEQ ID NO: 1311121 - RNA, 19 nt, Artificial Sequence
  Description of Artificial Sequence: Synthetic oligonucleotide
aggucaugcacuggugcac

SEQ ID NO: 1311122 - RNA, 19 nt, Artificial Sequence
  Description of Artificial Sequence: Synthetic oligonucleotide
aaccuaacccaggcccucg

SEQ ID NO: 1311123 - RNA, 19 nt, Artificial Sequence
  Description of Artificial Sequence: Synthetic oligonucleotide
gauggucgauccacauugg

SEQ ID NO: 1311124 - RNA, 19 nt, Artificial Sequence
  Description of Artificial Sequence: Synthetic oligonucleotide
cugcuguugggcagcauac

SEQ ID NO: 1311125 - RNA, 19 nt, Artificial Sequence
  Description of Artificial Sequence: Synthetic oligonucleotide
gaguuguggugguugguuc

SEQ ID NO: 1311126 - RNA, 19 nt, Artificial Sequence
  Description of Artificial Sequence: Synthetic oligonucleotide
cugggguugcaccugcggc

SEQ ID NO: 1311127 - RNA, 19 nt, Artificial Sequence
  Description of Artificial Sequence: Synthetic oligonucleotide
cuaccaucugggcagccug

SEQ ID NO: 1311128 - RNA, 19 nt, Artificial Sequence
  Description of Artificial Sequence: Synthetic oligonucleotide
uccaaccuggcuacuucac

SEQ ID NO: 1311129 - RNA, 19 nt, Artificial Sequence
  Description of Artificial Sequence: Synthetic oligonucleotide
gacgccgggagcuaccauc

SEQ ID NO: 1311130 - RNA, 19 nt, Artificial Sequence
  Description of Artificial Sequence: Synthetic oligonucleotide
gugauugcugggccugagg

SEQ ID NO: 1311131 - RNA, 19 nt, Artificial Sequence
  Description of Artificial Sequence: Synthetic oligonucleotide
agaagccaaugcuuaguaa

SEQ ID NO: 1311132 - RNA, 19 nt, Artificial Sequence
  Description of Artificial Sequence: Synthetic oligonucleotide
gaaggcugcggugagggga

SEQ ID NO: 1311133 - RNA, 19 nt, Artificial Sequence
  Description of Artificial Sequence: Synthetic oligonucleotide
auacagcauugguccaggg

SEQ ID NO: 1311134 - RNA, 19 nt, Artificial Sequence
  Description of Artificial Sequence: Synthetic oligonucleotide
gcuacuucaccuugcagca

SEQ ID NO: 1311135 - RNA, 19 nt, Artificial Sequence
  Description of Artificial Sequence: Synthetic oligonucleotide
aucagguggacagugccgu

SEQ ID NO: 1311136 - RNA, 19 nt, Artificial Sequence
  Description of Artificial Sequence: Synthetic oligonucleotide
gggacaacugaaauucugc

SEQ ID NO: 1311137 - RNA, 19 nt, Artificial Sequence
  Description of Artificial Sequence: Synthetic oligonucleotide
ggaggucaugcacuggugc

SEQ ID NO: 1311138 - RNA, 19 nt, Artificial Sequence
  Description of Artificial Sequence: Synthetic oligonucleotide
acugauggucgauccacau

SEQ ID NO: 1311139 - RNA, 19 nt, Artificial Sequence
  Description of Artificial Sequence: Synthetic oligonucleotide
uucaggggacaccgcuuag

SEQ ID NO: 1311140 - RNA, 19 nt, Artificial Sequence
  Description of Artificial Sequence: Synthetic oligonucleotide
cacgauaggugggccaugg

SEQ ID NO: 1311141 - RNA, 19 nt, Artificial Sequence
  Description of Artificial Sequence: Synthetic oligonucleotide
augcuuaguaacgucuggu

SEQ ID NO: 1311142 - RNA, 19 nt, Artificial Sequence
  Description of Artificial Sequence: Synthetic oligonucleotide
cacauugggcucugagcag

SEQ ID NO: 1311143 - RNA, 19 nt, Artificial Sequence
  Description of Artificial Sequence: Synthetic oligonucleotide
caggcgaacggauguuagc

SEQ ID NO: 1311144 - RNA, 19 nt, Artificial Sequence
  Description of Artificial Sequence: Synthetic oligonucleotide
aaccugcgcuuccgggaac

SEQ ID NO: 1311145 - RNA, 19 nt, Artificial Sequence
  Description of Artificial Sequence: Synthetic oligonucleotide
accaaaggcuggcuuugug

SEQ ID NO: 1311146 - RNA, 19 nt, Artificial Sequence
  Description of Artificial Sequence: Synthetic oligonucleotide
ugaccuggacgccgggagc

SEQ ID NO: 1311147 - RNA, 19 nt, Artificial Sequence
  Description of Artificial Sequence: Synthetic oligonucleotide
acagggguguuuaaagggu

SEQ ID NO: 1311148 - RNA, 19 nt, Artificial Sequence
  Description of Artificial Sequence: Synthetic oligonucleotide
caaaccugcgcuuccggga

SEQ ID NO: 1311149 - RNA, 19 nt, Artificial Sequence
  Description of Artificial Sequence: Synthetic oligonucleotide
ggugguggcguggugaugc

SEQ ID NO: 1311150 - RNA, 19 nt, Artificial Sequence
  Description of Artificial Sequence: Synthetic oligonucleotide
uggaccaccaucggagcac

SEQ ID NO: 1311151 - RNA, 19 nt, Artificial Sequence
  Description of Artificial Sequence: Synthetic oligonucleotide
agggguuggcaucguacug

SEQ ID NO: 1311152 - RNA, 19 nt, Artificial Sequence
  Description of Artificial Sequence: Synthetic oligonucleotide
cacacuagggagguccuug

SEQ ID NO: 1311153 - RNA, 19 nt, Artificial Sequence
  Description of Artificial Sequence: Synthetic oligonucleotide
accaucggagcacggacaa

SEQ ID NO: 1311154 - RNA, 19 nt, Artificial Sequence
  Description of Artificial Sequence: Synthetic oligonucleotide
cagggguguuuaaaggguc

SEQ ID NO: 1311155 - RNA, 19 nt, Artificial Sequence
  Description of Artificial Sequence: Synthetic oligonucleotide
gcgaacggauguuagccag

SEQ ID NO: 1311156 - RNA, 19 nt, Artificial Sequence
  Description of Artificial Sequence: Synthetic oligonucleotide
ugguugguucugagcaacu

SEQ ID NO: 1311157 - RNA, 19 nt, Artificial Sequence
  Description of Artificial Sequence: Synthetic oligonucleotide
gaacggauguuagccagga

SEQ ID NO: 1311158 - RNA, 19 nt, Artificial Sequence
  Description of Artificial Sequence: Synthetic oligonucleotide
guacugccacugauggucg

SEQ ID NO: 1311159 - RNA, 19 nt, Artificial Sequence
  Description of Artificial Sequence: Synthetic oligonucleotide
gcacggacaaauuucagcu

SEQ ID NO: 1311160 - RNA, 19 nt, Artificial Sequence
  Description of Artificial Sequence: Synthetic oligonucleotide
agguggacagugccguugu

SEQ ID NO: 1311161 - RNA, 19 nt, Artificial Sequence
  Description of Artificial Sequence: Synthetic oligonucleotide
ucugcgggguacgugcugu

SEQ ID NO: 1311162 - RNA, 19 nt, Artificial Sequence
  Description of Artificial Sequence: Synthetic oligonucleotide
cacgaaugugcgguacagg

SEQ ID NO: 1311163 - RNA, 19 nt, Artificial Sequence
  Description of Artificial Sequence: Synthetic oligonucleotide
ccacauugggcucugagca

SEQ ID NO: 1311164 - RNA, 19 nt, Artificial Sequence
  Description of Artificial Sequence: Synthetic oligonucleotide
agccaaugcuuaguaacgu

SEQ ID NO: 1311165 - RNA, 19 nt, Artificial Sequence
  Description of Artificial Sequence: Synthetic oligonucleotide
agccagcugggcucaugac

SEQ ID NO: 1311166 - RNA, 19 nt, Artificial Sequence
  Description of Artificial Sequence: Synthetic oligonucleotide
acaggcgaacggauguuag

SEQ ID NO: 1311167 - RNA, 19 nt, Artificial Sequence
  Description of Artificial Sequence: Synthetic oligonucleotide
augugcgguacagggaaug

SEQ ID NO: 1311168 - RNA, 19 nt, Artificial Sequence
  Description of Artificial Sequence: Synthetic oligonucleotide
ucgauccacauugggcucu

SEQ ID NO: 1311169 - RNA, 19 nt, Artificial Sequence
  Description of Artificial Sequence: Synthetic oligonucleotide
agcuggcacgaaugugcgg

SEQ ID NO: 1311170 - RNA, 19 nt, Artificial Sequence
  Description of Artificial Sequence: Synthetic oligonucleotide
cuuguugaucaugcgucuc

SEQ ID NO: 1311171 - RNA, 19 nt, Artificial Sequence
  Description of Artificial Sequence: Synthetic oligonucleotide
cuugucgaucuuguugauc

SEQ ID NO: 1311172 - RNA, 19 nt, Artificial Sequence
  Description of Artificial Sequence: Synthetic oligonucleotide
ccuugcagcacauugggaa

SEQ ID NO: 1311173 - RNA, 19 nt, Artificial Sequence
  Description of Artificial Sequence: Synthetic oligonucleotide
gcucaugacagagcugggg

SEQ ID NO: 1311174 - RNA, 19 nt, Artificial Sequence
  Description of Artificial Sequence: Synthetic oligonucleotide
cucaugacagagcuggggu

SEQ ID NO: 1311175 - RNA, 19 nt, Artificial Sequence
  Description of Artificial Sequence: Synthetic oligonucleotide
gccgggagcuaccaucugg

SEQ ID NO: 1311176 - RNA, 19 nt, Artificial Sequence
  Description of Artificial Sequence: Synthetic oligonucleotide
cugcaucuaggaguggcug

SEQ ID NO: 1311177 - RNA, 19 nt, Artificial Sequence
  Description of Artificial Sequence: Synthetic oligonucleotide
gagcacggacaaauuucag

SEQ ID NO: 1311178 - RNA, 19 nt, Artificial Sequence
  Description of Artificial Sequence: Synthetic oligonucleotide
cuggugauugcugggccug

SEQ ID NO: 1311179 - RNA, 19 nt, Artificial Sequence
  Description of Artificial Sequence: Synthetic oligonucleotide
ccguuguugcuacagugag

SEQ ID NO: 1311180 - RNA, 19 nt, Artificial Sequence
  Description of Artificial Sequence: Synthetic oligonucleotide
ugcggcugcuggaccacca

SEQ ID NO: 1311181 - RNA, 19 nt, Artificial Sequence
  Description of Artificial Sequence: Synthetic oligonucleotide
ccgggagcuaccaucuggg

SEQ ID NO: 1311182 - RNA, 19 nt, Artificial Sequence
  Description of Artificial Sequence: Synthetic oligonucleotide
uaacgucugguagguggug

SEQ ID NO: 1311183 - RNA, 19 nt, Artificial Sequence
  Description of Artificial Sequence: Synthetic oligonucleotide
ucuugucgaucuuguugau

SEQ ID NO: 1311184 - RNA, 19 nt, Artificial Sequence
  Description of Artificial Sequence: Synthetic oligonucleotide
uacagugagaaggguccaa

SEQ ID NO: 1311185 - RNA, 19 nt, Artificial Sequence
  Description of Artificial Sequence: Synthetic oligonucleotide
gggagcuaccaucugggca

SEQ ID NO: 1311186 - RNA, 19 nt, Artificial Sequence
  Description of Artificial Sequence: Synthetic oligonucleotide
cguacugccacugaugguc

SEQ ID NO: 1311187 - RNA, 19 nt, Artificial Sequence
  Description of Artificial Sequence: Synthetic oligonucleotide
guacgugcugucacugggc

SEQ ID NO: 1311188 - RNA, 19 nt, Artificial Sequence
  Description of Artificial Sequence: Synthetic oligonucleotide
ugcuguugggcagcauaca

SEQ ID NO: 1311189 - RNA, 19 nt, Artificial Sequence
  Description of Artificial Sequence: Synthetic oligonucleotide
guccaaccuggcuacuuca

SEQ ID NO: 1311190 - RNA, 19 nt, Artificial Sequence
  Description of Artificial Sequence: Synthetic oligonucleotide
ucguacugccacugauggu

SEQ ID NO: 1311191 - RNA, 19 nt, Artificial Sequence
  Description of Artificial Sequence: Synthetic oligonucleotide
guucugagcaacuggugau

SEQ ID NO: 1311192 - RNA, 19 nt, Artificial Sequence
  Description of Artificial Sequence: Synthetic oligonucleotide
gggguuggcaucguacugc

SEQ ID NO: 1311193 - RNA, 19 nt, Artificial Sequence
  Description of Artificial Sequence: Synthetic oligonucleotide
gguaggugguguaaaaucu

SEQ ID NO: 1311194 - RNA, 19 nt, Artificial Sequence
  Description of Artificial Sequence: Synthetic oligonucleotide
ggaacuugggguccaaccu

SEQ ID NO: 1311195 - RNA, 19 nt, Artificial Sequence
  Description of Artificial Sequence: Synthetic oligonucleotide
ucagguucgcuaggcggcu

SEQ ID NO: 1311196 - RNA, 19 nt, Artificial Sequence
  Description of Artificial Sequence: Synthetic oligonucleotide
uaaccuaacccaggcccuc

SEQ ID NO: 1311197 - RNA, 19 nt, Artificial Sequence
  Description of Artificial Sequence: Synthetic oligonucleotide
cugggcucaugacagagcu

SEQ ID NO: 1311198 - RNA, 19 nt, Artificial Sequence
  Description of Artificial Sequence: Synthetic oligonucleotide
gcagaucagguggacagug

SEQ ID NO: 1311199 - RNA, 19 nt, Artificial Sequence
  Description of Artificial Sequence: Synthetic oligonucleotide
gucgauccacauugggcuc

SEQ ID NO: 1311200 - RNA, 19 nt, Artificial Sequence
  Description of Artificial Sequence: Synthetic oligonucleotide
ggggacuagggcaggaagc

SEQ ID NO: 1311201 - RNA, 19 nt, Artificial Sequence
  Description of Artificial Sequence: Synthetic oligonucleotide
accaccaucggagcacgga

SEQ ID NO: 1311202 - RNA, 19 nt, Artificial Sequence
  Description of Artificial Sequence: Synthetic oligonucleotide
agguucgcuaggcggcuga

SEQ ID NO: 1311203 - RNA, 19 nt, Artificial Sequence
  Description of Artificial Sequence: Synthetic oligonucleotide
ucaugcgucucaggggcuc

SEQ ID NO: 1311204 - RNA, 19 nt, Artificial Sequence
  Description of Artificial Sequence: Synthetic oligonucleotide
caugcgucucaggggcucg

SEQ ID NO: 1311205 - RNA, 19 nt, Artificial Sequence
  Description of Artificial Sequence: Synthetic oligonucleotide
ggacaaauuucagcugcug

SEQ ID NO: 1311206 - RNA, 19 nt, Artificial Sequence
  Description of Artificial Sequence: Synthetic oligonucleotide
ccaaccuggcuacuucacc

SEQ ID NO: 1311207 - RNA, 19 nt, Artificial Sequence
  Description of Artificial Sequence: Synthetic oligonucleotide
ggggccggagcugacauug

SEQ ID NO: 1311208 - RNA, 19 nt, Artificial Sequence
  Description of Artificial Sequence: Synthetic oligonucleotide
cuggcuacuucaccuugca

SEQ ID NO: 1311209 - RNA, 19 nt, Artificial Sequence
  Description of Artificial Sequence: Synthetic oligonucleotide
gccaaugcuuaguaacguc

SEQ ID NO: 1311210 - RNA, 19 nt, Artificial Sequence
  Description of Artificial Sequence: Synthetic oligonucleotide
aaugugcgguacagggaau

SEQ ID NO: 1311211 - RNA, 19 nt, Artificial Sequence
  Description of Artificial Sequence: Synthetic oligonucleotide
gcaucuaggaguggcuggc

SEQ ID NO: 1311212 - RNA, 19 nt, Artificial Sequence
  Description of Artificial Sequence: Synthetic oligonucleotide
uugcuacagugagaagggu

SEQ ID NO: 1311213 - RNA, 19 nt, Artificial Sequence
  Description of Artificial Sequence: Synthetic oligonucleotide
cuggacgccgggagcuacc

SEQ ID NO: 1311214 - RNA, 19 nt, Artificial Sequence
  Description of Artificial Sequence: Synthetic oligonucleotide
gguccaaccuggcuacuuc

SEQ ID NO: 1311215 - RNA, 19 nt, Artificial Sequence
  Description of Artificial Sequence: Synthetic oligonucleotide
cacugauggucgauccaca

SEQ ID NO: 1311216 - RNA, 19 nt, Artificial Sequence
  Description of Artificial Sequence: Synthetic oligonucleotide
uggcacgaaugugcgguac

SEQ ID NO: 1311217 - RNA, 19 nt, Artificial Sequence
  Description of Artificial Sequence: Synthetic oligonucleotide
ccuggcuacuucaccuugc

SEQ ID NO: 1311218 - RNA, 19 nt, Artificial Sequence
  Description of Artificial Sequence: Synthetic oligonucleotide
ugggccauggauggccauc

SEQ ID NO: 1311219 - RNA, 19 nt, Artificial Sequence
  Description of Artificial Sequence: Synthetic oligonucleotide
caccaucggagcacggaca

SEQ ID NO: 1311220 - RNA, 19 nt, Artificial Sequence
  Description of Artificial Sequence: Synthetic oligonucleotide
ugcgggguacgugcuguca

SEQ ID NO: 1311221 - RNA, 19 nt, Artificial Sequence
  Description of Artificial Sequence: Synthetic oligonucleotide
caccugggguugcaccugc

SEQ ID NO: 1311222 - RNA, 19 nt, Artificial Sequence
  Description of Artificial Sequence: Synthetic oligonucleotide
caggcacacugaucuccag

SEQ ID NO: 1311223 - RNA, 19 nt, Artificial Sequence
  Description of Artificial Sequence: Synthetic oligonucleotide
gcggugaggggacuagggc

SEQ ID NO: 1311224 - RNA, 19 nt, Artificial Sequence
  Description of Artificial Sequence: Synthetic oligonucleotide
aggcccucgaagaagccaa

SEQ ID NO: 1311225 - RNA, 19 nt, Artificial Sequence
  Description of Artificial Sequence: Synthetic oligonucleotide
acgauaggugggccaugga

SEQ ID NO: 1311226 - RNA, 19 nt, Artificial Sequence
  Description of Artificial Sequence: Synthetic oligonucleotide
uaguaacgucugguaggug

SEQ ID NO: 1311227 - RNA, 19 nt, Artificial Sequence
  Description of Artificial Sequence: Synthetic oligonucleotide
accuaacccaggcccucga

SEQ ID NO: 1311228 - RNA, 19 nt, Artificial Sequence
  Description of Artificial Sequence: Synthetic oligonucleotide
gccaucauagcuggcacga

SEQ ID NO: 1311229 - RNA, 19 nt, Artificial Sequence
  Description of Artificial Sequence: Synthetic oligonucleotide
auguuagccaggacugcau

SEQ ID NO: 1311230 - RNA, 19 nt, Artificial Sequence
  Description of Artificial Sequence: Synthetic oligonucleotide
cacuagggagguccuuguc

SEQ ID NO: 1311231 - RNA, 19 nt, Artificial Sequence
  Description of Artificial Sequence: Synthetic oligonucleotide
ccaaugcuuaguaacgucu

SEQ ID NO: 1311232 - RNA, 19 nt, Artificial Sequence
  Description of Artificial Sequence: Synthetic oligonucleotide
gauggccaucauagcuggc

SEQ ID NO: 1311233 - RNA, 19 nt, Artificial Sequence
  Description of Artificial Sequence: Synthetic oligonucleotide
uggacgccgggagcuacca

SEQ ID NO: 1311234 - RNA, 19 nt, Artificial Sequence
  Description of Artificial Sequence: Synthetic oligonucleotide
ggcgaacggauguuagcca

SEQ ID NO: 1311235 - RNA, 19 nt, Artificial Sequence
  Description of Artificial Sequence: Synthetic oligonucleotide
gcugcuguugggcagcaua

SEQ ID NO: 1311236 - RNA, 19 nt, Artificial Sequence
  Description of Artificial Sequence: Synthetic oligonucleotide
ggaccaccaucggagcacg

SEQ ID NO: 1311237 - RNA, 19 nt, Artificial Sequence
  Description of Artificial Sequence: Synthetic oligonucleotide
gacaggcgaacggauguua

SEQ ID NO: 1311238 - RNA, 19 nt, Artificial Sequence
  Description of Artificial Sequence: Synthetic oligonucleotide
cuacuucaccuugcagcac

SEQ ID NO: 1311239 - RNA, 19 nt, Artificial Sequence
  Description of Artificial Sequence: Synthetic oligonucleotide
cugcggugaggggacuagg

SEQ ID NO: 1311240 - RNA, 19 nt, Artificial Sequence
  Description of Artificial Sequence: Synthetic oligonucleotide
guaacgucugguagguggu

SEQ ID NO: 1311241 - RNA, 19 nt, Artificial Sequence
  Description of Artificial Sequence: Synthetic oligonucleotide
ggacacgauaggugggcca

SEQ ID NO: 1311242 - RNA, 19 nt, Artificial Sequence
  Description of Artificial Sequence: Synthetic oligonucleotide
aucgacuguggggucugca

SEQ ID NO: 1311243 - RNA, 19 nt, Artificial Sequence
  Description of Artificial Sequence: Synthetic oligonucleotide
accgcuuagaggggucagu

SEQ ID NO: 1311244 - RNA, 19 nt, Artificial Sequence
  Description of Artificial Sequence: Synthetic oligonucleotide
cgaacggauguuagccagg

SEQ ID NO: 1311245 - RNA, 19 nt, Artificial Sequence
  Description of Artificial Sequence: Synthetic oligonucleotide
gacaccgcuuagagggguc

SEQ ID NO: 1311246 - RNA, 19 nt, Artificial Sequence
  Description of Artificial Sequence: Synthetic oligonucleotide
gcgguacagggaaugguug

SEQ ID NO: 1311247 - RNA, 19 nt, Artificial Sequence
  Description of Artificial Sequence: Synthetic oligonucleotide
cugccacugauggucgauc

SEQ ID NO: 1311248 - RNA, 19 nt, Artificial Sequence
  Description of Artificial Sequence: Synthetic oligonucleotide
caucggagcacggacaaau

SEQ ID NO: 1311249 - RNA, 19 nt, Artificial Sequence
  Description of Artificial Sequence: Synthetic oligonucleotide
cugcuggaccaccaucgga

SEQ ID NO: 1311250 - RNA, 19 nt, Artificial Sequence
  Description of Artificial Sequence: Synthetic oligonucleotide
acgccgggagcuaccaucu

SEQ ID NO: 1311251 - RNA, 19 nt, Artificial Sequence
  Description of Artificial Sequence: Synthetic oligonucleotide
ggcagcauacagcauuggu

SEQ ID NO: 1311252 - RNA, 19 nt, Artificial Sequence
  Description of Artificial Sequence: Synthetic oligonucleotide
cugacugcagaaagggguu

SEQ ID NO: 1311253 - RNA, 19 nt, Artificial Sequence
  Description of Artificial Sequence: Synthetic oligonucleotide
accugcgcuuccgggaaca

SEQ ID NO: 1311254 - RNA, 19 nt, Artificial Sequence
  Description of Artificial Sequence: Synthetic oligonucleotide
cuguuugguugggagaacu

SEQ ID NO: 1311255 - RNA, 19 nt, Artificial Sequence
  Description of Artificial Sequence: Synthetic oligonucleotide
ggugauugcugggccugag

SEQ ID NO: 1311256 - RNA, 19 nt, Artificial Sequence
  Description of Artificial Sequence: Synthetic oligonucleotide
gucugguaggugguguaaa

SEQ ID NO: 1311257 - RNA, 19 nt, Artificial Sequence
  Description of Artificial Sequence: Synthetic oligonucleotide
acacgauaggugggccaug

SEQ ID NO: 1311258 - RNA, 19 nt, Artificial Sequence
  Description of Artificial Sequence: Synthetic oligonucleotide
caccgcuuagaggggucag

SEQ ID NO: 1311259 - RNA, 19 nt, Artificial Sequence
  Description of Artificial Sequence: Synthetic oligonucleotide
gggguacgugcugucacug

SEQ ID NO: 1311260 - RNA, 19 nt, Artificial Sequence
  Description of Artificial Sequence: Synthetic oligonucleotide
gcggcugagaggcaggccu

SEQ ID NO: 1311261 - RNA, 19 nt, Artificial Sequence
  Description of Artificial Sequence: Synthetic oligonucleotide
gcgggguacgugcugucac

SEQ ID NO: 1311262 - RNA, 19 nt, Artificial Sequence
  Description of Artificial Sequence: Synthetic oligonucleotide
agacaggcgaacggauguu

SEQ ID NO: 1311263 - RNA, 19 nt, Artificial Sequence
  Description of Artificial Sequence: Synthetic oligonucleotide
guugcaccugcggcugcug

SEQ ID NO: 1311264 - RNA, 19 nt, Artificial Sequence
  Description of Artificial Sequence: Synthetic oligonucleotide
gguuuucaggggacaccgc

SEQ ID NO: 1311265 - RNA, 19 nt, Artificial Sequence
  Description of Artificial Sequence: Synthetic oligonucleotide
gacaacugcuucagcuuau

SEQ ID NO: 1311266 - RNA, 19 nt, Artificial Sequence
  Description of Artificial Sequence: Synthetic oligonucleotide
gcuuccgggaacacaccac

SEQ ID NO: 1311267 - RNA, 19 nt, Artificial Sequence
  Description of Artificial Sequence: Synthetic oligonucleotide
ggcucaugacagagcuggg

SEQ ID NO: 1311268 - RNA, 19 nt, Artificial Sequence
  Description of Artificial Sequence: Synthetic oligonucleotide
gggacuagggcaggaagcu

SEQ ID NO: 1311269 - RNA, 19 nt, Artificial Sequence
  Description of Artificial Sequence: Synthetic oligonucleotide
guucgcuaggcggcugaga

SEQ ID NO: 1311270 - RNA, 19 nt, Artificial Sequence
  Description of Artificial Sequence: Synthetic oligonucleotide
ccgcuuagaggggucagug

SEQ ID NO: 1311271 - RNA, 19 nt, Artificial Sequence
  Description of Artificial Sequence: Synthetic oligonucleotide
gguuuacagggguguuuaa

SEQ ID NO: 1311272 - RNA, 19 nt, Artificial Sequence
  Description of Artificial Sequence: Synthetic oligonucleotide
aucggagcacggacaaauu

SEQ ID NO: 1311273 - RNA, 19 nt, Artificial Sequence
  Description of Artificial Sequence: Synthetic oligonucleotide
gcgucucaggggcucgaug

SEQ ID NO: 1311274 - RNA, 19 nt, Artificial Sequence
  Description of Artificial Sequence: Synthetic oligonucleotide
caucgacuguggggucugc

SEQ ID NO: 1311275 - RNA, 19 nt, Artificial Sequence
  Description of Artificial Sequence: Synthetic oligonucleotide
gccauggauggccaucaua

SEQ ID NO: 1311276 - RNA, 19 nt, Artificial Sequence
  Description of Artificial Sequence: Synthetic oligonucleotide
gguucgcuaggcggcugag

SEQ ID NO: 1311277 - RNA, 19 nt, Artificial Sequence
  Description of Artificial Sequence: Synthetic oligonucleotide
gggccauggauggccauca

SEQ ID NO: 1311278 - RNA, 19 nt, Artificial Sequence
  Description of Artificial Sequence: Synthetic oligonucleotide
gguggaugcucugggccca

SEQ ID NO: 1311279 - RNA, 19 nt, Artificial Sequence
  Description of Artificial Sequence: Synthetic oligonucleotide
cugcgggguacgugcuguc

SEQ ID NO: 1311280 - RNA, 19 nt, Artificial Sequence
  Description of Artificial Sequence: Synthetic oligonucleotide
cugauggucgauccacauu

SEQ ID NO: 1311281 - RNA, 19 nt, Artificial Sequence
  Description of Artificial Sequence: Synthetic oligonucleotide
cgaaugugcgguacaggga

SEQ ID NO: 1311282 - RNA, 19 nt, Artificial Sequence
  Description of Artificial Sequence: Synthetic oligonucleotide
gugccguuguugcuacagu

SEQ ID NO: 1311283 - RNA, 19 nt, Artificial Sequence
  Description of Artificial Sequence: Synthetic oligonucleotide
gguggcacacuagggaggu

SEQ ID NO: 1311284 - RNA, 19 nt, Artificial Sequence
  Description of Artificial Sequence: Synthetic oligonucleotide
cagggccguggaggaaggg

SEQ ID NO: 1311285 - RNA, 19 nt, Artificial Sequence
  Description of Artificial Sequence: Synthetic oligonucleotide
gcaucguacugccacugau

SEQ ID NO: 1311286 - RNA, 19 nt, Artificial Sequence
  Description of Artificial Sequence: Synthetic oligonucleotide
ccuggaggucaugcacugg

SEQ ID NO: 1311287 - RNA, 19 nt, Artificial Sequence
  Description of Artificial Sequence: Synthetic oligonucleotide
ggcugaccuggacgccggg

SEQ ID NO: 1311288 - RNA, 19 nt, Artificial Sequence
  Description of Artificial Sequence: Synthetic oligonucleotide
gugcgguacagggaauggu

SEQ ID NO: 1311289 - RNA, 19 nt, Artificial Sequence
  Description of Artificial Sequence: Synthetic oligonucleotide
cugcgcuuccgggaacaca

SEQ ID NO: 1311290 - RNA, 19 nt, Artificial Sequence
  Description of Artificial Sequence: Synthetic oligonucleotide
augcgucucaggggcucga

SEQ ID NO: 1311291 - RNA, 19 nt, Artificial Sequence
  Description of Artificial Sequence: Synthetic oligonucleotide
ggacugcaucuaggagugg

SEQ ID NO: 1311292 - RNA, 19 nt, Artificial Sequence
  Description of Artificial Sequence: Synthetic oligonucleotide
cguuguugcuacagugaga

SEQ ID NO: 1311293 - RNA, 19 nt, Artificial Sequence
  Description of Artificial Sequence: Synthetic oligonucleotide
cccggugauggugaagaca

SEQ ID NO: 1311294 - RNA, 19 nt, Artificial Sequence
  Description of Artificial Sequence: Synthetic oligonucleotide
ccuggacgccgggagcuac

SEQ ID NO: 1311295 - RNA, 19 nt, Artificial Sequence
  Description of Artificial Sequence: Synthetic oligonucleotide
accuggacgccgggagcua

SEQ ID NO: 1311296 - RNA, 19 nt, Artificial Sequence
  Description of Artificial Sequence: Synthetic oligonucleotide
ggacaccgcuuagaggggu

SEQ ID NO: 1311297 - RNA, 19 nt, Artificial Sequence
  Description of Artificial Sequence: Synthetic oligonucleotide
gcgcuuccgggaacacacc

SEQ ID NO: 1311298 - RNA, 19 nt, Artificial Sequence
  Description of Artificial Sequence: Synthetic oligonucleotide
ccuaacccaggcccucgaa

SEQ ID NO: 1311299 - RNA, 19 nt, Artificial Sequence
  Description of Artificial Sequence: Synthetic oligonucleotide
ggcacaaguccugcuguuu

SEQ ID NO: 1311300 - RNA, 19 nt, Artificial Sequence
  Description of Artificial Sequence: Synthetic oligonucleotide
ggcacacuagggagguccu

SEQ ID NO: 1311301 - RNA, 19 nt, Artificial Sequence
  Description of Artificial Sequence: Synthetic oligonucleotide
ccagggcaaucucacacuu

SEQ ID NO: 1311302 - RNA, 19 nt, Artificial Sequence
  Description of Artificial Sequence: Synthetic oligonucleotide
gugggccauggauggccau

SEQ ID NO: 1311303 - RNA, 19 nt, Artificial Sequence
  Description of Artificial Sequence: Synthetic oligonucleotide
cggacaaauuucagcugcu

SEQ ID NO: 1311304 - RNA, 19 nt, Artificial Sequence
  Description of Artificial Sequence: Synthetic oligonucleotide
cagcugcguggggcagggc

SEQ ID NO: 1311305 - RNA, 19 nt, Artificial Sequence
  Description of Artificial Sequence: Synthetic oligonucleotide
gcggggccggagcugacau

SEQ ID NO: 1311306 - RNA, 19 nt, Artificial Sequence
  Description of Artificial Sequence: Synthetic oligonucleotide
cugcguggggcagggccgu

SEQ ID NO: 1311307 - RNA, 19 nt, Artificial Sequence
  Description of Artificial Sequence: Synthetic oligonucleotide
ggguccaaccuggcuacuu

SEQ ID NO: 1311308 - RNA, 19 nt, Artificial Sequence
  Description of Artificial Sequence: Synthetic oligonucleotide
ggcugcggugaggggacua

SEQ ID NO: 1311309 - RNA, 19 nt, Artificial Sequence
  Description of Artificial Sequence: Synthetic oligonucleotide
cgggguacgugcugucacu

SEQ ID NO: 1311310 - RNA, 19 nt, Artificial Sequence
  Description of Artificial Sequence: Synthetic oligonucleotide
cgccgggagcuaccaucug

SEQ ID NO: 1311311 - RNA, 19 nt, Artificial Sequence
  Description of Artificial Sequence: Synthetic oligonucleotide
ggacgccgggagcuaccau

SEQ ID NO: 1311312 - RNA, 19 nt, Artificial Sequence
  Description of Artificial Sequence: Synthetic oligonucleotide
gcacacuagggagguccuu

SEQ ID NO: 1311313 - RNA, 19 nt, Artificial Sequence
  Description of Artificial Sequence: Synthetic oligonucleotide
aaaacgaauccucaagucc

SEQ ID NO: 1311314 - RNA, 19 nt, Artificial Sequence
  Description of Artificial Sequence: Synthetic oligonucleotide
uuuucuucaaaccaacgcg

SEQ ID NO: 1311315 - RNA, 19 nt, Artificial Sequence
  Description of Artificial Sequence: Synthetic oligonucleotide
guaaugagaauuuucaccg

SEQ ID NO: 1311316 - RNA, 19 nt, Artificial Sequence
  Description of Artificial Sequence: Synthetic oligonucleotide
aauauugggaaaguguggc

SEQ ID NO: 1311317 - RNA, 19 nt, Artificial Sequence
  Description of Artificial Sequence: Synthetic oligonucleotide
uuuaguaucaccaccaagu

SEQ ID NO: 1311318 - RNA, 19 nt, Artificial Sequence
  Description of Artificial Sequence: Synthetic oligonucleotide
augagagagaauucgaacc

SEQ ID NO: 1311319 - RNA, 19 nt, Artificial Sequence
  Description of Artificial Sequence: Synthetic oligonucleotide
uuauguuuaaauauuggga

SEQ ID NO: 1311320 - RNA, 19 nt, Artificial Sequence
  Description of Artificial Sequence: Synthetic oligonucleotide
aauggaggacacuaaaccg

SEQ ID NO: 1311321 - RNA, 19 nt, Artificial Sequence
  Description of Artificial Sequence: Synthetic oligonucleotide
guuauguuuaaauauuggg

SEQ ID NO: 1311322 - RNA, 19 nt, Artificial Sequence
  Description of Artificial Sequence: Synthetic oligonucleotide
uaauccugaacaauggagg

SEQ ID NO: 1311323 - RNA, 19 nt, Artificial Sequence
  Description of Artificial Sequence: Synthetic oligonucleotide
aaaugggagacuuuaagcu

SEQ ID NO: 1311324 - RNA, 19 nt, Artificial Sequence
  Description of Artificial Sequence: Synthetic oligonucleotide
cugaugagaacuuuaaccg

SEQ ID NO: 1311325 - RNA, 19 nt, Artificial Sequence
  Description of Artificial Sequence: Synthetic oligonucleotide
ucauuagucagcaugguca

SEQ ID NO: 1311326 - RNA, 19 nt, Artificial Sequence
  Description of Artificial Sequence: Synthetic oligonucleotide
cuuuccacgacuuuguucc

SEQ ID NO: 1311327 - RNA, 19 nt, Artificial Sequence
  Description of Artificial Sequence: Synthetic oligonucleotide
gagaauucgaaccagaguc

SEQ ID NO: 1311328 - RNA, 19 nt, Artificial Sequence
  Description of Artificial Sequence: Synthetic oligonucleotide
uguguagcagaccauaucc

SEQ ID NO: 1311329 - RNA, 19 nt, Artificial Sequence
  Description of Artificial Sequence: Synthetic oligonucleotide
ucaauuugcacuucaaaug

SEQ ID NO: 1311330 - RNA, 19 nt, Artificial Sequence
  Description of Artificial Sequence: Synthetic oligonucleotide
uauaugauccaaccugucg

SEQ ID NO: 1311331 - RNA, 19 nt, Artificial Sequence
  Description of Artificial Sequence: Synthetic oligonucleotide
auaugauccaaccugucgg

SEQ ID NO: 1311332 - RNA, 19 nt, Artificial Sequence
  Description of Artificial Sequence: Synthetic oligonucleotide
aaggauagaagccugcucu

SEQ ID NO: 1311333 - RNA, 19 nt, Artificial Sequence
  Description of Artificial Sequence: Synthetic oligonucleotide
aagucagcuacauuguguc

SEQ ID NO: 1311334 - RNA, 19 nt, Artificial Sequence
  Description of Artificial Sequence: Synthetic oligonucleotide
cuguaugccacauucaggg

SEQ ID NO: 1311335 - RNA, 19 nt, Artificial Sequence
  Description of Artificial Sequence: Synthetic oligonucleotide
uguucuagggucaucacug

SEQ ID NO: 1311336 - RNA, 19 nt, Artificial Sequence
  Description of Artificial Sequence: Synthetic oligonucleotide
aggacguuucaucaggugc

SEQ ID NO: 1311337 - RNA, 19 nt, Artificial Sequence
  Description of Artificial Sequence: Synthetic oligonucleotide
agaaucuguaagcaacgcc

SEQ ID NO: 1311338 - RNA, 19 nt, Artificial Sequence
  Description of Artificial Sequence: Synthetic oligonucleotide
ugaaggacguuucaucagg

SEQ ID NO: 1311339 - RNA, 19 nt, Artificial Sequence
  Description of Artificial Sequence: Synthetic oligonucleotide
uugucaaucacauuguuua

SEQ ID NO: 1311340 - RNA, 19 nt, Artificial Sequence
  Description of Artificial Sequence: Synthetic oligonucleotide
agaagcguuuucuucaaac

SEQ ID NO: 1311341 - RNA, 19 nt, Artificial Sequence
  Description of Artificial Sequence: Synthetic oligonucleotide
uagauauuucagaagcaag

SEQ ID NO: 1311342 - RNA, 19 nt, Artificial Sequence
  Description of Artificial Sequence: Synthetic oligonucleotide
agaacuuuaaccguggacu

SEQ ID NO: 1311343 - RNA, 19 nt, Artificial Sequence
  Description of Artificial Sequence: Synthetic oligonucleotide
acacuugacaguuuacaac

SEQ ID NO: 1311344 - RNA, 19 nt, Artificial Sequence
  Description of Artificial Sequence: Synthetic oligonucleotide
uuacccagacacuugacag

SEQ ID NO: 1311345 - RNA, 19 nt, Artificial Sequence
  Description of Artificial Sequence: Synthetic oligonucleotide
gagacuuuaagcugcuuag

SEQ ID NO: 1311346 - RNA, 19 nt, Artificial Sequence
  Description of Artificial Sequence: Synthetic oligonucleotide
cuaggaaguacuuuaauca

SEQ ID NO: 1311347 - RNA, 19 nt, Artificial Sequence
  Description of Artificial Sequence: Synthetic oligonucleotide
aaauuacccagacacuuga

SEQ ID NO: 1311348 - RNA, 19 nt, Artificial Sequence
  Description of Artificial Sequence: Synthetic oligonucleotide
caauggaggacacuaaacc

SEQ ID NO: 1311349 - RNA, 19 nt, Artificial Sequence
  Description of Artificial Sequence: Synthetic oligonucleotide
ucaggugcgggcuugaccc

SEQ ID NO: 1311350 - RNA, 19 nt, Artificial Sequence
  Description of Artificial Sequence: Synthetic oligonucleotide
ugagagagaauucgaacca

SEQ ID NO: 1311351 - RNA, 19 nt, Artificial Sequence
  Description of Artificial Sequence: Synthetic oligonucleotide
uucaucacagcauaguguc

SEQ ID NO: 1311352 - RNA, 19 nt, Artificial Sequence
  Description of Artificial Sequence: Synthetic oligonucleotide
aaauauugggaaagugugg

SEQ ID NO: 1311353 - RNA, 19 nt, Artificial Sequence
  Description of Artificial Sequence: Synthetic oligonucleotide
gaacuaauuucaaagccag

SEQ ID NO: 1311354 - RNA, 19 nt, Artificial Sequence
  Description of Artificial Sequence: Synthetic oligonucleotide
aaaugccaccauauaaagc

SEQ ID NO: 1311355 - RNA, 19 nt, Artificial Sequence
  Description of Artificial Sequence: Synthetic oligonucleotide
ugguuauguuuaaauauug

SEQ ID NO: 1311356 - RNA, 19 nt, Artificial Sequence
  Description of Artificial Sequence: Synthetic oligonucleotide
guaagcaacgccuguaugc

SEQ ID NO: 1311357 - RNA, 19 nt, Artificial Sequence
  Description of Artificial Sequence: Synthetic oligonucleotide
ucucauaagccuuuucuga

SEQ ID NO: 1311358 - RNA, 19 nt, Artificial Sequence
  Description of Artificial Sequence: Synthetic oligonucleotide
uaaccguggacugagaagc

SEQ ID NO: 1311359 - RNA, 19 nt, Artificial Sequence
  Description of Artificial Sequence: Synthetic oligonucleotide
aauccugaacaauggagga

SEQ ID NO: 1311360 - RNA, 19 nt, Artificial Sequence
  Description of Artificial Sequence: Synthetic oligonucleotide
aggguuauucaucacagca

SEQ ID NO: 1311361 - RNA, 19 nt, Artificial Sequence
  Description of Artificial Sequence: Synthetic oligonucleotide
gaguaaaggaaguucacuc

SEQ ID NO: 1311362 - RNA, 19 nt, Artificial Sequence
  Description of Artificial Sequence: Synthetic oligonucleotide
aggucaaggauccagggug

SEQ ID NO: 1311363 - RNA, 19 nt, Artificial Sequence
  Description of Artificial Sequence: Synthetic oligonucleotide
ugcuuagccgcuaucaaca

SEQ ID NO: 1311364 - RNA, 19 nt, Artificial Sequence
  Description of Artificial Sequence: Synthetic oligonucleotide
acggagggcauauacaguc

SEQ ID NO: 1311365 - RNA, 19 nt, Artificial Sequence
  Description of Artificial Sequence: Synthetic oligonucleotide
agagaguacugauugggag

SEQ ID NO: 1311366 - RNA, 19 nt, Artificial Sequence
  Description of Artificial Sequence: Synthetic oligonucleotide
ugguucauuccauggacgg

SEQ ID NO: 1311367 - RNA, 19 nt, Artificial Sequence
  Description of Artificial Sequence: Synthetic oligonucleotide
aggaaaacgaauccucaag

SEQ ID NO: 1311368 - RNA, 19 nt, Artificial Sequence
  Description of Artificial Sequence: Synthetic oligonucleotide
ucaccguagcaucagaaga

SEQ ID NO: 1311369 - RNA, 19 nt, Artificial Sequence
  Description of Artificial Sequence: Synthetic oligonucleotide
aagauagcuggcaucuccc

SEQ ID NO: 1311370 - RNA, 19 nt, Artificial Sequence
  Description of Artificial Sequence: Synthetic oligonucleotide
ucgaaccagagucugagcu

SEQ ID NO: 1311371 - RNA, 19 nt, Artificial Sequence
  Description of Artificial Sequence: Synthetic oligonucleotide
ucggacuucuucaauuugc

SEQ ID NO: 1311372 - RNA, 19 nt, Artificial Sequence
  Description of Artificial Sequence: Synthetic oligonucleotide
acgacuuuguuccccaggg

SEQ ID NO: 1311373 - RNA, 19 nt, Artificial Sequence
  Description of Artificial Sequence: Synthetic oligonucleotide
aaacgaauccucaaguccu

SEQ ID NO: 1311374 - RNA, 19 nt, Artificial Sequence
  Description of Artificial Sequence: Synthetic oligonucleotide
aaugagaauuuucaccgua

SEQ ID NO: 1311375 - RNA, 19 nt, Artificial Sequence
  Description of Artificial Sequence: Synthetic oligonucleotide
aaaggaaguucacuccuga

SEQ ID NO: 1311376 - RNA, 19 nt, Artificial Sequence
  Description of Artificial Sequence: Synthetic oligonucleotide
cuugacccgaggaaaagcc

SEQ ID NO: 1311377 - RNA, 19 nt, Artificial Sequence
  Description of Artificial Sequence: Synthetic oligonucleotide
aguuuucggagauugggug

SEQ ID NO: 1311378 - RNA, 19 nt, Artificial Sequence
  Description of Artificial Sequence: Synthetic oligonucleotide
aagcaagauagcuggcauc

SEQ ID NO: 1311379 - RNA, 19 nt, Artificial Sequence
  Description of Artificial Sequence: Synthetic oligonucleotide
uguagcagaccauauccug

SEQ ID NO: 1311380 - RNA, 19 nt, Artificial Sequence
  Description of Artificial Sequence: Synthetic oligonucleotide
gaugagaacuuuaaccgug

SEQ ID NO: 1311381 - RNA, 19 nt, Artificial Sequence
  Description of Artificial Sequence: Synthetic oligonucleotide
uuugcacuucaaauguccc

SEQ ID NO: 1311382 - RNA, 19 nt, Artificial Sequence
  Description of Artificial Sequence: Synthetic oligonucleotide
auauaaagccccauggcag

SEQ ID NO: 1311383 - RNA, 19 nt, Artificial Sequence
  Description of Artificial Sequence: Synthetic oligonucleotide
aaaccaacgcgcaugccgg

SEQ ID NO: 1311384 - RNA, 19 nt, Artificial Sequence
  Description of Artificial Sequence: Synthetic oligonucleotide
auggacggagggcauauac

SEQ ID NO: 1311385 - RNA, 19 nt, Artificial Sequence
  Description of Artificial Sequence: Synthetic oligonucleotide
ggauguggggcacaaaugg

SEQ ID NO: 1311386 - RNA, 19 nt, Artificial Sequence
  Description of Artificial Sequence: Synthetic oligonucleotide
caugagagagaauucgaac

SEQ ID NO: 1311387 - RNA, 19 nt, Artificial Sequence
  Description of Artificial Sequence: Synthetic oligonucleotide
uucaaaccaacgcgcaugc

SEQ ID NO: 1311388 - RNA, 19 nt, Artificial Sequence
  Description of Artificial Sequence: Synthetic oligonucleotide
gugugagaggcucaaagcc

SEQ ID NO: 1311389 - RNA, 19 nt, Artificial Sequence
  Description of Artificial Sequence: Synthetic oligonucleotide
guuuucggagauugggugg

SEQ ID NO: 1311390 - RNA, 19 nt, Artificial Sequence
  Description of Artificial Sequence: Synthetic oligonucleotide
agagucugagcuguguagc

SEQ ID NO: 1311391 - RNA, 19 nt, Artificial Sequence
  Description of Artificial Sequence: Synthetic oligonucleotide
uuuaaccguggacugagaa

SEQ ID NO: 1311392 - RNA, 19 nt, Artificial Sequence
  Description of Artificial Sequence: Synthetic oligonucleotide
cauggucaaaacuucugag

SEQ ID NO: 1311393 - RNA, 19 nt, Artificial Sequence
  Description of Artificial Sequence: Synthetic oligonucleotide
acgccuguaugccacauuc

SEQ ID NO: 1311394 - RNA, 19 nt, Artificial Sequence
  Description of Artificial Sequence: Synthetic oligonucleotide
uucaccguagcaucagaag

SEQ ID NO: 1311395 - RNA, 19 nt, Artificial Sequence
  Description of Artificial Sequence: Synthetic oligonucleotide
cauauaaagccccauggca

SEQ ID NO: 1311396 - RNA, 19 nt, Artificial Sequence
  Description of Artificial Sequence: Synthetic oligonucleotide
uuaguaucaccaccaaguc

SEQ ID NO: 1311397 - RNA, 19 nt, Artificial Sequence
  Description of Artificial Sequence: Synthetic oligonucleotide
gaacuuuaaccguggacug

SEQ ID NO: 1311398 - RNA, 19 nt, Artificial Sequence
  Description of Artificial Sequence: Synthetic oligonucleotide
aaaauuacccagacacuug

SEQ ID NO: 1311399 - RNA, 19 nt, Artificial Sequence
  Description of Artificial Sequence: Synthetic oligonucleotide
caagauagcuggcaucucc

SEQ ID NO: 1311400 - RNA, 19 nt, Artificial Sequence
  Description of Artificial Sequence: Synthetic oligonucleotide
agaacuaauuucaaagcca

SEQ ID NO: 1311401 - RNA, 19 nt, Artificial Sequence
  Description of Artificial Sequence: Synthetic oligonucleotide
cuuccuaaagccuccauga

SEQ ID NO: 1311402 - RNA, 19 nt, Artificial Sequence
  Description of Artificial Sequence: Synthetic oligonucleotide
auauacagucacaaauggg

SEQ ID NO: 1311403 - RNA, 19 nt, Artificial Sequence
  Description of Artificial Sequence: Synthetic oligonucleotide
ugaugagaacuuuaaccgu

SEQ ID NO: 1311404 - RNA, 19 nt, Artificial Sequence
  Description of Artificial Sequence: Synthetic oligonucleotide
agagaauucgaaccagagu

SEQ ID NO: 1311405 - RNA, 19 nt, Artificial Sequence
  Description of Artificial Sequence: Synthetic oligonucleotide
uugggagugguuauguuua

SEQ ID NO: 1311406 - RNA, 19 nt, Artificial Sequence
  Description of Artificial Sequence: Synthetic oligonucleotide
aucaggugcgggcuugacc

SEQ ID NO: 1311407 - RNA, 19 nt, Artificial Sequence
  Description of Artificial Sequence: Synthetic oligonucleotide
uucauuagucagcaugguc

SEQ ID NO: 1311408 - RNA, 19 nt, Artificial Sequence
  Description of Artificial Sequence: Synthetic oligonucleotide
uaagcaacgccuguaugcc

SEQ ID NO: 1311409 - RNA, 19 nt, Artificial Sequence
  Description of Artificial Sequence: Synthetic oligonucleotide
ucccagguagauauuucag

SEQ ID NO: 1311410 - RNA, 19 nt, Artificial Sequence
  Description of Artificial Sequence: Synthetic oligonucleotide
ucauuccauggacggaggg

SEQ ID NO: 1311411 - RNA, 19 nt, Artificial Sequence
  Description of Artificial Sequence: Synthetic oligonucleotide
uguaagcaacgccuguaug

SEQ ID NO: 1311412 - RNA, 19 nt, Artificial Sequence
  Description of Artificial Sequence: Synthetic oligonucleotide
uccggauccaguuuucgga

SEQ ID NO: 1311413 - RNA, 19 nt, Artificial Sequence
  Description of Artificial Sequence: Synthetic oligonucleotide
guucauuccauggacggag

SEQ ID NO: 1311414 - RNA, 19 nt, Artificial Sequence
  Description of Artificial Sequence: Synthetic oligonucleotide
gagaacuuuaaccguggac

SEQ ID NO: 1311415 - RNA, 19 nt, Artificial Sequence
  Description of Artificial Sequence: Synthetic oligonucleotide
cuuuaguaucaccaccaag

SEQ ID NO: 1311416 - RNA, 19 nt, Artificial Sequence
  Description of Artificial Sequence: Synthetic oligonucleotide
gagagaauucgaaccagag

SEQ ID NO: 1311417 - RNA, 19 nt, Artificial Sequence
  Description of Artificial Sequence: Synthetic oligonucleotide
agaaaggauagaagccugc

SEQ ID NO: 1311418 - RNA, 19 nt, Artificial Sequence
  Description of Artificial Sequence: Synthetic oligonucleotide
uaugauccaaccugucgga

SEQ ID NO: 1311419 - RNA, 19 nt, Artificial Sequence
  Description of Artificial Sequence: Synthetic oligonucleotide
agucagcuacauugugucc

SEQ ID NO: 1311420 - RNA, 19 nt, Artificial Sequence
  Description of Artificial Sequence: Synthetic oligonucleotide
gcuaucaacaguggaaugg

SEQ ID NO: 1311421 - RNA, 19 nt, Artificial Sequence
  Description of Artificial Sequence: Synthetic oligonucleotide
cuaucaacaguggaauggc

SEQ ID NO: 1311422 - RNA, 19 nt, Artificial Sequence
  Description of Artificial Sequence: Synthetic oligonucleotide
agacuuuaagcugcuuagc

SEQ ID NO: 1311423 - RNA, 19 nt, Artificial Sequence
  Description of Artificial Sequence: Synthetic oligonucleotide
guuggcaggaucuuuagua

SEQ ID NO: 1311424 - RNA, 19 nt, Artificial Sequence
  Description of Artificial Sequence: Synthetic oligonucleotide
uucauuccauggacggagg

SEQ ID NO: 1311425 - RNA, 19 nt, Artificial Sequence
  Description of Artificial Sequence: Synthetic oligonucleotide
uucacugaaggacguuuca

SEQ ID NO: 1311426 - RNA, 19 nt, Artificial Sequence
  Description of Artificial Sequence: Synthetic oligonucleotide
auucgaaccagagucugag

SEQ ID NO: 1311427 - RNA, 19 nt, Artificial Sequence
  Description of Artificial Sequence: Synthetic oligonucleotide
ugucaccaaagaaaggaua

SEQ ID NO: 1311428 - RNA, 19 nt, Artificial Sequence
  Description of Artificial Sequence: Synthetic oligonucleotide
aaggacguuucaucaggug

SEQ ID NO: 1311429 - RNA, 19 nt, Artificial Sequence
  Description of Artificial Sequence: Synthetic oligonucleotide
uugauguccaaaugcaguu

SEQ ID NO: 1311430 - RNA, 19 nt, Artificial Sequence
  Description of Artificial Sequence: Synthetic oligonucleotide
cugguucauuccauggacg

SEQ ID NO: 1311431 - RNA, 19 nt, Artificial Sequence
  Description of Artificial Sequence: Synthetic oligonucleotide
aauuacccagacacuugac

SEQ ID NO: 1311432 - RNA, 19 nt, Artificial Sequence
  Description of Artificial Sequence: Synthetic oligonucleotide
uccaguuuucggagauugg

SEQ ID NO: 1311433 - RNA, 19 nt, Artificial Sequence
  Description of Artificial Sequence: Synthetic oligonucleotide
cagguagauauuucagaag

SEQ ID NO: 1311434 - RNA, 19 nt, Artificial Sequence
  Description of Artificial Sequence: Synthetic oligonucleotide
uuuucggagauuggguggc

SEQ ID NO: 1311435 - RNA, 19 nt, Artificial Sequence
  Description of Artificial Sequence: Synthetic oligonucleotide
ugucugguaggguuauuca

SEQ ID NO: 1311436 - RNA, 19 nt, Artificial Sequence
  Description of Artificial Sequence: Synthetic oligonucleotide
ugccaccauauaaagcccc

SEQ ID NO: 1311437 - RNA, 19 nt, Artificial Sequence
  Description of Artificial Sequence: Synthetic oligonucleotide
agaguacugauugggagug

SEQ ID NO: 1311438 - RNA, 19 nt, Artificial Sequence
  Description of Artificial Sequence: Synthetic oligonucleotide
agaaaagaguaaaggaagu

SEQ ID NO: 1311439 - RNA, 19 nt, Artificial Sequence
  Description of Artificial Sequence: Synthetic oligonucleotide
gaauucgaaccagagucug

SEQ ID NO: 1311440 - RNA, 19 nt, Artificial Sequence
  Description of Artificial Sequence: Synthetic oligonucleotide
cauauccugcuguucuagg

SEQ ID NO: 1311441 - RNA, 19 nt, Artificial Sequence
  Description of Artificial Sequence: Synthetic oligonucleotide
ggacggagggcauauacag

SEQ ID NO: 1311442 - RNA, 19 nt, Artificial Sequence
  Description of Artificial Sequence: Synthetic oligonucleotide
agggauguggggcacaaau

SEQ ID NO: 1311443 - RNA, 19 nt, Artificial Sequence
  Description of Artificial Sequence: Synthetic oligonucleotide
cuucaaaccaacgcgcaug

SEQ ID NO: 1311444 - RNA, 19 nt, Artificial Sequence
  Description of Artificial Sequence: Synthetic oligonucleotide
aucccagguagauauuuca

SEQ ID NO: 1311445 - RNA, 19 nt, Artificial Sequence
  Description of Artificial Sequence: Synthetic oligonucleotide
ucuuuaguaucaccaccaa

SEQ ID NO: 1311446 - RNA, 19 nt, Artificial Sequence
  Description of Artificial Sequence: Synthetic oligonucleotide
ugauccaaccugucggacu

SEQ ID NO: 1311447 - RNA, 19 nt, Artificial Sequence
  Description of Artificial Sequence: Synthetic oligonucleotide
uggacggagggcauauaca

SEQ ID NO: 1311448 - RNA, 19 nt, Artificial Sequence
  Description of Artificial Sequence: Synthetic oligonucleotide
cauaguguccaagaagguc

SEQ ID NO: 1311449 - RNA, 19 nt, Artificial Sequence
  Description of Artificial Sequence: Synthetic oligonucleotide
uuuucaccguagcaucaga

SEQ ID NO: 1311450 - RNA, 19 nt, Artificial Sequence
  Description of Artificial Sequence: Synthetic oligonucleotide
uucuagggucaucacugug

SEQ ID NO: 1311451 - RNA, 19 nt, Artificial Sequence
  Description of Artificial Sequence: Synthetic oligonucleotide
augagaauuuucaccguag

SEQ ID NO: 1311452 - RNA, 19 nt, Artificial Sequence
  Description of Artificial Sequence: Synthetic oligonucleotide
caggcacuuuucuuuacag

SEQ ID NO: 1311453 - RNA, 19 nt, Artificial Sequence
  Description of Artificial Sequence: Synthetic oligonucleotide
ucaucacagcauagugucc

SEQ ID NO: 1311454 - RNA, 19 nt, Artificial Sequence
  Description of Artificial Sequence: Synthetic oligonucleotide
cugaaggacguuucaucag

SEQ ID NO: 1311455 - RNA, 19 nt, Artificial Sequence
  Description of Artificial Sequence: Synthetic oligonucleotide
uuucaacagagaguacuga

SEQ ID NO: 1311456 - RNA, 19 nt, Artificial Sequence
  Description of Artificial Sequence: Synthetic oligonucleotide
uagcagaccauauccugcu

SEQ ID NO: 1311457 - RNA, 19 nt, Artificial Sequence
  Description of Artificial Sequence: Synthetic oligonucleotide
gagugguuauguuuaaaua

SEQ ID NO: 1311458 - RNA, 19 nt, Artificial Sequence
  Description of Artificial Sequence: Synthetic oligonucleotide
gcucgcuuaauccugaaca

SEQ ID NO: 1311459 - RNA, 19 nt, Artificial Sequence
  Description of Artificial Sequence: Synthetic oligonucleotide
guagauauuucagaagcaa

SEQ ID NO: 1311460 - RNA, 19 nt, Artificial Sequence
  Description of Artificial Sequence: Synthetic oligonucleotide
ugacccgaggaaaagccau

SEQ ID NO: 1311461 - RNA, 19 nt, Artificial Sequence
  Description of Artificial Sequence: Synthetic oligonucleotide
augagaacuuuaaccgugg

SEQ ID NO: 1311462 - RNA, 19 nt, Artificial Sequence
  Description of Artificial Sequence: Synthetic oligonucleotide
aggcgguuucucauaagcc

SEQ ID NO: 1311463 - RNA, 19 nt, Artificial Sequence
  Description of Artificial Sequence: Synthetic oligonucleotide
cugauuccucuucagcaag

SEQ ID NO: 1311464 - RNA, 19 nt, Artificial Sequence
  Description of Artificial Sequence: Synthetic oligonucleotide
auccugaacaauggaggac

SEQ ID NO: 1311465 - RNA, 19 nt, Artificial Sequence
  Description of Artificial Sequence: Synthetic oligonucleotide
uacauuguguccugucguc

SEQ ID NO: 1311466 - RNA, 19 nt, Artificial Sequence
  Description of Artificial Sequence: Synthetic oligonucleotide
guagcagaccauauccugc

SEQ ID NO: 1311467 - RNA, 19 nt, Artificial Sequence
  Description of Artificial Sequence: Synthetic oligonucleotide
caaauggccugaacccucc

SEQ ID NO: 1311468 - RNA, 19 nt, Artificial Sequence
  Description of Artificial Sequence: Synthetic oligonucleotide
ugauugggagugguuaugu

SEQ ID NO: 1311469 - RNA, 19 nt, Artificial Sequence
  Description of Artificial Sequence: Synthetic oligonucleotide
cccuaugccacagaaaugc

SEQ ID NO: 1311470 - RNA, 19 nt, Artificial Sequence
  Description of Artificial Sequence: Synthetic oligonucleotide
ugucaccccucauggcucg

SEQ ID NO: 1311471 - RNA, 19 nt, Artificial Sequence
  Description of Artificial Sequence: Synthetic oligonucleotide
acugauugggagugguuau

SEQ ID NO: 1311472 - RNA, 19 nt, Artificial Sequence
  Description of Artificial Sequence: Synthetic oligonucleotide
cugcuuagccgcuaucaac

SEQ ID NO: 1311473 - RNA, 19 nt, Artificial Sequence
  Description of Artificial Sequence: Synthetic oligonucleotide
uggacugagaagcguuuuc

SEQ ID NO: 1311474 - RNA, 19 nt, Artificial Sequence
  Description of Artificial Sequence: Synthetic oligonucleotide
ucggagauuggguggcacc

SEQ ID NO: 1311475 - RNA, 19 nt, Artificial Sequence
  Description of Artificial Sequence: Synthetic oligonucleotide
ccagaaucuguaagcaacg

SEQ ID NO: 1311476 - RNA, 19 nt, Artificial Sequence
  Description of Artificial Sequence: Synthetic oligonucleotide
ggaaaguguggcauucugg

SEQ ID NO: 1311477 - RNA, 19 nt, Artificial Sequence
  Description of Artificial Sequence: Synthetic oligonucleotide
ucaccaaagaaaggauaga

SEQ ID NO: 1311478 - RNA, 19 nt, Artificial Sequence
  Description of Artificial Sequence: Synthetic oligonucleotide
gagaguacugauugggagu

SEQ ID NO: 1311479 - RNA, 19 nt, Artificial Sequence
  Description of Artificial Sequence: Synthetic oligonucleotide
gggugugagaggcucaaag

SEQ ID NO: 1311480 - RNA, 19 nt, Artificial Sequence
  Description of Artificial Sequence: Synthetic oligonucleotide
ucccuaugccacagaaaug

SEQ ID NO: 1311481 - RNA, 19 nt, Artificial Sequence
  Description of Artificial Sequence: Synthetic oligonucleotide
uccacgacuuuguucccca

SEQ ID NO: 1311482 - RNA, 19 nt, Artificial Sequence
  Description of Artificial Sequence: Synthetic oligonucleotide
cacgacuuuguuccccagg

SEQ ID NO: 1311483 - RNA, 19 nt, Artificial Sequence
  Description of Artificial Sequence: Synthetic oligonucleotide
agggucaucacugugugua

SEQ ID NO: 1311484 - RNA, 19 nt, Artificial Sequence
  Description of Artificial Sequence: Synthetic oligonucleotide
cuaugccacagaaaugcca

SEQ ID NO: 1311485 - RNA, 19 nt, Artificial Sequence
  Description of Artificial Sequence: Synthetic oligonucleotide
ucaaaacuucugagggauc

SEQ ID NO: 1311486 - RNA, 19 nt, Artificial Sequence
  Description of Artificial Sequence: Synthetic oligonucleotide
aguacugauugggaguggu

SEQ ID NO: 1311487 - RNA, 19 nt, Artificial Sequence
  Description of Artificial Sequence: Synthetic oligonucleotide
gacguuucaucaggugcgg

SEQ ID NO: 1311488 - RNA, 19 nt, Artificial Sequence
  Description of Artificial Sequence: Synthetic oligonucleotide
uagccgcuaucaacagugg

SEQ ID NO: 1311489 - RNA, 19 nt, Artificial Sequence
  Description of Artificial Sequence: Synthetic oligonucleotide
aauucgaaccagagucuga

SEQ ID NO: 1311490 - RNA, 19 nt, Artificial Sequence
  Description of Artificial Sequence: Synthetic oligonucleotide
ccauauaaagccccauggc

SEQ ID NO: 1311491 - RNA, 19 nt, Artificial Sequence
  Description of Artificial Sequence: Synthetic oligonucleotide
agaauucgaaccagagucu

SEQ ID NO: 1311492 - RNA, 19 nt, Artificial Sequence
  Description of Artificial Sequence: Synthetic oligonucleotide
caacgcgcaugccggaugg

SEQ ID NO: 1311493 - RNA, 19 nt, Artificial Sequence
  Description of Artificial Sequence: Synthetic oligonucleotide
ccaguuuucggagauuggg

SEQ ID NO: 1311494 - RNA, 19 nt, Artificial Sequence
  Description of Artificial Sequence: Synthetic oligonucleotide
aacuaauuucaaagccagu

SEQ ID NO: 1311495 - RNA, 19 nt, Artificial Sequence
  Description of Artificial Sequence: Synthetic oligonucleotide
aucucccuaugccacagaa

SEQ ID NO: 1311496 - RNA, 19 nt, Artificial Sequence
  Description of Artificial Sequence: Synthetic oligonucleotide
uaagcugcuuagccgcuau

SEQ ID NO: 1311497 - RNA, 19 nt, Artificial Sequence
  Description of Artificial Sequence: Synthetic oligonucleotide
agcauggucaaaacuucug

SEQ ID NO: 1311498 - RNA, 19 nt, Artificial Sequence
  Description of Artificial Sequence: Synthetic oligonucleotide
caaaugucccuggagccac

SEQ ID NO: 1311499 - RNA, 19 nt, Artificial Sequence
  Description of Artificial Sequence: Synthetic oligonucleotide
auugggaaaguguggcauu

SEQ ID NO: 1311500 - RNA, 19 nt, Artificial Sequence
  Description of Artificial Sequence: Synthetic oligonucleotide
cuguguagcagaccauauc

SEQ ID NO: 1311501 - RNA, 19 nt, Artificial Sequence
  Description of Artificial Sequence: Synthetic oligonucleotide
aguugucaaucacauuguu

SEQ ID NO: 1311502 - RNA, 19 nt, Artificial Sequence
  Description of Artificial Sequence: Synthetic oligonucleotide
cucuggaaccaaagcgccc

SEQ ID NO: 1311503 - RNA, 19 nt, Artificial Sequence
  Description of Artificial Sequence: Synthetic oligonucleotide
ccuguaugccacauucagg

SEQ ID NO: 1311504 - RNA, 19 nt, Artificial Sequence
  Description of Artificial Sequence: Synthetic oligonucleotide
agcugcuuagccgcuauca

SEQ ID NO: 1311505 - RNA, 19 nt, Artificial Sequence
  Description of Artificial Sequence: Synthetic oligonucleotide
ugcgggcuugacccgagga

SEQ ID NO: 1311506 - RNA, 19 nt, Artificial Sequence
  Description of Artificial Sequence: Synthetic oligonucleotide
aaccguggacugagaagcg

SEQ ID NO: 1311507 - RNA, 19 nt, Artificial Sequence
  Description of Artificial Sequence: Synthetic oligonucleotide
agcguuuucuucaaaccaa

SEQ ID NO: 1311508 - RNA, 19 nt, Artificial Sequence
  Description of Artificial Sequence: Synthetic oligonucleotide
cauuagucagcauggucaa

SEQ ID NO: 1311509 - RNA, 19 nt, Artificial Sequence
  Description of Artificial Sequence: Synthetic oligonucleotide
gauuggguggcaccguugu

SEQ ID NO: 1311510 - RNA, 19 nt, Artificial Sequence
  Description of Artificial Sequence: Synthetic oligonucleotide
gguggcaccguuguaauga

SEQ ID NO: 1311511 - RNA, 19 nt, Artificial Sequence
  Description of Artificial Sequence: Synthetic oligonucleotide
ucaggcgguuucucauaag

SEQ ID NO: 1311512 - RNA, 19 nt, Artificial Sequence
  Description of Artificial Sequence: Synthetic oligonucleotide
cacugacccuggcagaaac

SEQ ID NO: 1311513 - RNA, 19 nt, Artificial Sequence
  Description of Artificial Sequence: Synthetic oligonucleotide
cucgcuuaauccugaacaa

SEQ ID NO: 1311514 - RNA, 19 nt, Artificial Sequence
  Description of Artificial Sequence: Synthetic oligonucleotide
auguccaaaugcaguuccg

SEQ ID NO: 1311515 - RNA, 19 nt, Artificial Sequence
  Description of Artificial Sequence: Synthetic oligonucleotide
cagagaguacugauuggga

SEQ ID NO: 1311516 - RNA, 19 nt, Artificial Sequence
  Description of Artificial Sequence: Synthetic oligonucleotide
uuccacgacuuuguucccc

SEQ ID NO: 1311517 - RNA, 19 nt, Artificial Sequence
  Description of Artificial Sequence: Synthetic oligonucleotide
gggaaaguguggcauucug

SEQ ID NO: 1311518 - RNA, 19 nt, Artificial Sequence
  Description of Artificial Sequence: Synthetic oligonucleotide
uggccgcuaaggcacucug

SEQ ID NO: 1311519 - RNA, 19 nt, Artificial Sequence
  Description of Artificial Sequence: Synthetic oligonucleotide
caccguagcaucagaagaa

SEQ ID NO: 1311520 - RNA, 19 nt, Artificial Sequence
  Description of Artificial Sequence: Synthetic oligonucleotide
ccaaaugcaguuccggauc

SEQ ID NO: 1311521 - RNA, 19 nt, Artificial Sequence
  Description of Artificial Sequence: Synthetic oligonucleotide
gcauggucaaaacuucuga

SEQ ID NO: 1311522 - RNA, 19 nt, Artificial Sequence
  Description of Artificial Sequence: Synthetic oligonucleotide
acauuguguccugucguca

SEQ ID NO: 1311523 - RNA, 19 nt, Artificial Sequence
  Description of Artificial Sequence: Synthetic oligonucleotide
gaaaggauagaagccugcu

SEQ ID NO: 1311524 - RNA, 19 nt, Artificial Sequence
  Description of Artificial Sequence: Synthetic oligonucleotide
accguuguaaugagaauuu

SEQ ID NO: 1311525 - RNA, 19 nt, Artificial Sequence
  Description of Artificial Sequence: Synthetic oligonucleotide
agccgcuaucaacagugga

SEQ ID NO: 1311526 - RNA, 19 nt, Artificial Sequence
  Description of Artificial Sequence: Synthetic oligonucleotide
aacgcgcaugccggauggc

SEQ ID NO: 1311527 - RNA, 19 nt, Artificial Sequence
  Description of Artificial Sequence: Synthetic oligonucleotide
ucgcuuaauccugaacaau

SEQ ID NO: 1311528 - RNA, 19 nt, Artificial Sequence
  Description of Artificial Sequence: Synthetic oligonucleotide
cacagaaaugccaccauau

SEQ ID NO: 1311529 - RNA, 19 nt, Artificial Sequence
  Description of Artificial Sequence: Synthetic oligonucleotide
gaguacugauugggagugg

SEQ ID NO: 1311530 - RNA, 19 nt, Artificial Sequence
  Description of Artificial Sequence: Synthetic oligonucleotide
aggaaguacuuuaaucauu

SEQ ID NO: 1311531 - RNA, 19 nt, Artificial Sequence
  Description of Artificial Sequence: Synthetic oligonucleotide
ggagggcauauacagucac

SEQ ID NO: 1311532 - RNA, 19 nt, Artificial Sequence
  Description of Artificial Sequence: Synthetic oligonucleotide
acgaauccucaaguccuuc

SEQ ID NO: 1311533 - RNA, 19 nt, Artificial Sequence
  Description of Artificial Sequence: Synthetic oligonucleotide
cugauugggagugguuaug

SEQ ID NO: 1311534 - RNA, 19 nt, Artificial Sequence
  Description of Artificial Sequence: Synthetic oligonucleotide
cucugucaccccucauggc

SEQ ID NO: 1311535 - RNA, 19 nt, Artificial Sequence
  Description of Artificial Sequence: Synthetic oligonucleotide
aaccaacgcgcaugccgga

SEQ ID NO: 1311536 - RNA, 19 nt, Artificial Sequence
  Description of Artificial Sequence: Synthetic oligonucleotide
auaaagccccauggcagcu

SEQ ID NO: 1311537 - RNA, 19 nt, Artificial Sequence
  Description of Artificial Sequence: Synthetic oligonucleotide
agcagaccauauccugcug

SEQ ID NO: 1311538 - RNA, 19 nt, Artificial Sequence
  Description of Artificial Sequence: Synthetic oligonucleotide
uccaaccugucggacuucu

SEQ ID NO: 1311539 - RNA, 19 nt, Artificial Sequence
  Description of Artificial Sequence: Synthetic oligonucleotide
aacgccuguaugccacauu

SEQ ID NO: 1311540 - RNA, 19 nt, Artificial Sequence
  Description of Artificial Sequence: Synthetic oligonucleotide
cuaaggcacucugcaacac

SEQ ID NO: 1311541 - RNA, 19 nt, Artificial Sequence
  Description of Artificial Sequence: Synthetic oligonucleotide
ggcaggaucuuuaguauca

SEQ ID NO: 1311542 - RNA, 19 nt, Artificial Sequence
  Description of Artificial Sequence: Synthetic oligonucleotide
cguuuucuucaaaccaacg

SEQ ID NO: 1311543 - RNA, 19 nt, Artificial Sequence
  Description of Artificial Sequence: Synthetic oligonucleotide
ggagugguuauguuuaaau

SEQ ID NO: 1311544 - RNA, 19 nt, Artificial Sequence
  Description of Artificial Sequence: Synthetic oligonucleotide
gaacaauggaggacacuaa

SEQ ID NO: 1311545 - RNA, 19 nt, Artificial Sequence
  Description of Artificial Sequence: Synthetic oligonucleotide
ggcaccguuguaaugagaa

SEQ ID NO: 1311546 - RNA, 19 nt, Artificial Sequence
  Description of Artificial Sequence: Synthetic oligonucleotide
gguccugauuccucuucag

SEQ ID NO: 1311547 - RNA, 19 nt, Artificial Sequence
  Description of Artificial Sequence: Synthetic oligonucleotide
agcaaucugaugagaacuu

SEQ ID NO: 1311548 - RNA, 19 nt, Artificial Sequence
  Description of Artificial Sequence: Synthetic oligonucleotide
ggaucuuccuaaagccucc

SEQ ID NO: 1311549 - RNA, 19 nt, Artificial Sequence
  Description of Artificial Sequence: Synthetic oligonucleotide
cuacauuguguccugucgu

SEQ ID NO: 1311550 - RNA, 19 nt, Artificial Sequence
  Description of Artificial Sequence: Synthetic oligonucleotide
uucggagauuggguggcac

SEQ ID NO: 1311551 - RNA, 19 nt, Artificial Sequence
  Description of Artificial Sequence: Synthetic oligonucleotide
ccgaggaaaagccauuuca

SEQ ID NO: 1311552 - RNA, 19 nt, Artificial Sequence
  Description of Artificial Sequence: Synthetic oligonucleotide
ugggagugguuauguuuaa

SEQ ID NO: 1311553 - RNA, 19 nt, Artificial Sequence
  Description of Artificial Sequence: Synthetic oligonucleotide
uggcaccguuguaaugaga

SEQ ID NO: 1311554 - RNA, 19 nt, Artificial Sequence
  Description of Artificial Sequence: Synthetic oligonucleotide
ugggaaaguguggcauucu

SEQ ID NO: 1311555 - RNA, 19 nt, Artificial Sequence
  Description of Artificial Sequence: Synthetic oligonucleotide
aucacagcauaguguccaa

SEQ ID NO: 1311556 - RNA, 19 nt, Artificial Sequence
  Description of Artificial Sequence: Synthetic oligonucleotide
ggcgguuucucauaagccu

SEQ ID NO: 1311557 - RNA, 19 nt, Artificial Sequence
  Description of Artificial Sequence: Synthetic oligonucleotide
aacgaauccucaaguccuu

SEQ ID NO: 1311558 - RNA, 19 nt, Artificial Sequence
  Description of Artificial Sequence: Synthetic oligonucleotide
gagggcauauacagucaca

SEQ ID NO: 1311559 - RNA, 19 nt, Artificial Sequence
  Description of Artificial Sequence: Synthetic oligonucleotide
gugguuauguuuaaauauu

SEQ ID NO: 1311560 - RNA, 19 nt, Artificial Sequence
  Description of Artificial Sequence: Synthetic oligonucleotide
gcuuagccgcuaucaacag

SEQ ID NO: 1311561 - RNA, 19 nt, Artificial Sequence
  Description of Artificial Sequence: Synthetic oligonucleotide
acguuucaucaggugcggg

SEQ ID NO: 1311562 - RNA, 19 nt, Artificial Sequence
  Description of Artificial Sequence: Synthetic oligonucleotide
ucacuccaucccagguaga

SEQ ID NO: 1311563 - RNA, 19 nt, Artificial Sequence
  Description of Artificial Sequence: Synthetic oligonucleotide
caguuuucggagauugggu

SEQ ID NO: 1311564 - RNA, 19 nt, Artificial Sequence
  Description of Artificial Sequence: Synthetic oligonucleotide
aucuuccuaaagccuccau

SEQ ID NO: 1311565 - RNA, 19 nt, Artificial Sequence
  Description of Artificial Sequence: Synthetic oligonucleotide
accugucggacuucuucaa

SEQ ID NO: 1311566 - RNA, 19 nt, Artificial Sequence
  Description of Artificial Sequence: Synthetic oligonucleotide
ccuaugccacagaaaugcc

SEQ ID NO: 1311567 - RNA, 19 nt, Artificial Sequence
  Description of Artificial Sequence: Synthetic oligonucleotide
gccaggaaaacgaauccuc

SEQ ID NO: 1311568 - RNA, 19 nt, Artificial Sequence
  Description of Artificial Sequence: Synthetic oligonucleotide
cgcuaaggcacucugcaac

SEQ ID NO: 1311569 - RNA, 19 nt, Artificial Sequence
  Description of Artificial Sequence: Synthetic oligonucleotide
gcuugacccgaggaaaagc

SEQ ID NO: 1311570 - RNA, 19 nt, Artificial Sequence
  Description of Artificial Sequence: Synthetic oligonucleotide
cuguucuagggucaucacu

SEQ ID NO: 1311571 - RNA, 19 nt, Artificial Sequence
  Description of Artificial Sequence: Synthetic oligonucleotide
cacgaccacguccucuguc

SEQ ID NO: 1311572 - RNA, 19 nt, Artificial Sequence
  Description of Artificial Sequence: Synthetic oligonucleotide
gagaagcguuuucuucaaa

SEQ ID NO: 1311573 - RNA, 19 nt, Artificial Sequence
  Description of Artificial Sequence: Synthetic oligonucleotide
guugucaaucacauuguuu

SEQ ID NO: 1311574 - RNA, 19 nt, Artificial Sequence
  Description of Artificial Sequence: Synthetic oligonucleotide
ccaagucagcuacauugug

SEQ ID NO: 1311575 - RNA, 19 nt, Artificial Sequence
  Description of Artificial Sequence: Synthetic oligonucleotide
cuuuaaccguggacugaga

SEQ ID NO: 1311576 - RNA, 19 nt, Artificial Sequence
  Description of Artificial Sequence: Synthetic oligonucleotide
gaaggacguuucaucaggu

SEQ ID NO: 1311577 - RNA, 19 nt, Artificial Sequence
  Description of Artificial Sequence: Synthetic oligonucleotide
ccaguuucauuagucagca

SEQ ID NO: 1311578 - RNA, 19 nt, Artificial Sequence
  Description of Artificial Sequence: Synthetic oligonucleotide
gacugagaagcguuuucuu

SEQ ID NO: 1311579 - RNA, 19 nt, Artificial Sequence
  Description of Artificial Sequence: Synthetic oligonucleotide
guucacuccugagucucca

SEQ ID NO: 1311580 - RNA, 19 nt, Artificial Sequence
  Description of Artificial Sequence: Synthetic oligonucleotide
accguggacugagaagcgu

SEQ ID NO: 1311581 - RNA, 19 nt, Artificial Sequence
  Description of Artificial Sequence: Synthetic oligonucleotide
gucaaggauccagggugug

SEQ ID NO: 1311582 - RNA, 19 nt, Artificial Sequence
  Description of Artificial Sequence: Synthetic oligonucleotide
cucaggcgguuucucauaa

SEQ ID NO: 1311583 - RNA, 19 nt, Artificial Sequence
  Description of Artificial Sequence: Synthetic oligonucleotide
cuggaaccaaagcgcccac

SEQ ID NO: 1311584 - RNA, 19 nt, Artificial Sequence
  Description of Artificial Sequence: Synthetic oligonucleotide
ccucauggcucgcuuaauc

SEQ ID NO: 1311585 - RNA, 19 nt, Artificial Sequence
  Description of Artificial Sequence: Synthetic oligonucleotide
augccggauggccgcuaag

SEQ ID NO: 1311586 - RNA, 19 nt, Artificial Sequence
  Description of Artificial Sequence: Synthetic oligonucleotide
gcguuuucuucaaaccaac

SEQ ID NO: 1311587 - RNA, 19 nt, Artificial Sequence
  Description of Artificial Sequence: Synthetic oligonucleotide
ccaugagagagaauucgaa

SEQ ID NO: 1311588 - RNA, 19 nt, Artificial Sequence
  Description of Artificial Sequence: Synthetic oligonucleotide
ccauauccugcuguucuag

SEQ ID NO: 1311589 - RNA, 19 nt, Artificial Sequence
  Description of Artificial Sequence: Synthetic oligonucleotide
caaucacuccaucccaggu

SEQ ID NO: 1311590 - RNA, 19 nt, Artificial Sequence
  Description of Artificial Sequence: Synthetic oligonucleotide
auuagucagcauggucaaa

SEQ ID NO: 1311591 - RNA, 19 nt, Artificial Sequence
  Description of Artificial Sequence: Synthetic oligonucleotide
cuugacaguuuacaacauu

SEQ ID NO: 1311592 - RNA, 19 nt, Artificial Sequence
  Description of Artificial Sequence: Synthetic oligonucleotide
gccgcuaucaacaguggaa

SEQ ID NO: 1311593 - RNA, 19 nt, Artificial Sequence
  Description of Artificial Sequence: Synthetic oligonucleotide
caccguuguaaugagaauu

SEQ ID NO: 1311594 - RNA, 19 nt, Artificial Sequence
  Description of Artificial Sequence: Synthetic oligonucleotide
auggcucgcuuaauccuga

SEQ ID NO: 1311595 - RNA, 19 nt, Artificial Sequence
  Description of Artificial Sequence: Synthetic oligonucleotide
gauugggagugguuauguu

SEQ ID NO: 1311596 - RNA, 19 nt, Artificial Sequence
  Description of Artificial Sequence: Synthetic oligonucleotide
guucuagggucaucacugu

SEQ ID NO: 1311597 - RNA, 19 nt, Artificial Sequence
  Description of Artificial Sequence: Synthetic oligonucleotide
gcuguucuagggucaucac

SEQ ID NO: 1311598 - RNA, 19 nt, Artificial Sequence
  Description of Artificial Sequence: Synthetic oligonucleotide
acccgaggaaaagccauuu

SEQ ID NO: 1311599 - RNA, 19 nt, Artificial Sequence
  Description of Artificial Sequence: Synthetic oligonucleotide
cuguaagcaacgccuguau

SEQ ID NO: 1311600 - RNA, 19 nt, Artificial Sequence
  Description of Artificial Sequence: Synthetic oligonucleotide
gguucauuccauggacgga

SEQ ID NO: 1311601 - RNA, 19 nt, Artificial Sequence
  Description of Artificial Sequence: Synthetic oligonucleotide
gcugcuuagccgcuaucaa

SEQ ID NO: 1311602 - RNA, 19 nt, Artificial Sequence
  Description of Artificial Sequence: Synthetic oligonucleotide
cggagauuggguggcaccg

SEQ ID NO: 1311603 - RNA, 19 nt, Artificial Sequence
  Description of Artificial Sequence: Synthetic oligonucleotide
cuuagccgcuaucaacagu

SEQ ID NO: 1311604 - RNA, 19 nt, Artificial Sequence
  Description of Artificial Sequence: Synthetic oligonucleotide
guguagcagaccauauccu

SEQ ID NO: 1311605 - RNA, 19 nt, Artificial Sequence
  Description of Artificial Sequence: Synthetic oligonucleotide
auggccgcuaaggcacucu

SEQ ID NO: 1311606 - RNA, 19 nt, Artificial Sequence
  Description of Artificial Sequence: Synthetic oligonucleotide
gagauuggguggcaccguu

SEQ ID NO: 1311607 - RNA, 19 nt, Artificial Sequence
  Description of Artificial Sequence: Synthetic oligonucleotide
gugcgggcuugacccgagg

SEQ ID NO: 1311608 - RNA, 19 nt, Artificial Sequence
  Description of Artificial Sequence: Synthetic oligonucleotide
ggacugagaagcguuuucu

SEQ ID NO: 1311609 - RNA, 19 nt, Artificial Sequence
  Description of Artificial Sequence: Synthetic oligonucleotide
gacggagggcauauacagu

SEQ ID NO: 1311610 - RNA, 19 nt, Artificial Sequence
  Description of Artificial Sequence: Synthetic oligonucleotide
gauggccgcuaaggcacuc

SEQ ID NO: 1311611 - RNA, 19 nt, Artificial Sequence
  Description of Artificial Sequence: Synthetic oligonucleotide
ggguuauucaucacagcau

SEQ ID NO: 1311612 - RNA, 19 nt, Artificial Sequence
  Description of Artificial Sequence: Synthetic oligonucleotide
accaacgcgcaugccggau

SEQ ID NO: 1311613 - RNA, 19 nt, Artificial Sequence
  Description of Artificial Sequence: Synthetic oligonucleotide
caucaggugcgggcuugac

SEQ ID NO: 1311614 - RNA, 19 nt, Artificial Sequence
  Description of Artificial Sequence: Synthetic oligonucleotide
caguggaauggcaggcacu

SEQ ID NO: 1311615 - RNA, 19 nt, Artificial Sequence
  Description of Artificial Sequence: Synthetic oligonucleotide
ggguggcaccguuguaaug

SEQ ID NO: 1311616 - RNA, 19 nt, Artificial Sequence
  Description of Artificial Sequence: Synthetic oligonucleotide
ccaacgcgcaugccggaug

SEQ ID NO: 1311617 - RNA, 19 nt, Artificial Sequence
  Description of Artificial Sequence: Synthetic oligonucleotide
caguuccggauccaguuuu

SEQ ID NO: 1311618 - RNA, 19 nt, Artificial Sequence
  Description of Artificial Sequence: Synthetic oligonucleotide
cgcuaucaacaguggaaug

SEQ ID NO: 1311619 - RNA, 19 nt, Artificial Sequence
  Description of Artificial Sequence: Synthetic oligonucleotide
cccgaggaaaagccauuuc

SEQ ID NO: 1311620 - RNA, 19 nt, Artificial Sequence
  Description of Artificial Sequence: Synthetic oligonucleotide
cagcagccagaaucuguaa

SEQ ID NO: 1311621 - RNA, 19 nt, Artificial Sequence
  Description of Artificial Sequence: Synthetic oligonucleotide
gcgggcuugacccgaggaa

SEQ ID NO: 1311622 - RNA, 19 nt, Artificial Sequence
  Description of Artificial Sequence: Synthetic oligonucleotide
ggccgcuaaggcacucugc

SEQ ID NO: 1311623 - RNA, 19 nt, Artificial Sequence
  Description of Artificial Sequence: Synthetic oligonucleotide
cugaacaauggaggacacu

SEQ ID NO: 1311624 - RNA, 19 nt, Artificial Sequence
  Description of Artificial Sequence: Synthetic oligonucleotide
cacguccucugucaccccu

SEQ ID NO: 1311625 - RNA, 19 nt, Artificial Sequence
  Description of Artificial Sequence: Synthetic oligonucleotide
ccacgacuuuguuccccag

SEQ ID NO: 1311626 - RNA, 19 nt, Artificial Sequence
  Description of Artificial Sequence: Synthetic oligonucleotide
ggugcgggcuugacccgag

SEQ ID NO: 1311627 - RNA, 19 nt, Artificial Sequence
  Description of Artificial Sequence: Synthetic oligonucleotide
gucaccccucauggcucgc

SEQ ID NO: 1311628 - RNA, 19 nt, Artificial Sequence
  Description of Artificial Sequence: Synthetic oligonucleotide
gacccgaggaaaagccauu

SEQ ID NO: 1311629 - RNA, 19 nt, Artificial Sequence
  Description of Artificial Sequence: Synthetic oligonucleotide
guggacugagaagcguuuu

SEQ ID NO: 1311630 - RNA, 19 nt, Artificial Sequence
  Description of Artificial Sequence: Synthetic oligonucleotide
guacugauugggagugguu

SEQ ID NO: 1311631 - RNA, 19 nt, Artificial Sequence
  Description of Artificial Sequence: Synthetic oligonucleotide
ccguagcaucagaagaacu

SEQ ID NO: 1311632 - RNA, 19 nt, Artificial Sequence
  Description of Artificial Sequence: Synthetic oligonucleotide
gcuguguagcagaccauau

SEQ ID NO: 1311633 - RNA, 19 nt, Artificial Sequence
  Description of Artificial Sequence: Synthetic oligonucleotide
gcgguuucucauaagccuu

SEQ ID NO: 1311634 - RNA, 19 nt, Artificial Sequence
  Description of Artificial Sequence: Synthetic oligonucleotide
gcaccguuguaaugagaau

SEQ ID NO: 1311635 - RNA, 19 nt, Artificial Sequence
  Description of Artificial Sequence: Synthetic oligonucleotide
cgaccacguccucugucac

SEQ ID NO: 1311636 - RNA, 19 nt, Artificial Sequence
  Description of Artificial Sequence: Synthetic oligonucleotide
ggagauuggguggcaccgu

SEQ ID NO: 1311637 - RNA, 19 nt, Artificial Sequence
  Description of Artificial Sequence: Synthetic oligonucleotide
ccgcuaucaacaguggaau

SEQ ID NO: 1311638 - RNA, 19 nt, Artificial Sequence
  Description of Artificial Sequence: Synthetic oligonucleotide
cauggacggagggcauaua

SEQ ID NO: 1311639 - RNA, 19 nt, Artificial Sequence
  Description of Artificial Sequence: Synthetic oligonucleotide
ccguggacugagaagcguu

SEQ ID NO: 1311640 - RNA, 19 nt, Artificial Sequence
  Description of Artificial Sequence: Synthetic oligonucleotide
caacgccuguaugccacau

SEQ ID NO: 1311641 - RNA, 19 nt, Artificial Sequence
  Description of Artificial Sequence: Synthetic oligonucleotide
ggggcacaaauggccugaa

SEQ ID NO: 1311642 - RNA, 19 nt, Artificial Sequence
  Description of Artificial Sequence: Synthetic oligonucleotide
ccauggacggagggcauau

SEQ ID NO: 1311643 - RNA, 19 nt, Artificial Sequence
  Description of Artificial Sequence: Synthetic oligonucleotide
ggcuucacugaaggacguu

SEQ ID NO: 1311644 - RNA, 19 nt, Artificial Sequence
  Description of Artificial Sequence: Synthetic oligonucleotide
ccguuguaaugagaauuuu

SEQ ID NO: 1311645 - RNA, 19 nt, Artificial Sequence
  Description of Artificial Sequence: Synthetic oligonucleotide
gcugucugguaggguuauu

SEQ ID NO: 1311646 - RNA, 19 nt, Artificial Sequence
  Description of Artificial Sequence: Synthetic oligonucleotide
aaaucuaaggcauccaggc

SEQ ID NO: 1311647 - RNA, 19 nt, Artificial Sequence
  Description of Artificial Sequence: Synthetic oligonucleotide
uuaauauggaaucacaggu

SEQ ID NO: 1311648 - RNA, 19 nt, Artificial Sequence
  Description of Artificial Sequence: Synthetic oligonucleotide
uuuaauauggaaucacagg

SEQ ID NO: 1311649 - RNA, 19 nt, Artificial Sequence
  Description of Artificial Sequence: Synthetic oligonucleotide
aaaguuuaagccauagacc

SEQ ID NO: 1311650 - RNA, 19 nt, Artificial Sequence
  Description of Artificial Sequence: Synthetic oligonucleotide
aauauggaaucacagguug

SEQ ID NO: 1311651 - RNA, 19 nt, Artificial Sequence
  Description of Artificial Sequence: Synthetic oligonucleotide
aaaagaauagacccggugu

SEQ ID NO: 1311652 - RNA, 19 nt, Artificial Sequence
  Description of Artificial Sequence: Synthetic oligonucleotide
uuuauuaucguguggacga

SEQ ID NO: 1311653 - RNA, 19 nt, Artificial Sequence
  Description of Artificial Sequence: Synthetic oligonucleotide
aauucaugauguucagggc

SEQ ID NO: 1311654 - RNA, 19 nt, Artificial Sequence
  Description of Artificial Sequence: Synthetic oligonucleotide
uuuuguuggacagugaacc

SEQ ID NO: 1311655 - RNA, 19 nt, Artificial Sequence
  Description of Artificial Sequence: Synthetic oligonucleotide
ucuuacguggugcugaucc

SEQ ID NO: 1311656 - RNA, 19 nt, Artificial Sequence
  Description of Artificial Sequence: Synthetic oligonucleotide
uacgagaaaacuuggaagc

SEQ ID NO: 1311657 - RNA, 19 nt, Artificial Sequence
  Description of Artificial Sequence: Synthetic oligonucleotide
ucuauaaaccaaagaaaug

SEQ ID NO: 1311658 - RNA, 19 nt, Artificial Sequence
  Description of Artificial Sequence: Synthetic oligonucleotide
ugauccuguagcuugaccc

SEQ ID NO: 1311659 - RNA, 19 nt, Artificial Sequence
  Description of Artificial Sequence: Synthetic oligonucleotide
uggacgaacacgcacugcg

SEQ ID NO: 1311660 - RNA, 19 nt, Artificial Sequence
  Description of Artificial Sequence: Synthetic oligonucleotide
uaaauguugauccggcuga

SEQ ID NO: 1311661 - RNA, 19 nt, Artificial Sequence
  Description of Artificial Sequence: Synthetic oligonucleotide
aagagcaucgcguuggaga

SEQ ID NO: 1311662 - RNA, 19 nt, Artificial Sequence
  Description of Artificial Sequence: Synthetic oligonucleotide
uucacgauugaauaauuga

SEQ ID NO: 1311663 - RNA, 19 nt, Artificial Sequence
  Description of Artificial Sequence: Synthetic oligonucleotide
agaggggccauucugcacc

SEQ ID NO: 1311664 - RNA, 19 nt, Artificial Sequence
  Description of Artificial Sequence: Synthetic oligonucleotide
acgauugaauaauugauca

SEQ ID NO: 1311665 - RNA, 19 nt, Artificial Sequence
  Description of Artificial Sequence: Synthetic oligonucleotide
uccucuuuuaccuugugga

SEQ ID NO: 1311666 - RNA, 19 nt, Artificial Sequence
  Description of Artificial Sequence: Synthetic oligonucleotide
uuuugugucagauacgcua

SEQ ID NO: 1311667 - RNA, 19 nt, Artificial Sequence
  Description of Artificial Sequence: Synthetic oligonucleotide
gauugaauaauugaucaca

SEQ ID NO: 1311668 - RNA, 19 nt, Artificial Sequence
  Description of Artificial Sequence: Synthetic oligonucleotide
ugagacuuaaguacauccc

SEQ ID NO: 1311669 - RNA, 19 nt, Artificial Sequence
  Description of Artificial Sequence: Synthetic oligonucleotide
cuacgagaaaacuuggaag

SEQ ID NO: 1311670 - RNA, 19 nt, Artificial Sequence
  Description of Artificial Sequence: Synthetic oligonucleotide
acuacucugaagguguugc

SEQ ID NO: 1311671 - RNA, 19 nt, Artificial Sequence
  Description of Artificial Sequence: Synthetic oligonucleotide
uuugaagucccacuaggac

SEQ ID NO: 1311672 - RNA, 19 nt, Artificial Sequence
  Description of Artificial Sequence: Synthetic oligonucleotide
uguacacuuaaauaagcaa

SEQ ID NO: 1311673 - RNA, 19 nt, Artificial Sequence
  Description of Artificial Sequence: Synthetic oligonucleotide
aaacuuggaagccaucuaa

SEQ ID NO: 1311674 - RNA, 19 nt, Artificial Sequence
  Description of Artificial Sequence: Synthetic oligonucleotide
ucacgauugaauaauugau

SEQ ID NO: 1311675 - RNA, 19 nt, Artificial Sequence
  Description of Artificial Sequence: Synthetic oligonucleotide
uguugauccggcugaaucc

SEQ ID NO: 1311676 - RNA, 19 nt, Artificial Sequence
  Description of Artificial Sequence: Synthetic oligonucleotide
ugugguaaauguugauccg

SEQ ID NO: 1311677 - RNA, 19 nt, Artificial Sequence
  Description of Artificial Sequence: Synthetic oligonucleotide
ucuuuuaccuuguggagcu

SEQ ID NO: 1311678 - RNA, 19 nt, Artificial Sequence
  Description of Artificial Sequence: Synthetic oligonucleotide
ugaaccguuuauuaucgug

SEQ ID NO: 1311679 - RNA, 19 nt, Artificial Sequence
  Description of Artificial Sequence: Synthetic oligonucleotide
guaaauguugauccggcug

SEQ ID NO: 1311680 - RNA, 19 nt, Artificial Sequence
  Description of Artificial Sequence: Synthetic oligonucleotide
ugcguggacagacugaaac

SEQ ID NO: 1311681 - RNA, 19 nt, Artificial Sequence
  Description of Artificial Sequence: Synthetic oligonucleotide
guuuauuaucguguggacg

SEQ ID NO: 1311682 - RNA, 19 nt, Artificial Sequence
  Description of Artificial Sequence: Synthetic oligonucleotide
uuggcaucggacuuugaag

SEQ ID NO: 1311683 - RNA, 19 nt, Artificial Sequence
  Description of Artificial Sequence: Synthetic oligonucleotide
ugcgguccaaaucuaaggc

SEQ ID NO: 1311684 - RNA, 19 nt, Artificial Sequence
  Description of Artificial Sequence: Synthetic oligonucleotide
cuuacuugcaaaguuuaag

SEQ ID NO: 1311685 - RNA, 19 nt, Artificial Sequence
  Description of Artificial Sequence: Synthetic oligonucleotide
uaucguguggacgaacacg

SEQ ID NO: 1311686 - RNA, 19 nt, Artificial Sequence
  Description of Artificial Sequence: Synthetic oligonucleotide
aucguguggacgaacacgc

SEQ ID NO: 1311687 - RNA, 19 nt, Artificial Sequence
  Description of Artificial Sequence: Synthetic oligonucleotide
aguugcuccguucccaggg

SEQ ID NO: 1311688 - RNA, 19 nt, Artificial Sequence
  Description of Artificial Sequence: Synthetic oligonucleotide
ucucucuauaaaccaaaga

SEQ ID NO: 1311689 - RNA, 19 nt, Artificial Sequence
  Description of Artificial Sequence: Synthetic oligonucleotide
aaccguuuauuaucgugug

SEQ ID NO: 1311690 - RNA, 19 nt, Artificial Sequence
  Description of Artificial Sequence: Synthetic oligonucleotide
gaauuagguggcuggcugg

SEQ ID NO: 1311691 - RNA, 19 nt, Artificial Sequence
  Description of Artificial Sequence: Synthetic oligonucleotide
gauggcgccaucuuacgug

SEQ ID NO: 1311692 - RNA, 19 nt, Artificial Sequence
  Description of Artificial Sequence: Synthetic oligonucleotide
uuugugucagauacgcuaa

SEQ ID NO: 1311693 - RNA, 19 nt, Artificial Sequence
  Description of Artificial Sequence: Synthetic oligonucleotide
agugaaccguuuauuaucg

SEQ ID NO: 1311694 - RNA, 19 nt, Artificial Sequence
  Description of Artificial Sequence: Synthetic oligonucleotide
acuuaaguacaucccagcu

SEQ ID NO: 1311695 - RNA, 19 nt, Artificial Sequence
  Description of Artificial Sequence: Synthetic oligonucleotide
cuuguggagcucucgaacc

SEQ ID NO: 1311696 - RNA, 19 nt, Artificial Sequence
  Description of Artificial Sequence: Synthetic oligonucleotide
guugcuggcaguguugugg

SEQ ID NO: 1311697 - RNA, 19 nt, Artificial Sequence
  Description of Artificial Sequence: Synthetic oligonucleotide
gagacuuaaguacauccca

SEQ ID NO: 1311698 - RNA, 19 nt, Artificial Sequence
  Description of Artificial Sequence: Synthetic oligonucleotide
ccucugaggaauuaggugg

SEQ ID NO: 1311699 - RNA, 19 nt, Artificial Sequence
  Description of Artificial Sequence: Synthetic oligonucleotide
gacuuaaguacaucccagc

SEQ ID NO: 1311700 - RNA, 19 nt, Artificial Sequence
  Description of Artificial Sequence: Synthetic oligonucleotide
uccacuacaugagagggug

SEQ ID NO: 1311701 - RNA, 19 nt, Artificial Sequence
  Description of Artificial Sequence: Synthetic oligonucleotide
aggcccacgucauuuacac

SEQ ID NO: 1311702 - RNA, 19 nt, Artificial Sequence
  Description of Artificial Sequence: Synthetic oligonucleotide
augcgguccaaaucuaagg

SEQ ID NO: 1311703 - RNA, 19 nt, Artificial Sequence
  Description of Artificial Sequence: Synthetic oligonucleotide
cacgauugaauaauugauc

SEQ ID NO: 1311704 - RNA, 19 nt, Artificial Sequence
  Description of Artificial Sequence: Synthetic oligonucleotide
gaauaauugaucacaaccu

SEQ ID NO: 1311705 - RNA, 19 nt, Artificial Sequence
  Description of Artificial Sequence: Synthetic oligonucleotide
uggcaucggacuuugaagu

SEQ ID NO: 1311706 - RNA, 19 nt, Artificial Sequence
  Description of Artificial Sequence: Synthetic oligonucleotide
aaaacuuggaagccaucua

SEQ ID NO: 1311707 - RNA, 19 nt, Artificial Sequence
  Description of Artificial Sequence: Synthetic oligonucleotide
cuaggaucuuccauuuggc

SEQ ID NO: 1311708 - RNA, 19 nt, Artificial Sequence
  Description of Artificial Sequence: Synthetic oligonucleotide
uugaauaauugaucacaac

SEQ ID NO: 1311709 - RNA, 19 nt, Artificial Sequence
  Description of Artificial Sequence: Synthetic oligonucleotide
ucaaugaucuccucuuuua

SEQ ID NO: 1311710 - RNA, 19 nt, Artificial Sequence
  Description of Artificial Sequence: Synthetic oligonucleotide
acagaguugcuccguuccc

SEQ ID NO: 1311711 - RNA, 19 nt, Artificial Sequence
  Description of Artificial Sequence: Synthetic oligonucleotide
agguccacuacaugagagg

SEQ ID NO: 1311712 - RNA, 19 nt, Artificial Sequence
  Description of Artificial Sequence: Synthetic oligonucleotide
gacuuugaagucccacuag

SEQ ID NO: 1311713 - RNA, 19 nt, Artificial Sequence
  Description of Artificial Sequence: Synthetic oligonucleotide
cagugaaccguuuauuauc

SEQ ID NO: 1311714 - RNA, 19 nt, Artificial Sequence
  Description of Artificial Sequence: Synthetic oligonucleotide
gacagcaacgaggacacug

SEQ ID NO: 1311715 - RNA, 19 nt, Artificial Sequence
  Description of Artificial Sequence: Synthetic oligonucleotide
ucgcguuggagaaaguggu

SEQ ID NO: 1311716 - RNA, 19 nt, Artificial Sequence
  Description of Artificial Sequence: Synthetic oligonucleotide
ucuaaggcauccaggccca

SEQ ID NO: 1311717 - RNA, 19 nt, Artificial Sequence
  Description of Artificial Sequence: Synthetic oligonucleotide
ugccugauuguacuucagc

SEQ ID NO: 1311718 - RNA, 19 nt, Artificial Sequence
  Description of Artificial Sequence: Synthetic oligonucleotide
acgaacacgcacugcgugg

SEQ ID NO: 1311719 - RNA, 19 nt, Artificial Sequence
  Description of Artificial Sequence: Synthetic oligonucleotide
cucuuuuaccuuguggagc

SEQ ID NO: 1311720 - RNA, 19 nt, Artificial Sequence
  Description of Artificial Sequence: Synthetic oligonucleotide
cacagaguugcuccguucc

SEQ ID NO: 1311721 - RNA, 19 nt, Artificial Sequence
  Description of Artificial Sequence: Synthetic oligonucleotide
aucgcguuggagaaagugg

SEQ ID NO: 1311722 - RNA, 19 nt, Artificial Sequence
  Description of Artificial Sequence: Synthetic oligonucleotide
accguuuauuaucgugugg

SEQ ID NO: 1311723 - RNA, 19 nt, Artificial Sequence
  Description of Artificial Sequence: Synthetic oligonucleotide
aauagacccgguguuuugu

SEQ ID NO: 1311724 - RNA, 19 nt, Artificial Sequence
  Description of Artificial Sequence: Synthetic oligonucleotide
auggcgccaucuuacgugg

SEQ ID NO: 1311725 - RNA, 19 nt, Artificial Sequence
  Description of Artificial Sequence: Synthetic oligonucleotide
uccuuacuugcaaaguuua

SEQ ID NO: 1311726 - RNA, 19 nt, Artificial Sequence
  Description of Artificial Sequence: Synthetic oligonucleotide
caugcgguccaaaucuaag

SEQ ID NO: 1311727 - RNA, 19 nt, Artificial Sequence
  Description of Artificial Sequence: Synthetic oligonucleotide
agacccgguguuuuguguc

SEQ ID NO: 1311728 - RNA, 19 nt, Artificial Sequence
  Description of Artificial Sequence: Synthetic oligonucleotide
agugccaccuacgagaaaa

SEQ ID NO: 1311729 - RNA, 19 nt, Artificial Sequence
  Description of Artificial Sequence: Synthetic oligonucleotide
cucucaucgugguuggccc

SEQ ID NO: 1311730 - RNA, 19 nt, Artificial Sequence
  Description of Artificial Sequence: Synthetic oligonucleotide
acagugaaccguuuauuau

SEQ ID NO: 1311731 - RNA, 19 nt, Artificial Sequence
  Description of Artificial Sequence: Synthetic oligonucleotide
ucuccacagaguugcuccg

SEQ ID NO: 1311732 - RNA, 19 nt, Artificial Sequence
  Description of Artificial Sequence: Synthetic oligonucleotide
gacgaacacgcacugcgug

SEQ ID NO: 1311733 - RNA, 19 nt, Artificial Sequence
  Description of Artificial Sequence: Synthetic oligonucleotide
uuaucguguggacgaacac

SEQ ID NO: 1311734 - RNA, 19 nt, Artificial Sequence
  Description of Artificial Sequence: Synthetic oligonucleotide
uucagcccuuucacgauug

SEQ ID NO: 1311735 - RNA, 19 nt, Artificial Sequence
  Description of Artificial Sequence: Synthetic oligonucleotide
agacuuaaguacaucccag

SEQ ID NO: 1311736 - RNA, 19 nt, Artificial Sequence
  Description of Artificial Sequence: Synthetic oligonucleotide
agagcaucgcguuggagaa

SEQ ID NO: 1311737 - RNA, 19 nt, Artificial Sequence
  Description of Artificial Sequence: Synthetic oligonucleotide
gaauagacccgguguuuug

SEQ ID NO: 1311738 - RNA, 19 nt, Artificial Sequence
  Description of Artificial Sequence: Synthetic oligonucleotide
uguuggacagugaaccguu

SEQ ID NO: 1311739 - RNA, 19 nt, Artificial Sequence
  Description of Artificial Sequence: Synthetic oligonucleotide
uaggaucuuccauuuggcu

SEQ ID NO: 1311740 - RNA, 19 nt, Artificial Sequence
  Description of Artificial Sequence: Synthetic oligonucleotide
uuuuaccuuguggagcucu

SEQ ID NO: 1311741 - RNA, 19 nt, Artificial Sequence
  Description of Artificial Sequence: Synthetic oligonucleotide
ucccacuuagcuccugucu

SEQ ID NO: 1311742 - RNA, 19 nt, Artificial Sequence
  Description of Artificial Sequence: Synthetic oligonucleotide
agaguugcuccguucccag

SEQ ID NO: 1311743 - RNA, 19 nt, Artificial Sequence
  Description of Artificial Sequence: Synthetic oligonucleotide
agaaagugguugccucuuc

SEQ ID NO: 1311744 - RNA, 19 nt, Artificial Sequence
  Description of Artificial Sequence: Synthetic oligonucleotide
auguacacuuaaauaagca

SEQ ID NO: 1311745 - RNA, 19 nt, Artificial Sequence
  Description of Artificial Sequence: Synthetic oligonucleotide
aauuagguggcuggcuggu

SEQ ID NO: 1311746 - RNA, 19 nt, Artificial Sequence
  Description of Artificial Sequence: Synthetic oligonucleotide
ggaauuagguggcuggcug

SEQ ID NO: 1311747 - RNA, 19 nt, Artificial Sequence
  Description of Artificial Sequence: Synthetic oligonucleotide
ugcaccugacgcugugugg

SEQ ID NO: 1311748 - RNA, 19 nt, Artificial Sequence
  Description of Artificial Sequence: Synthetic oligonucleotide
agcaucgcguuggagaaag

SEQ ID NO: 1311749 - RNA, 19 nt, Artificial Sequence
  Description of Artificial Sequence: Synthetic oligonucleotide
auuaucguguggacgaaca

SEQ ID NO: 1311750 - RNA, 19 nt, Artificial Sequence
  Description of Artificial Sequence: Synthetic oligonucleotide
uaccuuguggagcucucga

SEQ ID NO: 1311751 - RNA, 19 nt, Artificial Sequence
  Description of Artificial Sequence: Synthetic oligonucleotide
cuucaugcgguccaaaucu

SEQ ID NO: 1311752 - RNA, 19 nt, Artificial Sequence
  Description of Artificial Sequence: Synthetic oligonucleotide
aacgaggacacugguuucu

SEQ ID NO: 1311753 - RNA, 19 nt, Artificial Sequence
  Description of Artificial Sequence: Synthetic oligonucleotide
cuaacagugccaccuacga

SEQ ID NO: 1311754 - RNA, 19 nt, Artificial Sequence
  Description of Artificial Sequence: Synthetic oligonucleotide
ucacagguugagacuuaag

SEQ ID NO: 1311755 - RNA, 19 nt, Artificial Sequence
  Description of Artificial Sequence: Synthetic oligonucleotide
uuaccuuguggagcucucg

SEQ ID NO: 1311756 - RNA, 19 nt, Artificial Sequence
  Description of Artificial Sequence: Synthetic oligonucleotide
uuguuggacagugaaccgu

SEQ ID NO: 1311757 - RNA, 19 nt, Artificial Sequence
  Description of Artificial Sequence: Synthetic oligonucleotide
gguccacuacaugagaggg

SEQ ID NO: 1311758 - RNA, 19 nt, Artificial Sequence
  Description of Artificial Sequence: Synthetic oligonucleotide
ccaccuacgagaaaacuug

SEQ ID NO: 1311759 - RNA, 19 nt, Artificial Sequence
  Description of Artificial Sequence: Synthetic oligonucleotide
cucgggucccuggagaugg

SEQ ID NO: 1311760 - RNA, 19 nt, Artificial Sequence
  Description of Artificial Sequence: Synthetic oligonucleotide
cuuugaagucccacuagga

SEQ ID NO: 1311761 - RNA, 19 nt, Artificial Sequence
  Description of Artificial Sequence: Synthetic oligonucleotide
caccuacgagaaaacuugg

SEQ ID NO: 1311762 - RNA, 19 nt, Artificial Sequence
  Description of Artificial Sequence: Synthetic oligonucleotide
cuuacguggugcugauccc

SEQ ID NO: 1311763 - RNA, 19 nt, Artificial Sequence
  Description of Artificial Sequence: Synthetic oligonucleotide
cuugcaaaguuuaagccau

SEQ ID NO: 1311764 - RNA, 19 nt, Artificial Sequence
  Description of Artificial Sequence: Synthetic oligonucleotide
ugauccggcugaaucccug

SEQ ID NO: 1311765 - RNA, 19 nt, Artificial Sequence
  Description of Artificial Sequence: Synthetic oligonucleotide
acuacaugagaggguggcg

SEQ ID NO: 1311766 - RNA, 19 nt, Artificial Sequence
  Description of Artificial Sequence: Synthetic oligonucleotide
uacuaggaucuuccauuug

SEQ ID NO: 1311767 - RNA, 19 nt, Artificial Sequence
  Description of Artificial Sequence: Synthetic oligonucleotide
uuuaccuuguggagcucuc

SEQ ID NO: 1311768 - RNA, 19 nt, Artificial Sequence
  Description of Artificial Sequence: Synthetic oligonucleotide
auagacccgguguuuugug

SEQ ID NO: 1311769 - RNA, 19 nt, Artificial Sequence
  Description of Artificial Sequence: Synthetic oligonucleotide
uuggagaaagugguugccu

SEQ ID NO: 1311770 - RNA, 19 nt, Artificial Sequence
  Description of Artificial Sequence: Synthetic oligonucleotide
uugcgauccuccagggaug

SEQ ID NO: 1311771 - RNA, 19 nt, Artificial Sequence
  Description of Artificial Sequence: Synthetic oligonucleotide
gaaccguuuauuaucgugu

SEQ ID NO: 1311772 - RNA, 19 nt, Artificial Sequence
  Description of Artificial Sequence: Synthetic oligonucleotide
ucaugcgguccaaaucuaa

SEQ ID NO: 1311773 - RNA, 19 nt, Artificial Sequence
  Description of Artificial Sequence: Synthetic oligonucleotide
caaccugcugauccuguag

SEQ ID NO: 1311774 - RNA, 19 nt, Artificial Sequence
  Description of Artificial Sequence: Synthetic oligonucleotide
uccggcugaaucccugcug

SEQ ID NO: 1311775 - RNA, 19 nt, Artificial Sequence
  Description of Artificial Sequence: Synthetic oligonucleotide
ugugucagauacgcuaaaa

SEQ ID NO: 1311776 - RNA, 19 nt, Artificial Sequence
  Description of Artificial Sequence: Synthetic oligonucleotide
uuacguggugcugauccca

SEQ ID NO: 1311777 - RNA, 19 nt, Artificial Sequence
  Description of Artificial Sequence: Synthetic oligonucleotide
aagaauagacccgguguuu

SEQ ID NO: 1311778 - RNA, 19 nt, Artificial Sequence
  Description of Artificial Sequence: Synthetic oligonucleotide
gauccggcugaaucccugc

SEQ ID NO: 1311779 - RNA, 19 nt, Artificial Sequence
  Description of Artificial Sequence: Synthetic oligonucleotide
gcccacgucauuuacacuc

SEQ ID NO: 1311780 - RNA, 19 nt, Artificial Sequence
  Description of Artificial Sequence: Synthetic oligonucleotide
ugcgauccuccagggaugg

SEQ ID NO: 1311781 - RNA, 19 nt, Artificial Sequence
  Description of Artificial Sequence: Synthetic oligonucleotide
agguacuaggaucuuccau

SEQ ID NO: 1311782 - RNA, 19 nt, Artificial Sequence
  Description of Artificial Sequence: Synthetic oligonucleotide
gaggaauuagguggcuggc

SEQ ID NO: 1311783 - RNA, 19 nt, Artificial Sequence
  Description of Artificial Sequence: Synthetic oligonucleotide
uauuaucguguggacgaac

SEQ ID NO: 1311784 - RNA, 19 nt, Artificial Sequence
  Description of Artificial Sequence: Synthetic oligonucleotide
caucgcguuggagaaagug

SEQ ID NO: 1311785 - RNA, 19 nt, Artificial Sequence
  Description of Artificial Sequence: Synthetic oligonucleotide
uaaguacaucccagcuucu

SEQ ID NO: 1311786 - RNA, 19 nt, Artificial Sequence
  Description of Artificial Sequence: Synthetic oligonucleotide
cugauuguacuucagcccu

SEQ ID NO: 1311787 - RNA, 19 nt, Artificial Sequence
  Description of Artificial Sequence: Synthetic oligonucleotide
ucaggagaggggccauucu

SEQ ID NO: 1311788 - RNA, 19 nt, Artificial Sequence
  Description of Artificial Sequence: Synthetic oligonucleotide
uccugaagcagagcucuca

SEQ ID NO: 1311789 - RNA, 19 nt, Artificial Sequence
  Description of Artificial Sequence: Synthetic oligonucleotide
aacacgcacugcguggaca

SEQ ID NO: 1311790 - RNA, 19 nt, Artificial Sequence
  Description of Artificial Sequence: Synthetic oligonucleotide
cugauccuguagcuugacc

SEQ ID NO: 1311791 - RNA, 19 nt, Artificial Sequence
  Description of Artificial Sequence: Synthetic oligonucleotide
gaguugcuccguucccagg

SEQ ID NO: 1311792 - RNA, 19 nt, Artificial Sequence
  Description of Artificial Sequence: Synthetic oligonucleotide
ucucaucgugguuggcccc

SEQ ID NO: 1311793 - RNA, 19 nt, Artificial Sequence
  Description of Artificial Sequence: Synthetic oligonucleotide
ugcccgguuggcaucggac

SEQ ID NO: 1311794 - RNA, 19 nt, Artificial Sequence
  Description of Artificial Sequence: Synthetic oligonucleotide
cuugcgauccuccagggau

SEQ ID NO: 1311795 - RNA, 19 nt, Artificial Sequence
  Description of Artificial Sequence: Synthetic oligonucleotide
ccagcugaggagcuaacag

SEQ ID NO: 1311796 - RNA, 19 nt, Artificial Sequence
  Description of Artificial Sequence: Synthetic oligonucleotide
acugcguggacagacugaa

SEQ ID NO: 1311797 - RNA, 19 nt, Artificial Sequence
  Description of Artificial Sequence: Synthetic oligonucleotide
uggcauggaaaggccacgc

SEQ ID NO: 1311798 - RNA, 19 nt, Artificial Sequence
  Description of Artificial Sequence: Synthetic oligonucleotide
uugugucagauacgcuaaa

SEQ ID NO: 1311799 - RNA, 19 nt, Artificial Sequence
  Description of Artificial Sequence: Synthetic oligonucleotide
agaauagacccgguguuuu

SEQ ID NO: 1311800 - RNA, 19 nt, Artificial Sequence
  Description of Artificial Sequence: Synthetic oligonucleotide
agcccuuucacgauugaau

SEQ ID NO: 1311801 - RNA, 19 nt, Artificial Sequence
  Description of Artificial Sequence: Synthetic oligonucleotide
auauggaaucacagguuga

SEQ ID NO: 1311802 - RNA, 19 nt, Artificial Sequence
  Description of Artificial Sequence: Synthetic oligonucleotide
ucggacuuugaagucccac

SEQ ID NO: 1311803 - RNA, 19 nt, Artificial Sequence
  Description of Artificial Sequence: Synthetic oligonucleotide
gguacuaggaucuuccauu

SEQ ID NO: 1311804 - RNA, 19 nt, Artificial Sequence
  Description of Artificial Sequence: Synthetic oligonucleotide
uggagccugcagaagcauc

SEQ ID NO: 1311805 - RNA, 19 nt, Artificial Sequence
  Description of Artificial Sequence: Synthetic oligonucleotide
aauguugauccggcugaau

SEQ ID NO: 1311806 - RNA, 19 nt, Artificial Sequence
  Description of Artificial Sequence: Synthetic oligonucleotide
uuauuaucguguggacgaa

SEQ ID NO: 1311807 - RNA, 19 nt, Artificial Sequence
  Description of Artificial Sequence: Synthetic oligonucleotide
gacgcuguguggaggggcc

SEQ ID NO: 1311808 - RNA, 19 nt, Artificial Sequence
  Description of Artificial Sequence: Synthetic oligonucleotide
gacuacucugaagguguug

SEQ ID NO: 1311809 - RNA, 19 nt, Artificial Sequence
  Description of Artificial Sequence: Synthetic oligonucleotide
ugauuguacuucagcccuu

SEQ ID NO: 1311810 - RNA, 19 nt, Artificial Sequence
  Description of Artificial Sequence: Synthetic oligonucleotide
guggcauggaaaggccacg

SEQ ID NO: 1311811 - RNA, 19 nt, Artificial Sequence
  Description of Artificial Sequence: Synthetic oligonucleotide
aggaauuagguggcuggcu

SEQ ID NO: 1311812 - RNA, 19 nt, Artificial Sequence
  Description of Artificial Sequence: Synthetic oligonucleotide
uugauccggcugaaucccu

SEQ ID NO: 1311813 - RNA, 19 nt, Artificial Sequence
  Description of Artificial Sequence: Synthetic oligonucleotide
guugcuccguucccagggc

SEQ ID NO: 1311814 - RNA, 19 nt, Artificial Sequence
  Description of Artificial Sequence: Synthetic oligonucleotide
agucccacuaggacuggag

SEQ ID NO: 1311815 - RNA, 19 nt, Artificial Sequence
  Description of Artificial Sequence: Synthetic oligonucleotide
gagaggggccauucugcac

SEQ ID NO: 1311816 - RNA, 19 nt, Artificial Sequence
  Description of Artificial Sequence: Synthetic oligonucleotide
uguugcuggcaguguugug

SEQ ID NO: 1311817 - RNA, 19 nt, Artificial Sequence
  Description of Artificial Sequence: Synthetic oligonucleotide
uccacagaguugcuccguu

SEQ ID NO: 1311818 - RNA, 19 nt, Artificial Sequence
  Description of Artificial Sequence: Synthetic oligonucleotide
ucagcccuuucacgauuga

SEQ ID NO: 1311819 - RNA, 19 nt, Artificial Sequence
  Description of Artificial Sequence: Synthetic oligonucleotide
agcgggcuugucugucugg

SEQ ID NO: 1311820 - RNA, 19 nt, Artificial Sequence
  Description of Artificial Sequence: Synthetic oligonucleotide
ucugaggaauuagguggcu

SEQ ID NO: 1311821 - RNA, 19 nt, Artificial Sequence
  Description of Artificial Sequence: Synthetic oligonucleotide
auggaaucacagguugaga

SEQ ID NO: 1311822 - RNA, 19 nt, Artificial Sequence
  Description of Artificial Sequence: Synthetic oligonucleotide
gacccgguguuuuguguca

SEQ ID NO: 1311823 - RNA, 19 nt, Artificial Sequence
  Description of Artificial Sequence: Synthetic oligonucleotide
ugccaccuacgagaaaacu

SEQ ID NO: 1311824 - RNA, 19 nt, Artificial Sequence
  Description of Artificial Sequence: Synthetic oligonucleotide
accuuguggagcucucgaa

SEQ ID NO: 1311825 - RNA, 19 nt, Artificial Sequence
  Description of Artificial Sequence: Synthetic oligonucleotide
uugggguguucucucuaua

SEQ ID NO: 1311826 - RNA, 19 nt, Artificial Sequence
  Description of Artificial Sequence: Synthetic oligonucleotide
ucguguggacgaacacgca

SEQ ID NO: 1311827 - RNA, 19 nt, Artificial Sequence
  Description of Artificial Sequence: Synthetic oligonucleotide
gcaucggacuuugaagucc

SEQ ID NO: 1311828 - RNA, 19 nt, Artificial Sequence
  Description of Artificial Sequence: Synthetic oligonucleotide
cuuaaguacaucccagcuu

SEQ ID NO: 1311829 - RNA, 19 nt, Artificial Sequence
  Description of Artificial Sequence: Synthetic oligonucleotide
gcaguguugugguaaaugu

SEQ ID NO: 1311830 - RNA, 19 nt, Artificial Sequence
  Description of Artificial Sequence: Synthetic oligonucleotide
ccuuguggagcucucgaac

SEQ ID NO: 1311831 - RNA, 19 nt, Artificial Sequence
  Description of Artificial Sequence: Synthetic oligonucleotide
agcgcggcuccuugcgauc

SEQ ID NO: 1311832 - RNA, 19 nt, Artificial Sequence
  Description of Artificial Sequence: Synthetic oligonucleotide
caguaguugaaguuuguuu

SEQ ID NO: 1311833 - RNA, 19 nt, Artificial Sequence
  Description of Artificial Sequence: Synthetic oligonucleotide
ccaucuaauaaagcaggug

SEQ ID NO: 1311834 - RNA, 19 nt, Artificial Sequence
  Description of Artificial Sequence: Synthetic oligonucleotide
ccuacgagaaaacuuggaa

SEQ ID NO: 1311835 - RNA, 19 nt, Artificial Sequence
  Description of Artificial Sequence: Synthetic oligonucleotide
gguguugccugauuguacu

SEQ ID NO: 1311836 - RNA, 19 nt, Artificial Sequence
  Description of Artificial Sequence: Synthetic oligonucleotide
ggcccuguggcagagacuc

SEQ ID NO: 1311837 - RNA, 19 nt, Artificial Sequence
  Description of Artificial Sequence: Synthetic oligonucleotide
cguuggagaaagugguugc

SEQ ID NO: 1311838 - RNA, 19 nt, Artificial Sequence
  Description of Artificial Sequence: Synthetic oligonucleotide
accuacgagaaaacuugga

SEQ ID NO: 1311839 - RNA, 19 nt, Artificial Sequence
  Description of Artificial Sequence: Synthetic oligonucleotide
ggacuuugaagucccacua

SEQ ID NO: 1311840 - RNA, 19 nt, Artificial Sequence
  Description of Artificial Sequence: Synthetic oligonucleotide
cgauugaauaauugaucac

SEQ ID NO: 1311841 - RNA, 19 nt, Artificial Sequence
  Description of Artificial Sequence: Synthetic oligonucleotide
gcaacgaggacacugguuu

SEQ ID NO: 1311842 - RNA, 19 nt, Artificial Sequence
  Description of Artificial Sequence: Synthetic oligonucleotide
cacccuggacagcaacgag

SEQ ID NO: 1311843 - RNA, 19 nt, Artificial Sequence
  Description of Artificial Sequence: Synthetic oligonucleotide
ccguuuauuaucgugugga

SEQ ID NO: 1311844 - RNA, 19 nt, Artificial Sequence
  Description of Artificial Sequence: Synthetic oligonucleotide
cucaggagaggggccauuc

SEQ ID NO: 1311845 - RNA, 19 nt, Artificial Sequence
  Description of Artificial Sequence: Synthetic oligonucleotide
gaucccacuuagcuccugu

SEQ ID NO: 1311846 - RNA, 19 nt, Artificial Sequence
  Description of Artificial Sequence: Synthetic oligonucleotide
gcgguccaaaucuaaggca

SEQ ID NO: 1311847 - RNA, 19 nt, Artificial Sequence
  Description of Artificial Sequence: Synthetic oligonucleotide
ugaucacaaccugcugauc

SEQ ID NO: 1311848 - RNA, 19 nt, Artificial Sequence
  Description of Artificial Sequence: Synthetic oligonucleotide
cccacgucauuuacacucc

SEQ ID NO: 1311849 - RNA, 19 nt, Artificial Sequence
  Description of Artificial Sequence: Synthetic oligonucleotide
aucuuacguggugcugauc

SEQ ID NO: 1311850 - RNA, 19 nt, Artificial Sequence
  Description of Artificial Sequence: Synthetic oligonucleotide
guacuaggaucuuccauuu

SEQ ID NO: 1311851 - RNA, 19 nt, Artificial Sequence
  Description of Artificial Sequence: Synthetic oligonucleotide
ggcgccaucuuacguggug

SEQ ID NO: 1311852 - RNA, 19 nt, Artificial Sequence
  Description of Artificial Sequence: Synthetic oligonucleotide
gcguggacagacugaaaca

SEQ ID NO: 1311853 - RNA, 19 nt, Artificial Sequence
  Description of Artificial Sequence: Synthetic oligonucleotide
gcccuuucacgauugaaua

SEQ ID NO: 1311854 - RNA, 19 nt, Artificial Sequence
  Description of Artificial Sequence: Synthetic oligonucleotide
cguuuauuaucguguggac

SEQ ID NO: 1311855 - RNA, 19 nt, Artificial Sequence
  Description of Artificial Sequence: Synthetic oligonucleotide
ggcaucggacuuugaaguc

SEQ ID NO: 1311856 - RNA, 19 nt, Artificial Sequence
  Description of Artificial Sequence: Synthetic oligonucleotide
ugcuugcccgguuggcauc

SEQ ID NO: 1311857 - RNA, 19 nt, Artificial Sequence
  Description of Artificial Sequence: Synthetic oligonucleotide
cgauccuccagggauggcg

SEQ ID NO: 1311858 - RNA, 19 nt, Artificial Sequence
  Description of Artificial Sequence: Synthetic oligonucleotide
ggggcugagcugcauucug

SEQ ID NO: 1311859 - RNA, 19 nt, Artificial Sequence
  Description of Artificial Sequence: Synthetic oligonucleotide
ggcguagccccugugggug

SEQ ID NO: 1311860 - RNA, 19 nt, Artificial Sequence
  Description of Artificial Sequence: Synthetic oligonucleotide
cagaguugcuccguuccca

SEQ ID NO: 1311861 - RNA, 19 nt, Artificial Sequence
  Description of Artificial Sequence: Synthetic oligonucleotide
gccagcgcggcuccuugcg

SEQ ID NO: 1311862 - RNA, 19 nt, Artificial Sequence
  Description of Artificial Sequence: Synthetic oligonucleotide
agagacucuuggcgguguu

SEQ ID NO: 1311863 - RNA, 19 nt, Artificial Sequence
  Description of Artificial Sequence: Synthetic oligonucleotide
guguggacgaacacgcacu

SEQ ID NO: 1311864 - RNA, 19 nt, Artificial Sequence
  Description of Artificial Sequence: Synthetic oligonucleotide
acccgguguuuugugucag

SEQ ID NO: 1311865 - RNA, 19 nt, Artificial Sequence
  Description of Artificial Sequence: Synthetic oligonucleotide
uucuggccgcuguacccuc

SEQ ID NO: 1311866 - RNA, 19 nt, Artificial Sequence
  Description of Artificial Sequence: Synthetic oligonucleotide
gagcuaacagugccaccua

SEQ ID NO: 1311867 - RNA, 19 nt, Artificial Sequence
  Description of Artificial Sequence: Synthetic oligonucleotide
cauagaccugacgggcauc

SEQ ID NO: 1311868 - RNA, 19 nt, Artificial Sequence
  Description of Artificial Sequence: Synthetic oligonucleotide
acguggugcugaucccacu

SEQ ID NO: 1311869 - RNA, 19 nt, Artificial Sequence
  Description of Artificial Sequence: Synthetic oligonucleotide
guggacgaacacgcacugc

SEQ ID NO: 1311870 - RNA, 19 nt, Artificial Sequence
  Description of Artificial Sequence: Synthetic oligonucleotide
ucgcugugugcuggggcca

SEQ ID NO: 1311871 - RNA, 19 nt, Artificial Sequence
  Description of Artificial Sequence: Synthetic oligonucleotide
ggguguugccugauuguac

SEQ ID NO: 1311872 - RNA, 19 nt, Artificial Sequence
  Description of Artificial Sequence: Synthetic oligonucleotide
ccaucuuacguggugcuga

SEQ ID NO: 1311873 - RNA, 19 nt, Artificial Sequence
  Description of Artificial Sequence: Synthetic oligonucleotide
cccgacuacucugaaggug

SEQ ID NO: 1311874 - RNA, 19 nt, Artificial Sequence
  Description of Artificial Sequence: Synthetic oligonucleotide
gagaaagugguugccucuu

SEQ ID NO: 1311875 - RNA, 19 nt, Artificial Sequence
  Description of Artificial Sequence: Synthetic oligonucleotide
gguccaaaucuaaggcauc

SEQ ID NO: 1311876 - RNA, 19 nt, Artificial Sequence
  Description of Artificial Sequence: Synthetic oligonucleotide
cuuuuaccuuguggagcuc

SEQ ID NO: 1311877 - RNA, 19 nt, Artificial Sequence
  Description of Artificial Sequence: Synthetic oligonucleotide
gcgccaucuuacguggugc

SEQ ID NO: 1311878 - RNA, 19 nt, Artificial Sequence
  Description of Artificial Sequence: Synthetic oligonucleotide
ccgacuacucugaaggugu

SEQ ID NO: 1311879 - RNA, 19 nt, Artificial Sequence
  Description of Artificial Sequence: Synthetic oligonucleotide
uggcgccaucuuacguggu

SEQ ID NO: 1311880 - RNA, 19 nt, Artificial Sequence
  Description of Artificial Sequence: Synthetic oligonucleotide
ccacgucauuuacacuccc

SEQ ID NO: 1311881 - RNA, 19 nt, Artificial Sequence
  Description of Artificial Sequence: Synthetic oligonucleotide
guuuugugucagauacgcu

SEQ ID NO: 1311882 - RNA, 19 nt, Artificial Sequence
  Description of Artificial Sequence: Synthetic oligonucleotide
uggcgguguuguugcugcu

SEQ ID NO: 1311883 - RNA, 19 nt, Artificial Sequence
  Description of Artificial Sequence: Synthetic oligonucleotide
cugucugggaggcugcuuu

SEQ ID NO: 1311884 - RNA, 19 nt, Artificial Sequence
  Description of Artificial Sequence: Synthetic oligonucleotide
gagcugcauucugacagcu

SEQ ID NO: 1311885 - RNA, 19 nt, Artificial Sequence
  Description of Artificial Sequence: Synthetic oligonucleotide
ccuuacuugcaaaguuuaa

SEQ ID NO: 1311886 - RNA, 19 nt, Artificial Sequence
  Description of Artificial Sequence: Synthetic oligonucleotide
gugaaccguuuauuaucgu

SEQ ID NO: 1311887 - RNA, 19 nt, Artificial Sequence
  Description of Artificial Sequence: Synthetic oligonucleotide
gggagguacuaggaucuuc

SEQ ID NO: 1311888 - RNA, 19 nt, Artificial Sequence
  Description of Artificial Sequence: Synthetic oligonucleotide
ccacuuagcuccugucuga

SEQ ID NO: 1311889 - RNA, 19 nt, Artificial Sequence
  Description of Artificial Sequence: Synthetic oligonucleotide
cccuuucacgauugaauaa

SEQ ID NO: 1311890 - RNA, 19 nt, Artificial Sequence
  Description of Artificial Sequence: Synthetic oligonucleotide
gcguagccccugugggugg

SEQ ID NO: 1311891 - RNA, 19 nt, Artificial Sequence
  Description of Artificial Sequence: Synthetic oligonucleotide
ccacagaguugcuccguuc

SEQ ID NO: 1311892 - RNA, 19 nt, Artificial Sequence
  Description of Artificial Sequence: Synthetic oligonucleotide
gaggggccauucugcaccu

SEQ ID NO: 1311893 - RNA, 19 nt, Artificial Sequence
  Description of Artificial Sequence: Synthetic oligonucleotide
gccaucuuacguggugcug

SEQ ID NO: 1311894 - RNA, 19 nt, Artificial Sequence
  Description of Artificial Sequence: Synthetic oligonucleotide
uagaccugacgggcaucuc

SEQ ID NO: 1311895 - RNA, 19 nt, Artificial Sequence
  Description of Artificial Sequence: Synthetic oligonucleotide
ccuuucacgauugaauaau

SEQ ID NO: 1311896 - RNA, 19 nt, Artificial Sequence
  Description of Artificial Sequence: Synthetic oligonucleotide
caucuuacguggugcugau

SEQ ID NO: 1311897 - RNA, 19 nt, Artificial Sequence
  Description of Artificial Sequence: Synthetic oligonucleotide
guagccccuguggguggag

SEQ ID NO: 1311898 - RNA, 19 nt, Artificial Sequence
  Description of Artificial Sequence: Synthetic oligonucleotide
cuaaggcauccaggcccac

SEQ ID NO: 1311899 - RNA, 19 nt, Artificial Sequence
  Description of Artificial Sequence: Synthetic oligonucleotide
cugcuugcccgguuggcau

SEQ ID NO: 1311900 - RNA, 19 nt, Artificial Sequence
  Description of Artificial Sequence: Synthetic oligonucleotide
ggauggcgccaucuuacgu

SEQ ID NO: 1311901 - RNA, 19 nt, Artificial Sequence
  Description of Artificial Sequence: Synthetic oligonucleotide
gguugagacuuaaguacau

SEQ ID NO: 1311902 - RNA, 19 nt, Artificial Sequence
  Description of Artificial Sequence: Synthetic oligonucleotide
gccaccuacgagaaaacuu

SEQ ID NO: 1311903 - RNA, 19 nt, Artificial Sequence
  Description of Artificial Sequence: Synthetic oligonucleotide
gcugauccuguagcuugac

SEQ ID NO: 1311904 - RNA, 19 nt, Artificial Sequence
  Description of Artificial Sequence: Synthetic oligonucleotide
ggcauggaaaggccacgcu

SEQ ID NO: 1311905 - RNA, 19 nt, Artificial Sequence
  Description of Artificial Sequence: Synthetic oligonucleotide
gagcaucgcguuggagaaa

SEQ ID NO: 1311906 - RNA, 19 nt, Artificial Sequence
  Description of Artificial Sequence: Synthetic oligonucleotide
ggacagacugaaacacugu

SEQ ID NO: 1311907 - RNA, 19 nt, Artificial Sequence
  Description of Artificial Sequence: Synthetic oligonucleotide
gacucuuggcgguguuguu

SEQ ID NO: 1311908 - RNA, 19 nt, Artificial Sequence
  Description of Artificial Sequence: Synthetic oligonucleotide
cugcguggacagacugaaa

SEQ ID NO: 1311909 - RNA, 19 nt, Artificial Sequence
  Description of Artificial Sequence: Synthetic oligonucleotide
gguguuguugcugcuccau

SEQ ID NO: 1311910 - RNA, 19 nt, Artificial Sequence
  Description of Artificial Sequence: Synthetic oligonucleotide
ccgcugcuugcccgguugg

SEQ ID NO: 1311911 - RNA, 19 nt, Artificial Sequence
  Description of Artificial Sequence: Synthetic oligonucleotide
cgguccaaaucuaaggcau

SEQ ID NO: 1311912 - RNA, 19 nt, Artificial Sequence
  Description of Artificial Sequence: Synthetic oligonucleotide
gcccgguuggcaucggacu

SEQ ID NO: 1311913 - RNA, 19 nt, Artificial Sequence
  Description of Artificial Sequence: Synthetic oligonucleotide
cggacuuugaagucccacu

SEQ ID NO: 1311914 - RNA, 19 nt, Artificial Sequence
  Description of Artificial Sequence: Synthetic oligonucleotide
gcgcggcuccuugcgaucc

SEQ ID NO: 1311915 - RNA, 19 nt, Artificial Sequence
  Description of Artificial Sequence: Synthetic oligonucleotide
gcucgggucccuggagaug

SEQ ID NO: 1311916 - RNA, 19 nt, Artificial Sequence
  Description of Artificial Sequence: Synthetic oligonucleotide
cacuuagcuccugucugau

SEQ ID NO: 1311917 - RNA, 19 nt, Artificial Sequence
  Description of Artificial Sequence: Synthetic oligonucleotide
ggccacgcugcacccagcu

SEQ ID NO: 1311918 - RNA, 19 nt, Artificial Sequence
  Description of Artificial Sequence: Synthetic oligonucleotide
ggacgaacacgcacugcgu

SEQ ID NO: 1311919 - RNA, 19 nt, Artificial Sequence
  Description of Artificial Sequence: Synthetic oligonucleotide
guuggacagugaaccguuu

SEQ ID NO: 1311920 - RNA, 19 nt, Artificial Sequence
  Description of Artificial Sequence: Synthetic oligonucleotide
cagcgcggcuccuugcgau

SEQ ID NO: 1311921 - RNA, 19 nt, Artificial Sequence
  Description of Artificial Sequence: Synthetic oligonucleotide
cgaacacgcacugcgugga

SEQ ID NO: 1311922 - RNA, 19 nt, Artificial Sequence
  Description of Artificial Sequence: Synthetic oligonucleotide
gggcguagccccugugggu

SEQ ID NO: 1311923 - RNA, 19 nt, Artificial Sequence
  Description of Artificial Sequence: Synthetic oligonucleotide
cuggagccugcagaagcau

SEQ ID NO: 1311924 - RNA, 19 nt, Artificial Sequence
  Description of Artificial Sequence: Synthetic oligonucleotide
gggcuuucggccagccucu

SEQ ID NO: 1311925 - RNA, 19 nt, Artificial Sequence
  Description of Artificial Sequence: Synthetic oligonucleotide
cccgguguuuugugucaga

SEQ ID NO: 1311926 - RNA, 19 nt, Artificial Sequence
  Description of Artificial Sequence: Synthetic oligonucleotide
ggcccacgucauuuacacu

SEQ ID NO: 1311927 - RNA, 19 nt, Artificial Sequence
  Description of Artificial Sequence: Synthetic oligonucleotide
gcgauccuccagggauggc

SEQ ID NO: 1311928 - RNA, 19 nt, Artificial Sequence
  Description of Artificial Sequence: Synthetic oligonucleotide
gcggcuccuugcgauccuc

SEQ ID NO: 1311929 - RNA, 19 nt, Artificial Sequence
  Description of Artificial Sequence: Synthetic oligonucleotide
ccagcgcggcuccuugcga

SEQ ID NO: 1311930 - RNA, 19 nt, Artificial Sequence
  Description of Artificial Sequence: Synthetic oligonucleotide
cuguguggaggggccuccu

SEQ ID NO: 1311931 - RNA, 19 nt, Artificial Sequence
  Description of Artificial Sequence: Synthetic oligonucleotide
cccgguuggcaucggacuu

SEQ ID NO: 1311932 - RNA, 19 nt, Artificial Sequence
  Description of Artificial Sequence: Synthetic oligonucleotide
ccccgacuacucugaaggu

SEQ ID NO: 1311933 - RNA, 19 nt, Artificial Sequence
  Description of Artificial Sequence: Synthetic oligonucleotide
cgcacugcguggacagacu

SEQ ID NO: 1311934 - RNA, 19 nt, Artificial Sequence
  Description of Artificial Sequence: Synthetic oligonucleotide
gcaucgcguuggagaaagu

SEQ ID NO: 1311935 - RNA, 19 nt, Artificial Sequence
  Description of Artificial Sequence: Synthetic oligonucleotide
cgcguuggagaaagugguu

SEQ ID NO: 1311936 - RNA, 19 nt, Artificial Sequence
  Description of Artificial Sequence: Synthetic oligonucleotide
cggccagccucugaggaau

SEQ ID NO: 1311937 - RNA, 19 nt, Artificial Sequence
  Description of Artificial Sequence: Synthetic oligonucleotide
cgacuacucugaagguguu

SEQ ID NO: 1311938 - RNA, 19 nt, Artificial Sequence
  Description of Artificial Sequence: Synthetic oligonucleotide
ccucaggagaggggccauu

SEQ ID NO: 1311939 - RNA, 19 nt, Artificial Sequence
  Description of Artificial Sequence: Synthetic oligonucleotide
cgcggcuccuugcgauccu

SEQ ID NO: 1311940 - RNA, 19 nt, Artificial Sequence
  Description of Artificial Sequence: Synthetic oligonucleotide
ccccgcugcuugcccgguu

SEQ ID NO: 1311941 - RNA, 19 nt, Artificial Sequence
  Description of Artificial Sequence: Synthetic oligonucleotide
cauaugaagauuuugauac

SEQ ID NO: 1311942 - RNA, 19 nt, Artificial Sequence
  Description of Artificial Sequence: Synthetic oligonucleotide
uauuauuacaaaacuaaag

SEQ ID NO: 1311943 - RNA, 19 nt, Artificial Sequence
  Description of Artificial Sequence: Synthetic oligonucleotide
uaugcuaaggguaaaagga

SEQ ID NO: 1311944 - RNA, 19 nt, Artificial Sequence
  Description of Artificial Sequence: Synthetic oligonucleotide
aaauaucacagcuggcugc

SEQ ID NO: 1311945 - RNA, 19 nt, Artificial Sequence
  Description of Artificial Sequence: Synthetic oligonucleotide
uuuacuagaagccuuacuc

SEQ ID NO: 1311946 - RNA, 19 nt, Artificial Sequence
  Description of Artificial Sequence: Synthetic oligonucleotide
caauauaagcuauuggucg

SEQ ID NO: 1311947 - RNA, 19 nt, Artificial Sequence
  Description of Artificial Sequence: Synthetic oligonucleotide
aaucaauauaagcuauugg

SEQ ID NO: 1311948 - RNA, 19 nt, Artificial Sequence
  Description of Artificial Sequence: Synthetic oligonucleotide
uuauaugucacauaauaac

SEQ ID NO: 1311949 - RNA, 19 nt, Artificial Sequence
  Description of Artificial Sequence: Synthetic oligonucleotide
acuacuaucuguuuccugg

SEQ ID NO: 1311950 - RNA, 19 nt, Artificial Sequence
  Description of Artificial Sequence: Synthetic oligonucleotide
aacaauacaaguagcacac

SEQ ID NO: 1311951 - RNA, 19 nt, Artificial Sequence
  Description of Artificial Sequence: Synthetic oligonucleotide
aucaauauaagcuauuggu

SEQ ID NO: 1311952 - RNA, 19 nt, Artificial Sequence
  Description of Artificial Sequence: Synthetic oligonucleotide
ucaguaauuaaccuguuac

SEQ ID NO: 1311953 - RNA, 19 nt, Artificial Sequence
  Description of Artificial Sequence: Synthetic oligonucleotide
uauuggucgaacuugaucu

SEQ ID NO: 1311954 - RNA, 19 nt, Artificial Sequence
  Description of Artificial Sequence: Synthetic oligonucleotide
aauaggaccaagagaagcc

SEQ ID NO: 1311955 - RNA, 19 nt, Artificial Sequence
  Description of Artificial Sequence: Synthetic oligonucleotide
uuucauaaagcucuaaguc

SEQ ID NO: 1311956 - RNA, 19 nt, Artificial Sequence
  Description of Artificial Sequence: Synthetic oligonucleotide
auuaacuacuaucuguuuc

SEQ ID NO: 1311957 - RNA, 19 nt, Artificial Sequence
  Description of Artificial Sequence: Synthetic oligonucleotide
ucucgaguaauuuucacag

SEQ ID NO: 1311958 - RNA, 19 nt, Artificial Sequence
  Description of Artificial Sequence: Synthetic oligonucleotide
uuaacuacuaucuguuucc

SEQ ID NO: 1311959 - RNA, 19 nt, Artificial Sequence
  Description of Artificial Sequence: Synthetic oligonucleotide
uuuauuguggcuuuggcau

SEQ ID NO: 1311960 - RNA, 19 nt, Artificial Sequence
  Description of Artificial Sequence: Synthetic oligonucleotide
cuugcaacagcaaacaaug

SEQ ID NO: 1311961 - RNA, 19 nt, Artificial Sequence
  Description of Artificial Sequence: Synthetic oligonucleotide
cuuccuuagauacaggagg

SEQ ID NO: 1311962 - RNA, 19 nt, Artificial Sequence
  Description of Artificial Sequence: Synthetic oligonucleotide
aaucuuccuaugcuaaggg

SEQ ID NO: 1311963 - RNA, 19 nt, Artificial Sequence
  Description of Artificial Sequence: Synthetic oligonucleotide
uguaauaaguucaaucauc

SEQ ID NO: 1311964 - RNA, 19 nt, Artificial Sequence
  Description of Artificial Sequence: Synthetic oligonucleotide
uaaaaugcggucuucagaa

SEQ ID NO: 1311965 - RNA, 19 nt, Artificial Sequence
  Description of Artificial Sequence: Synthetic oligonucleotide
aagauaucuggccucauca

SEQ ID NO: 1311966 - RNA, 19 nt, Artificial Sequence
  Description of Artificial Sequence: Synthetic oligonucleotide
ucuagaagauucauguuca

SEQ ID NO: 1311967 - RNA, 19 nt, Artificial Sequence
  Description of Artificial Sequence: Synthetic oligonucleotide
aagcuuauaugucacauaa

SEQ ID NO: 1311968 - RNA, 19 nt, Artificial Sequence
  Description of Artificial Sequence: Synthetic oligonucleotide
uuuaaagguaggcagacua

SEQ ID NO: 1311969 - RNA, 19 nt, Artificial Sequence
  Description of Artificial Sequence: Synthetic oligonucleotide
uucauaaagcucuaagucu

SEQ ID NO: 1311970 - RNA, 19 nt, Artificial Sequence
  Description of Artificial Sequence: Synthetic oligonucleotide
uuuucaccaaucuucuccg

SEQ ID NO: 1311971 - RNA, 19 nt, Artificial Sequence
  Description of Artificial Sequence: Synthetic oligonucleotide
auacuaauauaucaaucag

SEQ ID NO: 1311972 - RNA, 19 nt, Artificial Sequence
  Description of Artificial Sequence: Synthetic oligonucleotide
aaauaagcuuauaugucac

SEQ ID NO: 1311973 - RNA, 19 nt, Artificial Sequence
  Description of Artificial Sequence: Synthetic oligonucleotide
uccaguaaagauaucuggc

SEQ ID NO: 1311974 - RNA, 19 nt, Artificial Sequence
  Description of Artificial Sequence: Synthetic oligonucleotide
gauuuugauacaugcuggg

SEQ ID NO: 1311975 - RNA, 19 nt, Artificial Sequence
  Description of Artificial Sequence: Synthetic oligonucleotide
uacuccacaacaauacaag

SEQ ID NO: 1311976 - RNA, 19 nt, Artificial Sequence
  Description of Artificial Sequence: Synthetic oligonucleotide
cuaugcuaaggguaaaagg

SEQ ID NO: 1311977 - RNA, 19 nt, Artificial Sequence
  Description of Artificial Sequence: Synthetic oligonucleotide
caugagauuaacuacuauc

SEQ ID NO: 1311978 - RNA, 19 nt, Artificial Sequence
  Description of Artificial Sequence: Synthetic oligonucleotide
auccaguaaagauaucugg

SEQ ID NO: 1311979 - RNA, 19 nt, Artificial Sequence
  Description of Artificial Sequence: Synthetic oligonucleotide
uacuaauauaucaaucagu

SEQ ID NO: 1311980 - RNA, 19 nt, Artificial Sequence
  Description of Artificial Sequence: Synthetic oligonucleotide
uaaauaucacagcuggcug

SEQ ID NO: 1311981 - RNA, 19 nt, Artificial Sequence
  Description of Artificial Sequence: Synthetic oligonucleotide
auaauuguucuuuugcagu

SEQ ID NO: 1311982 - RNA, 19 nt, Artificial Sequence
  Description of Artificial Sequence: Synthetic oligonucleotide
uuuugauacaugcugggau

SEQ ID NO: 1311983 - RNA, 19 nt, Artificial Sequence
  Description of Artificial Sequence: Synthetic oligonucleotide
auaaauaucacagcuggcu

SEQ ID NO: 1311984 - RNA, 19 nt, Artificial Sequence
  Description of Artificial Sequence: Synthetic oligonucleotide
aaaggacuggaauuagaug

SEQ ID NO: 1311985 - RNA, 19 nt, Artificial Sequence
  Description of Artificial Sequence: Synthetic oligonucleotide
ugcuccaucuaacugaacu

SEQ ID NO: 1311986 - RNA, 19 nt, Artificial Sequence
  Description of Artificial Sequence: Synthetic oligonucleotide
acuugaucugggcuuaugg

SEQ ID NO: 1311987 - RNA, 19 nt, Artificial Sequence
  Description of Artificial Sequence: Synthetic oligonucleotide
acaacaauacaaguagcac

SEQ ID NO: 1311988 - RNA, 19 nt, Artificial Sequence
  Description of Artificial Sequence: Synthetic oligonucleotide
cuuaugguagcgaugucag

SEQ ID NO: 1311989 - RNA, 19 nt, Artificial Sequence
  Description of Artificial Sequence: Synthetic oligonucleotide
uuaccauucuaaucugagg

SEQ ID NO: 1311990 - RNA, 19 nt, Artificial Sequence
  Description of Artificial Sequence: Synthetic oligonucleotide
uacuagaagccuuacucag

SEQ ID NO: 1311991 - RNA, 19 nt, Artificial Sequence
  Description of Artificial Sequence: Synthetic oligonucleotide
acuuagaagucaaagauga

SEQ ID NO: 1311992 - RNA, 19 nt, Artificial Sequence
  Description of Artificial Sequence: Synthetic oligonucleotide
caguauuggaucaggaagc

SEQ ID NO: 1311993 - RNA, 19 nt, Artificial Sequence
  Description of Artificial Sequence: Synthetic oligonucleotide
uggaucaggaagcauguca

SEQ ID NO: 1311994 - RNA, 19 nt, Artificial Sequence
  Description of Artificial Sequence: Synthetic oligonucleotide
uucaccaaucuucuccggg

SEQ ID NO: 1311995 - RNA, 19 nt, Artificial Sequence
  Description of Artificial Sequence: Synthetic oligonucleotide
ugagauuaacuacuaucug

SEQ ID NO: 1311996 - RNA, 19 nt, Artificial Sequence
  Description of Artificial Sequence: Synthetic oligonucleotide
auaaguucaaucauccuug

SEQ ID NO: 1311997 - RNA, 19 nt, Artificial Sequence
  Description of Artificial Sequence: Synthetic oligonucleotide
uuacuagaagccuuacuca

SEQ ID NO: 1311998 - RNA, 19 nt, Artificial Sequence
  Description of Artificial Sequence: Synthetic oligonucleotide
aauuaaccuguuaccauuc

SEQ ID NO: 1311999 - RNA, 19 nt, Artificial Sequence
  Description of Artificial Sequence: Synthetic oligonucleotide
uccacaaccaaauguuuug

SEQ ID NO: 1312000 - RNA, 19 nt, Artificial Sequence
  Description of Artificial Sequence: Synthetic oligonucleotide
ucaccuacccacuuagaag

SEQ ID NO: 1312001 - RNA, 19 nt, Artificial Sequence
  Description of Artificial Sequence: Synthetic oligonucleotide
cuucagacggucaucaaug

SEQ ID NO: 1312002 - RNA, 19 nt, Artificial Sequence
  Description of Artificial Sequence: Synthetic oligonucleotide
cuggaaggggaauauaaag

SEQ ID NO: 1312003 - RNA, 19 nt, Artificial Sequence
  Description of Artificial Sequence: Synthetic oligonucleotide
uccucuuugagacaauaaa

SEQ ID NO: 1312004 - RNA, 19 nt, Artificial Sequence
  Description of Artificial Sequence: Synthetic oligonucleotide
aucagaguuuuaccagucc

SEQ ID NO: 1312005 - RNA, 19 nt, Artificial Sequence
  Description of Artificial Sequence: Synthetic oligonucleotide
uucccaauguacuggaggc

SEQ ID NO: 1312006 - RNA, 19 nt, Artificial Sequence
  Description of Artificial Sequence: Synthetic oligonucleotide
ugcgaauaggaccaagaga

SEQ ID NO: 1312007 - RNA, 19 nt, Artificial Sequence
  Description of Artificial Sequence: Synthetic oligonucleotide
acuaauauaucaaucagua

SEQ ID NO: 1312008 - RNA, 19 nt, Artificial Sequence
  Description of Artificial Sequence: Synthetic oligonucleotide
caguaauuaaccuguuacc

SEQ ID NO: 1312009 - RNA, 19 nt, Artificial Sequence
  Description of Artificial Sequence: Synthetic oligonucleotide
augagauuaacuacuaucu

SEQ ID NO: 1312010 - RNA, 19 nt, Artificial Sequence
  Description of Artificial Sequence: Synthetic oligonucleotide
ucuuccuaugcuaagggua

SEQ ID NO: 1312011 - RNA, 19 nt, Artificial Sequence
  Description of Artificial Sequence: Synthetic oligonucleotide
ucguaauccaguaaagaua

SEQ ID NO: 1312012 - RNA, 19 nt, Artificial Sequence
  Description of Artificial Sequence: Synthetic oligonucleotide
acauacuaauauaucaauc

SEQ ID NO: 1312013 - RNA, 19 nt, Artificial Sequence
  Description of Artificial Sequence: Synthetic oligonucleotide
uuguaauaaguucaaucau

SEQ ID NO: 1312014 - RNA, 19 nt, Artificial Sequence
  Description of Artificial Sequence: Synthetic oligonucleotide
uacuccggcaauaucuucc

SEQ ID NO: 1312015 - RNA, 19 nt, Artificial Sequence
  Description of Artificial Sequence: Synthetic oligonucleotide
aaaaggacuggaauuagau

SEQ ID NO: 1312016 - RNA, 19 nt, Artificial Sequence
  Description of Artificial Sequence: Synthetic oligonucleotide
aucaaucaguaauuaaccu

SEQ ID NO: 1312017 - RNA, 19 nt, Artificial Sequence
  Description of Artificial Sequence: Synthetic oligonucleotide
uaucuucccaauguacugg

SEQ ID NO: 1312018 - RNA, 19 nt, Artificial Sequence
  Description of Artificial Sequence: Synthetic oligonucleotide
ucuuuuggggacacacuag

SEQ ID NO: 1312019 - RNA, 19 nt, Artificial Sequence
  Description of Artificial Sequence: Synthetic oligonucleotide
uuuggggacacacuagguc

SEQ ID NO: 1312020 - RNA, 19 nt, Artificial Sequence
  Description of Artificial Sequence: Synthetic oligonucleotide
uucacaccaccauaugaag

SEQ ID NO: 1312021 - RNA, 19 nt, Artificial Sequence
  Description of Artificial Sequence: Synthetic oligonucleotide
accuguuaccauucuaauc

SEQ ID NO: 1312022 - RNA, 19 nt, Artificial Sequence
  Description of Artificial Sequence: Synthetic oligonucleotide
aaucagaguuuuaccaguc

SEQ ID NO: 1312023 - RNA, 19 nt, Artificial Sequence
  Description of Artificial Sequence: Synthetic oligonucleotide
uaaagcucuaagucuuuug

SEQ ID NO: 1312024 - RNA, 19 nt, Artificial Sequence
  Description of Artificial Sequence: Synthetic oligonucleotide
aaccaaauguuuuguucca

SEQ ID NO: 1312025 - RNA, 19 nt, Artificial Sequence
  Description of Artificial Sequence: Synthetic oligonucleotide
ugcuaaggguaaaaggacu

SEQ ID NO: 1312026 - RNA, 19 nt, Artificial Sequence
  Description of Artificial Sequence: Synthetic oligonucleotide
cuuggggccgauuuguggc

SEQ ID NO: 1312027 - RNA, 19 nt, Artificial Sequence
  Description of Artificial Sequence: Synthetic oligonucleotide
aaaaugcggucuucagaag

SEQ ID NO: 1312028 - RNA, 19 nt, Artificial Sequence
  Description of Artificial Sequence: Synthetic oligonucleotide
aggcagacuauuaucuucc

SEQ ID NO: 1312029 - RNA, 19 nt, Artificial Sequence
  Description of Artificial Sequence: Synthetic oligonucleotide
auguacuggaggcccaugg

SEQ ID NO: 1312030 - RNA, 19 nt, Artificial Sequence
  Description of Artificial Sequence: Synthetic oligonucleotide
aagccuuacucaguauugg

SEQ ID NO: 1312031 - RNA, 19 nt, Artificial Sequence
  Description of Artificial Sequence: Synthetic oligonucleotide
uucagacggucaucaaugg

SEQ ID NO: 1312032 - RNA, 19 nt, Artificial Sequence
  Description of Artificial Sequence: Synthetic oligonucleotide
gcaaacugcgaauaggacc

SEQ ID NO: 1312033 - RNA, 19 nt, Artificial Sequence
  Description of Artificial Sequence: Synthetic oligonucleotide
aaucugaggcauggaauuc

SEQ ID NO: 1312034 - RNA, 19 nt, Artificial Sequence
  Description of Artificial Sequence: Synthetic oligonucleotide
cuuauaugucacauaauaa

SEQ ID NO: 1312035 - RNA, 19 nt, Artificial Sequence
  Description of Artificial Sequence: Synthetic oligonucleotide
uuugauacaugcugggauu

SEQ ID NO: 1312036 - RNA, 19 nt, Artificial Sequence
  Description of Artificial Sequence: Synthetic oligonucleotide
aaaagccuuccuuucucga

SEQ ID NO: 1312037 - RNA, 19 nt, Artificial Sequence
  Description of Artificial Sequence: Synthetic oligonucleotide
guuaccauucuaaucugag

SEQ ID NO: 1312038 - RNA, 19 nt, Artificial Sequence
  Description of Artificial Sequence: Synthetic oligonucleotide
aauaucacagcuggcugcu

SEQ ID NO: 1312039 - RNA, 19 nt, Artificial Sequence
  Description of Artificial Sequence: Synthetic oligonucleotide
ugagacaauaaagaaucaa

SEQ ID NO: 1312040 - RNA, 19 nt, Artificial Sequence
  Description of Artificial Sequence: Synthetic oligonucleotide
acuaucuguuuccuggcug

SEQ ID NO: 1312041 - RNA, 19 nt, Artificial Sequence
  Description of Artificial Sequence: Synthetic oligonucleotide
uggucgaacuugaucuggg

SEQ ID NO: 1312042 - RNA, 19 nt, Artificial Sequence
  Description of Artificial Sequence: Synthetic oligonucleotide
aggucauucuauuuaaaua

SEQ ID NO: 1312043 - RNA, 19 nt, Artificial Sequence
  Description of Artificial Sequence: Synthetic oligonucleotide
uuaaagguaggcagacuau

SEQ ID NO: 1312044 - RNA, 19 nt, Artificial Sequence
  Description of Artificial Sequence: Synthetic oligonucleotide
aacuacuaucuguuuccug

SEQ ID NO: 1312045 - RNA, 19 nt, Artificial Sequence
  Description of Artificial Sequence: Synthetic oligonucleotide
cacaacaauacaaguagca

SEQ ID NO: 1312046 - RNA, 19 nt, Artificial Sequence
  Description of Artificial Sequence: Synthetic oligonucleotide
auaagcuauuggucgaacu

SEQ ID NO: 1312047 - RNA, 19 nt, Artificial Sequence
  Description of Artificial Sequence: Synthetic oligonucleotide
aaugcacggaccauuuucu

SEQ ID NO: 1312048 - RNA, 19 nt, Artificial Sequence
  Description of Artificial Sequence: Synthetic oligonucleotide
uagcacaccccaaucuucc

SEQ ID NO: 1312049 - RNA, 19 nt, Artificial Sequence
  Description of Artificial Sequence: Synthetic oligonucleotide
acacuagccaaguuuauua

SEQ ID NO: 1312050 - RNA, 19 nt, Artificial Sequence
  Description of Artificial Sequence: Synthetic oligonucleotide
augcauuugccaaucagag

SEQ ID NO: 1312051 - RNA, 19 nt, Artificial Sequence
  Description of Artificial Sequence: Synthetic oligonucleotide
ucacaguucuaaaagcauu

SEQ ID NO: 1312052 - RNA, 19 nt, Artificial Sequence
  Description of Artificial Sequence: Synthetic oligonucleotide
auaaaaggucauucuauuu

SEQ ID NO: 1312053 - RNA, 19 nt, Artificial Sequence
  Description of Artificial Sequence: Synthetic oligonucleotide
uaauaaguucaaucauccu

SEQ ID NO: 1312054 - RNA, 19 nt, Artificial Sequence
  Description of Artificial Sequence: Synthetic oligonucleotide
aaguucuaauuugaacuca

SEQ ID NO: 1312055 - RNA, 19 nt, Artificial Sequence
  Description of Artificial Sequence: Synthetic oligonucleotide
augcuaaggguaaaaggac

SEQ ID NO: 1312056 - RNA, 19 nt, Artificial Sequence
  Description of Artificial Sequence: Synthetic oligonucleotide
gaagccuuacucaguauug

SEQ ID NO: 1312057 - RNA, 19 nt, Artificial Sequence
  Description of Artificial Sequence: Synthetic oligonucleotide
aauaacuggaaggcaaaua

SEQ ID NO: 1312058 - RNA, 19 nt, Artificial Sequence
  Description of Artificial Sequence: Synthetic oligonucleotide
caaucaguaauuaaccugu

SEQ ID NO: 1312059 - RNA, 19 nt, Artificial Sequence
  Description of Artificial Sequence: Synthetic oligonucleotide
aggcaaauacaacauacua

SEQ ID NO: 1312060 - RNA, 19 nt, Artificial Sequence
  Description of Artificial Sequence: Synthetic oligonucleotide
cagacggucaucaauggca

SEQ ID NO: 1312061 - RNA, 19 nt, Artificial Sequence
  Description of Artificial Sequence: Synthetic oligonucleotide
aaggcaaauacaacauacu

SEQ ID NO: 1312062 - RNA, 19 nt, Artificial Sequence
  Description of Artificial Sequence: Synthetic oligonucleotide
uugagacaauaaagaauca

SEQ ID NO: 1312063 - RNA, 19 nt, Artificial Sequence
  Description of Artificial Sequence: Synthetic oligonucleotide
aguucuaauuugaacucag

SEQ ID NO: 1312064 - RNA, 19 nt, Artificial Sequence
  Description of Artificial Sequence: Synthetic oligonucleotide
ugccaaucagaguuuuacc

SEQ ID NO: 1312065 - RNA, 19 nt, Artificial Sequence
  Description of Artificial Sequence: Synthetic oligonucleotide
caaugcacggaccauuuuc

SEQ ID NO: 1312066 - RNA, 19 nt, Artificial Sequence
  Description of Artificial Sequence: Synthetic oligonucleotide
cuauuggucgaacuugauc

SEQ ID NO: 1312067 - RNA, 19 nt, Artificial Sequence
  Description of Artificial Sequence: Synthetic oligonucleotide
ccucuuugagacaauaaag

SEQ ID NO: 1312068 - RNA, 19 nt, Artificial Sequence
  Description of Artificial Sequence: Synthetic oligonucleotide
agaagccuuacucaguauu

SEQ ID NO: 1312069 - RNA, 19 nt, Artificial Sequence
  Description of Artificial Sequence: Synthetic oligonucleotide
uuggucgaacuugaucugg

SEQ ID NO: 1312070 - RNA, 19 nt, Artificial Sequence
  Description of Artificial Sequence: Synthetic oligonucleotide
cuagccaaguuuauuauua

SEQ ID NO: 1312071 - RNA, 19 nt, Artificial Sequence
  Description of Artificial Sequence: Synthetic oligonucleotide
ucgaacuugaucugggcuu

SEQ ID NO: 1312072 - RNA, 19 nt, Artificial Sequence
  Description of Artificial Sequence: Synthetic oligonucleotide
auacaggaggaacaaacuu

SEQ ID NO: 1312073 - RNA, 19 nt, Artificial Sequence
  Description of Artificial Sequence: Synthetic oligonucleotide
ugugucauaucugcuccag

SEQ ID NO: 1312074 - RNA, 19 nt, Artificial Sequence
  Description of Artificial Sequence: Synthetic oligonucleotide
aaccuguuaccauucuaau

SEQ ID NO: 1312075 - RNA, 19 nt, Artificial Sequence
  Description of Artificial Sequence: Synthetic oligonucleotide
ugguugcuccaucuaacug

SEQ ID NO: 1312076 - RNA, 19 nt, Artificial Sequence
  Description of Artificial Sequence: Synthetic oligonucleotide
ugcaaacugcgaauaggac

SEQ ID NO: 1312077 - RNA, 19 nt, Artificial Sequence
  Description of Artificial Sequence: Synthetic oligonucleotide
ucaggcuauacuccacaac

SEQ ID NO: 1312078 - RNA, 19 nt, Artificial Sequence
  Description of Artificial Sequence: Synthetic oligonucleotide
agggccaaagagcagaauu

SEQ ID NO: 1312079 - RNA, 19 nt, Artificial Sequence
  Description of Artificial Sequence: Synthetic oligonucleotide
cugcgaauaggaccaagag

SEQ ID NO: 1312080 - RNA, 19 nt, Artificial Sequence
  Description of Artificial Sequence: Synthetic oligonucleotide
gcgaauaggaccaagagaa

SEQ ID NO: 1312081 - RNA, 19 nt, Artificial Sequence
  Description of Artificial Sequence: Synthetic oligonucleotide
ugacucugcccuaguaggc

SEQ ID NO: 1312082 - RNA, 19 nt, Artificial Sequence
  Description of Artificial Sequence: Synthetic oligonucleotide
ugauacaugcugggauugg

SEQ ID NO: 1312083 - RNA, 19 nt, Artificial Sequence
  Description of Artificial Sequence: Synthetic oligonucleotide
acaauacaaguagcacacc

SEQ ID NO: 1312084 - RNA, 19 nt, Artificial Sequence
  Description of Artificial Sequence: Synthetic oligonucleotide
agauuaacuacuaucuguu

SEQ ID NO: 1312085 - RNA, 19 nt, Artificial Sequence
  Description of Artificial Sequence: Synthetic oligonucleotide
auuggucgaacuugaucug

SEQ ID NO: 1312086 - RNA, 19 nt, Artificial Sequence
  Description of Artificial Sequence: Synthetic oligonucleotide
uucaauugcuguguucacu

SEQ ID NO: 1312087 - RNA, 19 nt, Artificial Sequence
  Description of Artificial Sequence: Synthetic oligonucleotide
auauuccucucgauuuccc

SEQ ID NO: 1312088 - RNA, 19 nt, Artificial Sequence
  Description of Artificial Sequence: Synthetic oligonucleotide
uccggcaauaucuucccaa

SEQ ID NO: 1312089 - RNA, 19 nt, Artificial Sequence
  Description of Artificial Sequence: Synthetic oligonucleotide
uugcaacagcaaacaaugc

SEQ ID NO: 1312090 - RNA, 19 nt, Artificial Sequence
  Description of Artificial Sequence: Synthetic oligonucleotide
aggcauggaauucaggcua

SEQ ID NO: 1312091 - RNA, 19 nt, Artificial Sequence
  Description of Artificial Sequence: Synthetic oligonucleotide
gguugcuccaucuaacuga

SEQ ID NO: 1312092 - RNA, 19 nt, Artificial Sequence
  Description of Artificial Sequence: Synthetic oligonucleotide
uccaucuaacugaacuaaa

SEQ ID NO: 1312093 - RNA, 19 nt, Artificial Sequence
  Description of Artificial Sequence: Synthetic oligonucleotide
aggcaacacaguuccuugg

SEQ ID NO: 1312094 - RNA, 19 nt, Artificial Sequence
  Description of Artificial Sequence: Synthetic oligonucleotide
gcagagaugcugaagaaug

SEQ ID NO: 1312095 - RNA, 19 nt, Artificial Sequence
  Description of Artificial Sequence: Synthetic oligonucleotide
ugcauuugccaaucagagu

SEQ ID NO: 1312096 - RNA, 19 nt, Artificial Sequence
  Description of Artificial Sequence: Synthetic oligonucleotide
ucuacuccggcaauaucuu

SEQ ID NO: 1312097 - RNA, 19 nt, Artificial Sequence
  Description of Artificial Sequence: Synthetic oligonucleotide
agcaaacaaugcacggacc

SEQ ID NO: 1312098 - RNA, 19 nt, Artificial Sequence
  Description of Artificial Sequence: Synthetic oligonucleotide
aggcccaugguccauaauu

SEQ ID NO: 1312099 - RNA, 19 nt, Artificial Sequence
  Description of Artificial Sequence: Synthetic oligonucleotide
cagcagugugcaaacugcg

SEQ ID NO: 1312100 - RNA, 19 nt, Artificial Sequence
  Description of Artificial Sequence: Synthetic oligonucleotide
uacuaucuguuuccuggcu

SEQ ID NO: 1312101 - RNA, 19 nt, Artificial Sequence
  Description of Artificial Sequence: Synthetic oligonucleotide
cucgaguaauuuucacagc

SEQ ID NO: 1312102 - RNA, 19 nt, Artificial Sequence
  Description of Artificial Sequence: Synthetic oligonucleotide
acuacacuagccaaguuua

SEQ ID NO: 1312103 - RNA, 19 nt, Artificial Sequence
  Description of Artificial Sequence: Synthetic oligonucleotide
ucuaagucuuuuggggaca

SEQ ID NO: 1312104 - RNA, 19 nt, Artificial Sequence
  Description of Artificial Sequence: Synthetic oligonucleotide
ccaaucagaguuuuaccag

SEQ ID NO: 1312105 - RNA, 19 nt, Artificial Sequence
  Description of Artificial Sequence: Synthetic oligonucleotide
auuuugauacaugcuggga

SEQ ID NO: 1312106 - RNA, 19 nt, Artificial Sequence
  Description of Artificial Sequence: Synthetic oligonucleotide
ugggcuuaugguagcgaug

SEQ ID NO: 1312107 - RNA, 19 nt, Artificial Sequence
  Description of Artificial Sequence: Synthetic oligonucleotide
acauaauaacuggaaggca

SEQ ID NO: 1312108 - RNA, 19 nt, Artificial Sequence
  Description of Artificial Sequence: Synthetic oligonucleotide
aaugcggucuucagaagau

SEQ ID NO: 1312109 - RNA, 19 nt, Artificial Sequence
  Description of Artificial Sequence: Synthetic oligonucleotide
uauucuacuccggcaauau

SEQ ID NO: 1312110 - RNA, 19 nt, Artificial Sequence
  Description of Artificial Sequence: Synthetic oligonucleotide
uuaugguagcgaugucagc

SEQ ID NO: 1312111 - RNA, 19 nt, Artificial Sequence
  Description of Artificial Sequence: Synthetic oligonucleotide
aggucucacaguucuaaaa

SEQ ID NO: 1312112 - RNA, 19 nt, Artificial Sequence
  Description of Artificial Sequence: Synthetic oligonucleotide
uuuuaaagguaggcagacu

SEQ ID NO: 1312113 - RNA, 19 nt, Artificial Sequence
  Description of Artificial Sequence: Synthetic oligonucleotide
aguaggcuuguacuucacu

SEQ ID NO: 1312114 - RNA, 19 nt, Artificial Sequence
  Description of Artificial Sequence: Synthetic oligonucleotide
gcugugucauaucugcucc

SEQ ID NO: 1312115 - RNA, 19 nt, Artificial Sequence
  Description of Artificial Sequence: Synthetic oligonucleotide
accacuaaaaugcggucuu

SEQ ID NO: 1312116 - RNA, 19 nt, Artificial Sequence
  Description of Artificial Sequence: Synthetic oligonucleotide
cuagaagauucauguucac

SEQ ID NO: 1312117 - RNA, 19 nt, Artificial Sequence
  Description of Artificial Sequence: Synthetic oligonucleotide
aguauuggaucaggaagca

SEQ ID NO: 1312118 - RNA, 19 nt, Artificial Sequence
  Description of Artificial Sequence: Synthetic oligonucleotide
ggaauucaggcuauacucc

SEQ ID NO: 1312119 - RNA, 19 nt, Artificial Sequence
  Description of Artificial Sequence: Synthetic oligonucleotide
cuaucuguuuccuggcuga

SEQ ID NO: 1312120 - RNA, 19 nt, Artificial Sequence
  Description of Artificial Sequence: Synthetic oligonucleotide
aucaguaauuaaccuguua

SEQ ID NO: 1312121 - RNA, 19 nt, Artificial Sequence
  Description of Artificial Sequence: Synthetic oligonucleotide
acuagccaaguuuauuauu

SEQ ID NO: 1312122 - RNA, 19 nt, Artificial Sequence
  Description of Artificial Sequence: Synthetic oligonucleotide
agauaucuggccucaucau

SEQ ID NO: 1312123 - RNA, 19 nt, Artificial Sequence
  Description of Artificial Sequence: Synthetic oligonucleotide
auacuccacaacaauacaa

SEQ ID NO: 1312124 - RNA, 19 nt, Artificial Sequence
  Description of Artificial Sequence: Synthetic oligonucleotide
uauaagcuauuggucgaac

SEQ ID NO: 1312125 - RNA, 19 nt, Artificial Sequence
  Description of Artificial Sequence: Synthetic oligonucleotide
agacuauuaucuucccuuu

SEQ ID NO: 1312126 - RNA, 19 nt, Artificial Sequence
  Description of Artificial Sequence: Synthetic oligonucleotide
uccuuucucgaguaauuuu

SEQ ID NO: 1312127 - RNA, 19 nt, Artificial Sequence
  Description of Artificial Sequence: Synthetic oligonucleotide
agccuuacucaguauugga

SEQ ID NO: 1312128 - RNA, 19 nt, Artificial Sequence
  Description of Artificial Sequence: Synthetic oligonucleotide
acuaaaguucuaauuugaa

SEQ ID NO: 1312129 - RNA, 19 nt, Artificial Sequence
  Description of Artificial Sequence: Synthetic oligonucleotide
ccuguuaccauucuaaucu

SEQ ID NO: 1312130 - RNA, 19 nt, Artificial Sequence
  Description of Artificial Sequence: Synthetic oligonucleotide
auaaagccuuuucaccaau

SEQ ID NO: 1312131 - RNA, 19 nt, Artificial Sequence
  Description of Artificial Sequence: Synthetic oligonucleotide
aguaauuuucacagccaga

SEQ ID NO: 1312132 - RNA, 19 nt, Artificial Sequence
  Description of Artificial Sequence: Synthetic oligonucleotide
gaucugggcuuaugguagc

SEQ ID NO: 1312133 - RNA, 19 nt, Artificial Sequence
  Description of Artificial Sequence: Synthetic oligonucleotide
ugaggcaacacaguuccuu

SEQ ID NO: 1312134 - RNA, 19 nt, Artificial Sequence
  Description of Artificial Sequence: Synthetic oligonucleotide
cuccacaacaauacaagua

SEQ ID NO: 1312135 - RNA, 19 nt, Artificial Sequence
  Description of Artificial Sequence: Synthetic oligonucleotide
acaugagauuaacuacuau

SEQ ID NO: 1312136 - RNA, 19 nt, Artificial Sequence
  Description of Artificial Sequence: Synthetic oligonucleotide
uucaggcuauacuccacaa

SEQ ID NO: 1312137 - RNA, 19 nt, Artificial Sequence
  Description of Artificial Sequence: Synthetic oligonucleotide
cucaguauuggaucaggaa

SEQ ID NO: 1312138 - RNA, 19 nt, Artificial Sequence
  Description of Artificial Sequence: Synthetic oligonucleotide
gugcaaacugcgaauagga

SEQ ID NO: 1312139 - RNA, 19 nt, Artificial Sequence
  Description of Artificial Sequence: Synthetic oligonucleotide
uagcgaugucagcagugug

SEQ ID NO: 1312140 - RNA, 19 nt, Artificial Sequence
  Description of Artificial Sequence: Synthetic oligonucleotide
cucguaauccaguaaagau

SEQ ID NO: 1312141 - RNA, 19 nt, Artificial Sequence
  Description of Artificial Sequence: Synthetic oligonucleotide
guaauuaaccuguuaccau

SEQ ID NO: 1312142 - RNA, 19 nt, Artificial Sequence
  Description of Artificial Sequence: Synthetic oligonucleotide
uuauuguggcuuuggcaua

SEQ ID NO: 1312143 - RNA, 19 nt, Artificial Sequence
  Description of Artificial Sequence: Synthetic oligonucleotide
agacugacuagcaaugcau

SEQ ID NO: 1312144 - RNA, 19 nt, Artificial Sequence
  Description of Artificial Sequence: Synthetic oligonucleotide
acugcgaauaggaccaaga

SEQ ID NO: 1312145 - RNA, 19 nt, Artificial Sequence
  Description of Artificial Sequence: Synthetic oligonucleotide
gauucauguucaccaucuc

SEQ ID NO: 1312146 - RNA, 19 nt, Artificial Sequence
  Description of Artificial Sequence: Synthetic oligonucleotide
uaacuacuaucuguuuccu

SEQ ID NO: 1312147 - RNA, 19 nt, Artificial Sequence
  Description of Artificial Sequence: Synthetic oligonucleotide
aaaggucauucuauuuaaa

SEQ ID NO: 1312148 - RNA, 19 nt, Artificial Sequence
  Description of Artificial Sequence: Synthetic oligonucleotide
ggcaauaucuucccaaugu

SEQ ID NO: 1312149 - RNA, 19 nt, Artificial Sequence
  Description of Artificial Sequence: Synthetic oligonucleotide
caccuacccacuuagaagu

SEQ ID NO: 1312150 - RNA, 19 nt, Artificial Sequence
  Description of Artificial Sequence: Synthetic oligonucleotide
cucaccuacccacuuagaa

SEQ ID NO: 1312151 - RNA, 19 nt, Artificial Sequence
  Description of Artificial Sequence: Synthetic oligonucleotide
uccuuggacaugagauuaa

SEQ ID NO: 1312152 - RNA, 19 nt, Artificial Sequence
  Description of Artificial Sequence: Synthetic oligonucleotide
uucaucucugaggcaacac

SEQ ID NO: 1312153 - RNA, 19 nt, Artificial Sequence
  Description of Artificial Sequence: Synthetic oligonucleotide
gcuaaggguaaaaggacug

SEQ ID NO: 1312154 - RNA, 19 nt, Artificial Sequence
  Description of Artificial Sequence: Synthetic oligonucleotide
cagacuauuaucuucccuu

SEQ ID NO: 1312155 - RNA, 19 nt, Artificial Sequence
  Description of Artificial Sequence: Synthetic oligonucleotide
gccaaguuuauuauuacaa

SEQ ID NO: 1312156 - RNA, 19 nt, Artificial Sequence
  Description of Artificial Sequence: Synthetic oligonucleotide
auacaugcugggauuggug

SEQ ID NO: 1312157 - RNA, 19 nt, Artificial Sequence
  Description of Artificial Sequence: Synthetic oligonucleotide
cuaaucugaggcauggaau

SEQ ID NO: 1312158 - RNA, 19 nt, Artificial Sequence
  Description of Artificial Sequence: Synthetic oligonucleotide
uacacuagccaaguuuauu

SEQ ID NO: 1312159 - RNA, 19 nt, Artificial Sequence
  Description of Artificial Sequence: Synthetic oligonucleotide
ugcaaagcugugucauauc

SEQ ID NO: 1312160 - RNA, 19 nt, Artificial Sequence
  Description of Artificial Sequence: Synthetic oligonucleotide
uccuaugcuaaggguaaaa

SEQ ID NO: 1312161 - RNA, 19 nt, Artificial Sequence
  Description of Artificial Sequence: Synthetic oligonucleotide
gcugacaccuugcaacagc

SEQ ID NO: 1312162 - RNA, 19 nt, Artificial Sequence
  Description of Artificial Sequence: Synthetic oligonucleotide
auauaagcuauuggucgaa

SEQ ID NO: 1312163 - RNA, 19 nt, Artificial Sequence
  Description of Artificial Sequence: Synthetic oligonucleotide
agugugcaaacugcgaaua

SEQ ID NO: 1312164 - RNA, 19 nt, Artificial Sequence
  Description of Artificial Sequence: Synthetic oligonucleotide
agcuauuggucgaacuuga

SEQ ID NO: 1312165 - RNA, 19 nt, Artificial Sequence
  Description of Artificial Sequence: Synthetic oligonucleotide
acuagaagccuuacucagu

SEQ ID NO: 1312166 - RNA, 19 nt, Artificial Sequence
  Description of Artificial Sequence: Synthetic oligonucleotide
cagacugacuagcaaugca

SEQ ID NO: 1312167 - RNA, 19 nt, Artificial Sequence
  Description of Artificial Sequence: Synthetic oligonucleotide
cuaagucuuuuggggacac

SEQ ID NO: 1312168 - RNA, 19 nt, Artificial Sequence
  Description of Artificial Sequence: Synthetic oligonucleotide
uaguaggcuuguacuucac

SEQ ID NO: 1312169 - RNA, 19 nt, Artificial Sequence
  Description of Artificial Sequence: Synthetic oligonucleotide
gcucuaagucuuuugggga

SEQ ID NO: 1312170 - RNA, 19 nt, Artificial Sequence
  Description of Artificial Sequence: Synthetic oligonucleotide
ucuccucuuugagacaaua

SEQ ID NO: 1312171 - RNA, 19 nt, Artificial Sequence
  Description of Artificial Sequence: Synthetic oligonucleotide
cacaccaccauaugaagau

SEQ ID NO: 1312172 - RNA, 19 nt, Artificial Sequence
  Description of Artificial Sequence: Synthetic oligonucleotide
cacacuaggucucacaguu

SEQ ID NO: 1312173 - RNA, 19 nt, Artificial Sequence
  Description of Artificial Sequence: Synthetic oligonucleotide
ugacaccuugcaacagcaa

SEQ ID NO: 1312174 - RNA, 19 nt, Artificial Sequence
  Description of Artificial Sequence: Synthetic oligonucleotide
aaucaguaauuaaccuguu

SEQ ID NO: 1312175 - RNA, 19 nt, Artificial Sequence
  Description of Artificial Sequence: Synthetic oligonucleotide
uuggggccgauuuguggcu

SEQ ID NO: 1312176 - RNA, 19 nt, Artificial Sequence
  Description of Artificial Sequence: Synthetic oligonucleotide
ugggauugguggcucuuuu

SEQ ID NO: 1312177 - RNA, 19 nt, Artificial Sequence
  Description of Artificial Sequence: Synthetic oligonucleotide
acucaguauuggaucagga

SEQ ID NO: 1312178 - RNA, 19 nt, Artificial Sequence
  Description of Artificial Sequence: Synthetic oligonucleotide
cuaggucucacaguucuaa

SEQ ID NO: 1312179 - RNA, 19 nt, Artificial Sequence
  Description of Artificial Sequence: Synthetic oligonucleotide
uccuuagauacaggaggaa

SEQ ID NO: 1312180 - RNA, 19 nt, Artificial Sequence
  Description of Artificial Sequence: Synthetic oligonucleotide
ugcugacaccuugcaacag

SEQ ID NO: 1312181 - RNA, 19 nt, Artificial Sequence
  Description of Artificial Sequence: Synthetic oligonucleotide
cugcugacaccuugcaaca

SEQ ID NO: 1312182 - RNA, 19 nt, Artificial Sequence
  Description of Artificial Sequence: Synthetic oligonucleotide
auauucuacuccggcaaua

SEQ ID NO: 1312183 - RNA, 19 nt, Artificial Sequence
  Description of Artificial Sequence: Synthetic oligonucleotide
cccaauguacuggaggccc

SEQ ID NO: 1312184 - RNA, 19 nt, Artificial Sequence
  Description of Artificial Sequence: Synthetic oligonucleotide
cuacuccggcaauaucuuc

SEQ ID NO: 1312185 - RNA, 19 nt, Artificial Sequence
  Description of Artificial Sequence: Synthetic oligonucleotide
uagaagccuuacucaguau

SEQ ID NO: 1312186 - RNA, 19 nt, Artificial Sequence
  Description of Artificial Sequence: Synthetic oligonucleotide
gauacaugcugggauuggu

SEQ ID NO: 1312187 - RNA, 19 nt, Artificial Sequence
  Description of Artificial Sequence: Synthetic oligonucleotide
gaauuagaugccagcuucu

SEQ ID NO: 1312188 - RNA, 19 nt, Artificial Sequence
  Description of Artificial Sequence: Synthetic oligonucleotide
ggaucaggaagcaugucaa

SEQ ID NO: 1312189 - RNA, 19 nt, Artificial Sequence
  Description of Artificial Sequence: Synthetic oligonucleotide
uucuguugacucugcccua

SEQ ID NO: 1312190 - RNA, 19 nt, Artificial Sequence
  Description of Artificial Sequence: Synthetic oligonucleotide
caucagacugcugcaccac

SEQ ID NO: 1312191 - RNA, 19 nt, Artificial Sequence
  Description of Artificial Sequence: Synthetic oligonucleotide
cacggaccauuuucucccc

SEQ ID NO: 1312192 - RNA, 19 nt, Artificial Sequence
  Description of Artificial Sequence: Synthetic oligonucleotide
gcccauaauuguucuuuug

SEQ ID NO: 1312193 - RNA, 19 nt, Artificial Sequence
  Description of Artificial Sequence: Synthetic oligonucleotide
acaccccaaucuuccuaug

SEQ ID NO: 1312194 - RNA, 19 nt, Artificial Sequence
  Description of Artificial Sequence: Synthetic oligonucleotide
acaaugcacggaccauuuu

SEQ ID NO: 1312195 - RNA, 19 nt, Artificial Sequence
  Description of Artificial Sequence: Synthetic oligonucleotide
cccaugguccauaauuuca

SEQ ID NO: 1312196 - RNA, 19 nt, Artificial Sequence
  Description of Artificial Sequence: Synthetic oligonucleotide
accuacccacuuagaaguc

SEQ ID NO: 1312197 - RNA, 19 nt, Artificial Sequence
  Description of Artificial Sequence: Synthetic oligonucleotide
cuccagacugacuagcaau

SEQ ID NO: 1312198 - RNA, 19 nt, Artificial Sequence
  Description of Artificial Sequence: Synthetic oligonucleotide
acucugcccuaguaggcuu

SEQ ID NO: 1312199 - RNA, 19 nt, Artificial Sequence
  Description of Artificial Sequence: Synthetic oligonucleotide
auggugccagagccaauaa

SEQ ID NO: 1312200 - RNA, 19 nt, Artificial Sequence
  Description of Artificial Sequence: Synthetic oligonucleotide
gugguugcuccaucuaacu

SEQ ID NO: 1312201 - RNA, 19 nt, Artificial Sequence
  Description of Artificial Sequence: Synthetic oligonucleotide
ggguaaaaggacuggaauu

SEQ ID NO: 1312202 - RNA, 19 nt, Artificial Sequence
  Description of Artificial Sequence: Synthetic oligonucleotide
guccauaauuucauuugua

SEQ ID NO: 1312203 - RNA, 19 nt, Artificial Sequence
  Description of Artificial Sequence: Synthetic oligonucleotide
gcccucguaauccaguaaa

SEQ ID NO: 1312204 - RNA, 19 nt, Artificial Sequence
  Description of Artificial Sequence: Synthetic oligonucleotide
ucugcccuaguaggcuugu

SEQ ID NO: 1312205 - RNA, 19 nt, Artificial Sequence
  Description of Artificial Sequence: Synthetic oligonucleotide
aggcuauacuccacaacaa

SEQ ID NO: 1312206 - RNA, 19 nt, Artificial Sequence
  Description of Artificial Sequence: Synthetic oligonucleotide
agcuuauaugucacauaau

SEQ ID NO: 1312207 - RNA, 19 nt, Artificial Sequence
  Description of Artificial Sequence: Synthetic oligonucleotide
cccucaccuacccacuuag

SEQ ID NO: 1312208 - RNA, 19 nt, Artificial Sequence
  Description of Artificial Sequence: Synthetic oligonucleotide
ccuaguaggcuuguacuuc

SEQ ID NO: 1312209 - RNA, 19 nt, Artificial Sequence
  Description of Artificial Sequence: Synthetic oligonucleotide
gcuccaucuaacugaacua

SEQ ID NO: 1312210 - RNA, 19 nt, Artificial Sequence
  Description of Artificial Sequence: Synthetic oligonucleotide
gaucaggaagcaugucaau

SEQ ID NO: 1312211 - RNA, 19 nt, Artificial Sequence
  Description of Artificial Sequence: Synthetic oligonucleotide
uuccuaugcuaaggguaaa

SEQ ID NO: 1312212 - RNA, 19 nt, Artificial Sequence
  Description of Artificial Sequence: Synthetic oligonucleotide
cuucaucucugaggcaaca

SEQ ID NO: 1312213 - RNA, 19 nt, Artificial Sequence
  Description of Artificial Sequence: Synthetic oligonucleotide
augggccacacaacaauuu

SEQ ID NO: 1312214 - RNA, 19 nt, Artificial Sequence
  Description of Artificial Sequence: Synthetic oligonucleotide
guagcgaugucagcagugu

SEQ ID NO: 1312215 - RNA, 19 nt, Artificial Sequence
  Description of Artificial Sequence: Synthetic oligonucleotide
gacucugcccuaguaggcu

SEQ ID NO: 1312216 - RNA, 19 nt, Artificial Sequence
  Description of Artificial Sequence: Synthetic oligonucleotide
ccagacugacuagcaaugc

SEQ ID NO: 1312217 - RNA, 19 nt, Artificial Sequence
  Description of Artificial Sequence: Synthetic oligonucleotide
cacuagccaaguuuauuau

SEQ ID NO: 1312218 - RNA, 19 nt, Artificial Sequence
  Description of Artificial Sequence: Synthetic oligonucleotide
guaggcagacuauuaucuu

SEQ ID NO: 1312219 - RNA, 19 nt, Artificial Sequence
  Description of Artificial Sequence: Synthetic oligonucleotide
caccaccauaugaagauuu

SEQ ID NO: 1312220 - RNA, 19 nt, Artificial Sequence
  Description of Artificial Sequence: Synthetic oligonucleotide
caucaauggcaugugcugu

SEQ ID NO: 1312221 - RNA, 19 nt, Artificial Sequence
  Description of Artificial Sequence: Synthetic oligonucleotide
gggcuuaugguagcgaugu

SEQ ID NO: 1312222 - RNA, 19 nt, Artificial Sequence
  Description of Artificial Sequence: Synthetic oligonucleotide
guaauccaguaaagauauc

SEQ ID NO: 1312223 - RNA, 19 nt, Artificial Sequence
  Description of Artificial Sequence: Synthetic oligonucleotide
caccacuaaaaugcggucu

SEQ ID NO: 1312224 - RNA, 19 nt, Artificial Sequence
  Description of Artificial Sequence: Synthetic oligonucleotide
ggcuauacuccacaacaau

SEQ ID NO: 1312225 - RNA, 19 nt, Artificial Sequence
  Description of Artificial Sequence: Synthetic oligonucleotide
gcccaugguccauaauuuc

SEQ ID NO: 1312226 - RNA, 19 nt, Artificial Sequence
  Description of Artificial Sequence: Synthetic oligonucleotide
ccuugcaacagcaaacaau

SEQ ID NO: 1312227 - RNA, 19 nt, Artificial Sequence
  Description of Artificial Sequence: Synthetic oligonucleotide
cccaccacuaaaaugcggu

SEQ ID NO: 1312228 - RNA, 19 nt, Artificial Sequence
  Description of Artificial Sequence: Synthetic oligonucleotide
acaccaccauaugaagauu

SEQ ID NO: 1312229 - RNA, 19 nt, Artificial Sequence
  Description of Artificial Sequence: Synthetic oligonucleotide
cauauucuacuccggcaau

SEQ ID NO: 1312230 - RNA, 19 nt, Artificial Sequence
  Description of Artificial Sequence: Synthetic oligonucleotide
cugggcuuaugguagcgau

SEQ ID NO: 1312231 - RNA, 19 nt, Artificial Sequence
  Description of Artificial Sequence: Synthetic oligonucleotide
ccaccacuaaaaugcgguc

SEQ ID NO: 1312232 - RNA, 19 nt, Artificial Sequence
  Description of Artificial Sequence: Synthetic oligonucleotide
gcggucuucagaagaugug

SEQ ID NO: 1312233 - RNA, 19 nt, Artificial Sequence
  Description of Artificial Sequence: Synthetic oligonucleotide
cagugugcaaacugcgaau

SEQ ID NO: 1312234 - RNA, 19 nt, Artificial Sequence
  Description of Artificial Sequence: Synthetic oligonucleotide
cugcaaagcugugucauau

SEQ ID NO: 1312235 - RNA, 19 nt, Artificial Sequence
  Description of Artificial Sequence: Synthetic oligonucleotide
ccucguaauccaguaaaga

SEQ ID NO: 1312236 - RNA, 19 nt, Artificial Sequence
  Description of Artificial Sequence: Synthetic oligonucleotide
cauuugccaaucagaguuu

SEQ ID NO: 1312237 - RNA, 19 nt, Artificial Sequence
  Description of Artificial Sequence: Synthetic oligonucleotide
uggggccgauuuguggcuc

SEQ ID NO: 1312238 - RNA, 19 nt, Artificial Sequence
  Description of Artificial Sequence: Synthetic oligonucleotide
cuacacuagccaaguuuau

SEQ ID NO: 1312239 - RNA, 19 nt, Artificial Sequence
  Description of Artificial Sequence: Synthetic oligonucleotide
acuaggucucacaguucua

SEQ ID NO: 1312240 - RNA, 19 nt, Artificial Sequence
  Description of Artificial Sequence: Synthetic oligonucleotide
ggaccaagagaagccucuc

SEQ ID NO: 1312241 - RNA, 19 nt, Artificial Sequence
  Description of Artificial Sequence: Synthetic oligonucleotide
ccaauguacuggaggccca

SEQ ID NO: 1312242 - RNA, 19 nt, Artificial Sequence
  Description of Artificial Sequence: Synthetic oligonucleotide
cuccggcaauaucuuccca

SEQ ID NO: 1312243 - RNA, 19 nt, Artificial Sequence
  Description of Artificial Sequence: Synthetic oligonucleotide
gccuuacucaguauuggau

SEQ ID NO: 1312244 - RNA, 19 nt, Artificial Sequence
  Description of Artificial Sequence: Synthetic oligonucleotide
ccacuaaaaugcggucuuc

SEQ ID NO: 1312245 - RNA, 19 nt, Artificial Sequence
  Description of Artificial Sequence: Synthetic oligonucleotide
ggcccucguaauccaguaa

SEQ ID NO: 1312246 - RNA, 19 nt, Artificial Sequence
  Description of Artificial Sequence: Synthetic oligonucleotide
gggcccucguaauccagua

SEQ ID NO: 1312247 - RNA, 19 nt, Artificial Sequence
  Description of Artificial Sequence: Synthetic oligonucleotide
gaggcccaugguccauaau

SEQ ID NO: 1312248 - RNA, 19 nt, Artificial Sequence
  Description of Artificial Sequence: Synthetic oligonucleotide
ggggaauauaaagccuuuu

SEQ ID NO: 1312249 - RNA, 19 nt, Artificial Sequence
  Description of Artificial Sequence: Synthetic oligonucleotide
ccggcaauaucuucccaau

SEQ ID NO: 1312250 - RNA, 19 nt, Artificial Sequence
  Description of Artificial Sequence: Synthetic oligonucleotide
ccucaccuacccacuuaga

SEQ ID NO: 1312251 - RNA, 19 nt, Artificial Sequence
  Description of Artificial Sequence: Synthetic oligonucleotide
ccacaaccaaauguuuugu

SEQ ID NO: 1312252 - RNA, 19 nt, Artificial Sequence
  Description of Artificial Sequence: Synthetic oligonucleotide
cgaacuugaucugggcuua

SEQ ID NO: 1312253 - RNA, 19 nt, Artificial Sequence
  Description of Artificial Sequence: Synthetic oligonucleotide
gcuauuggucgaacuugau

SEQ ID NO: 1312254 - RNA, 19 nt, Artificial Sequence
  Description of Artificial Sequence: Synthetic oligonucleotide
ccugcucccaaagacuuuu

SEQ ID NO: 1312255 - RNA, 19 nt, Artificial Sequence
  Description of Artificial Sequence: Synthetic oligonucleotide
gcauggaauucaggcuaua

SEQ ID NO: 1312256 - RNA, 19 nt, Artificial Sequence
  Description of Artificial Sequence: Synthetic oligonucleotide
ggggcccucguaauccagu

SEQ ID NO: 1312257 - RNA, 19 nt, Artificial Sequence
  Description of Artificial Sequence: Synthetic oligonucleotide
ccccucaccuacccacuua

SEQ ID NO: 1312258 - RNA, 19 nt, Artificial Sequence
  Description of Artificial Sequence: Synthetic oligonucleotide
cccugcucccaaagacuuu

SEQ ID NO: 1312259 - RNA, 19 nt, Artificial Sequence
  Description of Artificial Sequence: Synthetic oligonucleotide
aaaucaauuauuauguucc

SEQ ID NO: 1312260 - RNA, 19 nt, Artificial Sequence
  Description of Artificial Sequence: Synthetic oligonucleotide
guuucuauaacacacacgc

SEQ ID NO: 1312261 - RNA, 19 nt, Artificial Sequence
  Description of Artificial Sequence: Synthetic oligonucleotide
acaguuaccucauagcucc

SEQ ID NO: 1312262 - RNA, 19 nt, Artificial Sequence
  Description of Artificial Sequence: Synthetic oligonucleotide
auuauuauguuccaauguc

SEQ ID NO: 1312263 - RNA, 19 nt, Artificial Sequence
  Description of Artificial Sequence: Synthetic oligonucleotide
uguuaggggaguaaaaccg

SEQ ID NO: 1312264 - RNA, 19 nt, Artificial Sequence
  Description of Artificial Sequence: Synthetic oligonucleotide
aaagaaggcgcuuggagcg

SEQ ID NO: 1312265 - RNA, 19 nt, Artificial Sequence
  Description of Artificial Sequence: Synthetic oligonucleotide
aauaccuagucucuugacg

SEQ ID NO: 1312266 - RNA, 19 nt, Artificial Sequence
  Description of Artificial Sequence: Synthetic oligonucleotide
uaaagaauuguucugcuug

SEQ ID NO: 1312267 - RNA, 19 nt, Artificial Sequence
  Description of Artificial Sequence: Synthetic oligonucleotide
aagacauaaaauguauacc

SEQ ID NO: 1312268 - RNA, 19 nt, Artificial Sequence
  Description of Artificial Sequence: Synthetic oligonucleotide
auaccuagucucuugacgc

SEQ ID NO: 1312269 - RNA, 19 nt, Artificial Sequence
  Description of Artificial Sequence: Synthetic oligonucleotide
uuugggacaaacuugaaaa

SEQ ID NO: 1312270 - RNA, 19 nt, Artificial Sequence
  Description of Artificial Sequence: Synthetic oligonucleotide
uauuagucuggcuagcugg

SEQ ID NO: 1312271 - RNA, 19 nt, Artificial Sequence
  Description of Artificial Sequence: Synthetic oligonucleotide
uaucaggacauguuuaggg

SEQ ID NO: 1312272 - RNA, 19 nt, Artificial Sequence
  Description of Artificial Sequence: Synthetic oligonucleotide
gaguauuugccacaugucg

SEQ ID NO: 1312273 - RNA, 19 nt, Artificial Sequence
  Description of Artificial Sequence: Synthetic oligonucleotide
auuguagcgucuuuucugc

SEQ ID NO: 1312274 - RNA, 19 nt, Artificial Sequence
  Description of Artificial Sequence: Synthetic oligonucleotide
aaugauaaagucaaaaguu

SEQ ID NO: 1312275 - RNA, 19 nt, Artificial Sequence
  Description of Artificial Sequence: Synthetic oligonucleotide
ucgauaauaaacagcagcu

SEQ ID NO: 1312276 - RNA, 19 nt, Artificial Sequence
  Description of Artificial Sequence: Synthetic oligonucleotide
agacagaaagaguauuugc

SEQ ID NO: 1312277 - RNA, 19 nt, Artificial Sequence
  Description of Artificial Sequence: Synthetic oligonucleotide
aaggcugcaaucuuccauc

SEQ ID NO: 1312278 - RNA, 19 nt, Artificial Sequence
  Description of Artificial Sequence: Synthetic oligonucleotide
uuagugguaauuaacacuu

SEQ ID NO: 1312279 - RNA, 19 nt, Artificial Sequence
  Description of Artificial Sequence: Synthetic oligonucleotide
auguuaggggaguaaaacc

SEQ ID NO: 1312280 - RNA, 19 nt, Artificial Sequence
  Description of Artificial Sequence: Synthetic oligonucleotide
auaagauggacuccaauug

SEQ ID NO: 1312281 - RNA, 19 nt, Artificial Sequence
  Description of Artificial Sequence: Synthetic oligonucleotide
ugauaaagucaaaaguuca

SEQ ID NO: 1312282 - RNA, 19 nt, Artificial Sequence
  Description of Artificial Sequence: Synthetic oligonucleotide
auaccuguccauaagaugg

SEQ ID NO: 1312283 - RNA, 19 nt, Artificial Sequence
  Description of Artificial Sequence: Synthetic oligonucleotide
aauaagugcauuaacaaua

SEQ ID NO: 1312284 - RNA, 19 nt, Artificial Sequence
  Description of Artificial Sequence: Synthetic oligonucleotide
uucauauuagucuggcuag

SEQ ID NO: 1312285 - RNA, 19 nt, Artificial Sequence
  Description of Artificial Sequence: Synthetic oligonucleotide
ucuccguacacauugagcu

SEQ ID NO: 1312286 - RNA, 19 nt, Artificial Sequence
  Description of Artificial Sequence: Synthetic oligonucleotide
uuggcuacuagccaaggcc

SEQ ID NO: 1312287 - RNA, 19 nt, Artificial Sequence
  Description of Artificial Sequence: Synthetic oligonucleotide
aauauugcuucugucauca

SEQ ID NO: 1312288 - RNA, 19 nt, Artificial Sequence
  Description of Artificial Sequence: Synthetic oligonucleotide
gaugccguaggucuuaaag

SEQ ID NO: 1312289 - RNA, 19 nt, Artificial Sequence
  Description of Artificial Sequence: Synthetic oligonucleotide
gucgauaauaaacagcagc

SEQ ID NO: 1312290 - RNA, 19 nt, Artificial Sequence
  Description of Artificial Sequence: Synthetic oligonucleotide
agcuccauguucuuguggc

SEQ ID NO: 1312291 - RNA, 19 nt, Artificial Sequence
  Description of Artificial Sequence: Synthetic oligonucleotide
uuauuauguuccaauguca

SEQ ID NO: 1312292 - RNA, 19 nt, Artificial Sequence
  Description of Artificial Sequence: Synthetic oligonucleotide
agaaucuuggaauuucaag

SEQ ID NO: 1312293 - RNA, 19 nt, Artificial Sequence
  Description of Artificial Sequence: Synthetic oligonucleotide
cacaguuucuauaacacac

SEQ ID NO: 1312294 - RNA, 19 nt, Artificial Sequence
  Description of Artificial Sequence: Synthetic oligonucleotide
aaucuuggaauuucaagaa

SEQ ID NO: 1312295 - RNA, 19 nt, Artificial Sequence
  Description of Artificial Sequence: Synthetic oligonucleotide
agaaucucgaugugcacac

SEQ ID NO: 1312296 - RNA, 19 nt, Artificial Sequence
  Description of Artificial Sequence: Synthetic oligonucleotide
aucaucuccguacacauug

SEQ ID NO: 1312297 - RNA, 19 nt, Artificial Sequence
  Description of Artificial Sequence: Synthetic oligonucleotide
acgaugagagaccacaauc

SEQ ID NO: 1312298 - RNA, 19 nt, Artificial Sequence
  Description of Artificial Sequence: Synthetic oligonucleotide
acauaaaauguauaccugu

SEQ ID NO: 1312299 - RNA, 19 nt, Artificial Sequence
  Description of Artificial Sequence: Synthetic oligonucleotide
aauugcaggaucuggcuga

SEQ ID NO: 1312300 - RNA, 19 nt, Artificial Sequence
  Description of Artificial Sequence: Synthetic oligonucleotide
aagaaaucgguuaucagga

SEQ ID NO: 1312301 - RNA, 19 nt, Artificial Sequence
  Description of Artificial Sequence: Synthetic oligonucleotide
cuucuauagacagaaagag

SEQ ID NO: 1312302 - RNA, 19 nt, Artificial Sequence
  Description of Artificial Sequence: Synthetic oligonucleotide
uguauaccuguccauaaga

SEQ ID NO: 1312303 - RNA, 19 nt, Artificial Sequence
  Description of Artificial Sequence: Synthetic oligonucleotide
uaagauggacuccaauugc

SEQ ID NO: 1312304 - RNA, 19 nt, Artificial Sequence
  Description of Artificial Sequence: Synthetic oligonucleotide
uggaauuucaagaaaccau

SEQ ID NO: 1312305 - RNA, 19 nt, Artificial Sequence
  Description of Artificial Sequence: Synthetic oligonucleotide
acaugucgguaauuaaacc

SEQ ID NO: 1312306 - RNA, 19 nt, Artificial Sequence
  Description of Artificial Sequence: Synthetic oligonucleotide
agcaucaggacaauguggc

SEQ ID NO: 1312307 - RNA, 19 nt, Artificial Sequence
  Description of Artificial Sequence: Synthetic oligonucleotide
agaaagaaggcgcuuggag

SEQ ID NO: 1312308 - RNA, 19 nt, Artificial Sequence
  Description of Artificial Sequence: Synthetic oligonucleotide
uaaagucaaaaguucauua

SEQ ID NO: 1312309 - RNA, 19 nt, Artificial Sequence
  Description of Artificial Sequence: Synthetic oligonucleotide
cuucauaugcuugaugccg

SEQ ID NO: 1312310 - RNA, 19 nt, Artificial Sequence
  Description of Artificial Sequence: Synthetic oligonucleotide
ugggccuaaaagaugaacu

SEQ ID NO: 1312311 - RNA, 19 nt, Artificial Sequence
  Description of Artificial Sequence: Synthetic oligonucleotide
aauuaacacuuccacaauu

SEQ ID NO: 1312312 - RNA, 19 nt, Artificial Sequence
  Description of Artificial Sequence: Synthetic oligonucleotide
uauuauguuccaaugucau

SEQ ID NO: 1312313 - RNA, 19 nt, Artificial Sequence
  Description of Artificial Sequence: Synthetic oligonucleotide
aaaccuaugcuuucaucca

SEQ ID NO: 1312314 - RNA, 19 nt, Artificial Sequence
  Description of Artificial Sequence: Synthetic oligonucleotide
aguagauacacagagacuu

SEQ ID NO: 1312315 - RNA, 19 nt, Artificial Sequence
  Description of Artificial Sequence: Synthetic oligonucleotide
uugacgcuucuauagacag

SEQ ID NO: 1312316 - RNA, 19 nt, Artificial Sequence
  Description of Artificial Sequence: Synthetic oligonucleotide
auaaacagcagcucauugu

SEQ ID NO: 1312317 - RNA, 19 nt, Artificial Sequence
  Description of Artificial Sequence: Synthetic oligonucleotide
caggaguagauacacagag

SEQ ID NO: 1312318 - RNA, 19 nt, Artificial Sequence
  Description of Artificial Sequence: Synthetic oligonucleotide
acaaucccagaaugaagcc

SEQ ID NO: 1312319 - RNA, 19 nt, Artificial Sequence
  Description of Artificial Sequence: Synthetic oligonucleotide
auaugcuugaugccguagg

SEQ ID NO: 1312320 - RNA, 19 nt, Artificial Sequence
  Description of Artificial Sequence: Synthetic oligonucleotide
uccaauugcaggaucuggc

SEQ ID NO: 1312321 - RNA, 19 nt, Artificial Sequence
  Description of Artificial Sequence: Synthetic oligonucleotide
ucuuaaagaagaccaugac

SEQ ID NO: 1312322 - RNA, 19 nt, Artificial Sequence
  Description of Artificial Sequence: Synthetic oligonucleotide
uauaccuguccauaagaug

SEQ ID NO: 1312323 - RNA, 19 nt, Artificial Sequence
  Description of Artificial Sequence: Synthetic oligonucleotide
gaugagagaccacaauccc

SEQ ID NO: 1312324 - RNA, 19 nt, Artificial Sequence
  Description of Artificial Sequence: Synthetic oligonucleotide
ucuacaucaucuccguaca

SEQ ID NO: 1312325 - RNA, 19 nt, Artificial Sequence
  Description of Artificial Sequence: Synthetic oligonucleotide
aaucaauuauuauguucca

SEQ ID NO: 1312326 - RNA, 19 nt, Artificial Sequence
  Description of Artificial Sequence: Synthetic oligonucleotide
cacuucuacaucaucuccg

SEQ ID NO: 1312327 - RNA, 19 nt, Artificial Sequence
  Description of Artificial Sequence: Synthetic oligonucleotide
aaugucauugucccacagu

SEQ ID NO: 1312328 - RNA, 19 nt, Artificial Sequence
  Description of Artificial Sequence: Synthetic oligonucleotide
uuaucugagccaccgggag

SEQ ID NO: 1312329 - RNA, 19 nt, Artificial Sequence
  Description of Artificial Sequence: Synthetic oligonucleotide
uacuugagagggucuaugg

SEQ ID NO: 1312330 - RNA, 19 nt, Artificial Sequence
  Description of Artificial Sequence: Synthetic oligonucleotide
uuuugggacaaacuugaaa

SEQ ID NO: 1312331 - RNA, 19 nt, Artificial Sequence
  Description of Artificial Sequence: Synthetic oligonucleotide
cauaaaauguauaccuguc

SEQ ID NO: 1312332 - RNA, 19 nt, Artificial Sequence
  Description of Artificial Sequence: Synthetic oligonucleotide
aaucucgaugugcacacca

SEQ ID NO: 1312333 - RNA, 19 nt, Artificial Sequence
  Description of Artificial Sequence: Synthetic oligonucleotide
agguccuucauauuagucu

SEQ ID NO: 1312334 - RNA, 19 nt, Artificial Sequence
  Description of Artificial Sequence: Synthetic oligonucleotide
aguauuugccacaugucgg

SEQ ID NO: 1312335 - RNA, 19 nt, Artificial Sequence
  Description of Artificial Sequence: Synthetic oligonucleotide
gauguuaggggaguaaaac

SEQ ID NO: 1312336 - RNA, 19 nt, Artificial Sequence
  Description of Artificial Sequence: Synthetic oligonucleotide
agaauauugcuucugucau

SEQ ID NO: 1312337 - RNA, 19 nt, Artificial Sequence
  Description of Artificial Sequence: Synthetic oligonucleotide
cuuccgacauccuugggcc

SEQ ID NO: 1312338 - RNA, 19 nt, Artificial Sequence
  Description of Artificial Sequence: Synthetic oligonucleotide
uucuauagacagaaagagu

SEQ ID NO: 1312339 - RNA, 19 nt, Artificial Sequence
  Description of Artificial Sequence: Synthetic oligonucleotide
cucgaugugaccagcggcg

SEQ ID NO: 1312340 - RNA, 19 nt, Artificial Sequence
  Description of Artificial Sequence: Synthetic oligonucleotide
uaccucauagcuccuguag

SEQ ID NO: 1312341 - RNA, 19 nt, Artificial Sequence
  Description of Artificial Sequence: Synthetic oligonucleotide
cauuguagcgucuuuucug

SEQ ID NO: 1312342 - RNA, 19 nt, Artificial Sequence
  Description of Artificial Sequence: Synthetic oligonucleotide
cacaugucgguaauuaaac

SEQ ID NO: 1312343 - RNA, 19 nt, Artificial Sequence
  Description of Artificial Sequence: Synthetic oligonucleotide
gugucgauaauaaacagca

SEQ ID NO: 1312344 - RNA, 19 nt, Artificial Sequence
  Description of Artificial Sequence: Synthetic oligonucleotide
ugcucggcguacuugagag

SEQ ID NO: 1312345 - RNA, 19 nt, Artificial Sequence
  Description of Artificial Sequence: Synthetic oligonucleotide
caugucgguaauuaaacca

SEQ ID NO: 1312346 - RNA, 19 nt, Artificial Sequence
  Description of Artificial Sequence: Synthetic oligonucleotide
ugguguauuaucugagcca

SEQ ID NO: 1312347 - RNA, 19 nt, Artificial Sequence
  Description of Artificial Sequence: Synthetic oligonucleotide
ucaucagaaagaaggcgcu

SEQ ID NO: 1312348 - RNA, 19 nt, Artificial Sequence
  Description of Artificial Sequence: Synthetic oligonucleotide
aggacaauguggcugucag

SEQ ID NO: 1312349 - RNA, 19 nt, Artificial Sequence
  Description of Artificial Sequence: Synthetic oligonucleotide
aaacacauuuaaugggcaa

SEQ ID NO: 1312350 - RNA, 19 nt, Artificial Sequence
  Description of Artificial Sequence: Synthetic oligonucleotide
ucgaugugcacaccaaaac

SEQ ID NO: 1312351 - RNA, 19 nt, Artificial Sequence
  Description of Artificial Sequence: Synthetic oligonucleotide
uccaaggcugcaaucuucc

SEQ ID NO: 1312352 - RNA, 19 nt, Artificial Sequence
  Description of Artificial Sequence: Synthetic oligonucleotide
gaaaucgguuaucaggaca

SEQ ID NO: 1312353 - RNA, 19 nt, Artificial Sequence
  Description of Artificial Sequence: Synthetic oligonucleotide
agagacuuuugggacaaac

SEQ ID NO: 1312354 - RNA, 19 nt, Artificial Sequence
  Description of Artificial Sequence: Synthetic oligonucleotide
cccaaauuuacacaaaaug

SEQ ID NO: 1312355 - RNA, 19 nt, Artificial Sequence
  Description of Artificial Sequence: Synthetic oligonucleotide
ugucccacaguuucuauaa

SEQ ID NO: 1312356 - RNA, 19 nt, Artificial Sequence
  Description of Artificial Sequence: Synthetic oligonucleotide
aaaucgguuaucaggacau

SEQ ID NO: 1312357 - RNA, 19 nt, Artificial Sequence
  Description of Artificial Sequence: Synthetic oligonucleotide
ucuggcugaugcgacagcg

SEQ ID NO: 1312358 - RNA, 19 nt, Artificial Sequence
  Description of Artificial Sequence: Synthetic oligonucleotide
ccaaauuuacacaaaauga

SEQ ID NO: 1312359 - RNA, 19 nt, Artificial Sequence
  Description of Artificial Sequence: Synthetic oligonucleotide
agaaaucgguuaucaggac

SEQ ID NO: 1312360 - RNA, 19 nt, Artificial Sequence
  Description of Artificial Sequence: Synthetic oligonucleotide
ucauuguagcgucuuuucu

SEQ ID NO: 1312361 - RNA, 19 nt, Artificial Sequence
  Description of Artificial Sequence: Synthetic oligonucleotide
auauuagucuggcuagcug

SEQ ID NO: 1312362 - RNA, 19 nt, Artificial Sequence
  Description of Artificial Sequence: Synthetic oligonucleotide
uucauaugcuugaugccgu

SEQ ID NO: 1312363 - RNA, 19 nt, Artificial Sequence
  Description of Artificial Sequence: Synthetic oligonucleotide
ugccguaggucuuaaagaa

SEQ ID NO: 1312364 - RNA, 19 nt, Artificial Sequence
  Description of Artificial Sequence: Synthetic oligonucleotide
cauguuuagggucucucug

SEQ ID NO: 1312365 - RNA, 19 nt, Artificial Sequence
  Description of Artificial Sequence: Synthetic oligonucleotide
augucauugucccacaguu

SEQ ID NO: 1312366 - RNA, 19 nt, Artificial Sequence
  Description of Artificial Sequence: Synthetic oligonucleotide
aguucuauguuggugauuu

SEQ ID NO: 1312367 - RNA, 19 nt, Artificial Sequence
  Description of Artificial Sequence: Synthetic oligonucleotide
uggcugaugcgacagcgag

SEQ ID NO: 1312368 - RNA, 19 nt, Artificial Sequence
  Description of Artificial Sequence: Synthetic oligonucleotide
ugucgauaauaaacagcag

SEQ ID NO: 1312369 - RNA, 19 nt, Artificial Sequence
  Description of Artificial Sequence: Synthetic oligonucleotide
uccguacacauugagcucc

SEQ ID NO: 1312370 - RNA, 19 nt, Artificial Sequence
  Description of Artificial Sequence: Synthetic oligonucleotide
uuucuauaacacacacgca

SEQ ID NO: 1312371 - RNA, 19 nt, Artificial Sequence
  Description of Artificial Sequence: Synthetic oligonucleotide
uggauuaaucucuuccaaa

SEQ ID NO: 1312372 - RNA, 19 nt, Artificial Sequence
  Description of Artificial Sequence: Synthetic oligonucleotide
auguauaccuguccauaag

SEQ ID NO: 1312373 - RNA, 19 nt, Artificial Sequence
  Description of Artificial Sequence: Synthetic oligonucleotide
uguagcgucuuuucugcca

SEQ ID NO: 1312374 - RNA, 19 nt, Artificial Sequence
  Description of Artificial Sequence: Synthetic oligonucleotide
gucaguacgauguccagga

SEQ ID NO: 1312375 - RNA, 19 nt, Artificial Sequence
  Description of Artificial Sequence: Synthetic oligonucleotide
ucuauguuggugauuucuu

SEQ ID NO: 1312376 - RNA, 19 nt, Artificial Sequence
  Description of Artificial Sequence: Synthetic oligonucleotide
uuaggggaguaaaaccgcu

SEQ ID NO: 1312377 - RNA, 19 nt, Artificial Sequence
  Description of Artificial Sequence: Synthetic oligonucleotide
aaccgcucauacauggacg

SEQ ID NO: 1312378 - RNA, 19 nt, Artificial Sequence
  Description of Artificial Sequence: Synthetic oligonucleotide
aguuucuauaacacacacg

SEQ ID NO: 1312379 - RNA, 19 nt, Artificial Sequence
  Description of Artificial Sequence: Synthetic oligonucleotide
uggcuacuagccaaggcca

SEQ ID NO: 1312380 - RNA, 19 nt, Artificial Sequence
  Description of Artificial Sequence: Synthetic oligonucleotide
auugcaugccaugucauca

SEQ ID NO: 1312381 - RNA, 19 nt, Artificial Sequence
  Description of Artificial Sequence: Synthetic oligonucleotide
gguauggccgcuucuaaag

SEQ ID NO: 1312382 - RNA, 19 nt, Artificial Sequence
  Description of Artificial Sequence: Synthetic oligonucleotide
auccgcaaguucuauguug

SEQ ID NO: 1312383 - RNA, 19 nt, Artificial Sequence
  Description of Artificial Sequence: Synthetic oligonucleotide
ucaggacauguuuaggguc

SEQ ID NO: 1312384 - RNA, 19 nt, Artificial Sequence
  Description of Artificial Sequence: Synthetic oligonucleotide
aggugucgauaauaaacag

SEQ ID NO: 1312385 - RNA, 19 nt, Artificial Sequence
  Description of Artificial Sequence: Synthetic oligonucleotide
ugggguuucgggcauugca

SEQ ID NO: 1312386 - RNA, 19 nt, Artificial Sequence
  Description of Artificial Sequence: Synthetic oligonucleotide
ccaguuguugguauggccg

SEQ ID NO: 1312387 - RNA, 19 nt, Artificial Sequence
  Description of Artificial Sequence: Synthetic oligonucleotide
aacaccguggcuggcuugg

SEQ ID NO: 1312388 - RNA, 19 nt, Artificial Sequence
  Description of Artificial Sequence: Synthetic oligonucleotide
aggaauaccuagucucuug

SEQ ID NO: 1312389 - RNA, 19 nt, Artificial Sequence
  Description of Artificial Sequence: Synthetic oligonucleotide
aucuccguacacauugagc

SEQ ID NO: 1312390 - RNA, 19 nt, Artificial Sequence
  Description of Artificial Sequence: Synthetic oligonucleotide
ugucgguaauuaaaccaga

SEQ ID NO: 1312391 - RNA, 19 nt, Artificial Sequence
  Description of Artificial Sequence: Synthetic oligonucleotide
caggugucgauaauaaaca

SEQ ID NO: 1312392 - RNA, 19 nt, Artificial Sequence
  Description of Artificial Sequence: Synthetic oligonucleotide
aagauggacuccaauugca

SEQ ID NO: 1312393 - RNA, 19 nt, Artificial Sequence
  Description of Artificial Sequence: Synthetic oligonucleotide
uggcuagcuggauuaaucu

SEQ ID NO: 1312394 - RNA, 19 nt, Artificial Sequence
  Description of Artificial Sequence: Synthetic oligonucleotide
ggaguaaaaccgcucauac

SEQ ID NO: 1312395 - RNA, 19 nt, Artificial Sequence
  Description of Artificial Sequence: Synthetic oligonucleotide
gguaauuaacacuuccaca

SEQ ID NO: 1312396 - RNA, 19 nt, Artificial Sequence
  Description of Artificial Sequence: Synthetic oligonucleotide
uauagacagaaagaguauu

SEQ ID NO: 1312397 - RNA, 19 nt, Artificial Sequence
  Description of Artificial Sequence: Synthetic oligonucleotide
cucguugcugcucuccacg

SEQ ID NO: 1312398 - RNA, 19 nt, Artificial Sequence
  Description of Artificial Sequence: Synthetic oligonucleotide
uccuaauuucuucccaaau

SEQ ID NO: 1312399 - RNA, 19 nt, Artificial Sequence
  Description of Artificial Sequence: Synthetic oligonucleotide
guaguccacuucuacauca

SEQ ID NO: 1312400 - RNA, 19 nt, Artificial Sequence
  Description of Artificial Sequence: Synthetic oligonucleotide
acagcgaguccucucccac

SEQ ID NO: 1312401 - RNA, 19 nt, Artificial Sequence
  Description of Artificial Sequence: Synthetic oligonucleotide
auguuuagggucucucuga

SEQ ID NO: 1312402 - RNA, 19 nt, Artificial Sequence
  Description of Artificial Sequence: Synthetic oligonucleotide
gaccggugaagccuguugc

SEQ ID NO: 1312403 - RNA, 19 nt, Artificial Sequence
  Description of Artificial Sequence: Synthetic oligonucleotide
aaggucaguacgaugucca

SEQ ID NO: 1312404 - RNA, 19 nt, Artificial Sequence
  Description of Artificial Sequence: Synthetic oligonucleotide
ugaugcgacagcgaguccu

SEQ ID NO: 1312405 - RNA, 19 nt, Artificial Sequence
  Description of Artificial Sequence: Synthetic oligonucleotide
gacgcuucuauagacagaa

SEQ ID NO: 1312406 - RNA, 19 nt, Artificial Sequence
  Description of Artificial Sequence: Synthetic oligonucleotide
cuauguuggugauuucuuc

SEQ ID NO: 1312407 - RNA, 19 nt, Artificial Sequence
  Description of Artificial Sequence: Synthetic oligonucleotide
cuuccaaagaaaucgguua

SEQ ID NO: 1312408 - RNA, 19 nt, Artificial Sequence
  Description of Artificial Sequence: Synthetic oligonucleotide
aggggaguaaaaccgcuca

SEQ ID NO: 1312409 - RNA, 19 nt, Artificial Sequence
  Description of Artificial Sequence: Synthetic oligonucleotide
accagagcaucacggcggc

SEQ ID NO: 1312410 - RNA, 19 nt, Artificial Sequence
  Description of Artificial Sequence: Synthetic oligonucleotide
aaccuaugcuuucauccaa

SEQ ID NO: 1312411 - RNA, 19 nt, Artificial Sequence
  Description of Artificial Sequence: Synthetic oligonucleotide
uaucugagccaccgggagc

SEQ ID NO: 1312412 - RNA, 19 nt, Artificial Sequence
  Description of Artificial Sequence: Synthetic oligonucleotide
gcaaguucuauguugguga

SEQ ID NO: 1312413 - RNA, 19 nt, Artificial Sequence
  Description of Artificial Sequence: Synthetic oligonucleotide
ugcucaaaagcauccgcaa

SEQ ID NO: 1312414 - RNA, 19 nt, Artificial Sequence
  Description of Artificial Sequence: Synthetic oligonucleotide
caaaacagcccaguuguug

SEQ ID NO: 1312415 - RNA, 19 nt, Artificial Sequence
  Description of Artificial Sequence: Synthetic oligonucleotide
caucaggacaauguggcug

SEQ ID NO: 1312416 - RNA, 19 nt, Artificial Sequence
  Description of Artificial Sequence: Synthetic oligonucleotide
gaauaccuagucucuugac

SEQ ID NO: 1312417 - RNA, 19 nt, Artificial Sequence
  Description of Artificial Sequence: Synthetic oligonucleotide
uauggccgcuucuaaagaa

SEQ ID NO: 1312418 - RNA, 19 nt, Artificial Sequence
  Description of Artificial Sequence: Synthetic oligonucleotide
auaaagucaaaaguucauu

SEQ ID NO: 1312419 - RNA, 19 nt, Artificial Sequence
  Description of Artificial Sequence: Synthetic oligonucleotide
guugugauuuccacuuucc

SEQ ID NO: 1312420 - RNA, 19 nt, Artificial Sequence
  Description of Artificial Sequence: Synthetic oligonucleotide
guauuaucugagccaccgg

SEQ ID NO: 1312421 - RNA, 19 nt, Artificial Sequence
  Description of Artificial Sequence: Synthetic oligonucleotide
uccuugggccuaaaagaug

SEQ ID NO: 1312422 - RNA, 19 nt, Artificial Sequence
  Description of Artificial Sequence: Synthetic oligonucleotide
uguaguccacuucuacauc

SEQ ID NO: 1312423 - RNA, 19 nt, Artificial Sequence
  Description of Artificial Sequence: Synthetic oligonucleotide
cuggcuagcuggauuaauc

SEQ ID NO: 1312424 - RNA, 19 nt, Artificial Sequence
  Description of Artificial Sequence: Synthetic oligonucleotide
ucauauuagucuggcuagc

SEQ ID NO: 1312425 - RNA, 19 nt, Artificial Sequence
  Description of Artificial Sequence: Synthetic oligonucleotide
gcaggugucgauaauaaac

SEQ ID NO: 1312426 - RNA, 19 nt, Artificial Sequence
  Description of Artificial Sequence: Synthetic oligonucleotide
uccgcacacuuccaaagaa

SEQ ID NO: 1312427 - RNA, 19 nt, Artificial Sequence
  Description of Artificial Sequence: Synthetic oligonucleotide
gguaauuaaaccagaaucu

SEQ ID NO: 1312428 - RNA, 19 nt, Artificial Sequence
  Description of Artificial Sequence: Synthetic oligonucleotide
gaccugucauauaaaugag

SEQ ID NO: 1312429 - RNA, 19 nt, Artificial Sequence
  Description of Artificial Sequence: Synthetic oligonucleotide
guuaggggaguaaaaccgc

SEQ ID NO: 1312430 - RNA, 19 nt, Artificial Sequence
  Description of Artificial Sequence: Synthetic oligonucleotide
cauacauggacgcgccuug

SEQ ID NO: 1312431 - RNA, 19 nt, Artificial Sequence
  Description of Artificial Sequence: Synthetic oligonucleotide
cuuggcuacuagccaaggc

SEQ ID NO: 1312432 - RNA, 19 nt, Artificial Sequence
  Description of Artificial Sequence: Synthetic oligonucleotide
uccacgaccggugaagccu

SEQ ID NO: 1312433 - RNA, 19 nt, Artificial Sequence
  Description of Artificial Sequence: Synthetic oligonucleotide
uuccgcacacuuccaaaga

SEQ ID NO: 1312434 - RNA, 19 nt, Artificial Sequence
  Description of Artificial Sequence: Synthetic oligonucleotide
caauugcaggaucuggcug

SEQ ID NO: 1312435 - RNA, 19 nt, Artificial Sequence
  Description of Artificial Sequence: Synthetic oligonucleotide
aucuuggaauuucaagaaa

SEQ ID NO: 1312436 - RNA, 19 nt, Artificial Sequence
  Description of Artificial Sequence: Synthetic oligonucleotide
aguacgauguccaggagua

SEQ ID NO: 1312437 - RNA, 19 nt, Artificial Sequence
  Description of Artificial Sequence: Synthetic oligonucleotide
gguguauuaucugagccac

SEQ ID NO: 1312438 - RNA, 19 nt, Artificial Sequence
  Description of Artificial Sequence: Synthetic oligonucleotide
ggugucgauaauaaacagc

SEQ ID NO: 1312439 - RNA, 19 nt, Artificial Sequence
  Description of Artificial Sequence: Synthetic oligonucleotide
uguccauaagauggacucc

SEQ ID NO: 1312440 - RNA, 19 nt, Artificial Sequence
  Description of Artificial Sequence: Synthetic oligonucleotide
uacauggacgcgccuuggc

SEQ ID NO: 1312441 - RNA, 19 nt, Artificial Sequence
  Description of Artificial Sequence: Synthetic oligonucleotide
agucuggcuagcuggauua

SEQ ID NO: 1312442 - RNA, 19 nt, Artificial Sequence
  Description of Artificial Sequence: Synthetic oligonucleotide
aagaauuguucugcuuggu

SEQ ID NO: 1312443 - RNA, 19 nt, Artificial Sequence
  Description of Artificial Sequence: Synthetic oligonucleotide
ggaccagagcaucacggcg

SEQ ID NO: 1312444 - RNA, 19 nt, Artificial Sequence
  Description of Artificial Sequence: Synthetic oligonucleotide
auggacgcgccuuggcagg

SEQ ID NO: 1312445 - RNA, 19 nt, Artificial Sequence
  Description of Artificial Sequence: Synthetic oligonucleotide
guagcgucuuuucugccac

SEQ ID NO: 1312446 - RNA, 19 nt, Artificial Sequence
  Description of Artificial Sequence: Synthetic oligonucleotide
augaccugucauauaaaug

SEQ ID NO: 1312447 - RNA, 19 nt, Artificial Sequence
  Description of Artificial Sequence: Synthetic oligonucleotide
acauggacgcgccuuggca

SEQ ID NO: 1312448 - RNA, 19 nt, Artificial Sequence
  Description of Artificial Sequence: Synthetic oligonucleotide
cuccaauugcaggaucugg

SEQ ID NO: 1312449 - RNA, 19 nt, Artificial Sequence
  Description of Artificial Sequence: Synthetic oligonucleotide
cauaagauggacuccaauu

SEQ ID NO: 1312450 - RNA, 19 nt, Artificial Sequence
  Description of Artificial Sequence: Synthetic oligonucleotide
ucaguacgauguccaggag

SEQ ID NO: 1312451 - RNA, 19 nt, Artificial Sequence
  Description of Artificial Sequence: Synthetic oligonucleotide
agauggacuccaauugcag

SEQ ID NO: 1312452 - RNA, 19 nt, Artificial Sequence
  Description of Artificial Sequence: Synthetic oligonucleotide
ugcuugguccucgauguga

SEQ ID NO: 1312453 - RNA, 19 nt, Artificial Sequence
  Description of Artificial Sequence: Synthetic oligonucleotide
auagacagaaagaguauuu

SEQ ID NO: 1312454 - RNA, 19 nt, Artificial Sequence
  Description of Artificial Sequence: Synthetic oligonucleotide
ugauuuccacuuuccgcac

SEQ ID NO: 1312455 - RNA, 19 nt, Artificial Sequence
  Description of Artificial Sequence: Synthetic oligonucleotide
ugacgaugagagaccacaa

SEQ ID NO: 1312456 - RNA, 19 nt, Artificial Sequence
  Description of Artificial Sequence: Synthetic oligonucleotide
acacgcacaaacaaugaaa

SEQ ID NO: 1312457 - RNA, 19 nt, Artificial Sequence
  Description of Artificial Sequence: Synthetic oligonucleotide
gauaaagucaaaaguucau

SEQ ID NO: 1312458 - RNA, 19 nt, Artificial Sequence
  Description of Artificial Sequence: Synthetic oligonucleotide
uugggccuaaaagaugaac

SEQ ID NO: 1312459 - RNA, 19 nt, Artificial Sequence
  Description of Artificial Sequence: Synthetic oligonucleotide
acccucccgguuaacaccc

SEQ ID NO: 1312460 - RNA, 19 nt, Artificial Sequence
  Description of Artificial Sequence: Synthetic oligonucleotide
uguugguauggccgcuucu

SEQ ID NO: 1312461 - RNA, 19 nt, Artificial Sequence
  Description of Artificial Sequence: Synthetic oligonucleotide
ugacgcuucuauagacaga

SEQ ID NO: 1312462 - RNA, 19 nt, Artificial Sequence
  Description of Artificial Sequence: Synthetic oligonucleotide
aucgguuaucaggacaugu

SEQ ID NO: 1312463 - RNA, 19 nt, Artificial Sequence
  Description of Artificial Sequence: Synthetic oligonucleotide
cugcucaaaagcauccgca

SEQ ID NO: 1312464 - RNA, 19 nt, Artificial Sequence
  Description of Artificial Sequence: Synthetic oligonucleotide
agcauccgcaaguucuaug

SEQ ID NO: 1312465 - RNA, 19 nt, Artificial Sequence
  Description of Artificial Sequence: Synthetic oligonucleotide
aucaauuauuauguuccaa

SEQ ID NO: 1312466 - RNA, 19 nt, Artificial Sequence
  Description of Artificial Sequence: Synthetic oligonucleotide
uugguauggccgcuucuaa

SEQ ID NO: 1312467 - RNA, 19 nt, Artificial Sequence
  Description of Artificial Sequence: Synthetic oligonucleotide
uaggggaguaaaaccgcuc

SEQ ID NO: 1312468 - RNA, 19 nt, Artificial Sequence
  Description of Artificial Sequence: Synthetic oligonucleotide
augauguuaggggaguaaa

SEQ ID NO: 1312469 - RNA, 19 nt, Artificial Sequence
  Description of Artificial Sequence: Synthetic oligonucleotide
gacugaucgucucuguugu

SEQ ID NO: 1312470 - RNA, 19 nt, Artificial Sequence
  Description of Artificial Sequence: Synthetic oligonucleotide
guaaaaccgcucauacaug

SEQ ID NO: 1312471 - RNA, 19 nt, Artificial Sequence
  Description of Artificial Sequence: Synthetic oligonucleotide
cucaaaagcauccgcaagu

SEQ ID NO: 1312472 - RNA, 19 nt, Artificial Sequence
  Description of Artificial Sequence: Synthetic oligonucleotide
cucccacuuggcuacuagc

SEQ ID NO: 1312473 - RNA, 19 nt, Artificial Sequence
  Description of Artificial Sequence: Synthetic oligonucleotide
cuuggagcgaggagugcug

SEQ ID NO: 1312474 - RNA, 19 nt, Artificial Sequence
  Description of Artificial Sequence: Synthetic oligonucleotide
cgcuucuauagacagaaag

SEQ ID NO: 1312475 - RNA, 19 nt, Artificial Sequence
  Description of Artificial Sequence: Synthetic oligonucleotide
aagccuguugcagacugau

SEQ ID NO: 1312476 - RNA, 19 nt, Artificial Sequence
  Description of Artificial Sequence: Synthetic oligonucleotide
ucgaugugaccagcggcgg

SEQ ID NO: 1312477 - RNA, 19 nt, Artificial Sequence
  Description of Artificial Sequence: Synthetic oligonucleotide
cacccucccgguuaacacc

SEQ ID NO: 1312478 - RNA, 19 nt, Artificial Sequence
  Description of Artificial Sequence: Synthetic oligonucleotide
ucauacauggacgcgccuu

SEQ ID NO: 1312479 - RNA, 19 nt, Artificial Sequence
  Description of Artificial Sequence: Synthetic oligonucleotide
ucgggcauugcaugccaug

SEQ ID NO: 1312480 - RNA, 19 nt, Artificial Sequence
  Description of Artificial Sequence: Synthetic oligonucleotide
aaucgguuaucaggacaug

SEQ ID NO: 1312481 - RNA, 19 nt, Artificial Sequence
  Description of Artificial Sequence: Synthetic oligonucleotide
ugucauugucccacaguuu

SEQ ID NO: 1312482 - RNA, 19 nt, Artificial Sequence
  Description of Artificial Sequence: Synthetic oligonucleotide
ugguauggccgcuucuaaa

SEQ ID NO: 1312483 - RNA, 19 nt, Artificial Sequence
  Description of Artificial Sequence: Synthetic oligonucleotide
cacuuggcuacuagccaag

SEQ ID NO: 1312484 - RNA, 19 nt, Artificial Sequence
  Description of Artificial Sequence: Synthetic oligonucleotide
guccauaagauggacucca

SEQ ID NO: 1312485 - RNA, 19 nt, Artificial Sequence
  Description of Artificial Sequence: Synthetic oligonucleotide
uuguagcgucuuuucugcc

SEQ ID NO: 1312486 - RNA, 19 nt, Artificial Sequence
  Description of Artificial Sequence: Synthetic oligonucleotide
uuggcaggugucgauaaua

SEQ ID NO: 1312487 - RNA, 19 nt, Artificial Sequence
  Description of Artificial Sequence: Synthetic oligonucleotide
augcucgcccgcuucccac

SEQ ID NO: 1312488 - RNA, 19 nt, Artificial Sequence
  Description of Artificial Sequence: Synthetic oligonucleotide
ugcaaucuuccaucugcuc

SEQ ID NO: 1312489 - RNA, 19 nt, Artificial Sequence
  Description of Artificial Sequence: Synthetic oligonucleotide
gcucaaaagcauccgcaag

SEQ ID NO: 1312490 - RNA, 19 nt, Artificial Sequence
  Description of Artificial Sequence: Synthetic oligonucleotide
uccauaagauggacuccaa

SEQ ID NO: 1312491 - RNA, 19 nt, Artificial Sequence
  Description of Artificial Sequence: Synthetic oligonucleotide
guacuugagagggucuaug

SEQ ID NO: 1312492 - RNA, 19 nt, Artificial Sequence
  Description of Artificial Sequence: Synthetic oligonucleotide
uagucuggcuagcuggauu

SEQ ID NO: 1312493 - RNA, 19 nt, Artificial Sequence
  Description of Artificial Sequence: Synthetic oligonucleotide
ucccgguuaacacccgcaa

SEQ ID NO: 1312494 - RNA, 19 nt, Artificial Sequence
  Description of Artificial Sequence: Synthetic oligonucleotide
agagcaucacggcggccag

SEQ ID NO: 1312495 - RNA, 19 nt, Artificial Sequence
  Description of Artificial Sequence: Synthetic oligonucleotide
gauuuccacuuuccgcaca

SEQ ID NO: 1312496 - RNA, 19 nt, Artificial Sequence
  Description of Artificial Sequence: Synthetic oligonucleotide
gagcgaggagugcugggug

SEQ ID NO: 1312497 - RNA, 19 nt, Artificial Sequence
  Description of Artificial Sequence: Synthetic oligonucleotide
ggaauaccuagucucuuga

SEQ ID NO: 1312498 - RNA, 19 nt, Artificial Sequence
  Description of Artificial Sequence: Synthetic oligonucleotide
ugccacaugucgguaauua

SEQ ID NO: 1312499 - RNA, 19 nt, Artificial Sequence
  Description of Artificial Sequence: Synthetic oligonucleotide
guuucgggcauugcaugcc

SEQ ID NO: 1312500 - RNA, 19 nt, Artificial Sequence
  Description of Artificial Sequence: Synthetic oligonucleotide
acuuuccgcacacuuccaa

SEQ ID NO: 1312501 - RNA, 19 nt, Artificial Sequence
  Description of Artificial Sequence: Synthetic oligonucleotide
ggucaguacgauguccagg

SEQ ID NO: 1312502 - RNA, 19 nt, Artificial Sequence
  Description of Artificial Sequence: Synthetic oligonucleotide
uuguugguauggccgcuuc

SEQ ID NO: 1312503 - RNA, 19 nt, Artificial Sequence
  Description of Artificial Sequence: Synthetic oligonucleotide
accuaugcuuucauccaag

SEQ ID NO: 1312504 - RNA, 19 nt, Artificial Sequence
  Description of Artificial Sequence: Synthetic oligonucleotide
uaguccacuucuacaucau

SEQ ID NO: 1312505 - RNA, 19 nt, Artificial Sequence
  Description of Artificial Sequence: Synthetic oligonucleotide
cucuccacgaccggugaag

SEQ ID NO: 1312506 - RNA, 19 nt, Artificial Sequence
  Description of Artificial Sequence: Synthetic oligonucleotide
ucccagaaugaagccacca

SEQ ID NO: 1312507 - RNA, 19 nt, Artificial Sequence
  Description of Artificial Sequence: Synthetic oligonucleotide
acuuggcuacuagccaagg

SEQ ID NO: 1312508 - RNA, 19 nt, Artificial Sequence
  Description of Artificial Sequence: Synthetic oligonucleotide
ugaacaccguggcuggcuu

SEQ ID NO: 1312509 - RNA, 19 nt, Artificial Sequence
  Description of Artificial Sequence: Synthetic oligonucleotide
aguuaccucauagcuccug

SEQ ID NO: 1312510 - RNA, 19 nt, Artificial Sequence
  Description of Artificial Sequence: Synthetic oligonucleotide
ucgguuucugguguauuau

SEQ ID NO: 1312511 - RNA, 19 nt, Artificial Sequence
  Description of Artificial Sequence: Synthetic oligonucleotide
auacauggacgcgccuugg

SEQ ID NO: 1312512 - RNA, 19 nt, Artificial Sequence
  Description of Artificial Sequence: Synthetic oligonucleotide
ucuccacgaccggugaagc

SEQ ID NO: 1312513 - RNA, 19 nt, Artificial Sequence
  Description of Artificial Sequence: Synthetic oligonucleotide
ugcucuccacgaccgguga

SEQ ID NO: 1312514 - RNA, 19 nt, Artificial Sequence
  Description of Artificial Sequence: Synthetic oligonucleotide
accugucauauaaaugaga

SEQ ID NO: 1312515 - RNA, 19 nt, Artificial Sequence
  Description of Artificial Sequence: Synthetic oligonucleotide
gagacuuuugggacaaacu

SEQ ID NO: 1312516 - RNA, 19 nt, Artificial Sequence
  Description of Artificial Sequence: Synthetic oligonucleotide
ccuugggccuaaaagauga

SEQ ID NO: 1312517 - RNA, 19 nt, Artificial Sequence
  Description of Artificial Sequence: Synthetic oligonucleotide
uggccgcuucuaaagaauu

SEQ ID NO: 1312518 - RNA, 19 nt, Artificial Sequence
  Description of Artificial Sequence: Synthetic oligonucleotide
guauggccgcuucuaaaga

SEQ ID NO: 1312519 - RNA, 19 nt, Artificial Sequence
  Description of Artificial Sequence: Synthetic oligonucleotide
gcugaugcgacagcgaguc

SEQ ID NO: 1312520 - RNA, 19 nt, Artificial Sequence
  Description of Artificial Sequence: Synthetic oligonucleotide
cuugguccucgaugugacc

SEQ ID NO: 1312521 - RNA, 19 nt, Artificial Sequence
  Description of Artificial Sequence: Synthetic oligonucleotide
ucauaugcuugaugccgua

SEQ ID NO: 1312522 - RNA, 19 nt, Artificial Sequence
  Description of Artificial Sequence: Synthetic oligonucleotide
cucuugacgcuucuauaga

SEQ ID NO: 1312523 - RNA, 19 nt, Artificial Sequence
  Description of Artificial Sequence: Synthetic oligonucleotide
cuacaucaucuccguacac

SEQ ID NO: 1312524 - RNA, 19 nt, Artificial Sequence
  Description of Artificial Sequence: Synthetic oligonucleotide
cugaucgucucuguuguga

SEQ ID NO: 1312525 - RNA, 19 nt, Artificial Sequence
  Description of Artificial Sequence: Synthetic oligonucleotide
cuccguacacauugagcuc

SEQ ID NO: 1312526 - RNA, 19 nt, Artificial Sequence
  Description of Artificial Sequence: Synthetic oligonucleotide
aaggcgcuuggagcgagga

SEQ ID NO: 1312527 - RNA, 19 nt, Artificial Sequence
  Description of Artificial Sequence: Synthetic oligonucleotide
gucauauaaaugagaauau

SEQ ID NO: 1312528 - RNA, 19 nt, Artificial Sequence
  Description of Artificial Sequence: Synthetic oligonucleotide
caaucccagaaugaagcca

SEQ ID NO: 1312529 - RNA, 19 nt, Artificial Sequence
  Description of Artificial Sequence: Synthetic oligonucleotide
caugacgaugagagaccac

SEQ ID NO: 1312530 - RNA, 19 nt, Artificial Sequence
  Description of Artificial Sequence: Synthetic oligonucleotide
ugagagggucuaugggcuc

SEQ ID NO: 1312531 - RNA, 19 nt, Artificial Sequence
  Description of Artificial Sequence: Synthetic oligonucleotide
agaccaugacgaugagaga

SEQ ID NO: 1312532 - RNA, 19 nt, Artificial Sequence
  Description of Artificial Sequence: Synthetic oligonucleotide
aggaguagauacacagaga

SEQ ID NO: 1312533 - RNA, 19 nt, Artificial Sequence
  Description of Artificial Sequence: Synthetic oligonucleotide
cuuuccgcacacuuccaaa

SEQ ID NO: 1312534 - RNA, 19 nt, Artificial Sequence
  Description of Artificial Sequence: Synthetic oligonucleotide
aagaaggcgcuuggagcga

SEQ ID NO: 1312535 - RNA, 19 nt, Artificial Sequence
  Description of Artificial Sequence: Synthetic oligonucleotide
gaacaccguggcuggcuug

SEQ ID NO: 1312536 - RNA, 19 nt, Artificial Sequence
  Description of Artificial Sequence: Synthetic oligonucleotide
guuaccucauagcuccugu

SEQ ID NO: 1312537 - RNA, 19 nt, Artificial Sequence
  Description of Artificial Sequence: Synthetic oligonucleotide
agcgaguccucucccacuu

SEQ ID NO: 1312538 - RNA, 19 nt, Artificial Sequence
  Description of Artificial Sequence: Synthetic oligonucleotide
cuccacgaccggugaagcc

SEQ ID NO: 1312539 - RNA, 19 nt, Artificial Sequence
  Description of Artificial Sequence: Synthetic oligonucleotide
ggcgcagccaugcucgccc

SEQ ID NO: 1312540 - RNA, 19 nt, Artificial Sequence
  Description of Artificial Sequence: Synthetic oligonucleotide
auguccaggaguagauaca

SEQ ID NO: 1312541 - RNA, 19 nt, Artificial Sequence
  Description of Artificial Sequence: Synthetic oligonucleotide
cuguugcagacugaucguc

SEQ ID NO: 1312542 - RNA, 19 nt, Artificial Sequence
  Description of Artificial Sequence: Synthetic oligonucleotide
ggguuucgggcauugcaug

SEQ ID NO: 1312543 - RNA, 19 nt, Artificial Sequence
  Description of Artificial Sequence: Synthetic oligonucleotide
gaugcgacagcgaguccuc

SEQ ID NO: 1312544 - RNA, 19 nt, Artificial Sequence
  Description of Artificial Sequence: Synthetic oligonucleotide
cuucccaaauuuacacaaa

SEQ ID NO: 1312545 - RNA, 19 nt, Artificial Sequence
  Description of Artificial Sequence: Synthetic oligonucleotide
gaaucucgaugugcacacc

SEQ ID NO: 1312546 - RNA, 19 nt, Artificial Sequence
  Description of Artificial Sequence: Synthetic oligonucleotide
ccaaagaaaucgguuauca

SEQ ID NO: 1312547 - RNA, 19 nt, Artificial Sequence
  Description of Artificial Sequence: Synthetic oligonucleotide
cagagcaucacggcggcca

SEQ ID NO: 1312548 - RNA, 19 nt, Artificial Sequence
  Description of Artificial Sequence: Synthetic oligonucleotide
ccucgaugugaccagcggc

SEQ ID NO: 1312549 - RNA, 19 nt, Artificial Sequence
  Description of Artificial Sequence: Synthetic oligonucleotide
ggcuagcuggauuaaucuc

SEQ ID NO: 1312550 - RNA, 19 nt, Artificial Sequence
  Description of Artificial Sequence: Synthetic oligonucleotide
ucuggcuagcuggauuaau

SEQ ID NO: 1312551 - RNA, 19 nt, Artificial Sequence
  Description of Artificial Sequence: Synthetic oligonucleotide
aaguucuauguuggugauu

SEQ ID NO: 1312552 - RNA, 19 nt, Artificial Sequence
  Description of Artificial Sequence: Synthetic oligonucleotide
guugguauggccgcuucua

SEQ ID NO: 1312553 - RNA, 19 nt, Artificial Sequence
  Description of Artificial Sequence: Synthetic oligonucleotide
gacgaugagagaccacaau

SEQ ID NO: 1312554 - RNA, 19 nt, Artificial Sequence
  Description of Artificial Sequence: Synthetic oligonucleotide
gacauccuugggccuaaaa

SEQ ID NO: 1312555 - RNA, 19 nt, Artificial Sequence
  Description of Artificial Sequence: Synthetic oligonucleotide
cgcuucuaaagaauuguuc

SEQ ID NO: 1312556 - RNA, 19 nt, Artificial Sequence
  Description of Artificial Sequence: Synthetic oligonucleotide
acgauguccaggaguagau

SEQ ID NO: 1312557 - RNA, 19 nt, Artificial Sequence
  Description of Artificial Sequence: Synthetic oligonucleotide
ucggcguacuugagagggu

SEQ ID NO: 1312558 - RNA, 19 nt, Artificial Sequence
  Description of Artificial Sequence: Synthetic oligonucleotide
aggucuuaaagaagaccau

SEQ ID NO: 1312559 - RNA, 19 nt, Artificial Sequence
  Description of Artificial Sequence: Synthetic oligonucleotide
gaguccucucccacuuggc

SEQ ID NO: 1312560 - RNA, 19 nt, Artificial Sequence
  Description of Artificial Sequence: Synthetic oligonucleotide
uucgggcauugcaugccau

SEQ ID NO: 1312561 - RNA, 19 nt, Artificial Sequence
  Description of Artificial Sequence: Synthetic oligonucleotide
caugauguuaggggaguaa

SEQ ID NO: 1312562 - RNA, 19 nt, Artificial Sequence
  Description of Artificial Sequence: Synthetic oligonucleotide
caccguggcuggcuugggg

SEQ ID NO: 1312563 - RNA, 19 nt, Artificial Sequence
  Description of Artificial Sequence: Synthetic oligonucleotide
gcuagcuggauuaaucucu

SEQ ID NO: 1312564 - RNA, 19 nt, Artificial Sequence
  Description of Artificial Sequence: Synthetic oligonucleotide
uuccgacauccuugggccu

SEQ ID NO: 1312565 - RNA, 19 nt, Artificial Sequence
  Description of Artificial Sequence: Synthetic oligonucleotide
ccacaugucgguaauuaaa

SEQ ID NO: 1312566 - RNA, 19 nt, Artificial Sequence
  Description of Artificial Sequence: Synthetic oligonucleotide
gcaagcaucaggacaaugu

SEQ ID NO: 1312567 - RNA, 19 nt, Artificial Sequence
  Description of Artificial Sequence: Synthetic oligonucleotide
uccgacauccuugggccua

SEQ ID NO: 1312568 - RNA, 19 nt, Artificial Sequence
  Description of Artificial Sequence: Synthetic oligonucleotide
gucccacaguuucuauaac

SEQ ID NO: 1312569 - RNA, 19 nt, Artificial Sequence
  Description of Artificial Sequence: Synthetic oligonucleotide
ucgucucuguugugauuuc

SEQ ID NO: 1312570 - RNA, 19 nt, Artificial Sequence
  Description of Artificial Sequence: Synthetic oligonucleotide
auggccgcuucuaaagaau

SEQ ID NO: 1312571 - RNA, 19 nt, Artificial Sequence
  Description of Artificial Sequence: Synthetic oligonucleotide
cucccgguuaacacccgca

SEQ ID NO: 1312572 - RNA, 19 nt, Artificial Sequence
  Description of Artificial Sequence: Synthetic oligonucleotide
cauauuagucuggcuagcu

SEQ ID NO: 1312573 - RNA, 19 nt, Artificial Sequence
  Description of Artificial Sequence: Synthetic oligonucleotide
guacgauguccaggaguag

SEQ ID NO: 1312574 - RNA, 19 nt, Artificial Sequence
  Description of Artificial Sequence: Synthetic oligonucleotide
cacuuccaaagaaaucggu

SEQ ID NO: 1312575 - RNA, 19 nt, Artificial Sequence
  Description of Artificial Sequence: Synthetic oligonucleotide
caccgggagcugcucggcg

SEQ ID NO: 1312576 - RNA, 19 nt, Artificial Sequence
  Description of Artificial Sequence: Synthetic oligonucleotide
ggcaauaaaauaagugcau

SEQ ID NO: 1312577 - RNA, 19 nt, Artificial Sequence
  Description of Artificial Sequence: Synthetic oligonucleotide
gcacccucccgguuaacac

SEQ ID NO: 1312578 - RNA, 19 nt, Artificial Sequence
  Description of Artificial Sequence: Synthetic oligonucleotide
cuggcugaugcgacagcga

SEQ ID NO: 1312579 - RNA, 19 nt, Artificial Sequence
  Description of Artificial Sequence: Synthetic oligonucleotide
uugggguuucgggcauugc

SEQ ID NO: 1312580 - RNA, 19 nt, Artificial Sequence
  Description of Artificial Sequence: Synthetic oligonucleotide
ccgguuaacacccgcaaaa

SEQ ID NO: 1312581 - RNA, 19 nt, Artificial Sequence
  Description of Artificial Sequence: Synthetic oligonucleotide
aucucgaugugcacaccaa

SEQ ID NO: 1312582 - RNA, 19 nt, Artificial Sequence
  Description of Artificial Sequence: Synthetic oligonucleotide
ccaagacauaaaauguaua

SEQ ID NO: 1312583 - RNA, 19 nt, Artificial Sequence
  Description of Artificial Sequence: Synthetic oligonucleotide
uugaugccguaggucuuaa

SEQ ID NO: 1312584 - RNA, 19 nt, Artificial Sequence
  Description of Artificial Sequence: Synthetic oligonucleotide
ccuagucucuugacgcuuc

SEQ ID NO: 1312585 - RNA, 19 nt, Artificial Sequence
  Description of Artificial Sequence: Synthetic oligonucleotide
cugcaaucuuccaucugcu

SEQ ID NO: 1312586 - RNA, 19 nt, Artificial Sequence
  Description of Artificial Sequence: Synthetic oligonucleotide
cugaugcgacagcgagucc

SEQ ID NO: 1312587 - RNA, 19 nt, Artificial Sequence
  Description of Artificial Sequence: Synthetic oligonucleotide
ggaucuggcugaugcgaca

SEQ ID NO: 1312588 - RNA, 19 nt, Artificial Sequence
  Description of Artificial Sequence: Synthetic oligonucleotide
cgauaauaaacagcagcuc

SEQ ID NO: 1312589 - RNA, 19 nt, Artificial Sequence
  Description of Artificial Sequence: Synthetic oligonucleotide
ggccgcuucuaaagaauug

SEQ ID NO: 1312590 - RNA, 19 nt, Artificial Sequence
  Description of Artificial Sequence: Synthetic oligonucleotide
gcuacuagccaaggccaug

SEQ ID NO: 1312591 - RNA, 19 nt, Artificial Sequence
  Description of Artificial Sequence: Synthetic oligonucleotide
cuugaugccguaggucuua

SEQ ID NO: 1312592 - RNA, 19 nt, Artificial Sequence
  Description of Artificial Sequence: Synthetic oligonucleotide
cugcucggcguacuugaga

SEQ ID NO: 1312593 - RNA, 19 nt, Artificial Sequence
  Description of Artificial Sequence: Synthetic oligonucleotide
cuugggccuaaaagaugaa

SEQ ID NO: 1312594 - RNA, 19 nt, Artificial Sequence
  Description of Artificial Sequence: Synthetic oligonucleotide
ggacuccaauugcaggauc

SEQ ID NO: 1312595 - RNA, 19 nt, Artificial Sequence
  Description of Artificial Sequence: Synthetic oligonucleotide
cacaccaaaacagcccagu

SEQ ID NO: 1312596 - RNA, 19 nt, Artificial Sequence
  Description of Artificial Sequence: Synthetic oligonucleotide
gggccuaaaagaugaacuu

SEQ ID NO: 1312597 - RNA, 19 nt, Artificial Sequence
  Description of Artificial Sequence: Synthetic oligonucleotide
ggcgcuuggagcgaggagu

SEQ ID NO: 1312598 - RNA, 19 nt, Artificial Sequence
  Description of Artificial Sequence: Synthetic oligonucleotide
caugcucgcccgcuuccca

SEQ ID NO: 1312599 - RNA, 19 nt, Artificial Sequence
  Description of Artificial Sequence: Synthetic oligonucleotide
gccacaugucgguaauuaa

SEQ ID NO: 1312600 - RNA, 19 nt, Artificial Sequence
  Description of Artificial Sequence: Synthetic oligonucleotide
ggcaggugucgauaauaaa

SEQ ID NO: 1312601 - RNA, 19 nt, Artificial Sequence
  Description of Artificial Sequence: Synthetic oligonucleotide
acaccguggcuggcuuggg

SEQ ID NO: 1312602 - RNA, 19 nt, Artificial Sequence
  Description of Artificial Sequence: Synthetic oligonucleotide
gaucgucucuguugugauu

SEQ ID NO: 1312603 - RNA, 19 nt, Artificial Sequence
  Description of Artificial Sequence: Synthetic oligonucleotide
gacgcgccuuggcaggugu

SEQ ID NO: 1312604 - RNA, 19 nt, Artificial Sequence
  Description of Artificial Sequence: Synthetic oligonucleotide
ccacgaccggugaagccug

SEQ ID NO: 1312605 - RNA, 19 nt, Artificial Sequence
  Description of Artificial Sequence: Synthetic oligonucleotide
cucgcccgcuucccacgcc

SEQ ID NO: 1312606 - RNA, 19 nt, Artificial Sequence
  Description of Artificial Sequence: Synthetic oligonucleotide
cuagucucuugacgcuucu

SEQ ID NO: 1312607 - RNA, 19 nt, Artificial Sequence
  Description of Artificial Sequence: Synthetic oligonucleotide
ccucccgguuaacacccgc

SEQ ID NO: 1312608 - RNA, 19 nt, Artificial Sequence
  Description of Artificial Sequence: Synthetic oligonucleotide
gcgcuuggagcgaggagug

SEQ ID NO: 1312609 - RNA, 19 nt, Artificial Sequence
  Description of Artificial Sequence: Synthetic oligonucleotide
augcgacagcgaguccucu

SEQ ID NO: 1312610 - RNA, 19 nt, Artificial Sequence
  Description of Artificial Sequence: Synthetic oligonucleotide
ggcacccucccgguuaaca

SEQ ID NO: 1312611 - RNA, 19 nt, Artificial Sequence
  Description of Artificial Sequence: Synthetic oligonucleotide
cugaacaccguggcuggcu

SEQ ID NO: 1312612 - RNA, 19 nt, Artificial Sequence
  Description of Artificial Sequence: Synthetic oligonucleotide
gcgaggagugcuggguggc

SEQ ID NO: 1312613 - RNA, 19 nt, Artificial Sequence
  Description of Artificial Sequence: Synthetic oligonucleotide
cgucucuguugugauuucc

SEQ ID NO: 1312614 - RNA, 19 nt, Artificial Sequence
  Description of Artificial Sequence: Synthetic oligonucleotide
ccaugacgaugagagacca

SEQ ID NO: 1312615 - RNA, 19 nt, Artificial Sequence
  Description of Artificial Sequence: Synthetic oligonucleotide
cagacugaucgucucuguu

SEQ ID NO: 1312616 - RNA, 19 nt, Artificial Sequence
  Description of Artificial Sequence: Synthetic oligonucleotide
gcuuggagcgaggagugcu

SEQ ID NO: 1312617 - RNA, 19 nt, Artificial Sequence
  Description of Artificial Sequence: Synthetic oligonucleotide
cgaccggugaagccuguug

SEQ ID NO: 1312618 - RNA, 19 nt, Artificial Sequence
  Description of Artificial Sequence: Synthetic oligonucleotide
gcgucuuuucugccacauc

SEQ ID NO: 1312619 - RNA, 19 nt, Artificial Sequence
  Description of Artificial Sequence: Synthetic oligonucleotide
gcaucaggacaauguggcu

SEQ ID NO: 1312620 - RNA, 19 nt, Artificial Sequence
  Description of Artificial Sequence: Synthetic oligonucleotide
gggugccaaucuuuuggcu

SEQ ID NO: 1312621 - RNA, 19 nt, Artificial Sequence
  Description of Artificial Sequence: Synthetic oligonucleotide
gggguuucgggcauugcau

SEQ ID NO: 1312622 - RNA, 19 nt, Artificial Sequence
  Description of Artificial Sequence: Synthetic oligonucleotide
gcgaguccucucccacuug

SEQ ID NO: 1312623 - RNA, 19 nt, Artificial Sequence
  Description of Artificial Sequence: Synthetic oligonucleotide
caucaucuccguacacauu

SEQ ID NO: 1312624 - RNA, 19 nt, Artificial Sequence
  Description of Artificial Sequence: Synthetic oligonucleotide
guuguugguauggccgcuu

SEQ ID NO: 1312625 - RNA, 19 nt, Artificial Sequence
  Description of Artificial Sequence: Synthetic oligonucleotide
acgcuucuauagacagaaa

SEQ ID NO: 1312626 - RNA, 19 nt, Artificial Sequence
  Description of Artificial Sequence: Synthetic oligonucleotide
ccuguugcagacugaucgu

SEQ ID NO: 1312627 - RNA, 19 nt, Artificial Sequence
  Description of Artificial Sequence: Synthetic oligonucleotide
gcugaacaccguggcuggc

SEQ ID NO: 1312628 - RNA, 19 nt, Artificial Sequence
  Description of Artificial Sequence: Synthetic oligonucleotide
cauccgcaaguucuauguu

SEQ ID NO: 1312629 - RNA, 19 nt, Artificial Sequence
  Description of Artificial Sequence: Synthetic oligonucleotide
gcguacuugagagggucua

SEQ ID NO: 1312630 - RNA, 19 nt, Artificial Sequence
  Description of Artificial Sequence: Synthetic oligonucleotide
gagccaccgggagcugcuc

SEQ ID NO: 1312631 - RNA, 19 nt, Artificial Sequence
  Description of Artificial Sequence: Synthetic oligonucleotide
ccaaucuuuuggcuucggu

SEQ ID NO: 1312632 - RNA, 19 nt, Artificial Sequence
  Description of Artificial Sequence: Synthetic oligonucleotide
gugaagccuguugcagacu

SEQ ID NO: 1312633 - RNA, 19 nt, Artificial Sequence
  Description of Artificial Sequence: Synthetic oligonucleotide
acgaccggugaagccuguu

SEQ ID NO: 1312634 - RNA, 19 nt, Artificial Sequence
  Description of Artificial Sequence: Synthetic oligonucleotide
cccucccgguuaacacccg

SEQ ID NO: 1312635 - RNA, 19 nt, Artificial Sequence
  Description of Artificial Sequence: Synthetic oligonucleotide
cuaugggcuccuccaccau

SEQ ID NO: 1312636 - RNA, 19 nt, Artificial Sequence
  Description of Artificial Sequence: Synthetic oligonucleotide
cccgguuaacacccgcaaa

SEQ ID NO: 1312637 - RNA, 19 nt, Artificial Sequence
  Description of Artificial Sequence: Synthetic oligonucleotide
caguuaccucauagcuccu

SEQ ID NO: 1312638 - RNA, 19 nt, Artificial Sequence
  Description of Artificial Sequence: Synthetic oligonucleotide
gccuuggcaggugucgaua

SEQ ID NO: 1312639 - RNA, 19 nt, Artificial Sequence
  Description of Artificial Sequence: Synthetic oligonucleotide
ggcguacuugagagggucu

SEQ ID NO: 1312640 - RNA, 19 nt, Artificial Sequence
  Description of Artificial Sequence: Synthetic oligonucleotide
ggacauguuuagggucucu

SEQ ID NO: 1312641 - RNA, 19 nt, Artificial Sequence
  Description of Artificial Sequence: Synthetic oligonucleotide
ggcugaugcgacagcgagu

SEQ ID NO: 1312642 - RNA, 19 nt, Artificial Sequence
  Description of Artificial Sequence: Synthetic oligonucleotide
ggacgcgccuuggcaggug

SEQ ID NO: 1312643 - RNA, 19 nt, Artificial Sequence
  Description of Artificial Sequence: Synthetic oligonucleotide
cagcucauuguagcgucuu

SEQ ID NO: 1312644 - RNA, 19 nt, Artificial Sequence
  Description of Artificial Sequence: Synthetic oligonucleotide
ccagagcaucacggcggcc

SEQ ID NO: 1312645 - RNA, 19 nt, Artificial Sequence
  Description of Artificial Sequence: Synthetic oligonucleotide
ccgcuucuaaagaauuguu

SEQ ID NO: 1312646 - RNA, 19 nt, Artificial Sequence
  Description of Artificial Sequence: Synthetic oligonucleotide
ggcgagccagcagggcgca

SEQ ID NO: 1312647 - RNA, 19 nt, Artificial Sequence
  Description of Artificial Sequence: Synthetic oligonucleotide
ggcuacuagccaaggccau

SEQ ID NO: 1312648 - RNA, 19 nt, Artificial Sequence
  Description of Artificial Sequence: Synthetic oligonucleotide
gcuucgguuucugguguau

SEQ ID NO: 1312649 - RNA, 19 nt, Artificial Sequence
  Description of Artificial Sequence: Synthetic oligonucleotide
cagagacuuuugggacaaa

SEQ ID NO: 1312650 - RNA, 19 nt, Artificial Sequence
  Description of Artificial Sequence: Synthetic oligonucleotide
cacgaccggugaagccugu

SEQ ID NO: 1312651 - RNA, 19 nt, Artificial Sequence
  Description of Artificial Sequence: Synthetic oligonucleotide
cgcuuggagcgaggagugc

SEQ ID NO: 1312652 - RNA, 19 nt, Artificial Sequence
  Description of Artificial Sequence: Synthetic oligonucleotide
ccccaugaccugucauaua

SEQ ID NO: 1312653 - RNA, 19 nt, Artificial Sequence
  Description of Artificial Sequence: Synthetic oligonucleotide
cgggcauugcaugccaugu

SEQ ID NO: 1312654 - RNA, 19 nt, Artificial Sequence
  Description of Artificial Sequence: Synthetic oligonucleotide
ccgacauccuugggccuaa

SEQ ID NO: 1312655 - RNA, 19 nt, Artificial Sequence
  Description of Artificial Sequence: Synthetic oligonucleotide
cguacuugagagggucuau

SEQ ID NO: 1312656 - RNA, 19 nt, Artificial Sequence
  Description of Artificial Sequence: Synthetic oligonucleotide
cguguuccucguugcugcu

SEQ ID NO: 1312657 - RNA, 19 nt, Artificial Sequence
  Description of Artificial Sequence: Synthetic oligonucleotide
ucugaguuaguacugaugg

SEQ ID NO: 1312658 - RNA, 19 nt, Artificial Sequence
  Description of Artificial Sequence: Synthetic oligonucleotide
ugaaauuacagcuuucugg

SEQ ID NO: 1312659 - RNA, 19 nt, Artificial Sequence
  Description of Artificial Sequence: Synthetic oligonucleotide
uuagguuuuacgcuuaagg

SEQ ID NO: 1312660 - RNA, 19 nt, Artificial Sequence
  Description of Artificial Sequence: Synthetic oligonucleotide
uauucaaaagagaagaugu

SEQ ID NO: 1312661 - RNA, 19 nt, Artificial Sequence
  Description of Artificial Sequence: Synthetic oligonucleotide
uuuaugaacacgcaccagg

SEQ ID NO: 1312662 - RNA, 19 nt, Artificial Sequence
  Description of Artificial Sequence: Synthetic oligonucleotide
ucuuguaaggaacacagag

SEQ ID NO: 1312663 - RNA, 19 nt, Artificial Sequence
  Description of Artificial Sequence: Synthetic oligonucleotide
gaagucuugaaacaaagcc

SEQ ID NO: 1312664 - RNA, 19 nt, Artificial Sequence
  Description of Artificial Sequence: Synthetic oligonucleotide
uauaauacuccuucaagag

SEQ ID NO: 1312665 - RNA, 19 nt, Artificial Sequence
  Description of Artificial Sequence: Synthetic oligonucleotide
agauugacucuauaggucc

SEQ ID NO: 1312666 - RNA, 19 nt, Artificial Sequence
  Description of Artificial Sequence: Synthetic oligonucleotide
ugagauuuaagugaucugg

SEQ ID NO: 1312667 - RNA, 19 nt, Artificial Sequence
  Description of Artificial Sequence: Synthetic oligonucleotide
uguacuauaauacuccuuc

SEQ ID NO: 1312668 - RNA, 19 nt, Artificial Sequence
  Description of Artificial Sequence: Synthetic oligonucleotide
augacuaucacuuccauca

SEQ ID NO: 1312669 - RNA, 19 nt, Artificial Sequence
  Description of Artificial Sequence: Synthetic oligonucleotide
  modified_base (2)..(2): a, c, u, g, unknown or other
unauagucuauccaaaacu

SEQ ID NO: 1312670 - RNA, 19 nt, Artificial Sequence
  Description of Artificial Sequence: Synthetic oligonucleotide
aauuacagcuuucugguca

SEQ ID NO: 1312671 - RNA, 19 nt, Artificial Sequence
  Description of Artificial Sequence: Synthetic oligonucleotide
acuuccaucacucuccaac

SEQ ID NO: 1312672 - RNA, 19 nt, Artificial Sequence
  Description of Artificial Sequence: Synthetic oligonucleotide
uuggaaaucaguuccagug

SEQ ID NO: 1312673 - RNA, 19 nt, Artificial Sequence
  Description of Artificial Sequence: Synthetic oligonucleotide
agguuuuacgcuuaaggac

SEQ ID NO: 1312674 - RNA, 19 nt, Artificial Sequence
  Description of Artificial Sequence: Synthetic oligonucleotide
aacaacacaugacuaucac

SEQ ID NO: 1312675 - RNA, 19 nt, Artificial Sequence
  Description of Artificial Sequence: Synthetic oligonucleotide
ucaauaugcacagucacag

SEQ ID NO: 1312676 - RNA, 19 nt, Artificial Sequence
  Description of Artificial Sequence: Synthetic oligonucleotide
cuacaaagcuuauuggucg

SEQ ID NO: 1312677 - RNA, 19 nt, Artificial Sequence
  Description of Artificial Sequence: Synthetic oligonucleotide
  modified_base (3)..(3): a, c, u, g, unknown or other
uunauagucuauccaaaac

SEQ ID NO: 1312678 - RNA, 19 nt, Artificial Sequence
  Description of Artificial Sequence: Synthetic oligonucleotide
aaaacuguagaaagguuuc

SEQ ID NO: 1312679 - RNA, 19 nt, Artificial Sequence
  Description of Artificial Sequence: Synthetic oligonucleotide
uugucaacggcucagacuc

SEQ ID NO: 1312680 - RNA, 19 nt, Artificial Sequence
  Description of Artificial Sequence: Synthetic oligonucleotide
acuauaauacuccuucaag

SEQ ID NO: 1312681 - RNA, 19 nt, Artificial Sequence
  Description of Artificial Sequence: Synthetic oligonucleotide
auguuuaugaacacgcacc

SEQ ID NO: 1312682 - RNA, 19 nt, Artificial Sequence
  Description of Artificial Sequence: Synthetic oligonucleotide
cuuugugagguauuaagag

SEQ ID NO: 1312683 - RNA, 19 nt, Artificial Sequence
  Description of Artificial Sequence: Synthetic oligonucleotide
auugguaucgucuuggaaa

SEQ ID NO: 1312684 - RNA, 19 nt, Artificial Sequence
  Description of Artificial Sequence: Synthetic oligonucleotide
gauguuagaaacuccguac

SEQ ID NO: 1312685 - RNA, 19 nt, Artificial Sequence
  Description of Artificial Sequence: Synthetic oligonucleotide
uccaguguuaaacauguga

SEQ ID NO: 1312686 - RNA, 19 nt, Artificial Sequence
  Description of Artificial Sequence: Synthetic oligonucleotide
aaucuaguguaaguuuugc

SEQ ID NO: 1312687 - RNA, 19 nt, Artificial Sequence
  Description of Artificial Sequence: Synthetic oligonucleotide
acucuauagguccacugcc

SEQ ID NO: 1312688 - RNA, 19 nt, Artificial Sequence
  Description of Artificial Sequence: Synthetic oligonucleotide
ugcauauuugcauuggugu

SEQ ID NO: 1312689 - RNA, 19 nt, Artificial Sequence
  Description of Artificial Sequence: Synthetic oligonucleotide
uaaagcauuugaaggugcg

SEQ ID NO: 1312690 - RNA, 19 nt, Artificial Sequence
  Description of Artificial Sequence: Synthetic oligonucleotide
uagugauugaucugcaugc

SEQ ID NO: 1312691 - RNA, 19 nt, Artificial Sequence
  Description of Artificial Sequence: Synthetic oligonucleotide
cagcuaaagcauuugaagg

SEQ ID NO: 1312692 - RNA, 19 nt, Artificial Sequence
  Description of Artificial Sequence: Synthetic oligonucleotide
aagacgaagaggaaaacug

SEQ ID NO: 1312693 - RNA, 19 nt, Artificial Sequence
  Description of Artificial Sequence: Synthetic oligonucleotide
ucguguaugaaaagcagca

SEQ ID NO: 1312694 - RNA, 19 nt, Artificial Sequence
  Description of Artificial Sequence: Synthetic oligonucleotide
aauuuaucuuuguauugga

SEQ ID NO: 1312695 - RNA, 19 nt, Artificial Sequence
  Description of Artificial Sequence: Synthetic oligonucleotide
uguuuaugaacacgcacca

SEQ ID NO: 1312696 - RNA, 19 nt, Artificial Sequence
  Description of Artificial Sequence: Synthetic oligonucleotide
gacauguuuaugaacacgc

SEQ ID NO: 1312697 - RNA, 19 nt, Artificial Sequence
  Description of Artificial Sequence: Synthetic oligonucleotide
cucuguacuauaauacucc

SEQ ID NO: 1312698 - RNA, 19 nt, Artificial Sequence
  Description of Artificial Sequence: Synthetic oligonucleotide
aaagagccaucaucauucc

SEQ ID NO: 1312699 - RNA, 19 nt, Artificial Sequence
  Description of Artificial Sequence: Synthetic oligonucleotide
uuugugagguauuaagaga

SEQ ID NO: 1312700 - RNA, 19 nt, Artificial Sequence
  Description of Artificial Sequence: Synthetic oligonucleotide
agaaacuccguacuaaaga

SEQ ID NO: 1312701 - RNA, 19 nt, Artificial Sequence
  Description of Artificial Sequence: Synthetic oligonucleotide
  modified_base (8)..(8): a, c, u, g, unknown or other
aucccuunauagucuaucc

SEQ ID NO: 1312702 - RNA, 19 nt, Artificial Sequence
  Description of Artificial Sequence: Synthetic oligonucleotide
caaaacuggagaauacacc

SEQ ID NO: 1312703 - RNA, 19 nt, Artificial Sequence
  Description of Artificial Sequence: Synthetic oligonucleotide
cugcauaucuuguuguugg

SEQ ID NO: 1312704 - RNA, 19 nt, Artificial Sequence
  Description of Artificial Sequence: Synthetic oligonucleotide
ucauguucuuguaaggaac

SEQ ID NO: 1312705 - RNA, 19 nt, Artificial Sequence
  Description of Artificial Sequence: Synthetic oligonucleotide
uguaaggaacacagagugg

SEQ ID NO: 1312706 - RNA, 19 nt, Artificial Sequence
  Description of Artificial Sequence: Synthetic oligonucleotide
gaagauuggauggagaaga

SEQ ID NO: 1312707 - RNA, 19 nt, Artificial Sequence
  Description of Artificial Sequence: Synthetic oligonucleotide
aacggcucagacucuguac

SEQ ID NO: 1312708 - RNA, 19 nt, Artificial Sequence
  Description of Artificial Sequence: Synthetic oligonucleotide
aacacaugacuaucacuuc

SEQ ID NO: 1312709 - RNA, 19 nt, Artificial Sequence
  Description of Artificial Sequence: Synthetic oligonucleotide
  modified_base (2)..(2): a, c, u, g, unknown or other
unucugaccaccauuuguc

SEQ ID NO: 1312710 - RNA, 19 nt, Artificial Sequence
  Description of Artificial Sequence: Synthetic oligonucleotide
agucuacaaagcuuauugg

SEQ ID NO: 1312711 - RNA, 19 nt, Artificial Sequence
  Description of Artificial Sequence: Synthetic oligonucleotide
aaagccucuaggucagauc

SEQ ID NO: 1312712 - RNA, 19 nt, Artificial Sequence
  Description of Artificial Sequence: Synthetic oligonucleotide
aaacaugugagaaucucug

SEQ ID NO: 1312713 - RNA, 19 nt, Artificial Sequence
  Description of Artificial Sequence: Synthetic oligonucleotide
agucuugaaacaaagccuc

SEQ ID NO: 1312714 - RNA, 19 nt, Artificial Sequence
  Description of Artificial Sequence: Synthetic oligonucleotide
gguuuuacgcuuaaggacg

SEQ ID NO: 1312715 - RNA, 19 nt, Artificial Sequence
  Description of Artificial Sequence: Synthetic oligonucleotide
agacucuguacuauaauac

SEQ ID NO: 1312716 - RNA, 19 nt, Artificial Sequence
  Description of Artificial Sequence: Synthetic oligonucleotide
uuaugaacacgcaccagga

SEQ ID NO: 1312717 - RNA, 19 nt, Artificial Sequence
  Description of Artificial Sequence: Synthetic oligonucleotide
uuaagagacacuugaucac

SEQ ID NO: 1312718 - RNA, 19 nt, Artificial Sequence
  Description of Artificial Sequence: Synthetic oligonucleotide
aacuccguacuaaagauga

SEQ ID NO: 1312719 - RNA, 19 nt, Artificial Sequence
  Description of Artificial Sequence: Synthetic oligonucleotide
guagugauugaucugcaug

SEQ ID NO: 1312720 - RNA, 19 nt, Artificial Sequence
  Description of Artificial Sequence: Synthetic oligonucleotide
agcuaaagcauuugaaggu

SEQ ID NO: 1312721 - RNA, 19 nt, Artificial Sequence
  Description of Artificial Sequence: Synthetic oligonucleotide
gaaggugcguuuccgaaag

SEQ ID NO: 1312722 - RNA, 19 nt, Artificial Sequence
  Description of Artificial Sequence: Synthetic oligonucleotide
  modified_base (13)..(13): a, c, u, g, unknown or other
ucugaugccggunucugac

SEQ ID NO: 1312723 - RNA, 19 nt, Artificial Sequence
  Description of Artificial Sequence: Synthetic oligonucleotide
cuugaaacaaagccucuag

SEQ ID NO: 1312724 - RNA, 19 nt, Artificial Sequence
  Description of Artificial Sequence: Synthetic oligonucleotide
uuugaagucuugaaacaaa

SEQ ID NO: 1312725 - RNA, 19 nt, Artificial Sequence
  Description of Artificial Sequence: Synthetic oligonucleotide
cacuugaucacaagucugg

SEQ ID NO: 1312726 - RNA, 19 nt, Artificial Sequence
  Description of Artificial Sequence: Synthetic oligonucleotide
acggcugagauuuaaguga

SEQ ID NO: 1312727 - RNA, 19 nt, Artificial Sequence
  Description of Artificial Sequence: Synthetic oligonucleotide
augugagaaucucugaugu

SEQ ID NO: 1312728 - RNA, 19 nt, Artificial Sequence
  Description of Artificial Sequence: Synthetic oligonucleotide
cacuuugugagguauuaag

SEQ ID NO: 1312729 - RNA, 19 nt, Artificial Sequence
  Description of Artificial Sequence: Synthetic oligonucleotide
aaacuggagaauacaccgc

SEQ ID NO: 1312730 - RNA, 19 nt, Artificial Sequence
  Description of Artificial Sequence: Synthetic oligonucleotide
  modified_base (7)..(7): a, c, u, g, unknown or other
ucccuunauagucuaucca

SEQ ID NO: 1312731 - RNA, 19 nt, Artificial Sequence
  Description of Artificial Sequence: Synthetic oligonucleotide
uuauuggucguccuuucac

SEQ ID NO: 1312732 - RNA, 19 nt, Artificial Sequence
  Description of Artificial Sequence: Synthetic oligonucleotide
gacucuauagguccacugc

SEQ ID NO: 1312733 - RNA, 19 nt, Artificial Sequence
  Description of Artificial Sequence: Synthetic oligonucleotide
agaaagguuucugaugccg

SEQ ID NO: 1312734 - RNA, 19 nt, Artificial Sequence
  Description of Artificial Sequence: Synthetic oligonucleotide
ucuauccaaaacuggagaa

SEQ ID NO: 1312735 - RNA, 19 nt, Artificial Sequence
  Description of Artificial Sequence: Synthetic oligonucleotide
ugcauugguguucacacuc

SEQ ID NO: 1312736 - RNA, 19 nt, Artificial Sequence
  Description of Artificial Sequence: Synthetic oligonucleotide
ugacauguuuaugaacacg

SEQ ID NO: 1312737 - RNA, 19 nt, Artificial Sequence
  Description of Artificial Sequence: Synthetic oligonucleotide
aaagcagaacgagcgacuc

SEQ ID NO: 1312738 - RNA, 19 nt, Artificial Sequence
  Description of Artificial Sequence: Synthetic oligonucleotide
uacaguugcaacaguuuca

SEQ ID NO: 1312739 - RNA, 19 nt, Artificial Sequence
  Description of Artificial Sequence: Synthetic oligonucleotide
ugcaacaguuucaucuucc

SEQ ID NO: 1312740 - RNA, 19 nt, Artificial Sequence
  Description of Artificial Sequence: Synthetic oligonucleotide
gacggcugagauuuaagug

SEQ ID NO: 1312741 - RNA, 19 nt, Artificial Sequence
  Description of Artificial Sequence: Synthetic oligonucleotide
uccguacuaaagaugaaau

SEQ ID NO: 1312742 - RNA, 19 nt, Artificial Sequence
  Description of Artificial Sequence: Synthetic oligonucleotide
gagacacugugcuacuccg

SEQ ID NO: 1312743 - RNA, 19 nt, Artificial Sequence
  Description of Artificial Sequence: Synthetic oligonucleotide
auuugucaacggcucagac

SEQ ID NO: 1312744 - RNA, 19 nt, Artificial Sequence
  Description of Artificial Sequence: Synthetic oligonucleotide
uaugcacagucacaggacu

SEQ ID NO: 1312745 - RNA, 19 nt, Artificial Sequence
  Description of Artificial Sequence: Synthetic oligonucleotide
guaauucugaguuaguacu

SEQ ID NO: 1312746 - RNA, 19 nt, Artificial Sequence
  Description of Artificial Sequence: Synthetic oligonucleotide
cuaaagcauuugaaggugc

SEQ ID NO: 1312747 - RNA, 19 nt, Artificial Sequence
  Description of Artificial Sequence: Synthetic oligonucleotide
caagaugaucaauaugcac

SEQ ID NO: 1312748 - RNA, 19 nt, Artificial Sequence
  Description of Artificial Sequence: Synthetic oligonucleotide
uuugucaacggcucagacu

SEQ ID NO: 1312749 - RNA, 19 nt, Artificial Sequence
  Description of Artificial Sequence: Synthetic oligonucleotide
uugggaauaauauucccuu

SEQ ID NO: 1312750 - RNA, 19 nt, Artificial Sequence
  Description of Artificial Sequence: Synthetic oligonucleotide
acgguuuccaagguaauuc

SEQ ID NO: 1312751 - RNA, 19 nt, Artificial Sequence
  Description of Artificial Sequence: Synthetic oligonucleotide
gaacacagaguggagcugg

SEQ ID NO: 1312752 - RNA, 19 nt, Artificial Sequence
  Description of Artificial Sequence: Synthetic oligonucleotide
cucguguaugaaaagcagc

SEQ ID NO: 1312753 - RNA, 19 nt, Artificial Sequence
  Description of Artificial Sequence: Synthetic oligonucleotide
uuuguauuggaaacuugua

SEQ ID NO: 1312754 - RNA, 19 nt, Artificial Sequence
  Description of Artificial Sequence: Synthetic oligonucleotide
ucaagaguuuucuuccgcu

SEQ ID NO: 1312755 - RNA, 19 nt, Artificial Sequence
  Description of Artificial Sequence: Synthetic oligonucleotide
ugagaaucucugaugugga

SEQ ID NO: 1312756 - RNA, 19 nt, Artificial Sequence
  Description of Artificial Sequence: Synthetic oligonucleotide
caugugagaaucucugaug

SEQ ID NO: 1312757 - RNA, 19 nt, Artificial Sequence
  Description of Artificial Sequence: Synthetic oligonucleotide
  modified_base (12)..(12): a, c, u, g, unknown or other
uuucaucccuunauagucu

SEQ ID NO: 1312758 - RNA, 19 nt, Artificial Sequence
  Description of Artificial Sequence: Synthetic oligonucleotide
uuacgcuuaaggacggcug

SEQ ID NO: 1312759 - RNA, 19 nt, Artificial Sequence
  Description of Artificial Sequence: Synthetic oligonucleotide
uuguauuugaguuccuuuu

SEQ ID NO: 1312760 - RNA, 19 nt, Artificial Sequence
  Description of Artificial Sequence: Synthetic oligonucleotide
ucugcaucugaagacgaag

SEQ ID NO: 1312761 - RNA, 19 nt, Artificial Sequence
  Description of Artificial Sequence: Synthetic oligonucleotide
uguauuugaguuccuuuua

SEQ ID NO: 1312762 - RNA, 19 nt, Artificial Sequence
  Description of Artificial Sequence: Synthetic oligonucleotide
guaaggaacacagagugga

SEQ ID NO: 1312763 - RNA, 19 nt, Artificial Sequence
  Description of Artificial Sequence: Synthetic oligonucleotide
aauucugaguuaguacuga

SEQ ID NO: 1312764 - RNA, 19 nt, Artificial Sequence
  Description of Artificial Sequence: Synthetic oligonucleotide
uuuaccagcuaaagcauuu

SEQ ID NO: 1312765 - RNA, 19 nt, Artificial Sequence
  Description of Artificial Sequence: Synthetic oligonucleotide
  modified_base (17)..(17): a, c, u, g, unknown or other
ucacuuuucaucccuunau

SEQ ID NO: 1312766 - RNA, 19 nt, Artificial Sequence
  Description of Artificial Sequence: Synthetic oligonucleotide
cauucggccagccaaauca

SEQ ID NO: 1312767 - RNA, 19 nt, Artificial Sequence
  Description of Artificial Sequence: Synthetic oligonucleotide
ucuguacuauaauacuccu

SEQ ID NO: 1312768 - RNA, 19 nt, Artificial Sequence
  Description of Artificial Sequence: Synthetic oligonucleotide
aaacugucacaggauuugg

SEQ ID NO: 1312769 - RNA, 19 nt, Artificial Sequence
  Description of Artificial Sequence: Synthetic oligonucleotide
caugcauuuugguaucuug

SEQ ID NO: 1312770 - RNA, 19 nt, Artificial Sequence
  Description of Artificial Sequence: Synthetic oligonucleotide
aggaacacagaguggagcu

SEQ ID NO: 1312771 - RNA, 19 nt, Artificial Sequence
  Description of Artificial Sequence: Synthetic oligonucleotide
gagauuuaagugaucuggc

SEQ ID NO: 1312772 - RNA, 19 nt, Artificial Sequence
  Description of Artificial Sequence: Synthetic oligonucleotide
ugccuuuaccagcuaaagc

SEQ ID NO: 1312773 - RNA, 19 nt, Artificial Sequence
  Description of Artificial Sequence: Synthetic oligonucleotide
cuugaucacaagucuggag

SEQ ID NO: 1312774 - RNA, 19 nt, Artificial Sequence
  Description of Artificial Sequence: Synthetic oligonucleotide
gagaauacaccgcccacac

SEQ ID NO: 1312775 - RNA, 19 nt, Artificial Sequence
  Description of Artificial Sequence: Synthetic oligonucleotide
uaguacugauggcaucagg

SEQ ID NO: 1312776 - RNA, 19 nt, Artificial Sequence
  Description of Artificial Sequence: Synthetic oligonucleotide
gaauacaccgcccacacau

SEQ ID NO: 1312777 - RNA, 19 nt, Artificial Sequence
  Description of Artificial Sequence: Synthetic oligonucleotide
  modified_base (18)..(18): a, c, u, g, unknown or other
uucacuuuucaucccuuna

SEQ ID NO: 1312778 - RNA, 19 nt, Artificial Sequence
  Description of Artificial Sequence: Synthetic oligonucleotide
acuguguugcuuccucacg

SEQ ID NO: 1312779 - RNA, 19 nt, Artificial Sequence
  Description of Artificial Sequence: Synthetic oligonucleotide
uauuggucguccuuucacu

SEQ ID NO: 1312780 - RNA, 19 nt, Artificial Sequence
  Description of Artificial Sequence: Synthetic oligonucleotide
uuccccacaauucugcaua

SEQ ID NO: 1312781 - RNA, 19 nt, Artificial Sequence
  Description of Artificial Sequence: Synthetic oligonucleotide
acagucacaggacuuggcu

SEQ ID NO: 1312782 - RNA, 19 nt, Artificial Sequence
  Description of Artificial Sequence: Synthetic oligonucleotide
agauguuagaaacuccgua

SEQ ID NO: 1312783 - RNA, 19 nt, Artificial Sequence
  Description of Artificial Sequence: Synthetic oligonucleotide
acaacacaugacuaucacu

SEQ ID NO: 1312784 - RNA, 19 nt, Artificial Sequence
  Description of Artificial Sequence: Synthetic oligonucleotide
  modified_base (4)..(4): a, c, u, g, unknown or other
cuunauagucuauccaaaa

SEQ ID NO: 1312785 - RNA, 19 nt, Artificial Sequence
  Description of Artificial Sequence: Synthetic oligonucleotide
ucuuccgcuucauucggcc

SEQ ID NO: 1312786 - RNA, 19 nt, Artificial Sequence
  Description of Artificial Sequence: Synthetic oligonucleotide
ugugagguauuaagagaca

SEQ ID NO: 1312787 - RNA, 19 nt, Artificial Sequence
  Description of Artificial Sequence: Synthetic oligonucleotide
  modified_base (11)..(11): a, c, u, g, unknown or other
ugaugccggunucugacca

SEQ ID NO: 1312788 - RNA, 19 nt, Artificial Sequence
  Description of Artificial Sequence: Synthetic oligonucleotide
uugguaucgucuuggaaau

SEQ ID NO: 1312789 - RNA, 19 nt, Artificial Sequence
  Description of Artificial Sequence: Synthetic oligonucleotide
ucugcauaucuuguuguug

SEQ ID NO: 1312790 - RNA, 19 nt, Artificial Sequence
  Description of Artificial Sequence: Synthetic oligonucleotide
uaucuuuguauuggaaacu

SEQ ID NO: 1312791 - RNA, 19 nt, Artificial Sequence
  Description of Artificial Sequence: Synthetic oligonucleotide
uggggcaacgcuccuuagg

SEQ ID NO: 1312792 - RNA, 19 nt, Artificial Sequence
  Description of Artificial Sequence: Synthetic oligonucleotide
uacgcuuaaggacggcuga

SEQ ID NO: 1312793 - RNA, 19 nt, Artificial Sequence
  Description of Artificial Sequence: Synthetic oligonucleotide
guguuuuauucaauuuggg

SEQ ID NO: 1312794 - RNA, 19 nt, Artificial Sequence
  Description of Artificial Sequence: Synthetic oligonucleotide
gguaucuuguucaugagca

SEQ ID NO: 1312795 - RNA, 19 nt, Artificial Sequence
  Description of Artificial Sequence: Synthetic oligonucleotide
ugcguuuccgaaagcagaa

SEQ ID NO: 1312796 - RNA, 19 nt, Artificial Sequence
  Description of Artificial Sequence: Synthetic oligonucleotide
uguugcuuccucacgucac

SEQ ID NO: 1312797 - RNA, 19 nt, Artificial Sequence
  Description of Artificial Sequence: Synthetic oligonucleotide
ucacgucacacuuuccacu

SEQ ID NO: 1312798 - RNA, 19 nt, Artificial Sequence
  Description of Artificial Sequence: Synthetic oligonucleotide
gaaaggagucuacaaagcu

SEQ ID NO: 1312799 - RNA, 19 nt, Artificial Sequence
  Description of Artificial Sequence: Synthetic oligonucleotide
cuuuguauuggaaacuugu

SEQ ID NO: 1312800 - RNA, 19 nt, Artificial Sequence
  Description of Artificial Sequence: Synthetic oligonucleotide
cauauuugcauugguguuc

SEQ ID NO: 1312801 - RNA, 19 nt, Artificial Sequence
  Description of Artificial Sequence: Synthetic oligonucleotide
uaugaacacgcaccaggac

SEQ ID NO: 1312802 - RNA, 19 nt, Artificial Sequence
  Description of Artificial Sequence: Synthetic oligonucleotide
uuuacgcuuaaggacggcu

SEQ ID NO: 1312803 - RNA, 19 nt, Artificial Sequence
  Description of Artificial Sequence: Synthetic oligonucleotide
gaaucuaguguaaguuuug

SEQ ID NO: 1312804 - RNA, 19 nt, Artificial Sequence
  Description of Artificial Sequence: Synthetic oligonucleotide
aucuaguguaaguuuugcu

SEQ ID NO: 1312805 - RNA, 19 nt, Artificial Sequence
  Description of Artificial Sequence: Synthetic oligonucleotide
aaggugcguuuccgaaagc

SEQ ID NO: 1312806 - RNA, 19 nt, Artificial Sequence
  Description of Artificial Sequence: Synthetic oligonucleotide
aaacuccguacuaaagaug

SEQ ID NO: 1312807 - RNA, 19 nt, Artificial Sequence
  Description of Artificial Sequence: Synthetic oligonucleotide
auuggcauuacaguugcaa

SEQ ID NO: 1312808 - RNA, 19 nt, Artificial Sequence
  Description of Artificial Sequence: Synthetic oligonucleotide
accacaagaugaucaauau

SEQ ID NO: 1312809 - RNA, 19 nt, Artificial Sequence
  Description of Artificial Sequence: Synthetic oligonucleotide
cuggacuugucugaguggc

SEQ ID NO: 1312810 - RNA, 19 nt, Artificial Sequence
  Description of Artificial Sequence: Synthetic oligonucleotide
aaccaacuggacgguuucc

SEQ ID NO: 1312811 - RNA, 19 nt, Artificial Sequence
  Description of Artificial Sequence: Synthetic oligonucleotide
acucugcauaucuuguugu

SEQ ID NO: 1312812 - RNA, 19 nt, Artificial Sequence
  Description of Artificial Sequence: Synthetic oligonucleotide
uacaaagcuuauuggucgu

SEQ ID NO: 1312813 - RNA, 19 nt, Artificial Sequence
  Description of Artificial Sequence: Synthetic oligonucleotide
gacacuugaucacaagucu

SEQ ID NO: 1312814 - RNA, 19 nt, Artificial Sequence
  Description of Artificial Sequence: Synthetic oligonucleotide
cauaucuuguuguuggcaa

SEQ ID NO: 1312815 - RNA, 19 nt, Artificial Sequence
  Description of Artificial Sequence: Synthetic oligonucleotide
aaacuguagaaagguuucu

SEQ ID NO: 1312816 - RNA, 19 nt, Artificial Sequence
  Description of Artificial Sequence: Synthetic oligonucleotide
gaauaauauucccuuuaua

SEQ ID NO: 1312817 - RNA, 19 nt, Artificial Sequence
  Description of Artificial Sequence: Synthetic oligonucleotide
uggggaaucuaguguaagu

SEQ ID NO: 1312818 - RNA, 19 nt, Artificial Sequence
  Description of Artificial Sequence: Synthetic oligonucleotide
  modified_base (14)..(14): a, c, u, g, unknown or other
uucugaugccggunucuga

SEQ ID NO: 1312819 - RNA, 19 nt, Artificial Sequence
  Description of Artificial Sequence: Synthetic oligonucleotide
auccagcgagaccugagag

SEQ ID NO: 1312820 - RNA, 19 nt, Artificial Sequence
  Description of Artificial Sequence: Synthetic oligonucleotide
gacucguguaugaaaagca

SEQ ID NO: 1312821 - RNA, 19 nt, Artificial Sequence
  Description of Artificial Sequence: Synthetic oligonucleotide
aguuccaguguuaaacaug

SEQ ID NO: 1312822 - RNA, 19 nt, Artificial Sequence
  Description of Artificial Sequence: Synthetic oligonucleotide
ugcauaucuuguuguuggc

SEQ ID NO: 1312823 - RNA, 19 nt, Artificial Sequence
  Description of Artificial Sequence: Synthetic oligonucleotide
cugagauuuaagugaucug

SEQ ID NO: 1312824 - RNA, 19 nt, Artificial Sequence
  Description of Artificial Sequence: Synthetic oligonucleotide
uggacucacuuugugaggu

SEQ ID NO: 1312825 - RNA, 19 nt, Artificial Sequence
  Description of Artificial Sequence: Synthetic oligonucleotide
cauguucuuguaaggaaca

SEQ ID NO: 1312826 - RNA, 19 nt, Artificial Sequence
  Description of Artificial Sequence: Synthetic oligonucleotide
  modified_base (9)..(9): a, c, u, g, unknown or other
augccggunucugaccacc

SEQ ID NO: 1312827 - RNA, 19 nt, Artificial Sequence
  Description of Artificial Sequence: Synthetic oligonucleotide
ugcugacauguuuaugaac

SEQ ID NO: 1312828 - RNA, 19 nt, Artificial Sequence
  Description of Artificial Sequence: Synthetic oligonucleotide
auucaauuugggaauaaua

SEQ ID NO: 1312829 - RNA, 19 nt, Artificial Sequence
  Description of Artificial Sequence: Synthetic oligonucleotide
aauacaccgcccacacauc

SEQ ID NO: 1312830 - RNA, 19 nt, Artificial Sequence
  Description of Artificial Sequence: Synthetic oligonucleotide
ccaaaacuggagaauacac

SEQ ID NO: 1312831 - RNA, 19 nt, Artificial Sequence
  Description of Artificial Sequence: Synthetic oligonucleotide
uagaaagguuucugaugcc

SEQ ID NO: 1312832 - RNA, 19 nt, Artificial Sequence
  Description of Artificial Sequence: Synthetic oligonucleotide
ugaaggugcguuuccgaaa

SEQ ID NO: 1312833 - RNA, 19 nt, Artificial Sequence
  Description of Artificial Sequence: Synthetic oligonucleotide
auacugguagugauugauc

SEQ ID NO: 1312834 - RNA, 19 nt, Artificial Sequence
  Description of Artificial Sequence: Synthetic oligonucleotide
auacaccgcccacacauca

SEQ ID NO: 1312835 - RNA, 19 nt, Artificial Sequence
  Description of Artificial Sequence: Synthetic oligonucleotide
agaacgagcgacucgugua

SEQ ID NO: 1312836 - RNA, 19 nt, Artificial Sequence
  Description of Artificial Sequence: Synthetic oligonucleotide
cucacgucacacuuuccac

SEQ ID NO: 1312837 - RNA, 19 nt, Artificial Sequence
  Description of Artificial Sequence: Synthetic oligonucleotide
uggagaauacaccgcccac

SEQ ID NO: 1312838 - RNA, 19 nt, Artificial Sequence
  Description of Artificial Sequence: Synthetic oligonucleotide
accgcccacacaucagugg

SEQ ID NO: 1312839 - RNA, 19 nt, Artificial Sequence
  Description of Artificial Sequence: Synthetic oligonucleotide
uuuaagugaucuggcugug

SEQ ID NO: 1312840 - RNA, 19 nt, Artificial Sequence
  Description of Artificial Sequence: Synthetic oligonucleotide
cuggacucacuuugugagg

SEQ ID NO: 1312841 - RNA, 19 nt, Artificial Sequence
  Description of Artificial Sequence: Synthetic oligonucleotide
uauagguccacugccuuua

SEQ ID NO: 1312842 - RNA, 19 nt, Artificial Sequence
  Description of Artificial Sequence: Synthetic oligonucleotide
uuggggaaucuaguguaag

SEQ ID NO: 1312843 - RNA, 19 nt, Artificial Sequence
  Description of Artificial Sequence: Synthetic oligonucleotide
cacaucaguggcagcagac

SEQ ID NO: 1312844 - RNA, 19 nt, Artificial Sequence
  Description of Artificial Sequence: Synthetic oligonucleotide
uacaccgcccacacaucag

SEQ ID NO: 1312845 - RNA, 19 nt, Artificial Sequence
  Description of Artificial Sequence: Synthetic oligonucleotide
gaaccaacuggacgguuuc

SEQ ID NO: 1312846 - RNA, 19 nt, Artificial Sequence
  Description of Artificial Sequence: Synthetic oligonucleotide
ugacuaucacuuccaucac

SEQ ID NO: 1312847 - RNA, 19 nt, Artificial Sequence
  Description of Artificial Sequence: Synthetic oligonucleotide
uucagcucugaagauugac

SEQ ID NO: 1312848 - RNA, 19 nt, Artificial Sequence
  Description of Artificial Sequence: Synthetic oligonucleotide
acacugugcuacuccgggg

SEQ ID NO: 1312849 - RNA, 19 nt, Artificial Sequence
  Description of Artificial Sequence: Synthetic oligonucleotide
  modified_base (10)..(10): a, c, u, g, unknown or other
ucaucccuunauagucuau

SEQ ID NO: 1312850 - RNA, 19 nt, Artificial Sequence
  Description of Artificial Sequence: Synthetic oligonucleotide
aucacaagucuggaguucu

SEQ ID NO: 1312851 - RNA, 19 nt, Artificial Sequence
  Description of Artificial Sequence: Synthetic oligonucleotide
  modified_base (9)..(9): a, c, u, g, unknown or other
caucccuunauagucuauc

SEQ ID NO: 1312852 - RNA, 19 nt, Artificial Sequence
  Description of Artificial Sequence: Synthetic oligonucleotide
acaauucugcauauuugca

SEQ ID NO: 1312853 - RNA, 19 nt, Artificial Sequence
  Description of Artificial Sequence: Synthetic oligonucleotide
acuccggggacugucaucu

SEQ ID NO: 1312854 - RNA, 19 nt, Artificial Sequence
  Description of Artificial Sequence: Synthetic oligonucleotide
uaucuuguuguuggcaaau

SEQ ID NO: 1312855 - RNA, 19 nt, Artificial Sequence
  Description of Artificial Sequence: Synthetic oligonucleotide
acaagaugaucaauaugca

SEQ ID NO: 1312856 - RNA, 19 nt, Artificial Sequence
  Description of Artificial Sequence: Synthetic oligonucleotide
uuccaauaccaugcugucc

SEQ ID NO: 1312857 - RNA, 19 nt, Artificial Sequence
  Description of Artificial Sequence: Synthetic oligonucleotide
auaucuuguuguuggcaaa

SEQ ID NO: 1312858 - RNA, 19 nt, Artificial Sequence
  Description of Artificial Sequence: Synthetic oligonucleotide
guacuauaauacuccuuca

SEQ ID NO: 1312859 - RNA, 19 nt, Artificial Sequence
  Description of Artificial Sequence: Synthetic oligonucleotide
acaguugcaacaguuucau

SEQ ID NO: 1312860 - RNA, 19 nt, Artificial Sequence
  Description of Artificial Sequence: Synthetic oligonucleotide
aacgcuccuuagguuuuac

SEQ ID NO: 1312861 - RNA, 19 nt, Artificial Sequence
  Description of Artificial Sequence: Synthetic oligonucleotide
ggcauugguaucgucuugg

SEQ ID NO: 1312862 - RNA, 19 nt, Artificial Sequence
  Description of Artificial Sequence: Synthetic oligonucleotide
auagguccacugccuuuac

SEQ ID NO: 1312863 - RNA, 19 nt, Artificial Sequence
  Description of Artificial Sequence: Synthetic oligonucleotide
acagaggaaaggagucuac

SEQ ID NO: 1312864 - RNA, 19 nt, Artificial Sequence
  Description of Artificial Sequence: Synthetic oligonucleotide
  modified_base (11)..(11): a, c, u, g, unknown or other
uucaucccuunauagucua

SEQ ID NO: 1312865 - RNA, 19 nt, Artificial Sequence
  Description of Artificial Sequence: Synthetic oligonucleotide
uguguugcuuccucacguc

SEQ ID NO: 1312866 - RNA, 19 nt, Artificial Sequence
  Description of Artificial Sequence: Synthetic oligonucleotide
  modified_base (3)..(3): a, c, u, g, unknown or other
gunucugaccaccauuugu

SEQ ID NO: 1312867 - RNA, 19 nt, Artificial Sequence
  Description of Artificial Sequence: Synthetic oligonucleotide
cagacucuguacuauaaua

SEQ ID NO: 1312868 - RNA, 19 nt, Artificial Sequence
  Description of Artificial Sequence: Synthetic oligonucleotide
gagguauuaagagacacuu

SEQ ID NO: 1312869 - RNA, 19 nt, Artificial Sequence
  Description of Artificial Sequence: Synthetic oligonucleotide
agacgaagaggaaaacugu

SEQ ID NO: 1312870 - RNA, 19 nt, Artificial Sequence
  Description of Artificial Sequence: Synthetic oligonucleotide
agcauuugaaggugcguuu

SEQ ID NO: 1312871 - RNA, 19 nt, Artificial Sequence
  Description of Artificial Sequence: Synthetic oligonucleotide
auuggucguccuuucacuu

SEQ ID NO: 1312872 - RNA, 19 nt, Artificial Sequence
  Description of Artificial Sequence: Synthetic oligonucleotide
guuuaugaacacgcaccag

SEQ ID NO: 1312873 - RNA, 19 nt, Artificial Sequence
  Description of Artificial Sequence: Synthetic oligonucleotide
gcuaaagcauuugaaggug

SEQ ID NO: 1312874 - RNA, 19 nt, Artificial Sequence
  Description of Artificial Sequence: Synthetic oligonucleotide
guuuccgaaagcagaacga

SEQ ID NO: 1312875 - RNA, 19 nt, Artificial Sequence
  Description of Artificial Sequence: Synthetic oligonucleotide
ugcaugcugacauguuuau

SEQ ID NO: 1312876 - RNA, 19 nt, Artificial Sequence
  Description of Artificial Sequence: Synthetic oligonucleotide
uucuuccgcuucauucggc

SEQ ID NO: 1312877 - RNA, 19 nt, Artificial Sequence
  Description of Artificial Sequence: Synthetic oligonucleotide
acgcuccuuagguuuuacg

SEQ ID NO: 1312878 - RNA, 19 nt, Artificial Sequence
  Description of Artificial Sequence: Synthetic oligonucleotide
  modified_base (16)..(16): a, c, u, g, unknown or other
cacuuuucaucccuunaua

SEQ ID NO: 1312879 - RNA, 19 nt, Artificial Sequence
  Description of Artificial Sequence: Synthetic oligonucleotide
aucuuuguauuggaaacuu

SEQ ID NO: 1312880 - RNA, 19 nt, Artificial Sequence
  Description of Artificial Sequence: Synthetic oligonucleotide
uggacuugucugaguggcc

SEQ ID NO: 1312881 - RNA, 19 nt, Artificial Sequence
  Description of Artificial Sequence: Synthetic oligonucleotide
uaacucugcauaucuuguu

SEQ ID NO: 1312882 - RNA, 19 nt, Artificial Sequence
  Description of Artificial Sequence: Synthetic oligonucleotide
cuuagguuuuacgcuuaag

SEQ ID NO: 1312883 - RNA, 19 nt, Artificial Sequence
  Description of Artificial Sequence: Synthetic oligonucleotide
gguaucgucuuggaaauca

SEQ ID NO: 1312884 - RNA, 19 nt, Artificial Sequence
  Description of Artificial Sequence: Synthetic oligonucleotide
cagccaaaucacuggacuc

SEQ ID NO: 1312885 - RNA, 19 nt, Artificial Sequence
  Description of Artificial Sequence: Synthetic oligonucleotide
ugggaauaauauucccuuu

SEQ ID NO: 1312886 - RNA, 19 nt, Artificial Sequence
  Description of Artificial Sequence: Synthetic oligonucleotide
  modified_base (12)..(12): a, c, u, g, unknown or other
cugaugccggunucugacc

SEQ ID NO: 1312887 - RNA, 19 nt, Artificial Sequence
  Description of Artificial Sequence: Synthetic oligonucleotide
cacugaaucaugguuggca

SEQ ID NO: 1312888 - RNA, 19 nt, Artificial Sequence
  Description of Artificial Sequence: Synthetic oligonucleotide
gauacugguagugauugau

SEQ ID NO: 1312889 - RNA, 19 nt, Artificial Sequence
  Description of Artificial Sequence: Synthetic oligonucleotide
cugccuuuaccagcuaaag

SEQ ID NO: 1312890 - RNA, 19 nt, Artificial Sequence
  Description of Artificial Sequence: Synthetic oligonucleotide
gacuugucugaguggccug

SEQ ID NO: 1312891 - RNA, 19 nt, Artificial Sequence
  Description of Artificial Sequence: Synthetic oligonucleotide
cguuuccgaaagcagaacg

SEQ ID NO: 1312892 - RNA, 19 nt, Artificial Sequence
  Description of Artificial Sequence: Synthetic oligonucleotide
guaucgucuuggaaaucag

SEQ ID NO: 1312893 - RNA, 19 nt, Artificial Sequence
  Description of Artificial Sequence: Synthetic oligonucleotide
acgucacacuuuccacugg

SEQ ID NO: 1312894 - RNA, 19 nt, Artificial Sequence
  Description of Artificial Sequence: Synthetic oligonucleotide
acaccgcccacacaucagu

SEQ ID NO: 1312895 - RNA, 19 nt, Artificial Sequence
  Description of Artificial Sequence: Synthetic oligonucleotide
gaccaccauuugucaacgg

SEQ ID NO: 1312896 - RNA, 19 nt, Artificial Sequence
  Description of Artificial Sequence: Synthetic oligonucleotide
agauacugguagugauuga

SEQ ID NO: 1312897 - RNA, 19 nt, Artificial Sequence
  Description of Artificial Sequence: Synthetic oligonucleotide
aggugcguuuccgaaagca

SEQ ID NO: 1312898 - RNA, 19 nt, Artificial Sequence
  Description of Artificial Sequence: Synthetic oligonucleotide
agaccugagaggugcuccu

SEQ ID NO: 1312899 - RNA, 19 nt, Artificial Sequence
  Description of Artificial Sequence: Synthetic oligonucleotide
gacgaagaggaaaacugua

SEQ ID NO: 1312900 - RNA, 19 nt, Artificial Sequence
  Description of Artificial Sequence: Synthetic oligonucleotide
cauugguguucacacucuc

SEQ ID NO: 1312901 - RNA, 19 nt, Artificial Sequence
  Description of Artificial Sequence: Synthetic oligonucleotide
agguauuaagagacacuug

SEQ ID NO: 1312902 - RNA, 19 nt, Artificial Sequence
  Description of Artificial Sequence: Synthetic oligonucleotide
acuugaucacaagucugga

SEQ ID NO: 1312903 - RNA, 19 nt, Artificial Sequence
  Description of Artificial Sequence: Synthetic oligonucleotide
uuccaguguuaaacaugug

SEQ ID NO: 1312904 - RNA, 19 nt, Artificial Sequence
  Description of Artificial Sequence: Synthetic oligonucleotide
aagauuggauggagaagau

SEQ ID NO: 1312905 - RNA, 19 nt, Artificial Sequence
  Description of Artificial Sequence: Synthetic oligonucleotide
acauguuuaugaacacgca

SEQ ID NO: 1312906 - RNA, 19 nt, Artificial Sequence
  Description of Artificial Sequence: Synthetic oligonucleotide
guugcuuccucacgucaca

SEQ ID NO: 1312907 - RNA, 19 nt, Artificial Sequence
  Description of Artificial Sequence: Synthetic oligonucleotide
  modified_base (4)..(4): a, c, u, g, unknown or other
ggunucugaccaccauuug

SEQ ID NO: 1312908 - RNA, 19 nt, Artificial Sequence
  Description of Artificial Sequence: Synthetic oligonucleotide
cuuauuggucguccuuuca

SEQ ID NO: 1312909 - RNA, 19 nt, Artificial Sequence
  Description of Artificial Sequence: Synthetic oligonucleotide
acgagcgacucguguauga

SEQ ID NO: 1312910 - RNA, 19 nt, Artificial Sequence
  Description of Artificial Sequence: Synthetic oligonucleotide
agaauacaccgcccacaca

SEQ ID NO: 1312911 - RNA, 19 nt, Artificial Sequence
  Description of Artificial Sequence: Synthetic oligonucleotide
cacuggacucacuuuguga

SEQ ID NO: 1312912 - RNA, 19 nt, Artificial Sequence
  Description of Artificial Sequence: Synthetic oligonucleotide
aaggacggcugagauuuaa

SEQ ID NO: 1312913 - RNA, 19 nt, Artificial Sequence
  Description of Artificial Sequence: Synthetic oligonucleotide
aacgagcgacucguguaug

SEQ ID NO: 1312914 - RNA, 19 nt, Artificial Sequence
  Description of Artificial Sequence: Synthetic oligonucleotide
agcuuauuggucguccuuu

SEQ ID NO: 1312915 - RNA, 19 nt, Artificial Sequence
  Description of Artificial Sequence: Synthetic oligonucleotide
ucacuuugugagguauuaa

SEQ ID NO: 1312916 - RNA, 19 nt, Artificial Sequence
  Description of Artificial Sequence: Synthetic oligonucleotide
uuggucguccuuucacuuu

SEQ ID NO: 1312917 - RNA, 19 nt, Artificial Sequence
  Description of Artificial Sequence: Synthetic oligonucleotide
gaaaucaguuccaguguua

SEQ ID NO: 1312918 - RNA, 19 nt, Artificial Sequence
  Description of Artificial Sequence: Synthetic oligonucleotide
gcugagauuuaagugaucu

SEQ ID NO: 1312919 - RNA, 19 nt, Artificial Sequence
  Description of Artificial Sequence: Synthetic oligonucleotide
cguacuaaagaugaaauua

SEQ ID NO: 1312920 - RNA, 19 nt, Artificial Sequence
  Description of Artificial Sequence: Synthetic oligonucleotide
  modified_base (6)..(6): a, c, u, g, unknown or other
cccuunauagucuauccaa

SEQ ID NO: 1312921 - RNA, 19 nt, Artificial Sequence
  Description of Artificial Sequence: Synthetic oligonucleotide
gugcguuuccgaaagcaga

SEQ ID NO: 1312922 - RNA, 19 nt, Artificial Sequence
  Description of Artificial Sequence: Synthetic oligonucleotide
uccucacgucacacuuucc

SEQ ID NO: 1312923 - RNA, 19 nt, Artificial Sequence
  Description of Artificial Sequence: Synthetic oligonucleotide
cuccguacuaaagaugaaa

SEQ ID NO: 1312924 - RNA, 19 nt, Artificial Sequence
  Description of Artificial Sequence: Synthetic oligonucleotide
guaacucugcauaucuugu

SEQ ID NO: 1312925 - RNA, 19 nt, Artificial Sequence
  Description of Artificial Sequence: Synthetic oligonucleotide
  modified_base (8)..(8): a, c, u, g, unknown or other
ugccggunucugaccacca

SEQ ID NO: 1312926 - RNA, 19 nt, Artificial Sequence
  Description of Artificial Sequence: Synthetic oligonucleotide
gagcgacucguguaugaaa

SEQ ID NO: 1312927 - RNA, 19 nt, Artificial Sequence
  Description of Artificial Sequence: Synthetic oligonucleotide
ggaauaauauucccuuuau

SEQ ID NO: 1312928 - RNA, 19 nt, Artificial Sequence
  Description of Artificial Sequence: Synthetic oligonucleotide
ugucaacggcucagacucu

SEQ ID NO: 1312929 - RNA, 19 nt, Artificial Sequence
  Description of Artificial Sequence: Synthetic oligonucleotide
guguuaaacaugugagaau

SEQ ID NO: 1312930 - RNA, 19 nt, Artificial Sequence
  Description of Artificial Sequence: Synthetic oligonucleotide
cauccagcgagaccugaga

SEQ ID NO: 1312931 - RNA, 19 nt, Artificial Sequence
  Description of Artificial Sequence: Synthetic oligonucleotide
acgcuuaaggacggcugag

SEQ ID NO: 1312932 - RNA, 19 nt, Artificial Sequence
  Description of Artificial Sequence: Synthetic oligonucleotide
uggggaccuccuuacuguc

SEQ ID NO: 1312933 - RNA, 19 nt, Artificial Sequence
  Description of Artificial Sequence: Synthetic oligonucleotide
gaacgagcgacucguguau

SEQ ID NO: 1312934 - RNA, 19 nt, Artificial Sequence
  Description of Artificial Sequence: Synthetic oligonucleotide
cauugguaucgucuuggaa

SEQ ID NO: 1312935 - RNA, 19 nt, Artificial Sequence
  Description of Artificial Sequence: Synthetic oligonucleotide
ugcuacuccggggacuguc

SEQ ID NO: 1312936 - RNA, 19 nt, Artificial Sequence
  Description of Artificial Sequence: Synthetic oligonucleotide
  modified_base (5)..(5): a, c, u, g, unknown or other
ccuunauagucuauccaaa

SEQ ID NO: 1312937 - RNA, 19 nt, Artificial Sequence
  Description of Artificial Sequence: Synthetic oligonucleotide
uccccacaauucugcauau

SEQ ID NO: 1312938 - RNA, 19 nt, Artificial Sequence
  Description of Artificial Sequence: Synthetic oligonucleotide
uccgcuucauucggccagc

SEQ ID NO: 1312939 - RNA, 19 nt, Artificial Sequence
  Description of Artificial Sequence: Synthetic oligonucleotide
gugagauggcauccagcga

SEQ ID NO: 1312940 - RNA, 19 nt, Artificial Sequence
  Description of Artificial Sequence: Synthetic oligonucleotide
gucguccuuucacuuuuca

SEQ ID NO: 1312941 - RNA, 19 nt, Artificial Sequence
  Description of Artificial Sequence: Synthetic oligonucleotide
cucuauagguccacugccu

SEQ ID NO: 1312942 - RNA, 19 nt, Artificial Sequence
  Description of Artificial Sequence: Synthetic oligonucleotide
uucauucggccagccaaau

SEQ ID NO: 1312943 - RNA, 19 nt, Artificial Sequence
  Description of Artificial Sequence: Synthetic oligonucleotide
ccauuugucaacggcucag

SEQ ID NO: 1312944 - RNA, 19 nt, Artificial Sequence
  Description of Artificial Sequence: Synthetic oligonucleotide
uacuccggggacugucauc

SEQ ID NO: 1312945 - RNA, 19 nt, Artificial Sequence
  Description of Artificial Sequence: Synthetic oligonucleotide
caccgcccacacaucagug

SEQ ID NO: 1312946 - RNA, 19 nt, Artificial Sequence
  Description of Artificial Sequence: Synthetic oligonucleotide
caagguucucaggaacuga

SEQ ID NO: 1312947 - RNA, 19 nt, Artificial Sequence
  Description of Artificial Sequence: Synthetic oligonucleotide
cauuugucaacggcucaga

SEQ ID NO: 1312948 - RNA, 19 nt, Artificial Sequence
  Description of Artificial Sequence: Synthetic oligonucleotide
acacucucugcugggcucu

SEQ ID NO: 1312949 - RNA, 19 nt, Artificial Sequence
  Description of Artificial Sequence: Synthetic oligonucleotide
cacaggacuuggcugcaga

SEQ ID NO: 1312950 - RNA, 19 nt, Artificial Sequence
  Description of Artificial Sequence: Synthetic oligonucleotide
gcuuauuggucguccuuuc

SEQ ID NO: 1312951 - RNA, 19 nt, Artificial Sequence
  Description of Artificial Sequence: Synthetic oligonucleotide
gcuccuuagguuuuacgcu

SEQ ID NO: 1312952 - RNA, 19 nt, Artificial Sequence
  Description of Artificial Sequence: Synthetic oligonucleotide
auacuccuucaagaguuuu

SEQ ID NO: 1312953 - RNA, 19 nt, Artificial Sequence
  Description of Artificial Sequence: Synthetic oligonucleotide
ccucacgucacacuuucca

SEQ ID NO: 1312954 - RNA, 19 nt, Artificial Sequence
  Description of Artificial Sequence: Synthetic oligonucleotide
cgacucguguaugaaaagc

SEQ ID NO: 1312955 - RNA, 19 nt, Artificial Sequence
  Description of Artificial Sequence: Synthetic oligonucleotide
ggacggcugagauuuaagu

SEQ ID NO: 1312956 - RNA, 19 nt, Artificial Sequence
  Description of Artificial Sequence: Synthetic oligonucleotide
ggcucuggcaauuuguauu

SEQ ID NO: 1312957 - RNA, 19 nt, Artificial Sequence
  Description of Artificial Sequence: Synthetic oligonucleotide
cuccuuagguuuuacgcuu

SEQ ID NO: 1312958 - RNA, 19 nt, Artificial Sequence
  Description of Artificial Sequence: Synthetic oligonucleotide
ggaaucuaguguaaguuuu

SEQ ID NO: 1312959 - RNA, 19 nt, Artificial Sequence
  Description of Artificial Sequence: Synthetic oligonucleotide
ggggcaacgcuccuuaggu

SEQ ID NO: 1312960 - RNA, 19 nt, Artificial Sequence
  Description of Artificial Sequence: Synthetic oligonucleotide
  modified_base (17)..(17): a, c, u, g, unknown or other
gguuucugaugccggunuc

SEQ ID NO: 1312961 - RNA, 19 nt, Artificial Sequence
  Description of Artificial Sequence: Synthetic oligonucleotide
gacucacuuugugagguau

SEQ ID NO: 1312962 - RNA, 19 nt, Artificial Sequence
  Description of Artificial Sequence: Synthetic oligonucleotide
cugggcucuggcaauuugu

SEQ ID NO: 1312963 - RNA, 19 nt, Artificial Sequence
  Description of Artificial Sequence: Synthetic oligonucleotide
uaaggacggcugagauuua

SEQ ID NO: 1312964 - RNA, 19 nt, Artificial Sequence
  Description of Artificial Sequence: Synthetic oligonucleotide
cagagacacugugcuacuc

SEQ ID NO: 1312965 - RNA, 19 nt, Artificial Sequence
  Description of Artificial Sequence: Synthetic oligonucleotide
cguguaugaaaagcagcag

SEQ ID NO: 1312966 - RNA, 19 nt, Artificial Sequence
  Description of Artificial Sequence: Synthetic oligonucleotide
ggcaacgcuccuuagguuu

SEQ ID NO: 1312967 - RNA, 19 nt, Artificial Sequence
  Description of Artificial Sequence: Synthetic oligonucleotide
ugguaucgucuuggaaauc

SEQ ID NO: 1312968 - RNA, 19 nt, Artificial Sequence
  Description of Artificial Sequence: Synthetic oligonucleotide
gcauauuugcauugguguu

SEQ ID NO: 1312969 - RNA, 19 nt, Artificial Sequence
  Description of Artificial Sequence: Synthetic oligonucleotide
caguuccaguguuaaacau

SEQ ID NO: 1312970 - RNA, 19 nt, Artificial Sequence
  Description of Artificial Sequence: Synthetic oligonucleotide
cagaacgagcgacucgugu

SEQ ID NO: 1312971 - RNA, 19 nt, Artificial Sequence
  Description of Artificial Sequence: Synthetic oligonucleotide
cuguacuauaauacuccuu

SEQ ID NO: 1312972 - RNA, 19 nt, Artificial Sequence
  Description of Artificial Sequence: Synthetic oligonucleotide
gcauugguaucgucuugga

SEQ ID NO: 1312973 - RNA, 19 nt, Artificial Sequence
  Description of Artificial Sequence: Synthetic oligonucleotide
acucacuuugugagguauu

SEQ ID NO: 1312974 - RNA, 19 nt, Artificial Sequence
  Description of Artificial Sequence: Synthetic oligonucleotide
gcuuaaggacggcugagau

SEQ ID NO: 1312975 - RNA, 19 nt, Artificial Sequence
  Description of Artificial Sequence: Synthetic oligonucleotide
cagcgagaccugagaggug

SEQ ID NO: 1312976 - RNA, 19 nt, Artificial Sequence
  Description of Artificial Sequence: Synthetic oligonucleotide
aggagucuacaaagcuuau

SEQ ID NO: 1312977 - RNA, 19 nt, Artificial Sequence
  Description of Artificial Sequence: Synthetic oligonucleotide
agccucuaggucagaucca

SEQ ID NO: 1312978 - RNA, 19 nt, Artificial Sequence
  Description of Artificial Sequence: Synthetic oligonucleotide
ggggaaucuaguguaaguu

SEQ ID NO: 1312979 - RNA, 19 nt, Artificial Sequence
  Description of Artificial Sequence: Synthetic oligonucleotide
acuccguacuaaagaugaa

SEQ ID NO: 1312980 - RNA, 19 nt, Artificial Sequence
  Description of Artificial Sequence: Synthetic oligonucleotide
ggacuugucugaguggccu

SEQ ID NO: 1312981 - RNA, 19 nt, Artificial Sequence
  Description of Artificial Sequence: Synthetic oligonucleotide
cucugcauaucuuguuguu

SEQ ID NO: 1312982 - RNA, 19 nt, Artificial Sequence
  Description of Artificial Sequence: Synthetic oligonucleotide
cugaaucaugguuggcauu

SEQ ID NO: 1312983 - RNA, 19 nt, Artificial Sequence
  Description of Artificial Sequence: Synthetic oligonucleotide
ccagcgagaccugagaggu

SEQ ID NO: 1312984 - RNA, 19 nt, Artificial Sequence
  Description of Artificial Sequence: Synthetic oligonucleotide
gcuuucuggucagaaccaa

SEQ ID NO: 1312985 - RNA, 19 nt, Artificial Sequence
  Description of Artificial Sequence: Synthetic oligonucleotide
cuuccucacgucacacuuu

SEQ ID NO: 1312986 - RNA, 19 nt, Artificial Sequence
  Description of Artificial Sequence: Synthetic oligonucleotide
guacuucaggaaggaaaau

SEQ ID NO: 1312987 - RNA, 19 nt, Artificial Sequence
  Description of Artificial Sequence: Synthetic oligonucleotide
ccgaaagcagaacgagcga

SEQ ID NO: 1312988 - RNA, 19 nt, Artificial Sequence
  Description of Artificial Sequence: Synthetic oligonucleotide
gaguuccuuuuaauugcuu

SEQ ID NO: 1312989 - RNA, 19 nt, Artificial Sequence
  Description of Artificial Sequence: Synthetic oligonucleotide
gucacaggauuuggggaau

SEQ ID NO: 1312990 - RNA, 19 nt, Artificial Sequence
  Description of Artificial Sequence: Synthetic oligonucleotide
gcagaacgagcgacucgug

SEQ ID NO: 1312991 - RNA, 19 nt, Artificial Sequence
  Description of Artificial Sequence: Synthetic oligonucleotide
ggacucacuuugugaggua

SEQ ID NO: 1312992 - RNA, 19 nt, Artificial Sequence
  Description of Artificial Sequence: Synthetic oligonucleotide
ccguacuaaagaugaaauu

SEQ ID NO: 1312993 - RNA, 19 nt, Artificial Sequence
  Description of Artificial Sequence: Synthetic oligonucleotide
ggagucuacaaagcuuauu

SEQ ID NO: 1312994 - RNA, 19 nt, Artificial Sequence
  Description of Artificial Sequence: Synthetic oligonucleotide
cuacuccggggacugucau

SEQ ID NO: 1312995 - RNA, 19 nt, Artificial Sequence
  Description of Artificial Sequence: Synthetic oligonucleotide
ggucguccuuucacuuuuc

SEQ ID NO: 1312996 - RNA, 19 nt, Artificial Sequence
  Description of Artificial Sequence: Synthetic oligonucleotide
  modified_base (5)..(5): a, c, u, g, unknown or other
cggunucugaccaccauuu

SEQ ID NO: 1312997 - RNA, 19 nt, Artificial Sequence
  Description of Artificial Sequence: Synthetic oligonucleotide
  modified_base (7)..(7): a, c, u, g, unknown or other
gccggunucugaccaccau

SEQ ID NO: 1312998 - RNA, 19 nt, Artificial Sequence
  Description of Artificial Sequence: Synthetic oligonucleotide
caacgcuccuuagguuuua

SEQ ID NO: 1312999 - RNA, 19 nt, Artificial Sequence
  Description of Artificial Sequence: Synthetic oligonucleotide
ggagaggcuuccccacaau

SEQ ID NO: 1313000 - RNA, 19 nt, Artificial Sequence
  Description of Artificial Sequence: Synthetic oligonucleotide
gaguggagcuggggugggu

SEQ ID NO: 1313001 - RNA, 19 nt, Artificial Sequence
  Description of Artificial Sequence: Synthetic oligonucleotide
cgagaccugagaggugcuc

SEQ ID NO: 1313002 - RNA, 19 nt, Artificial Sequence
  Description of Artificial Sequence: Synthetic oligonucleotide
  modified_base (6)..(6): a, c, u, g, unknown or other
ccggunucugaccaccauu

SEQ ID NO: 1313003 - RNA, 19 nt, Artificial Sequence
  Description of Artificial Sequence: Synthetic oligonucleotide
ccgcuucauucggccagcc

SEQ ID NO: 1313004 - RNA, 19 nt, Artificial Sequence
  Description of Artificial Sequence: Synthetic oligonucleotide
ggacgguuuccaagguaau

SEQ ID NO: 1313005 - RNA, 19 nt, Artificial Sequence
  Description of Artificial Sequence: Synthetic oligonucleotide
gggcaacgcuccuuagguu

SEQ ID NO: 1313006 - RNA, 19 nt, Artificial Sequence
  Description of Artificial Sequence: Synthetic oligonucleotide
gcaacgcuccuuagguuuu

SEQ ID NO: 1313007 - RNA, 19 nt, Artificial Sequence
  Description of Artificial Sequence: Synthetic oligonucleotide
cgagcgacucguguaugaa

SEQ ID NO: 1313008 - RNA, 19 nt, Artificial Sequence
  Description of Artificial Sequence: Synthetic oligonucleotide
ccccacaauucugcauauu

SEQ ID NO: 1313009 - RNA, 19 nt, Artificial Sequence
  Description of Artificial Sequence: Synthetic oligonucleotide
  modified_base (1)..(1): a, c, u, g, unknown or other
nauagucuauccaaaacug

SEQ ID NO: 1313010 - RNA, 19 nt, Artificial Sequence
  Description of Artificial Sequence: Synthetic oligonucleotide
gaauucacuaucuuuaugg

SEQ ID NO: 1313011 - RNA, 19 nt, Artificial Sequence
  Description of Artificial Sequence: Synthetic oligonucleotide
aaacagaagacuuuccuac

SEQ ID NO: 1313012 - RNA, 19 nt, Artificial Sequence
  Description of Artificial Sequence: Synthetic oligonucleotide
cuuuauaagucccauaucg

SEQ ID NO: 1313013 - RNA, 19 nt, Artificial Sequence
  Description of Artificial Sequence: Synthetic oligonucleotide
aacaugugaccuuugacuc

SEQ ID NO: 1313014 - RNA, 19 nt, Artificial Sequence
  Description of Artificial Sequence: Synthetic oligonucleotide
aucacgugaacuuuuauag

SEQ ID NO: 1313015 - RNA, 19 nt, Artificial Sequence
  Description of Artificial Sequence: Synthetic oligonucleotide
uuuauaagucccauaucgg

SEQ ID NO: 1313016 - RNA, 19 nt, Artificial Sequence
  Description of Artificial Sequence: Synthetic oligonucleotide
aauucacuaucuuuauggg

SEQ ID NO: 1313017 - RNA, 19 nt, Artificial Sequence
  Description of Artificial Sequence: Synthetic oligonucleotide
ugaccuuugacucacauau

SEQ ID NO: 1313018 - RNA, 19 nt, Artificial Sequence
  Description of Artificial Sequence: Synthetic oligonucleotide
gacacuuaauguuugugcg

SEQ ID NO: 1313019 - RNA, 19 nt, Artificial Sequence
  Description of Artificial Sequence: Synthetic oligonucleotide
cuaaaucacucauugaacc

SEQ ID NO: 1313020 - RNA, 19 nt, Artificial Sequence
  Description of Artificial Sequence: Synthetic oligonucleotide
ugaaaucaagcuuaggcgc

SEQ ID NO: 1313021 - RNA, 19 nt, Artificial Sequence
  Description of Artificial Sequence: Synthetic oligonucleotide
ugacucacauaucagaacc

SEQ ID NO: 1313022 - RNA, 19 nt, Artificial Sequence
  Description of Artificial Sequence: Synthetic oligonucleotide
agcuggugcaaccugaugc

SEQ ID NO: 1313023 - RNA, 19 nt, Artificial Sequence
  Description of Artificial Sequence: Synthetic oligonucleotide
cugaaaucaagcuuaggcg

SEQ ID NO: 1313024 - RNA, 19 nt, Artificial Sequence
  Description of Artificial Sequence: Synthetic oligonucleotide
uaaagcagcaacaugugac

SEQ ID NO: 1313025 - RNA, 19 nt, Artificial Sequence
  Description of Artificial Sequence: Synthetic oligonucleotide
ucauuuccgaagaagcacg

SEQ ID NO: 1313026 - RNA, 19 nt, Artificial Sequence
  Description of Artificial Sequence: Synthetic oligonucleotide
acugcugagccacaggacc

SEQ ID NO: 1313027 - RNA, 19 nt, Artificial Sequence
  Description of Artificial Sequence: Synthetic oligonucleotide
accaauuugauccucccuc

SEQ ID NO: 1313028 - RNA, 19 nt, Artificial Sequence
  Description of Artificial Sequence: Synthetic oligonucleotide
ucaacugugccagagaccc

SEQ ID NO: 1313029 - RNA, 19 nt, Artificial Sequence
  Description of Artificial Sequence: Synthetic oligonucleotide
ugaaggaacggcagguucg

SEQ ID NO: 1313030 - RNA, 19 nt, Artificial Sequence
  Description of Artificial Sequence: Synthetic oligonucleotide
aguuguguauccuggaguc

SEQ ID NO: 1313031 - RNA, 19 nt, Artificial Sequence
  Description of Artificial Sequence: Synthetic oligonucleotide
uauaagucccauaucggug

SEQ ID NO: 1313032 - RNA, 19 nt, Artificial Sequence
  Description of Artificial Sequence: Synthetic oligonucleotide
ugcuuuauaagucccauau

SEQ ID NO: 1313033 - RNA, 19 nt, Artificial Sequence
  Description of Artificial Sequence: Synthetic oligonucleotide
uuaauguuugugcggaccc

SEQ ID NO: 1313034 - RNA, 19 nt, Artificial Sequence
  Description of Artificial Sequence: Synthetic oligonucleotide
agacauggauccuggaugc

SEQ ID NO: 1313035 - RNA, 19 nt, Artificial Sequence
  Description of Artificial Sequence: Synthetic oligonucleotide
uucguguucaguugggagg

SEQ ID NO: 1313036 - RNA, 19 nt, Artificial Sequence
  Description of Artificial Sequence: Synthetic oligonucleotide
ugacacuuaauguuugugc

SEQ ID NO: 1313037 - RNA, 19 nt, Artificial Sequence
  Description of Artificial Sequence: Synthetic oligonucleotide
gguuugaacaccuugggag

SEQ ID NO: 1313038 - RNA, 19 nt, Artificial Sequence
  Description of Artificial Sequence: Synthetic oligonucleotide
ucacauaucagaaccuucu

SEQ ID NO: 1313039 - RNA, 19 nt, Artificial Sequence
  Description of Artificial Sequence: Synthetic oligonucleotide
aaaucgaucacgugaacuu

SEQ ID NO: 1313040 - RNA, 19 nt, Artificial Sequence
  Description of Artificial Sequence: Synthetic oligonucleotide
uuauaagucccauaucggu

SEQ ID NO: 1313041 - RNA, 19 nt, Artificial Sequence
  Description of Artificial Sequence: Synthetic oligonucleotide
uuugucuugagcccgggga

SEQ ID NO: 1313042 - RNA, 19 nt, Artificial Sequence
  Description of Artificial Sequence: Synthetic oligonucleotide
agaaccaugcucuguuccc

SEQ ID NO: 1313043 - RNA, 19 nt, Artificial Sequence
  Description of Artificial Sequence: Synthetic oligonucleotide
gagaaugccgcucucgucc

SEQ ID NO: 1313044 - RNA, 19 nt, Artificial Sequence
  Description of Artificial Sequence: Synthetic oligonucleotide
accuaaaucacucauugaa

SEQ ID NO: 1313045 - RNA, 19 nt, Artificial Sequence
  Description of Artificial Sequence: Synthetic oligonucleotide
aagggugagagcaccaagc

SEQ ID NO: 1313046 - RNA, 19 nt, Artificial Sequence
  Description of Artificial Sequence: Synthetic oligonucleotide
uucuugagaagaaaagggu

SEQ ID NO: 1313047 - RNA, 19 nt, Artificial Sequence
  Description of Artificial Sequence: Synthetic oligonucleotide
gaggcaugcaaacagaaga

SEQ ID NO: 1313048 - RNA, 19 nt, Artificial Sequence
  Description of Artificial Sequence: Synthetic oligonucleotide
aucuuuaugggaaauacug

SEQ ID NO: 1313049 - RNA, 19 nt, Artificial Sequence
  Description of Artificial Sequence: Synthetic oligonucleotide
acuucggugguucacugac

SEQ ID NO: 1313050 - RNA, 19 nt, Artificial Sequence
  Description of Artificial Sequence: Synthetic oligonucleotide
aagugauuaggauccgaag

SEQ ID NO: 1313051 - RNA, 19 nt, Artificial Sequence
  Description of Artificial Sequence: Synthetic oligonucleotide
aggucuggcaacaaguugc

SEQ ID NO: 1313052 - RNA, 19 nt, Artificial Sequence
  Description of Artificial Sequence: Synthetic oligonucleotide
aaaaucgaucacgugaacu

SEQ ID NO: 1313053 - RNA, 19 nt, Artificial Sequence
  Description of Artificial Sequence: Synthetic oligonucleotide
uggaucacaguacugugca

SEQ ID NO: 1313054 - RNA, 19 nt, Artificial Sequence
  Description of Artificial Sequence: Synthetic oligonucleotide
agaaaagggugagagcacc

SEQ ID NO: 1313055 - RNA, 19 nt, Artificial Sequence
  Description of Artificial Sequence: Synthetic oligonucleotide
uaucagaccuaaaucacuc

SEQ ID NO: 1313056 - RNA, 19 nt, Artificial Sequence
  Description of Artificial Sequence: Synthetic oligonucleotide
uuauaggucuggcaacaag

SEQ ID NO: 1313057 - RNA, 19 nt, Artificial Sequence
  Description of Artificial Sequence: Synthetic oligonucleotide
caacaaagugauuaggauc

SEQ ID NO: 1313058 - RNA, 19 nt, Artificial Sequence
  Description of Artificial Sequence: Synthetic oligonucleotide
gugauuaggauccgaaggc

SEQ ID NO: 1313059 - RNA, 19 nt, Artificial Sequence
  Description of Artificial Sequence: Synthetic oligonucleotide
uuuuguaggcagaugugac

SEQ ID NO: 1313060 - RNA, 19 nt, Artificial Sequence
  Description of Artificial Sequence: Synthetic oligonucleotide
ccaaauaucccacacacag

SEQ ID NO: 1313061 - RNA, 19 nt, Artificial Sequence
  Description of Artificial Sequence: Synthetic oligonucleotide
ugucaacugugccagagac

SEQ ID NO: 1313062 - RNA, 19 nt, Artificial Sequence
  Description of Artificial Sequence: Synthetic oligonucleotide
cuucagguaagucaugaac

SEQ ID NO: 1313063 - RNA, 19 nt, Artificial Sequence
  Description of Artificial Sequence: Synthetic oligonucleotide
accuuugacucacauauca

SEQ ID NO: 1313064 - RNA, 19 nt, Artificial Sequence
  Description of Artificial Sequence: Synthetic oligonucleotide
aaagggugagagcaccaag

SEQ ID NO: 1313065 - RNA, 19 nt, Artificial Sequence
  Description of Artificial Sequence: Synthetic oligonucleotide
uccgaaggcagaaauuuga

SEQ ID NO: 1313066 - RNA, 19 nt, Artificial Sequence
  Description of Artificial Sequence: Synthetic oligonucleotide
ucacgugaacuuuuauagg

SEQ ID NO: 1313067 - RNA, 19 nt, Artificial Sequence
  Description of Artificial Sequence: Synthetic oligonucleotide
uaggcagaugugacgaccg

SEQ ID NO: 1313068 - RNA, 19 nt, Artificial Sequence
  Description of Artificial Sequence: Synthetic oligonucleotide
acacuuaauguuugugcgg

SEQ ID NO: 1313069 - RNA, 19 nt, Artificial Sequence
  Description of Artificial Sequence: Synthetic oligonucleotide
gguaauucaacaaccaccc

SEQ ID NO: 1313070 - RNA, 19 nt, Artificial Sequence
  Description of Artificial Sequence: Synthetic oligonucleotide
gaaagcuggacaaccgugg

SEQ ID NO: 1313071 - RNA, 19 nt, Artificial Sequence
  Description of Artificial Sequence: Synthetic oligonucleotide
gagguuugaacaccuuggg

SEQ ID NO: 1313072 - RNA, 19 nt, Artificial Sequence
  Description of Artificial Sequence: Synthetic oligonucleotide
uugaagagguacuucggug

SEQ ID NO: 1313073 - RNA, 19 nt, Artificial Sequence
  Description of Artificial Sequence: Synthetic oligonucleotide
auaguuguguauccuggag

SEQ ID NO: 1313074 - RNA, 19 nt, Artificial Sequence
  Description of Artificial Sequence: Synthetic oligonucleotide
uugguaauucaacaaccac

SEQ ID NO: 1313075 - RNA, 19 nt, Artificial Sequence
  Description of Artificial Sequence: Synthetic oligonucleotide
aaauacuguugcccaacug

SEQ ID NO: 1313076 - RNA, 19 nt, Artificial Sequence
  Description of Artificial Sequence: Synthetic oligonucleotide
aaccaugcucuguucccgc

SEQ ID NO: 1313077 - RNA, 19 nt, Artificial Sequence
  Description of Artificial Sequence: Synthetic oligonucleotide
ucguaggucccaaagcacc

SEQ ID NO: 1313078 - RNA, 19 nt, Artificial Sequence
  Description of Artificial Sequence: Synthetic oligonucleotide
agaugugacgaccggcucg

SEQ ID NO: 1313079 - RNA, 19 nt, Artificial Sequence
  Description of Artificial Sequence: Synthetic oligonucleotide
uuuuauaggucuggcaaca

SEQ ID NO: 1313080 - RNA, 19 nt, Artificial Sequence
  Description of Artificial Sequence: Synthetic oligonucleotide
caaccugaugcuuccaucc

SEQ ID NO: 1313081 - RNA, 19 nt, Artificial Sequence
  Description of Artificial Sequence: Synthetic oligonucleotide
aaacgguccucuucaagca

SEQ ID NO: 1313082 - RNA, 19 nt, Artificial Sequence
  Description of Artificial Sequence: Synthetic oligonucleotide
caacugugacaucagagag

SEQ ID NO: 1313083 - RNA, 19 nt, Artificial Sequence
  Description of Artificial Sequence: Synthetic oligonucleotide
acaacaaagugauuaggau

SEQ ID NO: 1313084 - RNA, 19 nt, Artificial Sequence
  Description of Artificial Sequence: Synthetic oligonucleotide
ugucucugaacacgagagg

SEQ ID NO: 1313085 - RNA, 19 nt, Artificial Sequence
  Description of Artificial Sequence: Synthetic oligonucleotide
aagggaggcguccugaaau

SEQ ID NO: 1313086 - RNA, 19 nt, Artificial Sequence
  Description of Artificial Sequence: Synthetic oligonucleotide
aaacguugggguccugaag

SEQ ID NO: 1313087 - RNA, 19 nt, Artificial Sequence
  Description of Artificial Sequence: Synthetic oligonucleotide
cucacauaguuguguaucc

SEQ ID NO: 1313088 - RNA, 19 nt, Artificial Sequence
  Description of Artificial Sequence: Synthetic oligonucleotide
ucaaacgguccucuucaag

SEQ ID NO: 1313089 - RNA, 19 nt, Artificial Sequence
  Description of Artificial Sequence: Synthetic oligonucleotide
uucuccugacaguacaccc

SEQ ID NO: 1313090 - RNA, 19 nt, Artificial Sequence
  Description of Artificial Sequence: Synthetic oligonucleotide
uacacccucauuuccgaag

SEQ ID NO: 1313091 - RNA, 19 nt, Artificial Sequence
  Description of Artificial Sequence: Synthetic oligonucleotide
ucagaccuaaaucacucau

SEQ ID NO: 1313092 - RNA, 19 nt, Artificial Sequence
  Description of Artificial Sequence: Synthetic oligonucleotide
cuuaauguuugugcggacc

SEQ ID NO: 1313093 - RNA, 19 nt, Artificial Sequence
  Description of Artificial Sequence: Synthetic oligonucleotide
uccaucgguaggaaaacgu

SEQ ID NO: 1313094 - RNA, 19 nt, Artificial Sequence
  Description of Artificial Sequence: Synthetic oligonucleotide
uaggaaaacguuggggucc

SEQ ID NO: 1313095 - RNA, 19 nt, Artificial Sequence
  Description of Artificial Sequence: Synthetic oligonucleotide
aucgguaggaaaacguugg

SEQ ID NO: 1313096 - RNA, 19 nt, Artificial Sequence
  Description of Artificial Sequence: Synthetic oligonucleotide
gaaagauggacugcugagc

SEQ ID NO: 1313097 - RNA, 19 nt, Artificial Sequence
  Description of Artificial Sequence: Synthetic oligonucleotide
uguucccgcaaacagcaga

SEQ ID NO: 1313098 - RNA, 19 nt, Artificial Sequence
  Description of Artificial Sequence: Synthetic oligonucleotide
acauaguuguguauccugg

SEQ ID NO: 1313099 - RNA, 19 nt, Artificial Sequence
  Description of Artificial Sequence: Synthetic oligonucleotide
cauaucggugccaacaaca

SEQ ID NO: 1313100 - RNA, 19 nt, Artificial Sequence
  Description of Artificial Sequence: Synthetic oligonucleotide
gauuaggauccgaaggcag

SEQ ID NO: 1313101 - RNA, 19 nt, Artificial Sequence
  Description of Artificial Sequence: Synthetic oligonucleotide
ugguacugugcuuuauaag

SEQ ID NO: 1313102 - RNA, 19 nt, Artificial Sequence
  Description of Artificial Sequence: Synthetic oligonucleotide
acugugcuuuauaaguccc

SEQ ID NO: 1313103 - RNA, 19 nt, Artificial Sequence
  Description of Artificial Sequence: Synthetic oligonucleotide
caguacacccucauuuccg

SEQ ID NO: 1313104 - RNA, 19 nt, Artificial Sequence
  Description of Artificial Sequence: Synthetic oligonucleotide
aaaacguugggguccugaa

SEQ ID NO: 1313105 - RNA, 19 nt, Artificial Sequence
  Description of Artificial Sequence: Synthetic oligonucleotide
aaagugauuaggauccgaa

SEQ ID NO: 1313106 - RNA, 19 nt, Artificial Sequence
  Description of Artificial Sequence: Synthetic oligonucleotide
auugagaaugccgcucucg

SEQ ID NO: 1313107 - RNA, 19 nt, Artificial Sequence
  Description of Artificial Sequence: Synthetic oligonucleotide
uuccgaagaagcacgugca

SEQ ID NO: 1313108 - RNA, 19 nt, Artificial Sequence
  Description of Artificial Sequence: Synthetic oligonucleotide
ucucacauaguuguguauc

SEQ ID NO: 1313109 - RNA, 19 nt, Artificial Sequence
  Description of Artificial Sequence: Synthetic oligonucleotide
ucucaagcaggucccagac

SEQ ID NO: 1313110 - RNA, 19 nt, Artificial Sequence
  Description of Artificial Sequence: Synthetic oligonucleotide
gaaaugacaagccugccau

SEQ ID NO: 1313111 - RNA, 19 nt, Artificial Sequence
  Description of Artificial Sequence: Synthetic oligonucleotide
uucaacaaccacccacaca

SEQ ID NO: 1313112 - RNA, 19 nt, Artificial Sequence
  Description of Artificial Sequence: Synthetic oligonucleotide
ucucugaacacgagaggca

SEQ ID NO: 1313113 - RNA, 19 nt, Artificial Sequence
  Description of Artificial Sequence: Synthetic oligonucleotide
uugacucacauaucagaac

SEQ ID NO: 1313114 - RNA, 19 nt, Artificial Sequence
  Description of Artificial Sequence: Synthetic oligonucleotide
caucgguaggaaaacguug

SEQ ID NO: 1313115 - RNA, 19 nt, Artificial Sequence
  Description of Artificial Sequence: Synthetic oligonucleotide
gucucugaacacgagaggc

SEQ ID NO: 1313116 - RNA, 19 nt, Artificial Sequence
  Description of Artificial Sequence: Synthetic oligonucleotide
cacauaguuguguauccug

SEQ ID NO: 1313117 - RNA, 19 nt, Artificial Sequence
  Description of Artificial Sequence: Synthetic oligonucleotide
guucguguucaguugggag

SEQ ID NO: 1313118 - RNA, 19 nt, Artificial Sequence
  Description of Artificial Sequence: Synthetic oligonucleotide
cagguaucagaccuaaauc

SEQ ID NO: 1313119 - RNA, 19 nt, Artificial Sequence
  Description of Artificial Sequence: Synthetic oligonucleotide
gaucacgugaacuuuuaua

SEQ ID NO: 1313120 - RNA, 19 nt, Artificial Sequence
  Description of Artificial Sequence: Synthetic oligonucleotide
ggaaagauggacugcugag

SEQ ID NO: 1313121 - RNA, 19 nt, Artificial Sequence
  Description of Artificial Sequence: Synthetic oligonucleotide
cucauuuccgaagaagcac

SEQ ID NO: 1313122 - RNA, 19 nt, Artificial Sequence
  Description of Artificial Sequence: Synthetic oligonucleotide
cuggaucacaguacugugc

SEQ ID NO: 1313123 - RNA, 19 nt, Artificial Sequence
  Description of Artificial Sequence: Synthetic oligonucleotide
ucacucauugaaccugaga

SEQ ID NO: 1313124 - RNA, 19 nt, Artificial Sequence
  Description of Artificial Sequence: Synthetic oligonucleotide
uuccuacccugaaggaacg

SEQ ID NO: 1313125 - RNA, 19 nt, Artificial Sequence
  Description of Artificial Sequence: Synthetic oligonucleotide
gacggucauggccacaagc

SEQ ID NO: 1313126 - RNA, 19 nt, Artificial Sequence
  Description of Artificial Sequence: Synthetic oligonucleotide
caacaacaaagugauuagg

SEQ ID NO: 1313127 - RNA, 19 nt, Artificial Sequence
  Description of Artificial Sequence: Synthetic oligonucleotide
cuucucguaggucccaaag

SEQ ID NO: 1313128 - RNA, 19 nt, Artificial Sequence
  Description of Artificial Sequence: Synthetic oligonucleotide
aggcaugcaaacagaagac

SEQ ID NO: 1313129 - RNA, 19 nt, Artificial Sequence
  Description of Artificial Sequence: Synthetic oligonucleotide
uucggugguucacugacau

SEQ ID NO: 1313130 - RNA, 19 nt, Artificial Sequence
  Description of Artificial Sequence: Synthetic oligonucleotide
ugauuaggauccgaaggca

SEQ ID NO: 1313131 - RNA, 19 nt, Artificial Sequence
  Description of Artificial Sequence: Synthetic oligonucleotide
aaccguggcgugucaaucu

SEQ ID NO: 1313132 - RNA, 19 nt, Artificial Sequence
  Description of Artificial Sequence: Synthetic oligonucleotide
ucccauaucggugccaaca

SEQ ID NO: 1313133 - RNA, 19 nt, Artificial Sequence
  Description of Artificial Sequence: Synthetic oligonucleotide
acugugcaccaauuugauc

SEQ ID NO: 1313134 - RNA, 19 nt, Artificial Sequence
  Description of Artificial Sequence: Synthetic oligonucleotide
gguacugugcuuuauaagu

SEQ ID NO: 1313135 - RNA, 19 nt, Artificial Sequence
  Description of Artificial Sequence: Synthetic oligonucleotide
cagaaccaugcucuguucc

SEQ ID NO: 1313136 - RNA, 19 nt, Artificial Sequence
  Description of Artificial Sequence: Synthetic oligonucleotide
cagguucguguucaguugg

SEQ ID NO: 1313137 - RNA, 19 nt, Artificial Sequence
  Description of Artificial Sequence: Synthetic oligonucleotide
acguugggguccugaaggc

SEQ ID NO: 1313138 - RNA, 19 nt, Artificial Sequence
  Description of Artificial Sequence: Synthetic oligonucleotide
aacacgagaggcaugcaaa

SEQ ID NO: 1313139 - RNA, 19 nt, Artificial Sequence
  Description of Artificial Sequence: Synthetic oligonucleotide
caaccacccacacauugag

SEQ ID NO: 1313140 - RNA, 19 nt, Artificial Sequence
  Description of Artificial Sequence: Synthetic oligonucleotide
cucagucucacauaguugu

SEQ ID NO: 1313141 - RNA, 19 nt, Artificial Sequence
  Description of Artificial Sequence: Synthetic oligonucleotide
aggaacggcagguucgugu

SEQ ID NO: 1313142 - RNA, 19 nt, Artificial Sequence
  Description of Artificial Sequence: Synthetic oligonucleotide
gaccacugcaggcucauca

SEQ ID NO: 1313143 - RNA, 19 nt, Artificial Sequence
  Description of Artificial Sequence: Synthetic oligonucleotide
agcaacaugugaccuuuga

SEQ ID NO: 1313144 - RNA, 19 nt, Artificial Sequence
  Description of Artificial Sequence: Synthetic oligonucleotide
cucacauaucagaaccuuc

SEQ ID NO: 1313145 - RNA, 19 nt, Artificial Sequence
  Description of Artificial Sequence: Synthetic oligonucleotide
agagcuaccgcuggccuuc

SEQ ID NO: 1313146 - RNA, 19 nt, Artificial Sequence
  Description of Artificial Sequence: Synthetic oligonucleotide
ugugcaccaauuugauccu

SEQ ID NO: 1313147 - RNA, 19 nt, Artificial Sequence
  Description of Artificial Sequence: Synthetic oligonucleotide
guaggaaaacguugggguc

SEQ ID NO: 1313148 - RNA, 19 nt, Artificial Sequence
  Description of Artificial Sequence: Synthetic oligonucleotide
ugugacgaccggcucgaug

SEQ ID NO: 1313149 - RNA, 19 nt, Artificial Sequence
  Description of Artificial Sequence: Synthetic oligonucleotide
cuccaaucuugucugguac

SEQ ID NO: 1313150 - RNA, 19 nt, Artificial Sequence
  Description of Artificial Sequence: Synthetic oligonucleotide
ugugaccuuugacucacau

SEQ ID NO: 1313151 - RNA, 19 nt, Artificial Sequence
  Description of Artificial Sequence: Synthetic oligonucleotide
ucguguucaguugggagga

SEQ ID NO: 1313152 - RNA, 19 nt, Artificial Sequence
  Description of Artificial Sequence: Synthetic oligonucleotide
caagcuuaggcgcuuguca

SEQ ID NO: 1313153 - RNA, 19 nt, Artificial Sequence
  Description of Artificial Sequence: Synthetic oligonucleotide
aacggcagguucguguuca

SEQ ID NO: 1313154 - RNA, 19 nt, Artificial Sequence
  Description of Artificial Sequence: Synthetic oligonucleotide
agggaggcguccugaaauc

SEQ ID NO: 1313155 - RNA, 19 nt, Artificial Sequence
  Description of Artificial Sequence: Synthetic oligonucleotide
aggauccgaaggcagaaau

SEQ ID NO: 1313156 - RNA, 19 nt, Artificial Sequence
  Description of Artificial Sequence: Synthetic oligonucleotide
uaagucccauaucggugcc

SEQ ID NO: 1313157 - RNA, 19 nt, Artificial Sequence
  Description of Artificial Sequence: Synthetic oligonucleotide
uugucuugagcccggggau

SEQ ID NO: 1313158 - RNA, 19 nt, Artificial Sequence
  Description of Artificial Sequence: Synthetic oligonucleotide
gagaacuccaucgguagga

SEQ ID NO: 1313159 - RNA, 19 nt, Artificial Sequence
  Description of Artificial Sequence: Synthetic oligonucleotide
ugggagacacucuccaauc

SEQ ID NO: 1313160 - RNA, 19 nt, Artificial Sequence
  Description of Artificial Sequence: Synthetic oligonucleotide
caugugaccuuugacucac

SEQ ID NO: 1313161 - RNA, 19 nt, Artificial Sequence
  Description of Artificial Sequence: Synthetic oligonucleotide
agggugagagcaccaagcu

SEQ ID NO: 1313162 - RNA, 19 nt, Artificial Sequence
  Description of Artificial Sequence: Synthetic oligonucleotide
caaucuuugguacaacugu

SEQ ID NO: 1313163 - RNA, 19 nt, Artificial Sequence
  Description of Artificial Sequence: Synthetic oligonucleotide
agggaggcgaugugaaaug

SEQ ID NO: 1313164 - RNA, 19 nt, Artificial Sequence
  Description of Artificial Sequence: Synthetic oligonucleotide
aagccugucuggaaagaug

SEQ ID NO: 1313165 - RNA, 19 nt, Artificial Sequence
  Description of Artificial Sequence: Synthetic oligonucleotide
ggcgaugugaaaugacaag

SEQ ID NO: 1313166 - RNA, 19 nt, Artificial Sequence
  Description of Artificial Sequence: Synthetic oligonucleotide
cauggauccuggaugcauc

SEQ ID NO: 1313167 - RNA, 19 nt, Artificial Sequence
  Description of Artificial Sequence: Synthetic oligonucleotide
uggugcaaccugaugcuuc

SEQ ID NO: 1313168 - RNA, 19 nt, Artificial Sequence
  Description of Artificial Sequence: Synthetic oligonucleotide
uuaggauccgaaggcagaa

SEQ ID NO: 1313169 - RNA, 19 nt, Artificial Sequence
  Description of Artificial Sequence: Synthetic oligonucleotide
aucagaccuaaaucacuca

SEQ ID NO: 1313170 - RNA, 19 nt, Artificial Sequence
  Description of Artificial Sequence: Synthetic oligonucleotide
cacauaucagaaccuucug

SEQ ID NO: 1313171 - RNA, 19 nt, Artificial Sequence
  Description of Artificial Sequence: Synthetic oligonucleotide
gcgaugugaaaugacaagc

SEQ ID NO: 1313172 - RNA, 19 nt, Artificial Sequence
  Description of Artificial Sequence: Synthetic oligonucleotide
cacgugaacuuuuauaggu

SEQ ID NO: 1313173 - RNA, 19 nt, Artificial Sequence
  Description of Artificial Sequence: Synthetic oligonucleotide
gaacacgagaggcaugcaa

SEQ ID NO: 1313174 - RNA, 19 nt, Artificial Sequence
  Description of Artificial Sequence: Synthetic oligonucleotide
aaucgaucacgugaacuuu

SEQ ID NO: 1313175 - RNA, 19 nt, Artificial Sequence
  Description of Artificial Sequence: Synthetic oligonucleotide
guaggcagaugugacgacc

SEQ ID NO: 1313176 - RNA, 19 nt, Artificial Sequence
  Description of Artificial Sequence: Synthetic oligonucleotide
acacauugagaaugccgcu

SEQ ID NO: 1313177 - RNA, 19 nt, Artificial Sequence
  Description of Artificial Sequence: Synthetic oligonucleotide
agucucacauaguugugua

SEQ ID NO: 1313178 - RNA, 19 nt, Artificial Sequence
  Description of Artificial Sequence: Synthetic oligonucleotide
aagcagcaacaugugaccu

SEQ ID NO: 1313179 - RNA, 19 nt, Artificial Sequence
  Description of Artificial Sequence: Synthetic oligonucleotide
cacacagaggaggugccgg

SEQ ID NO: 1313180 - RNA, 19 nt, Artificial Sequence
  Description of Artificial Sequence: Synthetic oligonucleotide
gaaccugagauaucugccu

SEQ ID NO: 1313181 - RNA, 19 nt, Artificial Sequence
  Description of Artificial Sequence: Synthetic oligonucleotide
acccacacauugagaaugc

SEQ ID NO: 1313182 - RNA, 19 nt, Artificial Sequence
  Description of Artificial Sequence: Synthetic oligonucleotide
gaggcguccugaaaucaag

SEQ ID NO: 1313183 - RNA, 19 nt, Artificial Sequence
  Description of Artificial Sequence: Synthetic oligonucleotide
aacgguccucuucaagcaa

SEQ ID NO: 1313184 - RNA, 19 nt, Artificial Sequence
  Description of Artificial Sequence: Synthetic oligonucleotide
ucacauaguuguguauccu

SEQ ID NO: 1313185 - RNA, 19 nt, Artificial Sequence
  Description of Artificial Sequence: Synthetic oligonucleotide
aaucaagcuuaggcgcuug

SEQ ID NO: 1313186 - RNA, 19 nt, Artificial Sequence
  Description of Artificial Sequence: Synthetic oligonucleotide
cuuugucuugagcccgggg

SEQ ID NO: 1313187 - RNA, 19 nt, Artificial Sequence
  Description of Artificial Sequence: Synthetic oligonucleotide
cagccaggaauacuguuuc

SEQ ID NO: 1313188 - RNA, 19 nt, Artificial Sequence
  Description of Artificial Sequence: Synthetic oligonucleotide
acagagcggccaccagugc

SEQ ID NO: 1313189 - RNA, 19 nt, Artificial Sequence
  Description of Artificial Sequence: Synthetic oligonucleotide
ggucaaacgguccucuuca

SEQ ID NO: 1313190 - RNA, 19 nt, Artificial Sequence
  Description of Artificial Sequence: Synthetic oligonucleotide
acaaagugauuaggauccg

SEQ ID NO: 1313191 - RNA, 19 nt, Artificial Sequence
  Description of Artificial Sequence: Synthetic oligonucleotide
gaaaacguugggguccuga

SEQ ID NO: 1313192 - RNA, 19 nt, Artificial Sequence
  Description of Artificial Sequence: Synthetic oligonucleotide
aggcguccugaaaucaagc

SEQ ID NO: 1313193 - RNA, 19 nt, Artificial Sequence
  Description of Artificial Sequence: Synthetic oligonucleotide
cauaguuguguauccugga

SEQ ID NO: 1313194 - RNA, 19 nt, Artificial Sequence
  Description of Artificial Sequence: Synthetic oligonucleotide
gugccggcuguccagagac

SEQ ID NO: 1313195 - RNA, 19 nt, Artificial Sequence
  Description of Artificial Sequence: Synthetic oligonucleotide
ccaauuugauccucccucc

SEQ ID NO: 1313196 - RNA, 19 nt, Artificial Sequence
  Description of Artificial Sequence: Synthetic oligonucleotide
gccaacaacaaagugauua

SEQ ID NO: 1313197 - RNA, 19 nt, Artificial Sequence
  Description of Artificial Sequence: Synthetic oligonucleotide
ugagaaugccgcucucguc

SEQ ID NO: 1313198 - RNA, 19 nt, Artificial Sequence
  Description of Artificial Sequence: Synthetic oligonucleotide
agacggggcaaauggcucu

SEQ ID NO: 1313199 - RNA, 19 nt, Artificial Sequence
  Description of Artificial Sequence: Synthetic oligonucleotide
cauugaaccugagauaucu

SEQ ID NO: 1313200 - RNA, 19 nt, Artificial Sequence
  Description of Artificial Sequence: Synthetic oligonucleotide
gugaacuuuuauaggucug

SEQ ID NO: 1313201 - RNA, 19 nt, Artificial Sequence
  Description of Artificial Sequence: Synthetic oligonucleotide
ggcuaaagcagcaacaugu

SEQ ID NO: 1313202 - RNA, 19 nt, Artificial Sequence
  Description of Artificial Sequence: Synthetic oligonucleotide
ccagaauucacuaucuuua

SEQ ID NO: 1313203 - RNA, 19 nt, Artificial Sequence
  Description of Artificial Sequence: Synthetic oligonucleotide
gucaaucuuugguacaacu

SEQ ID NO: 1313204 - RNA, 19 nt, Artificial Sequence
  Description of Artificial Sequence: Synthetic oligonucleotide
cucauugaaccugagauau

SEQ ID NO: 1313205 - RNA, 19 nt, Artificial Sequence
  Description of Artificial Sequence: Synthetic oligonucleotide
uacuguugcccaacuggau

SEQ ID NO: 1313206 - RNA, 19 nt, Artificial Sequence
  Description of Artificial Sequence: Synthetic oligonucleotide
uuuauaggucuggcaacaa

SEQ ID NO: 1313207 - RNA, 19 nt, Artificial Sequence
  Description of Artificial Sequence: Synthetic oligonucleotide
gaugugacgaccggcucga

SEQ ID NO: 1313208 - RNA, 19 nt, Artificial Sequence
  Description of Artificial Sequence: Synthetic oligonucleotide
uugagcccggggauuccag

SEQ ID NO: 1313209 - RNA, 19 nt, Artificial Sequence
  Description of Artificial Sequence: Synthetic oligonucleotide
guacuucggugguucacug

SEQ ID NO: 1313210 - RNA, 19 nt, Artificial Sequence
  Description of Artificial Sequence: Synthetic oligonucleotide
gauccgaaggcagaaauuu

SEQ ID NO: 1313211 - RNA, 19 nt, Artificial Sequence
  Description of Artificial Sequence: Synthetic oligonucleotide
uacuucggugguucacuga

SEQ ID NO: 1313212 - RNA, 19 nt, Artificial Sequence
  Description of Artificial Sequence: Synthetic oligonucleotide
gaaaucaagcuuaggcgcu

SEQ ID NO: 1313213 - RNA, 19 nt, Artificial Sequence
  Description of Artificial Sequence: Synthetic oligonucleotide
cccgcaaacagcagaaaug

SEQ ID NO: 1313214 - RNA, 19 nt, Artificial Sequence
  Description of Artificial Sequence: Synthetic oligonucleotide
cagucacauggacacggag

SEQ ID NO: 1313215 - RNA, 19 nt, Artificial Sequence
  Description of Artificial Sequence: Synthetic oligonucleotide
cucgauggcuugaagaggu

SEQ ID NO: 1313216 - RNA, 19 nt, Artificial Sequence
  Description of Artificial Sequence: Synthetic oligonucleotide
cucagacgccagcuggugc

SEQ ID NO: 1313217 - RNA, 19 nt, Artificial Sequence
  Description of Artificial Sequence: Synthetic oligonucleotide
aaaucaagcuuaggcgcuu

SEQ ID NO: 1313218 - RNA, 19 nt, Artificial Sequence
  Description of Artificial Sequence: Synthetic oligonucleotide
guggcgugucaaucuuugg

SEQ ID NO: 1313219 - RNA, 19 nt, Artificial Sequence
  Description of Artificial Sequence: Synthetic oligonucleotide
cuccaucgguaggaaaacg

SEQ ID NO: 1313220 - RNA, 19 nt, Artificial Sequence
  Description of Artificial Sequence: Synthetic oligonucleotide
ccuuugacucacauaucag

SEQ ID NO: 1313221 - RNA, 19 nt, Artificial Sequence
  Description of Artificial Sequence: Synthetic oligonucleotide
acucacauaucagaaccuu

SEQ ID NO: 1313222 - RNA, 19 nt, Artificial Sequence
  Description of Artificial Sequence: Synthetic oligonucleotide
augccgcucucguccaggg

SEQ ID NO: 1313223 - RNA, 19 nt, Artificial Sequence
  Description of Artificial Sequence: Synthetic oligonucleotide
gauaucugccuuugguaau

SEQ ID NO: 1313224 - RNA, 19 nt, Artificial Sequence
  Description of Artificial Sequence: Synthetic oligonucleotide
acggaggucaagggaggcg

SEQ ID NO: 1313225 - RNA, 19 nt, Artificial Sequence
  Description of Artificial Sequence: Synthetic oligonucleotide
uaccgcuggccuucuccgg

SEQ ID NO: 1313226 - RNA, 19 nt, Artificial Sequence
  Description of Artificial Sequence: Synthetic oligonucleotide
acaaccguggcgugucaau

SEQ ID NO: 1313227 - RNA, 19 nt, Artificial Sequence
  Description of Artificial Sequence: Synthetic oligonucleotide
auaucggugccaacaacaa

SEQ ID NO: 1313228 - RNA, 19 nt, Artificial Sequence
  Description of Artificial Sequence: Synthetic oligonucleotide
cuugaagagguacuucggu

SEQ ID NO: 1313229 - RNA, 19 nt, Artificial Sequence
  Description of Artificial Sequence: Synthetic oligonucleotide
caaccaccuggcacgcugc

SEQ ID NO: 1313230 - RNA, 19 nt, Artificial Sequence
  Description of Artificial Sequence: Synthetic oligonucleotide
uggcaacaaguugcugagg

SEQ ID NO: 1313231 - RNA, 19 nt, Artificial Sequence
  Description of Artificial Sequence: Synthetic oligonucleotide
gcuaccgcuggccuucucc

SEQ ID NO: 1313232 - RNA, 19 nt, Artificial Sequence
  Description of Artificial Sequence: Synthetic oligonucleotide
ucagaaccuucuggggccc

SEQ ID NO: 1313233 - RNA, 19 nt, Artificial Sequence
  Description of Artificial Sequence: Synthetic oligonucleotide
uggacaaccguggcguguc

SEQ ID NO: 1313234 - RNA, 19 nt, Artificial Sequence
  Description of Artificial Sequence: Synthetic oligonucleotide
acauggauccuggaugcau

SEQ ID NO: 1313235 - RNA, 19 nt, Artificial Sequence
  Description of Artificial Sequence: Synthetic oligonucleotide
gcagguucguguucaguug

SEQ ID NO: 1313236 - RNA, 19 nt, Artificial Sequence
  Description of Artificial Sequence: Synthetic oligonucleotide
uccuacccugaaggaacgg

SEQ ID NO: 1313237 - RNA, 19 nt, Artificial Sequence
  Description of Artificial Sequence: Synthetic oligonucleotide
gugccaacaacaaagugau

SEQ ID NO: 1313238 - RNA, 19 nt, Artificial Sequence
  Description of Artificial Sequence: Synthetic oligonucleotide
ugacggucauggccacaag

SEQ ID NO: 1313239 - RNA, 19 nt, Artificial Sequence
  Description of Artificial Sequence: Synthetic oligonucleotide
ugacgaccggcucgauggc

SEQ ID NO: 1313240 - RNA, 19 nt, Artificial Sequence
  Description of Artificial Sequence: Synthetic oligonucleotide
gugaaaugacaagccugcc

SEQ ID NO: 1313241 - RNA, 19 nt, Artificial Sequence
  Description of Artificial Sequence: Synthetic oligonucleotide
gugguucacugacaugaga

SEQ ID NO: 1313242 - RNA, 19 nt, Artificial Sequence
  Description of Artificial Sequence: Synthetic oligonucleotide
ucggugguucacugacaug

SEQ ID NO: 1313243 - RNA, 19 nt, Artificial Sequence
  Description of Artificial Sequence: Synthetic oligonucleotide
ucuucucguaggucccaaa

SEQ ID NO: 1313244 - RNA, 19 nt, Artificial Sequence
  Description of Artificial Sequence: Synthetic oligonucleotide
cugaugcuuccauccgaac

SEQ ID NO: 1313245 - RNA, 19 nt, Artificial Sequence
  Description of Artificial Sequence: Synthetic oligonucleotide
gcgugucaaucuuugguac

SEQ ID NO: 1313246 - RNA, 19 nt, Artificial Sequence
  Description of Artificial Sequence: Synthetic oligonucleotide
caauuugauccucccucca

SEQ ID NO: 1313247 - RNA, 19 nt, Artificial Sequence
  Description of Artificial Sequence: Synthetic oligonucleotide
guaucagaccuaaaucacu

SEQ ID NO: 1313248 - RNA, 19 nt, Artificial Sequence
  Description of Artificial Sequence: Synthetic oligonucleotide
agacacucuccaaucuugu

SEQ ID NO: 1313249 - RNA, 19 nt, Artificial Sequence
  Description of Artificial Sequence: Synthetic oligonucleotide
aggcgaugugaaaugacaa

SEQ ID NO: 1313250 - RNA, 19 nt, Artificial Sequence
  Description of Artificial Sequence: Synthetic oligonucleotide
ccccaugacggucauggcc

SEQ ID NO: 1313251 - RNA, 19 nt, Artificial Sequence
  Description of Artificial Sequence: Synthetic oligonucleotide
agguucguguucaguuggg

SEQ ID NO: 1313252 - RNA, 19 nt, Artificial Sequence
  Description of Artificial Sequence: Synthetic oligonucleotide
ggaauacuguuucuucaaa

SEQ ID NO: 1313253 - RNA, 19 nt, Artificial Sequence
  Description of Artificial Sequence: Synthetic oligonucleotide
aggaaaacguugggguccu

SEQ ID NO: 1313254 - RNA, 19 nt, Artificial Sequence
  Description of Artificial Sequence: Synthetic oligonucleotide
ggcgugucaaucuuuggua

SEQ ID NO: 1313255 - RNA, 19 nt, Artificial Sequence
  Description of Artificial Sequence: Synthetic oligonucleotide
caagcaggucccagacaug

SEQ ID NO: 1313256 - RNA, 19 nt, Artificial Sequence
  Description of Artificial Sequence: Synthetic oligonucleotide
guucccgcaaacagcagaa

SEQ ID NO: 1313257 - RNA, 19 nt, Artificial Sequence
  Description of Artificial Sequence: Synthetic oligonucleotide
caaagugauuaggauccga

SEQ ID NO: 1313258 - RNA, 19 nt, Artificial Sequence
  Description of Artificial Sequence: Synthetic oligonucleotide
aaccacccacacauugaga

SEQ ID NO: 1313259 - RNA, 19 nt, Artificial Sequence
  Description of Artificial Sequence: Synthetic oligonucleotide
gcucgauggcuugaagagg

SEQ ID NO: 1313260 - RNA, 19 nt, Artificial Sequence
  Description of Artificial Sequence: Synthetic oligonucleotide
ugccagagacccuggccaa

SEQ ID NO: 1313261 - RNA, 19 nt, Artificial Sequence
  Description of Artificial Sequence: Synthetic oligonucleotide
aagucccauaucggugcca

SEQ ID NO: 1313262 - RNA, 19 nt, Artificial Sequence
  Description of Artificial Sequence: Synthetic oligonucleotide
ugaacacgagaggcaugca

SEQ ID NO: 1313263 - RNA, 19 nt, Artificial Sequence
  Description of Artificial Sequence: Synthetic oligonucleotide
agcuuaggcgcuugucauu

SEQ ID NO: 1313264 - RNA, 19 nt, Artificial Sequence
  Description of Artificial Sequence: Synthetic oligonucleotide
agcggucaaacgguccucu

SEQ ID NO: 1313265 - RNA, 19 nt, Artificial Sequence
  Description of Artificial Sequence: Synthetic oligonucleotide
aaggaacggcagguucgug

SEQ ID NO: 1313266 - RNA, 19 nt, Artificial Sequence
  Description of Artificial Sequence: Synthetic oligonucleotide
cagaaauuugacacuuaau

SEQ ID NO: 1313267 - RNA, 19 nt, Artificial Sequence
  Description of Artificial Sequence: Synthetic oligonucleotide
caaccguggcgugucaauc

SEQ ID NO: 1313268 - RNA, 19 nt, Artificial Sequence
  Description of Artificial Sequence: Synthetic oligonucleotide
gcaaccugaugcuuccauc

SEQ ID NO: 1313269 - RNA, 19 nt, Artificial Sequence
  Description of Artificial Sequence: Synthetic oligonucleotide
aucgaucacgugaacuuuu

SEQ ID NO: 1313270 - RNA, 19 nt, Artificial Sequence
  Description of Artificial Sequence: Synthetic oligonucleotide
gacucacauaucagaaccu

SEQ ID NO: 1313271 - RNA, 19 nt, Artificial Sequence
  Description of Artificial Sequence: Synthetic oligonucleotide
gcuuaggcgcuugucauuc

SEQ ID NO: 1313272 - RNA, 19 nt, Artificial Sequence
  Description of Artificial Sequence: Synthetic oligonucleotide
gaacggcagguucguguuc

SEQ ID NO: 1313273 - RNA, 19 nt, Artificial Sequence
  Description of Artificial Sequence: Synthetic oligonucleotide
uaggauccgaaggcagaaa

SEQ ID NO: 1313274 - RNA, 19 nt, Artificial Sequence
  Description of Artificial Sequence: Synthetic oligonucleotide
cuguucccgcaaacagcag

SEQ ID NO: 1313275 - RNA, 19 nt, Artificial Sequence
  Description of Artificial Sequence: Synthetic oligonucleotide
gccggcuguccagagacgg

SEQ ID NO: 1313276 - RNA, 19 nt, Artificial Sequence
  Description of Artificial Sequence: Synthetic oligonucleotide
accguggcgugucaaucuu

SEQ ID NO: 1313277 - RNA, 19 nt, Artificial Sequence
  Description of Artificial Sequence: Synthetic oligonucleotide
auccuggaccaagaacaca

SEQ ID NO: 1313278 - RNA, 19 nt, Artificial Sequence
  Description of Artificial Sequence: Synthetic oligonucleotide
cacggaggucaagggaggc

SEQ ID NO: 1313279 - RNA, 19 nt, Artificial Sequence
  Description of Artificial Sequence: Synthetic oligonucleotide
gaccuuugacucacauauc

SEQ ID NO: 1313280 - RNA, 19 nt, Artificial Sequence
  Description of Artificial Sequence: Synthetic oligonucleotide
ugucuugagcccggggauu

SEQ ID NO: 1313281 - RNA, 19 nt, Artificial Sequence
  Description of Artificial Sequence: Synthetic oligonucleotide
cuucggugguucacugaca

SEQ ID NO: 1313282 - RNA, 19 nt, Artificial Sequence
  Description of Artificial Sequence: Synthetic oligonucleotide
cagaagacuuuccuacccu

SEQ ID NO: 1313283 - RNA, 19 nt, Artificial Sequence
  Description of Artificial Sequence: Synthetic oligonucleotide
acggcagguucguguucag

SEQ ID NO: 1313284 - RNA, 19 nt, Artificial Sequence
  Description of Artificial Sequence: Synthetic oligonucleotide
gaaggaacggcagguucgu

SEQ ID NO: 1313285 - RNA, 19 nt, Artificial Sequence
  Description of Artificial Sequence: Synthetic oligonucleotide
gcccggggauuccagcugg

SEQ ID NO: 1313286 - RNA, 19 nt, Artificial Sequence
  Description of Artificial Sequence: Synthetic oligonucleotide
cauuuccgaagaagcacgu

SEQ ID NO: 1313287 - RNA, 19 nt, Artificial Sequence
  Description of Artificial Sequence: Synthetic oligonucleotide
ggaucacaguacugugcac

SEQ ID NO: 1313288 - RNA, 19 nt, Artificial Sequence
  Description of Artificial Sequence: Synthetic oligonucleotide
cacaguacugugcaccaau

SEQ ID NO: 1313289 - RNA, 19 nt, Artificial Sequence
  Description of Artificial Sequence: Synthetic oligonucleotide
cguggcgugucaaucuuug

SEQ ID NO: 1313290 - RNA, 19 nt, Artificial Sequence
  Description of Artificial Sequence: Synthetic oligonucleotide
acgguccucuucaagcaaa

SEQ ID NO: 1313291 - RNA, 19 nt, Artificial Sequence
  Description of Artificial Sequence: Synthetic oligonucleotide
gagcccggggauuccagcu

SEQ ID NO: 1313292 - RNA, 19 nt, Artificial Sequence
  Description of Artificial Sequence: Synthetic oligonucleotide
gacauggauccuggaugca

SEQ ID NO: 1313293 - RNA, 19 nt, Artificial Sequence
  Description of Artificial Sequence: Synthetic oligonucleotide
ccagguaucagaccuaaau

SEQ ID NO: 1313294 - RNA, 19 nt, Artificial Sequence
  Description of Artificial Sequence: Synthetic oligonucleotide
gucaaacgguccucuucaa

SEQ ID NO: 1313295 - RNA, 19 nt, Artificial Sequence
  Description of Artificial Sequence: Synthetic oligonucleotide
caccuggcacgcugcccgg

SEQ ID NO: 1313296 - RNA, 19 nt, Artificial Sequence
  Description of Artificial Sequence: Synthetic oligonucleotide
gcccggagaaagcuggaca

SEQ ID NO: 1313297 - RNA, 19 nt, Artificial Sequence
  Description of Artificial Sequence: Synthetic oligonucleotide
ccauaucggugccaacaac

SEQ ID NO: 1313298 - RNA, 19 nt, Artificial Sequence
  Description of Artificial Sequence: Synthetic oligonucleotide
uucccgcaaacagcagaaa

SEQ ID NO: 1313299 - RNA, 19 nt, Artificial Sequence
  Description of Artificial Sequence: Synthetic oligonucleotide
ggcguccugaaaucaagcu

SEQ ID NO: 1313300 - RNA, 19 nt, Artificial Sequence
  Description of Artificial Sequence: Synthetic oligonucleotide
ugccaacaacaaagugauu

SEQ ID NO: 1313301 - RNA, 19 nt, Artificial Sequence
  Description of Artificial Sequence: Synthetic oligonucleotide
cagaccuaaaucacucauu

SEQ ID NO: 1313302 - RNA, 19 nt, Artificial Sequence
  Description of Artificial Sequence: Synthetic oligonucleotide
gacaaccguggcgugucaa

SEQ ID NO: 1313303 - RNA, 19 nt, Artificial Sequence
  Description of Artificial Sequence: Synthetic oligonucleotide
gagcggccaccagugcugc

SEQ ID NO: 1313304 - RNA, 19 nt, Artificial Sequence
  Description of Artificial Sequence: Synthetic oligonucleotide
gucucacauaguuguguau

SEQ ID NO: 1313305 - RNA, 19 nt, Artificial Sequence
  Description of Artificial Sequence: Synthetic oligonucleotide
cccggagaaagcuggacaa

SEQ ID NO: 1313306 - RNA, 19 nt, Artificial Sequence
  Description of Artificial Sequence: Synthetic oligonucleotide
agcuaccgcuggccuucuc

SEQ ID NO: 1313307 - RNA, 19 nt, Artificial Sequence
  Description of Artificial Sequence: Synthetic oligonucleotide
cauucucaagcagguccca

SEQ ID NO: 1313308 - RNA, 19 nt, Artificial Sequence
  Description of Artificial Sequence: Synthetic oligonucleotide
guugcccaacuggaucaca

SEQ ID NO: 1313309 - RNA, 19 nt, Artificial Sequence
  Description of Artificial Sequence: Synthetic oligonucleotide
gguucguguucaguuggga

SEQ ID NO: 1313310 - RNA, 19 nt, Artificial Sequence
  Description of Artificial Sequence: Synthetic oligonucleotide
cagggaggcgaugugaaau

SEQ ID NO: 1313311 - RNA, 19 nt, Artificial Sequence
  Description of Artificial Sequence: Synthetic oligonucleotide
gucccauaucggugccaac

SEQ ID NO: 1313312 - RNA, 19 nt, Artificial Sequence
  Description of Artificial Sequence: Synthetic oligonucleotide
gcaugcaaacagaagacuu

SEQ ID NO: 1313313 - RNA, 19 nt, Artificial Sequence
  Description of Artificial Sequence: Synthetic oligonucleotide
ggcaugcaaacagaagacu

SEQ ID NO: 1313314 - RNA, 19 nt, Artificial Sequence
  Description of Artificial Sequence: Synthetic oligonucleotide
ccgcucucguccagggagg

SEQ ID NO: 1313315 - RNA, 19 nt, Artificial Sequence
  Description of Artificial Sequence: Synthetic oligonucleotide
ccaaagcaccacagaacca

SEQ ID NO: 1313316 - RNA, 19 nt, Artificial Sequence
  Description of Artificial Sequence: Synthetic oligonucleotide
ccggcuguccagagacggg

SEQ ID NO: 1313317 - RNA, 19 nt, Artificial Sequence
  Description of Artificial Sequence: Synthetic oligonucleotide
acgaccggcucgauggcuu

SEQ ID NO: 1313318 - RNA, 19 nt, Artificial Sequence
  Description of Artificial Sequence: Synthetic oligonucleotide
gggaggcgaugugaaauga

SEQ ID NO: 1313319 - RNA, 19 nt, Artificial Sequence
  Description of Artificial Sequence: Synthetic oligonucleotide
cgauggcuugaagagguac

SEQ ID NO: 1313320 - RNA, 19 nt, Artificial Sequence
  Description of Artificial Sequence: Synthetic oligonucleotide
cgugucaaucuuugguaca

SEQ ID NO: 1313321 - RNA, 19 nt, Artificial Sequence
  Description of Artificial Sequence: Synthetic oligonucleotide
cuguccagagacggggcaa

SEQ ID NO: 1313322 - RNA, 19 nt, Artificial Sequence
  Description of Artificial Sequence: Synthetic oligonucleotide
ggaacggcagguucguguu

SEQ ID NO: 1313323 - RNA, 19 nt, Artificial Sequence
  Description of Artificial Sequence: Synthetic oligonucleotide
aucugccgccacuggggua

SEQ ID NO: 1313324 - RNA, 19 nt, Artificial Sequence
  Description of Artificial Sequence: Synthetic oligonucleotide
gguccagcggucaaacggu

SEQ ID NO: 1313325 - RNA, 19 nt, Artificial Sequence
  Description of Artificial Sequence: Synthetic oligonucleotide
ggugccggcuguccagaga

SEQ ID NO: 1313326 - RNA, 19 nt, Artificial Sequence
  Description of Artificial Sequence: Synthetic oligonucleotide
guccagcggucaaacgguc

SEQ ID NO: 1313327 - RNA, 19 nt, Artificial Sequence
  Description of Artificial Sequence: Synthetic oligonucleotide
cccacacauugagaaugcc

SEQ ID NO: 1313328 - RNA, 19 nt, Artificial Sequence
  Description of Artificial Sequence: Synthetic oligonucleotide
ggaggcguccugaaaucaa

SEQ ID NO: 1313329 - RNA, 19 nt, Artificial Sequence
  Description of Artificial Sequence: Synthetic oligonucleotide
cggucaaacgguccucuuc

SEQ ID NO: 1313330 - RNA, 19 nt, Artificial Sequence
  Description of Artificial Sequence: Synthetic oligonucleotide
gcguccugaaaucaagcuu

SEQ ID NO: 1313331 - RNA, 19 nt, Artificial Sequence
  Description of Artificial Sequence: Synthetic oligonucleotide
cgagaggcaugcaaacaga

SEQ ID NO: 1313332 - RNA, 19 nt, Artificial Sequence
  Description of Artificial Sequence: Synthetic oligonucleotide
cagcggucaaacgguccuc

SEQ ID NO: 1313333 - RNA, 19 nt, Artificial Sequence
  Description of Artificial Sequence: Synthetic oligonucleotide
accggcucgauggcuugaa

SEQ ID NO: 1313334 - RNA, 19 nt, Artificial Sequence
  Description of Artificial Sequence: Synthetic oligonucleotide
cccauaucggugccaacaa

SEQ ID NO: 1313335 - RNA, 19 nt, Artificial Sequence
  Description of Artificial Sequence: Synthetic oligonucleotide
cuuaggcgcuugucauucu

SEQ ID NO: 1313336 - RNA, 19 nt, Artificial Sequence
  Description of Artificial Sequence: Synthetic oligonucleotide
gcucucguccagggaggcg

SEQ ID NO: 1313337 - RNA, 19 nt, Artificial Sequence
  Description of Artificial Sequence: Synthetic oligonucleotide
caagccugucuggaaagau

SEQ ID NO: 1313338 - RNA, 19 nt, Artificial Sequence
  Description of Artificial Sequence: Synthetic oligonucleotide
caucugccgccacuggggu

SEQ ID NO: 1313339 - RNA, 19 nt, Artificial Sequence
  Description of Artificial Sequence: Synthetic oligonucleotide
cggcucgauggcuugaaga

SEQ ID NO: 1313340 - RNA, 19 nt, Artificial Sequence
  Description of Artificial Sequence: Synthetic oligonucleotide
ccggagaaagcuggacaac

SEQ ID NO: 1313341 - RNA, 19 nt, Artificial Sequence
  Description of Artificial Sequence: Synthetic oligonucleotide
ccaugacggucauggccac

SEQ ID NO: 1313342 - RNA, 19 nt, Artificial Sequence
  Description of Artificial Sequence: Synthetic oligonucleotide
gacgaccggcucgauggcu

SEQ ID NO: 1313343 - RNA, 19 nt, Artificial Sequence
  Description of Artificial Sequence: Synthetic oligonucleotide
caugacggucauggccaca

SEQ ID NO: 1313344 - RNA, 19 nt, Artificial Sequence
  Description of Artificial Sequence: Synthetic oligonucleotide
gaccggcucgauggcuuga

SEQ ID NO: 1313345 - RNA, 19 nt, Artificial Sequence
  Description of Artificial Sequence: Synthetic oligonucleotide
cccggggauuccagcuggg

SEQ ID NO: 1313346 - RNA, 19 nt, Artificial Sequence
  Description of Artificial Sequence: Synthetic oligonucleotide
ccaucgguaggaaaacguu

SEQ ID NO: 1313347 - RNA, 19 nt, Artificial Sequence
  Description of Artificial Sequence: Synthetic oligonucleotide
cuggacaaccguggcgugu

SEQ ID NO: 1313348 - RNA, 19 nt, Artificial Sequence
  Description of Artificial Sequence: Synthetic oligonucleotide
gggguaguccaccgccucu

SEQ ID NO: 1313349 - RNA, 19 nt, Artificial Sequence
  Description of Artificial Sequence: Synthetic oligonucleotide
ggacaaccguggcguguca

SEQ ID NO: 1313350 - RNA, 19 nt, Artificial Sequence
  Description of Artificial Sequence: Synthetic oligonucleotide
ccggcucgauggcuugaag

SEQ ID NO: 1313351 - RNA, 19 nt, Artificial Sequence
  Description of Artificial Sequence: Synthetic oligonucleotide
ggauccgaaggcagaaauu

SEQ ID NO: 1313352 - RNA, 19 nt, Artificial Sequence
  Description of Artificial Sequence: Synthetic oligonucleotide
cagagcuaccgcuggccuu

SEQ ID NO: 1313353 - RNA, 19 nt, Artificial Sequence
  Description of Artificial Sequence: Synthetic oligonucleotide
gacggggcaaauggcucuu

SEQ ID NO: 1313354 - RNA, 19 nt, Artificial Sequence
  Description of Artificial Sequence: Synthetic oligonucleotide
ggaaaacguugggguccug

SEQ ID NO: 1313355 - RNA, 19 nt, Artificial Sequence
  Description of Artificial Sequence: Synthetic oligonucleotide
cccagacauggauccugga

SEQ ID NO: 1313356 - RNA, 19 nt, Artificial Sequence
  Description of Artificial Sequence: Synthetic oligonucleotide
cgaccggcucgauggcuug

SEQ ID NO: 1313357 - RNA, 19 nt, Artificial Sequence
  Description of Artificial Sequence: Synthetic oligonucleotide
augugacgaccggcucgau

SEQ ID NO: 1313358 - RNA, 19 nt, Artificial Sequence
  Description of Artificial Sequence: Synthetic oligonucleotide
ccgaacagccagccaggaa

SEQ ID NO: 1313359 - RNA, 19 nt, Artificial Sequence
  Description of Artificial Sequence: Synthetic oligonucleotide
gcccugaaggcugccaaau

SEQ ID NO: 1313360 - RNA, 19 nt, Artificial Sequence
  Description of Artificial Sequence: Synthetic oligonucleotide
cggaggucaagggaggcgu

SEQ ID NO: 1313361 - RNA, 19 nt, Artificial Sequence
  Description of Artificial Sequence: Synthetic oligonucleotide
gagcuaccgcuggccuucu

SEQ ID NO: 1313362 - RNA, 19 nt, Artificial Sequence
  Description of Artificial Sequence: Synthetic oligonucleotide
gcggucaaacgguccucuu

SEQ ID NO: 1313363 - RNA, 19 nt, Artificial Sequence
  Description of Artificial Sequence: Synthetic oligonucleotide
cgaucacgugaacuuuuau

SEQ ID NO: 1313364 - RNA, 19 nt, Artificial Sequence
  Description of Artificial Sequence: Synthetic oligonucleotide
ccguggcgugucaaucuuu

SEQ ID NO: 1313365 - RNA, 19 nt, Artificial Sequence
  Description of Artificial Sequence: Synthetic oligonucleotide
ccggggauuccagcugggu

SEQ ID NO: 1313366 - RNA, 19 nt, Artificial Sequence
  Description of Artificial Sequence: Synthetic oligonucleotide
ccgcuggccuucuccggau

SEQ ID NO: 1313367 - RNA, 19 nt, Artificial Sequence
  Description of Artificial Sequence: Synthetic oligonucleotide
acagcuaaaauguugacuc

SEQ ID NO: 1313368 - RNA, 19 nt, Artificial Sequence
  Description of Artificial Sequence: Synthetic oligonucleotide
auuaagaacauuaagucac

SEQ ID NO: 1313369 - RNA, 19 nt, Artificial Sequence
  Description of Artificial Sequence: Synthetic oligonucleotide
aauuaguucaggacaaucc

SEQ ID NO: 1313370 - RNA, 19 nt, Artificial Sequence
  Description of Artificial Sequence: Synthetic oligonucleotide
aauggcacaaugcugagga

SEQ ID NO: 1313371 - RNA, 19 nt, Artificial Sequence
  Description of Artificial Sequence: Synthetic oligonucleotide
uaaaauguugacucaaggc

SEQ ID NO: 1313372 - RNA, 19 nt, Artificial Sequence
  Description of Artificial Sequence: Synthetic oligonucleotide
uguaaugccucacacaaca

SEQ ID NO: 1313373 - RNA, 19 nt, Artificial Sequence
  Description of Artificial Sequence: Synthetic oligonucleotide
aacgcaacuaacccgcccc

SEQ ID NO: 1313374 - RNA, 19 nt, Artificial Sequence
  Description of Artificial Sequence: Synthetic oligonucleotide
aaugccucacacaacaccc

SEQ ID NO: 1313375 - RNA, 19 nt, Artificial Sequence
  Description of Artificial Sequence: Synthetic oligonucleotide
aauaaaaccaagaaacgca

SEQ ID NO: 1313376 - RNA, 19 nt, Artificial Sequence
  Description of Artificial Sequence: Synthetic oligonucleotide
aaagacuugcccaagauca

SEQ ID NO: 1313377 - RNA, 19 nt, Artificial Sequence
  Description of Artificial Sequence: Synthetic oligonucleotide
acguauuauauacaaagag

SEQ ID NO: 1313378 - RNA, 19 nt, Artificial Sequence
  Description of Artificial Sequence: Synthetic oligonucleotide
agaaaugacagagaccacc

SEQ ID NO: 1313379 - RNA, 19 nt, Artificial Sequence
  Description of Artificial Sequence: Synthetic oligonucleotide
aaaacagacgaguuuggcu

SEQ ID NO: 1313380 - RNA, 19 nt, Artificial Sequence
  Description of Artificial Sequence: Synthetic oligonucleotide
ugaaaggaaagacuugccc

SEQ ID NO: 1313381 - RNA, 19 nt, Artificial Sequence
  Description of Artificial Sequence: Synthetic oligonucleotide
ucuguugccccaaugaucu

SEQ ID NO: 1313382 - RNA, 19 nt, Artificial Sequence
  Description of Artificial Sequence: Synthetic oligonucleotide
agguggacguauuauauac

SEQ ID NO: 1313383 - RNA, 19 nt, Artificial Sequence
  Description of Artificial Sequence: Synthetic oligonucleotide
guaggaaugaaagggaugg

SEQ ID NO: 1313384 - RNA, 19 nt, Artificial Sequence
  Description of Artificial Sequence: Synthetic oligonucleotide
ggacguauuauauacaaag

SEQ ID NO: 1313385 - RNA, 19 nt, Artificial Sequence
  Description of Artificial Sequence: Synthetic oligonucleotide
  modified_base (3)..(3): a, c, u, g, unknown or other
uanccuuuaagaaaucaaa

SEQ ID NO: 1313386 - RNA, 19 nt, Artificial Sequence
  Description of Artificial Sequence: Synthetic oligonucleotide
uccauuguaacauuuuacu

SEQ ID NO: 1313387 - RNA, 19 nt, Artificial Sequence
  Description of Artificial Sequence: Synthetic oligonucleotide
agaaacgcaacuaacccgc

SEQ ID NO: 1313388 - RNA, 19 nt, Artificial Sequence
  Description of Artificial Sequence: Synthetic oligonucleotide
aaagccucgagcgauauca

SEQ ID NO: 1313389 - RNA, 19 nt, Artificial Sequence
  Description of Artificial Sequence: Synthetic oligonucleotide
agaaacuacaccaagguca

SEQ ID NO: 1313390 - RNA, 19 nt, Artificial Sequence
  Description of Artificial Sequence: Synthetic oligonucleotide
  modified_base (4)..(4): a, c, u, g, unknown or other
uuanccuuuaagaaaucaa

SEQ ID NO: 1313391 - RNA, 19 nt, Artificial Sequence
  Description of Artificial Sequence: Synthetic oligonucleotide
ucagaaauuaguucaggac

SEQ ID NO: 1313392 - RNA, 19 nt, Artificial Sequence
  Description of Artificial Sequence: Synthetic oligonucleotide
uucaggacaauccaaguuc

SEQ ID NO: 1313393 - RNA, 19 nt, Artificial Sequence
  Description of Artificial Sequence: Synthetic oligonucleotide
uauuagagaaacuggauuu

SEQ ID NO: 1313394 - RNA, 19 nt, Artificial Sequence
  Description of Artificial Sequence: Synthetic oligonucleotide
acuaaggccaccgagguuc

SEQ ID NO: 1313395 - RNA, 19 nt, Artificial Sequence
  Description of Artificial Sequence: Synthetic oligonucleotide
caagguaugaccugcuucc

SEQ ID NO: 1313396 - RNA, 19 nt, Artificial Sequence
  Description of Artificial Sequence: Synthetic oligonucleotide
aaaugacagagaccacccc

SEQ ID NO: 1313397 - RNA, 19 nt, Artificial Sequence
  Description of Artificial Sequence: Synthetic oligonucleotide
agcacuauuagagaaacug

SEQ ID NO: 1313398 - RNA, 19 nt, Artificial Sequence
  Description of Artificial Sequence: Synthetic oligonucleotide
aucaucagcacuauuagag

SEQ ID NO: 1313399 - RNA, 19 nt, Artificial Sequence
  Description of Artificial Sequence: Synthetic oligonucleotide
agagaccccuauuaggagc

SEQ ID NO: 1313400 - RNA, 19 nt, Artificial Sequence
  Description of Artificial Sequence: Synthetic oligonucleotide
caagaaacgcaacuaaccc

SEQ ID NO: 1313401 - RNA, 19 nt, Artificial Sequence
  Description of Artificial Sequence: Synthetic oligonucleotide
auacaaagagaaaugacag

SEQ ID NO: 1313402 - RNA, 19 nt, Artificial Sequence
  Description of Artificial Sequence: Synthetic oligonucleotide
  modified_base (15)..(15): a, c, u, g, unknown or other
auauagaccacuuanccuu

SEQ ID NO: 1313403 - RNA, 19 nt, Artificial Sequence
  Description of Artificial Sequence: Synthetic oligonucleotide
gaaaggaaagacuugccca

SEQ ID NO: 1313404 - RNA, 19 nt, Artificial Sequence
  Description of Artificial Sequence: Synthetic oligonucleotide
aaacgcaacuaacccgccc

SEQ ID NO: 1313405 - RNA, 19 nt, Artificial Sequence
  Description of Artificial Sequence: Synthetic oligonucleotide
aaccaggucggcuucaucu

SEQ ID NO: 1313406 - RNA, 19 nt, Artificial Sequence
  Description of Artificial Sequence: Synthetic oligonucleotide
auuaguucaggacaaucca

SEQ ID NO: 1313407 - RNA, 19 nt, Artificial Sequence
  Description of Artificial Sequence: Synthetic oligonucleotide
aaggacuaaggccaccgag

SEQ ID NO: 1313408 - RNA, 19 nt, Artificial Sequence
  Description of Artificial Sequence: Synthetic oligonucleotide
uuaagaacauuaagucacc

SEQ ID NO: 1313409 - RNA, 19 nt, Artificial Sequence
  Description of Artificial Sequence: Synthetic oligonucleotide
acaagguaugaccugcuuc

SEQ ID NO: 1313410 - RNA, 19 nt, Artificial Sequence
  Description of Artificial Sequence: Synthetic oligonucleotide
gauaucauugcucugcucu

SEQ ID NO: 1313411 - RNA, 19 nt, Artificial Sequence
  Description of Artificial Sequence: Synthetic oligonucleotide
aaugucuuacuuccauuca

SEQ ID NO: 1313412 - RNA, 19 nt, Artificial Sequence
  Description of Artificial Sequence: Synthetic oligonucleotide
acgcugauccaccugaagg

SEQ ID NO: 1313413 - RNA, 19 nt, Artificial Sequence
  Description of Artificial Sequence: Synthetic oligonucleotide
agcagaguacaccuaacag

SEQ ID NO: 1313414 - RNA, 19 nt, Artificial Sequence
  Description of Artificial Sequence: Synthetic oligonucleotide
gaccuugugcuuuuagggg

SEQ ID NO: 1313415 - RNA, 19 nt, Artificial Sequence
  Description of Artificial Sequence: Synthetic oligonucleotide
uuaaccaugcgucugucua

SEQ ID NO: 1313416 - RNA, 19 nt, Artificial Sequence
  Description of Artificial Sequence: Synthetic oligonucleotide
aguagauauaaauuacuua

SEQ ID NO: 1313417 - RNA, 19 nt, Artificial Sequence
  Description of Artificial Sequence: Synthetic oligonucleotide
ggaaccgaggcauugaaag

SEQ ID NO: 1313418 - RNA, 19 nt, Artificial Sequence
  Description of Artificial Sequence: Synthetic oligonucleotide
caauuuguggacauuucac

SEQ ID NO: 1313419 - RNA, 19 nt, Artificial Sequence
  Description of Artificial Sequence: Synthetic oligonucleotide
acauuaagucaccacagga

SEQ ID NO: 1313420 - RNA, 19 nt, Artificial Sequence
  Description of Artificial Sequence: Synthetic oligonucleotide
uggagcacagugauaagca

SEQ ID NO: 1313421 - RNA, 19 nt, Artificial Sequence
  Description of Artificial Sequence: Synthetic oligonucleotide
  modified_base (9)..(9): a, c, u, g, unknown or other
accacuuanccuuuaagaa

SEQ ID NO: 1313422 - RNA, 19 nt, Artificial Sequence
  Description of Artificial Sequence: Synthetic oligonucleotide
gaaucuguugccccaauga

SEQ ID NO: 1313423 - RNA, 19 nt, Artificial Sequence
  Description of Artificial Sequence: Synthetic oligonucleotide
gaaaugacagagaccaccc

SEQ ID NO: 1313424 - RNA, 19 nt, Artificial Sequence
  Description of Artificial Sequence: Synthetic oligonucleotide
cauucagacaccuggcuac

SEQ ID NO: 1313425 - RNA, 19 nt, Artificial Sequence
  Description of Artificial Sequence: Synthetic oligonucleotide
augucuuacuuccauucag

SEQ ID NO: 1313426 - RNA, 19 nt, Artificial Sequence
  Description of Artificial Sequence: Synthetic oligonucleotide
aaucuguugccccaaugau

SEQ ID NO: 1313427 - RNA, 19 nt, Artificial Sequence
  Description of Artificial Sequence: Synthetic oligonucleotide
uugacucaaggcauccucc

SEQ ID NO: 1313428 - RNA, 19 nt, Artificial Sequence
  Description of Artificial Sequence: Synthetic oligonucleotide
gaaccgaggcauugaaagg

SEQ ID NO: 1313429 - RNA, 19 nt, Artificial Sequence
  Description of Artificial Sequence: Synthetic oligonucleotide
auuugacagauggggaacc

SEQ ID NO: 1313430 - RNA, 19 nt, Artificial Sequence
  Description of Artificial Sequence: Synthetic oligonucleotide
caugcgucugucuaacacc

SEQ ID NO: 1313431 - RNA, 19 nt, Artificial Sequence
  Description of Artificial Sequence: Synthetic oligonucleotide
cagccuuaagaccaagugg

SEQ ID NO: 1313432 - RNA, 19 nt, Artificial Sequence
  Description of Artificial Sequence: Synthetic oligonucleotide
ucuggauaugcaugccacg

SEQ ID NO: 1313433 - RNA, 19 nt, Artificial Sequence
  Description of Artificial Sequence: Synthetic oligonucleotide
uucaaugucuuacuuccau

SEQ ID NO: 1313434 - RNA, 19 nt, Artificial Sequence
  Description of Artificial Sequence: Synthetic oligonucleotide
ucacuaagugcuuccaaac

SEQ ID NO: 1313435 - RNA, 19 nt, Artificial Sequence
  Description of Artificial Sequence: Synthetic oligonucleotide
uuaagaccaaguggggagg

SEQ ID NO: 1313436 - RNA, 19 nt, Artificial Sequence
  Description of Artificial Sequence: Synthetic oligonucleotide
uucccaaguauugugcucc

SEQ ID NO: 1313437 - RNA, 19 nt, Artificial Sequence
  Description of Artificial Sequence: Synthetic oligonucleotide
uuaguucaggacaauccaa

SEQ ID NO: 1313438 - RNA, 19 nt, Artificial Sequence
  Description of Artificial Sequence: Synthetic oligonucleotide
  modified_base (2)..(2): a, c, u, g, unknown or other
anccuuuaagaaaucaaaa

SEQ ID NO: 1313439 - RNA, 19 nt, Artificial Sequence
  Description of Artificial Sequence: Synthetic oligonucleotide
acuuucagucaccucacug

SEQ ID NO: 1313440 - RNA, 19 nt, Artificial Sequence
  Description of Artificial Sequence: Synthetic oligonucleotide
ucaucagcacuauuagaga

SEQ ID NO: 1313441 - RNA, 19 nt, Artificial Sequence
  Description of Artificial Sequence: Synthetic oligonucleotide
cagcaugacucuuuggagc

SEQ ID NO: 1313442 - RNA, 19 nt, Artificial Sequence
  Description of Artificial Sequence: Synthetic oligonucleotide
uggcugaauaaaaccaaga

SEQ ID NO: 1313443 - RNA, 19 nt, Artificial Sequence
  Description of Artificial Sequence: Synthetic oligonucleotide
uguuaucaccccauuugac

SEQ ID NO: 1313444 - RNA, 19 nt, Artificial Sequence
  Description of Artificial Sequence: Synthetic oligonucleotide
cacuauuagagaaacugga

SEQ ID NO: 1313445 - RNA, 19 nt, Artificial Sequence
  Description of Artificial Sequence: Synthetic oligonucleotide
aggacaauccaaguucuuc

SEQ ID NO: 1313446 - RNA, 19 nt, Artificial Sequence
  Description of Artificial Sequence: Synthetic oligonucleotide
gaugagggcaaccaaccga

SEQ ID NO: 1313447 - RNA, 19 nt, Artificial Sequence
  Description of Artificial Sequence: Synthetic oligonucleotide
  modified_base (11)..(11): a, c, u, g, unknown or other
agaccacuuanccuuuaag

SEQ ID NO: 1313448 - RNA, 19 nt, Artificial Sequence
  Description of Artificial Sequence: Synthetic oligonucleotide
aggucaguguuaucacccc

SEQ ID NO: 1313449 - RNA, 19 nt, Artificial Sequence
  Description of Artificial Sequence: Synthetic oligonucleotide
cauugaaaggaaagacuug

SEQ ID NO: 1313450 - RNA, 19 nt, Artificial Sequence
  Description of Artificial Sequence: Synthetic oligonucleotide
ugccccuuaaccaugcguc

SEQ ID NO: 1313451 - RNA, 19 nt, Artificial Sequence
  Description of Artificial Sequence: Synthetic oligonucleotide
ugugcuuuuaggggugggg

SEQ ID NO: 1313452 - RNA, 19 nt, Artificial Sequence
  Description of Artificial Sequence: Synthetic oligonucleotide
augagggcaaccaaccgac

SEQ ID NO: 1313453 - RNA, 19 nt, Artificial Sequence
  Description of Artificial Sequence: Synthetic oligonucleotide
cagaguacaccuaacagaa

SEQ ID NO: 1313454 - RNA, 19 nt, Artificial Sequence
  Description of Artificial Sequence: Synthetic oligonucleotide
agcaugacucuuuggagca

SEQ ID NO: 1313455 - RNA, 19 nt, Artificial Sequence
  Description of Artificial Sequence: Synthetic oligonucleotide
ugcuuccuacucagaaugg

SEQ ID NO: 1313456 - RNA, 19 nt, Artificial Sequence
  Description of Artificial Sequence: Synthetic oligonucleotide
aaaugcuaucacaauuugu

SEQ ID NO: 1313457 - RNA, 19 nt, Artificial Sequence
  Description of Artificial Sequence: Synthetic oligonucleotide
cagauacuccacuugcccc

SEQ ID NO: 1313458 - RNA, 19 nt, Artificial Sequence
  Description of Artificial Sequence: Synthetic oligonucleotide
agauacuccacuugccccu

SEQ ID NO: 1313459 - RNA, 19 nt, Artificial Sequence
  Description of Artificial Sequence: Synthetic oligonucleotide
ccaaccgacuguuaaaugc

SEQ ID NO: 1313460 - RNA, 19 nt, Artificial Sequence
  Description of Artificial Sequence: Synthetic oligonucleotide
cauuagcuucuuuugccag

SEQ ID NO: 1313461 - RNA, 19 nt, Artificial Sequence
  Description of Artificial Sequence: Synthetic oligonucleotide
uuguuuucacccuccuuca

SEQ ID NO: 1313462 - RNA, 19 nt, Artificial Sequence
  Description of Artificial Sequence: Synthetic oligonucleotide
  modified_base (14)..(14): a, c, u, g, unknown or other
uauagaccacuuanccuuu

SEQ ID NO: 1313463 - RNA, 19 nt, Artificial Sequence
  Description of Artificial Sequence: Synthetic oligonucleotide
cauuaagucaccacaggaa

SEQ ID NO: 1313464 - RNA, 19 nt, Artificial Sequence
  Description of Artificial Sequence: Synthetic oligonucleotide
gagaaacuacaccaagguc

SEQ ID NO: 1313465 - RNA, 19 nt, Artificial Sequence
  Description of Artificial Sequence: Synthetic oligonucleotide
uggauguguaggaaugaaa

SEQ ID NO: 1313466 - RNA, 19 nt, Artificial Sequence
  Description of Artificial Sequence: Synthetic oligonucleotide
uucuucucagguucccaag

SEQ ID NO: 1313467 - RNA, 19 nt, Artificial Sequence
  Description of Artificial Sequence: Synthetic oligonucleotide
agaaauuaguucaggacaa

SEQ ID NO: 1313468 - RNA, 19 nt, Artificial Sequence
  Description of Artificial Sequence: Synthetic oligonucleotide
aggacuaaggccaccgagg

SEQ ID NO: 1313469 - RNA, 19 nt, Artificial Sequence
  Description of Artificial Sequence: Synthetic oligonucleotide
ugcacauaaaguagauaua

SEQ ID NO: 1313470 - RNA, 19 nt, Artificial Sequence
  Description of Artificial Sequence: Synthetic oligonucleotide
aacagacgaguuuggcuga

SEQ ID NO: 1313471 - RNA, 19 nt, Artificial Sequence
  Description of Artificial Sequence: Synthetic oligonucleotide
ucgagcgauaucauugcuc

SEQ ID NO: 1313472 - RNA, 19 nt, Artificial Sequence
  Description of Artificial Sequence: Synthetic oligonucleotide
gacguauuauauacaaaga

SEQ ID NO: 1313473 - RNA, 19 nt, Artificial Sequence
  Description of Artificial Sequence: Synthetic oligonucleotide
cuucuuuugccagaaccag

SEQ ID NO: 1313474 - RNA, 19 nt, Artificial Sequence
  Description of Artificial Sequence: Synthetic oligonucleotide
aucuguaaugccucacaca

SEQ ID NO: 1313475 - RNA, 19 nt, Artificial Sequence
  Description of Artificial Sequence: Synthetic oligonucleotide
ggaaugaaagggaugggag

SEQ ID NO: 1313476 - RNA, 19 nt, Artificial Sequence
  Description of Artificial Sequence: Synthetic oligonucleotide
aaccgacuguuaaaugcac

SEQ ID NO: 1313477 - RNA, 19 nt, Artificial Sequence
  Description of Artificial Sequence: Synthetic oligonucleotide
gagggcaaccaaccgacug

SEQ ID NO: 1313478 - RNA, 19 nt, Artificial Sequence
  Description of Artificial Sequence: Synthetic oligonucleotide
uaagaacauuaagucacca

SEQ ID NO: 1313479 - RNA, 19 nt, Artificial Sequence
  Description of Artificial Sequence: Synthetic oligonucleotide
guugacucaaggcauccuc

SEQ ID NO: 1313480 - RNA, 19 nt, Artificial Sequence
  Description of Artificial Sequence: Synthetic oligonucleotide
ugccccaaugaucuuuucu

SEQ ID NO: 1313481 - RNA, 19 nt, Artificial Sequence
  Description of Artificial Sequence: Synthetic oligonucleotide
uaucacaauuuguggacau

SEQ ID NO: 1313482 - RNA, 19 nt, Artificial Sequence
  Description of Artificial Sequence: Synthetic oligonucleotide
aagguggacguauuauaua

SEQ ID NO: 1313483 - RNA, 19 nt, Artificial Sequence
  Description of Artificial Sequence: Synthetic oligonucleotide
gacaauccaaguucuucuc

SEQ ID NO: 1313484 - RNA, 19 nt, Artificial Sequence
  Description of Artificial Sequence: Synthetic oligonucleotide
  modified_base (7)..(7): a, c, u, g, unknown or other
cacuuanccuuuaagaaau

SEQ ID NO: 1313485 - RNA, 19 nt, Artificial Sequence
  Description of Artificial Sequence: Synthetic oligonucleotide
ucugugagaaggugggaau

SEQ ID NO: 1313486 - RNA, 19 nt, Artificial Sequence
  Description of Artificial Sequence: Synthetic oligonucleotide
agaacuggagugugggccu

SEQ ID NO: 1313487 - RNA, 19 nt, Artificial Sequence
  Description of Artificial Sequence: Synthetic oligonucleotide
aaccaaccgacuguuaaau

SEQ ID NO: 1313488 - RNA, 19 nt, Artificial Sequence
  Description of Artificial Sequence: Synthetic oligonucleotide
guggacguauuauauacaa

SEQ ID NO: 1313489 - RNA, 19 nt, Artificial Sequence
  Description of Artificial Sequence: Synthetic oligonucleotide
gaguuuggcugaauaaaac

SEQ ID NO: 1313490 - RNA, 19 nt, Artificial Sequence
  Description of Artificial Sequence: Synthetic oligonucleotide
  modified_base (5)..(5): a, c, u, g, unknown or other
cuuanccuuuaagaaauca

SEQ ID NO: 1313491 - RNA, 19 nt, Artificial Sequence
  Description of Artificial Sequence: Synthetic oligonucleotide
cuacagugaccacucacac

SEQ ID NO: 1313492 - RNA, 19 nt, Artificial Sequence
  Description of Artificial Sequence: Synthetic oligonucleotide
agaauggcacaaugcugag

SEQ ID NO: 1313493 - RNA, 19 nt, Artificial Sequence
  Description of Artificial Sequence: Synthetic oligonucleotide
uggacguauuauauacaaa

SEQ ID NO: 1313494 - RNA, 19 nt, Artificial Sequence
  Description of Artificial Sequence: Synthetic oligonucleotide
uuuauaucaucagcacuau

SEQ ID NO: 1313495 - RNA, 19 nt, Artificial Sequence
  Description of Artificial Sequence: Synthetic oligonucleotide
ccuauuaggagcagaguac

SEQ ID NO: 1313496 - RNA, 19 nt, Artificial Sequence
  Description of Artificial Sequence: Synthetic oligonucleotide
ggggcgagaaacuacacca

SEQ ID NO: 1313497 - RNA, 19 nt, Artificial Sequence
  Description of Artificial Sequence: Synthetic oligonucleotide
gagcagaguacaccuaaca

SEQ ID NO: 1313498 - RNA, 19 nt, Artificial Sequence
  Description of Artificial Sequence: Synthetic oligonucleotide
ugagguaggucaguguuau

SEQ ID NO: 1313499 - RNA, 19 nt, Artificial Sequence
  Description of Artificial Sequence: Synthetic oligonucleotide
gacaugagacuguuccuuc

SEQ ID NO: 1313500 - RNA, 19 nt, Artificial Sequence
  Description of Artificial Sequence: Synthetic oligonucleotide
gaauggcacaaugcugagg

SEQ ID NO: 1313501 - RNA, 19 nt, Artificial Sequence
  Description of Artificial Sequence: Synthetic oligonucleotide
gaggcauugaaaggaaaga

SEQ ID NO: 1313502 - RNA, 19 nt, Artificial Sequence
  Description of Artificial Sequence: Synthetic oligonucleotide
gacgaguuuggcugaauaa

SEQ ID NO: 1313503 - RNA, 19 nt, Artificial Sequence
  Description of Artificial Sequence: Synthetic oligonucleotide
aguccucucucaaagccuc

SEQ ID NO: 1313504 - RNA, 19 nt, Artificial Sequence
  Description of Artificial Sequence: Synthetic oligonucleotide
guuuucacccuccuucauc

SEQ ID NO: 1313505 - RNA, 19 nt, Artificial Sequence
  Description of Artificial Sequence: Synthetic oligonucleotide
agggcaaccaaccgacugu

SEQ ID NO: 1313506 - RNA, 19 nt, Artificial Sequence
  Description of Artificial Sequence: Synthetic oligonucleotide
gcagaguacaccuaacaga

SEQ ID NO: 1313507 - RNA, 19 nt, Artificial Sequence
  Description of Artificial Sequence: Synthetic oligonucleotide
cauuugacagauggggaac

SEQ ID NO: 1313508 - RNA, 19 nt, Artificial Sequence
  Description of Artificial Sequence: Synthetic oligonucleotide
guguuaucaccccauuuga

SEQ ID NO: 1313509 - RNA, 19 nt, Artificial Sequence
  Description of Artificial Sequence: Synthetic oligonucleotide
acuauuagagaaacuggau

SEQ ID NO: 1313510 - RNA, 19 nt, Artificial Sequence
  Description of Artificial Sequence: Synthetic oligonucleotide
cacaauuuguggacauuuc

SEQ ID NO: 1313511 - RNA, 19 nt, Artificial Sequence
  Description of Artificial Sequence: Synthetic oligonucleotide
uugccccuuaaccaugcgu

SEQ ID NO: 1313512 - RNA, 19 nt, Artificial Sequence
  Description of Artificial Sequence: Synthetic oligonucleotide
  modified_base (12)..(12): a, c, u, g, unknown or other
uagaccacuuanccuuuaa

SEQ ID NO: 1313513 - RNA, 19 nt, Artificial Sequence
  Description of Artificial Sequence: Synthetic oligonucleotide
caaccgacuguuaaaugca

SEQ ID NO: 1313514 - RNA, 19 nt, Artificial Sequence
  Description of Artificial Sequence: Synthetic oligonucleotide
caucagcacuauuagagaa

SEQ ID NO: 1313515 - RNA, 19 nt, Artificial Sequence
  Description of Artificial Sequence: Synthetic oligonucleotide
guccauuguaacauuuuac

SEQ ID NO: 1313516 - RNA, 19 nt, Artificial Sequence
  Description of Artificial Sequence: Synthetic oligonucleotide
gccccaaugaucuuuucug

SEQ ID NO: 1313517 - RNA, 19 nt, Artificial Sequence
  Description of Artificial Sequence: Synthetic oligonucleotide
acgaguuuggcugaauaaa

SEQ ID NO: 1313518 - RNA, 19 nt, Artificial Sequence
  Description of Artificial Sequence: Synthetic oligonucleotide
caaguggggaggcuggcac

SEQ ID NO: 1313519 - RNA, 19 nt, Artificial Sequence
  Description of Artificial Sequence: Synthetic oligonucleotide
cucggaagaagaacuguca

SEQ ID NO: 1313520 - RNA, 19 nt, Artificial Sequence
  Description of Artificial Sequence: Synthetic oligonucleotide
cuacaccaaggucacuaag

SEQ ID NO: 1313521 - RNA, 19 nt, Artificial Sequence
  Description of Artificial Sequence: Synthetic oligonucleotide
cuauuaggagcagaguaca

SEQ ID NO: 1313522 - RNA, 19 nt, Artificial Sequence
  Description of Artificial Sequence: Synthetic oligonucleotide
acuccacuugccccuuaac

SEQ ID NO: 1313523 - RNA, 19 nt, Artificial Sequence
  Description of Artificial Sequence: Synthetic oligonucleotide
ggauaugcaugccacguca

SEQ ID NO: 1313524 - RNA, 19 nt, Artificial Sequence
  Description of Artificial Sequence: Synthetic oligonucleotide
uaaccaugcgucugucuaa

SEQ ID NO: 1313525 - RNA, 19 nt, Artificial Sequence
  Description of Artificial Sequence: Synthetic oligonucleotide
acuugccccuuaaccaugc

SEQ ID NO: 1313526 - RNA, 19 nt, Artificial Sequence
  Description of Artificial Sequence: Synthetic oligonucleotide
cugaaagccuauucuguga

SEQ ID NO: 1313527 - RNA, 19 nt, Artificial Sequence
  Description of Artificial Sequence: Synthetic oligonucleotide
ccaugucgcacgcugaucc

SEQ ID NO: 1313528 - RNA, 19 nt, Artificial Sequence
  Description of Artificial Sequence: Synthetic oligonucleotide
accaaccgacuguuaaaug

SEQ ID NO: 1313529 - RNA, 19 nt, Artificial Sequence
  Description of Artificial Sequence: Synthetic oligonucleotide
gaccaaguggggaggcugg

SEQ ID NO: 1313530 - RNA, 19 nt, Artificial Sequence
  Description of Artificial Sequence: Synthetic oligonucleotide
cagagaccccuauuaggag

SEQ ID NO: 1313531 - RNA, 19 nt, Artificial Sequence
  Description of Artificial Sequence: Synthetic oligonucleotide
  modified_base (6)..(6): a, c, u, g, unknown or other
acuuanccuuuaagaaauc

SEQ ID NO: 1313532 - RNA, 19 nt, Artificial Sequence
  Description of Artificial Sequence: Synthetic oligonucleotide
agacgaguuuggcugaaua

SEQ ID NO: 1313533 - RNA, 19 nt, Artificial Sequence
  Description of Artificial Sequence: Synthetic oligonucleotide
acuacaccaaggucacuaa

SEQ ID NO: 1313534 - RNA, 19 nt, Artificial Sequence
  Description of Artificial Sequence: Synthetic oligonucleotide
cuauuagagaaacuggauu

SEQ ID NO: 1313535 - RNA, 19 nt, Artificial Sequence
  Description of Artificial Sequence: Synthetic oligonucleotide
uugacagauggggaaccga

SEQ ID NO: 1313536 - RNA, 19 nt, Artificial Sequence
  Description of Artificial Sequence: Synthetic oligonucleotide
ucauugcucugcucucucu

SEQ ID NO: 1313537 - RNA, 19 nt, Artificial Sequence
  Description of Artificial Sequence: Synthetic oligonucleotide
augccucacacaacacccc

SEQ ID NO: 1313538 - RNA, 19 nt, Artificial Sequence
  Description of Artificial Sequence: Synthetic oligonucleotide
uacaagguaugaccugcuu

SEQ ID NO: 1313539 - RNA, 19 nt, Artificial Sequence
  Description of Artificial Sequence: Synthetic oligonucleotide
uguuuucacccuccuucau

SEQ ID NO: 1313540 - RNA, 19 nt, Artificial Sequence
  Description of Artificial Sequence: Synthetic oligonucleotide
augucgcacgcugauccac

SEQ ID NO: 1313541 - RNA, 19 nt, Artificial Sequence
  Description of Artificial Sequence: Synthetic oligonucleotide
cuguaaugccucacacaac

SEQ ID NO: 1313542 - RNA, 19 nt, Artificial Sequence
  Description of Artificial Sequence: Synthetic oligonucleotide
aaggagucaucagcucuca

SEQ ID NO: 1313543 - RNA, 19 nt, Artificial Sequence
  Description of Artificial Sequence: Synthetic oligonucleotide
acagugauaagcacauguu

SEQ ID NO: 1313544 - RNA, 19 nt, Artificial Sequence
  Description of Artificial Sequence: Synthetic oligonucleotide
guucccaaguauugugcuc

SEQ ID NO: 1313545 - RNA, 19 nt, Artificial Sequence
  Description of Artificial Sequence: Synthetic oligonucleotide
acaccuggcuacaagguau

SEQ ID NO: 1313546 - RNA, 19 nt, Artificial Sequence
  Description of Artificial Sequence: Synthetic oligonucleotide
augcgucugucuaacaccu

SEQ ID NO: 1313547 - RNA, 19 nt, Artificial Sequence
  Description of Artificial Sequence: Synthetic oligonucleotide
uguugccccaaugaucuuu

SEQ ID NO: 1313548 - RNA, 19 nt, Artificial Sequence
  Description of Artificial Sequence: Synthetic oligonucleotide
uugugcuuuuagggguggg

SEQ ID NO: 1313549 - RNA, 19 nt, Artificial Sequence
  Description of Artificial Sequence: Synthetic oligonucleotide
aacccagccucuacagucu

SEQ ID NO: 1313550 - RNA, 19 nt, Artificial Sequence
  Description of Artificial Sequence: Synthetic oligonucleotide
acgucagucucucuucaua

SEQ ID NO: 1313551 - RNA, 19 nt, Artificial Sequence
  Description of Artificial Sequence: Synthetic oligonucleotide
acuguuaaaugcacauaaa

SEQ ID NO: 1313552 - RNA, 19 nt, Artificial Sequence
  Description of Artificial Sequence: Synthetic oligonucleotide
uacuccacuugccccuuaa

SEQ ID NO: 1313553 - RNA, 19 nt, Artificial Sequence
  Description of Artificial Sequence: Synthetic oligonucleotide
gccucgagcgauaucauug

SEQ ID NO: 1313554 - RNA, 19 nt, Artificial Sequence
  Description of Artificial Sequence: Synthetic oligonucleotide
ccccaaugaucuuuucugg

SEQ ID NO: 1313555 - RNA, 19 nt, Artificial Sequence
  Description of Artificial Sequence: Synthetic oligonucleotide
ccaaacuuggaaacagcuc

SEQ ID NO: 1313556 - RNA, 19 nt, Artificial Sequence
  Description of Artificial Sequence: Synthetic oligonucleotide
gaaacgcaacuaacccgcc

SEQ ID NO: 1313557 - RNA, 19 nt, Artificial Sequence
  Description of Artificial Sequence: Synthetic oligonucleotide
cuaucacaauuuguggaca

SEQ ID NO: 1313558 - RNA, 19 nt, Artificial Sequence
  Description of Artificial Sequence: Synthetic oligonucleotide
uguugacucaaggcauccu

SEQ ID NO: 1313559 - RNA, 19 nt, Artificial Sequence
  Description of Artificial Sequence: Synthetic oligonucleotide
gaucagccuuaagaccaag

SEQ ID NO: 1313560 - RNA, 19 nt, Artificial Sequence
  Description of Artificial Sequence: Synthetic oligonucleotide
auggauguguaggaaugaa

SEQ ID NO: 1313561 - RNA, 19 nt, Artificial Sequence
  Description of Artificial Sequence: Synthetic oligonucleotide
cuaacaccuuuuccaccac

SEQ ID NO: 1313562 - RNA, 19 nt, Artificial Sequence
  Description of Artificial Sequence: Synthetic oligonucleotide
caggcaacuccaaaggagu

SEQ ID NO: 1313563 - RNA, 19 nt, Artificial Sequence
  Description of Artificial Sequence: Synthetic oligonucleotide
ggacaauccaaguucuucu

SEQ ID NO: 1313564 - RNA, 19 nt, Artificial Sequence
  Description of Artificial Sequence: Synthetic oligonucleotide
gcaaccaaccgacuguuaa

SEQ ID NO: 1313565 - RNA, 19 nt, Artificial Sequence
  Description of Artificial Sequence: Synthetic oligonucleotide
caugccacgucagucucuc

SEQ ID NO: 1313566 - RNA, 19 nt, Artificial Sequence
  Description of Artificial Sequence: Synthetic oligonucleotide
cacuugccccuuaaccaug

SEQ ID NO: 1313567 - RNA, 19 nt, Artificial Sequence
  Description of Artificial Sequence: Synthetic oligonucleotide
gucggcuucaucugugucu

SEQ ID NO: 1313568 - RNA, 19 nt, Artificial Sequence
  Description of Artificial Sequence: Synthetic oligonucleotide
ggagcacagugauaagcac

SEQ ID NO: 1313569 - RNA, 19 nt, Artificial Sequence
  Description of Artificial Sequence: Synthetic oligonucleotide
ccaugcgucugucuaacac

SEQ ID NO: 1313570 - RNA, 19 nt, Artificial Sequence
  Description of Artificial Sequence: Synthetic oligonucleotide
ugagggcaaccaaccgacu

SEQ ID NO: 1313571 - RNA, 19 nt, Artificial Sequence
  Description of Artificial Sequence: Synthetic oligonucleotide
cuugccccuuaaccaugcg

SEQ ID NO: 1313572 - RNA, 19 nt, Artificial Sequence
  Description of Artificial Sequence: Synthetic oligonucleotide
  modified_base (8)..(8): a, c, u, g, unknown or other
ccacuuanccuuuaagaaa

SEQ ID NO: 1313573 - RNA, 19 nt, Artificial Sequence
  Description of Artificial Sequence: Synthetic oligonucleotide
ccucgagcgauaucauugc

SEQ ID NO: 1313574 - RNA, 19 nt, Artificial Sequence
  Description of Artificial Sequence: Synthetic oligonucleotide
caaccaaccgacuguuaaa

SEQ ID NO: 1313575 - RNA, 19 nt, Artificial Sequence
  Description of Artificial Sequence: Synthetic oligonucleotide
guucaggacaauccaaguu

SEQ ID NO: 1313576 - RNA, 19 nt, Artificial Sequence
  Description of Artificial Sequence: Synthetic oligonucleotide
ucccaaguauugugcuccu

SEQ ID NO: 1313577 - RNA, 19 nt, Artificial Sequence
  Description of Artificial Sequence: Synthetic oligonucleotide
auucagacaccuggcuaca

SEQ ID NO: 1313578 - RNA, 19 nt, Artificial Sequence
  Description of Artificial Sequence: Synthetic oligonucleotide
gaucuacagugaccacuca

SEQ ID NO: 1313579 - RNA, 19 nt, Artificial Sequence
  Description of Artificial Sequence: Synthetic oligonucleotide
guaaugccucacacaacac

SEQ ID NO: 1313580 - RNA, 19 nt, Artificial Sequence
  Description of Artificial Sequence: Synthetic oligonucleotide
aggucggcuucaucugugu

SEQ ID NO: 1313581 - RNA, 19 nt, Artificial Sequence
  Description of Artificial Sequence: Synthetic oligonucleotide
accgagguucccgggaucu

SEQ ID NO: 1313582 - RNA, 19 nt, Artificial Sequence
  Description of Artificial Sequence: Synthetic oligonucleotide
gaacugucagcuguccucu

SEQ ID NO: 1313583 - RNA, 19 nt, Artificial Sequence
  Description of Artificial Sequence: Synthetic oligonucleotide
uggggaaccgaggcauuga

SEQ ID NO: 1313584 - RNA, 19 nt, Artificial Sequence
  Description of Artificial Sequence: Synthetic oligonucleotide
augacucuuuggagcacag

SEQ ID NO: 1313585 - RNA, 19 nt, Artificial Sequence
  Description of Artificial Sequence: Synthetic oligonucleotide
ucgcacgcugauccaccug

SEQ ID NO: 1313586 - RNA, 19 nt, Artificial Sequence
  Description of Artificial Sequence: Synthetic oligonucleotide
accgacuguuaaaugcaca

SEQ ID NO: 1313587 - RNA, 19 nt, Artificial Sequence
  Description of Artificial Sequence: Synthetic oligonucleotide
ugacucuuuggagcacagu

SEQ ID NO: 1313588 - RNA, 19 nt, Artificial Sequence
  Description of Artificial Sequence: Synthetic oligonucleotide
ugccagaaccaggucggcu

SEQ ID NO: 1313589 - RNA, 19 nt, Artificial Sequence
  Description of Artificial Sequence: Synthetic oligonucleotide
cccuauuaggagcagagua

SEQ ID NO: 1313590 - RNA, 19 nt, Artificial Sequence
  Description of Artificial Sequence: Synthetic oligonucleotide
aucacaauuuguggacauu

SEQ ID NO: 1313591 - RNA, 19 nt, Artificial Sequence
  Description of Artificial Sequence: Synthetic oligonucleotide
cuggauaugcaugccacgu

SEQ ID NO: 1313592 - RNA, 19 nt, Artificial Sequence
  Description of Artificial Sequence: Synthetic oligonucleotide
ggucaguguuaucacccca

SEQ ID NO: 1313593 - RNA, 19 nt, Artificial Sequence
  Description of Artificial Sequence: Synthetic oligonucleotide
uggcuacuacuuggcagga

SEQ ID NO: 1313594 - RNA, 19 nt, Artificial Sequence
  Description of Artificial Sequence: Synthetic oligonucleotide
ggcaacuccaaaggaguca

SEQ ID NO: 1313595 - RNA, 19 nt, Artificial Sequence
  Description of Artificial Sequence: Synthetic oligonucleotide
ggcaacugcuggcuacuac

SEQ ID NO: 1313596 - RNA, 19 nt, Artificial Sequence
  Description of Artificial Sequence: Synthetic oligonucleotide
agccucgagcgauaucauu

SEQ ID NO: 1313597 - RNA, 19 nt, Artificial Sequence
  Description of Artificial Sequence: Synthetic oligonucleotide
cuuaaccaugcgucugucu

SEQ ID NO: 1313598 - RNA, 19 nt, Artificial Sequence
  Description of Artificial Sequence: Synthetic oligonucleotide
gguucccaaguauugugcu

SEQ ID NO: 1313599 - RNA, 19 nt, Artificial Sequence
  Description of Artificial Sequence: Synthetic oligonucleotide
caugucgcacgcugaucca

SEQ ID NO: 1313600 - RNA, 19 nt, Artificial Sequence
  Description of Artificial Sequence: Synthetic oligonucleotide
augagguaggucaguguua

SEQ ID NO: 1313601 - RNA, 19 nt, Artificial Sequence
  Description of Artificial Sequence: Synthetic oligonucleotide
gguggacguauuauauaca

SEQ ID NO: 1313602 - RNA, 19 nt, Artificial Sequence
  Description of Artificial Sequence: Synthetic oligonucleotide
cccauuugacagaugggga

SEQ ID NO: 1313603 - RNA, 19 nt, Artificial Sequence
  Description of Artificial Sequence: Synthetic oligonucleotide
ggaaagacuugcccaagau

SEQ ID NO: 1313604 - RNA, 19 nt, Artificial Sequence
  Description of Artificial Sequence: Synthetic oligonucleotide
ggacuaaggccaccgaggu

SEQ ID NO: 1313605 - RNA, 19 nt, Artificial Sequence
  Description of Artificial Sequence: Synthetic oligonucleotide
uuucacccuccuucaucuu

SEQ ID NO: 1313606 - RNA, 19 nt, Artificial Sequence
  Description of Artificial Sequence: Synthetic oligonucleotide
gggaucuacagugaccacu

SEQ ID NO: 1313607 - RNA, 19 nt, Artificial Sequence
  Description of Artificial Sequence: Synthetic oligonucleotide
aagccucgagcgauaucau

SEQ ID NO: 1313608 - RNA, 19 nt, Artificial Sequence
  Description of Artificial Sequence: Synthetic oligonucleotide
cuacuacuuggcaggacau

SEQ ID NO: 1313609 - RNA, 19 nt, Artificial Sequence
  Description of Artificial Sequence: Synthetic oligonucleotide
cuacaagguaugaccugcu

SEQ ID NO: 1313610 - RNA, 19 nt, Artificial Sequence
  Description of Artificial Sequence: Synthetic oligonucleotide
ugcgucugucuaacaccuu

SEQ ID NO: 1313611 - RNA, 19 nt, Artificial Sequence
  Description of Artificial Sequence: Synthetic oligonucleotide
gaacuggagugugggccuc

SEQ ID NO: 1313612 - RNA, 19 nt, Artificial Sequence
  Description of Artificial Sequence: Synthetic oligonucleotide
ggagcagaguacaccuaac

SEQ ID NO: 1313613 - RNA, 19 nt, Artificial Sequence
  Description of Artificial Sequence: Synthetic oligonucleotide
aggggagccaggaccuugu

SEQ ID NO: 1313614 - RNA, 19 nt, Artificial Sequence
  Description of Artificial Sequence: Synthetic oligonucleotide
cgaguuuggcugaauaaaa

SEQ ID NO: 1313615 - RNA, 19 nt, Artificial Sequence
  Description of Artificial Sequence: Synthetic oligonucleotide
agaccccuauuaggagcag

SEQ ID NO: 1313616 - RNA, 19 nt, Artificial Sequence
  Description of Artificial Sequence: Synthetic oligonucleotide
cgagcgauaucauugcucu

SEQ ID NO: 1313617 - RNA, 19 nt, Artificial Sequence
  Description of Artificial Sequence: Synthetic oligonucleotide
  modified_base (13)..(13): a, c, u, g, unknown or other
auagaccacuuanccuuua

SEQ ID NO: 1313618 - RNA, 19 nt, Artificial Sequence
  Description of Artificial Sequence: Synthetic oligonucleotide
aggcccacagagauucaau

SEQ ID NO: 1313619 - RNA, 19 nt, Artificial Sequence
  Description of Artificial Sequence: Synthetic oligonucleotide
cgcugauccaccugaagga

SEQ ID NO: 1313620 - RNA, 19 nt, Artificial Sequence
  Description of Artificial Sequence: Synthetic oligonucleotide
ggucggcuucaucuguguc

SEQ ID NO: 1313621 - RNA, 19 nt, Artificial Sequence
  Description of Artificial Sequence: Synthetic oligonucleotide
ggggaaccgaggcauugaa

SEQ ID NO: 1313622 - RNA, 19 nt, Artificial Sequence
  Description of Artificial Sequence: Synthetic oligonucleotide
gccagaugagggcaaccaa

SEQ ID NO: 1313623 - RNA, 19 nt, Artificial Sequence
  Description of Artificial Sequence: Synthetic oligonucleotide
caccgagguucccgggauc

SEQ ID NO: 1313624 - RNA, 19 nt, Artificial Sequence
  Description of Artificial Sequence: Synthetic oligonucleotide
auacuccacuugccccuua

SEQ ID NO: 1313625 - RNA, 19 nt, Artificial Sequence
  Description of Artificial Sequence: Synthetic oligonucleotide
ccuacucagaauggcacaa

SEQ ID NO: 1313626 - RNA, 19 nt, Artificial Sequence
  Description of Artificial Sequence: Synthetic oligonucleotide
cucgagcgauaucauugcu

SEQ ID NO: 1313627 - RNA, 19 nt, Artificial Sequence
  Description of Artificial Sequence: Synthetic oligonucleotide
gccaccgagguucccggga

SEQ ID NO: 1313628 - RNA, 19 nt, Artificial Sequence
  Description of Artificial Sequence: Synthetic oligonucleotide
gacuaaggccaccgagguu

SEQ ID NO: 1313629 - RNA, 19 nt, Artificial Sequence
  Description of Artificial Sequence: Synthetic oligonucleotide
gcaacuccaaaggagucau

SEQ ID NO: 1313630 - RNA, 19 nt, Artificial Sequence
  Description of Artificial Sequence: Synthetic oligonucleotide
gucgcacgcugauccaccu

SEQ ID NO: 1313631 - RNA, 19 nt, Artificial Sequence
  Description of Artificial Sequence: Synthetic oligonucleotide
guugccccaaugaucuuuu

SEQ ID NO: 1313632 - RNA, 19 nt, Artificial Sequence
  Description of Artificial Sequence: Synthetic oligonucleotide
ccuuaaccaugcgucuguc

SEQ ID NO: 1313633 - RNA, 19 nt, Artificial Sequence
  Description of Artificial Sequence: Synthetic oligonucleotide
gcaugacucuuuggagcac

SEQ ID NO: 1313634 - RNA, 19 nt, Artificial Sequence
  Description of Artificial Sequence: Synthetic oligonucleotide
gggaaccgaggcauugaaa

SEQ ID NO: 1313635 - RNA, 19 nt, Artificial Sequence
  Description of Artificial Sequence: Synthetic oligonucleotide
ccacgucagucucucuuca

SEQ ID NO: 1313636 - RNA, 19 nt, Artificial Sequence
  Description of Artificial Sequence: Synthetic oligonucleotide
cagugacagcuaaaauguu

SEQ ID NO: 1313637 - RNA, 19 nt, Artificial Sequence
  Description of Artificial Sequence: Synthetic oligonucleotide
gccuauucugugagaaggu

SEQ ID NO: 1313638 - RNA, 19 nt, Artificial Sequence
  Description of Artificial Sequence: Synthetic oligonucleotide
cuacucagaauggcacaau

SEQ ID NO: 1313639 - RNA, 19 nt, Artificial Sequence
  Description of Artificial Sequence: Synthetic oligonucleotide
aggcaacugcuggcuacua

SEQ ID NO: 1313640 - RNA, 19 nt, Artificial Sequence
  Description of Artificial Sequence: Synthetic oligonucleotide
cacgucagucucucuucau

SEQ ID NO: 1313641 - RNA, 19 nt, Artificial Sequence
  Description of Artificial Sequence: Synthetic oligonucleotide
gauggggaaccgaggcauu

SEQ ID NO: 1313642 - RNA, 19 nt, Artificial Sequence
  Description of Artificial Sequence: Synthetic oligonucleotide
gccccuuaaccaugcgucu

SEQ ID NO: 1313643 - RNA, 19 nt, Artificial Sequence
  Description of Artificial Sequence: Synthetic oligonucleotide
ccacuugccccuuaaccau

SEQ ID NO: 1313644 - RNA, 19 nt, Artificial Sequence
  Description of Artificial Sequence: Synthetic oligonucleotide
ccgaggcauugaaaggaaa

SEQ ID NO: 1313645 - RNA, 19 nt, Artificial Sequence
  Description of Artificial Sequence: Synthetic oligonucleotide
cccaaguauugugcuccuc

SEQ ID NO: 1313646 - RNA, 19 nt, Artificial Sequence
  Description of Artificial Sequence: Synthetic oligonucleotide
cccaugucgcacgcugauc

SEQ ID NO: 1313647 - RNA, 19 nt, Artificial Sequence
  Description of Artificial Sequence: Synthetic oligonucleotide
ccaaguggggaggcuggca

SEQ ID NO: 1313648 - RNA, 19 nt, Artificial Sequence
  Description of Artificial Sequence: Synthetic oligonucleotide
ggcaaccaaccgacuguua

SEQ ID NO: 1313649 - RNA, 19 nt, Artificial Sequence
  Description of Artificial Sequence: Synthetic oligonucleotide
gggcaaccaaccgacuguu

SEQ ID NO: 1313650 - RNA, 19 nt, Artificial Sequence
  Description of Artificial Sequence: Synthetic oligonucleotide
cagacgaguuuggcugaau

SEQ ID NO: 1313651 - RNA, 19 nt, Artificial Sequence
  Description of Artificial Sequence: Synthetic oligonucleotide
gcaugccacgucagucucu

SEQ ID NO: 1313652 - RNA, 19 nt, Artificial Sequence
  Description of Artificial Sequence: Synthetic oligonucleotide
cuguugccccaaugaucuu

SEQ ID NO: 1313653 - RNA, 19 nt, Artificial Sequence
  Description of Artificial Sequence: Synthetic oligonucleotide
ccgagguucccgggaucua

SEQ ID NO: 1313654 - RNA, 19 nt, Artificial Sequence
  Description of Artificial Sequence: Synthetic oligonucleotide
  modified_base (5)..(5): a, c, u, g, unknown or other
uuugngaucagaaagaaga

SEQ ID NO: 1313655 - RNA, 19 nt, Artificial Sequence
  Description of Artificial Sequence: Synthetic oligonucleotide
aauagucgggccuggaugc

SEQ ID NO: 1313656 - RNA, 19 nt, Artificial Sequence
  Description of Artificial Sequence: Synthetic oligonucleotide
aacaugaugucauacuugu

SEQ ID NO: 1313657 - RNA, 19 nt, Artificial Sequence
  Description of Artificial Sequence: Synthetic oligonucleotide
aaauuggcagccucuuccc

SEQ ID NO: 1313658 - RNA, 19 nt, Artificial Sequence
  Description of Artificial Sequence: Synthetic oligonucleotide
agauagaacuccuugcagg

SEQ ID NO: 1313659 - RNA, 19 nt, Artificial Sequence
  Description of Artificial Sequence: Synthetic oligonucleotide
aagacagugaccaccuucc

SEQ ID NO: 1313660 - RNA, 19 nt, Artificial Sequence
  Description of Artificial Sequence: Synthetic oligonucleotide
aaauagucgggccuggaug

SEQ ID NO: 1313661 - RNA, 19 nt, Artificial Sequence
  Description of Artificial Sequence: Synthetic oligonucleotide
gaaauuggcagccucuucc

SEQ ID NO: 1313662 - RNA, 19 nt, Artificial Sequence
  Description of Artificial Sequence: Synthetic oligonucleotide
acagugaccaccuuccgcg

SEQ ID NO: 1313663 - RNA, 19 nt, Artificial Sequence
  Description of Artificial Sequence: Synthetic oligonucleotide
uuaugucccgugaagacag

SEQ ID NO: 1313664 - RNA, 19 nt, Artificial Sequence
  Description of Artificial Sequence: Synthetic oligonucleotide
ugagagauagaacuccuug

SEQ ID NO: 1313665 - RNA, 19 nt, Artificial Sequence
  Description of Artificial Sequence: Synthetic oligonucleotide
auguggaacagccuugugg

SEQ ID NO: 1313666 - RNA, 19 nt, Artificial Sequence
  Description of Artificial Sequence: Synthetic oligonucleotide
auuucugugaggaccaggc

SEQ ID NO: 1313667 - RNA, 19 nt, Artificial Sequence
  Description of Artificial Sequence: Synthetic oligonucleotide
ugcaccgucauucaccacc

SEQ ID NO: 1313668 - RNA, 19 nt, Artificial Sequence
  Description of Artificial Sequence: Synthetic oligonucleotide
gaagaugucacuggaggcg

SEQ ID NO: 1313669 - RNA, 19 nt, Artificial Sequence
  Description of Artificial Sequence: Synthetic oligonucleotide
uggacuaucagguccauuc

SEQ ID NO: 1313670 - RNA, 19 nt, Artificial Sequence
  Description of Artificial Sequence: Synthetic oligonucleotide
  modified_base (6)..(6): a, c, u, g, unknown or other
uuuugngaucagaaagaag

SEQ ID NO: 1313671 - RNA, 19 nt, Artificial Sequence
  Description of Artificial Sequence: Synthetic oligonucleotide
agucgcuggacauuguacg

SEQ ID NO: 1313672 - RNA, 19 nt, Artificial Sequence
  Description of Artificial Sequence: Synthetic oligonucleotide
uggagcacucaaauagucg

SEQ ID NO: 1313673 - RNA, 19 nt, Artificial Sequence
  Description of Artificial Sequence: Synthetic oligonucleotide
uugugguggaaauuggcag

SEQ ID NO: 1313674 - RNA, 19 nt, Artificial Sequence
  Description of Artificial Sequence: Synthetic oligonucleotide
gauagcagccuucaucuug

SEQ ID NO: 1313675 - RNA, 19 nt, Artificial Sequence
  Description of Artificial Sequence: Synthetic oligonucleotide
uugaaagucagagucugag

SEQ ID NO: 1313676 - RNA, 19 nt, Artificial Sequence
  Description of Artificial Sequence: Synthetic oligonucleotide
ugguguaccagccuuuccc

SEQ ID NO: 1313677 - RNA, 19 nt, Artificial Sequence
  Description of Artificial Sequence: Synthetic oligonucleotide
uagaacuccuugcaggcag

SEQ ID NO: 1313678 - RNA, 19 nt, Artificial Sequence
  Description of Artificial Sequence: Synthetic oligonucleotide
gagagauagaacuccuugc

SEQ ID NO: 1313679 - RNA, 19 nt, Artificial Sequence
  Description of Artificial Sequence: Synthetic oligonucleotide
uuuccgauccaguagugca

SEQ ID NO: 1313680 - RNA, 19 nt, Artificial Sequence
  Description of Artificial Sequence: Synthetic oligonucleotide
ugguccaggagauagcagc

SEQ ID NO: 1313681 - RNA, 19 nt, Artificial Sequence
  Description of Artificial Sequence: Synthetic oligonucleotide
ggagcacucaaauagucgg

SEQ ID NO: 1313682 - RNA, 19 nt, Artificial Sequence
  Description of Artificial Sequence: Synthetic oligonucleotide
aaggcgguggacucugcac

SEQ ID NO: 1313683 - RNA, 19 nt, Artificial Sequence
  Description of Artificial Sequence: Synthetic oligonucleotide
uugccuauguccaguuugg

SEQ ID NO: 1313684 - RNA, 19 nt, Artificial Sequence
  Description of Artificial Sequence: Synthetic oligonucleotide
uaaaucuugaagccacccu

SEQ ID NO: 1313685 - RNA, 19 nt, Artificial Sequence
  Description of Artificial Sequence: Synthetic oligonucleotide
agguccauucccuucucgc

SEQ ID NO: 1313686 - RNA, 19 nt, Artificial Sequence
  Description of Artificial Sequence: Synthetic oligonucleotide
acgguuuccauguuauguc

SEQ ID NO: 1313687 - RNA, 19 nt, Artificial Sequence
  Description of Artificial Sequence: Synthetic oligonucleotide
caugguuuggguguugugg

SEQ ID NO: 1313688 - RNA, 19 nt, Artificial Sequence
  Description of Artificial Sequence: Synthetic oligonucleotide
agacacaugcuuccuuccc

SEQ ID NO: 1313689 - RNA, 19 nt, Artificial Sequence
  Description of Artificial Sequence: Synthetic oligonucleotide
guagaugacucccgggugg

SEQ ID NO: 1313690 - RNA, 19 nt, Artificial Sequence
  Description of Artificial Sequence: Synthetic oligonucleotide
gcagccuucaucuugcagg

SEQ ID NO: 1313691 - RNA, 19 nt, Artificial Sequence
  Description of Artificial Sequence: Synthetic oligonucleotide
  modified_base (3)..(3): a, c, u, g, unknown or other
ugngaucagaaagaagaug

SEQ ID NO: 1313692 - RNA, 19 nt, Artificial Sequence
  Description of Artificial Sequence: Synthetic oligonucleotide
cuugccuauguccaguuug

SEQ ID NO: 1313693 - RNA, 19 nt, Artificial Sequence
  Description of Artificial Sequence: Synthetic oligonucleotide
ucuuggacuaucaggucca

SEQ ID NO: 1313694 - RNA, 19 nt, Artificial Sequence
  Description of Artificial Sequence: Synthetic oligonucleotide
uguuaugucccgugaagac

SEQ ID NO: 1313695 - RNA, 19 nt, Artificial Sequence
  Description of Artificial Sequence: Synthetic oligonucleotide
gucuccgugugcuugagag

SEQ ID NO: 1313696 - RNA, 19 nt, Artificial Sequence
  Description of Artificial Sequence: Synthetic oligonucleotide
  modified_base (2)..(2): a, c, u, g, unknown or other
gngaucagaaagaagaugu

SEQ ID NO: 1313697 - RNA, 19 nt, Artificial Sequence
  Description of Artificial Sequence: Synthetic oligonucleotide
ucccuucucgcugacaugg

SEQ ID NO: 1313698 - RNA, 19 nt, Artificial Sequence
  Description of Artificial Sequence: Synthetic oligonucleotide
auagcagccuucaucuugc

SEQ ID NO: 1313699 - RNA, 19 nt, Artificial Sequence
  Description of Artificial Sequence: Synthetic oligonucleotide
guuuccauguuaugucccg

SEQ ID NO: 1313700 - RNA, 19 nt, Artificial Sequence
  Description of Artificial Sequence: Synthetic oligonucleotide
uucccaucuagcuccuucg

SEQ ID NO: 1313701 - RNA, 19 nt, Artificial Sequence
  Description of Artificial Sequence: Synthetic oligonucleotide
uguaaaucuugaagccacc

SEQ ID NO: 1313702 - RNA, 19 nt, Artificial Sequence
  Description of Artificial Sequence: Synthetic oligonucleotide
uccugggaaucccuggagg

SEQ ID NO: 1313703 - RNA, 19 nt, Artificial Sequence
  Description of Artificial Sequence: Synthetic oligonucleotide
cauguuaugucccgugaag

SEQ ID NO: 1313704 - RNA, 19 nt, Artificial Sequence
  Description of Artificial Sequence: Synthetic oligonucleotide
uggacuuucgucccugcca

SEQ ID NO: 1313705 - RNA, 19 nt, Artificial Sequence
  Description of Artificial Sequence: Synthetic oligonucleotide
uccuuuccgauccaguagu

SEQ ID NO: 1313706 - RNA, 19 nt, Artificial Sequence
  Description of Artificial Sequence: Synthetic oligonucleotide
uccuguagaugacucccgg

SEQ ID NO: 1313707 - RNA, 19 nt, Artificial Sequence
  Description of Artificial Sequence: Synthetic oligonucleotide
aggcgguggacucugcacc

SEQ ID NO: 1313708 - RNA, 19 nt, Artificial Sequence
  Description of Artificial Sequence: Synthetic oligonucleotide
cuucucgcugacaugguag

SEQ ID NO: 1313709 - RNA, 19 nt, Artificial Sequence
  Description of Artificial Sequence: Synthetic oligonucleotide
  modified_base (4)..(4): a, c, u, g, unknown or other
uugngaucagaaagaagau

SEQ ID NO: 1313710 - RNA, 19 nt, Artificial Sequence
  Description of Artificial Sequence: Synthetic oligonucleotide
guuuggguagcccuuggcc

SEQ ID NO: 1313711 - RNA, 19 nt, Artificial Sequence
  Description of Artificial Sequence: Synthetic oligonucleotide
ggaccaggcagccugaagg

SEQ ID NO: 1313712 - RNA, 19 nt, Artificial Sequence
  Description of Artificial Sequence: Synthetic oligonucleotide
uggacauuguacgcguugg

SEQ ID NO: 1313713 - RNA, 19 nt, Artificial Sequence
  Description of Artificial Sequence: Synthetic oligonucleotide
gacuaucagguccauuccc

SEQ ID NO: 1313714 - RNA, 19 nt, Artificial Sequence
  Description of Artificial Sequence: Synthetic oligonucleotide
ugaaagucagagucugaga

SEQ ID NO: 1313715 - RNA, 19 nt, Artificial Sequence
  Description of Artificial Sequence: Synthetic oligonucleotide
ucugcaccgucauucacca

SEQ ID NO: 1313716 - RNA, 19 nt, Artificial Sequence
  Description of Artificial Sequence: Synthetic oligonucleotide
caggugucuaguaacauga

SEQ ID NO: 1313717 - RNA, 19 nt, Artificial Sequence
  Description of Artificial Sequence: Synthetic oligonucleotide
ugauguggaacagucgcug

SEQ ID NO: 1313718 - RNA, 19 nt, Artificial Sequence
  Description of Artificial Sequence: Synthetic oligonucleotide
uucugagcugggcugcuag

SEQ ID NO: 1313719 - RNA, 19 nt, Artificial Sequence
  Description of Artificial Sequence: Synthetic oligonucleotide
uuccuguagaugacucccg

SEQ ID NO: 1313720 - RNA, 19 nt, Artificial Sequence
  Description of Artificial Sequence: Synthetic oligonucleotide
cucugcaccgucauucacc

SEQ ID NO: 1313721 - RNA, 19 nt, Artificial Sequence
  Description of Artificial Sequence: Synthetic oligonucleotide
uuuugcugggguucuugcc

SEQ ID NO: 1313722 - RNA, 19 nt, Artificial Sequence
  Description of Artificial Sequence: Synthetic oligonucleotide
uuggguguuguggcuaucg

SEQ ID NO: 1313723 - RNA, 19 nt, Artificial Sequence
  Description of Artificial Sequence: Synthetic oligonucleotide
ugcauguggaacagccuug

SEQ ID NO: 1313724 - RNA, 19 nt, Artificial Sequence
  Description of Artificial Sequence: Synthetic oligonucleotide
uccauguuaugucccguga

SEQ ID NO: 1313725 - RNA, 19 nt, Artificial Sequence
  Description of Artificial Sequence: Synthetic oligonucleotide
ugcuagcucaggcugggug

SEQ ID NO: 1313726 - RNA, 19 nt, Artificial Sequence
  Description of Artificial Sequence: Synthetic oligonucleotide
gacagugaccaccuuccgc

SEQ ID NO: 1313727 - RNA, 19 nt, Artificial Sequence
  Description of Artificial Sequence: Synthetic oligonucleotide
ugcuuccuuccccugaugu

SEQ ID NO: 1313728 - RNA, 19 nt, Artificial Sequence
  Description of Artificial Sequence: Synthetic oligonucleotide
uccaaguccucuuggcuga

SEQ ID NO: 1313729 - RNA, 19 nt, Artificial Sequence
  Description of Artificial Sequence: Synthetic oligonucleotide
guaaaucuugaagccaccc

SEQ ID NO: 1313730 - RNA, 19 nt, Artificial Sequence
  Description of Artificial Sequence: Synthetic oligonucleotide
uccacguuggugugguuug

SEQ ID NO: 1313731 - RNA, 19 nt, Artificial Sequence
  Description of Artificial Sequence: Synthetic oligonucleotide
uguuguggcuaucggcccc

SEQ ID NO: 1313732 - RNA, 19 nt, Artificial Sequence
  Description of Artificial Sequence: Synthetic oligonucleotide
aguggcagacacaugcuuc

SEQ ID NO: 1313733 - RNA, 19 nt, Artificial Sequence
  Description of Artificial Sequence: Synthetic oligonucleotide
ucccaaaccagagguagcc

SEQ ID NO: 1313734 - RNA, 19 nt, Artificial Sequence
  Description of Artificial Sequence: Synthetic oligonucleotide
uuguccaaguccucuuggc

SEQ ID NO: 1313735 - RNA, 19 nt, Artificial Sequence
  Description of Artificial Sequence: Synthetic oligonucleotide
uucgaccacgucuggaaca

SEQ ID NO: 1313736 - RNA, 19 nt, Artificial Sequence
  Description of Artificial Sequence: Synthetic oligonucleotide
agagccgucauccaccauu

SEQ ID NO: 1313737 - RNA, 19 nt, Artificial Sequence
  Description of Artificial Sequence: Synthetic oligonucleotide
aagaugucacuggaggcga

SEQ ID NO: 1313738 - RNA, 19 nt, Artificial Sequence
  Description of Artificial Sequence: Synthetic oligonucleotide
agagucugagagauagaac

SEQ ID NO: 1313739 - RNA, 19 nt, Artificial Sequence
  Description of Artificial Sequence: Synthetic oligonucleotide
cuuggauuucccgaagaug

SEQ ID NO: 1313740 - RNA, 19 nt, Artificial Sequence
  Description of Artificial Sequence: Synthetic oligonucleotide
gaacagucgcuggacauug

SEQ ID NO: 1313741 - RNA, 19 nt, Artificial Sequence
  Description of Artificial Sequence: Synthetic oligonucleotide
uccuuggauuucccgaaga

SEQ ID NO: 1313742 - RNA, 19 nt, Artificial Sequence
  Description of Artificial Sequence: Synthetic oligonucleotide
guggcuaucggccccuugc

SEQ ID NO: 1313743 - RNA, 19 nt, Artificial Sequence
  Description of Artificial Sequence: Synthetic oligonucleotide
gaugacucccggguggaag

SEQ ID NO: 1313744 - RNA, 19 nt, Artificial Sequence
  Description of Artificial Sequence: Synthetic oligonucleotide
uacgcguuggucuccgugu

SEQ ID NO: 1313745 - RNA, 19 nt, Artificial Sequence
  Description of Artificial Sequence: Synthetic oligonucleotide
agccuugugguggaaauug

SEQ ID NO: 1313746 - RNA, 19 nt, Artificial Sequence
  Description of Artificial Sequence: Synthetic oligonucleotide
gaacaacugcuggaaggcg

SEQ ID NO: 1313747 - RNA, 19 nt, Artificial Sequence
  Description of Artificial Sequence: Synthetic oligonucleotide
cacaaaggugacuguggcc

SEQ ID NO: 1313748 - RNA, 19 nt, Artificial Sequence
  Description of Artificial Sequence: Synthetic oligonucleotide
ucgcuggacauuguacgcg

SEQ ID NO: 1313749 - RNA, 19 nt, Artificial Sequence
  Description of Artificial Sequence: Synthetic oligonucleotide
cagauccuccuguaggcgc

SEQ ID NO: 1313750 - RNA, 19 nt, Artificial Sequence
  Description of Artificial Sequence: Synthetic oligonucleotide
agggaggaagcacgggccg

SEQ ID NO: 1313751 - RNA, 19 nt, Artificial Sequence
  Description of Artificial Sequence: Synthetic oligonucleotide
cauuguacgcguuggucuc

SEQ ID NO: 1313752 - RNA, 19 nt, Artificial Sequence
  Description of Artificial Sequence: Synthetic oligonucleotide
uucucgcugacaugguaga

SEQ ID NO: 1313753 - RNA, 19 nt, Artificial Sequence
  Description of Artificial Sequence: Synthetic oligonucleotide
gguguaccagccuuucccg

SEQ ID NO: 1313754 - RNA, 19 nt, Artificial Sequence
  Description of Artificial Sequence: Synthetic oligonucleotide
gaugucacuggaggcgagg

SEQ ID NO: 1313755 - RNA, 19 nt, Artificial Sequence
  Description of Artificial Sequence: Synthetic oligonucleotide
uuucccgaagaugucuuga

SEQ ID NO: 1313756 - RNA, 19 nt, Artificial Sequence
  Description of Artificial Sequence: Synthetic oligonucleotide
ucuugaagccacccugguc

SEQ ID NO: 1313757 - RNA, 19 nt, Artificial Sequence
  Description of Artificial Sequence: Synthetic oligonucleotide
ccaucuagcuccuucgacc

SEQ ID NO: 1313758 - RNA, 19 nt, Artificial Sequence
  Description of Artificial Sequence: Synthetic oligonucleotide
ugacuguggccccaugggu

SEQ ID NO: 1313759 - RNA, 19 nt, Artificial Sequence
  Description of Artificial Sequence: Synthetic oligonucleotide
acucaaauagucgggccug

SEQ ID NO: 1313760 - RNA, 19 nt, Artificial Sequence
  Description of Artificial Sequence: Synthetic oligonucleotide
auuguacgcguuggucucc

SEQ ID NO: 1313761 - RNA, 19 nt, Artificial Sequence
  Description of Artificial Sequence: Synthetic oligonucleotide
cuggagcacucaaauaguc

SEQ ID NO: 1313762 - RNA, 19 nt, Artificial Sequence
  Description of Artificial Sequence: Synthetic oligonucleotide
auguuaugucccgugaaga

SEQ ID NO: 1313763 - RNA, 19 nt, Artificial Sequence
  Description of Artificial Sequence: Synthetic oligonucleotide
cuugagagcagaggcucgg

SEQ ID NO: 1313764 - RNA, 19 nt, Artificial Sequence
  Description of Artificial Sequence: Synthetic oligonucleotide
uccauucccuucucgcuga

SEQ ID NO: 1313765 - RNA, 19 nt, Artificial Sequence
  Description of Artificial Sequence: Synthetic oligonucleotide
ugguuuggguagcccuugg

SEQ ID NO: 1313766 - RNA, 19 nt, Artificial Sequence
  Description of Artificial Sequence: Synthetic oligonucleotide
ugggugugcagcuugccua

SEQ ID NO: 1313767 - RNA, 19 nt, Artificial Sequence
  Description of Artificial Sequence: Synthetic oligonucleotide
ggaacaacugcuggaaggc

SEQ ID NO: 1313768 - RNA, 19 nt, Artificial Sequence
  Description of Artificial Sequence: Synthetic oligonucleotide
auuucccgaagaugucuug

SEQ ID NO: 1313769 - RNA, 19 nt, Artificial Sequence
  Description of Artificial Sequence: Synthetic oligonucleotide
ugugguuuggguagcccuu

SEQ ID NO: 1313770 - RNA, 19 nt, Artificial Sequence
  Description of Artificial Sequence: Synthetic oligonucleotide
acuaucagguccauucccu

SEQ ID NO: 1313771 - RNA, 19 nt, Artificial Sequence
  Description of Artificial Sequence: Synthetic oligonucleotide
guuaugucccgugaagaca

SEQ ID NO: 1313772 - RNA, 19 nt, Artificial Sequence
  Description of Artificial Sequence: Synthetic oligonucleotide
gucgcuggacauuguacgc

SEQ ID NO: 1313773 - RNA, 19 nt, Artificial Sequence
  Description of Artificial Sequence: Synthetic oligonucleotide
ucggccucccuuccuguag

SEQ ID NO: 1313774 - RNA, 19 nt, Artificial Sequence
  Description of Artificial Sequence: Synthetic oligonucleotide
aguagcuguggaagcaguc

SEQ ID NO: 1313775 - RNA, 19 nt, Artificial Sequence
  Description of Artificial Sequence: Synthetic oligonucleotide
cuuuccgauccaguagugc

SEQ ID NO: 1313776 - RNA, 19 nt, Artificial Sequence
  Description of Artificial Sequence: Synthetic oligonucleotide
guaacaugaugucauacuu

SEQ ID NO: 1313777 - RNA, 19 nt, Artificial Sequence
  Description of Artificial Sequence: Synthetic oligonucleotide
acgcuggucaccauuacca

SEQ ID NO: 1313778 - RNA, 19 nt, Artificial Sequence
  Description of Artificial Sequence: Synthetic oligonucleotide
aaaccagagguagccgcug

SEQ ID NO: 1313779 - RNA, 19 nt, Artificial Sequence
  Description of Artificial Sequence: Synthetic oligonucleotide
augacucccggguggaagu

SEQ ID NO: 1313780 - RNA, 19 nt, Artificial Sequence
  Description of Artificial Sequence: Synthetic oligonucleotide
cuggucucccagauccucc

SEQ ID NO: 1313781 - RNA, 19 nt, Artificial Sequence
  Description of Artificial Sequence: Synthetic oligonucleotide
aaccagagguagccgcugu

SEQ ID NO: 1313782 - RNA, 19 nt, Artificial Sequence
  Description of Artificial Sequence: Synthetic oligonucleotide
ucuccgugugcuugagagc

SEQ ID NO: 1313783 - RNA, 19 nt, Artificial Sequence
  Description of Artificial Sequence: Synthetic oligonucleotide
accauaccuccaccuuccc

SEQ ID NO: 1313784 - RNA, 19 nt, Artificial Sequence
  Description of Artificial Sequence: Synthetic oligonucleotide
ucuucccuccauugccugc

SEQ ID NO: 1313785 - RNA, 19 nt, Artificial Sequence
  Description of Artificial Sequence: Synthetic oligonucleotide
cagucgcuggacauuguac

SEQ ID NO: 1313786 - RNA, 19 nt, Artificial Sequence
  Description of Artificial Sequence: Synthetic oligonucleotide
ucccgaagaugucuugaaa

SEQ ID NO: 1313787 - RNA, 19 nt, Artificial Sequence
  Description of Artificial Sequence: Synthetic oligonucleotide
guguaccagccuuucccgg

SEQ ID NO: 1313788 - RNA, 19 nt, Artificial Sequence
  Description of Artificial Sequence: Synthetic oligonucleotide
cacgcuggucaccauuacc

SEQ ID NO: 1313789 - RNA, 19 nt, Artificial Sequence
  Description of Artificial Sequence: Synthetic oligonucleotide
uggauuucccgaagauguc

SEQ ID NO: 1313790 - RNA, 19 nt, Artificial Sequence
  Description of Artificial Sequence: Synthetic oligonucleotide
ucagacucauggcccugug

SEQ ID NO: 1313791 - RNA, 19 nt, Artificial Sequence
  Description of Artificial Sequence: Synthetic oligonucleotide
uucccgaagaugucuugaa

SEQ ID NO: 1313792 - RNA, 19 nt, Artificial Sequence
  Description of Artificial Sequence: Synthetic oligonucleotide
ucccagagccgucauccac

SEQ ID NO: 1313793 - RNA, 19 nt, Artificial Sequence
  Description of Artificial Sequence: Synthetic oligonucleotide
uuguacgcguuggucuccg

SEQ ID NO: 1313794 - RNA, 19 nt, Artificial Sequence
  Description of Artificial Sequence: Synthetic oligonucleotide
gagagcuccucaggaagcc

SEQ ID NO: 1313795 - RNA, 19 nt, Artificial Sequence
  Description of Artificial Sequence: Synthetic oligonucleotide
gaacuccuugcaggcaggg

SEQ ID NO: 1313796 - RNA, 19 nt, Artificial Sequence
  Description of Artificial Sequence: Synthetic oligonucleotide
agggccaccucaguggcag

SEQ ID NO: 1313797 - RNA, 19 nt, Artificial Sequence
  Description of Artificial Sequence: Synthetic oligonucleotide
uggcuaucggccccuugca

SEQ ID NO: 1313798 - RNA, 19 nt, Artificial Sequence
  Description of Artificial Sequence: Synthetic oligonucleotide
ucccaucuagcuccuucga

SEQ ID NO: 1313799 - RNA, 19 nt, Artificial Sequence
  Description of Artificial Sequence: Synthetic oligonucleotide
uuccuuccccugaugugga

SEQ ID NO: 1313800 - RNA, 19 nt, Artificial Sequence
  Description of Artificial Sequence: Synthetic oligonucleotide
aggaagcacgggccggcac

SEQ ID NO: 1313801 - RNA, 19 nt, Artificial Sequence
  Description of Artificial Sequence: Synthetic oligonucleotide
uucccagaaguggggaggc

SEQ ID NO: 1313802 - RNA, 19 nt, Artificial Sequence
  Description of Artificial Sequence: Synthetic oligonucleotide
guguuguggcuaucggccc

SEQ ID NO: 1313803 - RNA, 19 nt, Artificial Sequence
  Description of Artificial Sequence: Synthetic oligonucleotide
auggcccugugacucucgg

SEQ ID NO: 1313804 - RNA, 19 nt, Artificial Sequence
  Description of Artificial Sequence: Synthetic oligonucleotide
ucucacgcuggucaccauu

SEQ ID NO: 1313805 - RNA, 19 nt, Artificial Sequence
  Description of Artificial Sequence: Synthetic oligonucleotide
gccuauguccaguuuggcc

SEQ ID NO: 1313806 - RNA, 19 nt, Artificial Sequence
  Description of Artificial Sequence: Synthetic oligonucleotide
ugccccuggaagauggcua

SEQ ID NO: 1313807 - RNA, 19 nt, Artificial Sequence
  Description of Artificial Sequence: Synthetic oligonucleotide
uccacgccaaggcccagcu

SEQ ID NO: 1313808 - RNA, 19 nt, Artificial Sequence
  Description of Artificial Sequence: Synthetic oligonucleotide
acucccggguggaaguagc

SEQ ID NO: 1313809 - RNA, 19 nt, Artificial Sequence
  Description of Artificial Sequence: Synthetic oligonucleotide
uccgcgccaucucacgcug

SEQ ID NO: 1313810 - RNA, 19 nt, Artificial Sequence
  Description of Artificial Sequence: Synthetic oligonucleotide
cucaaauagucgggccugg

SEQ ID NO: 1313811 - RNA, 19 nt, Artificial Sequence
  Description of Artificial Sequence: Synthetic oligonucleotide
gaugaagcccacagcccug

SEQ ID NO: 1313812 - RNA, 19 nt, Artificial Sequence
  Description of Artificial Sequence: Synthetic oligonucleotide
uuaccagccccuucccaaa

SEQ ID NO: 1313813 - RNA, 19 nt, Artificial Sequence
  Description of Artificial Sequence: Synthetic oligonucleotide
ggacuaucagguccauucc

SEQ ID NO: 1313814 - RNA, 19 nt, Artificial Sequence
  Description of Artificial Sequence: Synthetic oligonucleotide
accaucuggucucccagau

SEQ ID NO: 1313815 - RNA, 19 nt, Artificial Sequence
  Description of Artificial Sequence: Synthetic oligonucleotide
gcugaacccagccuucuug

SEQ ID NO: 1313816 - RNA, 19 nt, Artificial Sequence
  Description of Artificial Sequence: Synthetic oligonucleotide
gcuaucggccccuugcaug

SEQ ID NO: 1313817 - RNA, 19 nt, Artificial Sequence
  Description of Artificial Sequence: Synthetic oligonucleotide
guacgcguuggucuccgug

SEQ ID NO: 1313818 - RNA, 19 nt, Artificial Sequence
  Description of Artificial Sequence: Synthetic oligonucleotide
aggcgagggaggaagcacg

SEQ ID NO: 1313819 - RNA, 19 nt, Artificial Sequence
  Description of Artificial Sequence: Synthetic oligonucleotide
cuucgaccacgucuggaac

SEQ ID NO: 1313820 - RNA, 19 nt, Artificial Sequence
  Description of Artificial Sequence: Synthetic oligonucleotide
cuuccgcgccaucucacgc

SEQ ID NO: 1313821 - RNA, 19 nt, Artificial Sequence
  Description of Artificial Sequence: Synthetic oligonucleotide
ucaaauagucgggccugga

SEQ ID NO: 1313822 - RNA, 19 nt, Artificial Sequence
  Description of Artificial Sequence: Synthetic oligonucleotide
ggacuuucgucccugccac

SEQ ID NO: 1313823 - RNA, 19 nt, Artificial Sequence
  Description of Artificial Sequence: Synthetic oligonucleotide
gcuguagaacuccuccuug

SEQ ID NO: 1313824 - RNA, 19 nt, Artificial Sequence
  Description of Artificial Sequence: Synthetic oligonucleotide
ugguuuggguguuguggcu

SEQ ID NO: 1313825 - RNA, 19 nt, Artificial Sequence
  Description of Artificial Sequence: Synthetic oligonucleotide
cuuucccggggcaggcucc

SEQ ID NO: 1313826 - RNA, 19 nt, Artificial Sequence
  Description of Artificial Sequence: Synthetic oligonucleotide
acguuggugugguuugggu

SEQ ID NO: 1313827 - RNA, 19 nt, Artificial Sequence
  Description of Artificial Sequence: Synthetic oligonucleotide
ucugcgcuggccuccuuuc

SEQ ID NO: 1313828 - RNA, 19 nt, Artificial Sequence
  Description of Artificial Sequence: Synthetic oligonucleotide
uggaaggcgguggacucug

SEQ ID NO: 1313829 - RNA, 19 nt, Artificial Sequence
  Description of Artificial Sequence: Synthetic oligonucleotide
ggguguuguggcuaucggc

SEQ ID NO: 1313830 - RNA, 19 nt, Artificial Sequence
  Description of Artificial Sequence: Synthetic oligonucleotide
gacucugcaccgucauuca

SEQ ID NO: 1313831 - RNA, 19 nt, Artificial Sequence
  Description of Artificial Sequence: Synthetic oligonucleotide
uccaugguuuggguguugu

SEQ ID NO: 1313832 - RNA, 19 nt, Artificial Sequence
  Description of Artificial Sequence: Synthetic oligonucleotide
uuccgcgccaucucacgcu

SEQ ID NO: 1313833 - RNA, 19 nt, Artificial Sequence
  Description of Artificial Sequence: Synthetic oligonucleotide
uggucaccauuaccagccc

SEQ ID NO: 1313834 - RNA, 19 nt, Artificial Sequence
  Description of Artificial Sequence: Synthetic oligonucleotide
ugcacuccccuggaagacc

SEQ ID NO: 1313835 - RNA, 19 nt, Artificial Sequence
  Description of Artificial Sequence: Synthetic oligonucleotide
acagucgcuggacauugua

SEQ ID NO: 1313836 - RNA, 19 nt, Artificial Sequence
  Description of Artificial Sequence: Synthetic oligonucleotide
agaacuccuugcaggcagg

SEQ ID NO: 1313837 - RNA, 19 nt, Artificial Sequence
  Description of Artificial Sequence: Synthetic oligonucleotide
ggaagcacgggccggcacc

SEQ ID NO: 1313838 - RNA, 19 nt, Artificial Sequence
  Description of Artificial Sequence: Synthetic oligonucleotide
ucgaccacgucuggaacaa

SEQ ID NO: 1313839 - RNA, 19 nt, Artificial Sequence
  Description of Artificial Sequence: Synthetic oligonucleotide
agcacgguuuccauguuau

SEQ ID NO: 1313840 - RNA, 19 nt, Artificial Sequence
  Description of Artificial Sequence: Synthetic oligonucleotide
gguggaaauuggcagccuc

SEQ ID NO: 1313841 - RNA, 19 nt, Artificial Sequence
  Description of Artificial Sequence: Synthetic oligonucleotide
gucgccaauucuuggacua

SEQ ID NO: 1313842 - RNA, 19 nt, Artificial Sequence
  Description of Artificial Sequence: Synthetic oligonucleotide
uguggcuaucggccccuug

SEQ ID NO: 1313843 - RNA, 19 nt, Artificial Sequence
  Description of Artificial Sequence: Synthetic oligonucleotide
uccgugugcuugagagcag

SEQ ID NO: 1313844 - RNA, 19 nt, Artificial Sequence
  Description of Artificial Sequence: Synthetic oligonucleotide
auagaacuccuugcaggca

SEQ ID NO: 1313845 - RNA, 19 nt, Artificial Sequence
  Description of Artificial Sequence: Synthetic oligonucleotide
cacggccugguguaccagc

SEQ ID NO: 1313846 - RNA, 19 nt, Artificial Sequence
  Description of Artificial Sequence: Synthetic oligonucleotide
gccgucauccaccauucug

SEQ ID NO: 1313847 - RNA, 19 nt, Artificial Sequence
  Description of Artificial Sequence: Synthetic oligonucleotide
uggaaauuggcagccucuu

SEQ ID NO: 1313848 - RNA, 19 nt, Artificial Sequence
  Description of Artificial Sequence: Synthetic oligonucleotide
ucacgcuggucaccauuac

SEQ ID NO: 1313849 - RNA, 19 nt, Artificial Sequence
  Description of Artificial Sequence: Synthetic oligonucleotide
ugggcgggucgccaauucu

SEQ ID NO: 1313850 - RNA, 19 nt, Artificial Sequence
  Description of Artificial Sequence: Synthetic oligonucleotide
ccuguagaugacucccggg

SEQ ID NO: 1313851 - RNA, 19 nt, Artificial Sequence
  Description of Artificial Sequence: Synthetic oligonucleotide
cccagauccuccuguaggc

SEQ ID NO: 1313852 - RNA, 19 nt, Artificial Sequence
  Description of Artificial Sequence: Synthetic oligonucleotide
agucgggccuggaugcugg

SEQ ID NO: 1313853 - RNA, 19 nt, Artificial Sequence
  Description of Artificial Sequence: Synthetic oligonucleotide
gcacucaaauagucgggcc

SEQ ID NO: 1313854 - RNA, 19 nt, Artificial Sequence
  Description of Artificial Sequence: Synthetic oligonucleotide
acuuucgucccugccacau

SEQ ID NO: 1313855 - RNA, 19 nt, Artificial Sequence
  Description of Artificial Sequence: Synthetic oligonucleotide
cuccuuggauuucccgaag

SEQ ID NO: 1313856 - RNA, 19 nt, Artificial Sequence
  Description of Artificial Sequence: Synthetic oligonucleotide
ggcugaagaacaccauuuc

SEQ ID NO: 1313857 - RNA, 19 nt, Artificial Sequence
  Description of Artificial Sequence: Synthetic oligonucleotide
cacgccaaggcccagcucu

SEQ ID NO: 1313858 - RNA, 19 nt, Artificial Sequence
  Description of Artificial Sequence: Synthetic oligonucleotide
cacguuggugugguuuggg

SEQ ID NO: 1313859 - RNA, 19 nt, Artificial Sequence
  Description of Artificial Sequence: Synthetic oligonucleotide
ggcgguggacucugcaccg

SEQ ID NO: 1313860 - RNA, 19 nt, Artificial Sequence
  Description of Artificial Sequence: Synthetic oligonucleotide
cucccuuccuguagaugac

SEQ ID NO: 1313861 - RNA, 19 nt, Artificial Sequence
  Description of Artificial Sequence: Synthetic oligonucleotide
ugaagggcuggagcacuca

SEQ ID NO: 1313862 - RNA, 19 nt, Artificial Sequence
  Description of Artificial Sequence: Synthetic oligonucleotide
cacgucuggaacaacugcu

SEQ ID NO: 1313863 - RNA, 19 nt, Artificial Sequence
  Description of Artificial Sequence: Synthetic oligonucleotide
aggagguccugggucagug

SEQ ID NO: 1313864 - RNA, 19 nt, Artificial Sequence
  Description of Artificial Sequence: Synthetic oligonucleotide
augucccgugaagacagug

SEQ ID NO: 1313865 - RNA, 19 nt, Artificial Sequence
  Description of Artificial Sequence: Synthetic oligonucleotide
uaugucccgugaagacagu

SEQ ID NO: 1313866 - RNA, 19 nt, Artificial Sequence
  Description of Artificial Sequence: Synthetic oligonucleotide
acgcguuggucuccgugug

SEQ ID NO: 1313867 - RNA, 19 nt, Artificial Sequence
  Description of Artificial Sequence: Synthetic oligonucleotide
cacucaaauagucgggccu

SEQ ID NO: 1313868 - RNA, 19 nt, Artificial Sequence
  Description of Artificial Sequence: Synthetic oligonucleotide
uccuucgaccacgucugga

SEQ ID NO: 1313869 - RNA, 19 nt, Artificial Sequence
  Description of Artificial Sequence: Synthetic oligonucleotide
gguuuggguagcccuuggc

SEQ ID NO: 1313870 - RNA, 19 nt, Artificial Sequence
  Description of Artificial Sequence: Synthetic oligonucleotide
ucggccccuugcaugugga

SEQ ID NO: 1313871 - RNA, 19 nt, Artificial Sequence
  Description of Artificial Sequence: Synthetic oligonucleotide
cacgguuuccauguuaugu

SEQ ID NO: 1313872 - RNA, 19 nt, Artificial Sequence
  Description of Artificial Sequence: Synthetic oligonucleotide
ucagugggcgggucgccaa

SEQ ID NO: 1313873 - RNA, 19 nt, Artificial Sequence
  Description of Artificial Sequence: Synthetic oligonucleotide
gagccgucauccaccauuc

SEQ ID NO: 1313874 - RNA, 19 nt, Artificial Sequence
  Description of Artificial Sequence: Synthetic oligonucleotide
gguccaggagauagcagcc

SEQ ID NO: 1313875 - RNA, 19 nt, Artificial Sequence
  Description of Artificial Sequence: Synthetic oligonucleotide
gacucccggguggaaguag

SEQ ID NO: 1313876 - RNA, 19 nt, Artificial Sequence
  Description of Artificial Sequence: Synthetic oligonucleotide
cauguggaacagccuugug

SEQ ID NO: 1313877 - RNA, 19 nt, Artificial Sequence
  Description of Artificial Sequence: Synthetic oligonucleotide
uccugacaggugucuagua

SEQ ID NO: 1313878 - RNA, 19 nt, Artificial Sequence
  Description of Artificial Sequence: Synthetic oligonucleotide
cagugaccaccuuccgcgc

SEQ ID NO: 1313879 - RNA, 19 nt, Artificial Sequence
  Description of Artificial Sequence: Synthetic oligonucleotide
ucccuuccuguagaugacu

SEQ ID NO: 1313880 - RNA, 19 nt, Artificial Sequence
  Description of Artificial Sequence: Synthetic oligonucleotide
agauccuccuguaggcgcu

SEQ ID NO: 1313881 - RNA, 19 nt, Artificial Sequence
  Description of Artificial Sequence: Synthetic oligonucleotide
ccacgucuggaacaacugc

SEQ ID NO: 1313882 - RNA, 19 nt, Artificial Sequence
  Description of Artificial Sequence: Synthetic oligonucleotide
ggaugaagcccacagcccu

SEQ ID NO: 1313883 - RNA, 19 nt, Artificial Sequence
  Description of Artificial Sequence: Synthetic oligonucleotide
ccgucauccaccauucuga

SEQ ID NO: 1313884 - RNA, 19 nt, Artificial Sequence
  Description of Artificial Sequence: Synthetic oligonucleotide
gugugguuuggguagcccu

SEQ ID NO: 1313885 - RNA, 19 nt, Artificial Sequence
  Description of Artificial Sequence: Synthetic oligonucleotide
cauugccugcacuccccug

SEQ ID NO: 1313886 - RNA, 19 nt, Artificial Sequence
  Description of Artificial Sequence: Synthetic oligonucleotide
cucacgcuggucaccauua

SEQ ID NO: 1313887 - RNA, 19 nt, Artificial Sequence
  Description of Artificial Sequence: Synthetic oligonucleotide
cugugacucucggugcagc

SEQ ID NO: 1313888 - RNA, 19 nt, Artificial Sequence
  Description of Artificial Sequence: Synthetic oligonucleotide
caggagauagcagccuuca

SEQ ID NO: 1313889 - RNA, 19 nt, Artificial Sequence
  Description of Artificial Sequence: Synthetic oligonucleotide
accuuccgcgccaucucac

SEQ ID NO: 1313890 - RNA, 19 nt, Artificial Sequence
  Description of Artificial Sequence: Synthetic oligonucleotide
gaccacgucuggaacaacu

SEQ ID NO: 1313891 - RNA, 19 nt, Artificial Sequence
  Description of Artificial Sequence: Synthetic oligonucleotide
cuaucggccccuugcaugu

SEQ ID NO: 1313892 - RNA, 19 nt, Artificial Sequence
  Description of Artificial Sequence: Synthetic oligonucleotide
cuccaccuucccagagccg

SEQ ID NO: 1313893 - RNA, 19 nt, Artificial Sequence
  Description of Artificial Sequence: Synthetic oligonucleotide
caucucacgcuggucacca

SEQ ID NO: 1313894 - RNA, 19 nt, Artificial Sequence
  Description of Artificial Sequence: Synthetic oligonucleotide
gccccuggaagauggcuag

SEQ ID NO: 1313895 - RNA, 19 nt, Artificial Sequence
  Description of Artificial Sequence: Synthetic oligonucleotide
uagucgggccuggaugcug

SEQ ID NO: 1313896 - RNA, 19 nt, Artificial Sequence
  Description of Artificial Sequence: Synthetic oligonucleotide
uccccugauguggaacagu

SEQ ID NO: 1313897 - RNA, 19 nt, Artificial Sequence
  Description of Artificial Sequence: Synthetic oligonucleotide
gggucgccaauucuuggac

SEQ ID NO: 1313898 - RNA, 19 nt, Artificial Sequence
  Description of Artificial Sequence: Synthetic oligonucleotide
cgguuuccauguuaugucc

SEQ ID NO: 1313899 - RNA, 19 nt, Artificial Sequence
  Description of Artificial Sequence: Synthetic oligonucleotide
ugaagcccacagcccugcu

SEQ ID NO: 1313900 - RNA, 19 nt, Artificial Sequence
  Description of Artificial Sequence: Synthetic oligonucleotide
uggggcuuuugcugggguu

SEQ ID NO: 1313901 - RNA, 19 nt, Artificial Sequence
  Description of Artificial Sequence: Synthetic oligonucleotide
uggugugguuuggguagcc

SEQ ID NO: 1313902 - RNA, 19 nt, Artificial Sequence
  Description of Artificial Sequence: Synthetic oligonucleotide
aggagauagcagccuucau

SEQ ID NO: 1313903 - RNA, 19 nt, Artificial Sequence
  Description of Artificial Sequence: Synthetic oligonucleotide
caaaccagagguagccgcu

SEQ ID NO: 1313904 - RNA, 19 nt, Artificial Sequence
  Description of Artificial Sequence: Synthetic oligonucleotide
gccccuugcauguggaaca

SEQ ID NO: 1313905 - RNA, 19 nt, Artificial Sequence
  Description of Artificial Sequence: Synthetic oligonucleotide
agauagcagccuucaucuu

SEQ ID NO: 1313906 - RNA, 19 nt, Artificial Sequence
  Description of Artificial Sequence: Synthetic oligonucleotide
ccccugauguggaacaguc

SEQ ID NO: 1313907 - RNA, 19 nt, Artificial Sequence
  Description of Artificial Sequence: Synthetic oligonucleotide
cuucccuccauugccugca

SEQ ID NO: 1313908 - RNA, 19 nt, Artificial Sequence
  Description of Artificial Sequence: Synthetic oligonucleotide
gcuugagagcagaggcucg

SEQ ID NO: 1313909 - RNA, 19 nt, Artificial Sequence
  Description of Artificial Sequence: Synthetic oligonucleotide
gugacucucggugcagcac

SEQ ID NO: 1313910 - RNA, 19 nt, Artificial Sequence
  Description of Artificial Sequence: Synthetic oligonucleotide
caucuugcaggagguccug

SEQ ID NO: 1313911 - RNA, 19 nt, Artificial Sequence
  Description of Artificial Sequence: Synthetic oligonucleotide
gccuccgagggcuucccag

SEQ ID NO: 1313912 - RNA, 19 nt, Artificial Sequence
  Description of Artificial Sequence: Synthetic oligonucleotide
cugcgcuggccuccuuucc

SEQ ID NO: 1313913 - RNA, 19 nt, Artificial Sequence
  Description of Artificial Sequence: Synthetic oligonucleotide
cuccuucgaccacgucugg

SEQ ID NO: 1313914 - RNA, 19 nt, Artificial Sequence
  Description of Artificial Sequence: Synthetic oligonucleotide
agaugucacuggaggcgag

SEQ ID NO: 1313915 - RNA, 19 nt, Artificial Sequence
  Description of Artificial Sequence: Synthetic oligonucleotide
uggcccugugacucucggu

SEQ ID NO: 1313916 - RNA, 19 nt, Artificial Sequence
  Description of Artificial Sequence: Synthetic oligonucleotide
ccuuccgcgccaucucacg

SEQ ID NO: 1313917 - RNA, 19 nt, Artificial Sequence
  Description of Artificial Sequence: Synthetic oligonucleotide
aaggugacuguggccccau

SEQ ID NO: 1313918 - RNA, 19 nt, Artificial Sequence
  Description of Artificial Sequence: Synthetic oligonucleotide
uagcagccuucaucuugca

SEQ ID NO: 1313919 - RNA, 19 nt, Artificial Sequence
  Description of Artificial Sequence: Synthetic oligonucleotide
uggucuccgugugcuugag

SEQ ID NO: 1313920 - RNA, 19 nt, Artificial Sequence
  Description of Artificial Sequence: Synthetic oligonucleotide
ggcucaccauaccuccacc

SEQ ID NO: 1313921 - RNA, 19 nt, Artificial Sequence
  Description of Artificial Sequence: Synthetic oligonucleotide
gcgggucgccaauucuugg

SEQ ID NO: 1313922 - RNA, 19 nt, Artificial Sequence
  Description of Artificial Sequence: Synthetic oligonucleotide
gauuucccgaagaugucuu

SEQ ID NO: 1313923 - RNA, 19 nt, Artificial Sequence
  Description of Artificial Sequence: Synthetic oligonucleotide
gcugggguucuugccaucc

SEQ ID NO: 1313924 - RNA, 19 nt, Artificial Sequence
  Description of Artificial Sequence: Synthetic oligonucleotide
cugacaugguagagacgga

SEQ ID NO: 1313925 - RNA, 19 nt, Artificial Sequence
  Description of Artificial Sequence: Synthetic oligonucleotide
ggugugguuuggguagccc

SEQ ID NO: 1313926 - RNA, 19 nt, Artificial Sequence
  Description of Artificial Sequence: Synthetic oligonucleotide
gacuuucgucccugccaca

SEQ ID NO: 1313927 - RNA, 19 nt, Artificial Sequence
  Description of Artificial Sequence: Synthetic oligonucleotide
gggcucaccauaccuccac

SEQ ID NO: 1313928 - RNA, 19 nt, Artificial Sequence
  Description of Artificial Sequence: Synthetic oligonucleotide
caaauagucgggccuggau

SEQ ID NO: 1313929 - RNA, 19 nt, Artificial Sequence
  Description of Artificial Sequence: Synthetic oligonucleotide
cgcugcacaaaggugacug

SEQ ID NO: 1313930 - RNA, 19 nt, Artificial Sequence
  Description of Artificial Sequence: Synthetic oligonucleotide
uguacgcguuggucuccgu

SEQ ID NO: 1313931 - RNA, 19 nt, Artificial Sequence
  Description of Artificial Sequence: Synthetic oligonucleotide
cccaucuagcuccuucgac

SEQ ID NO: 1313932 - RNA, 19 nt, Artificial Sequence
  Description of Artificial Sequence: Synthetic oligonucleotide
uuuggguguuguggcuauc

SEQ ID NO: 1313933 - RNA, 19 nt, Artificial Sequence
  Description of Artificial Sequence: Synthetic oligonucleotide
cagcccugcugaacccagc

SEQ ID NO: 1313934 - RNA, 19 nt, Artificial Sequence
  Description of Artificial Sequence: Synthetic oligonucleotide
gcuagcucaggcugggugu

SEQ ID NO: 1313935 - RNA, 19 nt, Artificial Sequence
  Description of Artificial Sequence: Synthetic oligonucleotide
cuugcaggagguccugggu

SEQ ID NO: 1313936 - RNA, 19 nt, Artificial Sequence
  Description of Artificial Sequence: Synthetic oligonucleotide
uuggacuaucagguccauu

SEQ ID NO: 1313937 - RNA, 19 nt, Artificial Sequence
  Description of Artificial Sequence: Synthetic oligonucleotide
gguccauucccuucucgcu

SEQ ID NO: 1313938 - RNA, 19 nt, Artificial Sequence
  Description of Artificial Sequence: Synthetic oligonucleotide
gacaggugucuaguaacau

SEQ ID NO: 1313939 - RNA, 19 nt, Artificial Sequence
  Description of Artificial Sequence: Synthetic oligonucleotide
guuuggguguuguggcuau

SEQ ID NO: 1313940 - RNA, 19 nt, Artificial Sequence
  Description of Artificial Sequence: Synthetic oligonucleotide
ccuucgaccacgucuggaa

SEQ ID NO: 1313941 - RNA, 19 nt, Artificial Sequence
  Description of Artificial Sequence: Synthetic oligonucleotide
gcccugugacucucggugc

SEQ ID NO: 1313942 - RNA, 19 nt, Artificial Sequence
  Description of Artificial Sequence: Synthetic oligonucleotide
ccgaagaugucuugaaagu

SEQ ID NO: 1313943 - RNA, 19 nt, Artificial Sequence
  Description of Artificial Sequence: Synthetic oligonucleotide
ggccccuugcauguggaac

SEQ ID NO: 1313944 - RNA, 19 nt, Artificial Sequence
  Description of Artificial Sequence: Synthetic oligonucleotide
aagcacgggccggcaccuc

SEQ ID NO: 1313945 - RNA, 19 nt, Artificial Sequence
  Description of Artificial Sequence: Synthetic oligonucleotide
cccaaaccagagguagccg

SEQ ID NO: 1313946 - RNA, 19 nt, Artificial Sequence
  Description of Artificial Sequence: Synthetic oligonucleotide
ugccugcacuccccuggaa

SEQ ID NO: 1313947 - RNA, 19 nt, Artificial Sequence
  Description of Artificial Sequence: Synthetic oligonucleotide
agccgucauccaccauucu

SEQ ID NO: 1313948 - RNA, 19 nt, Artificial Sequence
  Description of Artificial Sequence: Synthetic oligonucleotide
aggugucuaguaacaugau

SEQ ID NO: 1313949 - RNA, 19 nt, Artificial Sequence
  Description of Artificial Sequence: Synthetic oligonucleotide
ccuuuccgauccaguagug

SEQ ID NO: 1313950 - RNA, 19 nt, Artificial Sequence
  Description of Artificial Sequence: Synthetic oligonucleotide
ggcgggucgccaauucuug

SEQ ID NO: 1313951 - RNA, 19 nt, Artificial Sequence
  Description of Artificial Sequence: Synthetic oligonucleotide
uaucggccccuugcaugug

SEQ ID NO: 1313952 - RNA, 19 nt, Artificial Sequence
  Description of Artificial Sequence: Synthetic oligonucleotide
gccccaugggucucugcgc

SEQ ID NO: 1313953 - RNA, 19 nt, Artificial Sequence
  Description of Artificial Sequence: Synthetic oligonucleotide
ggaucauucucugggcugu

SEQ ID NO: 1313954 - RNA, 19 nt, Artificial Sequence
  Description of Artificial Sequence: Synthetic oligonucleotide
ugacucccggguggaagua

SEQ ID NO: 1313955 - RNA, 19 nt, Artificial Sequence
  Description of Artificial Sequence: Synthetic oligonucleotide
cuaucagguccauucccuu

SEQ ID NO: 1313956 - RNA, 19 nt, Artificial Sequence
  Description of Artificial Sequence: Synthetic oligonucleotide
cuagcuccuucgaccacgu

SEQ ID NO: 1313957 - RNA, 19 nt, Artificial Sequence
  Description of Artificial Sequence: Synthetic oligonucleotide
gggucagugggcgggucgc

SEQ ID NO: 1313958 - RNA, 19 nt, Artificial Sequence
  Description of Artificial Sequence: Synthetic oligonucleotide
gaggaagcacgggccggca

SEQ ID NO: 1313959 - RNA, 19 nt, Artificial Sequence
  Description of Artificial Sequence: Synthetic oligonucleotide
ccauguuaugucccgugaa

SEQ ID NO: 1313960 - RNA, 19 nt, Artificial Sequence
  Description of Artificial Sequence: Synthetic oligonucleotide
ccaccauucugagcugggc

SEQ ID NO: 1313961 - RNA, 19 nt, Artificial Sequence
  Description of Artificial Sequence: Synthetic oligonucleotide
gaagcacgggccggcaccu

SEQ ID NO: 1313962 - RNA, 19 nt, Artificial Sequence
  Description of Artificial Sequence: Synthetic oligonucleotide
acgggccggcaccuccaug

SEQ ID NO: 1313963 - RNA, 19 nt, Artificial Sequence
  Description of Artificial Sequence: Synthetic oligonucleotide
cucaccauaccuccaccuu

SEQ ID NO: 1313964 - RNA, 19 nt, Artificial Sequence
  Description of Artificial Sequence: Synthetic oligonucleotide
cccuucccaaaccagaggu

SEQ ID NO: 1313965 - RNA, 19 nt, Artificial Sequence
  Description of Artificial Sequence: Synthetic oligonucleotide
cccagaaguggggaggcuc

SEQ ID NO: 1313966 - RNA, 19 nt, Artificial Sequence
  Description of Artificial Sequence: Synthetic oligonucleotide
ccuuccccugauguggaac

SEQ ID NO: 1313967 - RNA, 19 nt, Artificial Sequence
  Description of Artificial Sequence: Synthetic oligonucleotide
gcucaccauaccuccaccu

SEQ ID NO: 1313968 - RNA, 19 nt, Artificial Sequence
  Description of Artificial Sequence: Synthetic oligonucleotide
cagcacgguuuccauguua

SEQ ID NO: 1313969 - RNA, 19 nt, Artificial Sequence
  Description of Artificial Sequence: Synthetic oligonucleotide
ggcgcugcacaaaggugac

SEQ ID NO: 1313970 - RNA, 19 nt, Artificial Sequence
  Description of Artificial Sequence: Synthetic oligonucleotide
ccuuucccggggcaggcuc

SEQ ID NO: 1313971 - RNA, 19 nt, Artificial Sequence
  Description of Artificial Sequence: Synthetic oligonucleotide
ggucgccaauucuuggacu

SEQ ID NO: 1313972 - RNA, 19 nt, Artificial Sequence
  Description of Artificial Sequence: Synthetic oligonucleotide
guuccaggacagggccacc

SEQ ID NO: 1313973 - RNA, 19 nt, Artificial Sequence
  Description of Artificial Sequence: Synthetic oligonucleotide
cuccgagggcuucccagaa

SEQ ID NO: 1313974 - RNA, 19 nt, Artificial Sequence
  Description of Artificial Sequence: Synthetic oligonucleotide
cugcaccgucauucaccac

SEQ ID NO: 1313975 - RNA, 19 nt, Artificial Sequence
  Description of Artificial Sequence: Synthetic oligonucleotide
ggacauuguacgcguuggu

SEQ ID NO: 1313976 - RNA, 19 nt, Artificial Sequence
  Description of Artificial Sequence: Synthetic oligonucleotide
cgccaucucacgcugguca

SEQ ID NO: 1313977 - RNA, 19 nt, Artificial Sequence
  Description of Artificial Sequence: Synthetic oligonucleotide
cauucccuucucgcugaca

SEQ ID NO: 1313978 - RNA, 19 nt, Artificial Sequence
  Description of Artificial Sequence: Synthetic oligonucleotide
guuguggcuaucggccccu

SEQ ID NO: 1313979 - RNA, 19 nt, Artificial Sequence
  Description of Artificial Sequence: Synthetic oligonucleotide
gcuggccuccuuuccgauc

SEQ ID NO: 1313980 - RNA, 19 nt, Artificial Sequence
  Description of Artificial Sequence: Synthetic oligonucleotide
gcuggagcacucaaauagu

SEQ ID NO: 1313981 - RNA, 19 nt, Artificial Sequence
  Description of Artificial Sequence: Synthetic oligonucleotide
cuccugacaggugucuagu

SEQ ID NO: 1313982 - RNA, 19 nt, Artificial Sequence
  Description of Artificial Sequence: Synthetic oligonucleotide
cagagguagccgcuguuuu

SEQ ID NO: 1313983 - RNA, 19 nt, Artificial Sequence
  Description of Artificial Sequence: Synthetic oligonucleotide
ggaaucccuggaggccucc

SEQ ID NO: 1313984 - RNA, 19 nt, Artificial Sequence
  Description of Artificial Sequence: Synthetic oligonucleotide
agugggcgggucgccaauu

SEQ ID NO: 1313985 - RNA, 19 nt, Artificial Sequence
  Description of Artificial Sequence: Synthetic oligonucleotide
caccgucauucaccaccuc

SEQ ID NO: 1313986 - RNA, 19 nt, Artificial Sequence
  Description of Artificial Sequence: Synthetic oligonucleotide
cccggguggaaguagcugu

SEQ ID NO: 1313987 - RNA, 19 nt, Artificial Sequence
  Description of Artificial Sequence: Synthetic oligonucleotide
gaaucccuggaggccuccu

SEQ ID NO: 1313988 - RNA, 19 nt, Artificial Sequence
  Description of Artificial Sequence: Synthetic oligonucleotide
ccgugaagacagugaccac

SEQ ID NO: 1313989 - RNA, 19 nt, Artificial Sequence
  Description of Artificial Sequence: Synthetic oligonucleotide
ccgagggcuucccagaagu

SEQ ID NO: 1313990 - RNA, 19 nt, Artificial Sequence
  Description of Artificial Sequence: Synthetic oligonucleotide
ggucuccgugugcuugaga

SEQ ID NO: 1313991 - RNA, 19 nt, Artificial Sequence
  Description of Artificial Sequence: Synthetic oligonucleotide
cagcaccaucuggucuccc

SEQ ID NO: 1313992 - RNA, 19 nt, Artificial Sequence
  Description of Artificial Sequence: Synthetic oligonucleotide
gcauguggaacagccuugu

SEQ ID NO: 1313993 - RNA, 19 nt, Artificial Sequence
  Description of Artificial Sequence: Synthetic oligonucleotide
ggugugcagcuugccuaug

SEQ ID NO: 1313994 - RNA, 19 nt, Artificial Sequence
  Description of Artificial Sequence: Synthetic oligonucleotide
gccucuuguugcugggaua

SEQ ID NO: 1313995 - RNA, 19 nt, Artificial Sequence
  Description of Artificial Sequence: Synthetic oligonucleotide
ccauuucugugaggaccag

SEQ ID NO: 1313996 - RNA, 19 nt, Artificial Sequence
  Description of Artificial Sequence: Synthetic oligonucleotide
gggugugcagcuugccuau

SEQ ID NO: 1313997 - RNA, 19 nt, Artificial Sequence
  Description of Artificial Sequence: Synthetic oligonucleotide
cucggccucccuuccugua

SEQ ID NO: 1313998 - RNA, 19 nt, Artificial Sequence
  Description of Artificial Sequence: Synthetic oligonucleotide
cucccggguggaaguagcu

SEQ ID NO: 1313999 - RNA, 19 nt, Artificial Sequence
  Description of Artificial Sequence: Synthetic oligonucleotide
cgagggcuucccagaagug

SEQ ID NO: 1314000 - RNA, 19 nt, Artificial Sequence
  Description of Artificial Sequence: Synthetic oligonucleotide
ggaacagucgcuggacauu

SEQ ID NO: 1314001 - RNA, 19 nt, Artificial Sequence
  Description of Artificial Sequence: Synthetic oligonucleotide
gucgggccuggaugcugga

SEQ ID NO: 1314002 - RNA, 19 nt, Artificial Sequence
  Description of Artificial Sequence: Synthetic oligonucleotide
cauugaccacugagcugcu

SEQ ID NO: 1314003 - RNA, 19 nt, Artificial Sequence
  Description of Artificial Sequence: Synthetic oligonucleotide
cgggucgccaauucuugga

SEQ ID NO: 1314004 - RNA, 19 nt, Artificial Sequence
  Description of Artificial Sequence: Synthetic oligonucleotide
ggaaggcgguggacucugc

SEQ ID NO: 1314005 - RNA, 19 nt, Artificial Sequence
  Description of Artificial Sequence: Synthetic oligonucleotide
cugccccuggaagauggcu

SEQ ID NO: 1314006 - RNA, 19 nt, Artificial Sequence
  Description of Artificial Sequence: Synthetic oligonucleotide
cauucugagcugggcugcu

SEQ ID NO: 1314007 - RNA, 19 nt, Artificial Sequence
  Description of Artificial Sequence: Synthetic oligonucleotide
cgccaauucuuggacuauc

SEQ ID NO: 1314008 - RNA, 19 nt, Artificial Sequence
  Description of Artificial Sequence: Synthetic oligonucleotide
cuguggccccaugggucuc

SEQ ID NO: 1314009 - RNA, 19 nt, Artificial Sequence
  Description of Artificial Sequence: Synthetic oligonucleotide
gcaccgucauucaccaccu

SEQ ID NO: 1314010 - RNA, 19 nt, Artificial Sequence
  Description of Artificial Sequence: Synthetic oligonucleotide
uuguggcuaucggccccuu

SEQ ID NO: 1314011 - RNA, 19 nt, Artificial Sequence
  Description of Artificial Sequence: Synthetic oligonucleotide
gggaaucccuggaggccuc

SEQ ID NO: 1314012 - RNA, 19 nt, Artificial Sequence
  Description of Artificial Sequence: Synthetic oligonucleotide
gccggcaccuccaugguuu

SEQ ID NO: 1314013 - RNA, 19 nt, Artificial Sequence
  Description of Artificial Sequence: Synthetic oligonucleotide
ggcuaucggccccuugcau

SEQ ID NO: 1314014 - RNA, 19 nt, Artificial Sequence
  Description of Artificial Sequence: Synthetic oligonucleotide
ccgcgccaucucacgcugg

SEQ ID NO: 1314015 - RNA, 19 nt, Artificial Sequence
  Description of Artificial Sequence: Synthetic oligonucleotide
ccuguaggcgcugcacaaa

SEQ ID NO: 1314016 - RNA, 19 nt, Artificial Sequence
  Description of Artificial Sequence: Synthetic oligonucleotide
cgguggacucugcaccguc

SEQ ID NO: 1314017 - RNA, 19 nt, Artificial Sequence
  Description of Artificial Sequence: Synthetic oligonucleotide
cuggcccuccagcacgguu

SEQ ID NO: 1314018 - RNA, 19 nt, Artificial Sequence
  Description of Artificial Sequence: Synthetic oligonucleotide
gcuugccuauguccaguuu

SEQ ID NO: 1314019 - RNA, 19 nt, Artificial Sequence
  Description of Artificial Sequence: Synthetic oligonucleotide
ggccugcaucaguuuauuu

SEQ ID NO: 1314020 - RNA, 19 nt, Artificial Sequence
  Description of Artificial Sequence: Synthetic oligonucleotide
ggccuccgagggcuuccca

SEQ ID NO: 1314021 - RNA, 19 nt, Artificial Sequence
  Description of Artificial Sequence: Synthetic oligonucleotide
ccacgccaaggcccagcuc

SEQ ID NO: 1314022 - RNA, 19 nt, Artificial Sequence
  Description of Artificial Sequence: Synthetic oligonucleotide
gggcgggucgccaauucuu

SEQ ID NO: 1314023 - RNA, 19 nt, Artificial Sequence
  Description of Artificial Sequence: Synthetic oligonucleotide
ccuccacggccugguguac

SEQ ID NO: 1314024 - RNA, 19 nt, Artificial Sequence
  Description of Artificial Sequence: Synthetic oligonucleotide
gggccaccucaguggcaga

SEQ ID NO: 1314025 - RNA, 19 nt, Artificial Sequence
  Description of Artificial Sequence: Synthetic oligonucleotide
cagugggcgggucgccaau

SEQ ID NO: 1314026 - RNA, 19 nt, Artificial Sequence
  Description of Artificial Sequence: Synthetic oligonucleotide
cggccucccuuccuguaga

SEQ ID NO: 1314027 - RNA, 19 nt, Artificial Sequence
  Description of Artificial Sequence: Synthetic oligonucleotide
ggccucccuuccuguagau

SEQ ID NO: 1314028 - RNA, 19 nt, Artificial Sequence
  Description of Artificial Sequence: Synthetic oligonucleotide
ccgauccaguagugcaggu

SEQ ID NO: 1314029 - RNA, 19 nt, Artificial Sequence
  Description of Artificial Sequence: Synthetic oligonucleotide
gguagcccuuggccuggau

SEQ ID NO: 1314030 - RNA, 19 nt, Artificial Sequence
  Description of Artificial Sequence: Synthetic oligonucleotide
cugcuagcucaggcugggu

SEQ ID NO: 1314031 - RNA, 19 nt, Artificial Sequence
  Description of Artificial Sequence: Synthetic oligonucleotide
ggccggcaccuccaugguu

SEQ ID NO: 1314032 - RNA, 19 nt, Artificial Sequence
  Description of Artificial Sequence: Synthetic oligonucleotide
gcuggacauuguacgcguu

SEQ ID NO: 1314033 - RNA, 19 nt, Artificial Sequence
  Description of Artificial Sequence: Synthetic oligonucleotide
cacgggccggcaccuccau

SEQ ID NO: 1314034 - RNA, 19 nt, Artificial Sequence
  Description of Artificial Sequence: Synthetic oligonucleotide
cgaccacgucuggaacaac

SEQ ID NO: 1314035 - RNA, 19 nt, Artificial Sequence
  Description of Artificial Sequence: Synthetic oligonucleotide
cagagccgucauccaccau

SEQ ID NO: 1314036 - RNA, 19 nt, Artificial Sequence
  Description of Artificial Sequence: Synthetic oligonucleotide
gcgguggacucugcaccgu

SEQ ID NO: 1314037 - RNA, 19 nt, Artificial Sequence
  Description of Artificial Sequence: Synthetic oligonucleotide
cgcgccaucucacgcuggu

SEQ ID NO: 1314038 - RNA, 19 nt, Artificial Sequence
  Description of Artificial Sequence: Synthetic oligonucleotide
gcgcugcacaaaggugacu

SEQ ID NO: 1314039 - RNA, 19 nt, Artificial Sequence
  Description of Artificial Sequence: Synthetic oligonucleotide
cggccccuugcauguggaa

SEQ ID NO: 1314040 - RNA, 19 nt, Artificial Sequence
  Description of Artificial Sequence: Synthetic oligonucleotide
ccagcacgguuuccauguu

SEQ ID NO: 1314041 - RNA, 19 nt, Artificial Sequence
  Description of Artificial Sequence: Synthetic oligonucleotide
gcccggccuccgagggcuu

SEQ ID NO: 1314042 - RNA, 19 nt, Artificial Sequence
  Description of Artificial Sequence: Synthetic oligonucleotide
ugcuagaaaaucaaagacg

SEQ ID NO: 1314043 - RNA, 19 nt, Artificial Sequence
  Description of Artificial Sequence: Synthetic oligonucleotide
acuucuaugguagaggggc

SEQ ID NO: 1314044 - RNA, 19 nt, Artificial Sequence
  Description of Artificial Sequence: Synthetic oligonucleotide
ucguagaccagcaugauac

SEQ ID NO: 1314045 - RNA, 19 nt, Artificial Sequence
  Description of Artificial Sequence: Synthetic oligonucleotide
aaaaggaacguccgauugg

SEQ ID NO: 1314046 - RNA, 19 nt, Artificial Sequence
  Description of Artificial Sequence: Synthetic oligonucleotide
uaugguccuaauuuuaaag

SEQ ID NO: 1314047 - RNA, 19 nt, Artificial Sequence
  Description of Artificial Sequence: Synthetic oligonucleotide
ugaacuugaucccauaguc

SEQ ID NO: 1314048 - RNA, 19 nt, Artificial Sequence
  Description of Artificial Sequence: Synthetic oligonucleotide
ugcugcuagaaaaucaaag

SEQ ID NO: 1314049 - RNA, 19 nt, Artificial Sequence
  Description of Artificial Sequence: Synthetic oligonucleotide
aaaauucuaacucguucca

SEQ ID NO: 1314050 - RNA, 19 nt, Artificial Sequence
  Description of Artificial Sequence: Synthetic oligonucleotide
acacuuauuccccaguauc

SEQ ID NO: 1314051 - RNA, 19 nt, Artificial Sequence
  Description of Artificial Sequence: Synthetic oligonucleotide
uguuccgaauccaauuccg

SEQ ID NO: 1314052 - RNA, 19 nt, Artificial Sequence
  Description of Artificial Sequence: Synthetic oligonucleotide
aggaacguccgauuggagc

SEQ ID NO: 1314053 - RNA, 19 nt, Artificial Sequence
  Description of Artificial Sequence: Synthetic oligonucleotide
aacuugaucccauagucaa

SEQ ID NO: 1314054 - RNA, 19 nt, Artificial Sequence
  Description of Artificial Sequence: Synthetic oligonucleotide
ugguuugacauguaaggag

SEQ ID NO: 1314055 - RNA, 19 nt, Artificial Sequence
  Description of Artificial Sequence: Synthetic oligonucleotide
agacggaaucauuucaugg

SEQ ID NO: 1314056 - RNA, 19 nt, Artificial Sequence
  Description of Artificial Sequence: Synthetic oligonucleotide
gaaaagaucagaagguuac

SEQ ID NO: 1314057 - RNA, 19 nt, Artificial Sequence
  Description of Artificial Sequence: Synthetic oligonucleotide
uuugaugcugacagcuugg

SEQ ID NO: 1314058 - RNA, 19 nt, Artificial Sequence
  Description of Artificial Sequence: Synthetic oligonucleotide
agagccguccacuucuucc

SEQ ID NO: 1314059 - RNA, 19 nt, Artificial Sequence
  Description of Artificial Sequence: Synthetic oligonucleotide
gaaaaggaacguccgauug

SEQ ID NO: 1314060 - RNA, 19 nt, Artificial Sequence
  Description of Artificial Sequence: Synthetic oligonucleotide
gaucccauagucaagugcc

SEQ ID NO: 1314061 - RNA, 19 nt, Artificial Sequence
  Description of Artificial Sequence: Synthetic oligonucleotide
ucuacauggauuuuccuua

SEQ ID NO: 1314062 - RNA, 19 nt, Artificial Sequence
  Description of Artificial Sequence: Synthetic oligonucleotide
aagaucagaagguuacuaa

SEQ ID NO: 1314063 - RNA, 19 nt, Artificial Sequence
  Description of Artificial Sequence: Synthetic oligonucleotide
uaguaggcugucgugaucg

SEQ ID NO: 1314064 - RNA, 19 nt, Artificial Sequence
  Description of Artificial Sequence: Synthetic oligonucleotide
cugcuagaaaaucaaagac

SEQ ID NO: 1314065 - RNA, 19 nt, Artificial Sequence
  Description of Artificial Sequence: Synthetic oligonucleotide
ugugaucuugaccccgugg

SEQ ID NO: 1314066 - RNA, 19 nt, Artificial Sequence
  Description of Artificial Sequence: Synthetic oligonucleotide
ugaacagguaaucguaggu

SEQ ID NO: 1314067 - RNA, 19 nt, Artificial Sequence
  Description of Artificial Sequence: Synthetic oligonucleotide
gaagguuacuaaaauaauc

SEQ ID NO: 1314068 - RNA, 19 nt, Artificial Sequence
  Description of Artificial Sequence: Synthetic oligonucleotide
uaaucguaggucuucgcca

SEQ ID NO: 1314069 - RNA, 19 nt, Artificial Sequence
  Description of Artificial Sequence: Synthetic oligonucleotide
aaaaucaucucagcuagaa

SEQ ID NO: 1314070 - RNA, 19 nt, Artificial Sequence
  Description of Artificial Sequence: Synthetic oligonucleotide
aagacggaaucauuucaug

SEQ ID NO: 1314071 - RNA, 19 nt, Artificial Sequence
  Description of Artificial Sequence: Synthetic oligonucleotide
agcucuaugguccuaauuu

SEQ ID NO: 1314072 - RNA, 19 nt, Artificial Sequence
  Description of Artificial Sequence: Synthetic oligonucleotide
agcaugauacccauggcac

SEQ ID NO: 1314073 - RNA, 19 nt, Artificial Sequence
  Description of Artificial Sequence: Synthetic oligonucleotide
auuucaugguguuaggaau

SEQ ID NO: 1314074 - RNA, 19 nt, Artificial Sequence
  Description of Artificial Sequence: Synthetic oligonucleotide
agauuuugaugcugacagc

SEQ ID NO: 1314075 - RNA, 19 nt, Artificial Sequence
  Description of Artificial Sequence: Synthetic oligonucleotide
aauccaauuccggauguug

SEQ ID NO: 1314076 - RNA, 19 nt, Artificial Sequence
  Description of Artificial Sequence: Synthetic oligonucleotide
guaaucguaggucuucgcc

SEQ ID NO: 1314077 - RNA, 19 nt, Artificial Sequence
  Description of Artificial Sequence: Synthetic oligonucleotide
gaugcugacagcuuggacu

SEQ ID NO: 1314078 - RNA, 19 nt, Artificial Sequence
  Description of Artificial Sequence: Synthetic oligonucleotide
auugauguuggccuucgca

SEQ ID NO: 1314079 - RNA, 19 nt, Artificial Sequence
  Description of Artificial Sequence: Synthetic oligonucleotide
uaggucuucgccauauuac

SEQ ID NO: 1314080 - RNA, 19 nt, Artificial Sequence
  Description of Artificial Sequence: Synthetic oligonucleotide
ucuaugguccuaauuuuaa

SEQ ID NO: 1314081 - RNA, 19 nt, Artificial Sequence
  Description of Artificial Sequence: Synthetic oligonucleotide
ugacagcuuggacugacag

SEQ ID NO: 1314082 - RNA, 19 nt, Artificial Sequence
  Description of Artificial Sequence: Synthetic oligonucleotide
cucguuccaucucugaagg

SEQ ID NO: 1314083 - RNA, 19 nt, Artificial Sequence
  Description of Artificial Sequence: Synthetic oligonucleotide
uguccaaaacugagaacag

SEQ ID NO: 1314084 - RNA, 19 nt, Artificial Sequence
  Description of Artificial Sequence: Synthetic oligonucleotide
ugugcuucccuuugguuug

SEQ ID NO: 1314085 - RNA, 19 nt, Artificial Sequence
  Description of Artificial Sequence: Synthetic oligonucleotide
ugguccuaauuuuaaaguc

SEQ ID NO: 1314086 - RNA, 19 nt, Artificial Sequence
  Description of Artificial Sequence: Synthetic oligonucleotide
auggcaauaugacaaggga

SEQ ID NO: 1314087 - RNA, 19 nt, Artificial Sequence
  Description of Artificial Sequence: Synthetic oligonucleotide
ucgugaucguccgaaaccg

SEQ ID NO: 1314088 - RNA, 19 nt, Artificial Sequence
  Description of Artificial Sequence: Synthetic oligonucleotide
aaaggaacguccgauugga

SEQ ID NO: 1314089 - RNA, 19 nt, Artificial Sequence
  Description of Artificial Sequence: Synthetic oligonucleotide
agcggaacaggacacaggu

SEQ ID NO: 1314090 - RNA, 19 nt, Artificial Sequence
  Description of Artificial Sequence: Synthetic oligonucleotide
cacaucacacuuauucccc

SEQ ID NO: 1314091 - RNA, 19 nt, Artificial Sequence
  Description of Artificial Sequence: Synthetic oligonucleotide
uucaauguuccgaauccaa

SEQ ID NO: 1314092 - RNA, 19 nt, Artificial Sequence
  Description of Artificial Sequence: Synthetic oligonucleotide
agaggaugagaagagcggg

SEQ ID NO: 1314093 - RNA, 19 nt, Artificial Sequence
  Description of Artificial Sequence: Synthetic oligonucleotide
gaacguggaguugaaggcg

SEQ ID NO: 1314094 - RNA, 19 nt, Artificial Sequence
  Description of Artificial Sequence: Synthetic oligonucleotide
guugaaggcguccucggag

SEQ ID NO: 1314095 - RNA, 19 nt, Artificial Sequence
  Description of Artificial Sequence: Synthetic oligonucleotide
uuugauaucccuggcgaga

SEQ ID NO: 1314096 - RNA, 19 nt, Artificial Sequence
  Description of Artificial Sequence: Synthetic oligonucleotide
uggauuuuccuuaguuugu

SEQ ID NO: 1314097 - RNA, 19 nt, Artificial Sequence
  Description of Artificial Sequence: Synthetic oligonucleotide
agaucagaagguuacuaaa

SEQ ID NO: 1314098 - RNA, 19 nt, Artificial Sequence
  Description of Artificial Sequence: Synthetic oligonucleotide
acggaaucauuucauggug

SEQ ID NO: 1314099 - RNA, 19 nt, Artificial Sequence
  Description of Artificial Sequence: Synthetic oligonucleotide
uggcaauaugacaagggau

SEQ ID NO: 1314100 - RNA, 19 nt, Artificial Sequence
  Description of Artificial Sequence: Synthetic oligonucleotide
aaaacugagaacagaugaa

SEQ ID NO: 1314101 - RNA, 19 nt, Artificial Sequence
  Description of Artificial Sequence: Synthetic oligonucleotide
uguauccgagcaguggagg

SEQ ID NO: 1314102 - RNA, 19 nt, Artificial Sequence
  Description of Artificial Sequence: Synthetic oligonucleotide
gaaggauuucucauuggug

SEQ ID NO: 1314103 - RNA, 19 nt, Artificial Sequence
  Description of Artificial Sequence: Synthetic oligonucleotide
auagucaagugccagcuuu

SEQ ID NO: 1314104 - RNA, 19 nt, Artificial Sequence
  Description of Artificial Sequence: Synthetic oligonucleotide
ucaauguuccgaauccaau

SEQ ID NO: 1314105 - RNA, 19 nt, Artificial Sequence
  Description of Artificial Sequence: Synthetic oligonucleotide
augagagccguccacuucu

SEQ ID NO: 1314106 - RNA, 19 nt, Artificial Sequence
  Description of Artificial Sequence: Synthetic oligonucleotide
aaagaucagaagguuacua

SEQ ID NO: 1314107 - RNA, 19 nt, Artificial Sequence
  Description of Artificial Sequence: Synthetic oligonucleotide
ucucugaagguggaaaaga

SEQ ID NO: 1314108 - RNA, 19 nt, Artificial Sequence
  Description of Artificial Sequence: Synthetic oligonucleotide
aucauuucaugguguuagg

SEQ ID NO: 1314109 - RNA, 19 nt, Artificial Sequence
  Description of Artificial Sequence: Synthetic oligonucleotide
gucgugaucguccgaaacc

SEQ ID NO: 1314110 - RNA, 19 nt, Artificial Sequence
  Description of Artificial Sequence: Synthetic oligonucleotide
agcacugugccguggaaug

SEQ ID NO: 1314111 - RNA, 19 nt, Artificial Sequence
  Description of Artificial Sequence: Synthetic oligonucleotide
caugauacccauggcaccc

SEQ ID NO: 1314112 - RNA, 19 nt, Artificial Sequence
  Description of Artificial Sequence: Synthetic oligonucleotide
ggcaauaugacaagggaug

SEQ ID NO: 1314113 - RNA, 19 nt, Artificial Sequence
  Description of Artificial Sequence: Synthetic oligonucleotide
ucgaaggauuucucauugg

SEQ ID NO: 1314114 - RNA, 19 nt, Artificial Sequence
  Description of Artificial Sequence: Synthetic oligonucleotide
acaagggauggacaggccu

SEQ ID NO: 1314115 - RNA, 19 nt, Artificial Sequence
  Description of Artificial Sequence: Synthetic oligonucleotide
uuccgaauccaauuccgga

SEQ ID NO: 1314116 - RNA, 19 nt, Artificial Sequence
  Description of Artificial Sequence: Synthetic oligonucleotide
guuccaucucugaaggugg

SEQ ID NO: 1314117 - RNA, 19 nt, Artificial Sequence
  Description of Artificial Sequence: Synthetic oligonucleotide
gguguuaggaaucuggaaa

SEQ ID NO: 1314118 - RNA, 19 nt, Artificial Sequence
  Description of Artificial Sequence: Synthetic oligonucleotide
gauuuugaugcugacagcu

SEQ ID NO: 1314119 - RNA, 19 nt, Artificial Sequence
  Description of Artificial Sequence: Synthetic oligonucleotide
uugucucuugucauucaca

SEQ ID NO: 1314120 - RNA, 19 nt, Artificial Sequence
  Description of Artificial Sequence: Synthetic oligonucleotide
aaaagaucagaagguuacu

SEQ ID NO: 1314121 - RNA, 19 nt, Artificial Sequence
  Description of Artificial Sequence: Synthetic oligonucleotide
ucgauggcaauaugacaag

SEQ ID NO: 1314122 - RNA, 19 nt, Artificial Sequence
  Description of Artificial Sequence: Synthetic oligonucleotide
uucgcacuggucuccauga

SEQ ID NO: 1314123 - RNA, 19 nt, Artificial Sequence
  Description of Artificial Sequence: Synthetic oligonucleotide
aagggaagauuuugaugcu

SEQ ID NO: 1314124 - RNA, 19 nt, Artificial Sequence
  Description of Artificial Sequence: Synthetic oligonucleotide
agguuacuaaaauaaucaa

SEQ ID NO: 1314125 - RNA, 19 nt, Artificial Sequence
  Description of Artificial Sequence: Synthetic oligonucleotide
ggauggacaggccugacug

SEQ ID NO: 1314126 - RNA, 19 nt, Artificial Sequence
  Description of Artificial Sequence: Synthetic oligonucleotide
uugucgaaggauuucucau

SEQ ID NO: 1314127 - RNA, 19 nt, Artificial Sequence
  Description of Artificial Sequence: Synthetic oligonucleotide
uccgaauccaauuccggau

SEQ ID NO: 1314128 - RNA, 19 nt, Artificial Sequence
  Description of Artificial Sequence: Synthetic oligonucleotide
cuuugauaucccuggcgag

SEQ ID NO: 1314129 - RNA, 19 nt, Artificial Sequence
  Description of Artificial Sequence: Synthetic oligonucleotide
gaucguccgaaaccgcucc

SEQ ID NO: 1314130 - RNA, 19 nt, Artificial Sequence
  Description of Artificial Sequence: Synthetic oligonucleotide
ucaauuguguccgggcggc

SEQ ID NO: 1314131 - RNA, 19 nt, Artificial Sequence
  Description of Artificial Sequence: Synthetic oligonucleotide
uucccuuugguuugacaug

SEQ ID NO: 1314132 - RNA, 19 nt, Artificial Sequence
  Description of Artificial Sequence: Synthetic oligonucleotide
ugguacguugguuuuaauu

SEQ ID NO: 1314133 - RNA, 19 nt, Artificial Sequence
  Description of Artificial Sequence: Synthetic oligonucleotide
agugguugugggugagugg

SEQ ID NO: 1314134 - RNA, 19 nt, Artificial Sequence
  Description of Artificial Sequence: Synthetic oligonucleotide
ugucgugaucguccgaaac

SEQ ID NO: 1314135 - RNA, 19 nt, Artificial Sequence
  Description of Artificial Sequence: Synthetic oligonucleotide
aaaauccucuacauggauu

SEQ ID NO: 1314136 - RNA, 19 nt, Artificial Sequence
  Description of Artificial Sequence: Synthetic oligonucleotide
gacggaaucauuucauggu

SEQ ID NO: 1314137 - RNA, 19 nt, Artificial Sequence
  Description of Artificial Sequence: Synthetic oligonucleotide
cuugucucuugucauucac

SEQ ID NO: 1314138 - RNA, 19 nt, Artificial Sequence
  Description of Artificial Sequence: Synthetic oligonucleotide
caagggauggacaggccug

SEQ ID NO: 1314139 - RNA, 19 nt, Artificial Sequence
  Description of Artificial Sequence: Synthetic oligonucleotide
aucaaagacggaaucauuu

SEQ ID NO: 1314140 - RNA, 19 nt, Artificial Sequence
  Description of Artificial Sequence: Synthetic oligonucleotide
caaagacggaaucauuuca

SEQ ID NO: 1314141 - RNA, 19 nt, Artificial Sequence
  Description of Artificial Sequence: Synthetic oligonucleotide
gaucagaagguuacuaaaa

SEQ ID NO: 1314142 - RNA, 19 nt, Artificial Sequence
  Description of Artificial Sequence: Synthetic oligonucleotide
uucuaugguagaggggcag

SEQ ID NO: 1314143 - RNA, 19 nt, Artificial Sequence
  Description of Artificial Sequence: Synthetic oligonucleotide
ccugcaguggcucuugugg

SEQ ID NO: 1314144 - RNA, 19 nt, Artificial Sequence
  Description of Artificial Sequence: Synthetic oligonucleotide
ugaucaccuggguaugcug

SEQ ID NO: 1314145 - RNA, 19 nt, Artificial Sequence
  Description of Artificial Sequence: Synthetic oligonucleotide
cacuuauuccccaguauca

SEQ ID NO: 1314146 - RNA, 19 nt, Artificial Sequence
  Description of Artificial Sequence: Synthetic oligonucleotide
aauuguguccgggcggcug

SEQ ID NO: 1314147 - RNA, 19 nt, Artificial Sequence
  Description of Artificial Sequence: Synthetic oligonucleotide
uccaauuccggauguuguc

SEQ ID NO: 1314148 - RNA, 19 nt, Artificial Sequence
  Description of Artificial Sequence: Synthetic oligonucleotide
auacccauggcaccccugu

SEQ ID NO: 1314149 - RNA, 19 nt, Artificial Sequence
  Description of Artificial Sequence: Synthetic oligonucleotide
uguccgggcggcuguaucc

SEQ ID NO: 1314150 - RNA, 19 nt, Artificial Sequence
  Description of Artificial Sequence: Synthetic oligonucleotide
auguaaggagacaggggac

SEQ ID NO: 1314151 - RNA, 19 nt, Artificial Sequence
  Description of Artificial Sequence: Synthetic oligonucleotide
ggauacuugucucuuguca

SEQ ID NO: 1314152 - RNA, 19 nt, Artificial Sequence
  Description of Artificial Sequence: Synthetic oligonucleotide
ggagaagcggaacaggaca

SEQ ID NO: 1314153 - RNA, 19 nt, Artificial Sequence
  Description of Artificial Sequence: Synthetic oligonucleotide
uccuuggauacuugucucu

SEQ ID NO: 1314154 - RNA, 19 nt, Artificial Sequence
  Description of Artificial Sequence: Synthetic oligonucleotide
aucucugaagguggaaaag

SEQ ID NO: 1314155 - RNA, 19 nt, Artificial Sequence
  Description of Artificial Sequence: Synthetic oligonucleotide
cugcaccggaagaagcugg

SEQ ID NO: 1314156 - RNA, 19 nt, Artificial Sequence
  Description of Artificial Sequence: Synthetic oligonucleotide
cacuucuaugguagagggg

SEQ ID NO: 1314157 - RNA, 19 nt, Artificial Sequence
  Description of Artificial Sequence: Synthetic oligonucleotide
guuccgaauccaauuccgg

SEQ ID NO: 1314158 - RNA, 19 nt, Artificial Sequence
  Description of Artificial Sequence: Synthetic oligonucleotide
uggaaaagaucagaagguu

SEQ ID NO: 1314159 - RNA, 19 nt, Artificial Sequence
  Description of Artificial Sequence: Synthetic oligonucleotide
gcaauaugacaagggaugg

SEQ ID NO: 1314160 - RNA, 19 nt, Artificial Sequence
  Description of Artificial Sequence: Synthetic oligonucleotide
ugguguuaggaaucuggaa

SEQ ID NO: 1314161 - RNA, 19 nt, Artificial Sequence
  Description of Artificial Sequence: Synthetic oligonucleotide
ugaucguccgaaaccgcuc

SEQ ID NO: 1314162 - RNA, 19 nt, Artificial Sequence
  Description of Artificial Sequence: Synthetic oligonucleotide
auccgagcaguggaggugg

SEQ ID NO: 1314163 - RNA, 19 nt, Artificial Sequence
  Description of Artificial Sequence: Synthetic oligonucleotide
guggugaguccccucagug

SEQ ID NO: 1314164 - RNA, 19 nt, Artificial Sequence
  Description of Artificial Sequence: Synthetic oligonucleotide
ugccaucaagcucuauggu

SEQ ID NO: 1314165 - RNA, 19 nt, Artificial Sequence
  Description of Artificial Sequence: Synthetic oligonucleotide
aacguggaguugaaggcgu

SEQ ID NO: 1314166 - RNA, 19 nt, Artificial Sequence
  Description of Artificial Sequence: Synthetic oligonucleotide
gcuuugauaucccuggcga

SEQ ID NO: 1314167 - RNA, 19 nt, Artificial Sequence
  Description of Artificial Sequence: Synthetic oligonucleotide
aagcggaacaggacacagg

SEQ ID NO: 1314168 - RNA, 19 nt, Artificial Sequence
  Description of Artificial Sequence: Synthetic oligonucleotide
augucguagaccagcauga

SEQ ID NO: 1314169 - RNA, 19 nt, Artificial Sequence
  Description of Artificial Sequence: Synthetic oligonucleotide
acaucacacuuauucccca

SEQ ID NO: 1314170 - RNA, 19 nt, Artificial Sequence
  Description of Artificial Sequence: Synthetic oligonucleotide
cuguauccgagcaguggag

SEQ ID NO: 1314171 - RNA, 19 nt, Artificial Sequence
  Description of Artificial Sequence: Synthetic oligonucleotide
gguacguugguuuuaauuu

SEQ ID NO: 1314172 - RNA, 19 nt, Artificial Sequence
  Description of Artificial Sequence: Synthetic oligonucleotide
ucugguacguugguuuuaa

SEQ ID NO: 1314173 - RNA, 19 nt, Artificial Sequence
  Description of Artificial Sequence: Synthetic oligonucleotide
gagaagcggaacaggacac

SEQ ID NO: 1314174 - RNA, 19 nt, Artificial Sequence
  Description of Artificial Sequence: Synthetic oligonucleotide
uauccgagcaguggaggug

SEQ ID NO: 1314175 - RNA, 19 nt, Artificial Sequence
  Description of Artificial Sequence: Synthetic oligonucleotide
augauacccauggcacccc

SEQ ID NO: 1314176 - RNA, 19 nt, Artificial Sequence
  Description of Artificial Sequence: Synthetic oligonucleotide
cuagaaaaggaacguccga

SEQ ID NO: 1314177 - RNA, 19 nt, Artificial Sequence
  Description of Artificial Sequence: Synthetic oligonucleotide
caucgauggcaauaugaca

SEQ ID NO: 1314178 - RNA, 19 nt, Artificial Sequence
  Description of Artificial Sequence: Synthetic oligonucleotide
agucaagugccagcuuuuc

SEQ ID NO: 1314179 - RNA, 19 nt, Artificial Sequence
  Description of Artificial Sequence: Synthetic oligonucleotide
ggaccacagacucccaucc

SEQ ID NO: 1314180 - RNA, 19 nt, Artificial Sequence
  Description of Artificial Sequence: Synthetic oligonucleotide
cuagaaaaucaaagacgga

SEQ ID NO: 1314181 - RNA, 19 nt, Artificial Sequence
  Description of Artificial Sequence: Synthetic oligonucleotide
auuguguccgggcggcugu

SEQ ID NO: 1314182 - RNA, 19 nt, Artificial Sequence
  Description of Artificial Sequence: Synthetic oligonucleotide
cuucgcacuggucuccaug

SEQ ID NO: 1314183 - RNA, 19 nt, Artificial Sequence
  Description of Artificial Sequence: Synthetic oligonucleotide
guggccaugagagccgucc

SEQ ID NO: 1314184 - RNA, 19 nt, Artificial Sequence
  Description of Artificial Sequence: Synthetic oligonucleotide
ucccuggcgagagugaaaa

SEQ ID NO: 1314185 - RNA, 19 nt, Artificial Sequence
  Description of Artificial Sequence: Synthetic oligonucleotide
uuccaucucugaaggugga

SEQ ID NO: 1314186 - RNA, 19 nt, Artificial Sequence
  Description of Artificial Sequence: Synthetic oligonucleotide
gaggcugcaccggaagaag

SEQ ID NO: 1314187 - RNA, 19 nt, Artificial Sequence
  Description of Artificial Sequence: Synthetic oligonucleotide
aggaugagaagagcgggga

SEQ ID NO: 1314188 - RNA, 19 nt, Artificial Sequence
  Description of Artificial Sequence: Synthetic oligonucleotide
guaggucuucgccauauua

SEQ ID NO: 1314189 - RNA, 19 nt, Artificial Sequence
  Description of Artificial Sequence: Synthetic oligonucleotide
aggcugucgugaucguccg

SEQ ID NO: 1314190 - RNA, 19 nt, Artificial Sequence
  Description of Artificial Sequence: Synthetic oligonucleotide
ugcaccggaagaagcuggu

SEQ ID NO: 1314191 - RNA, 19 nt, Artificial Sequence
  Description of Artificial Sequence: Synthetic oligonucleotide
guuugacauguaaggagac

SEQ ID NO: 1314192 - RNA, 19 nt, Artificial Sequence
  Description of Artificial Sequence: Synthetic oligonucleotide
gagccguccacuucuucca

SEQ ID NO: 1314193 - RNA, 19 nt, Artificial Sequence
  Description of Artificial Sequence: Synthetic oligonucleotide
auaugacaagggauggaca

SEQ ID NO: 1314194 - RNA, 19 nt, Artificial Sequence
  Description of Artificial Sequence: Synthetic oligonucleotide
augguguuaggaaucugga

SEQ ID NO: 1314195 - RNA, 19 nt, Artificial Sequence
  Description of Artificial Sequence: Synthetic oligonucleotide
ugguggugaguccccucag

SEQ ID NO: 1314196 - RNA, 19 nt, Artificial Sequence
  Description of Artificial Sequence: Synthetic oligonucleotide
uugaugcugacagcuugga

SEQ ID NO: 1314197 - RNA, 19 nt, Artificial Sequence
  Description of Artificial Sequence: Synthetic oligonucleotide
ugauacccauggcaccccu

SEQ ID NO: 1314198 - RNA, 19 nt, Artificial Sequence
  Description of Artificial Sequence: Synthetic oligonucleotide
auccaauuccggauguugu

SEQ ID NO: 1314199 - RNA, 19 nt, Artificial Sequence
  Description of Artificial Sequence: Synthetic oligonucleotide
aaaacgcauucuccacauu

SEQ ID NO: 1314200 - RNA, 19 nt, Artificial Sequence
  Description of Artificial Sequence: Synthetic oligonucleotide
uugugggugagugguggug

SEQ ID NO: 1314201 - RNA, 19 nt, Artificial Sequence
  Description of Artificial Sequence: Synthetic oligonucleotide
gguugggcaccgcugcugg

SEQ ID NO: 1314202 - RNA, 19 nt, Artificial Sequence
  Description of Artificial Sequence: Synthetic oligonucleotide
gucucagggaccaggugcc

SEQ ID NO: 1314203 - RNA, 19 nt, Artificial Sequence
  Description of Artificial Sequence: Synthetic oligonucleotide
cuaugguccuaauuuuaaa

SEQ ID NO: 1314204 - RNA, 19 nt, Artificial Sequence
  Description of Artificial Sequence: Synthetic oligonucleotide
ggacaugguucuuugccac

SEQ ID NO: 1314205 - RNA, 19 nt, Artificial Sequence
  Description of Artificial Sequence: Synthetic oligonucleotide
gccaucaagcucuaugguc

SEQ ID NO: 1314206 - RNA, 19 nt, Artificial Sequence
  Description of Artificial Sequence: Synthetic oligonucleotide
ccaauuccggauguugucg

SEQ ID NO: 1314207 - RNA, 19 nt, Artificial Sequence
  Description of Artificial Sequence: Synthetic oligonucleotide
ggauuuuccuuaguuugug

SEQ ID NO: 1314208 - RNA, 19 nt, Artificial Sequence
  Description of Artificial Sequence: Synthetic oligonucleotide
caugagagccguccacuuc

SEQ ID NO: 1314209 - RNA, 19 nt, Artificial Sequence
  Description of Artificial Sequence: Synthetic oligonucleotide
cacugugccguggaaugcc

SEQ ID NO: 1314210 - RNA, 19 nt, Artificial Sequence
  Description of Artificial Sequence: Synthetic oligonucleotide
caauuccggauguugucga

SEQ ID NO: 1314211 - RNA, 19 nt, Artificial Sequence
  Description of Artificial Sequence: Synthetic oligonucleotide
cuccccgcuccuuggauac

SEQ ID NO: 1314212 - RNA, 19 nt, Artificial Sequence
  Description of Artificial Sequence: Synthetic oligonucleotide
acgcauucuccacauugau

SEQ ID NO: 1314213 - RNA, 19 nt, Artificial Sequence
  Description of Artificial Sequence: Synthetic oligonucleotide
aacguccgauuggagccag

SEQ ID NO: 1314214 - RNA, 19 nt, Artificial Sequence
  Description of Artificial Sequence: Synthetic oligonucleotide
aaggaacguccgauuggag

SEQ ID NO: 1314215 - RNA, 19 nt, Artificial Sequence
  Description of Artificial Sequence: Synthetic oligonucleotide
gcaugauacccauggcacc

SEQ ID NO: 1314216 - RNA, 19 nt, Artificial Sequence
  Description of Artificial Sequence: Synthetic oligonucleotide
cucuaugguccuaauuuua

SEQ ID NO: 1314217 - RNA, 19 nt, Artificial Sequence
  Description of Artificial Sequence: Synthetic oligonucleotide
uccuuaguuugugcuuccc

SEQ ID NO: 1314218 - RNA, 19 nt, Artificial Sequence
  Description of Artificial Sequence: Synthetic oligonucleotide
uggagccagccagaggaug

SEQ ID NO: 1314219 - RNA, 19 nt, Artificial Sequence
  Description of Artificial Sequence: Synthetic oligonucleotide
uccugaucaccuggguaug

SEQ ID NO: 1314220 - RNA, 19 nt, Artificial Sequence
  Description of Artificial Sequence: Synthetic oligonucleotide
gacagugguugugggugag

SEQ ID NO: 1314221 - RNA, 19 nt, Artificial Sequence
  Description of Artificial Sequence: Synthetic oligonucleotide
guccgaaaccgcuccuggc

SEQ ID NO: 1314222 - RNA, 19 nt, Artificial Sequence
  Description of Artificial Sequence: Synthetic oligonucleotide
ggcuguauccgagcagugg

SEQ ID NO: 1314223 - RNA, 19 nt, Artificial Sequence
  Description of Artificial Sequence: Synthetic oligonucleotide
uggccucacuucuauggua

SEQ ID NO: 1314224 - RNA, 19 nt, Artificial Sequence
  Description of Artificial Sequence: Synthetic oligonucleotide
cauugauguuggccuucgc

SEQ ID NO: 1314225 - RNA, 19 nt, Artificial Sequence
  Description of Artificial Sequence: Synthetic oligonucleotide
cuucuaugguagaggggca

SEQ ID NO: 1314226 - RNA, 19 nt, Artificial Sequence
  Description of Artificial Sequence: Synthetic oligonucleotide
ggaaaagaucagaagguua

SEQ ID NO: 1314227 - RNA, 19 nt, Artificial Sequence
  Description of Artificial Sequence: Synthetic oligonucleotide
agcggggaggcgguuuugg

SEQ ID NO: 1314228 - RNA, 19 nt, Artificial Sequence
  Description of Artificial Sequence: Synthetic oligonucleotide
cagcuagaaaaggaacguc

SEQ ID NO: 1314229 - RNA, 19 nt, Artificial Sequence
  Description of Artificial Sequence: Synthetic oligonucleotide
agaagcggaacaggacaca

SEQ ID NO: 1314230 - RNA, 19 nt, Artificial Sequence
  Description of Artificial Sequence: Synthetic oligonucleotide
caauguuccgaauccaauu

SEQ ID NO: 1314231 - RNA, 19 nt, Artificial Sequence
  Description of Artificial Sequence: Synthetic oligonucleotide
gauacccauggcaccccug

SEQ ID NO: 1314232 - RNA, 19 nt, Artificial Sequence
  Description of Artificial Sequence: Synthetic oligonucleotide
ccacagacucccauccugc

SEQ ID NO: 1314233 - RNA, 19 nt, Artificial Sequence
  Description of Artificial Sequence: Synthetic oligonucleotide
ggugcucgggguauggggc

SEQ ID NO: 1314234 - RNA, 19 nt, Artificial Sequence
  Description of Artificial Sequence: Synthetic oligonucleotide
ggugaguccccucagugcu

SEQ ID NO: 1314235 - RNA, 19 nt, Artificial Sequence
  Description of Artificial Sequence: Synthetic oligonucleotide
ggcgguuuuggugccauug

SEQ ID NO: 1314236 - RNA, 19 nt, Artificial Sequence
  Description of Artificial Sequence: Synthetic oligonucleotide
agucacgcugguuccugau

SEQ ID NO: 1314237 - RNA, 19 nt, Artificial Sequence
  Description of Artificial Sequence: Synthetic oligonucleotide
ucguuccaucucugaaggu

SEQ ID NO: 1314238 - RNA, 19 nt, Artificial Sequence
  Description of Artificial Sequence: Synthetic oligonucleotide
ccgaauccaauuccggaug

SEQ ID NO: 1314239 - RNA, 19 nt, Artificial Sequence
  Description of Artificial Sequence: Synthetic oligonucleotide
uggccuucgcacuggucuc

SEQ ID NO: 1314240 - RNA, 19 nt, Artificial Sequence
  Description of Artificial Sequence: Synthetic oligonucleotide
aguaggcugucgugaucgu

SEQ ID NO: 1314241 - RNA, 19 nt, Artificial Sequence
  Description of Artificial Sequence: Synthetic oligonucleotide
cacauugauguuggccuuc

SEQ ID NO: 1314242 - RNA, 19 nt, Artificial Sequence
  Description of Artificial Sequence: Synthetic oligonucleotide
gucguagaccagcaugaua

SEQ ID NO: 1314243 - RNA, 19 nt, Artificial Sequence
  Description of Artificial Sequence: Synthetic oligonucleotide
guauccgagcaguggaggu

SEQ ID NO: 1314244 - RNA, 19 nt, Artificial Sequence
  Description of Artificial Sequence: Synthetic oligonucleotide
gacaugguucuuugccacu

SEQ ID NO: 1314245 - RNA, 19 nt, Artificial Sequence
  Description of Artificial Sequence: Synthetic oligonucleotide
acaggccugacuggcagau

SEQ ID NO: 1314246 - RNA, 19 nt, Artificial Sequence
  Description of Artificial Sequence: Synthetic oligonucleotide
guccgggcggcuguauccg

SEQ ID NO: 1314247 - RNA, 19 nt, Artificial Sequence
  Description of Artificial Sequence: Synthetic oligonucleotide
ugucguagaccagcaugau

SEQ ID NO: 1314248 - RNA, 19 nt, Artificial Sequence
  Description of Artificial Sequence: Synthetic oligonucleotide
cacgcugguuccugaucac

SEQ ID NO: 1314249 - RNA, 19 nt, Artificial Sequence
  Description of Artificial Sequence: Synthetic oligonucleotide
ggucuucgccauauuacac

SEQ ID NO: 1314250 - RNA, 19 nt, Artificial Sequence
  Description of Artificial Sequence: Synthetic oligonucleotide
accuggguaugcugcuaga

SEQ ID NO: 1314251 - RNA, 19 nt, Artificial Sequence
  Description of Artificial Sequence: Synthetic oligonucleotide
aucguccgaaaccgcuccu

SEQ ID NO: 1314252 - RNA, 19 nt, Artificial Sequence
  Description of Artificial Sequence: Synthetic oligonucleotide
gaccccguggcugcuuccc

SEQ ID NO: 1314253 - RNA, 19 nt, Artificial Sequence
  Description of Artificial Sequence: Synthetic oligonucleotide
agaagagcggggaggcggu

SEQ ID NO: 1314254 - RNA, 19 nt, Artificial Sequence
  Description of Artificial Sequence: Synthetic oligonucleotide
agagcggggaggcgguuuu

SEQ ID NO: 1314255 - RNA, 19 nt, Artificial Sequence
  Description of Artificial Sequence: Synthetic oligonucleotide
ucgcacuggucuccaugaa

SEQ ID NO: 1314256 - RNA, 19 nt, Artificial Sequence
  Description of Artificial Sequence: Synthetic oligonucleotide
agguugggcaccgcugcug

SEQ ID NO: 1314257 - RNA, 19 nt, Artificial Sequence
  Description of Artificial Sequence: Synthetic oligonucleotide
cugugccguggaaugccug

SEQ ID NO: 1314258 - RNA, 19 nt, Artificial Sequence
  Description of Artificial Sequence: Synthetic oligonucleotide
ucgggguauggggccaggc

SEQ ID NO: 1314259 - RNA, 19 nt, Artificial Sequence
  Description of Artificial Sequence: Synthetic oligonucleotide
ccguggaaugccugucugg

SEQ ID NO: 1314260 - RNA, 19 nt, Artificial Sequence
  Description of Artificial Sequence: Synthetic oligonucleotide
guccgauuggagccagcca

SEQ ID NO: 1314261 - RNA, 19 nt, Artificial Sequence
  Description of Artificial Sequence: Synthetic oligonucleotide
aagagcggggaggcgguuu

SEQ ID NO: 1314262 - RNA, 19 nt, Artificial Sequence
  Description of Artificial Sequence: Synthetic oligonucleotide
uccgagcaguggaggugga

SEQ ID NO: 1314263 - RNA, 19 nt, Artificial Sequence
  Description of Artificial Sequence: Synthetic oligonucleotide
gccguggaaugccugucug

SEQ ID NO: 1314264 - RNA, 19 nt, Artificial Sequence
  Description of Artificial Sequence: Synthetic oligonucleotide
gugaucguccgaaaccgcu

SEQ ID NO: 1314265 - RNA, 19 nt, Artificial Sequence
  Description of Artificial Sequence: Synthetic oligonucleotide
gggcagucacgcugguucc

SEQ ID NO: 1314266 - RNA, 19 nt, Artificial Sequence
  Description of Artificial Sequence: Synthetic oligonucleotide
gccacuuguccaaaacuga

SEQ ID NO: 1314267 - RNA, 19 nt, Artificial Sequence
  Description of Artificial Sequence: Synthetic oligonucleotide
acguggaguugaaggcguc

SEQ ID NO: 1314268 - RNA, 19 nt, Artificial Sequence
  Description of Artificial Sequence: Synthetic oligonucleotide
ggcggcuguauccgagcag

SEQ ID NO: 1314269 - RNA, 19 nt, Artificial Sequence
  Description of Artificial Sequence: Synthetic oligonucleotide
acugugccguggaaugccu

SEQ ID NO: 1314270 - RNA, 19 nt, Artificial Sequence
  Description of Artificial Sequence: Synthetic oligonucleotide
gcugcaccggaagaagcug

SEQ ID NO: 1314271 - RNA, 19 nt, Artificial Sequence
  Description of Artificial Sequence: Synthetic oligonucleotide
cguagaccagcaugauacc

SEQ ID NO: 1314272 - RNA, 19 nt, Artificial Sequence
  Description of Artificial Sequence: Synthetic oligonucleotide
cacacuuauuccccaguau

SEQ ID NO: 1314273 - RNA, 19 nt, Artificial Sequence
  Description of Artificial Sequence: Synthetic oligonucleotide
gcugucgugaucguccgaa

SEQ ID NO: 1314274 - RNA, 19 nt, Artificial Sequence
  Description of Artificial Sequence: Synthetic oligonucleotide
gcgguuuuggugccauuga

SEQ ID NO: 1314275 - RNA, 19 nt, Artificial Sequence
  Description of Artificial Sequence: Synthetic oligonucleotide
aggauggcggugaccuugu

SEQ ID NO: 1314276 - RNA, 19 nt, Artificial Sequence
  Description of Artificial Sequence: Synthetic oligonucleotide
ccuuugguuugacauguaa

SEQ ID NO: 1314277 - RNA, 19 nt, Artificial Sequence
  Description of Artificial Sequence: Synthetic oligonucleotide
uccgggcggcuguauccga

SEQ ID NO: 1314278 - RNA, 19 nt, Artificial Sequence
  Description of Artificial Sequence: Synthetic oligonucleotide
guguccgggcggcuguauc

SEQ ID NO: 1314279 - RNA, 19 nt, Artificial Sequence
  Description of Artificial Sequence: Synthetic oligonucleotide
acguccgauuggagccagc

SEQ ID NO: 1314280 - RNA, 19 nt, Artificial Sequence
  Description of Artificial Sequence: Synthetic oligonucleotide
gaccacagacucccauccu

SEQ ID NO: 1314281 - RNA, 19 nt, Artificial Sequence
  Description of Artificial Sequence: Synthetic oligonucleotide
uggcggugaccuuguccuc

SEQ ID NO: 1314282 - RNA, 19 nt, Artificial Sequence
  Description of Artificial Sequence: Synthetic oligonucleotide
ggugccccuguguggccag

SEQ ID NO: 1314283 - RNA, 19 nt, Artificial Sequence
  Description of Artificial Sequence: Synthetic oligonucleotide
gcagucacgcugguuccug

SEQ ID NO: 1314284 - RNA, 19 nt, Artificial Sequence
  Description of Artificial Sequence: Synthetic oligonucleotide
cguccgauuggagccagcc

SEQ ID NO: 1314285 - RNA, 19 nt, Artificial Sequence
  Description of Artificial Sequence: Synthetic oligonucleotide
gcucuaugguccuaauuuu

SEQ ID NO: 1314286 - RNA, 19 nt, Artificial Sequence
  Description of Artificial Sequence: Synthetic oligonucleotide
ugcuucccuuugguuugac

SEQ ID NO: 1314287 - RNA, 19 nt, Artificial Sequence
  Description of Artificial Sequence: Synthetic oligonucleotide
cugucgugaucguccgaaa

SEQ ID NO: 1314288 - RNA, 19 nt, Artificial Sequence
  Description of Artificial Sequence: Synthetic oligonucleotide
cgugaucguccgaaaccgc

SEQ ID NO: 1314289 - RNA, 19 nt, Artificial Sequence
  Description of Artificial Sequence: Synthetic oligonucleotide
uguguccgggcggcuguau

SEQ ID NO: 1314290 - RNA, 19 nt, Artificial Sequence
  Description of Artificial Sequence: Synthetic oligonucleotide
ggcggugaccuuguccuca

SEQ ID NO: 1314291 - RNA, 19 nt, Artificial Sequence
  Description of Artificial Sequence: Synthetic oligonucleotide
cucgggguauggggccagg

SEQ ID NO: 1314292 - RNA, 19 nt, Artificial Sequence
  Description of Artificial Sequence: Synthetic oligonucleotide
gcacugugccguggaaugc

SEQ ID NO: 1314293 - RNA, 19 nt, Artificial Sequence
  Description of Artificial Sequence: Synthetic oligonucleotide
ggcggugcucgggguaugg

SEQ ID NO: 1314294 - RNA, 19 nt, Artificial Sequence
  Description of Artificial Sequence: Synthetic oligonucleotide
guuggccuucgcacugguc

SEQ ID NO: 1314295 - RNA, 19 nt, Artificial Sequence
  Description of Artificial Sequence: Synthetic oligonucleotide
caccccuguaguaggcugu

SEQ ID NO: 1314296 - RNA, 19 nt, Artificial Sequence
  Description of Artificial Sequence: Synthetic oligonucleotide
gagcggggaggcgguuuug

SEQ ID NO: 1314297 - RNA, 19 nt, Artificial Sequence
  Description of Artificial Sequence: Synthetic oligonucleotide
gguggugaguccccucagu

SEQ ID NO: 1314298 - RNA, 19 nt, Artificial Sequence
  Description of Artificial Sequence: Synthetic oligonucleotide
ggguaugcugcuagaaaau

SEQ ID NO: 1314299 - RNA, 19 nt, Artificial Sequence
  Description of Artificial Sequence: Synthetic oligonucleotide
uggcggugcucgggguaug

SEQ ID NO: 1314300 - RNA, 19 nt, Artificial Sequence
  Description of Artificial Sequence: Synthetic oligonucleotide
gcggcuguauccgagcagu

SEQ ID NO: 1314301 - RNA, 19 nt, Artificial Sequence
  Description of Artificial Sequence: Synthetic oligonucleotide
ccgggcggcuguauccgag

SEQ ID NO: 1314302 - RNA, 19 nt, Artificial Sequence
  Description of Artificial Sequence: Synthetic oligonucleotide
uuguguccgggcggcugua

SEQ ID NO: 1314303 - RNA, 19 nt, Artificial Sequence
  Description of Artificial Sequence: Synthetic oligonucleotide
gcggugcucgggguauggg

SEQ ID NO: 1314304 - RNA, 19 nt, Artificial Sequence
  Description of Artificial Sequence: Synthetic oligonucleotide
cucgcccggggcaggcaca

SEQ ID NO: 1314305 - RNA, 19 nt, Artificial Sequence
  Description of Artificial Sequence: Synthetic oligonucleotide
gaggcgguuuuggugccau

SEQ ID NO: 1314306 - RNA, 19 nt, Artificial Sequence
  Description of Artificial Sequence: Synthetic oligonucleotide
aggcgguuuuggugccauu

SEQ ID NO: 1314307 - RNA, 19 nt, Artificial Sequence
  Description of Artificial Sequence: Synthetic oligonucleotide
caggcagguugggcaccgc

SEQ ID NO: 1314308 - RNA, 19 nt, Artificial Sequence
  Description of Artificial Sequence: Synthetic oligonucleotide
cccuguaguaggcugucgu

SEQ ID NO: 1314309 - RNA, 19 nt, Artificial Sequence
  Description of Artificial Sequence: Synthetic oligonucleotide
cggaaucauuucauggugu

SEQ ID NO: 1314310 - RNA, 19 nt, Artificial Sequence
  Description of Artificial Sequence: Synthetic oligonucleotide
cugcuggccucacuucuau

SEQ ID NO: 1314311 - RNA, 19 nt, Artificial Sequence
  Description of Artificial Sequence: Synthetic oligonucleotide
gcggaacaggacacagguc

SEQ ID NO: 1314312 - RNA, 19 nt, Artificial Sequence
  Description of Artificial Sequence: Synthetic oligonucleotide
gguauggggccaggcaggu

SEQ ID NO: 1314313 - RNA, 19 nt, Artificial Sequence
  Description of Artificial Sequence: Synthetic oligonucleotide
cgggcggcuguauccgagc

SEQ ID NO: 1314314 - RNA, 19 nt, Artificial Sequence
  Description of Artificial Sequence: Synthetic oligonucleotide
ggcucuuguggcggugcuc

SEQ ID NO: 1314315 - RNA, 19 nt, Artificial Sequence
  Description of Artificial Sequence: Synthetic oligonucleotide
ggcaccgcugcuggccuca

SEQ ID NO: 1314316 - RNA, 19 nt, Artificial Sequence
  Description of Artificial Sequence: Synthetic oligonucleotide
ccgagcaguggagguggag

SEQ ID NO: 1314317 - RNA, 19 nt, Artificial Sequence
  Description of Artificial Sequence: Synthetic oligonucleotide
cagguugggcaccgcugcu

SEQ ID NO: 1314318 - RNA, 19 nt, Artificial Sequence
  Description of Artificial Sequence: Synthetic oligonucleotide
ggcugucgugaucguccga

SEQ ID NO: 1314319 - RNA, 19 nt, Artificial Sequence
  Description of Artificial Sequence: Synthetic oligonucleotide
ccucuacauggauuuuccu

SEQ ID NO: 1314320 - RNA, 19 nt, Artificial Sequence
  Description of Artificial Sequence: Synthetic oligonucleotide
gcucuucaauguuccgaau

SEQ ID NO: 1314321 - RNA, 19 nt, Artificial Sequence
  Description of Artificial Sequence: Synthetic oligonucleotide
cgaauccaauuccggaugu

SEQ ID NO: 1314322 - RNA, 19 nt, Artificial Sequence
  Description of Artificial Sequence: Synthetic oligonucleotide
cugguacguugguuuuaau

SEQ ID NO: 1314323 - RNA, 19 nt, Artificial Sequence
  Description of Artificial Sequence: Synthetic oligonucleotide
cggggcaggcacagucagc

SEQ ID NO: 1314324 - RNA, 19 nt, Artificial Sequence
  Description of Artificial Sequence: Synthetic oligonucleotide
cgggguauggggccaggca

SEQ ID NO: 1314325 - RNA, 19 nt, Artificial Sequence
  Description of Artificial Sequence: Synthetic oligonucleotide
cccaccccaccucucucca

SEQ ID NO: 1314326 - RNA, 19 nt, Artificial Sequence
  Description of Artificial Sequence: Synthetic oligonucleotide
gccuucgcacuggucucca

SEQ ID NO: 1314327 - RNA, 19 nt, Artificial Sequence
  Description of Artificial Sequence: Synthetic oligonucleotide
ggcaccccuguaguaggcu

SEQ ID NO: 1314328 - RNA, 19 nt, Artificial Sequence
  Description of Artificial Sequence: Synthetic oligonucleotide
caauuguguccgggcggcu

SEQ ID NO: 1314329 - RNA, 19 nt, Artificial Sequence
  Description of Artificial Sequence: Synthetic oligonucleotide
gcggggaggcgguuuuggu

SEQ ID NO: 1314330 - RNA, 19 nt, Artificial Sequence
  Description of Artificial Sequence: Synthetic oligonucleotide
ccguggcugcuucccugug

SEQ ID NO: 1314331 - RNA, 19 nt, Artificial Sequence
  Description of Artificial Sequence: Synthetic oligonucleotide
gaagagcggggaggcgguu

SEQ ID NO: 1314332 - RNA, 19 nt, Artificial Sequence
  Description of Artificial Sequence: Synthetic oligonucleotide
ggcagucacgcugguuccu

SEQ ID NO: 1314333 - RNA, 19 nt, Artificial Sequence
  Description of Artificial Sequence: Synthetic oligonucleotide
ccaugagagccguccacuu

SEQ ID NO: 1314334 - RNA, 19 nt, Artificial Sequence
  Description of Artificial Sequence: Synthetic oligonucleotide
cuugaccccguggcugcuu

SEQ ID NO: 1314335 - RNA, 19 nt, Artificial Sequence
  Description of Artificial Sequence: Synthetic oligonucleotide
guauggggccaggcagguu

SEQ ID NO: 1314336 - RNA, 19 nt, Artificial Sequence
  Description of Artificial Sequence: Synthetic oligonucleotide
gcaccgcugcuggccucac

SEQ ID NO: 1314337 - RNA, 19 nt, Artificial Sequence
  Description of Artificial Sequence: Synthetic oligonucleotide
ccuucgcacuggucuccau

SEQ ID NO: 1314338 - RNA, 19 nt, Artificial Sequence
  Description of Artificial Sequence: Synthetic oligonucleotide
cguaggucuucgccauauu

SEQ ID NO: 1314339 - RNA, 19 nt, Artificial Sequence
  Description of Artificial Sequence: Synthetic oligonucleotide
aagaguaacaaacuggacc

SEQ ID NO: 1314340 - RNA, 19 nt, Artificial Sequence
  Description of Artificial Sequence: Synthetic oligonucleotide
aaugguaagaccuccuuac

SEQ ID NO: 1314341 - RNA, 19 nt, Artificial Sequence
  Description of Artificial Sequence: Synthetic oligonucleotide
auugugaacauucagaccu

SEQ ID NO: 1314342 - RNA, 19 nt, Artificial Sequence
  Description of Artificial Sequence: Synthetic oligonucleotide
uuuaaaauuuuccagcgga

SEQ ID NO: 1314343 - RNA, 19 nt, Artificial Sequence
  Description of Artificial Sequence: Synthetic oligonucleotide
aaauagguuaccccacugc

SEQ ID NO: 1314344 - RNA, 19 nt, Artificial Sequence
  Description of Artificial Sequence: Synthetic oligonucleotide
uuaagaguaacaaacugga

SEQ ID NO: 1314345 - RNA, 19 nt, Artificial Sequence
  Description of Artificial Sequence: Synthetic oligonucleotide
aaaaugggaaucaacugcc

SEQ ID NO: 1314346 - RNA, 19 nt, Artificial Sequence
  Description of Artificial Sequence: Synthetic oligonucleotide
gacuaagucaaucaagucc

SEQ ID NO: 1314347 - RNA, 19 nt, Artificial Sequence
  Description of Artificial Sequence: Synthetic oligonucleotide
cuuaaaacgccaaaauagg

SEQ ID NO: 1314348 - RNA, 19 nt, Artificial Sequence
  Description of Artificial Sequence: Synthetic oligonucleotide
aaccucuuaauccagucag

SEQ ID NO: 1314349 - RNA, 19 nt, Artificial Sequence
  Description of Artificial Sequence: Synthetic oligonucleotide
ucuuaauccagucaggauc

SEQ ID NO: 1314350 - RNA, 19 nt, Artificial Sequence
  Description of Artificial Sequence: Synthetic oligonucleotide
uuugagaucagaagaagac

SEQ ID NO: 1314351 - RNA, 19 nt, Artificial Sequence
  Description of Artificial Sequence: Synthetic oligonucleotide
agauaagcaccacaggggc

SEQ ID NO: 1314352 - RNA, 19 nt, Artificial Sequence
  Description of Artificial Sequence: Synthetic oligonucleotide
accacuaaacuacagcuac

SEQ ID NO: 1314353 - RNA, 19 nt, Artificial Sequence
  Description of Artificial Sequence: Synthetic oligonucleotide
guaaggaugauaaaguggc

SEQ ID NO: 1314354 - RNA, 19 nt, Artificial Sequence
  Description of Artificial Sequence: Synthetic oligonucleotide
aauagguuaccccacugcu

SEQ ID NO: 1314355 - RNA, 19 nt, Artificial Sequence
  Description of Artificial Sequence: Synthetic oligonucleotide
acugcaaugccaugagucc

SEQ ID NO: 1314356 - RNA, 19 nt, Artificial Sequence
  Description of Artificial Sequence: Synthetic oligonucleotide
aaaacgccaaaauagguua

SEQ ID NO: 1314357 - RNA, 19 nt, Artificial Sequence
  Description of Artificial Sequence: Synthetic oligonucleotide
aaugggaaucaacugccuc

SEQ ID NO: 1314358 - RNA, 19 nt, Artificial Sequence
  Description of Artificial Sequence: Synthetic oligonucleotide
augauggccagauaagcac

SEQ ID NO: 1314359 - RNA, 19 nt, Artificial Sequence
  Description of Artificial Sequence: Synthetic oligonucleotide
uauaucaagcucuggcagg

SEQ ID NO: 1314360 - RNA, 19 nt, Artificial Sequence
  Description of Artificial Sequence: Synthetic oligonucleotide
uuacagaguccccuggugg

SEQ ID NO: 1314361 - RNA, 19 nt, Artificial Sequence
  Description of Artificial Sequence: Synthetic oligonucleotide
uccgugaaugguaagaccu

SEQ ID NO: 1314362 - RNA, 19 nt, Artificial Sequence
  Description of Artificial Sequence: Synthetic oligonucleotide
aaugcugucauggagcaga

SEQ ID NO: 1314363 - RNA, 19 nt, Artificial Sequence
  Description of Artificial Sequence: Synthetic oligonucleotide
uuaaaacgccaaaauaggu

SEQ ID NO: 1314364 - RNA, 19 nt, Artificial Sequence
  Description of Artificial Sequence: Synthetic oligonucleotide
ucugcagucauggagacga

SEQ ID NO: 1314365 - RNA, 19 nt, Artificial Sequence
  Description of Artificial Sequence: Synthetic oligonucleotide
acuagaacagguguacacc

SEQ ID NO: 1314366 - RNA, 19 nt, Artificial Sequence
  Description of Artificial Sequence: Synthetic oligonucleotide
acuuucuauagccgagucc

SEQ ID NO: 1314367 - RNA, 19 nt, Artificial Sequence
  Description of Artificial Sequence: Synthetic oligonucleotide
aggugagucaaccaguaag

SEQ ID NO: 1314368 - RNA, 19 nt, Artificial Sequence
  Description of Artificial Sequence: Synthetic oligonucleotide
ugaguggguuuccauaagg

SEQ ID NO: 1314369 - RNA, 19 nt, Artificial Sequence
  Description of Artificial Sequence: Synthetic oligonucleotide
cuuguucacaggauggagg

SEQ ID NO: 1314370 - RNA, 19 nt, Artificial Sequence
  Description of Artificial Sequence: Synthetic oligonucleotide
aaaauagguuaccccacug

SEQ ID NO: 1314371 - RNA, 19 nt, Artificial Sequence
  Description of Artificial Sequence: Synthetic oligonucleotide
guacacuucuccuaggacc

SEQ ID NO: 1314372 - RNA, 19 nt, Artificial Sequence
  Description of Artificial Sequence: Synthetic oligonucleotide
ugcaacaucugugaaaaug

SEQ ID NO: 1314373 - RNA, 19 nt, Artificial Sequence
  Description of Artificial Sequence: Synthetic oligonucleotide
guuagaaagcaccggagcc

SEQ ID NO: 1314374 - RNA, 19 nt, Artificial Sequence
  Description of Artificial Sequence: Synthetic oligonucleotide
uuuugaguccucgugagug

SEQ ID NO: 1314375 - RNA, 19 nt, Artificial Sequence
  Description of Artificial Sequence: Synthetic oligonucleotide
uuaaaauuuuccagcggac

SEQ ID NO: 1314376 - RNA, 19 nt, Artificial Sequence
  Description of Artificial Sequence: Synthetic oligonucleotide
cuuaaagagauucugaacu

SEQ ID NO: 1314377 - RNA, 19 nt, Artificial Sequence
  Description of Artificial Sequence: Synthetic oligonucleotide
uuuccagcggacuaaguca

SEQ ID NO: 1314378 - RNA, 19 nt, Artificial Sequence
  Description of Artificial Sequence: Synthetic oligonucleotide
gugaaguagccuuugacug

SEQ ID NO: 1314379 - RNA, 19 nt, Artificial Sequence
  Description of Artificial Sequence: Synthetic oligonucleotide
ucugagaguuuaaucagcu

SEQ ID NO: 1314380 - RNA, 19 nt, Artificial Sequence
  Description of Artificial Sequence: Synthetic oligonucleotide
uauacugguguucuccgug

SEQ ID NO: 1314381 - RNA, 19 nt, Artificial Sequence
  Description of Artificial Sequence: Synthetic oligonucleotide
aacgccaaaauagguuacc

SEQ ID NO: 1314382 - RNA, 19 nt, Artificial Sequence
  Description of Artificial Sequence: Synthetic oligonucleotide
guauaucaagcucuggcag

SEQ ID NO: 1314383 - RNA, 19 nt, Artificial Sequence
  Description of Artificial Sequence: Synthetic oligonucleotide
uugucugcagucauggaga

SEQ ID NO: 1314384 - RNA, 19 nt, Artificial Sequence
  Description of Artificial Sequence: Synthetic oligonucleotide
uuguucacaggauggaggc

SEQ ID NO: 1314385 - RNA, 19 nt, Artificial Sequence
  Description of Artificial Sequence: Synthetic oligonucleotide
aagcuuaaaacgccaaaau

SEQ ID NO: 1314386 - RNA, 19 nt, Artificial Sequence
  Description of Artificial Sequence: Synthetic oligonucleotide
uuccauaaggccucugaag

SEQ ID NO: 1314387 - RNA, 19 nt, Artificial Sequence
  Description of Artificial Sequence: Synthetic oligonucleotide
cuuccacaagacaacaggc

SEQ ID NO: 1314388 - RNA, 19 nt, Artificial Sequence
  Description of Artificial Sequence: Synthetic oligonucleotide
aaguuacagaguccccugg

SEQ ID NO: 1314389 - RNA, 19 nt, Artificial Sequence
  Description of Artificial Sequence: Synthetic oligonucleotide
ucuauagccgaguccaugu

SEQ ID NO: 1314390 - RNA, 19 nt, Artificial Sequence
  Description of Artificial Sequence: Synthetic oligonucleotide
uuugcauugacugguacaa

SEQ ID NO: 1314391 - RNA, 19 nt, Artificial Sequence
  Description of Artificial Sequence: Synthetic oligonucleotide
cauaggagccucuugcagc

SEQ ID NO: 1314392 - RNA, 19 nt, Artificial Sequence
  Description of Artificial Sequence: Synthetic oligonucleotide
auagccgaguccauguucc

SEQ ID NO: 1314393 - RNA, 19 nt, Artificial Sequence
  Description of Artificial Sequence: Synthetic oligonucleotide
ggagauauguccaaucagg

SEQ ID NO: 1314394 - RNA, 19 nt, Artificial Sequence
  Description of Artificial Sequence: Synthetic oligonucleotide
ugugacgugcgaauuguga

SEQ ID NO: 1314395 - RNA, 19 nt, Artificial Sequence
  Description of Artificial Sequence: Synthetic oligonucleotide
auccgugaaugguaagacc

SEQ ID NO: 1314396 - RNA, 19 nt, Artificial Sequence
  Description of Artificial Sequence: Synthetic oligonucleotide
cuuucuauagccgagucca

SEQ ID NO: 1314397 - RNA, 19 nt, Artificial Sequence
  Description of Artificial Sequence: Synthetic oligonucleotide
ugauggccagauaagcacc

SEQ ID NO: 1314398 - RNA, 19 nt, Artificial Sequence
  Description of Artificial Sequence: Synthetic oligonucleotide
ugcauugacugguacaaaa

SEQ ID NO: 1314399 - RNA, 19 nt, Artificial Sequence
  Description of Artificial Sequence: Synthetic oligonucleotide
gguaaggaugauaaagugg

SEQ ID NO: 1314400 - RNA, 19 nt, Artificial Sequence
  Description of Artificial Sequence: Synthetic oligonucleotide
aacugccugcuugcgaucc

SEQ ID NO: 1314401 - RNA, 19 nt, Artificial Sequence
  Description of Artificial Sequence: Synthetic oligonucleotide
auaagcaccacaggggcuc

SEQ ID NO: 1314402 - RNA, 19 nt, Artificial Sequence
  Description of Artificial Sequence: Synthetic oligonucleotide
uacaucugagaguuuaauc

SEQ ID NO: 1314403 - RNA, 19 nt, Artificial Sequence
  Description of Artificial Sequence: Synthetic oligonucleotide
uucccuuggaucucgagaa

SEQ ID NO: 1314404 - RNA, 19 nt, Artificial Sequence
  Description of Artificial Sequence: Synthetic oligonucleotide
augggaaucaacugccuca

SEQ ID NO: 1314405 - RNA, 19 nt, Artificial Sequence
  Description of Artificial Sequence: Synthetic oligonucleotide
cacugcaaugccaugaguc

SEQ ID NO: 1314406 - RNA, 19 nt, Artificial Sequence
  Description of Artificial Sequence: Synthetic oligonucleotide
ucuccuaggacccgcuuca

SEQ ID NO: 1314407 - RNA, 19 nt, Artificial Sequence
  Description of Artificial Sequence: Synthetic oligonucleotide
ucagaccugccuuugagau

SEQ ID NO: 1314408 - RNA, 19 nt, Artificial Sequence
  Description of Artificial Sequence: Synthetic oligonucleotide
uaaagagauucugaacuga

SEQ ID NO: 1314409 - RNA, 19 nt, Artificial Sequence
  Description of Artificial Sequence: Synthetic oligonucleotide
gcaacaucugugaaaaugg

SEQ ID NO: 1314410 - RNA, 19 nt, Artificial Sequence
  Description of Artificial Sequence: Synthetic oligonucleotide
agaugugcccauuggaaca

SEQ ID NO: 1314411 - RNA, 19 nt, Artificial Sequence
  Description of Artificial Sequence: Synthetic oligonucleotide
caugaguccucacggagcc

SEQ ID NO: 1314412 - RNA, 19 nt, Artificial Sequence
  Description of Artificial Sequence: Synthetic oligonucleotide
ggaacaaacugccugcuug

SEQ ID NO: 1314413 - RNA, 19 nt, Artificial Sequence
  Description of Artificial Sequence: Synthetic oligonucleotide
aucugagaguuuaaucagc

SEQ ID NO: 1314414 - RNA, 19 nt, Artificial Sequence
  Description of Artificial Sequence: Synthetic oligonucleotide
uaagaguaacaaacuggac

SEQ ID NO: 1314415 - RNA, 19 nt, Artificial Sequence
  Description of Artificial Sequence: Synthetic oligonucleotide
ugacacucagaagacagga

SEQ ID NO: 1314416 - RNA, 19 nt, Artificial Sequence
  Description of Artificial Sequence: Synthetic oligonucleotide
ucuuaaagugaaguagccu

SEQ ID NO: 1314417 - RNA, 19 nt, Artificial Sequence
  Description of Artificial Sequence: Synthetic oligonucleotide
aucucgagaagcuucuccu

SEQ ID NO: 1314418 - RNA, 19 nt, Artificial Sequence
  Description of Artificial Sequence: Synthetic oligonucleotide
aaacgccaaaauagguuac

SEQ ID NO: 1314419 - RNA, 19 nt, Artificial Sequence
  Description of Artificial Sequence: Synthetic oligonucleotide
acauaggagccucuugcag

SEQ ID NO: 1314420 - RNA, 19 nt, Artificial Sequence
  Description of Artificial Sequence: Synthetic oligonucleotide
aagagauucugaacugaag

SEQ ID NO: 1314421 - RNA, 19 nt, Artificial Sequence
  Description of Artificial Sequence: Synthetic oligonucleotide
aagacaacaggcugucuua

SEQ ID NO: 1314422 - RNA, 19 nt, Artificial Sequence
  Description of Artificial Sequence: Synthetic oligonucleotide
ucaaaggucuuaagaguaa

SEQ ID NO: 1314423 - RNA, 19 nt, Artificial Sequence
  Description of Artificial Sequence: Synthetic oligonucleotide
aacaucugugaaaauggga

SEQ ID NO: 1314424 - RNA, 19 nt, Artificial Sequence
  Description of Artificial Sequence: Synthetic oligonucleotide
cuuugagaucagaagaaga

SEQ ID NO: 1314425 - RNA, 19 nt, Artificial Sequence
  Description of Artificial Sequence: Synthetic oligonucleotide
gaagacuccaaaagcugag

SEQ ID NO: 1314426 - RNA, 19 nt, Artificial Sequence
  Description of Artificial Sequence: Synthetic oligonucleotide
aaucuucccuuggaucucg

SEQ ID NO: 1314427 - RNA, 19 nt, Artificial Sequence
  Description of Artificial Sequence: Synthetic oligonucleotide
cagaagaagacaccagaac

SEQ ID NO: 1314428 - RNA, 19 nt, Artificial Sequence
  Description of Artificial Sequence: Synthetic oligonucleotide
ugcagcuaccacuaaacua

SEQ ID NO: 1314429 - RNA, 19 nt, Artificial Sequence
  Description of Artificial Sequence: Synthetic oligonucleotide
acaccgucgguauaucaag

SEQ ID NO: 1314430 - RNA, 19 nt, Artificial Sequence
  Description of Artificial Sequence: Synthetic oligonucleotide
uagguuaccccacugcuuu

SEQ ID NO: 1314431 - RNA, 19 nt, Artificial Sequence
  Description of Artificial Sequence: Synthetic oligonucleotide
cuaaacuacagcuacacuu

SEQ ID NO: 1314432 - RNA, 19 nt, Artificial Sequence
  Description of Artificial Sequence: Synthetic oligonucleotide
aaauuuuccagcggacuaa

SEQ ID NO: 1314433 - RNA, 19 nt, Artificial Sequence
  Description of Artificial Sequence: Synthetic oligonucleotide
cacuagaacagguguacac

SEQ ID NO: 1314434 - RNA, 19 nt, Artificial Sequence
  Description of Artificial Sequence: Synthetic oligonucleotide
cuuggagauauguccaauc

SEQ ID NO: 1314435 - RNA, 19 nt, Artificial Sequence
  Description of Artificial Sequence: Synthetic oligonucleotide
uauggguucacggccuccg

SEQ ID NO: 1314436 - RNA, 19 nt, Artificial Sequence
  Description of Artificial Sequence: Synthetic oligonucleotide
acgccaaaauagguuaccc

SEQ ID NO: 1314437 - RNA, 19 nt, Artificial Sequence
  Description of Artificial Sequence: Synthetic oligonucleotide
aagagugucuccccaccgu

SEQ ID NO: 1314438 - RNA, 19 nt, Artificial Sequence
  Description of Artificial Sequence: Synthetic oligonucleotide
auaggagccucuugcagcu

SEQ ID NO: 1314439 - RNA, 19 nt, Artificial Sequence
  Description of Artificial Sequence: Synthetic oligonucleotide
uccuuacacagacugcagu

SEQ ID NO: 1314440 - RNA, 19 nt, Artificial Sequence
  Description of Artificial Sequence: Synthetic oligonucleotide
gguauacugguguucuccg

SEQ ID NO: 1314441 - RNA, 19 nt, Artificial Sequence
  Description of Artificial Sequence: Synthetic oligonucleotide
guagguuagaaagcaccgg

SEQ ID NO: 1314442 - RNA, 19 nt, Artificial Sequence
  Description of Artificial Sequence: Synthetic oligonucleotide
gcagcuaccacuaaacuac

SEQ ID NO: 1314443 - RNA, 19 nt, Artificial Sequence
  Description of Artificial Sequence: Synthetic oligonucleotide
uaagucaaucaaguccacc

SEQ ID NO: 1314444 - RNA, 19 nt, Artificial Sequence
  Description of Artificial Sequence: Synthetic oligonucleotide
cacuaaacuacagcuacac

SEQ ID NO: 1314445 - RNA, 19 nt, Artificial Sequence
  Description of Artificial Sequence: Synthetic oligonucleotide
aacugagggauauguuuau

SEQ ID NO: 1314446 - RNA, 19 nt, Artificial Sequence
  Description of Artificial Sequence: Synthetic oligonucleotide
cagaugugcccauuggaac

SEQ ID NO: 1314447 - RNA, 19 nt, Artificial Sequence
  Description of Artificial Sequence: Synthetic oligonucleotide
gguauaucaagcucuggca

SEQ ID NO: 1314448 - RNA, 19 nt, Artificial Sequence
  Description of Artificial Sequence: Synthetic oligonucleotide
cugacacucagaagacagg

SEQ ID NO: 1314449 - RNA, 19 nt, Artificial Sequence
  Description of Artificial Sequence: Synthetic oligonucleotide
ugacgugcgaauugugaac

SEQ ID NO: 1314450 - RNA, 19 nt, Artificial Sequence
  Description of Artificial Sequence: Synthetic oligonucleotide
cuugcuguucauccucacc

SEQ ID NO: 1314451 - RNA, 19 nt, Artificial Sequence
  Description of Artificial Sequence: Synthetic oligonucleotide
cuaccacuaaacuacagcu

SEQ ID NO: 1314452 - RNA, 19 nt, Artificial Sequence
  Description of Artificial Sequence: Synthetic oligonucleotide
acuaaacuacagcuacacu

SEQ ID NO: 1314453 - RNA, 19 nt, Artificial Sequence
  Description of Artificial Sequence: Synthetic oligonucleotide
uucccaucacuagaacagg

SEQ ID NO: 1314454 - RNA, 19 nt, Artificial Sequence
  Description of Artificial Sequence: Synthetic oligonucleotide
ggauggaggccauugauca

SEQ ID NO: 1314455 - RNA, 19 nt, Artificial Sequence
  Description of Artificial Sequence: Synthetic oligonucleotide
uaggacccgcuucaugugc

SEQ ID NO: 1314456 - RNA, 19 nt, Artificial Sequence
  Description of Artificial Sequence: Synthetic oligonucleotide
gguaagaccuccuuacaca

SEQ ID NO: 1314457 - RNA, 19 nt, Artificial Sequence
  Description of Artificial Sequence: Synthetic oligonucleotide
guagccuuugacugcuuug

SEQ ID NO: 1314458 - RNA, 19 nt, Artificial Sequence
  Description of Artificial Sequence: Synthetic oligonucleotide
aguuacagaguccccuggu

SEQ ID NO: 1314459 - RNA, 19 nt, Artificial Sequence
  Description of Artificial Sequence: Synthetic oligonucleotide
ugaaggccugugacgugcg

SEQ ID NO: 1314460 - RNA, 19 nt, Artificial Sequence
  Description of Artificial Sequence: Synthetic oligonucleotide
uuccagcggacuaagucaa

SEQ ID NO: 1314461 - RNA, 19 nt, Artificial Sequence
  Description of Artificial Sequence: Synthetic oligonucleotide
uaccacuaaacuacagcua

SEQ ID NO: 1314462 - RNA, 19 nt, Artificial Sequence
  Description of Artificial Sequence: Synthetic oligonucleotide
ucugaacugaagacuccaa

SEQ ID NO: 1314463 - RNA, 19 nt, Artificial Sequence
  Description of Artificial Sequence: Synthetic oligonucleotide
cucacugcaaugccaugag

SEQ ID NO: 1314464 - RNA, 19 nt, Artificial Sequence
  Description of Artificial Sequence: Synthetic oligonucleotide
uucuauagccgaguccaug

SEQ ID NO: 1314465 - RNA, 19 nt, Artificial Sequence
  Description of Artificial Sequence: Synthetic oligonucleotide
gacugguagguuagaaagc

SEQ ID NO: 1314466 - RNA, 19 nt, Artificial Sequence
  Description of Artificial Sequence: Synthetic oligonucleotide
uccucaccaucacccaucc

SEQ ID NO: 1314467 - RNA, 19 nt, Artificial Sequence
  Description of Artificial Sequence: Synthetic oligonucleotide
ucccaucacuagaacaggu

SEQ ID NO: 1314468 - RNA, 19 nt, Artificial Sequence
  Description of Artificial Sequence: Synthetic oligonucleotide
uucuccuaggacccgcuuc

SEQ ID NO: 1314469 - RNA, 19 nt, Artificial Sequence
  Description of Artificial Sequence: Synthetic oligonucleotide
uggccagauaagcaccaca

SEQ ID NO: 1314470 - RNA, 19 nt, Artificial Sequence
  Description of Artificial Sequence: Synthetic oligonucleotide
ugcgauccgugaaugguaa

SEQ ID NO: 1314471 - RNA, 19 nt, Artificial Sequence
  Description of Artificial Sequence: Synthetic oligonucleotide
uccccugguggguauacug

SEQ ID NO: 1314472 - RNA, 19 nt, Artificial Sequence
  Description of Artificial Sequence: Synthetic oligonucleotide
gaugauaaaguggcacaca

SEQ ID NO: 1314473 - RNA, 19 nt, Artificial Sequence
  Description of Artificial Sequence: Synthetic oligonucleotide
uagaacagguguacaccgu

SEQ ID NO: 1314474 - RNA, 19 nt, Artificial Sequence
  Description of Artificial Sequence: Synthetic oligonucleotide
ugauaaaguggcacacauu

SEQ ID NO: 1314475 - RNA, 19 nt, Artificial Sequence
  Description of Artificial Sequence: Synthetic oligonucleotide
auaucaagcucuggcagga

SEQ ID NO: 1314476 - RNA, 19 nt, Artificial Sequence
  Description of Artificial Sequence: Synthetic oligonucleotide
gaaugguaagaccuccuua

SEQ ID NO: 1314477 - RNA, 19 nt, Artificial Sequence
  Description of Artificial Sequence: Synthetic oligonucleotide
uucuuguucacaggaugga

SEQ ID NO: 1314478 - RNA, 19 nt, Artificial Sequence
  Description of Artificial Sequence: Synthetic oligonucleotide
gcuaugcacaggcaacugg

SEQ ID NO: 1314479 - RNA, 19 nt, Artificial Sequence
  Description of Artificial Sequence: Synthetic oligonucleotide
gcagguacacuucuccuag

SEQ ID NO: 1314480 - RNA, 19 nt, Artificial Sequence
  Description of Artificial Sequence: Synthetic oligonucleotide
gacacucagaagacaggag

SEQ ID NO: 1314481 - RNA, 19 nt, Artificial Sequence
  Description of Artificial Sequence: Synthetic oligonucleotide
accgucgguauaucaagcu

SEQ ID NO: 1314482 - RNA, 19 nt, Artificial Sequence
  Description of Artificial Sequence: Synthetic oligonucleotide
gucagaagagugucucccc

SEQ ID NO: 1314483 - RNA, 19 nt, Artificial Sequence
  Description of Artificial Sequence: Synthetic oligonucleotide
uccccugcuuggaagugcc

SEQ ID NO: 1314484 - RNA, 19 nt, Artificial Sequence
  Description of Artificial Sequence: Synthetic oligonucleotide
auacugguguucuccguga

SEQ ID NO: 1314485 - RNA, 19 nt, Artificial Sequence
  Description of Artificial Sequence: Synthetic oligonucleotide
cuucaaaggucuuaagagu

SEQ ID NO: 1314486 - RNA, 19 nt, Artificial Sequence
  Description of Artificial Sequence: Synthetic oligonucleotide
gugcgaauugugaacauuc

SEQ ID NO: 1314487 - RNA, 19 nt, Artificial Sequence
  Description of Artificial Sequence: Synthetic oligonucleotide
agaacagguguacaccguu

SEQ ID NO: 1314488 - RNA, 19 nt, Artificial Sequence
  Description of Artificial Sequence: Synthetic oligonucleotide
gacgugcgaauugugaaca

SEQ ID NO: 1314489 - RNA, 19 nt, Artificial Sequence
  Description of Artificial Sequence: Synthetic oligonucleotide
gcgaauugugaacauucag

SEQ ID NO: 1314490 - RNA, 19 nt, Artificial Sequence
  Description of Artificial Sequence: Synthetic oligonucleotide
aggcaacugguccauuucu

SEQ ID NO: 1314491 - RNA, 19 nt, Artificial Sequence
  Description of Artificial Sequence: Synthetic oligonucleotide
agcggacuaagucaaucaa

SEQ ID NO: 1314492 - RNA, 19 nt, Artificial Sequence
  Description of Artificial Sequence: Synthetic oligonucleotide
cugcaggccagccuuaguc

SEQ ID NO: 1314493 - RNA, 19 nt, Artificial Sequence
  Description of Artificial Sequence: Synthetic oligonucleotide
caucccaggugagucaacc

SEQ ID NO: 1314494 - RNA, 19 nt, Artificial Sequence
  Description of Artificial Sequence: Synthetic oligonucleotide
uugcgauccgugaauggua

SEQ ID NO: 1314495 - RNA, 19 nt, Artificial Sequence
  Description of Artificial Sequence: Synthetic oligonucleotide
ucuccgugauccaggugug

SEQ ID NO: 1314496 - RNA, 19 nt, Artificial Sequence
  Description of Artificial Sequence: Synthetic oligonucleotide
uuccagucagaagaguguc

SEQ ID NO: 1314497 - RNA, 19 nt, Artificial Sequence
  Description of Artificial Sequence: Synthetic oligonucleotide
ugggaaucaacugccucac

SEQ ID NO: 1314498 - RNA, 19 nt, Artificial Sequence
  Description of Artificial Sequence: Synthetic oligonucleotide
ucgugaguggguuuccaua

SEQ ID NO: 1314499 - RNA, 19 nt, Artificial Sequence
  Description of Artificial Sequence: Synthetic oligonucleotide
agguuagaaagcaccggag

SEQ ID NO: 1314500 - RNA, 19 nt, Artificial Sequence
  Description of Artificial Sequence: Synthetic oligonucleotide
uccgugauccaggugugca

SEQ ID NO: 1314501 - RNA, 19 nt, Artificial Sequence
  Description of Artificial Sequence: Synthetic oligonucleotide
acaccagaacacauaggag

SEQ ID NO: 1314502 - RNA, 19 nt, Artificial Sequence
  Description of Artificial Sequence: Synthetic oligonucleotide
gugacgugcgaauugugaa

SEQ ID NO: 1314503 - RNA, 19 nt, Artificial Sequence
  Description of Artificial Sequence: Synthetic oligonucleotide
ucgguauaucaagcucugg

SEQ ID NO: 1314504 - RNA, 19 nt, Artificial Sequence
  Description of Artificial Sequence: Synthetic oligonucleotide
cuccuuacacagacugcag

SEQ ID NO: 1314505 - RNA, 19 nt, Artificial Sequence
  Description of Artificial Sequence: Synthetic oligonucleotide
gaacauucagaccugccuu

SEQ ID NO: 1314506 - RNA, 19 nt, Artificial Sequence
  Description of Artificial Sequence: Synthetic oligonucleotide
caccgucgguauaucaagc

SEQ ID NO: 1314507 - RNA, 19 nt, Artificial Sequence
  Description of Artificial Sequence: Synthetic oligonucleotide
ggagccaaauacaucugag

SEQ ID NO: 1314508 - RNA, 19 nt, Artificial Sequence
  Description of Artificial Sequence: Synthetic oligonucleotide
cugagggauauguuuaucu

SEQ ID NO: 1314509 - RNA, 19 nt, Artificial Sequence
  Description of Artificial Sequence: Synthetic oligonucleotide
caagggcucugcagcaacc

SEQ ID NO: 1314510 - RNA, 19 nt, Artificial Sequence
  Description of Artificial Sequence: Synthetic oligonucleotide
gagccagaugugcccauug

SEQ ID NO: 1314511 - RNA, 19 nt, Artificial Sequence
  Description of Artificial Sequence: Synthetic oligonucleotide
agccuuugacugcuuugag

SEQ ID NO: 1314512 - RNA, 19 nt, Artificial Sequence
  Description of Artificial Sequence: Synthetic oligonucleotide
cugguagguuagaaagcac

SEQ ID NO: 1314513 - RNA, 19 nt, Artificial Sequence
  Description of Artificial Sequence: Synthetic oligonucleotide
ccaaaauagguuaccccac

SEQ ID NO: 1314514 - RNA, 19 nt, Artificial Sequence
  Description of Artificial Sequence: Synthetic oligonucleotide
cuaggacccgcuucaugug

SEQ ID NO: 1314515 - RNA, 19 nt, Artificial Sequence
  Description of Artificial Sequence: Synthetic oligonucleotide
uguucacaggauggaggcc

SEQ ID NO: 1314516 - RNA, 19 nt, Artificial Sequence
  Description of Artificial Sequence: Synthetic oligonucleotide
acaggcaacugguccauuu

SEQ ID NO: 1314517 - RNA, 19 nt, Artificial Sequence
  Description of Artificial Sequence: Synthetic oligonucleotide
accucuuaauccagucagg

SEQ ID NO: 1314518 - RNA, 19 nt, Artificial Sequence
  Description of Artificial Sequence: Synthetic oligonucleotide
ugcuugcgauccgugaaug

SEQ ID NO: 1314519 - RNA, 19 nt, Artificial Sequence
  Description of Artificial Sequence: Synthetic oligonucleotide
ugaccucccuucuuccagu

SEQ ID NO: 1314520 - RNA, 19 nt, Artificial Sequence
  Description of Artificial Sequence: Synthetic oligonucleotide
uaauccagucaggaucuuc

SEQ ID NO: 1314521 - RNA, 19 nt, Artificial Sequence
  Description of Artificial Sequence: Synthetic oligonucleotide
ggguauacugguguucucc

SEQ ID NO: 1314522 - RNA, 19 nt, Artificial Sequence
  Description of Artificial Sequence: Synthetic oligonucleotide
cacuuucuauagccgaguc

SEQ ID NO: 1314523 - RNA, 19 nt, Artificial Sequence
  Description of Artificial Sequence: Synthetic oligonucleotide
ccauaaggccucugaaggg

SEQ ID NO: 1314524 - RNA, 19 nt, Artificial Sequence
  Description of Artificial Sequence: Synthetic oligonucleotide
ucuauggguucacggccuc

SEQ ID NO: 1314525 - RNA, 19 nt, Artificial Sequence
  Description of Artificial Sequence: Synthetic oligonucleotide
agacaccgucgguauauca

SEQ ID NO: 1314526 - RNA, 19 nt, Artificial Sequence
  Description of Artificial Sequence: Synthetic oligonucleotide
cgaauugugaacauucaga

SEQ ID NO: 1314527 - RNA, 19 nt, Artificial Sequence
  Description of Artificial Sequence: Synthetic oligonucleotide
ggugagucaaccaguaaga

SEQ ID NO: 1314528 - RNA, 19 nt, Artificial Sequence
  Description of Artificial Sequence: Synthetic oligonucleotide
ugccaugaguccucacgga

SEQ ID NO: 1314529 - RNA, 19 nt, Artificial Sequence
  Description of Artificial Sequence: Synthetic oligonucleotide
aucaggacccgagcuguuc

SEQ ID NO: 1314530 - RNA, 19 nt, Artificial Sequence
  Description of Artificial Sequence: Synthetic oligonucleotide
gacaccgucgguauaucaa

SEQ ID NO: 1314531 - RNA, 19 nt, Artificial Sequence
  Description of Artificial Sequence: Synthetic oligonucleotide
gauggccagauaagcacca

SEQ ID NO: 1314532 - RNA, 19 nt, Artificial Sequence
  Description of Artificial Sequence: Synthetic oligonucleotide
gccaugaguccucacggag

SEQ ID NO: 1314533 - RNA, 19 nt, Artificial Sequence
  Description of Artificial Sequence: Synthetic oligonucleotide
gucgguauaucaagcucug

SEQ ID NO: 1314534 - RNA, 19 nt, Artificial Sequence
  Description of Artificial Sequence: Synthetic oligonucleotide
cacaagacaacaggcuguc

SEQ ID NO: 1314535 - RNA, 19 nt, Artificial Sequence
  Description of Artificial Sequence: Synthetic oligonucleotide
gaguaacaaacuggaccug

SEQ ID NO: 1314536 - RNA, 19 nt, Artificial Sequence
  Description of Artificial Sequence: Synthetic oligonucleotide
gguacacuucuccuaggac

SEQ ID NO: 1314537 - RNA, 19 nt, Artificial Sequence
  Description of Artificial Sequence: Synthetic oligonucleotide
cauacuccucaucagacau

SEQ ID NO: 1314538 - RNA, 19 nt, Artificial Sequence
  Description of Artificial Sequence: Synthetic oligonucleotide
gaacagguguacaccguuc

SEQ ID NO: 1314539 - RNA, 19 nt, Artificial Sequence
  Description of Artificial Sequence: Synthetic oligonucleotide
ucgagaagcuucuccucua

SEQ ID NO: 1314540 - RNA, 19 nt, Artificial Sequence
  Description of Artificial Sequence: Synthetic oligonucleotide
caucacuagaacaggugua

SEQ ID NO: 1314541 - RNA, 19 nt, Artificial Sequence
  Description of Artificial Sequence: Synthetic oligonucleotide
agguuaccccacugcuuuc

SEQ ID NO: 1314542 - RNA, 19 nt, Artificial Sequence
  Description of Artificial Sequence: Synthetic oligonucleotide
uggaacaaacugccugcuu

SEQ ID NO: 1314543 - RNA, 19 nt, Artificial Sequence
  Description of Artificial Sequence: Synthetic oligonucleotide
cagcggacuaagucaauca

SEQ ID NO: 1314544 - RNA, 19 nt, Artificial Sequence
  Description of Artificial Sequence: Synthetic oligonucleotide
ccaugaguccucacggagc

SEQ ID NO: 1314545 - RNA, 19 nt, Artificial Sequence
  Description of Artificial Sequence: Synthetic oligonucleotide
cugguguucaaauuucaau

SEQ ID NO: 1314546 - RNA, 19 nt, Artificial Sequence
  Description of Artificial Sequence: Synthetic oligonucleotide
gacccgagcuguucuguca

SEQ ID NO: 1314547 - RNA, 19 nt, Artificial Sequence
  Description of Artificial Sequence: Synthetic oligonucleotide
ggacuaagucaaucaaguc

SEQ ID NO: 1314548 - RNA, 19 nt, Artificial Sequence
  Description of Artificial Sequence: Synthetic oligonucleotide
cuuccagucagaagagugu

SEQ ID NO: 1314549 - RNA, 19 nt, Artificial Sequence
  Description of Artificial Sequence: Synthetic oligonucleotide
ucggggaaggucugcuuau

SEQ ID NO: 1314550 - RNA, 19 nt, Artificial Sequence
  Description of Artificial Sequence: Synthetic oligonucleotide
gccuuaguccccugcuugg

SEQ ID NO: 1314551 - RNA, 19 nt, Artificial Sequence
  Description of Artificial Sequence: Synthetic oligonucleotide
aguccccugguggguauac

SEQ ID NO: 1314552 - RNA, 19 nt, Artificial Sequence
  Description of Artificial Sequence: Synthetic oligonucleotide
caacaggcugucuuaaagu

SEQ ID NO: 1314553 - RNA, 19 nt, Artificial Sequence
  Description of Artificial Sequence: Synthetic oligonucleotide
gcuugcgauccgugaaugg

SEQ ID NO: 1314554 - RNA, 19 nt, Artificial Sequence
  Description of Artificial Sequence: Synthetic oligonucleotide
gcugucuuaaagugaagua

SEQ ID NO: 1314555 - RNA, 19 nt, Artificial Sequence
  Description of Artificial Sequence: Synthetic oligonucleotide
gcggacuaagucaaucaag

SEQ ID NO: 1314556 - RNA, 19 nt, Artificial Sequence
  Description of Artificial Sequence: Synthetic oligonucleotide
gaugugcccauuggaacaa

SEQ ID NO: 1314557 - RNA, 19 nt, Artificial Sequence
  Description of Artificial Sequence: Synthetic oligonucleotide
caccaucacccaucccagg

SEQ ID NO: 1314558 - RNA, 19 nt, Artificial Sequence
  Description of Artificial Sequence: Synthetic oligonucleotide
acaccguuccauucugcuu

SEQ ID NO: 1314559 - RNA, 19 nt, Artificial Sequence
  Description of Artificial Sequence: Synthetic oligonucleotide
ccgggcaaugcugucaugg

SEQ ID NO: 1314560 - RNA, 19 nt, Artificial Sequence
  Description of Artificial Sequence: Synthetic oligonucleotide
agcuaccacuaaacuacag

SEQ ID NO: 1314561 - RNA, 19 nt, Artificial Sequence
  Description of Artificial Sequence: Synthetic oligonucleotide
cugugacgugcgaauugug

SEQ ID NO: 1314562 - RNA, 19 nt, Artificial Sequence
  Description of Artificial Sequence: Synthetic oligonucleotide
acccgagcuguucugucau

SEQ ID NO: 1314563 - RNA, 19 nt, Artificial Sequence
  Description of Artificial Sequence: Synthetic oligonucleotide
caagacaacaggcugucuu

SEQ ID NO: 1314564 - RNA, 19 nt, Artificial Sequence
  Description of Artificial Sequence: Synthetic oligonucleotide
agacaacaggcugucuuaa

SEQ ID NO: 1314565 - RNA, 19 nt, Artificial Sequence
  Description of Artificial Sequence: Synthetic oligonucleotide
cagcuacacuucugguaag

SEQ ID NO: 1314566 - RNA, 19 nt, Artificial Sequence
  Description of Artificial Sequence: Synthetic oligonucleotide
cuauggguucacggccucc

SEQ ID NO: 1314567 - RNA, 19 nt, Artificial Sequence
  Description of Artificial Sequence: Synthetic oligonucleotide
ugcucggggaaggucugcu

SEQ ID NO: 1314568 - RNA, 19 nt, Artificial Sequence
  Description of Artificial Sequence: Synthetic oligonucleotide
gccaaauacaucugagagu

SEQ ID NO: 1314569 - RNA, 19 nt, Artificial Sequence
  Description of Artificial Sequence: Synthetic oligonucleotide
cuacacuucugguaaggau

SEQ ID NO: 1314570 - RNA, 19 nt, Artificial Sequence
  Description of Artificial Sequence: Synthetic oligonucleotide
cuugcgauccgugaauggu

SEQ ID NO: 1314571 - RNA, 19 nt, Artificial Sequence
  Description of Artificial Sequence: Synthetic oligonucleotide
gagacgaugggcagugagu

SEQ ID NO: 1314572 - RNA, 19 nt, Artificial Sequence
  Description of Artificial Sequence: Synthetic oligonucleotide
cauucagaccugccuuuga

SEQ ID NO: 1314573 - RNA, 19 nt, Artificial Sequence
  Description of Artificial Sequence: Synthetic oligonucleotide
gcagugagugagucuucag

SEQ ID NO: 1314574 - RNA, 19 nt, Artificial Sequence
  Description of Artificial Sequence: Synthetic oligonucleotide
guggguauacugguguucu

SEQ ID NO: 1314575 - RNA, 19 nt, Artificial Sequence
  Description of Artificial Sequence: Synthetic oligonucleotide
uugcauugacugguacaaa

SEQ ID NO: 1314576 - RNA, 19 nt, Artificial Sequence
  Description of Artificial Sequence: Synthetic oligonucleotide
auguccaaucaggacccga

SEQ ID NO: 1314577 - RNA, 19 nt, Artificial Sequence
  Description of Artificial Sequence: Synthetic oligonucleotide
cuuaguccccugcuuggaa

SEQ ID NO: 1314578 - RNA, 19 nt, Artificial Sequence
  Description of Artificial Sequence: Synthetic oligonucleotide
gaccucccuucuuccaguc

SEQ ID NO: 1314579 - RNA, 19 nt, Artificial Sequence
  Description of Artificial Sequence: Synthetic oligonucleotide
uggcagugagugagucuuc

SEQ ID NO: 1314580 - RNA, 19 nt, Artificial Sequence
  Description of Artificial Sequence: Synthetic oligonucleotide
ggggaaggucugcuuauuc

SEQ ID NO: 1314581 - RNA, 19 nt, Artificial Sequence
  Description of Artificial Sequence: Synthetic oligonucleotide
gcucacugcaaugccauga

SEQ ID NO: 1314582 - RNA, 19 nt, Artificial Sequence
  Description of Artificial Sequence: Synthetic oligonucleotide
ccuccuuacacagacugca

SEQ ID NO: 1314583 - RNA, 19 nt, Artificial Sequence
  Description of Artificial Sequence: Synthetic oligonucleotide
ccggugucucccauggcag

SEQ ID NO: 1314584 - RNA, 19 nt, Artificial Sequence
  Description of Artificial Sequence: Synthetic oligonucleotide
guauacugguguucuccgu

SEQ ID NO: 1314585 - RNA, 19 nt, Artificial Sequence
  Description of Artificial Sequence: Synthetic oligonucleotide
uccagcggacuaagucaau

SEQ ID NO: 1314586 - RNA, 19 nt, Artificial Sequence
  Description of Artificial Sequence: Synthetic oligonucleotide
cucuauggguucacggccu

SEQ ID NO: 1314587 - RNA, 19 nt, Artificial Sequence
  Description of Artificial Sequence: Synthetic oligonucleotide
cucuuaauccagucaggau

SEQ ID NO: 1314588 - RNA, 19 nt, Artificial Sequence
  Description of Artificial Sequence: Synthetic oligonucleotide
ggagcagacaccgucggua

SEQ ID NO: 1314589 - RNA, 19 nt, Artificial Sequence
  Description of Artificial Sequence: Synthetic oligonucleotide
cagcuaccacuaaacuaca

SEQ ID NO: 1314590 - RNA, 19 nt, Artificial Sequence
  Description of Artificial Sequence: Synthetic oligonucleotide
aggacccgagcuguucugu

SEQ ID NO: 1314591 - RNA, 19 nt, Artificial Sequence
  Description of Artificial Sequence: Synthetic oligonucleotide
aucacccaucccaggugag

SEQ ID NO: 1314592 - RNA, 19 nt, Artificial Sequence
  Description of Artificial Sequence: Synthetic oligonucleotide
gagcagacaccgucgguau

SEQ ID NO: 1314593 - RNA, 19 nt, Artificial Sequence
  Description of Artificial Sequence: Synthetic oligonucleotide
agggugccgggcaaugcug

SEQ ID NO: 1314594 - RNA, 19 nt, Artificial Sequence
  Description of Artificial Sequence: Synthetic oligonucleotide
aguccucgugaguggguuu

SEQ ID NO: 1314595 - RNA, 19 nt, Artificial Sequence
  Description of Artificial Sequence: Synthetic oligonucleotide
aggacccgcuucaugugcu

SEQ ID NO: 1314596 - RNA, 19 nt, Artificial Sequence
  Description of Artificial Sequence: Synthetic oligonucleotide
cugccucaccuucccauca

SEQ ID NO: 1314597 - RNA, 19 nt, Artificial Sequence
  Description of Artificial Sequence: Synthetic oligonucleotide
gauggaggccauugaucau

SEQ ID NO: 1314598 - RNA, 19 nt, Artificial Sequence
  Description of Artificial Sequence: Synthetic oligonucleotide
guccucacggagccaaaua

SEQ ID NO: 1314599 - RNA, 19 nt, Artificial Sequence
  Description of Artificial Sequence: Synthetic oligonucleotide
ccucuuaauccagucagga

SEQ ID NO: 1314600 - RNA, 19 nt, Artificial Sequence
  Description of Artificial Sequence: Synthetic oligonucleotide
ccgucgguauaucaagcuc

SEQ ID NO: 1314601 - RNA, 19 nt, Artificial Sequence
  Description of Artificial Sequence: Synthetic oligonucleotide
ccaucacuagaacaggugu

SEQ ID NO: 1314602 - RNA, 19 nt, Artificial Sequence
  Description of Artificial Sequence: Synthetic oligonucleotide
uuaauccagucaggaucuu

SEQ ID NO: 1314603 - RNA, 19 nt, Artificial Sequence
  Description of Artificial Sequence: Synthetic oligonucleotide
gggaaucaacugccucacc

SEQ ID NO: 1314604 - RNA, 19 nt, Artificial Sequence
  Description of Artificial Sequence: Synthetic oligonucleotide
gguuaccccacugcuuuca

SEQ ID NO: 1314605 - RNA, 19 nt, Artificial Sequence
  Description of Artificial Sequence: Synthetic oligonucleotide
ccgugaaugguaagaccuc

SEQ ID NO: 1314606 - RNA, 19 nt, Artificial Sequence
  Description of Artificial Sequence: Synthetic oligonucleotide
gcuacacuucugguaagga

SEQ ID NO: 1314607 - RNA, 19 nt, Artificial Sequence
  Description of Artificial Sequence: Synthetic oligonucleotide
cauggcagugagugagucu

SEQ ID NO: 1314608 - RNA, 19 nt, Artificial Sequence
  Description of Artificial Sequence: Synthetic oligonucleotide
cggacuaagucaaucaagu

SEQ ID NO: 1314609 - RNA, 19 nt, Artificial Sequence
  Description of Artificial Sequence: Synthetic oligonucleotide
agcagacaccgucgguaua

SEQ ID NO: 1314610 - RNA, 19 nt, Artificial Sequence
  Description of Artificial Sequence: Synthetic oligonucleotide
ggcagugagugagucuuca

SEQ ID NO: 1314611 - RNA, 19 nt, Artificial Sequence
  Description of Artificial Sequence: Synthetic oligonucleotide
ccagcggacuaagucaauc

SEQ ID NO: 1314612 - RNA, 19 nt, Artificial Sequence
  Description of Artificial Sequence: Synthetic oligonucleotide
ccagggcacuuucuauagc

SEQ ID NO: 1314613 - RNA, 19 nt, Artificial Sequence
  Description of Artificial Sequence: Synthetic oligonucleotide
cacggccuccggugucucc

SEQ ID NO: 1314614 - RNA, 19 nt, Artificial Sequence
  Description of Artificial Sequence: Synthetic oligonucleotide
agaccuccuuacacagacu

SEQ ID NO: 1314615 - RNA, 19 nt, Artificial Sequence
  Description of Artificial Sequence: Synthetic oligonucleotide
cuccggugucucccauggc

SEQ ID NO: 1314616 - RNA, 19 nt, Artificial Sequence
  Description of Artificial Sequence: Synthetic oligonucleotide
ccacuaaacuacagcuaca

SEQ ID NO: 1314617 - RNA, 19 nt, Artificial Sequence
  Description of Artificial Sequence: Synthetic oligonucleotide
gcgauccgugaaugguaag

SEQ ID NO: 1314618 - RNA, 19 nt, Artificial Sequence
  Description of Artificial Sequence: Synthetic oligonucleotide
cugcaaugccaugaguccu

SEQ ID NO: 1314619 - RNA, 19 nt, Artificial Sequence
  Description of Artificial Sequence: Synthetic oligonucleotide
agucaaccaguaagauuuu

SEQ ID NO: 1314620 - RNA, 19 nt, Artificial Sequence
  Description of Artificial Sequence: Synthetic oligonucleotide
gugccgggcaaugcuguca

SEQ ID NO: 1314621 - RNA, 19 nt, Artificial Sequence
  Description of Artificial Sequence: Synthetic oligonucleotide
caggugagucaaccaguaa

SEQ ID NO: 1314622 - RNA, 19 nt, Artificial Sequence
  Description of Artificial Sequence: Synthetic oligonucleotide
cagacaccgucgguauauc

SEQ ID NO: 1314623 - RNA, 19 nt, Artificial Sequence
  Description of Artificial Sequence: Synthetic oligonucleotide
ccugcuugcgauccgugaa

SEQ ID NO: 1314624 - RNA, 19 nt, Artificial Sequence
  Description of Artificial Sequence: Synthetic oligonucleotide
ggacccgagcuguucuguc

SEQ ID NO: 1314625 - RNA, 19 nt, Artificial Sequence
  Description of Artificial Sequence: Synthetic oligonucleotide
ggagccucuugcagcuacc

SEQ ID NO: 1314626 - RNA, 19 nt, Artificial Sequence
  Description of Artificial Sequence: Synthetic oligonucleotide
augaguccucacggagcca

SEQ ID NO: 1314627 - RNA, 19 nt, Artificial Sequence
  Description of Artificial Sequence: Synthetic oligonucleotide
ccaggugagucaaccagua

SEQ ID NO: 1314628 - RNA, 19 nt, Artificial Sequence
  Description of Artificial Sequence: Synthetic oligonucleotide
gaguccucgugaguggguu

SEQ ID NO: 1314629 - RNA, 19 nt, Artificial Sequence
  Description of Artificial Sequence: Synthetic oligonucleotide
gcauugacugguacaaaau

SEQ ID NO: 1314630 - RNA, 19 nt, Artificial Sequence
  Description of Artificial Sequence: Synthetic oligonucleotide
cucgugaguggguuuccau

SEQ ID NO: 1314631 - RNA, 19 nt, Artificial Sequence
  Description of Artificial Sequence: Synthetic oligonucleotide
cugcuugcgauccgugaau

SEQ ID NO: 1314632 - RNA, 19 nt, Artificial Sequence
  Description of Artificial Sequence: Synthetic oligonucleotide
ccaccguccugugccaggc

SEQ ID NO: 1314633 - RNA, 19 nt, Artificial Sequence
  Description of Artificial Sequence: Synthetic oligonucleotide
gcagacaccgucgguauau

SEQ ID NO: 1314634 - RNA, 19 nt, Artificial Sequence
  Description of Artificial Sequence: Synthetic oligonucleotide
aaguagccuuugacugcuu

SEQ ID NO: 1314635 - RNA, 19 nt, Artificial Sequence
  Description of Artificial Sequence: Synthetic oligonucleotide
cuauagccgaguccauguu

SEQ ID NO: 1314636 - RNA, 19 nt, Artificial Sequence
  Description of Artificial Sequence: Synthetic oligonucleotide
ccgagcuguucugucauca

SEQ ID NO: 1314637 - RNA, 19 nt, Artificial Sequence
  Description of Artificial Sequence: Synthetic oligonucleotide
augugcccauuggaacaaa

SEQ ID NO: 1314638 - RNA, 19 nt, Artificial Sequence
  Description of Artificial Sequence: Synthetic oligonucleotide
cgaugggcagugagugaag

SEQ ID NO: 1314639 - RNA, 19 nt, Artificial Sequence
  Description of Artificial Sequence: Synthetic oligonucleotide
ggacccgcuucaugugcuc

SEQ ID NO: 1314640 - RNA, 19 nt, Artificial Sequence
  Description of Artificial Sequence: Synthetic oligonucleotide
gguucacggccuccggugu

SEQ ID NO: 1314641 - RNA, 19 nt, Artificial Sequence
  Description of Artificial Sequence: Synthetic oligonucleotide
ccuuaguccccugcuugga

SEQ ID NO: 1314642 - RNA, 19 nt, Artificial Sequence
  Description of Artificial Sequence: Synthetic oligonucleotide
gcaggacugguagguuaga

SEQ ID NO: 1314643 - RNA, 19 nt, Artificial Sequence
  Description of Artificial Sequence: Synthetic oligonucleotide
cgggcaaugcugucaugga

SEQ ID NO: 1314644 - RNA, 19 nt, Artificial Sequence
  Description of Artificial Sequence: Synthetic oligonucleotide
gaguccccugguggguaua

SEQ ID NO: 1314645 - RNA, 19 nt, Artificial Sequence
  Description of Artificial Sequence: Synthetic oligonucleotide
cccgagcuguucugucauc

SEQ ID NO: 1314646 - RNA, 19 nt, Artificial Sequence
  Description of Artificial Sequence: Synthetic oligonucleotide
cuucuccuaggacccgcuu

SEQ ID NO: 1314647 - RNA, 19 nt, Artificial Sequence
  Description of Artificial Sequence: Synthetic oligonucleotide
cccaucccaggugagucaa

SEQ ID NO: 1314648 - RNA, 19 nt, Artificial Sequence
  Description of Artificial Sequence: Synthetic oligonucleotide
ggccagccuuaguccccug

SEQ ID NO: 1314649 - RNA, 19 nt, Artificial Sequence
  Description of Artificial Sequence: Synthetic oligonucleotide
cugcagucauggagacgau

SEQ ID NO: 1314650 - RNA, 19 nt, Artificial Sequence
  Description of Artificial Sequence: Synthetic oligonucleotide
ccaggugugcagguacacu

SEQ ID NO: 1314651 - RNA, 19 nt, Artificial Sequence
  Description of Artificial Sequence: Synthetic oligonucleotide
ggccugugacgugcgaauu

SEQ ID NO: 1314652 - RNA, 19 nt, Artificial Sequence
  Description of Artificial Sequence: Synthetic oligonucleotide
cuccuaggacccgcuucau

SEQ ID NO: 1314653 - RNA, 19 nt, Artificial Sequence
  Description of Artificial Sequence: Synthetic oligonucleotide
ccguuccauucugcuuguc

SEQ ID NO: 1314654 - RNA, 19 nt, Artificial Sequence
  Description of Artificial Sequence: Synthetic oligonucleotide
ggccuccggugucucccau

SEQ ID NO: 1314655 - RNA, 19 nt, Artificial Sequence
  Description of Artificial Sequence: Synthetic oligonucleotide
cggccuccggugucuccca

SEQ ID NO: 1314656 - RNA, 19 nt, Artificial Sequence
  Description of Artificial Sequence: Synthetic oligonucleotide
aaagccuacggucagacac

SEQ ID NO: 1314657 - RNA, 19 nt, Artificial Sequence
  Description of Artificial Sequence: Synthetic oligonucleotide
uggguuuugaaacagaggc

SEQ ID NO: 1314658 - RNA, 19 nt, Artificial Sequence
  Description of Artificial Sequence: Synthetic oligonucleotide
agacagaucagccaaaggg

SEQ ID NO: 1314659 - RNA, 19 nt, Artificial Sequence
  Description of Artificial Sequence: Synthetic oligonucleotide
ugcucuacuagacagauca

SEQ ID NO: 1314660 - RNA, 19 nt, Artificial Sequence
  Description of Artificial Sequence: Synthetic oligonucleotide
ucaucuaauagguacagug

SEQ ID NO: 1314661 - RNA, 19 nt, Artificial Sequence
  Description of Artificial Sequence: Synthetic oligonucleotide
uaagcugugggucauuugg

SEQ ID NO: 1314662 - RNA, 19 nt, Artificial Sequence
  Description of Artificial Sequence: Synthetic oligonucleotide
ucuaauagguacagugucg

SEQ ID NO: 1314663 - RNA, 19 nt, Artificial Sequence
  Description of Artificial Sequence: Synthetic oligonucleotide
ucuacuagacagaucagcc

SEQ ID NO: 1314664 - RNA, 19 nt, Artificial Sequence
  Description of Artificial Sequence: Synthetic oligonucleotide
uucgauacagacuagcaca

SEQ ID NO: 1314665 - RNA, 19 nt, Artificial Sequence
  Description of Artificial Sequence: Synthetic oligonucleotide
acuagcacagagcucagac

SEQ ID NO: 1314666 - RNA, 19 nt, Artificial Sequence
  Description of Artificial Sequence: Synthetic oligonucleotide
aucuaauagguacaguguc

SEQ ID NO: 1314667 - RNA, 19 nt, Artificial Sequence
  Description of Artificial Sequence: Synthetic oligonucleotide
uuuacuuauaccugagaga

SEQ ID NO: 1314668 - RNA, 19 nt, Artificial Sequence
  Description of Artificial Sequence: Synthetic oligonucleotide
agggucuucaucuaauagg

SEQ ID NO: 1314669 - RNA, 19 nt, Artificial Sequence
  Description of Artificial Sequence: Synthetic oligonucleotide
acuuauaccugagagaaag

SEQ ID NO: 1314670 - RNA, 19 nt, Artificial Sequence
  Description of Artificial Sequence: Synthetic oligonucleotide
uauaccugagagaaagugc

SEQ ID NO: 1314671 - RNA, 19 nt, Artificial Sequence
  Description of Artificial Sequence: Synthetic oligonucleotide
gacagcgucagcaacaggg

SEQ ID NO: 1314672 - RNA, 19 nt, Artificial Sequence
  Description of Artificial Sequence: Synthetic oligonucleotide
uuacuuauaccugagagaa

SEQ ID NO: 1314673 - RNA, 19 nt, Artificial Sequence
  Description of Artificial Sequence: Synthetic oligonucleotide
auagguacagugucgacag

SEQ ID NO: 1314674 - RNA, 19 nt, Artificial Sequence
  Description of Artificial Sequence: Synthetic oligonucleotide
ugcucuuucgaauugguga

SEQ ID NO: 1314675 - RNA, 19 nt, Artificial Sequence
  Description of Artificial Sequence: Synthetic oligonucleotide
aacagauaaagccuacggu

SEQ ID NO: 1314676 - RNA, 19 nt, Artificial Sequence
  Description of Artificial Sequence: Synthetic oligonucleotide
ucuacuagggauuucccca

SEQ ID NO: 1314677 - RNA, 19 nt, Artificial Sequence
  Description of Artificial Sequence: Synthetic oligonucleotide
ucugaagagguccagcucu

SEQ ID NO: 1314678 - RNA, 19 nt, Artificial Sequence
  Description of Artificial Sequence: Synthetic oligonucleotide
gaaacguuuucacugacca

SEQ ID NO: 1314679 - RNA, 19 nt, Artificial Sequence
  Description of Artificial Sequence: Synthetic oligonucleotide
agguagaggaaccuucagc

SEQ ID NO: 1314680 - RNA, 19 nt, Artificial Sequence
  Description of Artificial Sequence: Synthetic oligonucleotide
uuaugggugacauuucugu

SEQ ID NO: 1314681 - RNA, 19 nt, Artificial Sequence
  Description of Artificial Sequence: Synthetic oligonucleotide
aauagguacagugucgaca

SEQ ID NO: 1314682 - RNA, 19 nt, Artificial Sequence
  Description of Artificial Sequence: Synthetic oligonucleotide
caacauagaagaucagccg

SEQ ID NO: 1314683 - RNA, 19 nt, Artificial Sequence
  Description of Artificial Sequence: Synthetic oligonucleotide
aaacaagggugcuuccagg

SEQ ID NO: 1314684 - RNA, 19 nt, Artificial Sequence
  Description of Artificial Sequence: Synthetic oligonucleotide
cuugguacagcacuggaac

SEQ ID NO: 1314685 - RNA, 19 nt, Artificial Sequence
  Description of Artificial Sequence: Synthetic oligonucleotide
ucuucaucuaauagguaca

SEQ ID NO: 1314686 - RNA, 19 nt, Artificial Sequence
  Description of Artificial Sequence: Synthetic oligonucleotide
gucuucaucuaauagguac

SEQ ID NO: 1314687 - RNA, 19 nt, Artificial Sequence
  Description of Artificial Sequence: Synthetic oligonucleotide
gguagaggaaccuucagcc

SEQ ID NO: 1314688 - RNA, 19 nt, Artificial Sequence
  Description of Artificial Sequence: Synthetic oligonucleotide
aaacguuuucacugaccac

SEQ ID NO: 1314689 - RNA, 19 nt, Artificial Sequence
  Description of Artificial Sequence: Synthetic oligonucleotide
gacauuucuguguaccacc

SEQ ID NO: 1314690 - RNA, 19 nt, Artificial Sequence
  Description of Artificial Sequence: Synthetic oligonucleotide
acaaccacaaggcacagaa

SEQ ID NO: 1314691 - RNA, 19 nt, Artificial Sequence
  Description of Artificial Sequence: Synthetic oligonucleotide
uacuagacagaucagccaa

SEQ ID NO: 1314692 - RNA, 19 nt, Artificial Sequence
  Description of Artificial Sequence: Synthetic oligonucleotide
ucuuucgaauuggugaacg

SEQ ID NO: 1314693 - RNA, 19 nt, Artificial Sequence
  Description of Artificial Sequence: Synthetic oligonucleotide
agaucucuaggagucaagc

SEQ ID NO: 1314694 - RNA, 19 nt, Artificial Sequence
  Description of Artificial Sequence: Synthetic oligonucleotide
uguaccacccaugacacca

SEQ ID NO: 1314695 - RNA, 19 nt, Artificial Sequence
  Description of Artificial Sequence: Synthetic oligonucleotide
uuuaugggugacauuucug

SEQ ID NO: 1314696 - RNA, 19 nt, Artificial Sequence
  Description of Artificial Sequence: Synthetic oligonucleotide
uguucgauacagacuagca

SEQ ID NO: 1314697 - RNA, 19 nt, Artificial Sequence
  Description of Artificial Sequence: Synthetic oligonucleotide
ucgauacagacuagcacag

SEQ ID NO: 1314698 - RNA, 19 nt, Artificial Sequence
  Description of Artificial Sequence: Synthetic oligonucleotide
acugaugcaguuccucugg

SEQ ID NO: 1314699 - RNA, 19 nt, Artificial Sequence
  Description of Artificial Sequence: Synthetic oligonucleotide
uguguaccacccaugacac

SEQ ID NO: 1314700 - RNA, 19 nt, Artificial Sequence
  Description of Artificial Sequence: Synthetic oligonucleotide
aagggcuuguucgauacag

SEQ ID NO: 1314701 - RNA, 19 nt, Artificial Sequence
  Description of Artificial Sequence: Synthetic oligonucleotide
gacagaucagccaaagggc

SEQ ID NO: 1314702 - RNA, 19 nt, Artificial Sequence
  Description of Artificial Sequence: Synthetic oligonucleotide
ccaacauagaagaucagcc

SEQ ID NO: 1314703 - RNA, 19 nt, Artificial Sequence
  Description of Artificial Sequence: Synthetic oligonucleotide
ugcgaggcaagacugcaag

SEQ ID NO: 1314704 - RNA, 19 nt, Artificial Sequence
  Description of Artificial Sequence: Synthetic oligonucleotide
aacagaggcuuccagcccu

SEQ ID NO: 1314705 - RNA, 19 nt, Artificial Sequence
  Description of Artificial Sequence: Synthetic oligonucleotide
cauggaaggaccuggcccc

SEQ ID NO: 1314706 - RNA, 19 nt, Artificial Sequence
  Description of Artificial Sequence: Synthetic oligonucleotide
caugauaggucucaaccug

SEQ ID NO: 1314707 - RNA, 19 nt, Artificial Sequence
  Description of Artificial Sequence: Synthetic oligonucleotide
auaaagccuacggucagac

SEQ ID NO: 1314708 - RNA, 19 nt, Artificial Sequence
  Description of Artificial Sequence: Synthetic oligonucleotide
cuuugacugucagugaucc

SEQ ID NO: 1314709 - RNA, 19 nt, Artificial Sequence
  Description of Artificial Sequence: Synthetic oligonucleotide
agucaguaguccuacuuug

SEQ ID NO: 1314710 - RNA, 19 nt, Artificial Sequence
  Description of Artificial Sequence: Synthetic oligonucleotide
ugaccugcauggaaggacc

SEQ ID NO: 1314711 - RNA, 19 nt, Artificial Sequence
  Description of Artificial Sequence: Synthetic oligonucleotide
acaugauaggucucaaccu

SEQ ID NO: 1314712 - RNA, 19 nt, Artificial Sequence
  Description of Artificial Sequence: Synthetic oligonucleotide
gaucucuaggagucaagcc

SEQ ID NO: 1314713 - RNA, 19 nt, Artificial Sequence
  Description of Artificial Sequence: Synthetic oligonucleotide
ucauuuggggccucacuag

SEQ ID NO: 1314714 - RNA, 19 nt, Artificial Sequence
  Description of Artificial Sequence: Synthetic oligonucleotide
auacagacuagcacagagc

SEQ ID NO: 1314715 - RNA, 19 nt, Artificial Sequence
  Description of Artificial Sequence: Synthetic oligonucleotide
ccuacggucagacacaacc

SEQ ID NO: 1314716 - RNA, 19 nt, Artificial Sequence
  Description of Artificial Sequence: Synthetic oligonucleotide
ugaccacugagccugcucu

SEQ ID NO: 1314717 - RNA, 19 nt, Artificial Sequence
  Description of Artificial Sequence: Synthetic oligonucleotide
agaaacguuuucacugacc

SEQ ID NO: 1314718 - RNA, 19 nt, Artificial Sequence
  Description of Artificial Sequence: Synthetic oligonucleotide
cuuucgaauuggugaacgg

SEQ ID NO: 1314719 - RNA, 19 nt, Artificial Sequence
  Description of Artificial Sequence: Synthetic oligonucleotide
acaacuuuacuuauaccug

SEQ ID NO: 1314720 - RNA, 19 nt, Artificial Sequence
  Description of Artificial Sequence: Synthetic oligonucleotide
uaggagucaagccagccua

SEQ ID NO: 1314721 - RNA, 19 nt, Artificial Sequence
  Description of Artificial Sequence: Synthetic oligonucleotide
uucucuuaagcuguggguc

SEQ ID NO: 1314722 - RNA, 19 nt, Artificial Sequence
  Description of Artificial Sequence: Synthetic oligonucleotide
caaacaagggugcuuccag

SEQ ID NO: 1314723 - RNA, 19 nt, Artificial Sequence
  Description of Artificial Sequence: Synthetic oligonucleotide
aggcaagacugcaagacac

SEQ ID NO: 1314724 - RNA, 19 nt, Artificial Sequence
  Description of Artificial Sequence: Synthetic oligonucleotide
cuguguaccacccaugaca

SEQ ID NO: 1314725 - RNA, 19 nt, Artificial Sequence
  Description of Artificial Sequence: Synthetic oligonucleotide
ucucuuaagcuguggguca

SEQ ID NO: 1314726 - RNA, 19 nt, Artificial Sequence
  Description of Artificial Sequence: Synthetic oligonucleotide
aguccuacuuugccagagc

SEQ ID NO: 1314727 - RNA, 19 nt, Artificial Sequence
  Description of Artificial Sequence: Synthetic oligonucleotide
cuggguuuugaaacagagg

SEQ ID NO: 1314728 - RNA, 19 nt, Artificial Sequence
  Description of Artificial Sequence: Synthetic oligonucleotide
agggauagcaggcuuuaug

SEQ ID NO: 1314729 - RNA, 19 nt, Artificial Sequence
  Description of Artificial Sequence: Synthetic oligonucleotide
cucuacuagggauuucccc

SEQ ID NO: 1314730 - RNA, 19 nt, Artificial Sequence
  Description of Artificial Sequence: Synthetic oligonucleotide
aacuuuacuuauaccugag

SEQ ID NO: 1314731 - RNA, 19 nt, Artificial Sequence
  Description of Artificial Sequence: Synthetic oligonucleotide
cauguggccugcuaaugcc

SEQ ID NO: 1314732 - RNA, 19 nt, Artificial Sequence
  Description of Artificial Sequence: Synthetic oligonucleotide
aguacacagcugccugucc

SEQ ID NO: 1314733 - RNA, 19 nt, Artificial Sequence
  Description of Artificial Sequence: Synthetic oligonucleotide
augauaggucucaaccugc

SEQ ID NO: 1314734 - RNA, 19 nt, Artificial Sequence
  Description of Artificial Sequence: Synthetic oligonucleotide
cucucuacuagggauuucc

SEQ ID NO: 1314735 - RNA, 19 nt, Artificial Sequence
  Description of Artificial Sequence: Synthetic oligonucleotide
gaaagguagaggaaccuuc

SEQ ID NO: 1314736 - RNA, 19 nt, Artificial Sequence
  Description of Artificial Sequence: Synthetic oligonucleotide
cucuacuagacagaucagc

SEQ ID NO: 1314737 - RNA, 19 nt, Artificial Sequence
  Description of Artificial Sequence: Synthetic oligonucleotide
ucgaauuggugaacgggga

SEQ ID NO: 1314738 - RNA, 19 nt, Artificial Sequence
  Description of Artificial Sequence: Synthetic oligonucleotide
uuuggggccucacuagcca

SEQ ID NO: 1314739 - RNA, 19 nt, Artificial Sequence
  Description of Artificial Sequence: Synthetic oligonucleotide
acagguuucauagugcaaa

SEQ ID NO: 1314740 - RNA, 19 nt, Artificial Sequence
  Description of Artificial Sequence: Synthetic oligonucleotide
cagacuagcacagagcuca

SEQ ID NO: 1314741 - RNA, 19 nt, Artificial Sequence
  Description of Artificial Sequence: Synthetic oligonucleotide
agugucgacagcgucagca

SEQ ID NO: 1314742 - RNA, 19 nt, Artificial Sequence
  Description of Artificial Sequence: Synthetic oligonucleotide
uuggugaacggggacagca

SEQ ID NO: 1314743 - RNA, 19 nt, Artificial Sequence
  Description of Artificial Sequence: Synthetic oligonucleotide
gauagcaggcuuuaugggu

SEQ ID NO: 1314744 - RNA, 19 nt, Artificial Sequence
  Description of Artificial Sequence: Synthetic oligonucleotide
ugcgagugggaauucugcc

SEQ ID NO: 1314745 - RNA, 19 nt, Artificial Sequence
  Description of Artificial Sequence: Synthetic oligonucleotide
ugggugcgaggcaagacug

SEQ ID NO: 1314746 - RNA, 19 nt, Artificial Sequence
  Description of Artificial Sequence: Synthetic oligonucleotide
uaggucucaaccugcuuga

SEQ ID NO: 1314747 - RNA, 19 nt, Artificial Sequence
  Description of Artificial Sequence: Synthetic oligonucleotide
ucucuacuagggauuuccc

SEQ ID NO: 1314748 - RNA, 19 nt, Artificial Sequence
  Description of Artificial Sequence: Synthetic oligonucleotide
caacuuuacuuauaccuga

SEQ ID NO: 1314749 - RNA, 19 nt, Artificial Sequence
  Description of Artificial Sequence: Synthetic oligonucleotide
gacacgggaaagguagagg

SEQ ID NO: 1314750 - RNA, 19 nt, Artificial Sequence
  Description of Artificial Sequence: Synthetic oligonucleotide
cuucaucuaauagguacag

SEQ ID NO: 1314751 - RNA, 19 nt, Artificial Sequence
  Description of Artificial Sequence: Synthetic oligonucleotide
acccaugacaccaagcaug

SEQ ID NO: 1314752 - RNA, 19 nt, Artificial Sequence
  Description of Artificial Sequence: Synthetic oligonucleotide
cuacuagggauuuccccag

SEQ ID NO: 1314753 - RNA, 19 nt, Artificial Sequence
  Description of Artificial Sequence: Synthetic oligonucleotide
acuuuacuuauaccugaga

SEQ ID NO: 1314754 - RNA, 19 nt, Artificial Sequence
  Description of Artificial Sequence: Synthetic oligonucleotide
gcuuguucgauacagacua

SEQ ID NO: 1314755 - RNA, 19 nt, Artificial Sequence
  Description of Artificial Sequence: Synthetic oligonucleotide
ugcggaagucucuuuuccc

SEQ ID NO: 1314756 - RNA, 19 nt, Artificial Sequence
  Description of Artificial Sequence: Synthetic oligonucleotide
gaagucucuuuucccagca

SEQ ID NO: 1314757 - RNA, 19 nt, Artificial Sequence
  Description of Artificial Sequence: Synthetic oligonucleotide
cugcaagacaccagugagc

SEQ ID NO: 1314758 - RNA, 19 nt, Artificial Sequence
  Description of Artificial Sequence: Synthetic oligonucleotide
ugcuaaugccacuggcacc

SEQ ID NO: 1314759 - RNA, 19 nt, Artificial Sequence
  Description of Artificial Sequence: Synthetic oligonucleotide
acugagccugcucuacuag

SEQ ID NO: 1314760 - RNA, 19 nt, Artificial Sequence
  Description of Artificial Sequence: Synthetic oligonucleotide
uuaagcugugggucauuug

SEQ ID NO: 1314761 - RNA, 19 nt, Artificial Sequence
  Description of Artificial Sequence: Synthetic oligonucleotide
cauuuggggccucacuagc

SEQ ID NO: 1314762 - RNA, 19 nt, Artificial Sequence
  Description of Artificial Sequence: Synthetic oligonucleotide
uucacugaccacugagccu

SEQ ID NO: 1314763 - RNA, 19 nt, Artificial Sequence
  Description of Artificial Sequence: Synthetic oligonucleotide
ugggugacauuucugugua

SEQ ID NO: 1314764 - RNA, 19 nt, Artificial Sequence
  Description of Artificial Sequence: Synthetic oligonucleotide
ugacaccaagcauggaaac

SEQ ID NO: 1314765 - RNA, 19 nt, Artificial Sequence
  Description of Artificial Sequence: Synthetic oligonucleotide
uacuuugccagagcaggcc

SEQ ID NO: 1314766 - RNA, 19 nt, Artificial Sequence
  Description of Artificial Sequence: Synthetic oligonucleotide
agccgcaaguccaaagggc

SEQ ID NO: 1314767 - RNA, 19 nt, Artificial Sequence
  Description of Artificial Sequence: Synthetic oligonucleotide
cuagacagaucagccaaag

SEQ ID NO: 1314768 - RNA, 19 nt, Artificial Sequence
  Description of Artificial Sequence: Synthetic oligonucleotide
cacacaacaggagauucug

SEQ ID NO: 1314769 - RNA, 19 nt, Artificial Sequence
  Description of Artificial Sequence: Synthetic oligonucleotide
cugcgagugggaauucugc

SEQ ID NO: 1314770 - RNA, 19 nt, Artificial Sequence
  Description of Artificial Sequence: Synthetic oligonucleotide
cuaauagguacagugucga

SEQ ID NO: 1314771 - RNA, 19 nt, Artificial Sequence
  Description of Artificial Sequence: Synthetic oligonucleotide
augcugcggggucacuucc

SEQ ID NO: 1314772 - RNA, 19 nt, Artificial Sequence
  Description of Artificial Sequence: Synthetic oligonucleotide
gucagugaucccaugcaag

SEQ ID NO: 1314773 - RNA, 19 nt, Artificial Sequence
  Description of Artificial Sequence: Synthetic oligonucleotide
ucuguguaccacccaugac

SEQ ID NO: 1314774 - RNA, 19 nt, Artificial Sequence
  Description of Artificial Sequence: Synthetic oligonucleotide
agaucagccaaagggccag

SEQ ID NO: 1314775 - RNA, 19 nt, Artificial Sequence
  Description of Artificial Sequence: Synthetic oligonucleotide
ucugcggaagucucuuuuc

SEQ ID NO: 1314776 - RNA, 19 nt, Artificial Sequence
  Description of Artificial Sequence: Synthetic oligonucleotide
uguggccugcuaaugccac

SEQ ID NO: 1314777 - RNA, 19 nt, Artificial Sequence
  Description of Artificial Sequence: Synthetic oligonucleotide
gagaaacguuuucacugac

SEQ ID NO: 1314778 - RNA, 19 nt, Artificial Sequence
  Description of Artificial Sequence: Synthetic oligonucleotide
uaauagguacagugucgac

SEQ ID NO: 1314779 - RNA, 19 nt, Artificial Sequence
  Description of Artificial Sequence: Synthetic oligonucleotide
aaagggcuuguucgauaca

SEQ ID NO: 1314780 - RNA, 19 nt, Artificial Sequence
  Description of Artificial Sequence: Synthetic oligonucleotide
ugucgacagcgucagcaac

SEQ ID NO: 1314781 - RNA, 19 nt, Artificial Sequence
  Description of Artificial Sequence: Synthetic oligonucleotide
cagccgcaaguccaaaggg

SEQ ID NO: 1314782 - RNA, 19 nt, Artificial Sequence
  Description of Artificial Sequence: Synthetic oligonucleotide
cuacuagacagaucagcca

SEQ ID NO: 1314783 - RNA, 19 nt, Artificial Sequence
  Description of Artificial Sequence: Synthetic oligonucleotide
gucauuuggggccucacua

SEQ ID NO: 1314784 - RNA, 19 nt, Artificial Sequence
  Description of Artificial Sequence: Synthetic oligonucleotide
ucgacagcgucagcaacag

SEQ ID NO: 1314785 - RNA, 19 nt, Artificial Sequence
  Description of Artificial Sequence: Synthetic oligonucleotide
agaggcuuccccagacacc

SEQ ID NO: 1314786 - RNA, 19 nt, Artificial Sequence
  Description of Artificial Sequence: Synthetic oligonucleotide
cuuguucgauacagacuag

SEQ ID NO: 1314787 - RNA, 19 nt, Artificial Sequence
  Description of Artificial Sequence: Synthetic oligonucleotide
gaugcugcggggucacuuc

SEQ ID NO: 1314788 - RNA, 19 nt, Artificial Sequence
  Description of Artificial Sequence: Synthetic oligonucleotide
ugaacggggacagcacagc

SEQ ID NO: 1314789 - RNA, 19 nt, Artificial Sequence
  Description of Artificial Sequence: Synthetic oligonucleotide
caucuaauagguacagugu

SEQ ID NO: 1314790 - RNA, 19 nt, Artificial Sequence
  Description of Artificial Sequence: Synthetic oligonucleotide
uacuuauaccugagagaaa

SEQ ID NO: 1314791 - RNA, 19 nt, Artificial Sequence
  Description of Artificial Sequence: Synthetic oligonucleotide
guccuacuuugccagagca

SEQ ID NO: 1314792 - RNA, 19 nt, Artificial Sequence
  Description of Artificial Sequence: Synthetic oligonucleotide
uuggggccucacuagccag

SEQ ID NO: 1314793 - RNA, 19 nt, Artificial Sequence
  Description of Artificial Sequence: Synthetic oligonucleotide
ggaagagauucagggauag

SEQ ID NO: 1314794 - RNA, 19 nt, Artificial Sequence
  Description of Artificial Sequence: Synthetic oligonucleotide
uucaucuaauagguacagu

SEQ ID NO: 1314795 - RNA, 19 nt, Artificial Sequence
  Description of Artificial Sequence: Synthetic oligonucleotide
acaccagugagcuccucaa

SEQ ID NO: 1314796 - RNA, 19 nt, Artificial Sequence
  Description of Artificial Sequence: Synthetic oligonucleotide
gucaguaguccuacuuugc

SEQ ID NO: 1314797 - RNA, 19 nt, Artificial Sequence
  Description of Artificial Sequence: Synthetic oligonucleotide
ggagaaacguuuucacuga

SEQ ID NO: 1314798 - RNA, 19 nt, Artificial Sequence
  Description of Artificial Sequence: Synthetic oligonucleotide
gacugggcguauccgaguc

SEQ ID NO: 1314799 - RNA, 19 nt, Artificial Sequence
  Description of Artificial Sequence: Synthetic oligonucleotide
uaaagccuacggucagaca

SEQ ID NO: 1314800 - RNA, 19 nt, Artificial Sequence
  Description of Artificial Sequence: Synthetic oligonucleotide
uucccggcuagcagguuac

SEQ ID NO: 1314801 - RNA, 19 nt, Artificial Sequence
  Description of Artificial Sequence: Synthetic oligonucleotide
cagcugcccacucuagccg

SEQ ID NO: 1314802 - RNA, 19 nt, Artificial Sequence
  Description of Artificial Sequence: Synthetic oligonucleotide
cagaucucuaggagucaag

SEQ ID NO: 1314803 - RNA, 19 nt, Artificial Sequence
  Description of Artificial Sequence: Synthetic oligonucleotide
uccgagucaguaguccuac

SEQ ID NO: 1314804 - RNA, 19 nt, Artificial Sequence
  Description of Artificial Sequence: Synthetic oligonucleotide
cuacggucagacacaacca

SEQ ID NO: 1314805 - RNA, 19 nt, Artificial Sequence
  Description of Artificial Sequence: Synthetic oligonucleotide
gaggaauggccaggguggg

SEQ ID NO: 1314806 - RNA, 19 nt, Artificial Sequence
  Description of Artificial Sequence: Synthetic oligonucleotide
gaagagauucagggauagc

SEQ ID NO: 1314807 - RNA, 19 nt, Artificial Sequence
  Description of Artificial Sequence: Synthetic oligonucleotide
gaacggggacagcacagca

SEQ ID NO: 1314808 - RNA, 19 nt, Artificial Sequence
  Description of Artificial Sequence: Synthetic oligonucleotide
gggcuuguucgauacagac

SEQ ID NO: 1314809 - RNA, 19 nt, Artificial Sequence
  Description of Artificial Sequence: Synthetic oligonucleotide
auuggugaacggggacagc

SEQ ID NO: 1314810 - RNA, 19 nt, Artificial Sequence
  Description of Artificial Sequence: Synthetic oligonucleotide
agcgacgcaacugccgguc

SEQ ID NO: 1314811 - RNA, 19 nt, Artificial Sequence
  Description of Artificial Sequence: Synthetic oligonucleotide
aagccuacggucagacaca

SEQ ID NO: 1314812 - RNA, 19 nt, Artificial Sequence
  Description of Artificial Sequence: Synthetic oligonucleotide
cugggcguauccgagucag

SEQ ID NO: 1314813 - RNA, 19 nt, Artificial Sequence
  Description of Artificial Sequence: Synthetic oligonucleotide
cugcauagcgacgcaacug

SEQ ID NO: 1314814 - RNA, 19 nt, Artificial Sequence
  Description of Artificial Sequence: Synthetic oligonucleotide
cagugaucccaugcaaggc

SEQ ID NO: 1314815 - RNA, 19 nt, Artificial Sequence
  Description of Artificial Sequence: Synthetic oligonucleotide
cuuuaugggugacauuucu

SEQ ID NO: 1314816 - RNA, 19 nt, Artificial Sequence
  Description of Artificial Sequence: Synthetic oligonucleotide
acagacuagcacagagcuc

SEQ ID NO: 1314817 - RNA, 19 nt, Artificial Sequence
  Description of Artificial Sequence: Synthetic oligonucleotide
accacaaggcacagaaacu

SEQ ID NO: 1314818 - RNA, 19 nt, Artificial Sequence
  Description of Artificial Sequence: Synthetic oligonucleotide
accacugcgagugggaauu

SEQ ID NO: 1314819 - RNA, 19 nt, Artificial Sequence
  Description of Artificial Sequence: Synthetic oligonucleotide
ggcguauccgagucaguag

SEQ ID NO: 1314820 - RNA, 19 nt, Artificial Sequence
  Description of Artificial Sequence: Synthetic oligonucleotide
gucugaagagguccagcuc

SEQ ID NO: 1314821 - RNA, 19 nt, Artificial Sequence
  Description of Artificial Sequence: Synthetic oligonucleotide
caacggccagagccgaugc

SEQ ID NO: 1314822 - RNA, 19 nt, Artificial Sequence
  Description of Artificial Sequence: Synthetic oligonucleotide
uagguacagugucgacagc

SEQ ID NO: 1314823 - RNA, 19 nt, Artificial Sequence
  Description of Artificial Sequence: Synthetic oligonucleotide
cuucucuuaagcugugggu

SEQ ID NO: 1314824 - RNA, 19 nt, Artificial Sequence
  Description of Artificial Sequence: Synthetic oligonucleotide
gagucaguaguccuacuuu

SEQ ID NO: 1314825 - RNA, 19 nt, Artificial Sequence
  Description of Artificial Sequence: Synthetic oligonucleotide
ccauguggccugcuaaugc

SEQ ID NO: 1314826 - RNA, 19 nt, Artificial Sequence
  Description of Artificial Sequence: Synthetic oligonucleotide
guccaaagggcuuguucga

SEQ ID NO: 1314827 - RNA, 19 nt, Artificial Sequence
  Description of Artificial Sequence: Synthetic oligonucleotide
ucacuagccaguggccaac

SEQ ID NO: 1314828 - RNA, 19 nt, Artificial Sequence
  Description of Artificial Sequence: Synthetic oligonucleotide
gucacucccacaguuugga

SEQ ID NO: 1314829 - RNA, 19 nt, Artificial Sequence
  Description of Artificial Sequence: Synthetic oligonucleotide
caagcauggaaacaacuuu

SEQ ID NO: 1314830 - RNA, 19 nt, Artificial Sequence
  Description of Artificial Sequence: Synthetic oligonucleotide
gcucuuucgaauuggugaa

SEQ ID NO: 1314831 - RNA, 19 nt, Artificial Sequence
  Description of Artificial Sequence: Synthetic oligonucleotide
gucgacagcgucagcaaca

SEQ ID NO: 1314832 - RNA, 19 nt, Artificial Sequence
  Description of Artificial Sequence: Synthetic oligonucleotide
ggaccuggccccaagagga

SEQ ID NO: 1314833 - RNA, 19 nt, Artificial Sequence
  Description of Artificial Sequence: Synthetic oligonucleotide
agugcuggagaaacguuuu

SEQ ID NO: 1314834 - RNA, 19 nt, Artificial Sequence
  Description of Artificial Sequence: Synthetic oligonucleotide
gaagguccgaagguagaaa

SEQ ID NO: 1314835 - RNA, 19 nt, Artificial Sequence
  Description of Artificial Sequence: Synthetic oligonucleotide
gauucagggauagcaggcu

SEQ ID NO: 1314836 - RNA, 19 nt, Artificial Sequence
  Description of Artificial Sequence: Synthetic oligonucleotide
cagcgucagcaacagggac

SEQ ID NO: 1314837 - RNA, 19 nt, Artificial Sequence
  Description of Artificial Sequence: Synthetic oligonucleotide
agcacugcauagcgacgca

SEQ ID NO: 1314838 - RNA, 19 nt, Artificial Sequence
  Description of Artificial Sequence: Synthetic oligonucleotide
ccacaaggcacagaaacuc

SEQ ID NO: 1314839 - RNA, 19 nt, Artificial Sequence
  Description of Artificial Sequence: Synthetic oligonucleotide
ucgcaggaggcccgcagau

SEQ ID NO: 1314840 - RNA, 19 nt, Artificial Sequence
  Description of Artificial Sequence: Synthetic oligonucleotide
agccgaaggcucuggccug

SEQ ID NO: 1314841 - RNA, 19 nt, Artificial Sequence
  Description of Artificial Sequence: Synthetic oligonucleotide
acagcgucagcaacaggga

SEQ ID NO: 1314842 - RNA, 19 nt, Artificial Sequence
  Description of Artificial Sequence: Synthetic oligonucleotide
acggucagacacaaccaca

SEQ ID NO: 1314843 - RNA, 19 nt, Artificial Sequence
  Description of Artificial Sequence: Synthetic oligonucleotide
agagccgaugcugcggggu

SEQ ID NO: 1314844 - RNA, 19 nt, Artificial Sequence
  Description of Artificial Sequence: Synthetic oligonucleotide
cuagccaguggccaacaua

SEQ ID NO: 1314845 - RNA, 19 nt, Artificial Sequence
  Description of Artificial Sequence: Synthetic oligonucleotide
cucuuucgaauuggugaac

SEQ ID NO: 1314846 - RNA, 19 nt, Artificial Sequence
  Description of Artificial Sequence: Synthetic oligonucleotide
ugcucucuacuagggauuu

SEQ ID NO: 1314847 - RNA, 19 nt, Artificial Sequence
  Description of Artificial Sequence: Synthetic oligonucleotide
ccacccaugacaccaagca

SEQ ID NO: 1314848 - RNA, 19 nt, Artificial Sequence
  Description of Artificial Sequence: Synthetic oligonucleotide
gggucuucaucuaauaggu

SEQ ID NO: 1314849 - RNA, 19 nt, Artificial Sequence
  Description of Artificial Sequence: Synthetic oligonucleotide
cggcuagcagguuacacag

SEQ ID NO: 1314850 - RNA, 19 nt, Artificial Sequence
  Description of Artificial Sequence: Synthetic oligonucleotide
aggagucaagccagccuag

SEQ ID NO: 1314851 - RNA, 19 nt, Artificial Sequence
  Description of Artificial Sequence: Synthetic oligonucleotide
cagacaccacugcgagugg

SEQ ID NO: 1314852 - RNA, 19 nt, Artificial Sequence
  Description of Artificial Sequence: Synthetic oligonucleotide
cugcggggucacuuccucc

SEQ ID NO: 1314853 - RNA, 19 nt, Artificial Sequence
  Description of Artificial Sequence: Synthetic oligonucleotide
gacaccacugcgaguggga

SEQ ID NO: 1314854 - RNA, 19 nt, Artificial Sequence
  Description of Artificial Sequence: Synthetic oligonucleotide
cacagagcucagacugcug

SEQ ID NO: 1314855 - RNA, 19 nt, Artificial Sequence
  Description of Artificial Sequence: Synthetic oligonucleotide
caguacacagcugccuguc

SEQ ID NO: 1314856 - RNA, 19 nt, Artificial Sequence
  Description of Artificial Sequence: Synthetic oligonucleotide
cauuucuguguaccaccca

SEQ ID NO: 1314857 - RNA, 19 nt, Artificial Sequence
  Description of Artificial Sequence: Synthetic oligonucleotide
ccagagccgaugcugcggg

SEQ ID NO: 1314858 - RNA, 19 nt, Artificial Sequence
  Description of Artificial Sequence: Synthetic oligonucleotide
cuaggagucaagccagccu

SEQ ID NO: 1314859 - RNA, 19 nt, Artificial Sequence
  Description of Artificial Sequence: Synthetic oligonucleotide
cucacuagccaguggccaa

SEQ ID NO: 1314860 - RNA, 19 nt, Artificial Sequence
  Description of Artificial Sequence: Synthetic oligonucleotide
agcagguuacacagugaga

SEQ ID NO: 1314861 - RNA, 19 nt, Artificial Sequence
  Description of Artificial Sequence: Synthetic oligonucleotide
gcaacagggacacgggaaa

SEQ ID NO: 1314862 - RNA, 19 nt, Artificial Sequence
  Description of Artificial Sequence: Synthetic oligonucleotide
cuuauaccugagagaaagu

SEQ ID NO: 1314863 - RNA, 19 nt, Artificial Sequence
  Description of Artificial Sequence: Synthetic oligonucleotide
guaguccuacuuugccaga

SEQ ID NO: 1314864 - RNA, 19 nt, Artificial Sequence
  Description of Artificial Sequence: Synthetic oligonucleotide
gcuaaugccacuggcaccu

SEQ ID NO: 1314865 - RNA, 19 nt, Artificial Sequence
  Description of Artificial Sequence: Synthetic oligonucleotide
gcaagacugcaagacacca

SEQ ID NO: 1314866 - RNA, 19 nt, Artificial Sequence
  Description of Artificial Sequence: Synthetic oligonucleotide
guucccggcuagcagguua

SEQ ID NO: 1314867 - RNA, 19 nt, Artificial Sequence
  Description of Artificial Sequence: Synthetic oligonucleotide
gagccgaugcugcgggguc

SEQ ID NO: 1314868 - RNA, 19 nt, Artificial Sequence
  Description of Artificial Sequence: Synthetic oligonucleotide
guguaccacccaugacacc

SEQ ID NO: 1314869 - RNA, 19 nt, Artificial Sequence
  Description of Artificial Sequence: Synthetic oligonucleotide
auguggccugcuaaugcca

SEQ ID NO: 1314870 - RNA, 19 nt, Artificial Sequence
  Description of Artificial Sequence: Synthetic oligonucleotide
cugcucuacuagacagauc

SEQ ID NO: 1314871 - RNA, 19 nt, Artificial Sequence
  Description of Artificial Sequence: Synthetic oligonucleotide
uagcgacgcaacugccggu

SEQ ID NO: 1314872 - RNA, 19 nt, Artificial Sequence
  Description of Artificial Sequence: Synthetic oligonucleotide
acugccggucaggacaaau

SEQ ID NO: 1314873 - RNA, 19 nt, Artificial Sequence
  Description of Artificial Sequence: Synthetic oligonucleotide
cugggugcgaggcaagacu

SEQ ID NO: 1314874 - RNA, 19 nt, Artificial Sequence
  Description of Artificial Sequence: Synthetic oligonucleotide
caucucggggcagcaguac

SEQ ID NO: 1314875 - RNA, 19 nt, Artificial Sequence
  Description of Artificial Sequence: Synthetic oligonucleotide
aggucucaaccugcuugag

SEQ ID NO: 1314876 - RNA, 19 nt, Artificial Sequence
  Description of Artificial Sequence: Synthetic oligonucleotide
ugggcguauccgagucagu

SEQ ID NO: 1314877 - RNA, 19 nt, Artificial Sequence
  Description of Artificial Sequence: Synthetic oligonucleotide
ggccugcuaaugccacugg

SEQ ID NO: 1314878 - RNA, 19 nt, Artificial Sequence
  Description of Artificial Sequence: Synthetic oligonucleotide
agggcuuguucgauacaga

SEQ ID NO: 1314879 - RNA, 19 nt, Artificial Sequence
  Description of Artificial Sequence: Synthetic oligonucleotide
agagaaccacauggucacu

SEQ ID NO: 1314880 - RNA, 19 nt, Artificial Sequence
  Description of Artificial Sequence: Synthetic oligonucleotide
ucuuaagcugugggucauu

SEQ ID NO: 1314881 - RNA, 19 nt, Artificial Sequence
  Description of Artificial Sequence: Synthetic oligonucleotide
ccggcuagcagguuacaca

SEQ ID NO: 1314882 - RNA, 19 nt, Artificial Sequence
  Description of Artificial Sequence: Synthetic oligonucleotide
cgaauuggugaacggggac

SEQ ID NO: 1314883 - RNA, 19 nt, Artificial Sequence
  Description of Artificial Sequence: Synthetic oligonucleotide
cacugaccacugagccugc

SEQ ID NO: 1314884 - RNA, 19 nt, Artificial Sequence
  Description of Artificial Sequence: Synthetic oligonucleotide
gcguauccgagucaguagu

SEQ ID NO: 1314885 - RNA, 19 nt, Artificial Sequence
  Description of Artificial Sequence: Synthetic oligonucleotide
cucccugaccugcauggaa

SEQ ID NO: 1314886 - RNA, 19 nt, Artificial Sequence
  Description of Artificial Sequence: Synthetic oligonucleotide
ggugcgaggcaagacugca

SEQ ID NO: 1314887 - RNA, 19 nt, Artificial Sequence
  Description of Artificial Sequence: Synthetic oligonucleotide
gcaacggccagagccgaug

SEQ ID NO: 1314888 - RNA, 19 nt, Artificial Sequence
  Description of Artificial Sequence: Synthetic oligonucleotide
caggcuuuaugggugacau

SEQ ID NO: 1314889 - RNA, 19 nt, Artificial Sequence
  Description of Artificial Sequence: Synthetic oligonucleotide
ggaagguccgaagguagaa

SEQ ID NO: 1314890 - RNA, 19 nt, Artificial Sequence
  Description of Artificial Sequence: Synthetic oligonucleotide
cugcaccgcagacacugga

SEQ ID NO: 1314891 - RNA, 19 nt, Artificial Sequence
  Description of Artificial Sequence: Synthetic oligonucleotide
aggcuuuaugggugacauu

SEQ ID NO: 1314892 - RNA, 19 nt, Artificial Sequence
  Description of Artificial Sequence: Synthetic oligonucleotide
gcucuacuagacagaucag

SEQ ID NO: 1314893 - RNA, 19 nt, Artificial Sequence
  Description of Artificial Sequence: Synthetic oligonucleotide
ccuugguacagcacuggaa

SEQ ID NO: 1314894 - RNA, 19 nt, Artificial Sequence
  Description of Artificial Sequence: Synthetic oligonucleotide
gcuuuaugggugacauuuc

SEQ ID NO: 1314895 - RNA, 19 nt, Artificial Sequence
  Description of Artificial Sequence: Synthetic oligonucleotide
cacuggcaccuugguacag

SEQ ID NO: 1314896 - RNA, 19 nt, Artificial Sequence
  Description of Artificial Sequence: Synthetic oligonucleotide
gccagcucgcaggaggccc

SEQ ID NO: 1314897 - RNA, 19 nt, Artificial Sequence
  Description of Artificial Sequence: Synthetic oligonucleotide
cucggggcagcaguacaca

SEQ ID NO: 1314898 - RNA, 19 nt, Artificial Sequence
  Description of Artificial Sequence: Synthetic oligonucleotide
ccaagcauggaaacaacuu

SEQ ID NO: 1314899 - RNA, 19 nt, Artificial Sequence
  Description of Artificial Sequence: Synthetic oligonucleotide
ccuggagacagguuucaua

SEQ ID NO: 1314900 - RNA, 19 nt, Artificial Sequence
  Description of Artificial Sequence: Synthetic oligonucleotide
ggucauuuggggccucacu

SEQ ID NO: 1314901 - RNA, 19 nt, Artificial Sequence
  Description of Artificial Sequence: Synthetic oligonucleotide
gggccucacuagccagugg

SEQ ID NO: 1314902 - RNA, 19 nt, Artificial Sequence
  Description of Artificial Sequence: Synthetic oligonucleotide
gaguucccggcuagcaggu

SEQ ID NO: 1314903 - RNA, 19 nt, Artificial Sequence
  Description of Artificial Sequence: Synthetic oligonucleotide
gggcguauccgagucagua

SEQ ID NO: 1314904 - RNA, 19 nt, Artificial Sequence
  Description of Artificial Sequence: Synthetic oligonucleotide
gcgaggcaagacugcaaga

SEQ ID NO: 1314905 - RNA, 19 nt, Artificial Sequence
  Description of Artificial Sequence: Synthetic oligonucleotide
cucugcggaagucucuuuu

SEQ ID NO: 1314906 - RNA, 19 nt, Artificial Sequence
  Description of Artificial Sequence: Synthetic oligonucleotide
ggcuuguucgauacagacu

SEQ ID NO: 1314907 - RNA, 19 nt, Artificial Sequence
  Description of Artificial Sequence: Synthetic oligonucleotide
gcugcggggucacuuccuc

SEQ ID NO: 1314908 - RNA, 19 nt, Artificial Sequence
  Description of Artificial Sequence: Synthetic oligonucleotide
cacaaccacaaggcacaga

SEQ ID NO: 1314909 - RNA, 19 nt, Artificial Sequence
  Description of Artificial Sequence: Synthetic oligonucleotide
gccgcaaguccaaagggcu

SEQ ID NO: 1314910 - RNA, 19 nt, Artificial Sequence
  Description of Artificial Sequence: Synthetic oligonucleotide
gggugcgaggcaagacugc

SEQ ID NO: 1314911 - RNA, 19 nt, Artificial Sequence
  Description of Artificial Sequence: Synthetic oligonucleotide
ggaaggcacggcaaugccu

SEQ ID NO: 1314912 - RNA, 19 nt, Artificial Sequence
  Description of Artificial Sequence: Synthetic oligonucleotide
cucugggugcgaggcaaga

SEQ ID NO: 1314913 - RNA, 19 nt, Artificial Sequence
  Description of Artificial Sequence: Synthetic oligonucleotide
ucccggcuagcagguuaca

SEQ ID NO: 1314914 - RNA, 19 nt, Artificial Sequence
  Description of Artificial Sequence: Synthetic oligonucleotide
cacccaugacaccaagcau

SEQ ID NO: 1314915 - RNA, 19 nt, Artificial Sequence
  Description of Artificial Sequence: Synthetic oligonucleotide
gcaggcuuuaugggugaca

SEQ ID NO: 1314916 - RNA, 19 nt, Artificial Sequence
  Description of Artificial Sequence: Synthetic oligonucleotide
ccgcagauggccccuguca

SEQ ID NO: 1314917 - RNA, 19 nt, Artificial Sequence
  Description of Artificial Sequence: Synthetic oligonucleotide
gaccugcauggaaggaccu

SEQ ID NO: 1314918 - RNA, 19 nt, Artificial Sequence
  Description of Artificial Sequence: Synthetic oligonucleotide
ccucacuagccaguggcca

SEQ ID NO: 1314919 - RNA, 19 nt, Artificial Sequence
  Description of Artificial Sequence: Synthetic oligonucleotide
ccaaagggcuuguucgaua

SEQ ID NO: 1314920 - RNA, 19 nt, Artificial Sequence
  Description of Artificial Sequence: Synthetic oligonucleotide
ccucugggugcgaggcaag

SEQ ID NO: 1314921 - RNA, 19 nt, Artificial Sequence
  Description of Artificial Sequence: Synthetic oligonucleotide
cagcucgcaggaggcccgc

SEQ ID NO: 1314922 - RNA, 19 nt, Artificial Sequence
  Description of Artificial Sequence: Synthetic oligonucleotide
cagcaacggccagagccga

SEQ ID NO: 1314923 - RNA, 19 nt, Artificial Sequence
  Description of Artificial Sequence: Synthetic oligonucleotide
cccggcuagcagguuacac

SEQ ID NO: 1314924 - RNA, 19 nt, Artificial Sequence
  Description of Artificial Sequence: Synthetic oligonucleotide
guacagcacuggaacuccu

SEQ ID NO: 1314925 - RNA, 19 nt, Artificial Sequence
  Description of Artificial Sequence: Synthetic oligonucleotide
cucuuaagcugugggucau

SEQ ID NO: 1314926 - RNA, 19 nt, Artificial Sequence
  Description of Artificial Sequence: Synthetic oligonucleotide
gucccaaccugggcuccuc

SEQ ID NO: 1314927 - RNA, 19 nt, Artificial Sequence
  Description of Artificial Sequence: Synthetic oligonucleotide
ggacugggcguauccgagu

SEQ ID NO: 1314928 - RNA, 19 nt, Artificial Sequence
  Description of Artificial Sequence: Synthetic oligonucleotide
cccugucaccuucaacaga

SEQ ID NO: 1314929 - RNA, 19 nt, Artificial Sequence
  Description of Artificial Sequence: Synthetic oligonucleotide
ggacacacaacaggagauu

SEQ ID NO: 1314930 - RNA, 19 nt, Artificial Sequence
  Description of Artificial Sequence: Synthetic oligonucleotide
cgcaacugccggucaggac

SEQ ID NO: 1314931 - RNA, 19 nt, Artificial Sequence
  Description of Artificial Sequence: Synthetic oligonucleotide
gccacaugauaggucucaa

SEQ ID NO: 1314932 - RNA, 19 nt, Artificial Sequence
  Description of Artificial Sequence: Synthetic oligonucleotide
ggagucaagccagccuagu

SEQ ID NO: 1314933 - RNA, 19 nt, Artificial Sequence
  Description of Artificial Sequence: Synthetic oligonucleotide
gcgacgcaacugccgguca

SEQ ID NO: 1314934 - RNA, 19 nt, Artificial Sequence
  Description of Artificial Sequence: Synthetic oligonucleotide
aguucccggcuagcagguu

SEQ ID NO: 1314935 - RNA, 19 nt, Artificial Sequence
  Description of Artificial Sequence: Synthetic oligonucleotide
ugggcuccucuggcuugaa

SEQ ID NO: 1314936 - RNA, 19 nt, Artificial Sequence
  Description of Artificial Sequence: Synthetic oligonucleotide
ccugaccugcauggaagga

SEQ ID NO: 1314937 - RNA, 19 nt, Artificial Sequence
  Description of Artificial Sequence: Synthetic oligonucleotide
cccgcagauggccccuguc

SEQ ID NO: 1314938 - RNA, 19 nt, Artificial Sequence
  Description of Artificial Sequence: Synthetic oligonucleotide
gcucucuacuagggauuuc

SEQ ID NO: 1314939 - RNA, 19 nt, Artificial Sequence
  Description of Artificial Sequence: Synthetic oligonucleotide
ccucauucuccagucccaa

SEQ ID NO: 1314940 - RNA, 19 nt, Artificial Sequence
  Description of Artificial Sequence: Synthetic oligonucleotide
cgacagcgucagcaacagg

SEQ ID NO: 1314941 - RNA, 19 nt, Artificial Sequence
  Description of Artificial Sequence: Synthetic oligonucleotide
gcaaguccaaagggcuugu

SEQ ID NO: 1314942 - RNA, 19 nt, Artificial Sequence
  Description of Artificial Sequence: Synthetic oligonucleotide
cgauacagacuagcacaga

SEQ ID NO: 1314943 - RNA, 19 nt, Artificial Sequence
  Description of Artificial Sequence: Synthetic oligonucleotide
ggcuagcagguuacacagu

SEQ ID NO: 1314944 - RNA, 19 nt, Artificial Sequence
  Description of Artificial Sequence: Synthetic oligonucleotide
gccuacggucagacacaac

SEQ ID NO: 1314945 - RNA, 19 nt, Artificial Sequence
  Description of Artificial Sequence: Synthetic oligonucleotide
gcacggcaaugccuggcau

SEQ ID NO: 1314946 - RNA, 19 nt, Artificial Sequence
  Description of Artificial Sequence: Synthetic oligonucleotide
cagggauagcaggcuuuau

SEQ ID NO: 1314947 - RNA, 19 nt, Artificial Sequence
  Description of Artificial Sequence: Synthetic oligonucleotide
ccacugagccugcucuacu

SEQ ID NO: 1314948 - RNA, 19 nt, Artificial Sequence
  Description of Artificial Sequence: Synthetic oligonucleotide
ccacugcgagugggaauuc

SEQ ID NO: 1314949 - RNA, 19 nt, Artificial Sequence
  Description of Artificial Sequence: Synthetic oligonucleotide
gcugcccacucuagccgaa

SEQ ID NO: 1314950 - RNA, 19 nt, Artificial Sequence
  Description of Artificial Sequence: Synthetic oligonucleotide
ggcccgcagauggccccug

SEQ ID NO: 1314951 - RNA, 19 nt, Artificial Sequence
  Description of Artificial Sequence: Synthetic oligonucleotide
ccgcaaguccaaagggcuu

SEQ ID NO: 1314952 - RNA, 19 nt, Artificial Sequence
  Description of Artificial Sequence: Synthetic oligonucleotide
ccgagucaguaguccuacu

SEQ ID NO: 1314953 - RNA, 19 nt, Artificial Sequence
  Description of Artificial Sequence: Synthetic oligonucleotide
gcuugaggacugggcguau

SEQ ID NO: 1314954 - RNA, 19 nt, Artificial Sequence
  Description of Artificial Sequence: Synthetic oligonucleotide
gcccgcagauggccccugu

SEQ ID NO: 1314955 - RNA, 19 nt, Artificial Sequence
  Description of Artificial Sequence: Synthetic oligonucleotide
ccucugcggaagucucuuu

SEQ ID NO: 1314956 - RNA, 19 nt, Artificial Sequence
  Description of Artificial Sequence: Synthetic oligonucleotide
cgaugcugcggggucacuu

SEQ ID NO: 1314957 - RNA, 19 nt, Artificial Sequence
  Description of Artificial Sequence: Synthetic oligonucleotide
ccguggguccuuggccucu

SEQ ID NO: 1314958 - RNA, 19 nt, Artificial Sequence
  Description of Artificial Sequence: Synthetic oligonucleotide
ccgaugcugcggggucacu

SEQ ID NO: 1314959 - RNA, 19 nt, Artificial Sequence
  Description of Artificial Sequence: Synthetic oligonucleotide
aaaucguauagcuugaugg

SEQ ID NO: 1314960 - RNA, 19 nt, Artificial Sequence
  Description of Artificial Sequence: Synthetic oligonucleotide
aauguaguagaguacaucu

SEQ ID NO: 1314961 - RNA, 19 nt, Artificial Sequence
  Description of Artificial Sequence: Synthetic oligonucleotide
uguaguagaguacaucugg

SEQ ID NO: 1314962 - RNA, 19 nt, Artificial Sequence
  Description of Artificial Sequence: Synthetic oligonucleotide
uuugaagagguagaaaucg

SEQ ID NO: 1314963 - RNA, 19 nt, Artificial Sequence
  Description of Artificial Sequence: Synthetic oligonucleotide
aaucguagcaacugucgcc

SEQ ID NO: 1314964 - RNA, 19 nt, Artificial Sequence
  Description of Artificial Sequence: Synthetic oligonucleotide
guagaaaucguauagcuug

SEQ ID NO: 1314965 - RNA, 19 nt, Artificial Sequence
  Description of Artificial Sequence: Synthetic oligonucleotide
aaaaggugucauuucggcc

SEQ ID NO: 1314966 - RNA, 19 nt, Artificial Sequence
  Description of Artificial Sequence: Synthetic oligonucleotide
uuauaugauacacaagugu

SEQ ID NO: 1314967 - RNA, 19 nt, Artificial Sequence
  Description of Artificial Sequence: Synthetic oligonucleotide
aaucguauagcuugauggg

SEQ ID NO: 1314968 - RNA, 19 nt, Artificial Sequence
  Description of Artificial Sequence: Synthetic oligonucleotide
uucaacaggaaguacuugg

SEQ ID NO: 1314969 - RNA, 19 nt, Artificial Sequence
  Description of Artificial Sequence: Synthetic oligonucleotide
aaaggugucauuucggccu

SEQ ID NO: 1314970 - RNA, 19 nt, Artificial Sequence
  Description of Artificial Sequence: Synthetic oligonucleotide
uuuuccuugagaaagggaa

SEQ ID NO: 1314971 - RNA, 19 nt, Artificial Sequence
  Description of Artificial Sequence: Synthetic oligonucleotide
uaugucacuugucauaaag

SEQ ID NO: 1314972 - RNA, 19 nt, Artificial Sequence
  Description of Artificial Sequence: Synthetic oligonucleotide
ucaucuguaacuuucuggc

SEQ ID NO: 1314973 - RNA, 19 nt, Artificial Sequence
  Description of Artificial Sequence: Synthetic oligonucleotide
agcauucuuggucugagcc

SEQ ID NO: 1314974 - RNA, 19 nt, Artificial Sequence
  Description of Artificial Sequence: Synthetic oligonucleotide
uauccuuaggauuuugagg

SEQ ID NO: 1314975 - RNA, 19 nt, Artificial Sequence
  Description of Artificial Sequence: Synthetic oligonucleotide
aacagaaguagccugaaaa

SEQ ID NO: 1314976 - RNA, 19 nt, Artificial Sequence
  Description of Artificial Sequence: Synthetic oligonucleotide
uaugaagaugcaaagcccc

SEQ ID NO: 1314977 - RNA, 19 nt, Artificial Sequence
  Description of Artificial Sequence: Synthetic oligonucleotide
aauucaauucagccacagc

SEQ ID NO: 1314978 - RNA, 19 nt, Artificial Sequence
  Description of Artificial Sequence: Synthetic oligonucleotide
ugaucuacugucuucaaca

SEQ ID NO: 1314979 - RNA, 19 nt, Artificial Sequence
  Description of Artificial Sequence: Synthetic oligonucleotide
gauacucgugcuuuuaucc

SEQ ID NO: 1314980 - RNA, 19 nt, Artificial Sequence
  Description of Artificial Sequence: Synthetic oligonucleotide
uaagaugcuaagcuuaugu

SEQ ID NO: 1314981 - RNA, 19 nt, Artificial Sequence
  Description of Artificial Sequence: Synthetic oligonucleotide
uuuauaugauacacaagug

SEQ ID NO: 1314982 - RNA, 19 nt, Artificial Sequence
  Description of Artificial Sequence: Synthetic oligonucleotide
aaaacccagagagagcccc

SEQ ID NO: 1314983 - RNA, 19 nt, Artificial Sequence
  Description of Artificial Sequence: Synthetic oligonucleotide
aagagugguaucuuuauau

SEQ ID NO: 1314984 - RNA, 19 nt, Artificial Sequence
  Description of Artificial Sequence: Synthetic oligonucleotide
aguagaguacaucuggguc

SEQ ID NO: 1314985 - RNA, 19 nt, Artificial Sequence
  Description of Artificial Sequence: Synthetic oligonucleotide
acaaguguauguuacaaga

SEQ ID NO: 1314986 - RNA, 19 nt, Artificial Sequence
  Description of Artificial Sequence: Synthetic oligonucleotide
cuugagaaagggaagggcc

SEQ ID NO: 1314987 - RNA, 19 nt, Artificial Sequence
  Description of Artificial Sequence: Synthetic oligonucleotide
auaucuaugucacuuguca

SEQ ID NO: 1314988 - RNA, 19 nt, Artificial Sequence
  Description of Artificial Sequence: Synthetic oligonucleotide
uuaaacagaggccauaauu

SEQ ID NO: 1314989 - RNA, 19 nt, Artificial Sequence
  Description of Artificial Sequence: Synthetic oligonucleotide
uggacugaguaccaaauug

SEQ ID NO: 1314990 - RNA, 19 nt, Artificial Sequence
  Description of Artificial Sequence: Synthetic oligonucleotide
uuauccuuaggauuuugag

SEQ ID NO: 1314991 - RNA, 19 nt, Artificial Sequence
  Description of Artificial Sequence: Synthetic oligonucleotide
uuuuaacagaaguagccug

SEQ ID NO: 1314992 - RNA, 19 nt, Artificial Sequence
  Description of Artificial Sequence: Synthetic oligonucleotide
aaaauaugucaucuacucu

SEQ ID NO: 1314993 - RNA, 19 nt, Artificial Sequence
  Description of Artificial Sequence: Synthetic oligonucleotide
uuuaacagaaguagccuga

SEQ ID NO: 1314994 - RNA, 19 nt, Artificial Sequence
  Description of Artificial Sequence: Synthetic oligonucleotide
ugucgaagaaccuuggaga

SEQ ID NO: 1314995 - RNA, 19 nt, Artificial Sequence
  Description of Artificial Sequence: Synthetic oligonucleotide
uguuacaagaguuccguca

SEQ ID NO: 1314996 - RNA, 19 nt, Artificial Sequence
  Description of Artificial Sequence: Synthetic oligonucleotide
uaccaaauugggcuguugg

SEQ ID NO: 1314997 - RNA, 19 nt, Artificial Sequence
  Description of Artificial Sequence: Synthetic oligonucleotide
ugucacuugucauaaagga

SEQ ID NO: 1314998 - RNA, 19 nt, Artificial Sequence
  Description of Artificial Sequence: Synthetic oligonucleotide
ugucauuaaacagaggcca

SEQ ID NO: 1314999 - RNA, 19 nt, Artificial Sequence
  Description of Artificial Sequence: Synthetic oligonucleotide
ucuucuuggaaucguagca

SEQ ID NO: 1315000 - RNA, 19 nt, Artificial Sequence
  Description of Artificial Sequence: Synthetic oligonucleotide
aacaguccaagccucuuuc

SEQ ID NO: 1315001 - RNA, 19 nt, Artificial Sequence
  Description of Artificial Sequence: Synthetic oligonucleotide
aaacgaacauaguaaagau

SEQ ID NO: 1315002 - RNA, 19 nt, Artificial Sequence
  Description of Artificial Sequence: Synthetic oligonucleotide
aucuuuauaugauacacaa

SEQ ID NO: 1315003 - RNA, 19 nt, Artificial Sequence
  Description of Artificial Sequence: Synthetic oligonucleotide
acgaacauaguaaagauca

SEQ ID NO: 1315004 - RNA, 19 nt, Artificial Sequence
  Description of Artificial Sequence: Synthetic oligonucleotide
aaagaucagaaaauauguc

SEQ ID NO: 1315005 - RNA, 19 nt, Artificial Sequence
  Description of Artificial Sequence: Synthetic oligonucleotide
aagcuuaugucugagcauc

SEQ ID NO: 1315006 - RNA, 19 nt, Artificial Sequence
  Description of Artificial Sequence: Synthetic oligonucleotide
acaaguaaccuggagcugc

SEQ ID NO: 1315007 - RNA, 19 nt, Artificial Sequence
  Description of Artificial Sequence: Synthetic oligonucleotide
auuucggccuuucacacuc

SEQ ID NO: 1315008 - RNA, 19 nt, Artificial Sequence
  Description of Artificial Sequence: Synthetic oligonucleotide
uucauguaaccacucagug

SEQ ID NO: 1315009 - RNA, 19 nt, Artificial Sequence
  Description of Artificial Sequence: Synthetic oligonucleotide
acagaaguagccugaaaag

SEQ ID NO: 1315010 - RNA, 19 nt, Artificial Sequence
  Description of Artificial Sequence: Synthetic oligonucleotide
gaaacgaacauaguaaaga

SEQ ID NO: 1315011 - RNA, 19 nt, Artificial Sequence
  Description of Artificial Sequence: Synthetic oligonucleotide
ugaaacgaacauaguaaag

SEQ ID NO: 1315012 - RNA, 19 nt, Artificial Sequence
  Description of Artificial Sequence: Synthetic oligonucleotide
ugucccaacaguccaagcc

SEQ ID NO: 1315013 - RNA, 19 nt, Artificial Sequence
  Description of Artificial Sequence: Synthetic oligonucleotide
gacauagccaaguggagug

SEQ ID NO: 1315014 - RNA, 19 nt, Artificial Sequence
  Description of Artificial Sequence: Synthetic oligonucleotide
gucaucuguaacuuucugg

SEQ ID NO: 1315015 - RNA, 19 nt, Artificial Sequence
  Description of Artificial Sequence: Synthetic oligonucleotide
agauagcggauacucgugc

SEQ ID NO: 1315016 - RNA, 19 nt, Artificial Sequence
  Description of Artificial Sequence: Synthetic oligonucleotide
uaugauacacaaguguaug

SEQ ID NO: 1315017 - RNA, 19 nt, Artificial Sequence
  Description of Artificial Sequence: Synthetic oligonucleotide
accucaauggauucucugg

SEQ ID NO: 1315018 - RNA, 19 nt, Artificial Sequence
  Description of Artificial Sequence: Synthetic oligonucleotide
aguccaagccucuuucccc

SEQ ID NO: 1315019 - RNA, 19 nt, Artificial Sequence
  Description of Artificial Sequence: Synthetic oligonucleotide
uucagauagcggauacucg

SEQ ID NO: 1315020 - RNA, 19 nt, Artificial Sequence
  Description of Artificial Sequence: Synthetic oligonucleotide
uaauaucuaugucacuugu

SEQ ID NO: 1315021 - RNA, 19 nt, Artificial Sequence
  Description of Artificial Sequence: Synthetic oligonucleotide
ucagauagcggauacucgu

SEQ ID NO: 1315022 - RNA, 19 nt, Artificial Sequence
  Description of Artificial Sequence: Synthetic oligonucleotide
aaucauaauugaaguuccc

SEQ ID NO: 1315023 - RNA, 19 nt, Artificial Sequence
  Description of Artificial Sequence: Synthetic oligonucleotide
aguuccgucaggcacaacu

SEQ ID NO: 1315024 - RNA, 19 nt, Artificial Sequence
  Description of Artificial Sequence: Synthetic oligonucleotide
acuuccuagaacaucuggc

SEQ ID NO: 1315025 - RNA, 19 nt, Artificial Sequence
  Description of Artificial Sequence: Synthetic oligonucleotide
uuuaguguaaaagucuguc

SEQ ID NO: 1315026 - RNA, 19 nt, Artificial Sequence
  Description of Artificial Sequence: Synthetic oligonucleotide
uuggaagcaaaaguucugg

SEQ ID NO: 1315027 - RNA, 19 nt, Artificial Sequence
  Description of Artificial Sequence: Synthetic oligonucleotide
uucagaacuucauguaacc

SEQ ID NO: 1315028 - RNA, 19 nt, Artificial Sequence
  Description of Artificial Sequence: Synthetic oligonucleotide
aguucagcauucuuggucu

SEQ ID NO: 1315029 - RNA, 19 nt, Artificial Sequence
  Description of Artificial Sequence: Synthetic oligonucleotide
uuuauccuuaggauuuuga

SEQ ID NO: 1315030 - RNA, 19 nt, Artificial Sequence
  Description of Artificial Sequence: Synthetic oligonucleotide
aacgaacauaguaaagauc

SEQ ID NO: 1315031 - RNA, 19 nt, Artificial Sequence
  Description of Artificial Sequence: Synthetic oligonucleotide
ugucauuucggccuuucac

SEQ ID NO: 1315032 - RNA, 19 nt, Artificial Sequence
  Description of Artificial Sequence: Synthetic oligonucleotide
aauaucuaugucacuuguc

SEQ ID NO: 1315033 - RNA, 19 nt, Artificial Sequence
  Description of Artificial Sequence: Synthetic oligonucleotide
cauguaaccacucagugaa

SEQ ID NO: 1315034 - RNA, 19 nt, Artificial Sequence
  Description of Artificial Sequence: Synthetic oligonucleotide
agaaaauguaguagaguac

SEQ ID NO: 1315035 - RNA, 19 nt, Artificial Sequence
  Description of Artificial Sequence: Synthetic oligonucleotide
agguagaaaucguauagcu

SEQ ID NO: 1315036 - RNA, 19 nt, Artificial Sequence
  Description of Artificial Sequence: Synthetic oligonucleotide
auaauugaaguuccccuca

SEQ ID NO: 1315037 - RNA, 19 nt, Artificial Sequence
  Description of Artificial Sequence: Synthetic oligonucleotide
ucccgugucauuaaacaga

SEQ ID NO: 1315038 - RNA, 19 nt, Artificial Sequence
  Description of Artificial Sequence: Synthetic oligonucleotide
cuaagcuuaugucugagca

SEQ ID NO: 1315039 - RNA, 19 nt, Artificial Sequence
  Description of Artificial Sequence: Synthetic oligonucleotide
gaaaucguauagcuugaug

SEQ ID NO: 1315040 - RNA, 19 nt, Artificial Sequence
  Description of Artificial Sequence: Synthetic oligonucleotide
gaacaaguaaccuggagcu

SEQ ID NO: 1315041 - RNA, 19 nt, Artificial Sequence
  Description of Artificial Sequence: Synthetic oligonucleotide
ucauguaaccacucaguga

SEQ ID NO: 1315042 - RNA, 19 nt, Artificial Sequence
  Description of Artificial Sequence: Synthetic oligonucleotide
caaaaguucuggugaaggc

SEQ ID NO: 1315043 - RNA, 19 nt, Artificial Sequence
  Description of Artificial Sequence: Synthetic oligonucleotide
uccuagaacaucuggcucu

SEQ ID NO: 1315044 - RNA, 19 nt, Artificial Sequence
  Description of Artificial Sequence: Synthetic oligonucleotide
agugaaacgaacauaguaa

SEQ ID NO: 1315045 - RNA, 19 nt, Artificial Sequence
  Description of Artificial Sequence: Synthetic oligonucleotide
agaaauugucuuuaauaaa

SEQ ID NO: 1315046 - RNA, 19 nt, Artificial Sequence
  Description of Artificial Sequence: Synthetic oligonucleotide
guaaccacucagugaaacg

SEQ ID NO: 1315047 - RNA, 19 nt, Artificial Sequence
  Description of Artificial Sequence: Synthetic oligonucleotide
gaaucguagcaacugucgc

SEQ ID NO: 1315048 - RNA, 19 nt, Artificial Sequence
  Description of Artificial Sequence: Synthetic oligonucleotide
auaaaaggugucauuucgg

SEQ ID NO: 1315049 - RNA, 19 nt, Artificial Sequence
  Description of Artificial Sequence: Synthetic oligonucleotide
cuugcauucccacagcauc

SEQ ID NO: 1315050 - RNA, 19 nt, Artificial Sequence
  Description of Artificial Sequence: Synthetic oligonucleotide
uaaccacucagugaaacga

SEQ ID NO: 1315051 - RNA, 19 nt, Artificial Sequence
  Description of Artificial Sequence: Synthetic oligonucleotide
aagaugcaaagccccaaca

SEQ ID NO: 1315052 - RNA, 19 nt, Artificial Sequence
  Description of Artificial Sequence: Synthetic oligonucleotide
uugaugggacaccucaaug

SEQ ID NO: 1315053 - RNA, 19 nt, Artificial Sequence
  Description of Artificial Sequence: Synthetic oligonucleotide
ucguauagcuugaugggac

SEQ ID NO: 1315054 - RNA, 19 nt, Artificial Sequence
  Description of Artificial Sequence: Synthetic oligonucleotide
auuugaagagguagaaauc

SEQ ID NO: 1315055 - RNA, 19 nt, Artificial Sequence
  Description of Artificial Sequence: Synthetic oligonucleotide
ucaacaggaaguacuuggu

SEQ ID NO: 1315056 - RNA, 19 nt, Artificial Sequence
  Description of Artificial Sequence: Synthetic oligonucleotide
guagaguacaucuggguca

SEQ ID NO: 1315057 - RNA, 19 nt, Artificial Sequence
  Description of Artificial Sequence: Synthetic oligonucleotide
auacuucaagcccuucuuc

SEQ ID NO: 1315058 - RNA, 19 nt, Artificial Sequence
  Description of Artificial Sequence: Synthetic oligonucleotide
gccauaauucaauucagcc

SEQ ID NO: 1315059 - RNA, 19 nt, Artificial Sequence
  Description of Artificial Sequence: Synthetic oligonucleotide
aagagguagaaaucguaua

SEQ ID NO: 1315060 - RNA, 19 nt, Artificial Sequence
  Description of Artificial Sequence: Synthetic oligonucleotide
uaugucugagcaucaucag

SEQ ID NO: 1315061 - RNA, 19 nt, Artificial Sequence
  Description of Artificial Sequence: Synthetic oligonucleotide
ugauaggcuggacugagua

SEQ ID NO: 1315062 - RNA, 19 nt, Artificial Sequence
  Description of Artificial Sequence: Synthetic oligonucleotide
ucuaugucacuugucauaa

SEQ ID NO: 1315063 - RNA, 19 nt, Artificial Sequence
  Description of Artificial Sequence: Synthetic oligonucleotide
acugucgccucccaauggg

SEQ ID NO: 1315064 - RNA, 19 nt, Artificial Sequence
  Description of Artificial Sequence: Synthetic oligonucleotide
gaguacaucugggucauag

SEQ ID NO: 1315065 - RNA, 19 nt, Artificial Sequence
  Description of Artificial Sequence: Synthetic oligonucleotide
gagugguaucuuuauauga

SEQ ID NO: 1315066 - RNA, 19 nt, Artificial Sequence
  Description of Artificial Sequence: Synthetic oligonucleotide
aacugucgccucccaaugg

SEQ ID NO: 1315067 - RNA, 19 nt, Artificial Sequence
  Description of Artificial Sequence: Synthetic oligonucleotide
auuucgagcuucccguguc

SEQ ID NO: 1315068 - RNA, 19 nt, Artificial Sequence
  Description of Artificial Sequence: Synthetic oligonucleotide
uucccgugucauuaaacag

SEQ ID NO: 1315069 - RNA, 19 nt, Artificial Sequence
  Description of Artificial Sequence: Synthetic oligonucleotide
caauggauucucuggauuc

SEQ ID NO: 1315070 - RNA, 19 nt, Artificial Sequence
  Description of Artificial Sequence: Synthetic oligonucleotide
gaagggcccauacuugucc

SEQ ID NO: 1315071 - RNA, 19 nt, Artificial Sequence
  Description of Artificial Sequence: Synthetic oligonucleotide
uagaaaucguauagcuuga

SEQ ID NO: 1315072 - RNA, 19 nt, Artificial Sequence
  Description of Artificial Sequence: Synthetic oligonucleotide
ucagcauuugucccaucug

SEQ ID NO: 1315073 - RNA, 19 nt, Artificial Sequence
  Description of Artificial Sequence: Synthetic oligonucleotide
cagaaguagccugaaaagc

SEQ ID NO: 1315074 - RNA, 19 nt, Artificial Sequence
  Description of Artificial Sequence: Synthetic oligonucleotide
caggacauagccaagugga

SEQ ID NO: 1315075 - RNA, 19 nt, Artificial Sequence
  Description of Artificial Sequence: Synthetic oligonucleotide
ucauuucggccuuucacac

SEQ ID NO: 1315076 - RNA, 19 nt, Artificial Sequence
  Description of Artificial Sequence: Synthetic oligonucleotide
uguaaccacucagugaaac

SEQ ID NO: 1315077 - RNA, 19 nt, Artificial Sequence
  Description of Artificial Sequence: Synthetic oligonucleotide
auuugucccaucugcucuc

SEQ ID NO: 1315078 - RNA, 19 nt, Artificial Sequence
  Description of Artificial Sequence: Synthetic oligonucleotide
gaacauaguaaagaucaga

SEQ ID NO: 1315079 - RNA, 19 nt, Artificial Sequence
  Description of Artificial Sequence: Synthetic oligonucleotide
cuuggaaucguagcaacug

SEQ ID NO: 1315080 - RNA, 19 nt, Artificial Sequence
  Description of Artificial Sequence: Synthetic oligonucleotide
uuggaaucguagcaacugu

SEQ ID NO: 1315081 - RNA, 19 nt, Artificial Sequence
  Description of Artificial Sequence: Synthetic oligonucleotide
augauacacaaguguaugu

SEQ ID NO: 1315082 - RNA, 19 nt, Artificial Sequence
  Description of Artificial Sequence: Synthetic oligonucleotide
gaugggacaccucaaugga

SEQ ID NO: 1315083 - RNA, 19 nt, Artificial Sequence
  Description of Artificial Sequence: Synthetic oligonucleotide
cauuaagaugcuaagcuua

SEQ ID NO: 1315084 - RNA, 19 nt, Artificial Sequence
  Description of Artificial Sequence: Synthetic oligonucleotide
gucauuucggccuuucaca

SEQ ID NO: 1315085 - RNA, 19 nt, Artificial Sequence
  Description of Artificial Sequence: Synthetic oligonucleotide
cacaaguguauguuacaag

SEQ ID NO: 1315086 - RNA, 19 nt, Artificial Sequence
  Description of Artificial Sequence: Synthetic oligonucleotide
cuucagauagcggauacuc

SEQ ID NO: 1315087 - RNA, 19 nt, Artificial Sequence
  Description of Artificial Sequence: Synthetic oligonucleotide
guaguagaguacaucuggg

SEQ ID NO: 1315088 - RNA, 19 nt, Artificial Sequence
  Description of Artificial Sequence: Synthetic oligonucleotide
cuccauuucgagcuucccg

SEQ ID NO: 1315089 - RNA, 19 nt, Artificial Sequence
  Description of Artificial Sequence: Synthetic oligonucleotide
uucccguauaaccaagauc

SEQ ID NO: 1315090 - RNA, 19 nt, Artificial Sequence
  Description of Artificial Sequence: Synthetic oligonucleotide
guauguuacaagaguuccg

SEQ ID NO: 1315091 - RNA, 19 nt, Artificial Sequence
  Description of Artificial Sequence: Synthetic oligonucleotide
gagguagaaaucguauagc

SEQ ID NO: 1315092 - RNA, 19 nt, Artificial Sequence
  Description of Artificial Sequence: Synthetic oligonucleotide
ucuuggaaucguagcaacu

SEQ ID NO: 1315093 - RNA, 19 nt, Artificial Sequence
  Description of Artificial Sequence: Synthetic oligonucleotide
aauuucccguauaaccaag

SEQ ID NO: 1315094 - RNA, 19 nt, Artificial Sequence
  Description of Artificial Sequence: Synthetic oligonucleotide
gaagaugcaaagccccaac

SEQ ID NO: 1315095 - RNA, 19 nt, Artificial Sequence
  Description of Artificial Sequence: Synthetic oligonucleotide
caaccugaacaguuugugc

SEQ ID NO: 1315096 - RNA, 19 nt, Artificial Sequence
  Description of Artificial Sequence: Synthetic oligonucleotide
agaucagaaaauaugucau

SEQ ID NO: 1315097 - RNA, 19 nt, Artificial Sequence
  Description of Artificial Sequence: Synthetic oligonucleotide
uuucuuucauuaagaugcu

SEQ ID NO: 1315098 - RNA, 19 nt, Artificial Sequence
  Description of Artificial Sequence: Synthetic oligonucleotide
aagcaaaaguucuggugaa

SEQ ID NO: 1315099 - RNA, 19 nt, Artificial Sequence
  Description of Artificial Sequence: Synthetic oligonucleotide
uggccagucugauggaucc

SEQ ID NO: 1315100 - RNA, 19 nt, Artificial Sequence
  Description of Artificial Sequence: Synthetic oligonucleotide
uaaaagucugucugguuuu

SEQ ID NO: 1315101 - RNA, 19 nt, Artificial Sequence
  Description of Artificial Sequence: Synthetic oligonucleotide
cauuuuccuugagaaaggg

SEQ ID NO: 1315102 - RNA, 19 nt, Artificial Sequence
  Description of Artificial Sequence: Synthetic oligonucleotide
cguauaaccaagauccggg

SEQ ID NO: 1315103 - RNA, 19 nt, Artificial Sequence
  Description of Artificial Sequence: Synthetic oligonucleotide
uauagcuugaugggacacc

SEQ ID NO: 1315104 - RNA, 19 nt, Artificial Sequence
  Description of Artificial Sequence: Synthetic oligonucleotide
aucuaugucacuugucaua

SEQ ID NO: 1315105 - RNA, 19 nt, Artificial Sequence
  Description of Artificial Sequence: Synthetic oligonucleotide
ucagaacuucauguaacca

SEQ ID NO: 1315106 - RNA, 19 nt, Artificial Sequence
  Description of Artificial Sequence: Synthetic oligonucleotide
gugcugaacaaguaaccug

SEQ ID NO: 1315107 - RNA, 19 nt, Artificial Sequence
  Description of Artificial Sequence: Synthetic oligonucleotide
cacuuccuagaacaucugg

SEQ ID NO: 1315108 - RNA, 19 nt, Artificial Sequence
  Description of Artificial Sequence: Synthetic oligonucleotide
gugucauuaaacagaggcc

SEQ ID NO: 1315109 - RNA, 19 nt, Artificial Sequence
  Description of Artificial Sequence: Synthetic oligonucleotide
ggacugaguaccaaauugg

SEQ ID NO: 1315110 - RNA, 19 nt, Artificial Sequence
  Description of Artificial Sequence: Synthetic oligonucleotide
ucuuugucugucgaagaac

SEQ ID NO: 1315111 - RNA, 19 nt, Artificial Sequence
  Description of Artificial Sequence: Synthetic oligonucleotide
gugaaacgaacauaguaaa

SEQ ID NO: 1315112 - RNA, 19 nt, Artificial Sequence
  Description of Artificial Sequence: Synthetic oligonucleotide
agaaccuuggagaaagcca

SEQ ID NO: 1315113 - RNA, 19 nt, Artificial Sequence
  Description of Artificial Sequence: Synthetic oligonucleotide
auacucgugcuuuuauccu

SEQ ID NO: 1315114 - RNA, 19 nt, Artificial Sequence
  Description of Artificial Sequence: Synthetic oligonucleotide
uggcucaacuucagcaacc

SEQ ID NO: 1315115 - RNA, 19 nt, Artificial Sequence
  Description of Artificial Sequence: Synthetic oligonucleotide
cuguacauccuucagaacu

SEQ ID NO: 1315116 - RNA, 19 nt, Artificial Sequence
  Description of Artificial Sequence: Synthetic oligonucleotide
uaagcuuaugucugagcau

SEQ ID NO: 1315117 - RNA, 19 nt, Artificial Sequence
  Description of Artificial Sequence: Synthetic oligonucleotide
uaucuaugucacuugucau

SEQ ID NO: 1315118 - RNA, 19 nt, Artificial Sequence
  Description of Artificial Sequence: Synthetic oligonucleotide
ucgugcuuuuauccuuagg

SEQ ID NO: 1315119 - RNA, 19 nt, Artificial Sequence
  Description of Artificial Sequence: Synthetic oligonucleotide
caucuguaacuuucuggcc

SEQ ID NO: 1315120 - RNA, 19 nt, Artificial Sequence
  Description of Artificial Sequence: Synthetic oligonucleotide
auguuacaagaguuccguc

SEQ ID NO: 1315121 - RNA, 19 nt, Artificial Sequence
  Description of Artificial Sequence: Synthetic oligonucleotide
agaacaucuggcucucaga

SEQ ID NO: 1315122 - RNA, 19 nt, Artificial Sequence
  Description of Artificial Sequence: Synthetic oligonucleotide
cugaacaaguaaccuggag

SEQ ID NO: 1315123 - RNA, 19 nt, Artificial Sequence
  Description of Artificial Sequence: Synthetic oligonucleotide
uuucccguauaaccaagau

SEQ ID NO: 1315124 - RNA, 19 nt, Artificial Sequence
  Description of Artificial Sequence: Synthetic oligonucleotide
ggaaucguagcaacugucg

SEQ ID NO: 1315125 - RNA, 19 nt, Artificial Sequence
  Description of Artificial Sequence: Synthetic oligonucleotide
cuucccgugucauuaaaca

SEQ ID NO: 1315126 - RNA, 19 nt, Artificial Sequence
  Description of Artificial Sequence: Synthetic oligonucleotide
ugggacaccucaauggauu

SEQ ID NO: 1315127 - RNA, 19 nt, Artificial Sequence
  Description of Artificial Sequence: Synthetic oligonucleotide
aggucuaugaagaugcaaa

SEQ ID NO: 1315128 - RNA, 19 nt, Artificial Sequence
  Description of Artificial Sequence: Synthetic oligonucleotide
aauugaaguuccccucauu

SEQ ID NO: 1315129 - RNA, 19 nt, Artificial Sequence
  Description of Artificial Sequence: Synthetic oligonucleotide
ugugcugaucuacugucuu

SEQ ID NO: 1315130 - RNA, 19 nt, Artificial Sequence
  Description of Artificial Sequence: Synthetic oligonucleotide
auagcuugaugggacaccu

SEQ ID NO: 1315131 - RNA, 19 nt, Artificial Sequence
  Description of Artificial Sequence: Synthetic oligonucleotide
aacaaguaaccuggagcug

SEQ ID NO: 1315132 - RNA, 19 nt, Artificial Sequence
  Description of Artificial Sequence: Synthetic oligonucleotide
uagccugaaaagcaucaua

SEQ ID NO: 1315133 - RNA, 19 nt, Artificial Sequence
  Description of Artificial Sequence: Synthetic oligonucleotide
aucguagcaacugucgccu

SEQ ID NO: 1315134 - RNA, 19 nt, Artificial Sequence
  Description of Artificial Sequence: Synthetic oligonucleotide
guaaaagucugucugguuu

SEQ ID NO: 1315135 - RNA, 19 nt, Artificial Sequence
  Description of Artificial Sequence: Synthetic oligonucleotide
auggaggccucuucuuuag

SEQ ID NO: 1315136 - RNA, 19 nt, Artificial Sequence
  Description of Artificial Sequence: Synthetic oligonucleotide
auucguuugcuguggcuga

SEQ ID NO: 1315137 - RNA, 19 nt, Artificial Sequence
  Description of Artificial Sequence: Synthetic oligonucleotide
agccugaaaagcaucauaa

SEQ ID NO: 1315138 - RNA, 19 nt, Artificial Sequence
  Description of Artificial Sequence: Synthetic oligonucleotide
cugaucuacugucuucaac

SEQ ID NO: 1315139 - RNA, 19 nt, Artificial Sequence
  Description of Artificial Sequence: Synthetic oligonucleotide
aguagccugaaaagcauca

SEQ ID NO: 1315140 - RNA, 19 nt, Artificial Sequence
  Description of Artificial Sequence: Synthetic oligonucleotide
cagugaaacgaacauagua

SEQ ID NO: 1315141 - RNA, 19 nt, Artificial Sequence
  Description of Artificial Sequence: Synthetic oligonucleotide
uugugacuguggcucaacu

SEQ ID NO: 1315142 - RNA, 19 nt, Artificial Sequence
  Description of Artificial Sequence: Synthetic oligonucleotide
auuaaacagaggccauaau

SEQ ID NO: 1315143 - RNA, 19 nt, Artificial Sequence
  Description of Artificial Sequence: Synthetic oligonucleotide
ggggcauuugaagagguag

SEQ ID NO: 1315144 - RNA, 19 nt, Artificial Sequence
  Description of Artificial Sequence: Synthetic oligonucleotide
cugauggaucccgagggcc

SEQ ID NO: 1315145 - RNA, 19 nt, Artificial Sequence
  Description of Artificial Sequence: Synthetic oligonucleotide
aucguauagcuugauggga

SEQ ID NO: 1315146 - RNA, 19 nt, Artificial Sequence
  Description of Artificial Sequence: Synthetic oligonucleotide
auggugguugcgcuggcca

SEQ ID NO: 1315147 - RNA, 19 nt, Artificial Sequence
  Description of Artificial Sequence: Synthetic oligonucleotide
cagauagcggauacucgug

SEQ ID NO: 1315148 - RNA, 19 nt, Artificial Sequence
  Description of Artificial Sequence: Synthetic oligonucleotide
uccgucaggcacaacuuua

SEQ ID NO: 1315149 - RNA, 19 nt, Artificial Sequence
  Description of Artificial Sequence: Synthetic oligonucleotide
uggauucguuugcuguggc

SEQ ID NO: 1315150 - RNA, 19 nt, Artificial Sequence
  Description of Artificial Sequence: Synthetic oligonucleotide
uguaacuuucuggccaguc

SEQ ID NO: 1315151 - RNA, 19 nt, Artificial Sequence
  Description of Artificial Sequence: Synthetic oligonucleotide
cuggcucucagaaaaccca

SEQ ID NO: 1315152 - RNA, 19 nt, Artificial Sequence
  Description of Artificial Sequence: Synthetic oligonucleotide
gucgaagaaccuuggagaa

SEQ ID NO: 1315153 - RNA, 19 nt, Artificial Sequence
  Description of Artificial Sequence: Synthetic oligonucleotide
uagccaaguggagugacuc

SEQ ID NO: 1315154 - RNA, 19 nt, Artificial Sequence
  Description of Artificial Sequence: Synthetic oligonucleotide
ugaagaugcaaagccccaa

SEQ ID NO: 1315155 - RNA, 19 nt, Artificial Sequence
  Description of Artificial Sequence: Synthetic oligonucleotide
ucaggucuaugaagaugca

SEQ ID NO: 1315156 - RNA, 19 nt, Artificial Sequence
  Description of Artificial Sequence: Synthetic oligonucleotide
uaggcuggacugaguacca

SEQ ID NO: 1315157 - RNA, 19 nt, Artificial Sequence
  Description of Artificial Sequence: Synthetic oligonucleotide
aaggggagugugccccaag

SEQ ID NO: 1315158 - RNA, 19 nt, Artificial Sequence
  Description of Artificial Sequence: Synthetic oligonucleotide
ggcuguacauccuucagaa

SEQ ID NO: 1315159 - RNA, 19 nt, Artificial Sequence
  Description of Artificial Sequence: Synthetic oligonucleotide
uacucgugcuuuuauccuu

SEQ ID NO: 1315160 - RNA, 19 nt, Artificial Sequence
  Description of Artificial Sequence: Synthetic oligonucleotide
gaagagguagaaaucguau

SEQ ID NO: 1315161 - RNA, 19 nt, Artificial Sequence
  Description of Artificial Sequence: Synthetic oligonucleotide
guggcucaacuucagcaac

SEQ ID NO: 1315162 - RNA, 19 nt, Artificial Sequence
  Description of Artificial Sequence: Synthetic oligonucleotide
aggccauaauucaauucag

SEQ ID NO: 1315163 - RNA, 19 nt, Artificial Sequence
  Description of Artificial Sequence: Synthetic oligonucleotide
cccgugucauuaaacagag

SEQ ID NO: 1315164 - RNA, 19 nt, Artificial Sequence
  Description of Artificial Sequence: Synthetic oligonucleotide
cugucgccucccaaugggg

SEQ ID NO: 1315165 - RNA, 19 nt, Artificial Sequence
  Description of Artificial Sequence: Synthetic oligonucleotide
aaggugucauuucggccuu

SEQ ID NO: 1315166 - RNA, 19 nt, Artificial Sequence
  Description of Artificial Sequence: Synthetic oligonucleotide
gguggaauagaaauugucu

SEQ ID NO: 1315167 - RNA, 19 nt, Artificial Sequence
  Description of Artificial Sequence: Synthetic oligonucleotide
aaccaagauccgggucagc

SEQ ID NO: 1315168 - RNA, 19 nt, Artificial Sequence
  Description of Artificial Sequence: Synthetic oligonucleotide
gaucccgagggccuucaga

SEQ ID NO: 1315169 - RNA, 19 nt, Artificial Sequence
  Description of Artificial Sequence: Synthetic oligonucleotide
ggagugugccccaagcugc

SEQ ID NO: 1315170 - RNA, 19 nt, Artificial Sequence
  Description of Artificial Sequence: Synthetic oligonucleotide
cagugcauggugguugcgc

SEQ ID NO: 1315171 - RNA, 19 nt, Artificial Sequence
  Description of Artificial Sequence: Synthetic oligonucleotide
uaggguucaccuucuccau

SEQ ID NO: 1315172 - RNA, 19 nt, Artificial Sequence
  Description of Artificial Sequence: Synthetic oligonucleotide
gcuaagcuuaugucugagc

SEQ ID NO: 1315173 - RNA, 19 nt, Artificial Sequence
  Description of Artificial Sequence: Synthetic oligonucleotide
ucguuugcuguggcugagg

SEQ ID NO: 1315174 - RNA, 19 nt, Artificial Sequence
  Description of Artificial Sequence: Synthetic oligonucleotide
gauagcggauacucgugcu

SEQ ID NO: 1315175 - RNA, 19 nt, Artificial Sequence
  Description of Artificial Sequence: Synthetic oligonucleotide
uucguuugcuguggcugag

SEQ ID NO: 1315176 - RNA, 19 nt, Artificial Sequence
  Description of Artificial Sequence: Synthetic oligonucleotide
uuccgucaggcacaacuuu

SEQ ID NO: 1315177 - RNA, 19 nt, Artificial Sequence
  Description of Artificial Sequence: Synthetic oligonucleotide
cacggcaauggcuucuuga

SEQ ID NO: 1315178 - RNA, 19 nt, Artificial Sequence
  Description of Artificial Sequence: Synthetic oligonucleotide
cauuugucccaucugcucu

SEQ ID NO: 1315179 - RNA, 19 nt, Artificial Sequence
  Description of Artificial Sequence: Synthetic oligonucleotide
ggauacucgugcuuuuauc

SEQ ID NO: 1315180 - RNA, 19 nt, Artificial Sequence
  Description of Artificial Sequence: Synthetic oligonucleotide
agccaaguggagugacucu

SEQ ID NO: 1315181 - RNA, 19 nt, Artificial Sequence
  Description of Artificial Sequence: Synthetic oligonucleotide
gcaaccugaacaguuugug

SEQ ID NO: 1315182 - RNA, 19 nt, Artificial Sequence
  Description of Artificial Sequence: Synthetic oligonucleotide
acucagugaaacgaacaua

SEQ ID NO: 1315183 - RNA, 19 nt, Artificial Sequence
  Description of Artificial Sequence: Synthetic oligonucleotide
ugcugauaggcuggacuga

SEQ ID NO: 1315184 - RNA, 19 nt, Artificial Sequence
  Description of Artificial Sequence: Synthetic oligonucleotide
auuucccguauaaccaaga

SEQ ID NO: 1315185 - RNA, 19 nt, Artificial Sequence
  Description of Artificial Sequence: Synthetic oligonucleotide
cccgagggccuucagauag

SEQ ID NO: 1315186 - RNA, 19 nt, Artificial Sequence
  Description of Artificial Sequence: Synthetic oligonucleotide
cagaggagauuagaucuuc

SEQ ID NO: 1315187 - RNA, 19 nt, Artificial Sequence
  Description of Artificial Sequence: Synthetic oligonucleotide
augaagaugcaaagcccca

SEQ ID NO: 1315188 - RNA, 19 nt, Artificial Sequence
  Description of Artificial Sequence: Synthetic oligonucleotide
auaauucaauucagccaca

SEQ ID NO: 1315189 - RNA, 19 nt, Artificial Sequence
  Description of Artificial Sequence: Synthetic oligonucleotide
ucgaagaaccuuggagaaa

SEQ ID NO: 1315190 - RNA, 19 nt, Artificial Sequence
  Description of Artificial Sequence: Synthetic oligonucleotide
guauaaccaagauccgggu

SEQ ID NO: 1315191 - RNA, 19 nt, Artificial Sequence
  Description of Artificial Sequence: Synthetic oligonucleotide
ccguauaaccaagauccgg

SEQ ID NO: 1315192 - RNA, 19 nt, Artificial Sequence
  Description of Artificial Sequence: Synthetic oligonucleotide
ggccauaauucaauucagc

SEQ ID NO: 1315193 - RNA, 19 nt, Artificial Sequence
  Description of Artificial Sequence: Synthetic oligonucleotide
agaggagauuagaucuucu

SEQ ID NO: 1315194 - RNA, 19 nt, Artificial Sequence
  Description of Artificial Sequence: Synthetic oligonucleotide
  modified_base (8)..(8): a, c, u, g, unknown or other
uguugggnguggugguguc

SEQ ID NO: 1315195 - RNA, 19 nt, Artificial Sequence
  Description of Artificial Sequence: Synthetic oligonucleotide
gcugauaggcuggacugag

SEQ ID NO: 1315196 - RNA, 19 nt, Artificial Sequence
  Description of Artificial Sequence: Synthetic oligonucleotide
agccccaacauugucuuuu

SEQ ID NO: 1315197 - RNA, 19 nt, Artificial Sequence
  Description of Artificial Sequence: Synthetic oligonucleotide
aaacccagagagagcccca

SEQ ID NO: 1315198 - RNA, 19 nt, Artificial Sequence
  Description of Artificial Sequence: Synthetic oligonucleotide
uagcggauacucgugcuuu

SEQ ID NO: 1315199 - RNA, 19 nt, Artificial Sequence
  Description of Artificial Sequence: Synthetic oligonucleotide
agaaaucguauagcuugau

SEQ ID NO: 1315200 - RNA, 19 nt, Artificial Sequence
  Description of Artificial Sequence: Synthetic oligonucleotide
ugccccaagcugcuugcau

SEQ ID NO: 1315201 - RNA, 19 nt, Artificial Sequence
  Description of Artificial Sequence: Synthetic oligonucleotide
cuucagucacguggcuggg

SEQ ID NO: 1315202 - RNA, 19 nt, Artificial Sequence
  Description of Artificial Sequence: Synthetic oligonucleotide
gugguugcgcuggccacgg

SEQ ID NO: 1315203 - RNA, 19 nt, Artificial Sequence
  Description of Artificial Sequence: Synthetic oligonucleotide
ggguggaauagaaauuguc

SEQ ID NO: 1315204 - RNA, 19 nt, Artificial Sequence
  Description of Artificial Sequence: Synthetic oligonucleotide
uuucggccuuucacacucu

SEQ ID NO: 1315205 - RNA, 19 nt, Artificial Sequence
  Description of Artificial Sequence: Synthetic oligonucleotide
gccaaguggagugacucug

SEQ ID NO: 1315206 - RNA, 19 nt, Artificial Sequence
  Description of Artificial Sequence: Synthetic oligonucleotide
guaccaaauugggcuguug

SEQ ID NO: 1315207 - RNA, 19 nt, Artificial Sequence
  Description of Artificial Sequence: Synthetic oligonucleotide
aggguggaauagaaauugu

SEQ ID NO: 1315208 - RNA, 19 nt, Artificial Sequence
  Description of Artificial Sequence: Synthetic oligonucleotide
ggggccaaucuguucugag

SEQ ID NO: 1315209 - RNA, 19 nt, Artificial Sequence
  Description of Artificial Sequence: Synthetic oligonucleotide
auagccaaguggagugacu

SEQ ID NO: 1315210 - RNA, 19 nt, Artificial Sequence
  Description of Artificial Sequence: Synthetic oligonucleotide
gucagauaaaaggugucau

SEQ ID NO: 1315211 - RNA, 19 nt, Artificial Sequence
  Description of Artificial Sequence: Synthetic oligonucleotide
aacccagagagagccccau

SEQ ID NO: 1315212 - RNA, 19 nt, Artificial Sequence
  Description of Artificial Sequence: Synthetic oligonucleotide
cauggugguugcgcuggcc

SEQ ID NO: 1315213 - RNA, 19 nt, Artificial Sequence
  Description of Artificial Sequence: Synthetic oligonucleotide
agcuucccgugucauuaaa

SEQ ID NO: 1315214 - RNA, 19 nt, Artificial Sequence
  Description of Artificial Sequence: Synthetic oligonucleotide
cccguauaaccaagauccg

SEQ ID NO: 1315215 - RNA, 19 nt, Artificial Sequence
  Description of Artificial Sequence: Synthetic oligonucleotide
gugucauuucggccuuuca

SEQ ID NO: 1315216 - RNA, 19 nt, Artificial Sequence
  Description of Artificial Sequence: Synthetic oligonucleotide
gggcuguacauccuucaga

SEQ ID NO: 1315217 - RNA, 19 nt, Artificial Sequence
  Description of Artificial Sequence: Synthetic oligonucleotide
gguugcgcuggccacggca

SEQ ID NO: 1315218 - RNA, 19 nt, Artificial Sequence
  Description of Artificial Sequence: Synthetic oligonucleotide
gccuucagauagcggauac

SEQ ID NO: 1315219 - RNA, 19 nt, Artificial Sequence
  Description of Artificial Sequence: Synthetic oligonucleotide
aggguucaccuucuccauu

SEQ ID NO: 1315220 - RNA, 19 nt, Artificial Sequence
  Description of Artificial Sequence: Synthetic oligonucleotide
gucauaaaggaggguggaa

SEQ ID NO: 1315221 - RNA, 19 nt, Artificial Sequence
  Description of Artificial Sequence: Synthetic oligonucleotide
cugucuguucugcauacau

SEQ ID NO: 1315222 - RNA, 19 nt, Artificial Sequence
  Description of Artificial Sequence: Synthetic oligonucleotide
agcggauacucgugcuuuu

SEQ ID NO: 1315223 - RNA, 19 nt, Artificial Sequence
  Description of Artificial Sequence: Synthetic oligonucleotide
ucgagcuucccgugucauu

SEQ ID NO: 1315224 - RNA, 19 nt, Artificial Sequence
  Description of Artificial Sequence: Synthetic oligonucleotide
gcaaagccccaacauuguc

SEQ ID NO: 1315225 - RNA, 19 nt, Artificial Sequence
  Description of Artificial Sequence: Synthetic oligonucleotide
ccgggucagcauuuguccc

SEQ ID NO: 1315226 - RNA, 19 nt, Artificial Sequence
  Description of Artificial Sequence: Synthetic oligonucleotide
acucgugcuuuuauccuua

SEQ ID NO: 1315227 - RNA, 19 nt, Artificial Sequence
  Description of Artificial Sequence: Synthetic oligonucleotide
aagccccaacauugucuuu

SEQ ID NO: 1315228 - RNA, 19 nt, Artificial Sequence
  Description of Artificial Sequence: Synthetic oligonucleotide
guaaccuggagcugcuguu

SEQ ID NO: 1315229 - RNA, 19 nt, Artificial Sequence
  Description of Artificial Sequence: Synthetic oligonucleotide
aguaccaaauugggcuguu

SEQ ID NO: 1315230 - RNA, 19 nt, Artificial Sequence
  Description of Artificial Sequence: Synthetic oligonucleotide
caagauccgggucagcauu

SEQ ID NO: 1315231 - RNA, 19 nt, Artificial Sequence
  Description of Artificial Sequence: Synthetic oligonucleotide
caggucuaugaagaugcaa

SEQ ID NO: 1315232 - RNA, 19 nt, Artificial Sequence
  Description of Artificial Sequence: Synthetic oligonucleotide
cguagcaacugucgccucc

SEQ ID NO: 1315233 - RNA, 19 nt, Artificial Sequence
  Description of Artificial Sequence: Synthetic oligonucleotide
uggaucccgagggccuuca

SEQ ID NO: 1315234 - RNA, 19 nt, Artificial Sequence
  Description of Artificial Sequence: Synthetic oligonucleotide
gauccgggucagcauuugu

SEQ ID NO: 1315235 - RNA, 19 nt, Artificial Sequence
  Description of Artificial Sequence: Synthetic oligonucleotide
uccaagccucuuuccccau

SEQ ID NO: 1315236 - RNA, 19 nt, Artificial Sequence
  Description of Artificial Sequence: Synthetic oligonucleotide
guugcgcuggccacggcaa

SEQ ID NO: 1315237 - RNA, 19 nt, Artificial Sequence
  Description of Artificial Sequence: Synthetic oligonucleotide
ucguagcaacugucgccuc

SEQ ID NO: 1315238 - RNA, 19 nt, Artificial Sequence
  Description of Artificial Sequence: Synthetic oligonucleotide
gcuucccgugucauuaaac

SEQ ID NO: 1315239 - RNA, 19 nt, Artificial Sequence
  Description of Artificial Sequence: Synthetic oligonucleotide
cuaugucacuugucauaaa

SEQ ID NO: 1315240 - RNA, 19 nt, Artificial Sequence
  Description of Artificial Sequence: Synthetic oligonucleotide
gaguaccaaauugggcugu

SEQ ID NO: 1315241 - RNA, 19 nt, Artificial Sequence
  Description of Artificial Sequence: Synthetic oligonucleotide
ccauuucgagcuucccgug

SEQ ID NO: 1315242 - RNA, 19 nt, Artificial Sequence
  Description of Artificial Sequence: Synthetic oligonucleotide
cauuucgagcuucccgugu

SEQ ID NO: 1315243 - RNA, 19 nt, Artificial Sequence
  Description of Artificial Sequence: Synthetic oligonucleotide
gcauuugaagagguagaaa

SEQ ID NO: 1315244 - RNA, 19 nt, Artificial Sequence
  Description of Artificial Sequence: Synthetic oligonucleotide
ggacauagccaaguggagu

SEQ ID NO: 1315245 - RNA, 19 nt, Artificial Sequence
  Description of Artificial Sequence: Synthetic oligonucleotide
uugcgcuggccacggcaau

SEQ ID NO: 1315246 - RNA, 19 nt, Artificial Sequence
  Description of Artificial Sequence: Synthetic oligonucleotide
gucauuaaacagaggccau

SEQ ID NO: 1315247 - RNA, 19 nt, Artificial Sequence
  Description of Artificial Sequence: Synthetic oligonucleotide
cauuucggccuuucacacu

SEQ ID NO: 1315248 - RNA, 19 nt, Artificial Sequence
  Description of Artificial Sequence: Synthetic oligonucleotide
ccgugucauuaaacagagg

SEQ ID NO: 1315249 - RNA, 19 nt, Artificial Sequence
  Description of Artificial Sequence: Synthetic oligonucleotide
acucugggcuguacauccu

SEQ ID NO: 1315250 - RNA, 19 nt, Artificial Sequence
  Description of Artificial Sequence: Synthetic oligonucleotide
cguauagcuugaugggaca

SEQ ID NO: 1315251 - RNA, 19 nt, Artificial Sequence
  Description of Artificial Sequence: Synthetic oligonucleotide
auguaaccacucagugaaa

SEQ ID NO: 1315252 - RNA, 19 nt, Artificial Sequence
  Description of Artificial Sequence: Synthetic oligonucleotide
acguggcugggcaggacau

SEQ ID NO: 1315253 - RNA, 19 nt, Artificial Sequence
  Description of Artificial Sequence: Synthetic oligonucleotide
cuggacugaguaccaaauu

SEQ ID NO: 1315254 - RNA, 19 nt, Artificial Sequence
  Description of Artificial Sequence: Synthetic oligonucleotide
cugauaggcuggacugagu

SEQ ID NO: 1315255 - RNA, 19 nt, Artificial Sequence
  Description of Artificial Sequence: Synthetic oligonucleotide
guuccgucaggcacaacuu

SEQ ID NO: 1315256 - RNA, 19 nt, Artificial Sequence
  Description of Artificial Sequence: Synthetic oligonucleotide
ccgagggccuucagauagc

SEQ ID NO: 1315257 - RNA, 19 nt, Artificial Sequence
  Description of Artificial Sequence: Synthetic oligonucleotide
gagugugccccaagcugcu

SEQ ID NO: 1315258 - RNA, 19 nt, Artificial Sequence
  Description of Artificial Sequence: Synthetic oligonucleotide
ggaucccgagggccuucag

SEQ ID NO: 1315259 - RNA, 19 nt, Artificial Sequence
  Description of Artificial Sequence: Synthetic oligonucleotide
caagcccuucuucuggcuu

SEQ ID NO: 1315260 - RNA, 19 nt, Artificial Sequence
  Description of Artificial Sequence: Synthetic oligonucleotide
ccgucaggcacaacuuuaa

SEQ ID NO: 1315261 - RNA, 19 nt, Artificial Sequence
  Description of Artificial Sequence: Synthetic oligonucleotide
gcauggugguugcgcuggc

SEQ ID NO: 1315262 - RNA, 19 nt, Artificial Sequence
  Description of Artificial Sequence: Synthetic oligonucleotide
gauggaucccgagggccuu

SEQ ID NO: 1315263 - RNA, 19 nt, Artificial Sequence
  Description of Artificial Sequence: Synthetic oligonucleotide
ccuuaggauuuugaggggu

SEQ ID NO: 1315264 - RNA, 19 nt, Artificial Sequence
  Description of Artificial Sequence: Synthetic oligonucleotide
caccggcucaggugucaga

SEQ ID NO: 1315265 - RNA, 19 nt, Artificial Sequence
  Description of Artificial Sequence: Synthetic oligonucleotide
ggacaccucaauggauucu

SEQ ID NO: 1315266 - RNA, 19 nt, Artificial Sequence
  Description of Artificial Sequence: Synthetic oligonucleotide
gccaaucuguucugagcau

SEQ ID NO: 1315267 - RNA, 19 nt, Artificial Sequence
  Description of Artificial Sequence: Synthetic oligonucleotide
ccaaggggucuguucaggu

SEQ ID NO: 1315268 - RNA, 19 nt, Artificial Sequence
  Description of Artificial Sequence: Synthetic oligonucleotide
ggccuucagauagcggaua

SEQ ID NO: 1315269 - RNA, 19 nt, Artificial Sequence
  Description of Artificial Sequence: Synthetic oligonucleotide
gcuuaugucugagcaucau

SEQ ID NO: 1315270 - RNA, 19 nt, Artificial Sequence
  Description of Artificial Sequence: Synthetic oligonucleotide
agaguacaucugggucaua

SEQ ID NO: 1315271 - RNA, 19 nt, Artificial Sequence
  Description of Artificial Sequence: Synthetic oligonucleotide
ccaccggcucaggugucag

SEQ ID NO: 1315272 - RNA, 19 nt, Artificial Sequence
  Description of Artificial Sequence: Synthetic oligonucleotide
aggugucauuucggccuuu

SEQ ID NO: 1315273 - RNA, 19 nt, Artificial Sequence
  Description of Artificial Sequence: Synthetic oligonucleotide
gcggauacucgugcuuuua

SEQ ID NO: 1315274 - RNA, 19 nt, Artificial Sequence
  Description of Artificial Sequence: Synthetic oligonucleotide
ccacggcaauggcuucuug

SEQ ID NO: 1315275 - RNA, 19 nt, Artificial Sequence
  Description of Artificial Sequence: Synthetic oligonucleotide
cugaggcaccucagugcau

SEQ ID NO: 1315276 - RNA, 19 nt, Artificial Sequence
  Description of Artificial Sequence: Synthetic oligonucleotide
gggucagcauuugucccau

SEQ ID NO: 1315277 - RNA, 19 nt, Artificial Sequence
  Description of Artificial Sequence: Synthetic oligonucleotide
ggagugacucugggcugua

SEQ ID NO: 1315278 - RNA, 19 nt, Artificial Sequence
  Description of Artificial Sequence: Synthetic oligonucleotide
cggauacucgugcuuuuau

SEQ ID NO: 1315279 - RNA, 19 nt, Artificial Sequence
  Description of Artificial Sequence: Synthetic oligonucleotide
uaucuuguuagauagaggg

SEQ ID NO: 1315280 - RNA, 19 nt, Artificial Sequence
  Description of Artificial Sequence: Synthetic oligonucleotide
uuuacgauugcucauuucg

SEQ ID NO: 1315281 - RNA, 19 nt, Artificial Sequence
  Description of Artificial Sequence: Synthetic oligonucleotide
aacauaucuuguuagauag

SEQ ID NO: 1315282 - RNA, 19 nt, Artificial Sequence
  Description of Artificial Sequence: Synthetic oligonucleotide
aauaaauuacuauguggac

SEQ ID NO: 1315283 - RNA, 19 nt, Artificial Sequence
  Description of Artificial Sequence: Synthetic oligonucleotide
aagauuauaaaggaguguc

SEQ ID NO: 1315284 - RNA, 19 nt, Artificial Sequence
  Description of Artificial Sequence: Synthetic oligonucleotide
uugaguauuauccaaaagu

SEQ ID NO: 1315285 - RNA, 19 nt, Artificial Sequence
  Description of Artificial Sequence: Synthetic oligonucleotide
uguuacucgauuuaaagca

SEQ ID NO: 1315286 - RNA, 19 nt, Artificial Sequence
  Description of Artificial Sequence: Synthetic oligonucleotide
aauacuugcuuuagaaucc

SEQ ID NO: 1315287 - RNA, 19 nt, Artificial Sequence
  Description of Artificial Sequence: Synthetic oligonucleotide
auccaagcuacacaaaugc

SEQ ID NO: 1315288 - RNA, 19 nt, Artificial Sequence
  Description of Artificial Sequence: Synthetic oligonucleotide
auauguaacgaccguaagc

SEQ ID NO: 1315289 - RNA, 19 nt, Artificial Sequence
  Description of Artificial Sequence: Synthetic oligonucleotide
ugaaacucauuauagacca

SEQ ID NO: 1315290 - RNA, 19 nt, Artificial Sequence
  Description of Artificial Sequence: Synthetic oligonucleotide
uccaguaugaagaucacug

SEQ ID NO: 1315291 - RNA, 19 nt, Artificial Sequence
  Description of Artificial Sequence: Synthetic oligonucleotide
aaaauuaaagggcucuucu

SEQ ID NO: 1315292 - RNA, 19 nt, Artificial Sequence
  Description of Artificial Sequence: Synthetic oligonucleotide
auuucgaccaacucaaauc

SEQ ID NO: 1315293 - RNA, 19 nt, Artificial Sequence
  Description of Artificial Sequence: Synthetic oligonucleotide
uguuucauugcuauuauaa

SEQ ID NO: 1315294 - RNA, 19 nt, Artificial Sequence
  Description of Artificial Sequence: Synthetic oligonucleotide
aacagcauauguaacgacc

SEQ ID NO: 1315295 - RNA, 19 nt, Artificial Sequence
  Description of Artificial Sequence: Synthetic oligonucleotide
uaauacuugcuuuagaauc

SEQ ID NO: 1315296 - RNA, 19 nt, Artificial Sequence
  Description of Artificial Sequence: Synthetic oligonucleotide
aaucuuucacguaaaauuc

SEQ ID NO: 1315297 - RNA, 19 nt, Artificial Sequence
  Description of Artificial Sequence: Synthetic oligonucleotide
ucauaaaugggugugauac

SEQ ID NO: 1315298 - RNA, 19 nt, Artificial Sequence
  Description of Artificial Sequence: Synthetic oligonucleotide
ugcagauugagaaauguca

SEQ ID NO: 1315299 - RNA, 19 nt, Artificial Sequence
  Description of Artificial Sequence: Synthetic oligonucleotide
ucugaaacucauuauagac

SEQ ID NO: 1315300 - RNA, 19 nt, Artificial Sequence
  Description of Artificial Sequence: Synthetic oligonucleotide
uuucgaccaacucaaaucc

SEQ ID NO: 1315301 - RNA, 19 nt, Artificial Sequence
  Description of Artificial Sequence: Synthetic oligonucleotide
agauuuccaagacugauag

SEQ ID NO: 1315302 - RNA, 19 nt, Artificial Sequence
  Description of Artificial Sequence: Synthetic oligonucleotide
ucauuaaauguaucugucg

SEQ ID NO: 1315303 - RNA, 19 nt, Artificial Sequence
  Description of Artificial Sequence: Synthetic oligonucleotide
gaaaugaaagguuuucagc

SEQ ID NO: 1315304 - RNA, 19 nt, Artificial Sequence
  Description of Artificial Sequence: Synthetic oligonucleotide
uuagauagagggcaguagc

SEQ ID NO: 1315305 - RNA, 19 nt, Artificial Sequence
  Description of Artificial Sequence: Synthetic oligonucleotide
uauauuguggaaaaucaaa

SEQ ID NO: 1315306 - RNA, 19 nt, Artificial Sequence
  Description of Artificial Sequence: Synthetic oligonucleotide
ugugaucuccguaagagca

SEQ ID NO: 1315307 - RNA, 19 nt, Artificial Sequence
  Description of Artificial Sequence: Synthetic oligonucleotide
uaaauuacuauguggacuc

SEQ ID NO: 1315308 - RNA, 19 nt, Artificial Sequence
  Description of Artificial Sequence: Synthetic oligonucleotide
uauguaacgaccguaagcu

SEQ ID NO: 1315309 - RNA, 19 nt, Artificial Sequence
  Description of Artificial Sequence: Synthetic oligonucleotide
aauaacugcuacugguguc

SEQ ID NO: 1315310 - RNA, 19 nt, Artificial Sequence
  Description of Artificial Sequence: Synthetic oligonucleotide
auguaagaccaauaacugc

SEQ ID NO: 1315311 - RNA, 19 nt, Artificial Sequence
  Description of Artificial Sequence: Synthetic oligonucleotide
ucgauuuaaagcaagcauc

SEQ ID NO: 1315312 - RNA, 19 nt, Artificial Sequence
  Description of Artificial Sequence: Synthetic oligonucleotide
auugauagcaguucuuuug

SEQ ID NO: 1315313 - RNA, 19 nt, Artificial Sequence
  Description of Artificial Sequence: Synthetic oligonucleotide
agacugaguauucucauuc

SEQ ID NO: 1315314 - RNA, 19 nt, Artificial Sequence
  Description of Artificial Sequence: Synthetic oligonucleotide
cuaugaggacacaagaugc

SEQ ID NO: 1315315 - RNA, 19 nt, Artificial Sequence
  Description of Artificial Sequence: Synthetic oligonucleotide
acuaugaggacacaagaug

SEQ ID NO: 1315316 - RNA, 19 nt, Artificial Sequence
  Description of Artificial Sequence: Synthetic oligonucleotide
acuguuacucgauuuaaag

SEQ ID NO: 1315317 - RNA, 19 nt, Artificial Sequence
  Description of Artificial Sequence: Synthetic oligonucleotide
uguaaaugcucaaaugccu

SEQ ID NO: 1315318 - RNA, 19 nt, Artificial Sequence
  Description of Artificial Sequence: Synthetic oligonucleotide
agaauuacuuucuccauug

SEQ ID NO: 1315319 - RNA, 19 nt, Artificial Sequence
  Description of Artificial Sequence: Synthetic oligonucleotide
uuuugaguagcucaauuaa

SEQ ID NO: 1315320 - RNA, 19 nt, Artificial Sequence
  Description of Artificial Sequence: Synthetic oligonucleotide
ugugaauugacugaaguuc

SEQ ID NO: 1315321 - RNA, 19 nt, Artificial Sequence
  Description of Artificial Sequence: Synthetic oligonucleotide
uucacagccaacuuaguga

SEQ ID NO: 1315322 - RNA, 19 nt, Artificial Sequence
  Description of Artificial Sequence: Synthetic oligonucleotide
acauguaagaccaauaacu

SEQ ID NO: 1315323 - RNA, 19 nt, Artificial Sequence
  Description of Artificial Sequence: Synthetic oligonucleotide
uauaaacaaaggaauguaa

SEQ ID NO: 1315324 - RNA, 19 nt, Artificial Sequence
  Description of Artificial Sequence: Synthetic oligonucleotide
aguaugaagaucacugggc

SEQ ID NO: 1315325 - RNA, 19 nt, Artificial Sequence
  Description of Artificial Sequence: Synthetic oligonucleotide
uccagaauauccaaucuac

SEQ ID NO: 1315326 - RNA, 19 nt, Artificial Sequence
  Description of Artificial Sequence: Synthetic oligonucleotide
ucuuguuagauagagggca

SEQ ID NO: 1315327 - RNA, 19 nt, Artificial Sequence
  Description of Artificial Sequence: Synthetic oligonucleotide
aacucaaauccucucgcag

SEQ ID NO: 1315328 - RNA, 19 nt, Artificial Sequence
  Description of Artificial Sequence: Synthetic oligonucleotide
uuaaauguaucugucggug

SEQ ID NO: 1315329 - RNA, 19 nt, Artificial Sequence
  Description of Artificial Sequence: Synthetic oligonucleotide
agcuuuuaguucuuuacag

SEQ ID NO: 1315330 - RNA, 19 nt, Artificial Sequence
  Description of Artificial Sequence: Synthetic oligonucleotide
ucugucggugagaaaaccg

SEQ ID NO: 1315331 - RNA, 19 nt, Artificial Sequence
  Description of Artificial Sequence: Synthetic oligonucleotide
ugaguauucucauuccacc

SEQ ID NO: 1315332 - RNA, 19 nt, Artificial Sequence
  Description of Artificial Sequence: Synthetic oligonucleotide
gauuauaaaggagugucug

SEQ ID NO: 1315333 - RNA, 19 nt, Artificial Sequence
  Description of Artificial Sequence: Synthetic oligonucleotide
aaugcuuguauuguacuug

SEQ ID NO: 1315334 - RNA, 19 nt, Artificial Sequence
  Description of Artificial Sequence: Synthetic oligonucleotide
aguauuauccaaaaguagu

SEQ ID NO: 1315335 - RNA, 19 nt, Artificial Sequence
  Description of Artificial Sequence: Synthetic oligonucleotide
cauugaaaaguuucuguag

SEQ ID NO: 1315336 - RNA, 19 nt, Artificial Sequence
  Description of Artificial Sequence: Synthetic oligonucleotide
uccaacuacauuuucuaga

SEQ ID NO: 1315337 - RNA, 19 nt, Artificial Sequence
  Description of Artificial Sequence: Synthetic oligonucleotide
acgauugcucauuucgacc

SEQ ID NO: 1315338 - RNA, 19 nt, Artificial Sequence
  Description of Artificial Sequence: Synthetic oligonucleotide
uucuguagggcauucauaa

SEQ ID NO: 1315339 - RNA, 19 nt, Artificial Sequence
  Description of Artificial Sequence: Synthetic oligonucleotide
uugguuuuacgauugcuca

SEQ ID NO: 1315340 - RNA, 19 nt, Artificial Sequence
  Description of Artificial Sequence: Synthetic oligonucleotide
cauguaagaccaauaacug

SEQ ID NO: 1315341 - RNA, 19 nt, Artificial Sequence
  Description of Artificial Sequence: Synthetic oligonucleotide
auguacuuaaaauguucac

SEQ ID NO: 1315342 - RNA, 19 nt, Artificial Sequence
  Description of Artificial Sequence: Synthetic oligonucleotide
uuauuaauuccaguuguug

SEQ ID NO: 1315343 - RNA, 19 nt, Artificial Sequence
  Description of Artificial Sequence: Synthetic oligonucleotide
ucauauauuguggaaaauc

SEQ ID NO: 1315344 - RNA, 19 nt, Artificial Sequence
  Description of Artificial Sequence: Synthetic oligonucleotide
acucaaauccucucgcagg

SEQ ID NO: 1315345 - RNA, 19 nt, Artificial Sequence
  Description of Artificial Sequence: Synthetic oligonucleotide
auaaauuacuauguggacu

SEQ ID NO: 1315346 - RNA, 19 nt, Artificial Sequence
  Description of Artificial Sequence: Synthetic oligonucleotide
uugaguagcucaauuaaau

SEQ ID NO: 1315347 - RNA, 19 nt, Artificial Sequence
  Description of Artificial Sequence: Synthetic oligonucleotide
uacaccggggcaaagccgg

SEQ ID NO: 1315348 - RNA, 19 nt, Artificial Sequence
  Description of Artificial Sequence: Synthetic oligonucleotide
uucucauaaacaauauuua

SEQ ID NO: 1315349 - RNA, 19 nt, Artificial Sequence
  Description of Artificial Sequence: Synthetic oligonucleotide
cuguuacucgauuuaaagc

SEQ ID NO: 1315350 - RNA, 19 nt, Artificial Sequence
  Description of Artificial Sequence: Synthetic oligonucleotide
ugucugugcagauugagaa

SEQ ID NO: 1315351 - RNA, 19 nt, Artificial Sequence
  Description of Artificial Sequence: Synthetic oligonucleotide
acauuuucuagauuuaauu

SEQ ID NO: 1315352 - RNA, 19 nt, Artificial Sequence
  Description of Artificial Sequence: Synthetic oligonucleotide
uacauguaagaccaauaac

SEQ ID NO: 1315353 - RNA, 19 nt, Artificial Sequence
  Description of Artificial Sequence: Synthetic oligonucleotide
agauuuaauugucuuguga

SEQ ID NO: 1315354 - RNA, 19 nt, Artificial Sequence
  Description of Artificial Sequence: Synthetic oligonucleotide
agcaugauuuauuaacaug

SEQ ID NO: 1315355 - RNA, 19 nt, Artificial Sequence
  Description of Artificial Sequence: Synthetic oligonucleotide
caaaaguaguuucacuagc

SEQ ID NO: 1315356 - RNA, 19 nt, Artificial Sequence
  Description of Artificial Sequence: Synthetic oligonucleotide
ugcuuuagaauccaagcua

SEQ ID NO: 1315357 - RNA, 19 nt, Artificial Sequence
  Description of Artificial Sequence: Synthetic oligonucleotide
aagaccaauaacugcuacu

SEQ ID NO: 1315358 - RNA, 19 nt, Artificial Sequence
  Description of Artificial Sequence: Synthetic oligonucleotide
auuugaaaauuaaagggcu

SEQ ID NO: 1315359 - RNA, 19 nt, Artificial Sequence
  Description of Artificial Sequence: Synthetic oligonucleotide
uuacucgauuuaaagcaag

SEQ ID NO: 1315360 - RNA, 19 nt, Artificial Sequence
  Description of Artificial Sequence: Synthetic oligonucleotide
aaagauuauaaaggagugu

SEQ ID NO: 1315361 - RNA, 19 nt, Artificial Sequence
  Description of Artificial Sequence: Synthetic oligonucleotide
cauuuaucugcaucagucc

SEQ ID NO: 1315362 - RNA, 19 nt, Artificial Sequence
  Description of Artificial Sequence: Synthetic oligonucleotide
cuugugaucuccguaagag

SEQ ID NO: 1315363 - RNA, 19 nt, Artificial Sequence
  Description of Artificial Sequence: Synthetic oligonucleotide
acgucuguagggcaguugg

SEQ ID NO: 1315364 - RNA, 19 nt, Artificial Sequence
  Description of Artificial Sequence: Synthetic oligonucleotide
uugaaaauuaaagggcucu

SEQ ID NO: 1315365 - RNA, 19 nt, Artificial Sequence
  Description of Artificial Sequence: Synthetic oligonucleotide
uagcuuuuaguucuuuaca

SEQ ID NO: 1315366 - RNA, 19 nt, Artificial Sequence
  Description of Artificial Sequence: Synthetic oligonucleotide
uuugaaaauuaaagggcuc

SEQ ID NO: 1315367 - RNA, 19 nt, Artificial Sequence
  Description of Artificial Sequence: Synthetic oligonucleotide
caguaugaagaucacuggg

SEQ ID NO: 1315368 - RNA, 19 nt, Artificial Sequence
  Description of Artificial Sequence: Synthetic oligonucleotide
ucacguaaaauucuuugua

SEQ ID NO: 1315369 - RNA, 19 nt, Artificial Sequence
  Description of Artificial Sequence: Synthetic oligonucleotide
uucacguaaaauucuuugu

SEQ ID NO: 1315370 - RNA, 19 nt, Artificial Sequence
  Description of Artificial Sequence: Synthetic oligonucleotide
auuaaauguaucugucggu

SEQ ID NO: 1315371 - RNA, 19 nt, Artificial Sequence
  Description of Artificial Sequence: Synthetic oligonucleotide
auaaaugggugugauacug

SEQ ID NO: 1315372 - RNA, 19 nt, Artificial Sequence
  Description of Artificial Sequence: Synthetic oligonucleotide
aacagaaugggccuuucuu

SEQ ID NO: 1315373 - RNA, 19 nt, Artificial Sequence
  Description of Artificial Sequence: Synthetic oligonucleotide
uuugaguagcucaauuaaa

SEQ ID NO: 1315374 - RNA, 19 nt, Artificial Sequence
  Description of Artificial Sequence: Synthetic oligonucleotide
cucaaaugccuucaugacc

SEQ ID NO: 1315375 - RNA, 19 nt, Artificial Sequence
  Description of Artificial Sequence: Synthetic oligonucleotide
gaagucauaaaugggugug

SEQ ID NO: 1315376 - RNA, 19 nt, Artificial Sequence
  Description of Artificial Sequence: Synthetic oligonucleotide
cacguaaaauucuuuguac

SEQ ID NO: 1315377 - RNA, 19 nt, Artificial Sequence
  Description of Artificial Sequence: Synthetic oligonucleotide
uucugaaacucauuauaga

SEQ ID NO: 1315378 - RNA, 19 nt, Artificial Sequence
  Description of Artificial Sequence: Synthetic oligonucleotide
uguaacgaccguaagcuuu

SEQ ID NO: 1315379 - RNA, 19 nt, Artificial Sequence
  Description of Artificial Sequence: Synthetic oligonucleotide
agaccaauaacugcuacug

SEQ ID NO: 1315380 - RNA, 19 nt, Artificial Sequence
  Description of Artificial Sequence: Synthetic oligonucleotide
aagguuuucagcaaagcuu

SEQ ID NO: 1315381 - RNA, 19 nt, Artificial Sequence
  Description of Artificial Sequence: Synthetic oligonucleotide
aagcaugauuuauuaacau

SEQ ID NO: 1315382 - RNA, 19 nt, Artificial Sequence
  Description of Artificial Sequence: Synthetic oligonucleotide
aaaugcuuguauuguacuu

SEQ ID NO: 1315383 - RNA, 19 nt, Artificial Sequence
  Description of Artificial Sequence: Synthetic oligonucleotide
acagcauauguaacgaccg

SEQ ID NO: 1315384 - RNA, 19 nt, Artificial Sequence
  Description of Artificial Sequence: Synthetic oligonucleotide
ugucuugugaucuccguaa

SEQ ID NO: 1315385 - RNA, 19 nt, Artificial Sequence
  Description of Artificial Sequence: Synthetic oligonucleotide
acuguuagcacgguuaccu

SEQ ID NO: 1315386 - RNA, 19 nt, Artificial Sequence
  Description of Artificial Sequence: Synthetic oligonucleotide
aguagcucaauuaaaugcu

SEQ ID NO: 1315387 - RNA, 19 nt, Artificial Sequence
  Description of Artificial Sequence: Synthetic oligonucleotide
uuacgauugcucauuucga

SEQ ID NO: 1315388 - RNA, 19 nt, Artificial Sequence
  Description of Artificial Sequence: Synthetic oligonucleotide
cauuagaucugcugaaguc

SEQ ID NO: 1315389 - RNA, 19 nt, Artificial Sequence
  Description of Artificial Sequence: Synthetic oligonucleotide
uguagggcauucauaauuu

SEQ ID NO: 1315390 - RNA, 19 nt, Artificial Sequence
  Description of Artificial Sequence: Synthetic oligonucleotide
aauugucuugugaucuccg

SEQ ID NO: 1315391 - RNA, 19 nt, Artificial Sequence
  Description of Artificial Sequence: Synthetic oligonucleotide
uagauagagggcaguagcu

SEQ ID NO: 1315392 - RNA, 19 nt, Artificial Sequence
  Description of Artificial Sequence: Synthetic oligonucleotide
uuuauuaauuccaguuguu

SEQ ID NO: 1315393 - RNA, 19 nt, Artificial Sequence
  Description of Artificial Sequence: Synthetic oligonucleotide
aauuacuauguggacucug

SEQ ID NO: 1315394 - RNA, 19 nt, Artificial Sequence
  Description of Artificial Sequence: Synthetic oligonucleotide
uguauuguacuugcacucc

SEQ ID NO: 1315395 - RNA, 19 nt, Artificial Sequence
  Description of Artificial Sequence: Synthetic oligonucleotide
aauccaagcuacacaaaug

SEQ ID NO: 1315396 - RNA, 19 nt, Artificial Sequence
  Description of Artificial Sequence: Synthetic oligonucleotide
ugugauacuguuacucgau

SEQ ID NO: 1315397 - RNA, 19 nt, Artificial Sequence
  Description of Artificial Sequence: Synthetic oligonucleotide
ugaauucauuaaauguauc

SEQ ID NO: 1315398 - RNA, 19 nt, Artificial Sequence
  Description of Artificial Sequence: Synthetic oligonucleotide
aaacuuuauuugggaauuc

SEQ ID NO: 1315399 - RNA, 19 nt, Artificial Sequence
  Description of Artificial Sequence: Synthetic oligonucleotide
ggugugauacuguuacucg

SEQ ID NO: 1315400 - RNA, 19 nt, Artificial Sequence
  Description of Artificial Sequence: Synthetic oligonucleotide
aggaauguaauaacauauc

SEQ ID NO: 1315401 - RNA, 19 nt, Artificial Sequence
  Description of Artificial Sequence: Synthetic oligonucleotide
acugauagcccauguauaa

SEQ ID NO: 1315402 - RNA, 19 nt, Artificial Sequence
  Description of Artificial Sequence: Synthetic oligonucleotide
auuugaguauuauccaaaa

SEQ ID NO: 1315403 - RNA, 19 nt, Artificial Sequence
  Description of Artificial Sequence: Synthetic oligonucleotide
ugaacuuguaacacauuuu

SEQ ID NO: 1315404 - RNA, 19 nt, Artificial Sequence
  Description of Artificial Sequence: Synthetic oligonucleotide
acucauuauagaccauuug

SEQ ID NO: 1315405 - RNA, 19 nt, Artificial Sequence
  Description of Artificial Sequence: Synthetic oligonucleotide
aaaugcugugccuccauua

SEQ ID NO: 1315406 - RNA, 19 nt, Artificial Sequence
  Description of Artificial Sequence: Synthetic oligonucleotide
gauacuguuacucgauuua

SEQ ID NO: 1315407 - RNA, 19 nt, Artificial Sequence
  Description of Artificial Sequence: Synthetic oligonucleotide
aaaugggugugauacuguu

SEQ ID NO: 1315408 - RNA, 19 nt, Artificial Sequence
  Description of Artificial Sequence: Synthetic oligonucleotide
uccguaagagcaauuuuau

SEQ ID NO: 1315409 - RNA, 19 nt, Artificial Sequence
  Description of Artificial Sequence: Synthetic oligonucleotide
uaagaccaauaacugcuac

SEQ ID NO: 1315410 - RNA, 19 nt, Artificial Sequence
  Description of Artificial Sequence: Synthetic oligonucleotide
gaccaauaacugcuacugg

SEQ ID NO: 1315411 - RNA, 19 nt, Artificial Sequence
  Description of Artificial Sequence: Synthetic oligonucleotide
cucauuucgaccaacucaa

SEQ ID NO: 1315412 - RNA, 19 nt, Artificial Sequence
  Description of Artificial Sequence: Synthetic oligonucleotide
agggcauucauaauuugag

SEQ ID NO: 1315413 - RNA, 19 nt, Artificial Sequence
  Description of Artificial Sequence: Synthetic oligonucleotide
uacgauugcucauuucgac

SEQ ID NO: 1315414 - RNA, 19 nt, Artificial Sequence
  Description of Artificial Sequence: Synthetic oligonucleotide
gaaaaccgugacuucacuc

SEQ ID NO: 1315415 - RNA, 19 nt, Artificial Sequence
  Description of Artificial Sequence: Synthetic oligonucleotide
guaugaagaucacugggca

SEQ ID NO: 1315416 - RNA, 19 nt, Artificial Sequence
  Description of Artificial Sequence: Synthetic oligonucleotide
gaccguaagcuuuuguuga

SEQ ID NO: 1315417 - RNA, 19 nt, Artificial Sequence
  Description of Artificial Sequence: Synthetic oligonucleotide
uccaguuguuguaaaugcu

SEQ ID NO: 1315418 - RNA, 19 nt, Artificial Sequence
  Description of Artificial Sequence: Synthetic oligonucleotide
ugugcagauugagaaaugu

SEQ ID NO: 1315419 - RNA, 19 nt, Artificial Sequence
  Description of Artificial Sequence: Synthetic oligonucleotide
ucacucacuucucuuauuu

SEQ ID NO: 1315420 - RNA, 19 nt, Artificial Sequence
  Description of Artificial Sequence: Synthetic oligonucleotide
uagauuuaauugucuugug

SEQ ID NO: 1315421 - RNA, 19 nt, Artificial Sequence
  Description of Artificial Sequence: Synthetic oligonucleotide
uaaaugggugugauacugu

SEQ ID NO: 1315422 - RNA, 19 nt, Artificial Sequence
  Description of Artificial Sequence: Synthetic oligonucleotide
uuacccuugguuuuacgau

SEQ ID NO: 1315423 - RNA, 19 nt, Artificial Sequence
  Description of Artificial Sequence: Synthetic oligonucleotide
ugauagcaguucuuuugag

SEQ ID NO: 1315424 - RNA, 19 nt, Artificial Sequence
  Description of Artificial Sequence: Synthetic oligonucleotide
aaauccucucgcaggacag

SEQ ID NO: 1315425 - RNA, 19 nt, Artificial Sequence
  Description of Artificial Sequence: Synthetic oligonucleotide
auaacauaucuuguuagau

SEQ ID NO: 1315426 - RNA, 19 nt, Artificial Sequence
  Description of Artificial Sequence: Synthetic oligonucleotide
uugugaucuccguaagagc

SEQ ID NO: 1315427 - RNA, 19 nt, Artificial Sequence
  Description of Artificial Sequence: Synthetic oligonucleotide
ugggaauucuucagguaga

SEQ ID NO: 1315428 - RNA, 19 nt, Artificial Sequence
  Description of Artificial Sequence: Synthetic oligonucleotide
guuacccuugguuuuacga

SEQ ID NO: 1315429 - RNA, 19 nt, Artificial Sequence
  Description of Artificial Sequence: Synthetic oligonucleotide
uccaaucuacauguaagac

SEQ ID NO: 1315430 - RNA, 19 nt, Artificial Sequence
  Description of Artificial Sequence: Synthetic oligonucleotide
ugucggugagaaaaccgug

SEQ ID NO: 1315431 - RNA, 19 nt, Artificial Sequence
  Description of Artificial Sequence: Synthetic oligonucleotide
uauucucucugugaauuga

SEQ ID NO: 1315432 - RNA, 19 nt, Artificial Sequence
  Description of Artificial Sequence: Synthetic oligonucleotide
ucuugugaucuccguaaga

SEQ ID NO: 1315433 - RNA, 19 nt, Artificial Sequence
  Description of Artificial Sequence: Synthetic oligonucleotide
accguaagcuuuuguugac

SEQ ID NO: 1315434 - RNA, 19 nt, Artificial Sequence
  Description of Artificial Sequence: Synthetic oligonucleotide
uagcaguucuuuugaguag

SEQ ID NO: 1315435 - RNA, 19 nt, Artificial Sequence
  Description of Artificial Sequence: Synthetic oligonucleotide
acgacgacuaugaggacac

SEQ ID NO: 1315436 - RNA, 19 nt, Artificial Sequence
  Description of Artificial Sequence: Synthetic oligonucleotide
ucggugagaaaaccgugac

SEQ ID NO: 1315437 - RNA, 19 nt, Artificial Sequence
  Description of Artificial Sequence: Synthetic oligonucleotide
uccaagcuacacaaaugcu

SEQ ID NO: 1315438 - RNA, 19 nt, Artificial Sequence
  Description of Artificial Sequence: Synthetic oligonucleotide
uccauuagaucugcugaag

SEQ ID NO: 1315439 - RNA, 19 nt, Artificial Sequence
  Description of Artificial Sequence: Synthetic oligonucleotide
guuagauagagggcaguag

SEQ ID NO: 1315440 - RNA, 19 nt, Artificial Sequence
  Description of Artificial Sequence: Synthetic oligonucleotide
cguaagagcaauuuuauca

SEQ ID NO: 1315441 - RNA, 19 nt, Artificial Sequence
  Description of Artificial Sequence: Synthetic oligonucleotide
cuucacgcacaguugaguc

SEQ ID NO: 1315442 - RNA, 19 nt, Artificial Sequence
  Description of Artificial Sequence: Synthetic oligonucleotide
uggacucugaugacaaaau

SEQ ID NO: 1315443 - RNA, 19 nt, Artificial Sequence
  Description of Artificial Sequence: Synthetic oligonucleotide
cugccugacgucuguaggg

SEQ ID NO: 1315444 - RNA, 19 nt, Artificial Sequence
  Description of Artificial Sequence: Synthetic oligonucleotide
aucugucggugagaaaacc

SEQ ID NO: 1315445 - RNA, 19 nt, Artificial Sequence
  Description of Artificial Sequence: Synthetic oligonucleotide
uccaagaguuccagaauau

SEQ ID NO: 1315446 - RNA, 19 nt, Artificial Sequence
  Description of Artificial Sequence: Synthetic oligonucleotide
gaauccaagcuacacaaau

SEQ ID NO: 1315447 - RNA, 19 nt, Artificial Sequence
  Description of Artificial Sequence: Synthetic oligonucleotide
uguuacccuugguuuuacg

SEQ ID NO: 1315448 - RNA, 19 nt, Artificial Sequence
  Description of Artificial Sequence: Synthetic oligonucleotide
uacuguuacucgauuuaaa

SEQ ID NO: 1315449 - RNA, 19 nt, Artificial Sequence
  Description of Artificial Sequence: Synthetic oligonucleotide
cuuuugaguagcucaauua

SEQ ID NO: 1315450 - RNA, 19 nt, Artificial Sequence
  Description of Artificial Sequence: Synthetic oligonucleotide
gauagcaguucuuuugagu

SEQ ID NO: 1315451 - RNA, 19 nt, Artificial Sequence
  Description of Artificial Sequence: Synthetic oligonucleotide
aauguaucugucggugaga

SEQ ID NO: 1315452 - RNA, 19 nt, Artificial Sequence
  Description of Artificial Sequence: Synthetic oligonucleotide
aagcuacacaaaugcugug

SEQ ID NO: 1315453 - RNA, 19 nt, Artificial Sequence
  Description of Artificial Sequence: Synthetic oligonucleotide
ugcaucaguccguuuagau

SEQ ID NO: 1315454 - RNA, 19 nt, Artificial Sequence
  Description of Artificial Sequence: Synthetic oligonucleotide
aguuucacuagcugguauu

SEQ ID NO: 1315455 - RNA, 19 nt, Artificial Sequence
  Description of Artificial Sequence: Synthetic oligonucleotide
auuacuauguggacucuga

SEQ ID NO: 1315456 - RNA, 19 nt, Artificial Sequence
  Description of Artificial Sequence: Synthetic oligonucleotide
cuccaacuacauuuucuag

SEQ ID NO: 1315457 - RNA, 19 nt, Artificial Sequence
  Description of Artificial Sequence: Synthetic oligonucleotide
cuagauuuaauugucuugu

SEQ ID NO: 1315458 - RNA, 19 nt, Artificial Sequence
  Description of Artificial Sequence: Synthetic oligonucleotide
acucgauuuaaagcaagca

SEQ ID NO: 1315459 - RNA, 19 nt, Artificial Sequence
  Description of Artificial Sequence: Synthetic oligonucleotide
gcuuguauuguacuugcac

SEQ ID NO: 1315460 - RNA, 19 nt, Artificial Sequence
  Description of Artificial Sequence: Synthetic oligonucleotide
uucacgcacaguugagucu

SEQ ID NO: 1315461 - RNA, 19 nt, Artificial Sequence
  Description of Artificial Sequence: Synthetic oligonucleotide
accggggcaaagccggccc

SEQ ID NO: 1315462 - RNA, 19 nt, Artificial Sequence
  Description of Artificial Sequence: Synthetic oligonucleotide
uugcucauuucgaccaacu

SEQ ID NO: 1315463 - RNA, 19 nt, Artificial Sequence
  Description of Artificial Sequence: Synthetic oligonucleotide
uugguccaacaauaaguac

SEQ ID NO: 1315464 - RNA, 19 nt, Artificial Sequence
  Description of Artificial Sequence: Synthetic oligonucleotide
acgacuaugaggacacaag

SEQ ID NO: 1315465 - RNA, 19 nt, Artificial Sequence
  Description of Artificial Sequence: Synthetic oligonucleotide
uuacuauguggacucugau

SEQ ID NO: 1315466 - RNA, 19 nt, Artificial Sequence
  Description of Artificial Sequence: Synthetic oligonucleotide
uuuuacgauugcucauuuc

SEQ ID NO: 1315467 - RNA, 19 nt, Artificial Sequence
  Description of Artificial Sequence: Synthetic oligonucleotide
uguuagcacgguuaccuuu

SEQ ID NO: 1315468 - RNA, 19 nt, Artificial Sequence
  Description of Artificial Sequence: Synthetic oligonucleotide
guaagagcaauuuuaucau

SEQ ID NO: 1315469 - RNA, 19 nt, Artificial Sequence
  Description of Artificial Sequence: Synthetic oligonucleotide
acgaccguaagcuuuuguu

SEQ ID NO: 1315470 - RNA, 19 nt, Artificial Sequence
  Description of Artificial Sequence: Synthetic oligonucleotide
aacgaccguaagcuuuugu

SEQ ID NO: 1315471 - RNA, 19 nt, Artificial Sequence
  Description of Artificial Sequence: Synthetic oligonucleotide
caacuguuagcacgguuac

SEQ ID NO: 1315472 - RNA, 19 nt, Artificial Sequence
  Description of Artificial Sequence: Synthetic oligonucleotide
agaaaaccgugacuucacu

SEQ ID NO: 1315473 - RNA, 19 nt, Artificial Sequence
  Description of Artificial Sequence: Synthetic oligonucleotide
cuacaccggggcaaagccg

SEQ ID NO: 1315474 - RNA, 19 nt, Artificial Sequence
  Description of Artificial Sequence: Synthetic oligonucleotide
gcuacacaaaugcugugcc

SEQ ID NO: 1315475 - RNA, 19 nt, Artificial Sequence
  Description of Artificial Sequence: Synthetic oligonucleotide
agauuauaaaggagugucu

SEQ ID NO: 1315476 - RNA, 19 nt, Artificial Sequence
  Description of Artificial Sequence: Synthetic oligonucleotide
aaaccgugacuucacucuu

SEQ ID NO: 1315477 - RNA, 19 nt, Artificial Sequence
  Description of Artificial Sequence: Synthetic oligonucleotide
uguuagauagagggcagua

SEQ ID NO: 1315478 - RNA, 19 nt, Artificial Sequence
  Description of Artificial Sequence: Synthetic oligonucleotide
cccacgacgacuaugagga

SEQ ID NO: 1315479 - RNA, 19 nt, Artificial Sequence
  Description of Artificial Sequence: Synthetic oligonucleotide
uucgaccaacucaaauccu

SEQ ID NO: 1315480 - RNA, 19 nt, Artificial Sequence
  Description of Artificial Sequence: Synthetic oligonucleotide
uaguuucacuagcugguau

SEQ ID NO: 1315481 - RNA, 19 nt, Artificial Sequence
  Description of Artificial Sequence: Synthetic oligonucleotide
ucuccguaagagcaauuuu

SEQ ID NO: 1315482 - RNA, 19 nt, Artificial Sequence
  Description of Artificial Sequence: Synthetic oligonucleotide
ugaaaauuaaagggcucuu

SEQ ID NO: 1315483 - RNA, 19 nt, Artificial Sequence
  Description of Artificial Sequence: Synthetic oligonucleotide
gagaaaaccgugacuucac

SEQ ID NO: 1315484 - RNA, 19 nt, Artificial Sequence
  Description of Artificial Sequence: Synthetic oligonucleotide
cacaagaugcucaccgcuc

SEQ ID NO: 1315485 - RNA, 19 nt, Artificial Sequence
  Description of Artificial Sequence: Synthetic oligonucleotide
cuccguaagagcaauuuua

SEQ ID NO: 1315486 - RNA, 19 nt, Artificial Sequence
  Description of Artificial Sequence: Synthetic oligonucleotide
uauucucauuccaccuuuc

SEQ ID NO: 1315487 - RNA, 19 nt, Artificial Sequence
  Description of Artificial Sequence: Synthetic oligonucleotide
aaauuacuauguggacucu

SEQ ID NO: 1315488 - RNA, 19 nt, Artificial Sequence
  Description of Artificial Sequence: Synthetic oligonucleotide
agccaacuuagugaggaug

SEQ ID NO: 1315489 - RNA, 19 nt, Artificial Sequence
  Description of Artificial Sequence: Synthetic oligonucleotide
ugguuuuacgauugcucau

SEQ ID NO: 1315490 - RNA, 19 nt, Artificial Sequence
  Description of Artificial Sequence: Synthetic oligonucleotide
gugugauacuguuacucga

SEQ ID NO: 1315491 - RNA, 19 nt, Artificial Sequence
  Description of Artificial Sequence: Synthetic oligonucleotide
uauaaacagaaugggccuu

SEQ ID NO: 1315492 - RNA, 19 nt, Artificial Sequence
  Description of Artificial Sequence: Synthetic oligonucleotide
cucaaauccucucgcagga

SEQ ID NO: 1315493 - RNA, 19 nt, Artificial Sequence
  Description of Artificial Sequence: Synthetic oligonucleotide
agaugcucaccgcuccuug

SEQ ID NO: 1315494 - RNA, 19 nt, Artificial Sequence
  Description of Artificial Sequence: Synthetic oligonucleotide
gcaucaguccguuuagaug

SEQ ID NO: 1315495 - RNA, 19 nt, Artificial Sequence
  Description of Artificial Sequence: Synthetic oligonucleotide
gaguauucucauuccaccu

SEQ ID NO: 1315496 - RNA, 19 nt, Artificial Sequence
  Description of Artificial Sequence: Synthetic oligonucleotide
gcuuuagaauccaagcuac

SEQ ID NO: 1315497 - RNA, 19 nt, Artificial Sequence
  Description of Artificial Sequence: Synthetic oligonucleotide
cugguauucucucugugaa

SEQ ID NO: 1315498 - RNA, 19 nt, Artificial Sequence
  Description of Artificial Sequence: Synthetic oligonucleotide
gcccauguauaauacuugc

SEQ ID NO: 1315499 - RNA, 19 nt, Artificial Sequence
  Description of Artificial Sequence: Synthetic oligonucleotide
ugcuuguauuguacuugca

SEQ ID NO: 1315500 - RNA, 19 nt, Artificial Sequence
  Description of Artificial Sequence: Synthetic oligonucleotide
gucuugugaucuccguaag

SEQ ID NO: 1315501 - RNA, 19 nt, Artificial Sequence
  Description of Artificial Sequence: Synthetic oligonucleotide
agaccauuugaaaauuaaa

SEQ ID NO: 1315502 - RNA, 19 nt, Artificial Sequence
  Description of Artificial Sequence: Synthetic oligonucleotide
aucuacauguaagaccaau

SEQ ID NO: 1315503 - RNA, 19 nt, Artificial Sequence
  Description of Artificial Sequence: Synthetic oligonucleotide
cagaauauccaaucuacau

SEQ ID NO: 1315504 - RNA, 19 nt, Artificial Sequence
  Description of Artificial Sequence: Synthetic oligonucleotide
uggauguacugcacuguua

SEQ ID NO: 1315505 - RNA, 19 nt, Artificial Sequence
  Description of Artificial Sequence: Synthetic oligonucleotide
aggcuucucaaaguuauaa

SEQ ID NO: 1315506 - RNA, 19 nt, Artificial Sequence
  Description of Artificial Sequence: Synthetic oligonucleotide
uuucacuagcugguauucu

SEQ ID NO: 1315507 - RNA, 19 nt, Artificial Sequence
  Description of Artificial Sequence: Synthetic oligonucleotide
agaagaaaugaaagguuuu

SEQ ID NO: 1315508 - RNA, 19 nt, Artificial Sequence
  Description of Artificial Sequence: Synthetic oligonucleotide
ccaacucaaauccucucgc

SEQ ID NO: 1315509 - RNA, 19 nt, Artificial Sequence
  Description of Artificial Sequence: Synthetic oligonucleotide
agcuuuuguugacauugaa

SEQ ID NO: 1315510 - RNA, 19 nt, Artificial Sequence
  Description of Artificial Sequence: Synthetic oligonucleotide
gcuacaccggggcaaagcc

SEQ ID NO: 1315511 - RNA, 19 nt, Artificial Sequence
  Description of Artificial Sequence: Synthetic oligonucleotide
auacuguuacucgauuuaa

SEQ ID NO: 1315512 - RNA, 19 nt, Artificial Sequence
  Description of Artificial Sequence: Synthetic oligonucleotide
guuucacuagcugguauuc

SEQ ID NO: 1315513 - RNA, 19 nt, Artificial Sequence
  Description of Artificial Sequence: Synthetic oligonucleotide
cucgauuuaaagcaagcau

SEQ ID NO: 1315514 - RNA, 19 nt, Artificial Sequence
  Description of Artificial Sequence: Synthetic oligonucleotide
caauaaguacagaauuacu

SEQ ID NO: 1315515 - RNA, 19 nt, Artificial Sequence
  Description of Artificial Sequence: Synthetic oligonucleotide
augcucaccgcuccuugug

SEQ ID NO: 1315516 - RNA, 19 nt, Artificial Sequence
  Description of Artificial Sequence: Synthetic oligonucleotide
ucuguagggcauucauaau

SEQ ID NO: 1315517 - RNA, 19 nt, Artificial Sequence
  Description of Artificial Sequence: Synthetic oligonucleotide
cagccgagagcgcacacac

SEQ ID NO: 1315518 - RNA, 19 nt, Artificial Sequence
  Description of Artificial Sequence: Synthetic oligonucleotide
ucacgcacaguugagucuu

SEQ ID NO: 1315519 - RNA, 19 nt, Artificial Sequence
  Description of Artificial Sequence: Synthetic oligonucleotide
uuguuagauagagggcagu

SEQ ID NO: 1315520 - RNA, 19 nt, Artificial Sequence
  Description of Artificial Sequence: Synthetic oligonucleotide
gcccacgacgacuaugagg

SEQ ID NO: 1315521 - RNA, 19 nt, Artificial Sequence
  Description of Artificial Sequence: Synthetic oligonucleotide
ugccugacgucuguagggc

SEQ ID NO: 1315522 - RNA, 19 nt, Artificial Sequence
  Description of Artificial Sequence: Synthetic oligonucleotide
agcauauguaacgaccgua

SEQ ID NO: 1315523 - RNA, 19 nt, Artificial Sequence
  Description of Artificial Sequence: Synthetic oligonucleotide
acuucacgcacaguugagu

SEQ ID NO: 1315524 - RNA, 19 nt, Artificial Sequence
  Description of Artificial Sequence: Synthetic oligonucleotide
ugaucuccguaagagcaau

SEQ ID NO: 1315525 - RNA, 19 nt, Artificial Sequence
  Description of Artificial Sequence: Synthetic oligonucleotide
acaaaugcugugccuccau

SEQ ID NO: 1315526 - RNA, 19 nt, Artificial Sequence
  Description of Artificial Sequence: Synthetic oligonucleotide
guuacucgauuuaaagcaa

SEQ ID NO: 1315527 - RNA, 19 nt, Artificial Sequence
  Description of Artificial Sequence: Synthetic oligonucleotide
gacgacuaugaggacacaa

SEQ ID NO: 1315528 - RNA, 19 nt, Artificial Sequence
  Description of Artificial Sequence: Synthetic oligonucleotide
aucuccguaagagcaauuu

SEQ ID NO: 1315529 - RNA, 19 nt, Artificial Sequence
  Description of Artificial Sequence: Synthetic oligonucleotide
aauauccaaucuacaugua

SEQ ID NO: 1315530 - RNA, 19 nt, Artificial Sequence
  Description of Artificial Sequence: Synthetic oligonucleotide
caacucaaauccucucgca

SEQ ID NO: 1315531 - RNA, 19 nt, Artificial Sequence
  Description of Artificial Sequence: Synthetic oligonucleotide
gugaauugacugaaguucu

SEQ ID NO: 1315532 - RNA, 19 nt, Artificial Sequence
  Description of Artificial Sequence: Synthetic oligonucleotide
guggacucugaugacaaaa

SEQ ID NO: 1315533 - RNA, 19 nt, Artificial Sequence
  Description of Artificial Sequence: Synthetic oligonucleotide
gccuccauuagaucugcug

SEQ ID NO: 1315534 - RNA, 19 nt, Artificial Sequence
  Description of Artificial Sequence: Synthetic oligonucleotide
ggacucugaugacaaaauc

SEQ ID NO: 1315535 - RNA, 19 nt, Artificial Sequence
  Description of Artificial Sequence: Synthetic oligonucleotide
auccaguaugaagaucacu

SEQ ID NO: 1315536 - RNA, 19 nt, Artificial Sequence
  Description of Artificial Sequence: Synthetic oligonucleotide
cuccauuagaucugcugaa

SEQ ID NO: 1315537 - RNA, 19 nt, Artificial Sequence
  Description of Artificial Sequence: Synthetic oligonucleotide
gucggugagaaaaccguga

SEQ ID NO: 1315538 - RNA, 19 nt, Artificial Sequence
  Description of Artificial Sequence: Synthetic oligonucleotide
acccuugguuuuacgauug

SEQ ID NO: 1315539 - RNA, 19 nt, Artificial Sequence
  Description of Artificial Sequence: Synthetic oligonucleotide
uucacucacuucucuuauu

SEQ ID NO: 1315540 - RNA, 19 nt, Artificial Sequence
  Description of Artificial Sequence: Synthetic oligonucleotide
gggugugauacuguuacuc

SEQ ID NO: 1315541 - RNA, 19 nt, Artificial Sequence
  Description of Artificial Sequence: Synthetic oligonucleotide
gacuaugaggacacaagau

SEQ ID NO: 1315542 - RNA, 19 nt, Artificial Sequence
  Description of Artificial Sequence: Synthetic oligonucleotide
gugcagauugagaaauguc

SEQ ID NO: 1315543 - RNA, 19 nt, Artificial Sequence
  Description of Artificial Sequence: Synthetic oligonucleotide
gauugcucauuucgaccaa

SEQ ID NO: 1315544 - RNA, 19 nt, Artificial Sequence
  Description of Artificial Sequence: Synthetic oligonucleotide
cucucgcaggacagccugg

SEQ ID NO: 1315545 - RNA, 19 nt, Artificial Sequence
  Description of Artificial Sequence: Synthetic oligonucleotide
uguggacucugaugacaaa

SEQ ID NO: 1315546 - RNA, 19 nt, Artificial Sequence
  Description of Artificial Sequence: Synthetic oligonucleotide
uaacugcuacuggugucug

SEQ ID NO: 1315547 - RNA, 19 nt, Artificial Sequence
  Description of Artificial Sequence: Synthetic oligonucleotide
cugucggugagaaaaccgu

SEQ ID NO: 1315548 - RNA, 19 nt, Artificial Sequence
  Description of Artificial Sequence: Synthetic oligonucleotide
gucauaaaugggugugaua

SEQ ID NO: 1315549 - RNA, 19 nt, Artificial Sequence
  Description of Artificial Sequence: Synthetic oligonucleotide
uagaucugcugaagucaua

SEQ ID NO: 1315550 - RNA, 19 nt, Artificial Sequence
  Description of Artificial Sequence: Synthetic oligonucleotide
acuguuacccuugguuuua

SEQ ID NO: 1315551 - RNA, 19 nt, Artificial Sequence
  Description of Artificial Sequence: Synthetic oligonucleotide
auguaacgaccguaagcuu

SEQ ID NO: 1315552 - RNA, 19 nt, Artificial Sequence
  Description of Artificial Sequence: Synthetic oligonucleotide
agaucacugggcaacuguu

SEQ ID NO: 1315553 - RNA, 19 nt, Artificial Sequence
  Description of Artificial Sequence: Synthetic oligonucleotide
guauucucauuccaccuuu

SEQ ID NO: 1315554 - RNA, 19 nt, Artificial Sequence
  Description of Artificial Sequence: Synthetic oligonucleotide
gcaacuguuagcacgguua

SEQ ID NO: 1315555 - RNA, 19 nt, Artificial Sequence
  Description of Artificial Sequence: Synthetic oligonucleotide
gcagauugagaaaugucaa

SEQ ID NO: 1315556 - RNA, 19 nt, Artificial Sequence
  Description of Artificial Sequence: Synthetic oligonucleotide
cgaccguaagcuuuuguug

SEQ ID NO: 1315557 - RNA, 19 nt, Artificial Sequence
  Description of Artificial Sequence: Synthetic oligonucleotide
gcauauguaacgaccguaa

SEQ ID NO: 1315558 - RNA, 19 nt, Artificial Sequence
  Description of Artificial Sequence: Synthetic oligonucleotide
ccaacaauaaguacagaau

SEQ ID NO: 1315559 - RNA, 19 nt, Artificial Sequence
  Description of Artificial Sequence: Synthetic oligonucleotide
caaagccggcccacgacga

SEQ ID NO: 1315560 - RNA, 19 nt, Artificial Sequence
  Description of Artificial Sequence: Synthetic oligonucleotide
cgauugcucauuucgacca

SEQ ID NO: 1315561 - RNA, 19 nt, Artificial Sequence
  Description of Artificial Sequence: Synthetic oligonucleotide
ccagaauauccaaucuaca

SEQ ID NO: 1315562 - RNA, 19 nt, Artificial Sequence
  Description of Artificial Sequence: Synthetic oligonucleotide
aaucuacauguaagaccaa

SEQ ID NO: 1315563 - RNA, 19 nt, Artificial Sequence
  Description of Artificial Sequence: Synthetic oligonucleotide
gaugcucaccgcuccuugu

SEQ ID NO: 1315564 - RNA, 19 nt, Artificial Sequence
  Description of Artificial Sequence: Synthetic oligonucleotide
agaauccaagcuacacaaa

SEQ ID NO: 1315565 - RNA, 19 nt, Artificial Sequence
  Description of Artificial Sequence: Synthetic oligonucleotide
cuuucacguaaaauucuuu

SEQ ID NO: 1315566 - RNA, 19 nt, Artificial Sequence
  Description of Artificial Sequence: Synthetic oligonucleotide
cuacacaaaugcugugccu

SEQ ID NO: 1315567 - RNA, 19 nt, Artificial Sequence
  Description of Artificial Sequence: Synthetic oligonucleotide
ggcaaagccggcccacgac

SEQ ID NO: 1315568 - RNA, 19 nt, Artificial Sequence
  Description of Artificial Sequence: Synthetic oligonucleotide
cacaggcuucucaaaguua

SEQ ID NO: 1315569 - RNA, 19 nt, Artificial Sequence
  Description of Artificial Sequence: Synthetic oligonucleotide
uagagggcaguagcuuuua

SEQ ID NO: 1315570 - RNA, 19 nt, Artificial Sequence
  Description of Artificial Sequence: Synthetic oligonucleotide
ccguaagagcaauuuuauc

SEQ ID NO: 1315571 - RNA, 19 nt, Artificial Sequence
  Description of Artificial Sequence: Synthetic oligonucleotide
guuuuacgauugcucauuu

SEQ ID NO: 1315572 - RNA, 19 nt, Artificial Sequence
  Description of Artificial Sequence: Synthetic oligonucleotide
ccauguauaauacuugcuu

SEQ ID NO: 1315573 - RNA, 19 nt, Artificial Sequence
  Description of Artificial Sequence: Synthetic oligonucleotide
ggcuacaccggggcaaagc

SEQ ID NO: 1315574 - RNA, 19 nt, Artificial Sequence
  Description of Artificial Sequence: Synthetic oligonucleotide
cuguuacccuugguuuuac

SEQ ID NO: 1315575 - RNA, 19 nt, Artificial Sequence
  Description of Artificial Sequence: Synthetic oligonucleotide
gggcauucauaauuugagu

SEQ ID NO: 1315576 - RNA, 19 nt, Artificial Sequence
  Description of Artificial Sequence: Synthetic oligonucleotide
acgcacaguugagucuucu

SEQ ID NO: 1315577 - RNA, 19 nt, Artificial Sequence
  Description of Artificial Sequence: Synthetic oligonucleotide
cgacuaugaggacacaaga

SEQ ID NO: 1315578 - RNA, 19 nt, Artificial Sequence
  Description of Artificial Sequence: Synthetic oligonucleotide
gccaacuuagugaggaugu

SEQ ID NO: 1315579 - RNA, 19 nt, Artificial Sequence
  Description of Artificial Sequence: Synthetic oligonucleotide
guaacgaccguaagcuuuu

SEQ ID NO: 1315580 - RNA, 19 nt, Artificial Sequence
  Description of Artificial Sequence: Synthetic oligonucleotide
gugauacuguuacucgauu

SEQ ID NO: 1315581 - RNA, 19 nt, Artificial Sequence
  Description of Artificial Sequence: Synthetic oligonucleotide
auuccaccuuucagcaaaa

SEQ ID NO: 1315582 - RNA, 19 nt, Artificial Sequence
  Description of Artificial Sequence: Synthetic oligonucleotide
guagcucaauuaaaugcuu

SEQ ID NO: 1315583 - RNA, 19 nt, Artificial Sequence
  Description of Artificial Sequence: Synthetic oligonucleotide
cacuguuacccuugguuuu

SEQ ID NO: 1315584 - RNA, 19 nt, Artificial Sequence
  Description of Artificial Sequence: Synthetic oligonucleotide
gguuuuacgauugcucauu

SEQ ID NO: 1315585 - RNA, 19 nt, Artificial Sequence
  Description of Artificial Sequence: Synthetic oligonucleotide
gggccuuucuuugaauaaa

SEQ ID NO: 1315586 - RNA, 19 nt, Artificial Sequence
  Description of Artificial Sequence: Synthetic oligonucleotide
cacgcacaguugagucuuc

SEQ ID NO: 1315587 - RNA, 19 nt, Artificial Sequence
  Description of Artificial Sequence: Synthetic oligonucleotide
uggcuacaccggggcaaag

SEQ ID NO: 1315588 - RNA, 19 nt, Artificial Sequence
  Description of Artificial Sequence: Synthetic oligonucleotide
cagcauauguaacgaccgu

SEQ ID NO: 1315589 - RNA, 19 nt, Artificial Sequence
  Description of Artificial Sequence: Synthetic oligonucleotide
ccauuagaucugcugaagu

SEQ ID NO: 1315590 - RNA, 19 nt, Artificial Sequence
  Description of Artificial Sequence: Synthetic oligonucleotide
cugcaucaguccguuuaga

SEQ ID NO: 1315591 - RNA, 19 nt, Artificial Sequence
  Description of Artificial Sequence: Synthetic oligonucleotide
cugauagcccauguauaau

SEQ ID NO: 1315592 - RNA, 19 nt, Artificial Sequence
  Description of Artificial Sequence: Synthetic oligonucleotide
cccauguauaauacuugcu

SEQ ID NO: 1315593 - RNA, 19 nt, Artificial Sequence
  Description of Artificial Sequence: Synthetic oligonucleotide
gggcaaagccggcccacga

SEQ ID NO: 1315594 - RNA, 19 nt, Artificial Sequence
  Description of Artificial Sequence: Synthetic oligonucleotide
cuggcuacaccggggcaaa

SEQ ID NO: 1315595 - RNA, 19 nt, Artificial Sequence
  Description of Artificial Sequence: Synthetic oligonucleotide
gcugcagccgagagcgcac

SEQ ID NO: 1315596 - RNA, 19 nt, Artificial Sequence
  Description of Artificial Sequence: Synthetic oligonucleotide
cuguuagcacgguuaccuu

SEQ ID NO: 1315597 - RNA, 19 nt, Artificial Sequence
  Description of Artificial Sequence: Synthetic oligonucleotide
cggcccacgacgacuauga

SEQ ID NO: 1315598 - RNA, 19 nt, Artificial Sequence
  Description of Artificial Sequence: Synthetic oligonucleotide
gcagccgagagcgcacaca

SEQ ID NO: 1315599 - RNA, 19 nt, Artificial Sequence
  Description of Artificial Sequence: Synthetic oligonucleotide
agccggcccacgacgacua

SEQ ID NO: 1315600 - RNA, 19 nt, Artificial Sequence
  Description of Artificial Sequence: Synthetic oligonucleotide
ccguaagcuuuuguugaca

SEQ ID NO: 1315601 - RNA, 19 nt, Artificial Sequence
  Description of Artificial Sequence: Synthetic oligonucleotide
cugcagccgagagcgcaca

SEQ ID NO: 1315602 - RNA, 19 nt, Artificial Sequence
  Description of Artificial Sequence: Synthetic oligonucleotide
ccuggcuacaccggggcaa

SEQ ID NO: 1315603 - RNA, 19 nt, Artificial Sequence
  Description of Artificial Sequence: Synthetic oligonucleotide
ccguuuagaugaacuugua

SEQ ID NO: 1315604 - RNA, 19 nt, Artificial Sequence
  Description of Artificial Sequence: Synthetic oligonucleotide
cagccaacuuagugaggau

SEQ ID NO: 1315605 - RNA, 19 nt, Artificial Sequence
  Description of Artificial Sequence: Synthetic oligonucleotide
ccacgacgacuaugaggac

SEQ ID NO: 1315606 - RNA, 19 nt, Artificial Sequence
  Description of Artificial Sequence: Synthetic oligonucleotide
ccggcccacgacgacuaug

SEQ ID NO: 1315607 - RNA, 19 nt, Artificial Sequence
  Description of Artificial Sequence: Synthetic oligonucleotide
cggugagaaaaccgugacu

SEQ ID NO: 1315608 - RNA, 19 nt, Artificial Sequence
  Description of Artificial Sequence: Synthetic oligonucleotide
ccggggcaaagccggccca

SEQ ID NO: 1315609 - RNA, 19 nt, Artificial Sequence
  Description of Artificial Sequence: Synthetic oligonucleotide
gggcaacuguuagcacggu

SEQ ID NO: 1315610 - RNA, 19 nt, Artificial Sequence
  Description of Artificial Sequence: Synthetic oligonucleotide
ccacugccugacgucugua

SEQ ID NO: 1315611 - RNA, 19 nt, Artificial Sequence
  Description of Artificial Sequence: Synthetic oligonucleotide
cgacgacuaugaggacaca

SEQ ID NO: 1315612 - RNA, 19 nt, Artificial Sequence
  Description of Artificial Sequence: Synthetic oligonucleotide
gccggcccacgacgacuau

SEQ ID NO: 1315613 - RNA, 19 nt, Artificial Sequence
  Description of Artificial Sequence: Synthetic oligonucleotide
aauacuguagguuccacag

SEQ ID NO: 1315614 - RNA, 19 nt, Artificial Sequence
  Description of Artificial Sequence: Synthetic oligonucleotide
uaucucaacaguuauacag

SEQ ID NO: 1315615 - RNA, 19 nt, Artificial Sequence
  Description of Artificial Sequence: Synthetic oligonucleotide
uguuuaaagcugaacagag

SEQ ID NO: 1315616 - RNA, 19 nt, Artificial Sequence
  Description of Artificial Sequence: Synthetic oligonucleotide
aguauugccauuuaucuca

SEQ ID NO: 1315617 - RNA, 19 nt, Artificial Sequence
  Description of Artificial Sequence: Synthetic oligonucleotide
ugucuauuggcaaagagaa

SEQ ID NO: 1315618 - RNA, 19 nt, Artificial Sequence
  Description of Artificial Sequence: Synthetic oligonucleotide
ucagacuugaccacguggg

SEQ ID NO: 1315619 - RNA, 19 nt, Artificial Sequence
  Description of Artificial Sequence: Synthetic oligonucleotide
uacagauucagacuugacc

SEQ ID NO: 1315620 - RNA, 19 nt, Artificial Sequence
  Description of Artificial Sequence: Synthetic oligonucleotide
uguguuguccaguucaccg

SEQ ID NO: 1315621 - RNA, 19 nt, Artificial Sequence
  Description of Artificial Sequence: Synthetic oligonucleotide
uugauauuccaccaggaca

SEQ ID NO: 1315622 - RNA, 19 nt, Artificial Sequence
  Description of Artificial Sequence: Synthetic oligonucleotide
gauaucaaacucauuacag

SEQ ID NO: 1315623 - RNA, 19 nt, Artificial Sequence
  Description of Artificial Sequence: Synthetic oligonucleotide
aguguuuaaagcugaacag

SEQ ID NO: 1315624 - RNA, 19 nt, Artificial Sequence
  Description of Artificial Sequence: Synthetic oligonucleotide
ugcaaagacauucuggaac

SEQ ID NO: 1315625 - RNA, 19 nt, Artificial Sequence
  Description of Artificial Sequence: Synthetic oligonucleotide
gcuaagaucacucacugcg

SEQ ID NO: 1315626 - RNA, 19 nt, Artificial Sequence
  Description of Artificial Sequence: Synthetic oligonucleotide
uagacuucuacgaacaccu

SEQ ID NO: 1315627 - RNA, 19 nt, Artificial Sequence
  Description of Artificial Sequence: Synthetic oligonucleotide
aagucaauauucgagacca

SEQ ID NO: 1315628 - RNA, 19 nt, Artificial Sequence
  Description of Artificial Sequence: Synthetic oligonucleotide
uaaagaauggcuccgaguu

SEQ ID NO: 1315629 - RNA, 19 nt, Artificial Sequence
  Description of Artificial Sequence: Synthetic oligonucleotide
uuauagacuucuacgaaca

SEQ ID NO: 1315630 - RNA, 19 nt, Artificial Sequence
  Description of Artificial Sequence: Synthetic oligonucleotide
aacuggauugaagaguucg

SEQ ID NO: 1315631 - RNA, 19 nt, Artificial Sequence
  Description of Artificial Sequence: Synthetic oligonucleotide
acuugaaacagccaggcca

SEQ ID NO: 1315632 - RNA, 19 nt, Artificial Sequence
  Description of Artificial Sequence: Synthetic oligonucleotide
aaguauugccauuuaucuc

SEQ ID NO: 1315633 - RNA, 19 nt, Artificial Sequence
  Description of Artificial Sequence: Synthetic oligonucleotide
gaaacauugagacacucca

SEQ ID NO: 1315634 - RNA, 19 nt, Artificial Sequence
  Description of Artificial Sequence: Synthetic oligonucleotide
ugauauuccaccaggacau

SEQ ID NO: 1315635 - RNA, 19 nt, Artificial Sequence
  Description of Artificial Sequence: Synthetic oligonucleotide
gaacgcaucaucuaagaac

SEQ ID NO: 1315636 - RNA, 19 nt, Artificial Sequence
  Description of Artificial Sequence: Synthetic oligonucleotide
ucaucauaaagaauggcuc

SEQ ID NO: 1315637 - RNA, 19 nt, Artificial Sequence
  Description of Artificial Sequence: Synthetic oligonucleotide
caagacuugaaacagccag

SEQ ID NO: 1315638 - RNA, 19 nt, Artificial Sequence
  Description of Artificial Sequence: Synthetic oligonucleotide
uugucuauuggcaaagaga

SEQ ID NO: 1315639 - RNA, 19 nt, Artificial Sequence
  Description of Artificial Sequence: Synthetic oligonucleotide
uuauguuauagacuucuac

SEQ ID NO: 1315640 - RNA, 19 nt, Artificial Sequence
  Description of Artificial Sequence: Synthetic oligonucleotide
aacaguuauacagauucag

SEQ ID NO: 1315641 - RNA, 19 nt, Artificial Sequence
  Description of Artificial Sequence: Synthetic oligonucleotide
aaggauaccccauccaucu

SEQ ID NO: 1315642 - RNA, 19 nt, Artificial Sequence
  Description of Artificial Sequence: Synthetic oligonucleotide
aagaguucgucauuggagu

SEQ ID NO: 1315643 - RNA, 19 nt, Artificial Sequence
  Description of Artificial Sequence: Synthetic oligonucleotide
uuugucuauuggcaaagag

SEQ ID NO: 1315644 - RNA, 19 nt, Artificial Sequence
  Description of Artificial Sequence: Synthetic oligonucleotide
uucgagaccagcaucuugc

SEQ ID NO: 1315645 - RNA, 19 nt, Artificial Sequence
  Description of Artificial Sequence: Synthetic oligonucleotide
uacuacaaccacuucauga

SEQ ID NO: 1315646 - RNA, 19 nt, Artificial Sequence
  Description of Artificial Sequence: Synthetic oligonucleotide
uaaagcuaagaucacucac

SEQ ID NO: 1315647 - RNA, 19 nt, Artificial Sequence
  Description of Artificial Sequence: Synthetic oligonucleotide
uccuacuacaaccacuuca

SEQ ID NO: 1315648 - RNA, 19 nt, Artificial Sequence
  Description of Artificial Sequence: Synthetic oligonucleotide
ugccuaauuagccagugcu

SEQ ID NO: 1315649 - RNA, 19 nt, Artificial Sequence
  Description of Artificial Sequence: Synthetic oligonucleotide
uugguuugaucccaggccc

SEQ ID NO: 1315650 - RNA, 19 nt, Artificial Sequence
  Description of Artificial Sequence: Synthetic oligonucleotide
gauugcugaacaugagacg

SEQ ID NO: 1315651 - RNA, 19 nt, Artificial Sequence
  Description of Artificial Sequence: Synthetic oligonucleotide
aauggcuccgaguuggacu

SEQ ID NO: 1315652 - RNA, 19 nt, Artificial Sequence
  Description of Artificial Sequence: Synthetic oligonucleotide
aagcuaagaucacucacug

SEQ ID NO: 1315653 - RNA, 19 nt, Artificial Sequence
  Description of Artificial Sequence: Synthetic oligonucleotide
auguuauagacuucuacga

SEQ ID NO: 1315654 - RNA, 19 nt, Artificial Sequence
  Description of Artificial Sequence: Synthetic oligonucleotide
ugagacgcaggucaaaccu

SEQ ID NO: 1315655 - RNA, 19 nt, Artificial Sequence
  Description of Artificial Sequence: Synthetic oligonucleotide
uugauaucaaacucauuac

SEQ ID NO: 1315656 - RNA, 19 nt, Artificial Sequence
  Description of Artificial Sequence: Synthetic oligonucleotide
uuggcuugccuaauuagcc

SEQ ID NO: 1315657 - RNA, 19 nt, Artificial Sequence
  Description of Artificial Sequence: Synthetic oligonucleotide
uguagguuccacagugacg

SEQ ID NO: 1315658 - RNA, 19 nt, Artificial Sequence
  Description of Artificial Sequence: Synthetic oligonucleotide
guuauagacuucuacgaac

SEQ ID NO: 1315659 - RNA, 19 nt, Artificial Sequence
  Description of Artificial Sequence: Synthetic oligonucleotide
guaucaccgaaguuguugg

SEQ ID NO: 1315660 - RNA, 19 nt, Artificial Sequence
  Description of Artificial Sequence: Synthetic oligonucleotide
ggacuuguaauccaggaag

SEQ ID NO: 1315661 - RNA, 19 nt, Artificial Sequence
  Description of Artificial Sequence: Synthetic oligonucleotide
ucugaacgcaucaucuaag

SEQ ID NO: 1315662 - RNA, 19 nt, Artificial Sequence
  Description of Artificial Sequence: Synthetic oligonucleotide
uaagaucacucacugcgcc

SEQ ID NO: 1315663 - RNA, 19 nt, Artificial Sequence
  Description of Artificial Sequence: Synthetic oligonucleotide
ucggagguauagaagaugu

SEQ ID NO: 1315664 - RNA, 19 nt, Artificial Sequence
  Description of Artificial Sequence: Synthetic oligonucleotide
ugcaguuauguuauagacu

SEQ ID NO: 1315665 - RNA, 19 nt, Artificial Sequence
  Description of Artificial Sequence: Synthetic oligonucleotide
cuugaaacagccaggccag

SEQ ID NO: 1315666 - RNA, 19 nt, Artificial Sequence
  Description of Artificial Sequence: Synthetic oligonucleotide
ugucuuauucaggucauag

SEQ ID NO: 1315667 - RNA, 19 nt, Artificial Sequence
  Description of Artificial Sequence: Synthetic oligonucleotide
aguuauguuauagacuucu

SEQ ID NO: 1315668 - RNA, 19 nt, Artificial Sequence
  Description of Artificial Sequence: Synthetic oligonucleotide
ucacaugagguaaaggaau

SEQ ID NO: 1315669 - RNA, 19 nt, Artificial Sequence
  Description of Artificial Sequence: Synthetic oligonucleotide
ucugcaguuauguuauaga

SEQ ID NO: 1315670 - RNA, 19 nt, Artificial Sequence
  Description of Artificial Sequence: Synthetic oligonucleotide
aggauccaacugcagaggc

SEQ ID NO: 1315671 - RNA, 19 nt, Artificial Sequence
  Description of Artificial Sequence: Synthetic oligonucleotide
gacuucuacgaacaccucc

SEQ ID NO: 1315672 - RNA, 19 nt, Artificial Sequence
  Description of Artificial Sequence: Synthetic oligonucleotide
aacuguccuguaugguagc

SEQ ID NO: 1315673 - RNA, 19 nt, Artificial Sequence
  Description of Artificial Sequence: Synthetic oligonucleotide
uggauugaagaguucguca

SEQ ID NO: 1315674 - RNA, 19 nt, Artificial Sequence
  Description of Artificial Sequence: Synthetic oligonucleotide
guaugguagccauugucgg

SEQ ID NO: 1315675 - RNA, 19 nt, Artificial Sequence
  Description of Artificial Sequence: Synthetic oligonucleotide
ugacguuacggccuucucc

SEQ ID NO: 1315676 - RNA, 19 nt, Artificial Sequence
  Description of Artificial Sequence: Synthetic oligonucleotide
aaggggugugcaaggaucc

SEQ ID NO: 1315677 - RNA, 19 nt, Artificial Sequence
  Description of Artificial Sequence: Synthetic oligonucleotide
guauguguuguccaguuca

SEQ ID NO: 1315678 - RNA, 19 nt, Artificial Sequence
  Description of Artificial Sequence: Synthetic oligonucleotide
auccaucugugucuuauuc

SEQ ID NO: 1315679 - RNA, 19 nt, Artificial Sequence
  Description of Artificial Sequence: Synthetic oligonucleotide
ugccuuuugucuauuggca

SEQ ID NO: 1315680 - RNA, 19 nt, Artificial Sequence
  Description of Artificial Sequence: Synthetic oligonucleotide
agaguuugccaccuccuuc

SEQ ID NO: 1315681 - RNA, 19 nt, Artificial Sequence
  Description of Artificial Sequence: Synthetic oligonucleotide
auggcuauuaccccaacau

SEQ ID NO: 1315682 - RNA, 19 nt, Artificial Sequence
  Description of Artificial Sequence: Synthetic oligonucleotide
ucgucaaacucacaauacu

SEQ ID NO: 1315683 - RNA, 19 nt, Artificial Sequence
  Description of Artificial Sequence: Synthetic oligonucleotide
auaaagaauggcuccgagu

SEQ ID NO: 1315684 - RNA, 19 nt, Artificial Sequence
  Description of Artificial Sequence: Synthetic oligonucleotide
ugccauuuaucucaacagu

SEQ ID NO: 1315685 - RNA, 19 nt, Artificial Sequence
  Description of Artificial Sequence: Synthetic oligonucleotide
uggaucugcaguuauguua

SEQ ID NO: 1315686 - RNA, 19 nt, Artificial Sequence
  Description of Artificial Sequence: Synthetic oligonucleotide
aguaucaccgaaguuguug

SEQ ID NO: 1315687 - RNA, 19 nt, Artificial Sequence
  Description of Artificial Sequence: Synthetic oligonucleotide
ucucucaguaucaccgaag

SEQ ID NO: 1315688 - RNA, 19 nt, Artificial Sequence
  Description of Artificial Sequence: Synthetic oligonucleotide
uucgucauuggagucuugg

SEQ ID NO: 1315689 - RNA, 19 nt, Artificial Sequence
  Description of Artificial Sequence: Synthetic oligonucleotide
guggagaucaucauaaaga

SEQ ID NO: 1315690 - RNA, 19 nt, Artificial Sequence
  Description of Artificial Sequence: Synthetic oligonucleotide
ggcuauuaccccaacaugg

SEQ ID NO: 1315691 - RNA, 19 nt, Artificial Sequence
  Description of Artificial Sequence: Synthetic oligonucleotide
uucugaacgcaucaucuaa

SEQ ID NO: 1315692 - RNA, 19 nt, Artificial Sequence
  Description of Artificial Sequence: Synthetic oligonucleotide
augauugcugaacaugaga

SEQ ID NO: 1315693 - RNA, 19 nt, Artificial Sequence
  Description of Artificial Sequence: Synthetic oligonucleotide
ugggagaucaucacacacu

SEQ ID NO: 1315694 - RNA, 19 nt, Artificial Sequence
  Description of Artificial Sequence: Synthetic oligonucleotide
guagguuccacagugacga

SEQ ID NO: 1315695 - RNA, 19 nt, Artificial Sequence
  Description of Artificial Sequence: Synthetic oligonucleotide
uucgagaaccuucucguuc

SEQ ID NO: 1315696 - RNA, 19 nt, Artificial Sequence
  Description of Artificial Sequence: Synthetic oligonucleotide
agcuaagaucacucacugc

SEQ ID NO: 1315697 - RNA, 19 nt, Artificial Sequence
  Description of Artificial Sequence: Synthetic oligonucleotide
gaacuguccuguaugguag

SEQ ID NO: 1315698 - RNA, 19 nt, Artificial Sequence
  Description of Artificial Sequence: Synthetic oligonucleotide
cuaagaucacucacugcgc

SEQ ID NO: 1315699 - RNA, 19 nt, Artificial Sequence
  Description of Artificial Sequence: Synthetic oligonucleotide
ggucacaugagguaaagga

SEQ ID NO: 1315700 - RNA, 19 nt, Artificial Sequence
  Description of Artificial Sequence: Synthetic oligonucleotide
agaucaucacacacugugc

SEQ ID NO: 1315701 - RNA, 19 nt, Artificial Sequence
  Description of Artificial Sequence: Synthetic oligonucleotide
uuguucgucccauggaugu

SEQ ID NO: 1315702 - RNA, 19 nt, Artificial Sequence
  Description of Artificial Sequence: Synthetic oligonucleotide
uggcaaagagaacuguccu

SEQ ID NO: 1315703 - RNA, 19 nt, Artificial Sequence
  Description of Artificial Sequence: Synthetic oligonucleotide
aggucaaaccuguauccag

SEQ ID NO: 1315704 - RNA, 19 nt, Artificial Sequence
  Description of Artificial Sequence: Synthetic oligonucleotide
uggcuauuaccccaacaug

SEQ ID NO: 1315705 - RNA, 19 nt, Artificial Sequence
  Description of Artificial Sequence: Synthetic oligonucleotide
accgagagcagaguuugcc

SEQ ID NO: 1315706 - RNA, 19 nt, Artificial Sequence
  Description of Artificial Sequence: Synthetic oligonucleotide
uaaggauaccccauccauc

SEQ ID NO: 1315707 - RNA, 19 nt, Artificial Sequence
  Description of Artificial Sequence: Synthetic oligonucleotide
gucaaaccuguauccaggg

SEQ ID NO: 1315708 - RNA, 19 nt, Artificial Sequence
  Description of Artificial Sequence: Synthetic oligonucleotide
ucgagaaccuucucguucu

SEQ ID NO: 1315709 - RNA, 19 nt, Artificial Sequence
  Description of Artificial Sequence: Synthetic oligonucleotide
agauucagacuugaccacg

SEQ ID NO: 1315710 - RNA, 19 nt, Artificial Sequence
  Description of Artificial Sequence: Synthetic oligonucleotide
gaguucggcagguuggccc

SEQ ID NO: 1315711 - RNA, 19 nt, Artificial Sequence
  Description of Artificial Sequence: Synthetic oligonucleotide
uccgaguuggacuuguaau

SEQ ID NO: 1315712 - RNA, 19 nt, Artificial Sequence
  Description of Artificial Sequence: Synthetic oligonucleotide
agaacuguccuguauggua

SEQ ID NO: 1315713 - RNA, 19 nt, Artificial Sequence
  Description of Artificial Sequence: Synthetic oligonucleotide
aguaaggauaccccaucca

SEQ ID NO: 1315714 - RNA, 19 nt, Artificial Sequence
  Description of Artificial Sequence: Synthetic oligonucleotide
uuacuggccccuuucagaa

SEQ ID NO: 1315715 - RNA, 19 nt, Artificial Sequence
  Description of Artificial Sequence: Synthetic oligonucleotide
agaguucgucauuggaguc

SEQ ID NO: 1315716 - RNA, 19 nt, Artificial Sequence
  Description of Artificial Sequence: Synthetic oligonucleotide
acaucugaccuccagguua

SEQ ID NO: 1315717 - RNA, 19 nt, Artificial Sequence
  Description of Artificial Sequence: Synthetic oligonucleotide
cuauuaccccaacauggcc

SEQ ID NO: 1315718 - RNA, 19 nt, Artificial Sequence
  Description of Artificial Sequence: Synthetic oligonucleotide
agccagugcuuguucgucc

SEQ ID NO: 1315719 - RNA, 19 nt, Artificial Sequence
  Description of Artificial Sequence: Synthetic oligonucleotide
aucaccgaaguuguugggg

SEQ ID NO: 1315720 - RNA, 19 nt, Artificial Sequence
  Description of Artificial Sequence: Synthetic oligonucleotide
uauagacuucuacgaacac

SEQ ID NO: 1315721 - RNA, 19 nt, Artificial Sequence
  Description of Artificial Sequence: Synthetic oligonucleotide
cacaugagguaaaggaaug

SEQ ID NO: 1315722 - RNA, 19 nt, Artificial Sequence
  Description of Artificial Sequence: Synthetic oligonucleotide
ggaaggacaggucgggucg

SEQ ID NO: 1315723 - RNA, 19 nt, Artificial Sequence
  Description of Artificial Sequence: Synthetic oligonucleotide
acgugggagaucaucacac

SEQ ID NO: 1315724 - RNA, 19 nt, Artificial Sequence
  Description of Artificial Sequence: Synthetic oligonucleotide
ucaucaaccgauaguucau

SEQ ID NO: 1315725 - RNA, 19 nt, Artificial Sequence
  Description of Artificial Sequence: Synthetic oligonucleotide
uacaguugccuuuugucua

SEQ ID NO: 1315726 - RNA, 19 nt, Artificial Sequence
  Description of Artificial Sequence: Synthetic oligonucleotide
uuaucucaacaguuauaca

SEQ ID NO: 1315727 - RNA, 19 nt, Artificial Sequence
  Description of Artificial Sequence: Synthetic oligonucleotide
guguuguccaguucaccgg

SEQ ID NO: 1315728 - RNA, 19 nt, Artificial Sequence
  Description of Artificial Sequence: Synthetic oligonucleotide
ugaacgcaucaucuaagaa

SEQ ID NO: 1315729 - RNA, 19 nt, Artificial Sequence
  Description of Artificial Sequence: Synthetic oligonucleotide
caugauugcugaacaugag

SEQ ID NO: 1315730 - RNA, 19 nt, Artificial Sequence
  Description of Artificial Sequence: Synthetic oligonucleotide
uuaccaguuuucuccacaa

SEQ ID NO: 1315731 - RNA, 19 nt, Artificial Sequence
  Description of Artificial Sequence: Synthetic oligonucleotide
ugcugaacaugagacgcag

SEQ ID NO: 1315732 - RNA, 19 nt, Artificial Sequence
  Description of Artificial Sequence: Synthetic oligonucleotide
gagagcagaguuugccacc

SEQ ID NO: 1315733 - RNA, 19 nt, Artificial Sequence
  Description of Artificial Sequence: Synthetic oligonucleotide
cuccaggacucaaggaagg

SEQ ID NO: 1315734 - RNA, 19 nt, Artificial Sequence
  Description of Artificial Sequence: Synthetic oligonucleotide
uuccauugccuguuugucu

SEQ ID NO: 1315735 - RNA, 19 nt, Artificial Sequence
  Description of Artificial Sequence: Synthetic oligonucleotide
auucgagaccagcaucuug

SEQ ID NO: 1315736 - RNA, 19 nt, Artificial Sequence
  Description of Artificial Sequence: Synthetic oligonucleotide
ugcaaggauccaacugcag

SEQ ID NO: 1315737 - RNA, 19 nt, Artificial Sequence
  Description of Artificial Sequence: Synthetic oligonucleotide
ucaaccgagagcagaguuu

SEQ ID NO: 1315738 - RNA, 19 nt, Artificial Sequence
  Description of Artificial Sequence: Synthetic oligonucleotide
ucaaaccuguauccagggu

SEQ ID NO: 1315739 - RNA, 19 nt, Artificial Sequence
  Description of Artificial Sequence: Synthetic oligonucleotide
ucaaccgauaguucauuuu

SEQ ID NO: 1315740 - RNA, 19 nt, Artificial Sequence
  Description of Artificial Sequence: Synthetic oligonucleotide
auuggagucuuggcuugcc

SEQ ID NO: 1315741 - RNA, 19 nt, Artificial Sequence
  Description of Artificial Sequence: Synthetic oligonucleotide
aucucaacaguuauacaga

SEQ ID NO: 1315742 - RNA, 19 nt, Artificial Sequence
  Description of Artificial Sequence: Synthetic oligonucleotide
uucaugagaaaggggugug

SEQ ID NO: 1315743 - RNA, 19 nt, Artificial Sequence
  Description of Artificial Sequence: Synthetic oligonucleotide
uugccuaauuagccagugc

SEQ ID NO: 1315744 - RNA, 19 nt, Artificial Sequence
  Description of Artificial Sequence: Synthetic oligonucleotide
aucucuuuaccaguuuucu

SEQ ID NO: 1315745 - RNA, 19 nt, Artificial Sequence
  Description of Artificial Sequence: Synthetic oligonucleotide
gcaagguccaagauugugg

SEQ ID NO: 1315746 - RNA, 19 nt, Artificial Sequence
  Description of Artificial Sequence: Synthetic oligonucleotide
gacguuacggccuucuccu

SEQ ID NO: 1315747 - RNA, 19 nt, Artificial Sequence
  Description of Artificial Sequence: Synthetic oligonucleotide
gagaggacaaagaccucag

SEQ ID NO: 1315748 - RNA, 19 nt, Artificial Sequence
  Description of Artificial Sequence: Synthetic oligonucleotide
caagcauagguauuguugu

SEQ ID NO: 1315749 - RNA, 19 nt, Artificial Sequence
  Description of Artificial Sequence: Synthetic oligonucleotide
caaccgagagcagaguuug

SEQ ID NO: 1315750 - RNA, 19 nt, Artificial Sequence
  Description of Artificial Sequence: Synthetic oligonucleotide
caugagacgcaggucaaac

SEQ ID NO: 1315751 - RNA, 19 nt, Artificial Sequence
  Description of Artificial Sequence: Synthetic oligonucleotide
gcauagguauuguuguaag

SEQ ID NO: 1315752 - RNA, 19 nt, Artificial Sequence
  Description of Artificial Sequence: Synthetic oligonucleotide
ccggcaagguccaagauug

SEQ ID NO: 1315753 - RNA, 19 nt, Artificial Sequence
  Description of Artificial Sequence: Synthetic oligonucleotide
ucaggaguguugguuguca

SEQ ID NO: 1315754 - RNA, 19 nt, Artificial Sequence
  Description of Artificial Sequence: Synthetic oligonucleotide
ggucaaaccuguauccagg

SEQ ID NO: 1315755 - RNA, 19 nt, Artificial Sequence
  Description of Artificial Sequence: Synthetic oligonucleotide
ugguuugguuugaucccag

SEQ ID NO: 1315756 - RNA, 19 nt, Artificial Sequence
  Description of Artificial Sequence: Synthetic oligonucleotide
cuacagagggugcuucgag

SEQ ID NO: 1315757 - RNA, 19 nt, Artificial Sequence
  Description of Artificial Sequence: Synthetic oligonucleotide
aucaaccgagagcagaguu

SEQ ID NO: 1315758 - RNA, 19 nt, Artificial Sequence
  Description of Artificial Sequence: Synthetic oligonucleotide
cauugucggagguauagaa

SEQ ID NO: 1315759 - RNA, 19 nt, Artificial Sequence
  Description of Artificial Sequence: Synthetic oligonucleotide
ucaugagaaaggggugugc

SEQ ID NO: 1315760 - RNA, 19 nt, Artificial Sequence
  Description of Artificial Sequence: Synthetic oligonucleotide
cucgaaccaacaguggaac

SEQ ID NO: 1315761 - RNA, 19 nt, Artificial Sequence
  Description of Artificial Sequence: Synthetic oligonucleotide
gcaguuauguuauagacuu

SEQ ID NO: 1315762 - RNA, 19 nt, Artificial Sequence
  Description of Artificial Sequence: Synthetic oligonucleotide
ugucggagguauagaagau

SEQ ID NO: 1315763 - RNA, 19 nt, Artificial Sequence
  Description of Artificial Sequence: Synthetic oligonucleotide
agcguccucacacaagcau

SEQ ID NO: 1315764 - RNA, 19 nt, Artificial Sequence
  Description of Artificial Sequence: Synthetic oligonucleotide
ugccauccaaucucuuuac

SEQ ID NO: 1315765 - RNA, 19 nt, Artificial Sequence
  Description of Artificial Sequence: Synthetic oligonucleotide
agcauagguauuguuguaa

SEQ ID NO: 1315766 - RNA, 19 nt, Artificial Sequence
  Description of Artificial Sequence: Synthetic oligonucleotide
ucauagccggcaaggucca

SEQ ID NO: 1315767 - RNA, 19 nt, Artificial Sequence
  Description of Artificial Sequence: Synthetic oligonucleotide
aguucggcagguuggccca

SEQ ID NO: 1315768 - RNA, 19 nt, Artificial Sequence
  Description of Artificial Sequence: Synthetic oligonucleotide
guuguuggggucacaugag

SEQ ID NO: 1315769 - RNA, 19 nt, Artificial Sequence
  Description of Artificial Sequence: Synthetic oligonucleotide
auacagauucagacuugac

SEQ ID NO: 1315770 - RNA, 19 nt, Artificial Sequence
  Description of Artificial Sequence: Synthetic oligonucleotide
aggcccucgaaccaacagu

SEQ ID NO: 1315771 - RNA, 19 nt, Artificial Sequence
  Description of Artificial Sequence: Synthetic oligonucleotide
acucacaauacuguagguu

SEQ ID NO: 1315772 - RNA, 19 nt, Artificial Sequence
  Description of Artificial Sequence: Synthetic oligonucleotide
uucaccggugccauccaau

SEQ ID NO: 1315773 - RNA, 19 nt, Artificial Sequence
  Description of Artificial Sequence: Synthetic oligonucleotide
gaguuggacuuguaaucca

SEQ ID NO: 1315774 - RNA, 19 nt, Artificial Sequence
  Description of Artificial Sequence: Synthetic oligonucleotide
auucagacuugaccacgug

SEQ ID NO: 1315775 - RNA, 19 nt, Artificial Sequence
  Description of Artificial Sequence: Synthetic oligonucleotide
cugaacgcaucaucuaaga

SEQ ID NO: 1315776 - RNA, 19 nt, Artificial Sequence
  Description of Artificial Sequence: Synthetic oligonucleotide
cuugccuaauuagccagug

SEQ ID NO: 1315777 - RNA, 19 nt, Artificial Sequence
  Description of Artificial Sequence: Synthetic oligonucleotide
cuggauugaagaguucguc

SEQ ID NO: 1315778 - RNA, 19 nt, Artificial Sequence
  Description of Artificial Sequence: Synthetic oligonucleotide
acaugagguaaaggaauga

SEQ ID NO: 1315779 - RNA, 19 nt, Artificial Sequence
  Description of Artificial Sequence: Synthetic oligonucleotide
ucaccggugccauccaauc

SEQ ID NO: 1315780 - RNA, 19 nt, Artificial Sequence
  Description of Artificial Sequence: Synthetic oligonucleotide
aggcgugggcuccuacuac

SEQ ID NO: 1315781 - RNA, 19 nt, Artificial Sequence
  Description of Artificial Sequence: Synthetic oligonucleotide
ucgaaccaacaguggaacu

SEQ ID NO: 1315782 - RNA, 19 nt, Artificial Sequence
  Description of Artificial Sequence: Synthetic oligonucleotide
gacaggucgggucggugac

SEQ ID NO: 1315783 - RNA, 19 nt, Artificial Sequence
  Description of Artificial Sequence: Synthetic oligonucleotide
ugcgcccuuaaaguauugc

SEQ ID NO: 1315784 - RNA, 19 nt, Artificial Sequence
  Description of Artificial Sequence: Synthetic oligonucleotide
auagccggcaagguccaag

SEQ ID NO: 1315785 - RNA, 19 nt, Artificial Sequence
  Description of Artificial Sequence: Synthetic oligonucleotide
uagccggcaagguccaaga

SEQ ID NO: 1315786 - RNA, 19 nt, Artificial Sequence
  Description of Artificial Sequence: Synthetic oligonucleotide
guaaggauaccccauccau

SEQ ID NO: 1315787 - RNA, 19 nt, Artificial Sequence
  Description of Artificial Sequence: Synthetic oligonucleotide
aaccgagagcagaguuugc

SEQ ID NO: 1315788 - RNA, 19 nt, Artificial Sequence
  Description of Artificial Sequence: Synthetic oligonucleotide
aucaaccgauaguucauuu

SEQ ID NO: 1315789 - RNA, 19 nt, Artificial Sequence
  Description of Artificial Sequence: Synthetic oligonucleotide
gaccuccagguuaaguuac

SEQ ID NO: 1315790 - RNA, 19 nt, Artificial Sequence
  Description of Artificial Sequence: Synthetic oligonucleotide
accacgugggagaucauca

SEQ ID NO: 1315791 - RNA, 19 nt, Artificial Sequence
  Description of Artificial Sequence: Synthetic oligonucleotide
gucggagguauagaagaug

SEQ ID NO: 1315792 - RNA, 19 nt, Artificial Sequence
  Description of Artificial Sequence: Synthetic oligonucleotide
augaacuccauggcuauua

SEQ ID NO: 1315793 - RNA, 19 nt, Artificial Sequence
  Description of Artificial Sequence: Synthetic oligonucleotide
gcaaggauccaacugcaga

SEQ ID NO: 1315794 - RNA, 19 nt, Artificial Sequence
  Description of Artificial Sequence: Synthetic oligonucleotide
gagacgcaggucaaaccug

SEQ ID NO: 1315795 - RNA, 19 nt, Artificial Sequence
  Description of Artificial Sequence: Synthetic oligonucleotide
caugagaaaggggugugca

SEQ ID NO: 1315796 - RNA, 19 nt, Artificial Sequence
  Description of Artificial Sequence: Synthetic oligonucleotide
gaaggacaggucgggucgg

SEQ ID NO: 1315797 - RNA, 19 nt, Artificial Sequence
  Description of Artificial Sequence: Synthetic oligonucleotide
cuacgaacaccuccugguc

SEQ ID NO: 1315798 - RNA, 19 nt, Artificial Sequence
  Description of Artificial Sequence: Synthetic oligonucleotide
gacagcguccucacacaag

SEQ ID NO: 1315799 - RNA, 19 nt, Artificial Sequence
  Description of Artificial Sequence: Synthetic oligonucleotide
gcuauuaccccaacauggc

SEQ ID NO: 1315800 - RNA, 19 nt, Artificial Sequence
  Description of Artificial Sequence: Synthetic oligonucleotide
gaguguugguugucaucug

SEQ ID NO: 1315801 - RNA, 19 nt, Artificial Sequence
  Description of Artificial Sequence: Synthetic oligonucleotide
ccaugauugcugaacauga

SEQ ID NO: 1315802 - RNA, 19 nt, Artificial Sequence
  Description of Artificial Sequence: Synthetic oligonucleotide
uggaguucggcagguuggc

SEQ ID NO: 1315803 - RNA, 19 nt, Artificial Sequence
  Description of Artificial Sequence: Synthetic oligonucleotide
cuacuacaaccacuucaug

SEQ ID NO: 1315804 - RNA, 19 nt, Artificial Sequence
  Description of Artificial Sequence: Synthetic oligonucleotide
gggucggugacguuacggc

SEQ ID NO: 1315805 - RNA, 19 nt, Artificial Sequence
  Description of Artificial Sequence: Synthetic oligonucleotide
acgacagcguccucacaca

SEQ ID NO: 1315806 - RNA, 19 nt, Artificial Sequence
  Description of Artificial Sequence: Synthetic oligonucleotide
gccagagcucuucuaggcg

SEQ ID NO: 1315807 - RNA, 19 nt, Artificial Sequence
  Description of Artificial Sequence: Synthetic oligonucleotide
ccgaguuggacuuguaauc

SEQ ID NO: 1315808 - RNA, 19 nt, Artificial Sequence
  Description of Artificial Sequence: Synthetic oligonucleotide
gccaugauugcugaacaug

SEQ ID NO: 1315809 - RNA, 19 nt, Artificial Sequence
  Description of Artificial Sequence: Synthetic oligonucleotide
auuguggggcccaagucaa

SEQ ID NO: 1315810 - RNA, 19 nt, Artificial Sequence
  Description of Artificial Sequence: Synthetic oligonucleotide
cauggcuauuaccccaaca

SEQ ID NO: 1315811 - RNA, 19 nt, Artificial Sequence
  Description of Artificial Sequence: Synthetic oligonucleotide
cuucuacgaacaccuccug

SEQ ID NO: 1315812 - RNA, 19 nt, Artificial Sequence
  Description of Artificial Sequence: Synthetic oligonucleotide
uauugccauuuaucucaac

SEQ ID NO: 1315813 - RNA, 19 nt, Artificial Sequence
  Description of Artificial Sequence: Synthetic oligonucleotide
caggcccucgaaccaacag

SEQ ID NO: 1315814 - RNA, 19 nt, Artificial Sequence
  Description of Artificial Sequence: Synthetic oligonucleotide
ucuaggcgugggcuccuac

SEQ ID NO: 1315815 - RNA, 19 nt, Artificial Sequence
  Description of Artificial Sequence: Synthetic oligonucleotide
caguuauguuauagacuuc

SEQ ID NO: 1315816 - RNA, 19 nt, Artificial Sequence
  Description of Artificial Sequence: Synthetic oligonucleotide
gguauuguuguaagcaucu

SEQ ID NO: 1315817 - RNA, 19 nt, Artificial Sequence
  Description of Artificial Sequence: Synthetic oligonucleotide
gauguauguguuguccagu

SEQ ID NO: 1315818 - RNA, 19 nt, Artificial Sequence
  Description of Artificial Sequence: Synthetic oligonucleotide
aaugaacuccauggcuauu

SEQ ID NO: 1315819 - RNA, 19 nt, Artificial Sequence
  Description of Artificial Sequence: Synthetic oligonucleotide
caucugaccuccagguuaa

SEQ ID NO: 1315820 - RNA, 19 nt, Artificial Sequence
  Description of Artificial Sequence: Synthetic oligonucleotide
aggauaccccauccaucug

SEQ ID NO: 1315821 - RNA, 19 nt, Artificial Sequence
  Description of Artificial Sequence: Synthetic oligonucleotide
aucccaggcccucgaacca

SEQ ID NO: 1315822 - RNA, 19 nt, Artificial Sequence
  Description of Artificial Sequence: Synthetic oligonucleotide
gcaguaaggauaccccauc

SEQ ID NO: 1315823 - RNA, 19 nt, Artificial Sequence
  Description of Artificial Sequence: Synthetic oligonucleotide
ggcccucgaaccaacagug

SEQ ID NO: 1315824 - RNA, 19 nt, Artificial Sequence
  Description of Artificial Sequence: Synthetic oligonucleotide
cacgugggagaucaucaca

SEQ ID NO: 1315825 - RNA, 19 nt, Artificial Sequence
  Description of Artificial Sequence: Synthetic oligonucleotide
gauucagacuugaccacgu

SEQ ID NO: 1315826 - RNA, 19 nt, Artificial Sequence
  Description of Artificial Sequence: Synthetic oligonucleotide
caauauucgagaccagcau

SEQ ID NO: 1315827 - RNA, 19 nt, Artificial Sequence
  Description of Artificial Sequence: Synthetic oligonucleotide
acacaagcauagguauugu

SEQ ID NO: 1315828 - RNA, 19 nt, Artificial Sequence
  Description of Artificial Sequence: Synthetic oligonucleotide
gaccacgugggagaucauc

SEQ ID NO: 1315829 - RNA, 19 nt, Artificial Sequence
  Description of Artificial Sequence: Synthetic oligonucleotide
ggauugaagaguucgucau

SEQ ID NO: 1315830 - RNA, 19 nt, Artificial Sequence
  Description of Artificial Sequence: Synthetic oligonucleotide
aguucgucauuggagucuu

SEQ ID NO: 1315831 - RNA, 19 nt, Artificial Sequence
  Description of Artificial Sequence: Synthetic oligonucleotide
gcuucgagaaccuucucgu

SEQ ID NO: 1315832 - RNA, 19 nt, Artificial Sequence
  Description of Artificial Sequence: Synthetic oligonucleotide
gucuauuggcaaagagaac

SEQ ID NO: 1315833 - RNA, 19 nt, Artificial Sequence
  Description of Artificial Sequence: Synthetic oligonucleotide
agucaauauucgagaccag

SEQ ID NO: 1315834 - RNA, 19 nt, Artificial Sequence
  Description of Artificial Sequence: Synthetic oligonucleotide
ucgggucggugacguuacg

SEQ ID NO: 1315835 - RNA, 19 nt, Artificial Sequence
  Description of Artificial Sequence: Synthetic oligonucleotide
cacacagucagggaaacau

SEQ ID NO: 1315836 - RNA, 19 nt, Artificial Sequence
  Description of Artificial Sequence: Synthetic oligonucleotide
gaguggggcgccggagugg

SEQ ID NO: 1315837 - RNA, 19 nt, Artificial Sequence
  Description of Artificial Sequence: Synthetic oligonucleotide
gaguucgucauuggagucu

SEQ ID NO: 1315838 - RNA, 19 nt, Artificial Sequence
  Description of Artificial Sequence: Synthetic oligonucleotide
caccgaaguuguugggguc

SEQ ID NO: 1315839 - RNA, 19 nt, Artificial Sequence
  Description of Artificial Sequence: Synthetic oligonucleotide
gucucucaguaucaccgaa

SEQ ID NO: 1315840 - RNA, 19 nt, Artificial Sequence
  Description of Artificial Sequence: Synthetic oligonucleotide
ucggugacguuacggccuu

SEQ ID NO: 1315841 - RNA, 19 nt, Artificial Sequence
  Description of Artificial Sequence: Synthetic oligonucleotide
ugugcccacccaagaugaa

SEQ ID NO: 1315842 - RNA, 19 nt, Artificial Sequence
  Description of Artificial Sequence: Synthetic oligonucleotide
uauucgagaccagcaucuu

SEQ ID NO: 1315843 - RNA, 19 nt, Artificial Sequence
  Description of Artificial Sequence: Synthetic oligonucleotide
guuauguuauagacuucua

SEQ ID NO: 1315844 - RNA, 19 nt, Artificial Sequence
  Description of Artificial Sequence: Synthetic oligonucleotide
gccagugcuuguucguccc

SEQ ID NO: 1315845 - RNA, 19 nt, Artificial Sequence
  Description of Artificial Sequence: Synthetic oligonucleotide
gugcaaggauccaacugca

SEQ ID NO: 1315846 - RNA, 19 nt, Artificial Sequence
  Description of Artificial Sequence: Synthetic oligonucleotide
gccauccaaucucuuuacc

SEQ ID NO: 1315847 - RNA, 19 nt, Artificial Sequence
  Description of Artificial Sequence: Synthetic oligonucleotide
cgagagcagaguuugccac

SEQ ID NO: 1315848 - RNA, 19 nt, Artificial Sequence
  Description of Artificial Sequence: Synthetic oligonucleotide
gggcaguaaggauacccca

SEQ ID NO: 1315849 - RNA, 19 nt, Artificial Sequence
  Description of Artificial Sequence: Synthetic oligonucleotide
aguggggcgccggagugga

SEQ ID NO: 1315850 - RNA, 19 nt, Artificial Sequence
  Description of Artificial Sequence: Synthetic oligonucleotide
cuccgaguuggacuuguaa

SEQ ID NO: 1315851 - RNA, 19 nt, Artificial Sequence
  Description of Artificial Sequence: Synthetic oligonucleotide
gaagucagcugaccggguu

SEQ ID NO: 1315852 - RNA, 19 nt, Artificial Sequence
  Description of Artificial Sequence: Synthetic oligonucleotide
ggacaggucgggucgguga

SEQ ID NO: 1315853 - RNA, 19 nt, Artificial Sequence
  Description of Artificial Sequence: Synthetic oligonucleotide
agggaaacauugagacacu

SEQ ID NO: 1315854 - RNA, 19 nt, Artificial Sequence
  Description of Artificial Sequence: Synthetic oligonucleotide
ccucacacaagcauaggua

SEQ ID NO: 1315855 - RNA, 19 nt, Artificial Sequence
  Description of Artificial Sequence: Synthetic oligonucleotide
gccuuuugucuauuggcaa

SEQ ID NO: 1315856 - RNA, 19 nt, Artificial Sequence
  Description of Artificial Sequence: Synthetic oligonucleotide
gccggaguggagaucauca

SEQ ID NO: 1315857 - RNA, 19 nt, Artificial Sequence
  Description of Artificial Sequence: Synthetic oligonucleotide
gugacguuacggccuucuc

SEQ ID NO: 1315858 - RNA, 19 nt, Artificial Sequence
  Description of Artificial Sequence: Synthetic oligonucleotide
cgucccauggauguugaag

SEQ ID NO: 1315859 - RNA, 19 nt, Artificial Sequence
  Description of Artificial Sequence: Synthetic oligonucleotide
gucgggucggugacguuac

SEQ ID NO: 1315860 - RNA, 19 nt, Artificial Sequence
  Description of Artificial Sequence: Synthetic oligonucleotide
aaccuguauccagggucaa

SEQ ID NO: 1315861 - RNA, 19 nt, Artificial Sequence
  Description of Artificial Sequence: Synthetic oligonucleotide
guauugccauuuaucucaa

SEQ ID NO: 1315862 - RNA, 19 nt, Artificial Sequence
  Description of Artificial Sequence: Synthetic oligonucleotide
uguucgucccauggauguu

SEQ ID NO: 1315863 - RNA, 19 nt, Artificial Sequence
  Description of Artificial Sequence: Synthetic oligonucleotide
uuguggggcccaagucaau

SEQ ID NO: 1315864 - RNA, 19 nt, Artificial Sequence
  Description of Artificial Sequence: Synthetic oligonucleotide
ggcgugggcuccuacuaca

SEQ ID NO: 1315865 - RNA, 19 nt, Artificial Sequence
  Description of Artificial Sequence: Synthetic oligonucleotide
ggcgccggaguggagauca

SEQ ID NO: 1315866 - RNA, 19 nt, Artificial Sequence
  Description of Artificial Sequence: Synthetic oligonucleotide
cugcgcccuuaaaguauug

SEQ ID NO: 1315867 - RNA, 19 nt, Artificial Sequence
  Description of Artificial Sequence: Synthetic oligonucleotide
cgcccuuaaaguauugcca

SEQ ID NO: 1315868 - RNA, 19 nt, Artificial Sequence
  Description of Artificial Sequence: Synthetic oligonucleotide
cuaggcgugggcuccuacu

SEQ ID NO: 1315869 - RNA, 19 nt, Artificial Sequence
  Description of Artificial Sequence: Synthetic oligonucleotide
gacaucugaccuccagguu

SEQ ID NO: 1315870 - RNA, 19 nt, Artificial Sequence
  Description of Artificial Sequence: Synthetic oligonucleotide
agccggcaagguccaagau

SEQ ID NO: 1315871 - RNA, 19 nt, Artificial Sequence
  Description of Artificial Sequence: Synthetic oligonucleotide
ccucgaaccaacaguggaa

SEQ ID NO: 1315872 - RNA, 19 nt, Artificial Sequence
  Description of Artificial Sequence: Synthetic oligonucleotide
gcaauguuggugauuuggu

SEQ ID NO: 1315873 - RNA, 19 nt, Artificial Sequence
  Description of Artificial Sequence: Synthetic oligonucleotide
cucaacaguuauacagauu

SEQ ID NO: 1315874 - RNA, 19 nt, Artificial Sequence
  Description of Artificial Sequence: Synthetic oligonucleotide
acgcaucaucuaagaacug

SEQ ID NO: 1315875 - RNA, 19 nt, Artificial Sequence
  Description of Artificial Sequence: Synthetic oligonucleotide
uucggcagguuggcccaga

SEQ ID NO: 1315876 - RNA, 19 nt, Artificial Sequence
  Description of Artificial Sequence: Synthetic oligonucleotide
gugaguggggcgccggagu

SEQ ID NO: 1315877 - RNA, 19 nt, Artificial Sequence
  Description of Artificial Sequence: Synthetic oligonucleotide
ccgagagcagaguuugcca

SEQ ID NO: 1315878 - RNA, 19 nt, Artificial Sequence
  Description of Artificial Sequence: Synthetic oligonucleotide
cguuacggccuucuccuug

SEQ ID NO: 1315879 - RNA, 19 nt, Artificial Sequence
  Description of Artificial Sequence: Synthetic oligonucleotide
guaaaggaaugaacuccau

SEQ ID NO: 1315880 - RNA, 19 nt, Artificial Sequence
  Description of Artificial Sequence: Synthetic oligonucleotide
gcuacagagggugcuucga

SEQ ID NO: 1315881 - RNA, 19 nt, Artificial Sequence
  Description of Artificial Sequence: Synthetic oligonucleotide
ggaguucggcagguuggcc

SEQ ID NO: 1315882 - RNA, 19 nt, Artificial Sequence
  Description of Artificial Sequence: Synthetic oligonucleotide
aucugaccuccagguuaag

SEQ ID NO: 1315883 - RNA, 19 nt, Artificial Sequence
  Description of Artificial Sequence: Synthetic oligonucleotide
gcccucgaaccaacagugg

SEQ ID NO: 1315884 - RNA, 19 nt, Artificial Sequence
  Description of Artificial Sequence: Synthetic oligonucleotide
guggggcccaagucaauau

SEQ ID NO: 1315885 - RNA, 19 nt, Artificial Sequence
  Description of Artificial Sequence: Synthetic oligonucleotide
ggucgggucggugacguua

SEQ ID NO: 1315886 - RNA, 19 nt, Artificial Sequence
  Description of Artificial Sequence: Synthetic oligonucleotide
acguuacggccuucuccuu

SEQ ID NO: 1315887 - RNA, 19 nt, Artificial Sequence
  Description of Artificial Sequence: Synthetic oligonucleotide
guucggcagguuggcccag

SEQ ID NO: 1315888 - RNA, 19 nt, Artificial Sequence
  Description of Artificial Sequence: Synthetic oligonucleotide
cguucugaugcugccauga

SEQ ID NO: 1315889 - RNA, 19 nt, Artificial Sequence
  Description of Artificial Sequence: Synthetic oligonucleotide
cuucgagaaccuucucguu

SEQ ID NO: 1315890 - RNA, 19 nt, Artificial Sequence
  Description of Artificial Sequence: Synthetic oligonucleotide
gcucuggaucuauaguuuu

SEQ ID NO: 1315891 - RNA, 19 nt, Artificial Sequence
  Description of Artificial Sequence: Synthetic oligonucleotide
ggugacguuacggccuucu

SEQ ID NO: 1315892 - RNA, 19 nt, Artificial Sequence
  Description of Artificial Sequence: Synthetic oligonucleotide
cgggucggugacguuacgg

SEQ ID NO: 1315893 - RNA, 19 nt, Artificial Sequence
  Description of Artificial Sequence: Synthetic oligonucleotide
cagcugaccggguuauuuu

SEQ ID NO: 1315894 - RNA, 19 nt, Artificial Sequence
  Description of Artificial Sequence: Synthetic oligonucleotide
cagaguuugccaccuccuu

SEQ ID NO: 1315895 - RNA, 19 nt, Artificial Sequence
  Description of Artificial Sequence: Synthetic oligonucleotide
gugucuuauucaggucaua

SEQ ID NO: 1315896 - RNA, 19 nt, Artificial Sequence
  Description of Artificial Sequence: Synthetic oligonucleotide
gacgcaggucaaaccugua

SEQ ID NO: 1315897 - RNA, 19 nt, Artificial Sequence
  Description of Artificial Sequence: Synthetic oligonucleotide
gggacauggagaggacaaa

SEQ ID NO: 1315898 - RNA, 19 nt, Artificial Sequence
  Description of Artificial Sequence: Synthetic oligonucleotide
gcguccucacacaagcaua

SEQ ID NO: 1315899 - RNA, 19 nt, Artificial Sequence
  Description of Artificial Sequence: Synthetic oligonucleotide
gccggcaagguccaagauu

SEQ ID NO: 1315900 - RNA, 19 nt, Artificial Sequence
  Description of Artificial Sequence: Synthetic oligonucleotide
caucaaccgauaguucauu

SEQ ID NO: 1315901 - RNA, 19 nt, Artificial Sequence
  Description of Artificial Sequence: Synthetic oligonucleotide
caucaaccgagagcagagu

SEQ ID NO: 1315902 - RNA, 19 nt, Artificial Sequence
  Description of Artificial Sequence: Synthetic oligonucleotide
cccaggcccucgaaccaac

SEQ ID NO: 1315903 - RNA, 19 nt, Artificial Sequence
  Description of Artificial Sequence: Synthetic oligonucleotide
agggugcuucgagaaccuu

SEQ ID NO: 1315904 - RNA, 19 nt, Artificial Sequence
  Description of Artificial Sequence: Synthetic oligonucleotide
cgugggcuccuacuacaac

SEQ ID NO: 1315905 - RNA, 19 nt, Artificial Sequence
  Description of Artificial Sequence: Synthetic oligonucleotide
caggucgggucggugacgu

SEQ ID NO: 1315906 - RNA, 19 nt, Artificial Sequence
  Description of Artificial Sequence: Synthetic oligonucleotide
ccucugggaucccuaaagu

SEQ ID NO: 1315907 - RNA, 19 nt, Artificial Sequence
  Description of Artificial Sequence: Synthetic oligonucleotide
cggaguggagaucaucaua

SEQ ID NO: 1315908 - RNA, 19 nt, Artificial Sequence
  Description of Artificial Sequence: Synthetic oligonucleotide
ggcugcuacagagggugcu

SEQ ID NO: 1315909 - RNA, 19 nt, Artificial Sequence
  Description of Artificial Sequence: Synthetic oligonucleotide
gccuaauuagccagugcuu

SEQ ID NO: 1315910 - RNA, 19 nt, Artificial Sequence
  Description of Artificial Sequence: Synthetic oligonucleotide
aggucgggucggugacguu

SEQ ID NO: 1315911 - RNA, 19 nt, Artificial Sequence
  Description of Artificial Sequence: Synthetic oligonucleotide
ggaagucagcugaccgggu

SEQ ID NO: 1315912 - RNA, 19 nt, Artificial Sequence
  Description of Artificial Sequence: Synthetic oligonucleotide
gcgugggcuccuacuacaa

SEQ ID NO: 1315913 - RNA, 19 nt, Artificial Sequence
  Description of Artificial Sequence: Synthetic oligonucleotide
cccuuaaaguauugccauu

SEQ ID NO: 1315914 - RNA, 19 nt, Artificial Sequence
  Description of Artificial Sequence: Synthetic oligonucleotide
cauagccggcaagguccaa

SEQ ID NO: 1315915 - RNA, 19 nt, Artificial Sequence
  Description of Artificial Sequence: Synthetic oligonucleotide
gcugcuacagagggugcuu

SEQ ID NO: 1315916 - RNA, 19 nt, Artificial Sequence
  Description of Artificial Sequence: Synthetic oligonucleotide
ccggugccauccaaucucu

SEQ ID NO: 1315917 - RNA, 19 nt, Artificial Sequence
  Description of Artificial Sequence: Synthetic oligonucleotide
cggagguauagaagaugua

SEQ ID NO: 1315918 - RNA, 19 nt, Artificial Sequence
  Description of Artificial Sequence: Synthetic oligonucleotide
cgacagcguccucacacaa

SEQ ID NO: 1315919 - RNA, 19 nt, Artificial Sequence
  Description of Artificial Sequence: Synthetic oligonucleotide
ccggaguggagaucaucau

SEQ ID NO: 1315920 - RNA, 19 nt, Artificial Sequence
  Description of Artificial Sequence: Synthetic oligonucleotide
gggcgccggaguggagauc

SEQ ID NO: 1315921 - RNA, 19 nt, Artificial Sequence
  Description of Artificial Sequence: Synthetic oligonucleotide
cggcaagguccaagauugu

SEQ ID NO: 1315922 - RNA, 19 nt, Artificial Sequence
  Description of Artificial Sequence: Synthetic oligonucleotide
cggugacguuacggccuuc

SEQ ID NO: 1315923 - RNA, 19 nt, Artificial Sequence
  Description of Artificial Sequence: Synthetic oligonucleotide
cggugccauccaaucucuu

SEQ ID NO: 1315924 - RNA, 19 nt, Artificial Sequence
  Description of Artificial Sequence: Synthetic oligonucleotide
gcgccggaguggagaucau

SEQ ID NO: 1315925 - RNA, 19 nt, Artificial Sequence
  Description of Artificial Sequence: Synthetic oligonucleotide
aaaagugcacaauagggac

SEQ ID NO: 1315926 - RNA, 19 nt, Artificial Sequence
  Description of Artificial Sequence: Synthetic oligonucleotide
aauaucagcagauccgugg

SEQ ID NO: 1315927 - RNA, 19 nt, Artificial Sequence
  Description of Artificial Sequence: Synthetic oligonucleotide
aauacuguugucaaugauc

SEQ ID NO: 1315928 - RNA, 19 nt, Artificial Sequence
  Description of Artificial Sequence: Synthetic oligonucleotide
ugaagucuggcacaggagg

SEQ ID NO: 1315929 - RNA, 19 nt, Artificial Sequence
  Description of Artificial Sequence: Synthetic oligonucleotide
aagauggucuaaccuaggc

SEQ ID NO: 1315930 - RNA, 19 nt, Artificial Sequence
  Description of Artificial Sequence: Synthetic oligonucleotide
uccaauaucaccuggguac

SEQ ID NO: 1315931 - RNA, 19 nt, Artificial Sequence
  Description of Artificial Sequence: Synthetic oligonucleotide
uguauucagugacagagcc

SEQ ID NO: 1315932 - RNA, 19 nt, Artificial Sequence
  Description of Artificial Sequence: Synthetic oligonucleotide
cuuguauucagugacagag

SEQ ID NO: 1315933 - RNA, 19 nt, Artificial Sequence
  Description of Artificial Sequence: Synthetic oligonucleotide
auacuguugucaaugaucc

SEQ ID NO: 1315934 - RNA, 19 nt, Artificial Sequence
  Description of Artificial Sequence: Synthetic oligonucleotide
uuuaaggugagcagguuca

SEQ ID NO: 1315935 - RNA, 19 nt, Artificial Sequence
  Description of Artificial Sequence: Synthetic oligonucleotide
uguugagagaguacagugg

SEQ ID NO: 1315936 - RNA, 19 nt, Artificial Sequence
  Description of Artificial Sequence: Synthetic oligonucleotide
uagauagagagauaggggu

SEQ ID NO: 1315937 - RNA, 19 nt, Artificial Sequence
  Description of Artificial Sequence: Synthetic oligonucleotide
aauaucaccuggguacugc

SEQ ID NO: 1315938 - RNA, 19 nt, Artificial Sequence
  Description of Artificial Sequence: Synthetic oligonucleotide
aguugagcauuucacauag

SEQ ID NO: 1315939 - RNA, 19 nt, Artificial Sequence
  Description of Artificial Sequence: Synthetic oligonucleotide
ugagacacucucauuagcc

SEQ ID NO: 1315940 - RNA, 19 nt, Artificial Sequence
  Description of Artificial Sequence: Synthetic oligonucleotide
ucauuagccccaaugaaga

SEQ ID NO: 1315941 - RNA, 19 nt, Artificial Sequence
  Description of Artificial Sequence: Synthetic oligonucleotide
aauagacacaucuggcuca

SEQ ID NO: 1315942 - RNA, 19 nt, Artificial Sequence
  Description of Artificial Sequence: Synthetic oligonucleotide
gauacuugcugggagaucc

SEQ ID NO: 1315943 - RNA, 19 nt, Artificial Sequence
  Description of Artificial Sequence: Synthetic oligonucleotide
aagacuggucucuacagca

SEQ ID NO: 1315944 - RNA, 19 nt, Artificial Sequence
  Description of Artificial Sequence: Synthetic oligonucleotide
agacacucucauuagcccc

SEQ ID NO: 1315945 - RNA, 19 nt, Artificial Sequence
  Description of Artificial Sequence: Synthetic oligonucleotide
agagauaggggucaucuug

SEQ ID NO: 1315946 - RNA, 19 nt, Artificial Sequence
  Description of Artificial Sequence: Synthetic oligonucleotide
uguaguugagcauuucaca

SEQ ID NO: 1315947 - RNA, 19 nt, Artificial Sequence
  Description of Artificial Sequence: Synthetic oligonucleotide
ucagagguagcaaggagug

SEQ ID NO: 1315948 - RNA, 19 nt, Artificial Sequence
  Description of Artificial Sequence: Synthetic oligonucleotide
ugaccuuugugccuaagca

SEQ ID NO: 1315949 - RNA, 19 nt, Artificial Sequence
  Description of Artificial Sequence: Synthetic oligonucleotide
ugcacaauagggacagggg

SEQ ID NO: 1315950 - RNA, 19 nt, Artificial Sequence
  Description of Artificial Sequence: Synthetic oligonucleotide
ucaccaacagguuaagcug

SEQ ID NO: 1315951 - RNA, 19 nt, Artificial Sequence
  Description of Artificial Sequence: Synthetic oligonucleotide
uggauaugcagcuuugcug

SEQ ID NO: 1315952 - RNA, 19 nt, Artificial Sequence
  Description of Artificial Sequence: Synthetic oligonucleotide
uguguaguugagcauuuca

SEQ ID NO: 1315953 - RNA, 19 nt, Artificial Sequence
  Description of Artificial Sequence: Synthetic oligonucleotide
ugugccuggauagacagag

SEQ ID NO: 1315954 - RNA, 19 nt, Artificial Sequence
  Description of Artificial Sequence: Synthetic oligonucleotide
ucucuauucuacuauucca

SEQ ID NO: 1315955 - RNA, 19 nt, Artificial Sequence
  Description of Artificial Sequence: Synthetic oligonucleotide
auuagccccaaugaagagc

SEQ ID NO: 1315956 - RNA, 19 nt, Artificial Sequence
  Description of Artificial Sequence: Synthetic oligonucleotide
uaacagugaagucuggcac

SEQ ID NO: 1315957 - RNA, 19 nt, Artificial Sequence
  Description of Artificial Sequence: Synthetic oligonucleotide
ucuaaccuaggcaugcucu

SEQ ID NO: 1315958 - RNA, 19 nt, Artificial Sequence
  Description of Artificial Sequence: Synthetic oligonucleotide
aaguagauggcgaaacauc

SEQ ID NO: 1315959 - RNA, 19 nt, Artificial Sequence
  Description of Artificial Sequence: Synthetic oligonucleotide
gauccgugggcaaagaaag

SEQ ID NO: 1315960 - RNA, 19 nt, Artificial Sequence
  Description of Artificial Sequence: Synthetic oligonucleotide
auagauagagagauagggg

SEQ ID NO: 1315961 - RNA, 19 nt, Artificial Sequence
  Description of Artificial Sequence: Synthetic oligonucleotide
uccguguugggguaaacag

SEQ ID NO: 1315962 - RNA, 19 nt, Artificial Sequence
  Description of Artificial Sequence: Synthetic oligonucleotide
uuagggugugccuggauag

SEQ ID NO: 1315963 - RNA, 19 nt, Artificial Sequence
  Description of Artificial Sequence: Synthetic oligonucleotide
gaaacauccaauaucaccu

SEQ ID NO: 1315964 - RNA, 19 nt, Artificial Sequence
  Description of Artificial Sequence: Synthetic oligonucleotide
ucuauucuacuauuccagc

SEQ ID NO: 1315965 - RNA, 19 nt, Artificial Sequence
  Description of Artificial Sequence: Synthetic oligonucleotide
uggccuaagguauucuggg

SEQ ID NO: 1315966 - RNA, 19 nt, Artificial Sequence
  Description of Artificial Sequence: Synthetic oligonucleotide
cugaauagacacaucuggc

SEQ ID NO: 1315967 - RNA, 19 nt, Artificial Sequence
  Description of Artificial Sequence: Synthetic oligonucleotide
aagugcacaauagggacag

SEQ ID NO: 1315968 - RNA, 19 nt, Artificial Sequence
  Description of Artificial Sequence: Synthetic oligonucleotide
agugggaacacucgcugac

SEQ ID NO: 1315969 - RNA, 19 nt, Artificial Sequence
  Description of Artificial Sequence: Synthetic oligonucleotide
gaauagacacaucuggcuc

SEQ ID NO: 1315970 - RNA, 19 nt, Artificial Sequence
  Description of Artificial Sequence: Synthetic oligonucleotide
gucacaaucuccuccacug

SEQ ID NO: 1315971 - RNA, 19 nt, Artificial Sequence
  Description of Artificial Sequence: Synthetic oligonucleotide
aaggcuuguccucugagau

SEQ ID NO: 1315972 - RNA, 19 nt, Artificial Sequence
  Description of Artificial Sequence: Synthetic oligonucleotide
ugagcauuucacauagggu

SEQ ID NO: 1315973 - RNA, 19 nt, Artificial Sequence
  Description of Artificial Sequence: Synthetic oligonucleotide
gauccguuucaccaacagg

SEQ ID NO: 1315974 - RNA, 19 nt, Artificial Sequence
  Description of Artificial Sequence: Synthetic oligonucleotide
agagucuagugccaagauc

SEQ ID NO: 1315975 - RNA, 19 nt, Artificial Sequence
  Description of Artificial Sequence: Synthetic oligonucleotide
cucucuauucuacuauucc

SEQ ID NO: 1315976 - RNA, 19 nt, Artificial Sequence
  Description of Artificial Sequence: Synthetic oligonucleotide
gauagacagagcuguuucc

SEQ ID NO: 1315977 - RNA, 19 nt, Artificial Sequence
  Description of Artificial Sequence: Synthetic oligonucleotide
uggcacaucaaugaauuug

SEQ ID NO: 1315978 - RNA, 19 nt, Artificial Sequence
  Description of Artificial Sequence: Synthetic oligonucleotide
ugugccuaagcaguucugg

SEQ ID NO: 1315979 - RNA, 19 nt, Artificial Sequence
  Description of Artificial Sequence: Synthetic oligonucleotide
agagaguacaguggagugc

SEQ ID NO: 1315980 - RNA, 19 nt, Artificial Sequence
  Description of Artificial Sequence: Synthetic oligonucleotide
uucuacuauuccagcaugc

SEQ ID NO: 1315981 - RNA, 19 nt, Artificial Sequence
  Description of Artificial Sequence: Synthetic oligonucleotide
uuugugccuaagcaguucu

SEQ ID NO: 1315982 - RNA, 19 nt, Artificial Sequence
  Description of Artificial Sequence: Synthetic oligonucleotide
gaccuuugugccuaagcag

SEQ ID NO: 1315983 - RNA, 19 nt, Artificial Sequence
  Description of Artificial Sequence: Synthetic oligonucleotide
aguauugucugagcaugcc

SEQ ID NO: 1315984 - RNA, 19 nt, Artificial Sequence
  Description of Artificial Sequence: Synthetic oligonucleotide
agucacuaaugccaagcuc

SEQ ID NO: 1315985 - RNA, 19 nt, Artificial Sequence
  Description of Artificial Sequence: Synthetic oligonucleotide
uucagugagacacucucau

SEQ ID NO: 1315986 - RNA, 19 nt, Artificial Sequence
  Description of Artificial Sequence: Synthetic oligonucleotide
agugacagagccagggacc

SEQ ID NO: 1315987 - RNA, 19 nt, Artificial Sequence
  Description of Artificial Sequence: Synthetic oligonucleotide
aggaaguagauggcgaaac

SEQ ID NO: 1315988 - RNA, 19 nt, Artificial Sequence
  Description of Artificial Sequence: Synthetic oligonucleotide
uugaccuuugugccuaagc

SEQ ID NO: 1315989 - RNA, 19 nt, Artificial Sequence
  Description of Artificial Sequence: Synthetic oligonucleotide
auccguuucaccaacaggu

SEQ ID NO: 1315990 - RNA, 19 nt, Artificial Sequence
  Description of Artificial Sequence: Synthetic oligonucleotide
aagaggaagggcagcuugc

SEQ ID NO: 1315991 - RNA, 19 nt, Artificial Sequence
  Description of Artificial Sequence: Synthetic oligonucleotide
acagggguugggcugggcc

SEQ ID NO: 1315992 - RNA, 19 nt, Artificial Sequence
  Description of Artificial Sequence: Synthetic oligonucleotide
ugguagcugucacugaccc

SEQ ID NO: 1315993 - RNA, 19 nt, Artificial Sequence
  Description of Artificial Sequence: Synthetic oligonucleotide
uuggacuaucagaaggaug

SEQ ID NO: 1315994 - RNA, 19 nt, Artificial Sequence
  Description of Artificial Sequence: Synthetic oligonucleotide
guguugagagaguacagug

SEQ ID NO: 1315995 - RNA, 19 nt, Artificial Sequence
  Description of Artificial Sequence: Synthetic oligonucleotide
uacaguggagugcaggccu

SEQ ID NO: 1315996 - RNA, 19 nt, Artificial Sequence
  Description of Artificial Sequence: Synthetic oligonucleotide
aauccacuggccuaaggua

SEQ ID NO: 1315997 - RNA, 19 nt, Artificial Sequence
  Description of Artificial Sequence: Synthetic oligonucleotide
ucucauuagccccaaugaa

SEQ ID NO: 1315998 - RNA, 19 nt, Artificial Sequence
  Description of Artificial Sequence: Synthetic oligonucleotide
gagacacucucauuagccc

SEQ ID NO: 1315999 - RNA, 19 nt, Artificial Sequence
  Description of Artificial Sequence: Synthetic oligonucleotide
acaguauugucugagcaug

SEQ ID NO: 1316000 - RNA, 19 nt, Artificial Sequence
  Description of Artificial Sequence: Synthetic oligonucleotide
auucuacuauuccagcaug

SEQ ID NO: 1316001 - RNA, 19 nt, Artificial Sequence
  Description of Artificial Sequence: Synthetic oligonucleotide
acagguuaagcuguuccac

SEQ ID NO: 1316002 - RNA, 19 nt, Artificial Sequence
  Description of Artificial Sequence: Synthetic oligonucleotide
uagauggcgaaacauccaa

SEQ ID NO: 1316003 - RNA, 19 nt, Artificial Sequence
  Description of Artificial Sequence: Synthetic oligonucleotide
agaccccucauccugaaga

SEQ ID NO: 1316004 - RNA, 19 nt, Artificial Sequence
  Description of Artificial Sequence: Synthetic oligonucleotide
cuggccuaagguauucugg

SEQ ID NO: 1316005 - RNA, 19 nt, Artificial Sequence
  Description of Artificial Sequence: Synthetic oligonucleotide
aggguuggcacaucaauga

SEQ ID NO: 1316006 - RNA, 19 nt, Artificial Sequence
  Description of Artificial Sequence: Synthetic oligonucleotide
gagagaguacaguggagug

SEQ ID NO: 1316007 - RNA, 19 nt, Artificial Sequence
  Description of Artificial Sequence: Synthetic oligonucleotide
uggcgaaacauccaauauc

SEQ ID NO: 1316008 - RNA, 19 nt, Artificial Sequence
  Description of Artificial Sequence: Synthetic oligonucleotide
gaagacuggucucuacagc

SEQ ID NO: 1316009 - RNA, 19 nt, Artificial Sequence
  Description of Artificial Sequence: Synthetic oligonucleotide
agauggucuaaccuaggca

SEQ ID NO: 1316010 - RNA, 19 nt, Artificial Sequence
  Description of Artificial Sequence: Synthetic oligonucleotide
agagagauaggggucaucu

SEQ ID NO: 1316011 - RNA, 19 nt, Artificial Sequence
  Description of Artificial Sequence: Synthetic oligonucleotide
cuuuaaggugagcagguuc

SEQ ID NO: 1316012 - RNA, 19 nt, Artificial Sequence
  Description of Artificial Sequence: Synthetic oligonucleotide
ugggaaauacuguugucaa

SEQ ID NO: 1316013 - RNA, 19 nt, Artificial Sequence
  Description of Artificial Sequence: Synthetic oligonucleotide
gauggucuaaccuaggcau

SEQ ID NO: 1316014 - RNA, 19 nt, Artificial Sequence
  Description of Artificial Sequence: Synthetic oligonucleotide
ugcucuggagucacuaaug

SEQ ID NO: 1316015 - RNA, 19 nt, Artificial Sequence
  Description of Artificial Sequence: Synthetic oligonucleotide
guugggcugggccugaaag

SEQ ID NO: 1316016 - RNA, 19 nt, Artificial Sequence
  Description of Artificial Sequence: Synthetic oligonucleotide
uccucugagaucugggcca

SEQ ID NO: 1316017 - RNA, 19 nt, Artificial Sequence
  Description of Artificial Sequence: Synthetic oligonucleotide
gaagucuggcacaggaggg

SEQ ID NO: 1316018 - RNA, 19 nt, Artificial Sequence
  Description of Artificial Sequence: Synthetic oligonucleotide
agcacgaacaguauugucu

SEQ ID NO: 1316019 - RNA, 19 nt, Artificial Sequence
  Description of Artificial Sequence: Synthetic oligonucleotide
cagcauauaggugaugggc

SEQ ID NO: 1316020 - RNA, 19 nt, Artificial Sequence
  Description of Artificial Sequence: Synthetic oligonucleotide
aguuguugccuccugaaua

SEQ ID NO: 1316021 - RNA, 19 nt, Artificial Sequence
  Description of Artificial Sequence: Synthetic oligonucleotide
cuaggcaugcucuggaguc

SEQ ID NO: 1316022 - RNA, 19 nt, Artificial Sequence
  Description of Artificial Sequence: Synthetic oligonucleotide
gagucuagugccaagaucu

SEQ ID NO: 1316023 - RNA, 19 nt, Artificial Sequence
  Description of Artificial Sequence: Synthetic oligonucleotide
ggaacuggccagcauauag

SEQ ID NO: 1316024 - RNA, 19 nt, Artificial Sequence
  Description of Artificial Sequence: Synthetic oligonucleotide
ugucacugacccuuggacu

SEQ ID NO: 1316025 - RNA, 19 nt, Artificial Sequence
  Description of Artificial Sequence: Synthetic oligonucleotide
aauagggacagggguuggg

SEQ ID NO: 1316026 - RNA, 19 nt, Artificial Sequence
  Description of Artificial Sequence: Synthetic oligonucleotide
gauagagagauagggguca

SEQ ID NO: 1316027 - RNA, 19 nt, Artificial Sequence
  Description of Artificial Sequence: Synthetic oligonucleotide
agauccguuucaccaacag

SEQ ID NO: 1316028 - RNA, 19 nt, Artificial Sequence
  Description of Artificial Sequence: Synthetic oligonucleotide
ucauaacagugaagucugg

SEQ ID NO: 1316029 - RNA, 19 nt, Artificial Sequence
  Description of Artificial Sequence: Synthetic oligonucleotide
aucuuguauucagugacag

SEQ ID NO: 1316030 - RNA, 19 nt, Artificial Sequence
  Description of Artificial Sequence: Synthetic oligonucleotide
auaggguuggcacaucaau

SEQ ID NO: 1316031 - RNA, 19 nt, Artificial Sequence
  Description of Artificial Sequence: Synthetic oligonucleotide
ucaucuugacuccguguug

SEQ ID NO: 1316032 - RNA, 19 nt, Artificial Sequence
  Description of Artificial Sequence: Synthetic oligonucleotide
ucuacuauuccagcaugca

SEQ ID NO: 1316033 - RNA, 19 nt, Artificial Sequence
  Description of Artificial Sequence: Synthetic oligonucleotide
gaaaccacacaagcccugg

SEQ ID NO: 1316034 - RNA, 19 nt, Artificial Sequence
  Description of Artificial Sequence: Synthetic oligonucleotide
aggccauugcugcaggauc

SEQ ID NO: 1316035 - RNA, 19 nt, Artificial Sequence
  Description of Artificial Sequence: Synthetic oligonucleotide
gugcacaauagggacaggg

SEQ ID NO: 1316036 - RNA, 19 nt, Artificial Sequence
  Description of Artificial Sequence: Synthetic oligonucleotide
gcugcaaagggauuucucc

SEQ ID NO: 1316037 - RNA, 19 nt, Artificial Sequence
  Description of Artificial Sequence: Synthetic oligonucleotide
aaagaaagcuucagugaga

SEQ ID NO: 1316038 - RNA, 19 nt, Artificial Sequence
  Description of Artificial Sequence: Synthetic oligonucleotide
cagguuaagcuguuccacc

SEQ ID NO: 1316039 - RNA, 19 nt, Artificial Sequence
  Description of Artificial Sequence: Synthetic oligonucleotide
ucuucauaacagugaaguc

SEQ ID NO: 1316040 - RNA, 19 nt, Artificial Sequence
  Description of Artificial Sequence: Synthetic oligonucleotide
aggguagugcuguggugcc

SEQ ID NO: 1316041 - RNA, 19 nt, Artificial Sequence
  Description of Artificial Sequence: Synthetic oligonucleotide
agauaggggucaucuugac

SEQ ID NO: 1316042 - RNA, 19 nt, Artificial Sequence
  Description of Artificial Sequence: Synthetic oligonucleotide
cuauucuacuauuccagca

SEQ ID NO: 1316043 - RNA, 19 nt, Artificial Sequence
  Description of Artificial Sequence: Synthetic oligonucleotide
cuucccgcagaugucaucc

SEQ ID NO: 1316044 - RNA, 19 nt, Artificial Sequence
  Description of Artificial Sequence: Synthetic oligonucleotide
cuaucagaaggaugcuggc

SEQ ID NO: 1316045 - RNA, 19 nt, Artificial Sequence
  Description of Artificial Sequence: Synthetic oligonucleotide
aaagugcacaauagggaca

SEQ ID NO: 1316046 - RNA, 19 nt, Artificial Sequence
  Description of Artificial Sequence: Synthetic oligonucleotide
uccugaagauggucuaacc

SEQ ID NO: 1316047 - RNA, 19 nt, Artificial Sequence
  Description of Artificial Sequence: Synthetic oligonucleotide
ucuucaucaggugggagaa

SEQ ID NO: 1316048 - RNA, 19 nt, Artificial Sequence
  Description of Artificial Sequence: Synthetic oligonucleotide
acugcuagccagcaggcau

SEQ ID NO: 1316049 - RNA, 19 nt, Artificial Sequence
  Description of Artificial Sequence: Synthetic oligonucleotide
ucuuguauucagugacaga

SEQ ID NO: 1316050 - RNA, 19 nt, Artificial Sequence
  Description of Artificial Sequence: Synthetic oligonucleotide
acuggccuaagguauucug

SEQ ID NO: 1316051 - RNA, 19 nt, Artificial Sequence
  Description of Artificial Sequence: Synthetic oligonucleotide
cucuggagucacuaaugcc

SEQ ID NO: 1316052 - RNA, 19 nt, Artificial Sequence
  Description of Artificial Sequence: Synthetic oligonucleotide
guaaacagccuguccuugc

SEQ ID NO: 1316053 - RNA, 19 nt, Artificial Sequence
  Description of Artificial Sequence: Synthetic oligonucleotide
gcaaggaguguugagagag

SEQ ID NO: 1316054 - RNA, 19 nt, Artificial Sequence
  Description of Artificial Sequence: Synthetic oligonucleotide
uggugccuggauaugcagc

SEQ ID NO: 1316055 - RNA, 19 nt, Artificial Sequence
  Description of Artificial Sequence: Synthetic oligonucleotide
agucuugacacagaccccu

SEQ ID NO: 1316056 - RNA, 19 nt, Artificial Sequence
  Description of Artificial Sequence: Synthetic oligonucleotide
cuaaccuaggcaugcucug

SEQ ID NO: 1316057 - RNA, 19 nt, Artificial Sequence
  Description of Artificial Sequence: Synthetic oligonucleotide
aagugggaacacucgcuga

SEQ ID NO: 1316058 - RNA, 19 nt, Artificial Sequence
  Description of Artificial Sequence: Synthetic oligonucleotide
caggcaugccacuucacug

SEQ ID NO: 1316059 - RNA, 19 nt, Artificial Sequence
  Description of Artificial Sequence: Synthetic oligonucleotide
uggucuaaccuaggcaugc

SEQ ID NO: 1316060 - RNA, 19 nt, Artificial Sequence
  Description of Artificial Sequence: Synthetic oligonucleotide
uccuccacuggccggaaac

SEQ ID NO: 1316061 - RNA, 19 nt, Artificial Sequence
  Description of Artificial Sequence: Synthetic oligonucleotide
ggaagacuggucucuacag

SEQ ID NO: 1316062 - RNA, 19 nt, Artificial Sequence
  Description of Artificial Sequence: Synthetic oligonucleotide
uguuggagccuaucuuccc

SEQ ID NO: 1316063 - RNA, 19 nt, Artificial Sequence
  Description of Artificial Sequence: Synthetic oligonucleotide
caggguagugcuguggugc

SEQ ID NO: 1316064 - RNA, 19 nt, Artificial Sequence
  Description of Artificial Sequence: Synthetic oligonucleotide
ucacugcuagccagcaggc

SEQ ID NO: 1316065 - RNA, 19 nt, Artificial Sequence
  Description of Artificial Sequence: Synthetic oligonucleotide
auugucugagcaugccaug

SEQ ID NO: 1316066 - RNA, 19 nt, Artificial Sequence
  Description of Artificial Sequence: Synthetic oligonucleotide
gacccuuggacuaucagaa

SEQ ID NO: 1316067 - RNA, 19 nt, Artificial Sequence
  Description of Artificial Sequence: Synthetic oligonucleotide
ccggaaaccacacaagccc

SEQ ID NO: 1316068 - RNA, 19 nt, Artificial Sequence
  Description of Artificial Sequence: Synthetic oligonucleotide
gucacuaaugccaagcucu

SEQ ID NO: 1316069 - RNA, 19 nt, Artificial Sequence
  Description of Artificial Sequence: Synthetic oligonucleotide
cacaagcccuggaaggagg

SEQ ID NO: 1316070 - RNA, 19 nt, Artificial Sequence
  Description of Artificial Sequence: Synthetic oligonucleotide
ggcgaaacauccaauauca

SEQ ID NO: 1316071 - RNA, 19 nt, Artificial Sequence
  Description of Artificial Sequence: Synthetic oligonucleotide
ucaucaggugggagaagca

SEQ ID NO: 1316072 - RNA, 19 nt, Artificial Sequence
  Description of Artificial Sequence: Synthetic oligonucleotide
agagagcacuuugaagagg

SEQ ID NO: 1316073 - RNA, 19 nt, Artificial Sequence
  Description of Artificial Sequence: Synthetic oligonucleotide
auggcgaaacauccaauau

SEQ ID NO: 1316074 - RNA, 19 nt, Artificial Sequence
  Description of Artificial Sequence: Synthetic oligonucleotide
aggcaugccacuucacugu

SEQ ID NO: 1316075 - RNA, 19 nt, Artificial Sequence
  Description of Artificial Sequence: Synthetic oligonucleotide
ucacuaaugccaagcucuc

SEQ ID NO: 1316076 - RNA, 19 nt, Artificial Sequence
  Description of Artificial Sequence: Synthetic oligonucleotide
gagcaugccaugcacucca

SEQ ID NO: 1316077 - RNA, 19 nt, Artificial Sequence
  Description of Artificial Sequence: Synthetic oligonucleotide
caguauugucugagcaugc

SEQ ID NO: 1316078 - RNA, 19 nt, Artificial Sequence
  Description of Artificial Sequence: Synthetic oligonucleotide
cagugggucacugcuagcc

SEQ ID NO: 1316079 - RNA, 19 nt, Artificial Sequence
  Description of Artificial Sequence: Synthetic oligonucleotide
agagguagcaaggaguguu

SEQ ID NO: 1316080 - RNA, 19 nt, Artificial Sequence
  Description of Artificial Sequence: Synthetic oligonucleotide
cauuagccccaaugaagag

SEQ ID NO: 1316081 - RNA, 19 nt, Artificial Sequence
  Description of Artificial Sequence: Synthetic oligonucleotide
cccuuggacuaucagaagg

SEQ ID NO: 1316082 - RNA, 19 nt, Artificial Sequence
  Description of Artificial Sequence: Synthetic oligonucleotide
aaggaguguugagagagua

SEQ ID NO: 1316083 - RNA, 19 nt, Artificial Sequence
  Description of Artificial Sequence: Synthetic oligonucleotide
uuaaggugagcagguucag

SEQ ID NO: 1316084 - RNA, 19 nt, Artificial Sequence
  Description of Artificial Sequence: Synthetic oligonucleotide
cagugagacacucucauua

SEQ ID NO: 1316085 - RNA, 19 nt, Artificial Sequence
  Description of Artificial Sequence: Synthetic oligonucleotide
gaacucaggcaccuucuuc

SEQ ID NO: 1316086 - RNA, 19 nt, Artificial Sequence
  Description of Artificial Sequence: Synthetic oligonucleotide
ugcaaagggauuucuccuu

SEQ ID NO: 1316087 - RNA, 19 nt, Artificial Sequence
  Description of Artificial Sequence: Synthetic oligonucleotide
cggaauaucagcagauccg

SEQ ID NO: 1316088 - RNA, 19 nt, Artificial Sequence
  Description of Artificial Sequence: Synthetic oligonucleotide
uugacacagaccccucauc

SEQ ID NO: 1316089 - RNA, 19 nt, Artificial Sequence
  Description of Artificial Sequence: Synthetic oligonucleotide
gccuaagcaguucugguug

SEQ ID NO: 1316090 - RNA, 19 nt, Artificial Sequence
  Description of Artificial Sequence: Synthetic oligonucleotide
guaguugagcauuucacau

SEQ ID NO: 1316091 - RNA, 19 nt, Artificial Sequence
  Description of Artificial Sequence: Synthetic oligonucleotide
cuccuuguuagggugugcc

SEQ ID NO: 1316092 - RNA, 19 nt, Artificial Sequence
  Description of Artificial Sequence: Synthetic oligonucleotide
caucaggugggagaagcag

SEQ ID NO: 1316093 - RNA, 19 nt, Artificial Sequence
  Description of Artificial Sequence: Synthetic oligonucleotide
gcauauaggugaugggcag

SEQ ID NO: 1316094 - RNA, 19 nt, Artificial Sequence
  Description of Artificial Sequence: Synthetic oligonucleotide
uaggggucaucuugacucc

SEQ ID NO: 1316095 - RNA, 19 nt, Artificial Sequence
  Description of Artificial Sequence: Synthetic oligonucleotide
gugggucacugcuagccag

SEQ ID NO: 1316096 - RNA, 19 nt, Artificial Sequence
  Description of Artificial Sequence: Synthetic oligonucleotide
ggagucacuaaugccaagc

SEQ ID NO: 1316097 - RNA, 19 nt, Artificial Sequence
  Description of Artificial Sequence: Synthetic oligonucleotide
auuugggugucaggccagc

SEQ ID NO: 1316098 - RNA, 19 nt, Artificial Sequence
  Description of Artificial Sequence: Synthetic oligonucleotide
ccggaauaucagcagaucc

SEQ ID NO: 1316099 - RNA, 19 nt, Artificial Sequence
  Description of Artificial Sequence: Synthetic oligonucleotide
cugagaucugggccagugg

SEQ ID NO: 1316100 - RNA, 19 nt, Artificial Sequence
  Description of Artificial Sequence: Synthetic oligonucleotide
uccacuggccggaaaccac

SEQ ID NO: 1316101 - RNA, 19 nt, Artificial Sequence
  Description of Artificial Sequence: Synthetic oligonucleotide
agggugugccuggauagac

SEQ ID NO: 1316102 - RNA, 19 nt, Artificial Sequence
  Description of Artificial Sequence: Synthetic oligonucleotide
caucaaugaauuugggugu

SEQ ID NO: 1316103 - RNA, 19 nt, Artificial Sequence
  Description of Artificial Sequence: Synthetic oligonucleotide
cugcauaaggcuuguccuc

SEQ ID NO: 1316104 - RNA, 19 nt, Artificial Sequence
  Description of Artificial Sequence: Synthetic oligonucleotide
aagucuggcacaggagggu

SEQ ID NO: 1316105 - RNA, 19 nt, Artificial Sequence
  Description of Artificial Sequence: Synthetic oligonucleotide
gaauaucagcagauccgug

SEQ ID NO: 1316106 - RNA, 19 nt, Artificial Sequence
  Description of Artificial Sequence: Synthetic oligonucleotide
aggaguguugagagaguac

SEQ ID NO: 1316107 - RNA, 19 nt, Artificial Sequence
  Description of Artificial Sequence: Synthetic oligonucleotide
ucaaugaauuuggguguca

SEQ ID NO: 1316108 - RNA, 19 nt, Artificial Sequence
  Description of Artificial Sequence: Synthetic oligonucleotide
uugugccuaagcaguucug

SEQ ID NO: 1316109 - RNA, 19 nt, Artificial Sequence
  Description of Artificial Sequence: Synthetic oligonucleotide
ccacacaagcccuggaagg

SEQ ID NO: 1316110 - RNA, 19 nt, Artificial Sequence
  Description of Artificial Sequence: Synthetic oligonucleotide
ucacauaggguuggcacau

SEQ ID NO: 1316111 - RNA, 19 nt, Artificial Sequence
  Description of Artificial Sequence: Synthetic oligonucleotide
ugccuaagcaguucugguu

SEQ ID NO: 1316112 - RNA, 19 nt, Artificial Sequence
  Description of Artificial Sequence: Synthetic oligonucleotide
gaucuuguauucagugaca

SEQ ID NO: 1316113 - RNA, 19 nt, Artificial Sequence
  Description of Artificial Sequence: Synthetic oligonucleotide
auccaauaucaccugggua

SEQ ID NO: 1316114 - RNA, 19 nt, Artificial Sequence
  Description of Artificial Sequence: Synthetic oligonucleotide
uagugccaagaucuuguau

SEQ ID NO: 1316115 - RNA, 19 nt, Artificial Sequence
  Description of Artificial Sequence: Synthetic oligonucleotide
ugagcaugccaugcacucc

SEQ ID NO: 1316116 - RNA, 19 nt, Artificial Sequence
  Description of Artificial Sequence: Synthetic oligonucleotide
gucacugacccuuggacua

SEQ ID NO: 1316117 - RNA, 19 nt, Artificial Sequence
  Description of Artificial Sequence: Synthetic oligonucleotide
augcucuggagucacuaau

SEQ ID NO: 1316118 - RNA, 19 nt, Artificial Sequence
  Description of Artificial Sequence: Synthetic oligonucleotide
guuagggugugccuggaua

SEQ ID NO: 1316119 - RNA, 19 nt, Artificial Sequence
  Description of Artificial Sequence: Synthetic oligonucleotide
agugggucacugcuagcca

SEQ ID NO: 1316120 - RNA, 19 nt, Artificial Sequence
  Description of Artificial Sequence: Synthetic oligonucleotide
uaagguauucugggaaaua

SEQ ID NO: 1316121 - RNA, 19 nt, Artificial Sequence
  Description of Artificial Sequence: Synthetic oligonucleotide
gagguagcaaggaguguug

SEQ ID NO: 1316122 - RNA, 19 nt, Artificial Sequence
  Description of Artificial Sequence: Synthetic oligonucleotide
gcucuggagucacuaaugc

SEQ ID NO: 1316123 - RNA, 19 nt, Artificial Sequence
  Description of Artificial Sequence: Synthetic oligonucleotide
agucuggcacaggaggguc

SEQ ID NO: 1316124 - RNA, 19 nt, Artificial Sequence
  Description of Artificial Sequence: Synthetic oligonucleotide
uccuuguuagggugugccu

SEQ ID NO: 1316125 - RNA, 19 nt, Artificial Sequence
  Description of Artificial Sequence: Synthetic oligonucleotide
auuucacauaggguuggca

SEQ ID NO: 1316126 - RNA, 19 nt, Artificial Sequence
  Description of Artificial Sequence: Synthetic oligonucleotide
cugggagauccguuucacc

SEQ ID NO: 1316127 - RNA, 19 nt, Artificial Sequence
  Description of Artificial Sequence: Synthetic oligonucleotide
cuugacuccguguuggggu

SEQ ID NO: 1316128 - RNA, 19 nt, Artificial Sequence
  Description of Artificial Sequence: Synthetic oligonucleotide
agcucucuauucuacuauu

SEQ ID NO: 1316129 - RNA, 19 nt, Artificial Sequence
  Description of Artificial Sequence: Synthetic oligonucleotide
cacaucaaugaauuugggu

SEQ ID NO: 1316130 - RNA, 19 nt, Artificial Sequence
  Description of Artificial Sequence: Synthetic oligonucleotide
agcaaggaguguugagaga

SEQ ID NO: 1316131 - RNA, 19 nt, Artificial Sequence
  Description of Artificial Sequence: Synthetic oligonucleotide
cucaggcaccuucuucagg

SEQ ID NO: 1316132 - RNA, 19 nt, Artificial Sequence
  Description of Artificial Sequence: Synthetic oligonucleotide
gaaguagauggcgaaacau

SEQ ID NO: 1316133 - RNA, 19 nt, Artificial Sequence
  Description of Artificial Sequence: Synthetic oligonucleotide
cugcuagccagcaggcaug

SEQ ID NO: 1316134 - RNA, 19 nt, Artificial Sequence
  Description of Artificial Sequence: Synthetic oligonucleotide
ggaacacucgcugacucgc

SEQ ID NO: 1316135 - RNA, 19 nt, Artificial Sequence
  Description of Artificial Sequence: Synthetic oligonucleotide
uccguuucaccaacagguu

SEQ ID NO: 1316136 - RNA, 19 nt, Artificial Sequence
  Description of Artificial Sequence: Synthetic oligonucleotide
auccgugggcaaagaaagc

SEQ ID NO: 1316137 - RNA, 19 nt, Artificial Sequence
  Description of Artificial Sequence: Synthetic oligonucleotide
agcagauccgugggcaaag

SEQ ID NO: 1316138 - RNA, 19 nt, Artificial Sequence
  Description of Artificial Sequence: Synthetic oligonucleotide
cauugcugcaggaucccca

SEQ ID NO: 1316139 - RNA, 19 nt, Artificial Sequence
  Description of Artificial Sequence: Synthetic oligonucleotide
agauacuugcugggagauc

SEQ ID NO: 1316140 - RNA, 19 nt, Artificial Sequence
  Description of Artificial Sequence: Synthetic oligonucleotide
uagguguguaguugagcau

SEQ ID NO: 1316141 - RNA, 19 nt, Artificial Sequence
  Description of Artificial Sequence: Synthetic oligonucleotide
uggauagacagagcuguuu

SEQ ID NO: 1316142 - RNA, 19 nt, Artificial Sequence
  Description of Artificial Sequence: Synthetic oligonucleotide
gugaagucuggcacaggag

SEQ ID NO: 1316143 - RNA, 19 nt, Artificial Sequence
  Description of Artificial Sequence: Synthetic oligonucleotide
gcaaagggauuucuccuug

SEQ ID NO: 1316144 - RNA, 19 nt, Artificial Sequence
  Description of Artificial Sequence: Synthetic oligonucleotide
gggaacacucgcugacucg

SEQ ID NO: 1316145 - RNA, 19 nt, Artificial Sequence
  Description of Artificial Sequence: Synthetic oligonucleotide
gaaagugggaacacucgcu

SEQ ID NO: 1316146 - RNA, 19 nt, Artificial Sequence
  Description of Artificial Sequence: Synthetic oligonucleotide
caauccacuggccuaaggu

SEQ ID NO: 1316147 - RNA, 19 nt, Artificial Sequence
  Description of Artificial Sequence: Synthetic oligonucleotide
uggggcagaguuguugccu

SEQ ID NO: 1316148 - RNA, 19 nt, Artificial Sequence
  Description of Artificial Sequence: Synthetic oligonucleotide
gccagcacgaacaguauug

SEQ ID NO: 1316149 - RNA, 19 nt, Artificial Sequence
  Description of Artificial Sequence: Synthetic oligonucleotide
gauaggggucaucuugacu

SEQ ID NO: 1316150 - RNA, 19 nt, Artificial Sequence
  Description of Artificial Sequence: Synthetic oligonucleotide
gagucacuaaugccaagcu

SEQ ID NO: 1316151 - RNA, 19 nt, Artificial Sequence
  Description of Artificial Sequence: Synthetic oligonucleotide
aggcaugcucuggagucac

SEQ ID NO: 1316152 - RNA, 19 nt, Artificial Sequence
  Description of Artificial Sequence: Synthetic oligonucleotide
ugggaagacuggucucuac

SEQ ID NO: 1316153 - RNA, 19 nt, Artificial Sequence
  Description of Artificial Sequence: Synthetic oligonucleotide
gucuaaccuaggcaugcuc

SEQ ID NO: 1316154 - RNA, 19 nt, Artificial Sequence
  Description of Artificial Sequence: Synthetic oligonucleotide
caguuccucaaagcagagg

SEQ ID NO: 1316155 - RNA, 19 nt, Artificial Sequence
  Description of Artificial Sequence: Synthetic oligonucleotide
ugccaagcucucuauucua

SEQ ID NO: 1316156 - RNA, 19 nt, Artificial Sequence
  Description of Artificial Sequence: Synthetic oligonucleotide
uugacuccguguuggggua

SEQ ID NO: 1316157 - RNA, 19 nt, Artificial Sequence
  Description of Artificial Sequence: Synthetic oligonucleotide
guuggcacaucaaugaauu

SEQ ID NO: 1316158 - RNA, 19 nt, Artificial Sequence
  Description of Artificial Sequence: Synthetic oligonucleotide
aagggcagcuugccauuaa

SEQ ID NO: 1316159 - RNA, 19 nt, Artificial Sequence
  Description of Artificial Sequence: Synthetic oligonucleotide
gccugaaagguggaacugg

SEQ ID NO: 1316160 - RNA, 19 nt, Artificial Sequence
  Description of Artificial Sequence: Synthetic oligonucleotide
gggguaaacagccuguccu

SEQ ID NO: 1316161 - RNA, 19 nt, Artificial Sequence
  Description of Artificial Sequence: Synthetic oligonucleotide
cauuucacauaggguuggc

SEQ ID NO: 1316162 - RNA, 19 nt, Artificial Sequence
  Description of Artificial Sequence: Synthetic oligonucleotide
uaggcaugcucuggaguca

SEQ ID NO: 1316163 - RNA, 19 nt, Artificial Sequence
  Description of Artificial Sequence: Synthetic oligonucleotide
ggagauccguuucaccaac

SEQ ID NO: 1316164 - RNA, 19 nt, Artificial Sequence
  Description of Artificial Sequence: Synthetic oligonucleotide
ccagcauauaggugauggg

SEQ ID NO: 1316165 - RNA, 19 nt, Artificial Sequence
  Description of Artificial Sequence: Synthetic oligonucleotide
gcaccacacaggaaagugg

SEQ ID NO: 1316166 - RNA, 19 nt, Artificial Sequence
  Description of Artificial Sequence: Synthetic oligonucleotide
uccacuggccuaagguauu

SEQ ID NO: 1316167 - RNA, 19 nt, Artificial Sequence
  Description of Artificial Sequence: Synthetic oligonucleotide
ugugggugugguagcuguc

SEQ ID NO: 1316168 - RNA, 19 nt, Artificial Sequence
  Description of Artificial Sequence: Synthetic oligonucleotide
caggcauacugcugcacca

SEQ ID NO: 1316169 - RNA, 19 nt, Artificial Sequence
  Description of Artificial Sequence: Synthetic oligonucleotide
caaccagggacuggaacuc

SEQ ID NO: 1316170 - RNA, 19 nt, Artificial Sequence
  Description of Artificial Sequence: Synthetic oligonucleotide
gggaagacuggucucuaca

SEQ ID NO: 1316171 - RNA, 19 nt, Artificial Sequence
  Description of Artificial Sequence: Synthetic oligonucleotide
ucccgcagaugucauccau

SEQ ID NO: 1316172 - RNA, 19 nt, Artificial Sequence
  Description of Artificial Sequence: Synthetic oligonucleotide
uauaggugaugggcagaga

SEQ ID NO: 1316173 - RNA, 19 nt, Artificial Sequence
  Description of Artificial Sequence: Synthetic oligonucleotide
caaagggauuucuccuuga

SEQ ID NO: 1316174 - RNA, 19 nt, Artificial Sequence
  Description of Artificial Sequence: Synthetic oligonucleotide
agcuugccauuaaaggugu

SEQ ID NO: 1316175 - RNA, 19 nt, Artificial Sequence
  Description of Artificial Sequence: Synthetic oligonucleotide
cuggagucacuaaugccaa

SEQ ID NO: 1316176 - RNA, 19 nt, Artificial Sequence
  Description of Artificial Sequence: Synthetic oligonucleotide
ccguguugggguaaacagc

SEQ ID NO: 1316177 - RNA, 19 nt, Artificial Sequence
  Description of Artificial Sequence: Synthetic oligonucleotide
gguaaacagccuguccuug

SEQ ID NO: 1316178 - RNA, 19 nt, Artificial Sequence
  Description of Artificial Sequence: Synthetic oligonucleotide
cucgcugacucgccauccc

SEQ ID NO: 1316179 - RNA, 19 nt, Artificial Sequence
  Description of Artificial Sequence: Synthetic oligonucleotide
gcuugugguuggcaucagg

SEQ ID NO: 1316180 - RNA, 19 nt, Artificial Sequence
  Description of Artificial Sequence: Synthetic oligonucleotide
uacuugcugggagauccgu

SEQ ID NO: 1316181 - RNA, 19 nt, Artificial Sequence
  Description of Artificial Sequence: Synthetic oligonucleotide
gugucaggccagcacgaac

SEQ ID NO: 1316182 - RNA, 19 nt, Artificial Sequence
  Description of Artificial Sequence: Synthetic oligonucleotide
guauucagugacagagcca

SEQ ID NO: 1316183 - RNA, 19 nt, Artificial Sequence
  Description of Artificial Sequence: Synthetic oligonucleotide
cagcacgaacaguauuguc

SEQ ID NO: 1316184 - RNA, 19 nt, Artificial Sequence
  Description of Artificial Sequence: Synthetic oligonucleotide
gggucauagauagagagau

SEQ ID NO: 1316185 - RNA, 19 nt, Artificial Sequence
  Description of Artificial Sequence: Synthetic oligonucleotide
gccuaagguauucugggaa

SEQ ID NO: 1316186 - RNA, 19 nt, Artificial Sequence
  Description of Artificial Sequence: Synthetic oligonucleotide
cugcagcaagagcuucccg

SEQ ID NO: 1316187 - RNA, 19 nt, Artificial Sequence
  Description of Artificial Sequence: Synthetic oligonucleotide
ccuuggacuaucagaagga

SEQ ID NO: 1316188 - RNA, 19 nt, Artificial Sequence
  Description of Artificial Sequence: Synthetic oligonucleotide
cuugccauuaaaggugucu

SEQ ID NO: 1316189 - RNA, 19 nt, Artificial Sequence
  Description of Artificial Sequence: Synthetic oligonucleotide
ggccauugcugcaggaucc

SEQ ID NO: 1316190 - RNA, 19 nt, Artificial Sequence
  Description of Artificial Sequence: Synthetic oligonucleotide
gcaauccacuggccuaagg

SEQ ID NO: 1316191 - RNA, 19 nt, Artificial Sequence
  Description of Artificial Sequence: Synthetic oligonucleotide
acacucgcugacucgccau

SEQ ID NO: 1316192 - RNA, 19 nt, Artificial Sequence
  Description of Artificial Sequence: Synthetic oligonucleotide
cauauaggugaugggcaga

SEQ ID NO: 1316193 - RNA, 19 nt, Artificial Sequence
  Description of Artificial Sequence: Synthetic oligonucleotide
cgaacaguauugucugagc

SEQ ID NO: 1316194 - RNA, 19 nt, Artificial Sequence
  Description of Artificial Sequence: Synthetic oligonucleotide
acuggccggaaaccacaca

SEQ ID NO: 1316195 - RNA, 19 nt, Artificial Sequence
  Description of Artificial Sequence: Synthetic oligonucleotide
cacuggccggaaaccacac

SEQ ID NO: 1316196 - RNA, 19 nt, Artificial Sequence
  Description of Artificial Sequence: Synthetic oligonucleotide
ccuuguuagggugugccug

SEQ ID NO: 1316197 - RNA, 19 nt, Artificial Sequence
  Description of Artificial Sequence: Synthetic oligonucleotide
caauaucaccuggguacug

SEQ ID NO: 1316198 - RNA, 19 nt, Artificial Sequence
  Description of Artificial Sequence: Synthetic oligonucleotide
uucccgcagaugucaucca

SEQ ID NO: 1316199 - RNA, 19 nt, Artificial Sequence
  Description of Artificial Sequence: Synthetic oligonucleotide
cauccaauaucaccugggu

SEQ ID NO: 1316200 - RNA, 19 nt, Artificial Sequence
  Description of Artificial Sequence: Synthetic oligonucleotide
gccggaaaccacacaagcc

SEQ ID NO: 1316201 - RNA, 19 nt, Artificial Sequence
  Description of Artificial Sequence: Synthetic oligonucleotide
gggagaagcaguuccucaa

SEQ ID NO: 1316202 - RNA, 19 nt, Artificial Sequence
  Description of Artificial Sequence: Synthetic oligonucleotide
acuggccagcauauaggug

SEQ ID NO: 1316203 - RNA, 19 nt, Artificial Sequence
  Description of Artificial Sequence: Synthetic oligonucleotide
ggaauaucagcagauccgu

SEQ ID NO: 1316204 - RNA, 19 nt, Artificial Sequence
  Description of Artificial Sequence: Synthetic oligonucleotide
cacaauagggacagggguu

SEQ ID NO: 1316205 - RNA, 19 nt, Artificial Sequence
  Description of Artificial Sequence: Synthetic oligonucleotide
caugcucuggagucacuaa

SEQ ID NO: 1316206 - RNA, 19 nt, Artificial Sequence
  Description of Artificial Sequence: Synthetic oligonucleotide
gcuagguguguaguugagc

SEQ ID NO: 1316207 - RNA, 19 nt, Artificial Sequence
  Description of Artificial Sequence: Synthetic oligonucleotide
cacagaccccucauccuga

SEQ ID NO: 1316208 - RNA, 19 nt, Artificial Sequence
  Description of Artificial Sequence: Synthetic oligonucleotide
aggugucuuugaccuuugu

SEQ ID NO: 1316209 - RNA, 19 nt, Artificial Sequence
  Description of Artificial Sequence: Synthetic oligonucleotide
acuccguguugggguaaac

SEQ ID NO: 1316210 - RNA, 19 nt, Artificial Sequence
  Description of Artificial Sequence: Synthetic oligonucleotide
agugcacaauagggacagg

SEQ ID NO: 1316211 - RNA, 19 nt, Artificial Sequence
  Description of Artificial Sequence: Synthetic oligonucleotide
auagagagauaggggucau

SEQ ID NO: 1316212 - RNA, 19 nt, Artificial Sequence
  Description of Artificial Sequence: Synthetic oligonucleotide
ggaaaccacacaagcccug

SEQ ID NO: 1316213 - RNA, 19 nt, Artificial Sequence
  Description of Artificial Sequence: Synthetic oligonucleotide
agauggcgaaacauccaau

SEQ ID NO: 1316214 - RNA, 19 nt, Artificial Sequence
  Description of Artificial Sequence: Synthetic oligonucleotide
gcauggggcacauuggccu

SEQ ID NO: 1316215 - RNA, 19 nt, Artificial Sequence
  Description of Artificial Sequence: Synthetic oligonucleotide
ggagaagcaguuccucaaa

SEQ ID NO: 1316216 - RNA, 19 nt, Artificial Sequence
  Description of Artificial Sequence: Synthetic oligonucleotide
acagaccccucauccugaa

SEQ ID NO: 1316217 - RNA, 19 nt, Artificial Sequence
  Description of Artificial Sequence: Synthetic oligonucleotide
agggaccuccaucuucaua

SEQ ID NO: 1316218 - RNA, 19 nt, Artificial Sequence
  Description of Artificial Sequence: Synthetic oligonucleotide
ucacugacccuuggacuau

SEQ ID NO: 1316219 - RNA, 19 nt, Artificial Sequence
  Description of Artificial Sequence: Synthetic oligonucleotide
gaguuguugccuccugaau

SEQ ID NO: 1316220 - RNA, 19 nt, Artificial Sequence
  Description of Artificial Sequence: Synthetic oligonucleotide
cuguccuugcuggggcuag

SEQ ID NO: 1316221 - RNA, 19 nt, Artificial Sequence
  Description of Artificial Sequence: Synthetic oligonucleotide
cuccguguugggguaaaca

SEQ ID NO: 1316222 - RNA, 19 nt, Artificial Sequence
  Description of Artificial Sequence: Synthetic oligonucleotide
cauccacagcucugcauaa

SEQ ID NO: 1316223 - RNA, 19 nt, Artificial Sequence
  Description of Artificial Sequence: Synthetic oligonucleotide
cacucgcugacucgccauc

SEQ ID NO: 1316224 - RNA, 19 nt, Artificial Sequence
  Description of Artificial Sequence: Synthetic oligonucleotide
gagauccguuucaccaaca

SEQ ID NO: 1316225 - RNA, 19 nt, Artificial Sequence
  Description of Artificial Sequence: Synthetic oligonucleotide
cacgcugcaaagggauuuc

SEQ ID NO: 1316226 - RNA, 19 nt, Artificial Sequence
  Description of Artificial Sequence: Synthetic oligonucleotide
gggcuagguguguaguuga

SEQ ID NO: 1316227 - RNA, 19 nt, Artificial Sequence
  Description of Artificial Sequence: Synthetic oligonucleotide
ccuaagguauucugggaaa

SEQ ID NO: 1316228 - RNA, 19 nt, Artificial Sequence
  Description of Artificial Sequence: Synthetic oligonucleotide
cacgaacaguauugucuga

SEQ ID NO: 1316229 - RNA, 19 nt, Artificial Sequence
  Description of Artificial Sequence: Synthetic oligonucleotide
agcaugccaugcacuccac

SEQ ID NO: 1316230 - RNA, 19 nt, Artificial Sequence
  Description of Artificial Sequence: Synthetic oligonucleotide
cagcaggcaugccacuuca

SEQ ID NO: 1316231 - RNA, 19 nt, Artificial Sequence
  Description of Artificial Sequence: Synthetic oligonucleotide
gugccuaagcaguucuggu

SEQ ID NO: 1316232 - RNA, 19 nt, Artificial Sequence
  Description of Artificial Sequence: Synthetic oligonucleotide
cugugggugugguagcugu

SEQ ID NO: 1316233 - RNA, 19 nt, Artificial Sequence
  Description of Artificial Sequence: Synthetic oligonucleotide
cguuucaccaacagguuaa

SEQ ID NO: 1316234 - RNA, 19 nt, Artificial Sequence
  Description of Artificial Sequence: Synthetic oligonucleotide
ugagggcaauggccauuuc

SEQ ID NO: 1316235 - RNA, 19 nt, Artificial Sequence
  Description of Artificial Sequence: Synthetic oligonucleotide
gggagauccguuucaccaa

SEQ ID NO: 1316236 - RNA, 19 nt, Artificial Sequence
  Description of Artificial Sequence: Synthetic oligonucleotide
gcugucacugacccuugga

SEQ ID NO: 1316237 - RNA, 19 nt, Artificial Sequence
  Description of Artificial Sequence: Synthetic oligonucleotide
agcaauccacuggccuaag

SEQ ID NO: 1316238 - RNA, 19 nt, Artificial Sequence
  Description of Artificial Sequence: Synthetic oligonucleotide
ggccuaagguauucuggga

SEQ ID NO: 1316239 - RNA, 19 nt, Artificial Sequence
  Description of Artificial Sequence: Synthetic oligonucleotide
cccgcagaugucauccaug

SEQ ID NO: 1316240 - RNA, 19 nt, Artificial Sequence
  Description of Artificial Sequence: Synthetic oligonucleotide
gccaagcucucuauucuac

SEQ ID NO: 1316241 - RNA, 19 nt, Artificial Sequence
  Description of Artificial Sequence: Synthetic oligonucleotide
gaccccucauccugaagau

SEQ ID NO: 1316242 - RNA, 19 nt, Artificial Sequence
  Description of Artificial Sequence: Synthetic oligonucleotide
gcauacugcugcaccacac

SEQ ID NO: 1316243 - RNA, 19 nt, Artificial Sequence
  Description of Artificial Sequence: Synthetic oligonucleotide
cuaagguauucugggaaau

SEQ ID NO: 1316244 - RNA, 19 nt, Artificial Sequence
  Description of Artificial Sequence: Synthetic oligonucleotide
caagagcuucccgcagaug

SEQ ID NO: 1316245 - RNA, 19 nt, Artificial Sequence
  Description of Artificial Sequence: Synthetic oligonucleotide
ggccugaaagguggaacug

SEQ ID NO: 1316246 - RNA, 19 nt, Artificial Sequence
  Description of Artificial Sequence: Synthetic oligonucleotide
cagauccgugggcaaagaa

SEQ ID NO: 1316247 - RNA, 19 nt, Artificial Sequence
  Description of Artificial Sequence: Synthetic oligonucleotide
gagagauaggggucaucuu

SEQ ID NO: 1316248 - RNA, 19 nt, Artificial Sequence
  Description of Artificial Sequence: Synthetic oligonucleotide
caccacgcugcaaagggau

SEQ ID NO: 1316249 - RNA, 19 nt, Artificial Sequence
  Description of Artificial Sequence: Synthetic oligonucleotide
gggccugaaagguggaacu

SEQ ID NO: 1316250 - RNA, 19 nt, Artificial Sequence
  Description of Artificial Sequence: Synthetic oligonucleotide
caggaaguagauggcgaaa

SEQ ID NO: 1316251 - RNA, 19 nt, Artificial Sequence
  Description of Artificial Sequence: Synthetic oligonucleotide
ggguuggcacaucaaugaa

SEQ ID NO: 1316252 - RNA, 19 nt, Artificial Sequence
  Description of Artificial Sequence: Synthetic oligonucleotide
ggcucagagguagcaagga

SEQ ID NO: 1316253 - RNA, 19 nt, Artificial Sequence
  Description of Artificial Sequence: Synthetic oligonucleotide
ggauuucuccuugaacugu

SEQ ID NO: 1316254 - RNA, 19 nt, Artificial Sequence
  Description of Artificial Sequence: Synthetic oligonucleotide
cccggcuuuaaggugagca

SEQ ID NO: 1316255 - RNA, 19 nt, Artificial Sequence
  Description of Artificial Sequence: Synthetic oligonucleotide
agucuagugccaagaucuu

SEQ ID NO: 1316256 - RNA, 19 nt, Artificial Sequence
  Description of Artificial Sequence: Synthetic oligonucleotide
gaagggcagcuugccauua

SEQ ID NO: 1316257 - RNA, 19 nt, Artificial Sequence
  Description of Artificial Sequence: Synthetic oligonucleotide
ggacuggaacucaggcacc

SEQ ID NO: 1316258 - RNA, 19 nt, Artificial Sequence
  Description of Artificial Sequence: Synthetic oligonucleotide
caaggaguguugagagagu

SEQ ID NO: 1316259 - RNA, 19 nt, Artificial Sequence
  Description of Artificial Sequence: Synthetic oligonucleotide
ugacuccguguugggguaa

SEQ ID NO: 1316260 - RNA, 19 nt, Artificial Sequence
  Description of Artificial Sequence: Synthetic oligonucleotide
gacagcaggcccggaauau

SEQ ID NO: 1316261 - RNA, 19 nt, Artificial Sequence
  Description of Artificial Sequence: Synthetic oligonucleotide
caggugggagaagcaguuc

SEQ ID NO: 1316262 - RNA, 19 nt, Artificial Sequence
  Description of Artificial Sequence: Synthetic oligonucleotide
cacuguuggagccuaucuu

SEQ ID NO: 1316263 - RNA, 19 nt, Artificial Sequence
  Description of Artificial Sequence: Synthetic oligonucleotide
cuuggacuaucagaaggau

SEQ ID NO: 1316264 - RNA, 19 nt, Artificial Sequence
  Description of Artificial Sequence: Synthetic oligonucleotide
gggugggaagacuggucuc

SEQ ID NO: 1316265 - RNA, 19 nt, Artificial Sequence
  Description of Artificial Sequence: Synthetic oligonucleotide
ggcuuuaaggugagcaggu

SEQ ID NO: 1316266 - RNA, 19 nt, Artificial Sequence
  Description of Artificial Sequence: Synthetic oligonucleotide
ggugggaagacuggucucu

SEQ ID NO: 1316267 - RNA, 19 nt, Artificial Sequence
  Description of Artificial Sequence: Synthetic oligonucleotide
cagggguugggcugggccu

SEQ ID NO: 1316268 - RNA, 19 nt, Artificial Sequence
  Description of Artificial Sequence: Synthetic oligonucleotide
ccccaaugaagagcacucc

SEQ ID NO: 1316269 - RNA, 19 nt, Artificial Sequence
  Description of Artificial Sequence: Synthetic oligonucleotide
cagacagcaggcccggaau

SEQ ID NO: 1316270 - RNA, 19 nt, Artificial Sequence
  Description of Artificial Sequence: Synthetic oligonucleotide
ccuccacuggccggaaacc

SEQ ID NO: 1316271 - RNA, 19 nt, Artificial Sequence
  Description of Artificial Sequence: Synthetic oligonucleotide
gguuggcacaucaaugaau

SEQ ID NO: 1316272 - RNA, 19 nt, Artificial Sequence
  Description of Artificial Sequence: Synthetic oligonucleotide
gcgaaacauccaauaucac

SEQ ID NO: 1316273 - RNA, 19 nt, Artificial Sequence
  Description of Artificial Sequence: Synthetic oligonucleotide
cacauaggguuggcacauc

SEQ ID NO: 1316274 - RNA, 19 nt, Artificial Sequence
  Description of Artificial Sequence: Synthetic oligonucleotide
cagagucuagugccaagau

SEQ ID NO: 1316275 - RNA, 19 nt, Artificial Sequence
  Description of Artificial Sequence: Synthetic oligonucleotide
gcuguuccguggcauccuc

SEQ ID NO: 1316276 - RNA, 19 nt, Artificial Sequence
  Description of Artificial Sequence: Synthetic oligonucleotide
ccaagaucuuguauucagu

SEQ ID NO: 1316277 - RNA, 19 nt, Artificial Sequence
  Description of Artificial Sequence: Synthetic oligonucleotide
caggagggucauagauaga

SEQ ID NO: 1316278 - RNA, 19 nt, Artificial Sequence
  Description of Artificial Sequence: Synthetic oligonucleotide
cuuugaccuuugugccuaa

SEQ ID NO: 1316279 - RNA, 19 nt, Artificial Sequence
  Description of Artificial Sequence: Synthetic oligonucleotide
gcaugccaugcacuccaca

SEQ ID NO: 1316280 - RNA, 19 nt, Artificial Sequence
  Description of Artificial Sequence: Synthetic oligonucleotide
caggcaccuucuucaggaa

SEQ ID NO: 1316281 - RNA, 19 nt, Artificial Sequence
  Description of Artificial Sequence: Synthetic oligonucleotide
ccagugggucacugcuagc

SEQ ID NO: 1316282 - RNA, 19 nt, Artificial Sequence
  Description of Artificial Sequence: Synthetic oligonucleotide
gggugugccuggauagaca

SEQ ID NO: 1316283 - RNA, 19 nt, Artificial Sequence
  Description of Artificial Sequence: Synthetic oligonucleotide
gcuucccgcagaugucauc

SEQ ID NO: 1316284 - RNA, 19 nt, Artificial Sequence
  Description of Artificial Sequence: Synthetic oligonucleotide
ggguaaacagccuguccuu

SEQ ID NO: 1316285 - RNA, 19 nt, Artificial Sequence
  Description of Artificial Sequence: Synthetic oligonucleotide
gugggaacacucgcugacu

SEQ ID NO: 1316286 - RNA, 19 nt, Artificial Sequence
  Description of Artificial Sequence: Synthetic oligonucleotide
cccggaauaucagcagauc

SEQ ID NO: 1316287 - RNA, 19 nt, Artificial Sequence
  Description of Artificial Sequence: Synthetic oligonucleotide
ccauugcugcaggaucccc

SEQ ID NO: 1316288 - RNA, 19 nt, Artificial Sequence
  Description of Artificial Sequence: Synthetic oligonucleotide
gcaugccacuucacuguug

SEQ ID NO: 1316289 - RNA, 19 nt, Artificial Sequence
  Description of Artificial Sequence: Synthetic oligonucleotide
cacugcuagccagcaggca

SEQ ID NO: 1316290 - RNA, 19 nt, Artificial Sequence
  Description of Artificial Sequence: Synthetic oligonucleotide
gcaugcucuggagucacua

SEQ ID NO: 1316291 - RNA, 19 nt, Artificial Sequence
  Description of Artificial Sequence: Synthetic oligonucleotide
ggucauagauagagagaua

SEQ ID NO: 1316292 - RNA, 19 nt, Artificial Sequence
  Description of Artificial Sequence: Synthetic oligonucleotide
gugagggcaauggccauuu

SEQ ID NO: 1316293 - RNA, 19 nt, Artificial Sequence
  Description of Artificial Sequence: Synthetic oligonucleotide
accacgcugcaaagggauu

SEQ ID NO: 1316294 - RNA, 19 nt, Artificial Sequence
  Description of Artificial Sequence: Synthetic oligonucleotide
cagcagauccgugggcaaa

SEQ ID NO: 1316295 - RNA, 19 nt, Artificial Sequence
  Description of Artificial Sequence: Synthetic oligonucleotide
ccguuucaccaacagguua

SEQ ID NO: 1316296 - RNA, 19 nt, Artificial Sequence
  Description of Artificial Sequence: Synthetic oligonucleotide
cagcuccuuguuagggugu

SEQ ID NO: 1316297 - RNA, 19 nt, Artificial Sequence
  Description of Artificial Sequence: Synthetic oligonucleotide
gcaagagcuucccgcagau

SEQ ID NO: 1316298 - RNA, 19 nt, Artificial Sequence
  Description of Artificial Sequence: Synthetic oligonucleotide
gugggaagacuggucucua

SEQ ID NO: 1316299 - RNA, 19 nt, Artificial Sequence
  Description of Artificial Sequence: Synthetic oligonucleotide
ccuaggcaugcucuggagu

SEQ ID NO: 1316300 - RNA, 19 nt, Artificial Sequence
  Description of Artificial Sequence: Synthetic oligonucleotide
cugggccugaaagguggaa

SEQ ID NO: 1316301 - RNA, 19 nt, Artificial Sequence
  Description of Artificial Sequence: Synthetic oligonucleotide
ccacuggccuaagguauuc

SEQ ID NO: 1316302 - RNA, 19 nt, Artificial Sequence
  Description of Artificial Sequence: Synthetic oligonucleotide
ggacuaucagaaggaugcu

SEQ ID NO: 1316303 - RNA, 19 nt, Artificial Sequence
  Description of Artificial Sequence: Synthetic oligonucleotide
gcagauccgugggcaaaga

SEQ ID NO: 1316304 - RNA, 19 nt, Artificial Sequence
  Description of Artificial Sequence: Synthetic oligonucleotide
ggccagcauauaggugaug

SEQ ID NO: 1316305 - RNA, 19 nt, Artificial Sequence
  Description of Artificial Sequence: Synthetic oligonucleotide
gguguguaguugagcauuu

SEQ ID NO: 1316306 - RNA, 19 nt, Artificial Sequence
  Description of Artificial Sequence: Synthetic oligonucleotide
ccaauaucaccuggguacu

SEQ ID NO: 1316307 - RNA, 19 nt, Artificial Sequence
  Description of Artificial Sequence: Synthetic oligonucleotide
gccucagucuugacacaga

SEQ ID NO: 1316308 - RNA, 19 nt, Artificial Sequence
  Description of Artificial Sequence: Synthetic oligonucleotide
ggucuaaccuaggcaugcu

SEQ ID NO: 1316309 - RNA, 19 nt, Artificial Sequence
  Description of Artificial Sequence: Synthetic oligonucleotide
gcuagccagcaggcaugcc

SEQ ID NO: 1316310 - RNA, 19 nt, Artificial Sequence
  Description of Artificial Sequence: Synthetic oligonucleotide
gcuugccauuaaagguguc

SEQ ID NO: 1316311 - RNA, 19 nt, Artificial Sequence
  Description of Artificial Sequence: Synthetic oligonucleotide
cacuggccuaagguauucu

SEQ ID NO: 1316312 - RNA, 19 nt, Artificial Sequence
  Description of Artificial Sequence: Synthetic oligonucleotide
ccagcacgaacaguauugu

SEQ ID NO: 1316313 - RNA, 19 nt, Artificial Sequence
  Description of Artificial Sequence: Synthetic oligonucleotide
gcccggaauaucagcagau

SEQ ID NO: 1316314 - RNA, 19 nt, Artificial Sequence
  Description of Artificial Sequence: Synthetic oligonucleotide
ccuuugugccuaagcaguu

SEQ ID NO: 1316315 - RNA, 19 nt, Artificial Sequence
  Description of Artificial Sequence: Synthetic oligonucleotide
gcuuuaaggugagcagguu

SEQ ID NO: 1316316 - RNA, 19 nt, Artificial Sequence
  Description of Artificial Sequence: Synthetic oligonucleotide
ggugagggcaauggccauu

SEQ ID NO: 1316317 - RNA, 19 nt, Artificial Sequence
  Description of Artificial Sequence: Synthetic oligonucleotide
ccacgcugcaaagggauuu

SEQ ID NO: 1316318 - RNA, 19 nt, Artificial Sequence
  Description of Artificial Sequence: Synthetic oligonucleotide
ggcaugcucuggagucacu

SEQ ID NO: 1316319 - RNA, 19 nt, Artificial Sequence
  Description of Artificial Sequence: Synthetic oligonucleotide
ccccggcuuuaaggugagc

SEQ ID NO: 1316320 - RNA, 19 nt, Artificial Sequence
  Description of Artificial Sequence: Synthetic oligonucleotide
aaagcuucaauacaguagc

SEQ ID NO: 1316321 - RNA, 19 nt, Artificial Sequence
  Description of Artificial Sequence: Synthetic oligonucleotide
aagacaauugauuaucacc

SEQ ID NO: 1316322 - RNA, 19 nt, Artificial Sequence
  Description of Artificial Sequence: Synthetic oligonucleotide
uccaauaucaucaaacugg

SEQ ID NO: 1316323 - RNA, 19 nt, Artificial Sequence
  Description of Artificial Sequence: Synthetic oligonucleotide
aauguuaugugcuaucaac

SEQ ID NO: 1316324 - RNA, 19 nt, Artificial Sequence
  Description of Artificial Sequence: Synthetic oligonucleotide
aauugauuaucaccuaagc

SEQ ID NO: 1316325 - RNA, 19 nt, Artificial Sequence
  Description of Artificial Sequence: Synthetic oligonucleotide
aaaguguuaacauuuaaga

SEQ ID NO: 1316326 - RNA, 19 nt, Artificial Sequence
  Description of Artificial Sequence: Synthetic oligonucleotide
uuaugugcuaucaacaucc

SEQ ID NO: 1316327 - RNA, 19 nt, Artificial Sequence
  Description of Artificial Sequence: Synthetic oligonucleotide
uuuaagauaacucaacauc

SEQ ID NO: 1316328 - RNA, 19 nt, Artificial Sequence
  Description of Artificial Sequence: Synthetic oligonucleotide
aauaucaucaaacuggauu

SEQ ID NO: 1316329 - RNA, 19 nt, Artificial Sequence
  Description of Artificial Sequence: Synthetic oligonucleotide
uuaacuuuaaccuaucuau

SEQ ID NO: 1316330 - RNA, 19 nt, Artificial Sequence
  Description of Artificial Sequence: Synthetic oligonucleotide
caugcaaagcauaaaaugg

SEQ ID NO: 1316331 - RNA, 19 nt, Artificial Sequence
  Description of Artificial Sequence: Synthetic oligonucleotide
ugugcuaucaacauccacc

SEQ ID NO: 1316332 - RNA, 19 nt, Artificial Sequence
  Description of Artificial Sequence: Synthetic oligonucleotide
uuuaauuucugcaaugacu

SEQ ID NO: 1316333 - RNA, 19 nt, Artificial Sequence
  Description of Artificial Sequence: Synthetic oligonucleotide
aaauguguccguuucauug

SEQ ID NO: 1316334 - RNA, 19 nt, Artificial Sequence
  Description of Artificial Sequence: Synthetic oligonucleotide
auuacauauaaacauuguc

SEQ ID NO: 1316335 - RNA, 19 nt, Artificial Sequence
  Description of Artificial Sequence: Synthetic oligonucleotide
uauuguauuucuaaaguca

SEQ ID NO: 1316336 - RNA, 19 nt, Artificial Sequence
  Description of Artificial Sequence: Synthetic oligonucleotide
aaaacucaaaacugcuagc

SEQ ID NO: 1316337 - RNA, 19 nt, Artificial Sequence
  Description of Artificial Sequence: Synthetic oligonucleotide
uuaagauaacucaacaucu

SEQ ID NO: 1316338 - RNA, 19 nt, Artificial Sequence
  Description of Artificial Sequence: Synthetic oligonucleotide
aguaucaaaacauauuucu

SEQ ID NO: 1316339 - RNA, 19 nt, Artificial Sequence
  Description of Artificial Sequence: Synthetic oligonucleotide
uuaaauuacucaaagcuuc

SEQ ID NO: 1316340 - RNA, 19 nt, Artificial Sequence
  Description of Artificial Sequence: Synthetic oligonucleotide
aacuuuaaccuaucuauag

SEQ ID NO: 1316341 - RNA, 19 nt, Artificial Sequence
  Description of Artificial Sequence: Synthetic oligonucleotide
uuaacauuuaagauaacuc

SEQ ID NO: 1316342 - RNA, 19 nt, Artificial Sequence
  Description of Artificial Sequence: Synthetic oligonucleotide
uuuaugggcagcaacaaca

SEQ ID NO: 1316343 - RNA, 19 nt, Artificial Sequence
  Description of Artificial Sequence: Synthetic oligonucleotide
uauagcauuaaauuacuca

SEQ ID NO: 1316344 - RNA, 19 nt, Artificial Sequence
  Description of Artificial Sequence: Synthetic oligonucleotide
uugauuaucaccuaagcau

SEQ ID NO: 1316345 - RNA, 19 nt, Artificial Sequence
  Description of Artificial Sequence: Synthetic oligonucleotide
aaagcauaaaauggcaugg

SEQ ID NO: 1316346 - RNA, 19 nt, Artificial Sequence
  Description of Artificial Sequence: Synthetic oligonucleotide
auaaugaguguauagaaca

SEQ ID NO: 1316347 - RNA, 19 nt, Artificial Sequence
  Description of Artificial Sequence: Synthetic oligonucleotide
augacuaggacauggggcc

SEQ ID NO: 1316348 - RNA, 19 nt, Artificial Sequence
  Description of Artificial Sequence: Synthetic oligonucleotide
uaaacauugucaacuauug

SEQ ID NO: 1316349 - RNA, 19 nt, Artificial Sequence
  Description of Artificial Sequence: Synthetic oligonucleotide
uauuucuaaagucaagaca

SEQ ID NO: 1316350 - RNA, 19 nt, Artificial Sequence
  Description of Artificial Sequence: Synthetic oligonucleotide
uuaauuucugcaaugacua

SEQ ID NO: 1316351 - RNA, 19 nt, Artificial Sequence
  Description of Artificial Sequence: Synthetic oligonucleotide
cauaaaauggcauggcucc

SEQ ID NO: 1316352 - RNA, 19 nt, Artificial Sequence
  Description of Artificial Sequence: Synthetic oligonucleotide
aacauaaaggcuauaauga

SEQ ID NO: 1316353 - RNA, 19 nt, Artificial Sequence
  Description of Artificial Sequence: Synthetic oligonucleotide
uacauuaucuguaaaucug

SEQ ID NO: 1316354 - RNA, 19 nt, Artificial Sequence
  Description of Artificial Sequence: Synthetic oligonucleotide
acuuuaaccuaucuauagc

SEQ ID NO: 1316355 - RNA, 19 nt, Artificial Sequence
  Description of Artificial Sequence: Synthetic oligonucleotide
auguucaccucgcagaacc

SEQ ID NO: 1316356 - RNA, 19 nt, Artificial Sequence
  Description of Artificial Sequence: Synthetic oligonucleotide
aaaacugcuagccauguaa

SEQ ID NO: 1316357 - RNA, 19 nt, Artificial Sequence
  Description of Artificial Sequence: Synthetic oligonucleotide
aacauugucaacuauugua

SEQ ID NO: 1316358 - RNA, 19 nt, Artificial Sequence
  Description of Artificial Sequence: Synthetic oligonucleotide
gugaaaagccuauuuaugg

SEQ ID NO: 1316359 - RNA, 19 nt, Artificial Sequence
  Description of Artificial Sequence: Synthetic oligonucleotide
ucuaucugacuccaaaugc

SEQ ID NO: 1316360 - RNA, 19 nt, Artificial Sequence
  Description of Artificial Sequence: Synthetic oligonucleotide
uaugcauuagaaaaguaaa

SEQ ID NO: 1316361 - RNA, 19 nt, Artificial Sequence
  Description of Artificial Sequence: Synthetic oligonucleotide
caacauaaaggcuauaaug

SEQ ID NO: 1316362 - RNA, 19 nt, Artificial Sequence
  Description of Artificial Sequence: Synthetic oligonucleotide
uuggguaugcauuagaaaa

SEQ ID NO: 1316363 - RNA, 19 nt, Artificial Sequence
  Description of Artificial Sequence: Synthetic oligonucleotide
uuugaaaauuucucuacgc

SEQ ID NO: 1316364 - RNA, 19 nt, Artificial Sequence
  Description of Artificial Sequence: Synthetic oligonucleotide
acaugcaaagcauaaaaug

SEQ ID NO: 1316365 - RNA, 19 nt, Artificial Sequence
  Description of Artificial Sequence: Synthetic oligonucleotide
aguguuaacauuuaagaua

SEQ ID NO: 1316366 - RNA, 19 nt, Artificial Sequence
  Description of Artificial Sequence: Synthetic oligonucleotide
acuauuguauuucuaaagu

SEQ ID NO: 1316367 - RNA, 19 nt, Artificial Sequence
  Description of Artificial Sequence: Synthetic oligonucleotide
uacauauaaacauugucaa

SEQ ID NO: 1316368 - RNA, 19 nt, Artificial Sequence
  Description of Artificial Sequence: Synthetic oligonucleotide
auagcauuaaauuacucaa

SEQ ID NO: 1316369 - RNA, 19 nt, Artificial Sequence
  Description of Artificial Sequence: Synthetic oligonucleotide
ucaacuauuguauuucuaa

SEQ ID NO: 1316370 - RNA, 19 nt, Artificial Sequence
  Description of Artificial Sequence: Synthetic oligonucleotide
ugugaaaagccuauuuaug

SEQ ID NO: 1316371 - RNA, 19 nt, Artificial Sequence
  Description of Artificial Sequence: Synthetic oligonucleotide
accuuaaaauuuaaaauac

SEQ ID NO: 1316372 - RNA, 19 nt, Artificial Sequence
  Description of Artificial Sequence: Synthetic oligonucleotide
uugaaaauuucucuacgca

SEQ ID NO: 1316373 - RNA, 19 nt, Artificial Sequence
  Description of Artificial Sequence: Synthetic oligonucleotide
gaaaauuucucuacgcaag

SEQ ID NO: 1316374 - RNA, 19 nt, Artificial Sequence
  Description of Artificial Sequence: Synthetic oligonucleotide
ucucuuucaauuuucauuu

SEQ ID NO: 1316375 - RNA, 19 nt, Artificial Sequence
  Description of Artificial Sequence: Synthetic oligonucleotide
augaguguauagaacaugc

SEQ ID NO: 1316376 - RNA, 19 nt, Artificial Sequence
  Description of Artificial Sequence: Synthetic oligonucleotide
aauuucucuacgcaaguau

SEQ ID NO: 1316377 - RNA, 19 nt, Artificial Sequence
  Description of Artificial Sequence: Synthetic oligonucleotide
aagucaagacaauugauua

SEQ ID NO: 1316378 - RNA, 19 nt, Artificial Sequence
  Description of Artificial Sequence: Synthetic oligonucleotide
ugacucaagucucaaagca

SEQ ID NO: 1316379 - RNA, 19 nt, Artificial Sequence
  Description of Artificial Sequence: Synthetic oligonucleotide
gucucaauaguguauacug

SEQ ID NO: 1316380 - RNA, 19 nt, Artificial Sequence
  Description of Artificial Sequence: Synthetic oligonucleotide
uuuuacccaaccuacuuug

SEQ ID NO: 1316381 - RNA, 19 nt, Artificial Sequence
  Description of Artificial Sequence: Synthetic oligonucleotide
auugauuaucaccuaagca

SEQ ID NO: 1316382 - RNA, 19 nt, Artificial Sequence
  Description of Artificial Sequence: Synthetic oligonucleotide
guauagaacaugcaaagca

SEQ ID NO: 1316383 - RNA, 19 nt, Artificial Sequence
  Description of Artificial Sequence: Synthetic oligonucleotide
uuacauuaucuguaaaucu

SEQ ID NO: 1316384 - RNA, 19 nt, Artificial Sequence
  Description of Artificial Sequence: Synthetic oligonucleotide
caaagcuucaauacaguag

SEQ ID NO: 1316385 - RNA, 19 nt, Artificial Sequence
  Description of Artificial Sequence: Synthetic oligonucleotide
auaaaggcuauaaugagug

SEQ ID NO: 1316386 - RNA, 19 nt, Artificial Sequence
  Description of Artificial Sequence: Synthetic oligonucleotide
cuuugaaaauuucucuacg

SEQ ID NO: 1316387 - RNA, 19 nt, Artificial Sequence
  Description of Artificial Sequence: Synthetic oligonucleotide
uacgcaaguaucaaaacau

SEQ ID NO: 1316388 - RNA, 19 nt, Artificial Sequence
  Description of Artificial Sequence: Synthetic oligonucleotide
uucuaucugacuccaaaug

SEQ ID NO: 1316389 - RNA, 19 nt, Artificial Sequence
  Description of Artificial Sequence: Synthetic oligonucleotide
cauuaaauuacucaaagcu

SEQ ID NO: 1316390 - RNA, 19 nt, Artificial Sequence
  Description of Artificial Sequence: Synthetic oligonucleotide
acauauaaacauugucaac

SEQ ID NO: 1316391 - RNA, 19 nt, Artificial Sequence
  Description of Artificial Sequence: Synthetic oligonucleotide
uuacucaaagcuucaauac

SEQ ID NO: 1316392 - RNA, 19 nt, Artificial Sequence
  Description of Artificial Sequence: Synthetic oligonucleotide
uauagaacaugcaaagcau

SEQ ID NO: 1316393 - RNA, 19 nt, Artificial Sequence
  Description of Artificial Sequence: Synthetic oligonucleotide
aaacauauuucucuuucaa

SEQ ID NO: 1316394 - RNA, 19 nt, Artificial Sequence
  Description of Artificial Sequence: Synthetic oligonucleotide
ugaaaauuucucuacgcaa

SEQ ID NO: 1316395 - RNA, 19 nt, Artificial Sequence
  Description of Artificial Sequence: Synthetic oligonucleotide
aaaauuucucuacgcaagu

SEQ ID NO: 1316396 - RNA, 19 nt, Artificial Sequence
  Description of Artificial Sequence: Synthetic oligonucleotide
acauaaaggcuauaaugag

SEQ ID NO: 1316397 - RNA, 19 nt, Artificial Sequence
  Description of Artificial Sequence: Synthetic oligonucleotide
uaucuauagcauuaaauua

SEQ ID NO: 1316398 - RNA, 19 nt, Artificial Sequence
  Description of Artificial Sequence: Synthetic oligonucleotide
aauuaacuuuaaccuaucu

SEQ ID NO: 1316399 - RNA, 19 nt, Artificial Sequence
  Description of Artificial Sequence: Synthetic oligonucleotide
auaucaucaaacuggauuu

SEQ ID NO: 1316400 - RNA, 19 nt, Artificial Sequence
  Description of Artificial Sequence: Synthetic oligonucleotide
ugacgcaaaacacacagau

SEQ ID NO: 1316401 - RNA, 19 nt, Artificial Sequence
  Description of Artificial Sequence: Synthetic oligonucleotide
uguaauuaacuuuaaccua

SEQ ID NO: 1316402 - RNA, 19 nt, Artificial Sequence
  Description of Artificial Sequence: Synthetic oligonucleotide
acuaggggcacacuucggc

SEQ ID NO: 1316403 - RNA, 19 nt, Artificial Sequence
  Description of Artificial Sequence: Synthetic oligonucleotide
aacagcugcauucuaucug

SEQ ID NO: 1316404 - RNA, 19 nt, Artificial Sequence
  Description of Artificial Sequence: Synthetic oligonucleotide
aauuacucaaagcuucaau

SEQ ID NO: 1316405 - RNA, 19 nt, Artificial Sequence
  Description of Artificial Sequence: Synthetic oligonucleotide
uggguaugcauuagaaaag

SEQ ID NO: 1316406 - RNA, 19 nt, Artificial Sequence
  Description of Artificial Sequence: Synthetic oligonucleotide
agucucaaagcacagccag

SEQ ID NO: 1316407 - RNA, 19 nt, Artificial Sequence
  Description of Artificial Sequence: Synthetic oligonucleotide
augcaaagcauaaaauggc

SEQ ID NO: 1316408 - RNA, 19 nt, Artificial Sequence
  Description of Artificial Sequence: Synthetic oligonucleotide
auuacucaaagcuucaaua

SEQ ID NO: 1316409 - RNA, 19 nt, Artificial Sequence
  Description of Artificial Sequence: Synthetic oligonucleotide
ugcaaagcauaaaauggca

SEQ ID NO: 1316410 - RNA, 19 nt, Artificial Sequence
  Description of Artificial Sequence: Synthetic oligonucleotide
aagcauaaaauggcauggc

SEQ ID NO: 1316411 - RNA, 19 nt, Artificial Sequence
  Description of Artificial Sequence: Synthetic oligonucleotide
aauguguccguuucauuga

SEQ ID NO: 1316412 - RNA, 19 nt, Artificial Sequence
  Description of Artificial Sequence: Synthetic oligonucleotide
gaugacuaggacauggggc

SEQ ID NO: 1316413 - RNA, 19 nt, Artificial Sequence
  Description of Artificial Sequence: Synthetic oligonucleotide
gaacuaggggcacacuucg

SEQ ID NO: 1316414 - RNA, 19 nt, Artificial Sequence
  Description of Artificial Sequence: Synthetic oligonucleotide
ucucaauaguguauacugc

SEQ ID NO: 1316415 - RNA, 19 nt, Artificial Sequence
  Description of Artificial Sequence: Synthetic oligonucleotide
agacaauugauuaucaccu

SEQ ID NO: 1316416 - RNA, 19 nt, Artificial Sequence
  Description of Artificial Sequence: Synthetic oligonucleotide
aaacugcacugugaaaagc

SEQ ID NO: 1316417 - RNA, 19 nt, Artificial Sequence
  Description of Artificial Sequence: Synthetic oligonucleotide
aacauauuucucuuucaau

SEQ ID NO: 1316418 - RNA, 19 nt, Artificial Sequence
  Description of Artificial Sequence: Synthetic oligonucleotide
cuuacauuaucuguaaauc

SEQ ID NO: 1316419 - RNA, 19 nt, Artificial Sequence
  Description of Artificial Sequence: Synthetic oligonucleotide
uuuuggguaugcauuagaa

SEQ ID NO: 1316420 - RNA, 19 nt, Artificial Sequence
  Description of Artificial Sequence: Synthetic oligonucleotide
aaagccuauuuaugggcag

SEQ ID NO: 1316421 - RNA, 19 nt, Artificial Sequence
  Description of Artificial Sequence: Synthetic oligonucleotide
cuauuguauuucuaaaguc

SEQ ID NO: 1316422 - RNA, 19 nt, Artificial Sequence
  Description of Artificial Sequence: Synthetic oligonucleotide
aaugaguguauagaacaug

SEQ ID NO: 1316423 - RNA, 19 nt, Artificial Sequence
  Description of Artificial Sequence: Synthetic oligonucleotide
cuuuaaccuaucuauagca

SEQ ID NO: 1316424 - RNA, 19 nt, Artificial Sequence
  Description of Artificial Sequence: Synthetic oligonucleotide
auuuaugggcagcaacaac

SEQ ID NO: 1316425 - RNA, 19 nt, Artificial Sequence
  Description of Artificial Sequence: Synthetic oligonucleotide
caaaacauauuucucuuuc

SEQ ID NO: 1316426 - RNA, 19 nt, Artificial Sequence
  Description of Artificial Sequence: Synthetic oligonucleotide
acauuuaagauaacucaac

SEQ ID NO: 1316427 - RNA, 19 nt, Artificial Sequence
  Description of Artificial Sequence: Synthetic oligonucleotide
auuaacuuuaaccuaucua

SEQ ID NO: 1316428 - RNA, 19 nt, Artificial Sequence
  Description of Artificial Sequence: Synthetic oligonucleotide
ucuuucaauuuucauuuuc

SEQ ID NO: 1316429 - RNA, 19 nt, Artificial Sequence
  Description of Artificial Sequence: Synthetic oligonucleotide
caauugauuaucaccuaag

SEQ ID NO: 1316430 - RNA, 19 nt, Artificial Sequence
  Description of Artificial Sequence: Synthetic oligonucleotide
agaugacuaggacaugggg

SEQ ID NO: 1316431 - RNA, 19 nt, Artificial Sequence
  Description of Artificial Sequence: Synthetic oligonucleotide
ucaagacaauugauuauca

SEQ ID NO: 1316432 - RNA, 19 nt, Artificial Sequence
  Description of Artificial Sequence: Synthetic oligonucleotide
gaacaugcaaagcauaaaa

SEQ ID NO: 1316433 - RNA, 19 nt, Artificial Sequence
  Description of Artificial Sequence: Synthetic oligonucleotide
uucaauacaguagcuaacu

SEQ ID NO: 1316434 - RNA, 19 nt, Artificial Sequence
  Description of Artificial Sequence: Synthetic oligonucleotide
ucaccuaagcauuuaauuu

SEQ ID NO: 1316435 - RNA, 19 nt, Artificial Sequence
  Description of Artificial Sequence: Synthetic oligonucleotide
uuguauuucuaaagucaag

SEQ ID NO: 1316436 - RNA, 19 nt, Artificial Sequence
  Description of Artificial Sequence: Synthetic oligonucleotide
uuaaaacucaaaacugcua

SEQ ID NO: 1316437 - RNA, 19 nt, Artificial Sequence
  Description of Artificial Sequence: Synthetic oligonucleotide
uggaaaggcagucucaaua

SEQ ID NO: 1316438 - RNA, 19 nt, Artificial Sequence
  Description of Artificial Sequence: Synthetic oligonucleotide
auuaucuguaaaucugacu

SEQ ID NO: 1316439 - RNA, 19 nt, Artificial Sequence
  Description of Artificial Sequence: Synthetic oligonucleotide
ugauuaucaccuaagcauu

SEQ ID NO: 1316440 - RNA, 19 nt, Artificial Sequence
  Description of Artificial Sequence: Synthetic oligonucleotide
aaacauugucaacuauugu

SEQ ID NO: 1316441 - RNA, 19 nt, Artificial Sequence
  Description of Artificial Sequence: Synthetic oligonucleotide
aacucaaaacugcuagcca

SEQ ID NO: 1316442 - RNA, 19 nt, Artificial Sequence
  Description of Artificial Sequence: Synthetic oligonucleotide
guaaaucugacucaagucu

SEQ ID NO: 1316443 - RNA, 19 nt, Artificial Sequence
  Description of Artificial Sequence: Synthetic oligonucleotide
aauuucugcaaugacuaau

SEQ ID NO: 1316444 - RNA, 19 nt, Artificial Sequence
  Description of Artificial Sequence: Synthetic oligonucleotide
uuuaaccuaucuauagcau

SEQ ID NO: 1316445 - RNA, 19 nt, Artificial Sequence
  Description of Artificial Sequence: Synthetic oligonucleotide
acucaaagcuucaauacag

SEQ ID NO: 1316446 - RNA, 19 nt, Artificial Sequence
  Description of Artificial Sequence: Synthetic oligonucleotide
guauuucuaaagucaagac

SEQ ID NO: 1316447 - RNA, 19 nt, Artificial Sequence
  Description of Artificial Sequence: Synthetic oligonucleotide
aagccuauuuaugggcagc

SEQ ID NO: 1316448 - RNA, 19 nt, Artificial Sequence
  Description of Artificial Sequence: Synthetic oligonucleotide
uguauagaacaugcaaagc

SEQ ID NO: 1316449 - RNA, 19 nt, Artificial Sequence
  Description of Artificial Sequence: Synthetic oligonucleotide
caccuaagcauuuaauuuc

SEQ ID NO: 1316450 - RNA, 19 nt, Artificial Sequence
  Description of Artificial Sequence: Synthetic oligonucleotide
uguuaugugcuaucaacau

SEQ ID NO: 1316451 - RNA, 19 nt, Artificial Sequence
  Description of Artificial Sequence: Synthetic oligonucleotide
acuccaaaugcagacuuac

SEQ ID NO: 1316452 - RNA, 19 nt, Artificial Sequence
  Description of Artificial Sequence: Synthetic oligonucleotide
gaguguauagaacaugcaa

SEQ ID NO: 1316453 - RNA, 19 nt, Artificial Sequence
  Description of Artificial Sequence: Synthetic oligonucleotide
aauaguguauacugcugua

SEQ ID NO: 1316454 - RNA, 19 nt, Artificial Sequence
  Description of Artificial Sequence: Synthetic oligonucleotide
aucaccuaagcauuuaauu

SEQ ID NO: 1316455 - RNA, 19 nt, Artificial Sequence
  Description of Artificial Sequence: Synthetic oligonucleotide
cuauaaugaguguauagaa

SEQ ID NO: 1316456 - RNA, 19 nt, Artificial Sequence
  Description of Artificial Sequence: Synthetic oligonucleotide
aaaagccuauuuaugggca

SEQ ID NO: 1316457 - RNA, 19 nt, Artificial Sequence
  Description of Artificial Sequence: Synthetic oligonucleotide
aaaggcuauaaugagugua

SEQ ID NO: 1316458 - RNA, 19 nt, Artificial Sequence
  Description of Artificial Sequence: Synthetic oligonucleotide
acucaaaacugcuagccau

SEQ ID NO: 1316459 - RNA, 19 nt, Artificial Sequence
  Description of Artificial Sequence: Synthetic oligonucleotide
uuaaccuaucuauagcauu

SEQ ID NO: 1316460 - RNA, 19 nt, Artificial Sequence
  Description of Artificial Sequence: Synthetic oligonucleotide
ugcagacuuacauuaucug

SEQ ID NO: 1316461 - RNA, 19 nt, Artificial Sequence
  Description of Artificial Sequence: Synthetic oligonucleotide
agcauaaaauggcauggcu

SEQ ID NO: 1316462 - RNA, 19 nt, Artificial Sequence
  Description of Artificial Sequence: Synthetic oligonucleotide
gcugacgcaaaacacacag

SEQ ID NO: 1316463 - RNA, 19 nt, Artificial Sequence
  Description of Artificial Sequence: Synthetic oligonucleotide
uuuggguaugcauuagaaa

SEQ ID NO: 1316464 - RNA, 19 nt, Artificial Sequence
  Description of Artificial Sequence: Synthetic oligonucleotide
acaauugauuaucaccuaa

SEQ ID NO: 1316465 - RNA, 19 nt, Artificial Sequence
  Description of Artificial Sequence: Synthetic oligonucleotide
auugucaacuauuguauuu

SEQ ID NO: 1316466 - RNA, 19 nt, Artificial Sequence
  Description of Artificial Sequence: Synthetic oligonucleotide
uaaugaguguauagaacau

SEQ ID NO: 1316467 - RNA, 19 nt, Artificial Sequence
  Description of Artificial Sequence: Synthetic oligonucleotide
acaacauaaaggcuauaau

SEQ ID NO: 1316468 - RNA, 19 nt, Artificial Sequence
  Description of Artificial Sequence: Synthetic oligonucleotide
agaugugugggaacuaggg

SEQ ID NO: 1316469 - RNA, 19 nt, Artificial Sequence
  Description of Artificial Sequence: Synthetic oligonucleotide
auuaaauuacucaaagcuu

SEQ ID NO: 1316470 - RNA, 19 nt, Artificial Sequence
  Description of Artificial Sequence: Synthetic oligonucleotide
auuucucuacgcaaguauc

SEQ ID NO: 1316471 - RNA, 19 nt, Artificial Sequence
  Description of Artificial Sequence: Synthetic oligonucleotide
ggaaaggcagucucaauag

SEQ ID NO: 1316472 - RNA, 19 nt, Artificial Sequence
  Description of Artificial Sequence: Synthetic oligonucleotide
ugaguguauagaacaugca

SEQ ID NO: 1316473 - RNA, 19 nt, Artificial Sequence
  Description of Artificial Sequence: Synthetic oligonucleotide
cacacuucggcccaugaug

SEQ ID NO: 1316474 - RNA, 19 nt, Artificial Sequence
  Description of Artificial Sequence: Synthetic oligonucleotide
cuagccauguaauuuaaaa

SEQ ID NO: 1316475 - RNA, 19 nt, Artificial Sequence
  Description of Artificial Sequence: Synthetic oligonucleotide
ucuguaaaucugacucaag

SEQ ID NO: 1316476 - RNA, 19 nt, Artificial Sequence
  Description of Artificial Sequence: Synthetic oligonucleotide
ugguagaucugaaguaacu

SEQ ID NO: 1316477 - RNA, 19 nt, Artificial Sequence
  Description of Artificial Sequence: Synthetic oligonucleotide
uuaucaccuaagcauuuaa

SEQ ID NO: 1316478 - RNA, 19 nt, Artificial Sequence
  Description of Artificial Sequence: Synthetic oligonucleotide
cuucaauacaguagcuaac

SEQ ID NO: 1316479 - RNA, 19 nt, Artificial Sequence
  Description of Artificial Sequence: Synthetic oligonucleotide
cugacucaagucucaaagc

SEQ ID NO: 1316480 - RNA, 19 nt, Artificial Sequence
  Description of Artificial Sequence: Synthetic oligonucleotide
uaacuuuaaccuaucuaua

SEQ ID NO: 1316481 - RNA, 19 nt, Artificial Sequence
  Description of Artificial Sequence: Synthetic oligonucleotide
uaccccuaaguucaauuac

SEQ ID NO: 1316482 - RNA, 19 nt, Artificial Sequence
  Description of Artificial Sequence: Synthetic oligonucleotide
aguguauagaacaugcaaa

SEQ ID NO: 1316483 - RNA, 19 nt, Artificial Sequence
  Description of Artificial Sequence: Synthetic oligonucleotide
cuaucuauagcauuaaauu

SEQ ID NO: 1316484 - RNA, 19 nt, Artificial Sequence
  Description of Artificial Sequence: Synthetic oligonucleotide
uuuacccaaccuacuuugc

SEQ ID NO: 1316485 - RNA, 19 nt, Artificial Sequence
  Description of Artificial Sequence: Synthetic oligonucleotide
agcaacaacauaaaggcua

SEQ ID NO: 1316486 - RNA, 19 nt, Artificial Sequence
  Description of Artificial Sequence: Synthetic oligonucleotide
uugucaacuauuguauuuc

SEQ ID NO: 1316487 - RNA, 19 nt, Artificial Sequence
  Description of Artificial Sequence: Synthetic oligonucleotide
ucuacgcaaguaucaaaac

SEQ ID NO: 1316488 - RNA, 19 nt, Artificial Sequence
  Description of Artificial Sequence: Synthetic oligonucleotide
caagacaauugauuaucac

SEQ ID NO: 1316489 - RNA, 19 nt, Artificial Sequence
  Description of Artificial Sequence: Synthetic oligonucleotide
cuccaauaucaucaaacug

SEQ ID NO: 1316490 - RNA, 19 nt, Artificial Sequence
  Description of Artificial Sequence: Synthetic oligonucleotide
aacaugcaaagcauaaaau

SEQ ID NO: 1316491 - RNA, 19 nt, Artificial Sequence
  Description of Artificial Sequence: Synthetic oligonucleotide
uauacugcuguaccccuaa

SEQ ID NO: 1316492 - RNA, 19 nt, Artificial Sequence
  Description of Artificial Sequence: Synthetic oligonucleotide
ugcacugugaaaagccuau

SEQ ID NO: 1316493 - RNA, 19 nt, Artificial Sequence
  Description of Artificial Sequence: Synthetic oligonucleotide
agcacagccagaugacuag

SEQ ID NO: 1316494 - RNA, 19 nt, Artificial Sequence
  Description of Artificial Sequence: Synthetic oligonucleotide
uaauuaacuuuaaccuauc

SEQ ID NO: 1316495 - RNA, 19 nt, Artificial Sequence
  Description of Artificial Sequence: Synthetic oligonucleotide
gcuaucaacauccaccuuc

SEQ ID NO: 1316496 - RNA, 19 nt, Artificial Sequence
  Description of Artificial Sequence: Synthetic oligonucleotide
ccuaaguucaauuacaucu

SEQ ID NO: 1316497 - RNA, 19 nt, Artificial Sequence
  Description of Artificial Sequence: Synthetic oligonucleotide
aaccgcugacgcaaaacac

SEQ ID NO: 1316498 - RNA, 19 nt, Artificial Sequence
  Description of Artificial Sequence: Synthetic oligonucleotide
cuaucugacuccaaaugca

SEQ ID NO: 1316499 - RNA, 19 nt, Artificial Sequence
  Description of Artificial Sequence: Synthetic oligonucleotide
guaugcauuagaaaaguaa

SEQ ID NO: 1316500 - RNA, 19 nt, Artificial Sequence
  Description of Artificial Sequence: Synthetic oligonucleotide
gucaagacaauugauuauc

SEQ ID NO: 1316501 - RNA, 19 nt, Artificial Sequence
  Description of Artificial Sequence: Synthetic oligonucleotide
ugucaacuauuguauuucu

SEQ ID NO: 1316502 - RNA, 19 nt, Artificial Sequence
  Description of Artificial Sequence: Synthetic oligonucleotide
aaggcuauaaugaguguau

SEQ ID NO: 1316503 - RNA, 19 nt, Artificial Sequence
  Description of Artificial Sequence: Synthetic oligonucleotide
augugcuaucaacauccac

SEQ ID NO: 1316504 - RNA, 19 nt, Artificial Sequence
  Description of Artificial Sequence: Synthetic oligonucleotide
uaucaccuaagcauuuaau

SEQ ID NO: 1316505 - RNA, 19 nt, Artificial Sequence
  Description of Artificial Sequence: Synthetic oligonucleotide
uguucaccucgcagaaccg

SEQ ID NO: 1316506 - RNA, 19 nt, Artificial Sequence
  Description of Artificial Sequence: Synthetic oligonucleotide
auucuaucugacuccaaau

SEQ ID NO: 1316507 - RNA, 19 nt, Artificial Sequence
  Description of Artificial Sequence: Synthetic oligonucleotide
gaaccgcugacgcaaaaca

SEQ ID NO: 1316508 - RNA, 19 nt, Artificial Sequence
  Description of Artificial Sequence: Synthetic oligonucleotide
uucugcaaugacuaauuuu

SEQ ID NO: 1316509 - RNA, 19 nt, Artificial Sequence
  Description of Artificial Sequence: Synthetic oligonucleotide
cugcauucuaucugacucc

SEQ ID NO: 1316510 - RNA, 19 nt, Artificial Sequence
  Description of Artificial Sequence: Synthetic oligonucleotide
uuaugggcagcaacaacau

SEQ ID NO: 1316511 - RNA, 19 nt, Artificial Sequence
  Description of Artificial Sequence: Synthetic oligonucleotide
cucaaaacugcuagccaug

SEQ ID NO: 1316512 - RNA, 19 nt, Artificial Sequence
  Description of Artificial Sequence: Synthetic oligonucleotide
agucaagacaauugauuau

SEQ ID NO: 1316513 - RNA, 19 nt, Artificial Sequence
  Description of Artificial Sequence: Synthetic oligonucleotide
guuaugugcuaucaacauc

SEQ ID NO: 1316514 - RNA, 19 nt, Artificial Sequence
  Description of Artificial Sequence: Synthetic oligonucleotide
ggcuauaaugaguguauag

SEQ ID NO: 1316515 - RNA, 19 nt, Artificial Sequence
  Description of Artificial Sequence: Synthetic oligonucleotide
gcauuaaauuacucaaagc

SEQ ID NO: 1316516 - RNA, 19 nt, Artificial Sequence
  Description of Artificial Sequence: Synthetic oligonucleotide
acauugucaacuauuguau

SEQ ID NO: 1316517 - RNA, 19 nt, Artificial Sequence
  Description of Artificial Sequence: Synthetic oligonucleotide
gcugcauucuaucugacuc

SEQ ID NO: 1316518 - RNA, 19 nt, Artificial Sequence
  Description of Artificial Sequence: Synthetic oligonucleotide
cucgcagaaccgcugacgc

SEQ ID NO: 1316519 - RNA, 19 nt, Artificial Sequence
  Description of Artificial Sequence: Synthetic oligonucleotide
cuacgcaaguaucaaaaca

SEQ ID NO: 1316520 - RNA, 19 nt, Artificial Sequence
  Description of Artificial Sequence: Synthetic oligonucleotide
cagaugacuaggacauggg

SEQ ID NO: 1316521 - RNA, 19 nt, Artificial Sequence
  Description of Artificial Sequence: Synthetic oligonucleotide
acauccaccuucuuugaaa

SEQ ID NO: 1316522 - RNA, 19 nt, Artificial Sequence
  Description of Artificial Sequence: Synthetic oligonucleotide
acaaaguguuaacauuuaa

SEQ ID NO: 1316523 - RNA, 19 nt, Artificial Sequence
  Description of Artificial Sequence: Synthetic oligonucleotide
augggcagcaacaacauaa

SEQ ID NO: 1316524 - RNA, 19 nt, Artificial Sequence
  Description of Artificial Sequence: Synthetic oligonucleotide
uauuuaugggcagcaacaa

SEQ ID NO: 1316525 - RNA, 19 nt, Artificial Sequence
  Description of Artificial Sequence: Synthetic oligonucleotide
acauuaucuguaaaucuga

SEQ ID NO: 1316526 - RNA, 19 nt, Artificial Sequence
  Description of Artificial Sequence: Synthetic oligonucleotide
auguuaugugcuaucaaca

SEQ ID NO: 1316527 - RNA, 19 nt, Artificial Sequence
  Description of Artificial Sequence: Synthetic oligonucleotide
aagcagaugugugggaacu

SEQ ID NO: 1316528 - RNA, 19 nt, Artificial Sequence
  Description of Artificial Sequence: Synthetic oligonucleotide
cuaggggcacacuucggcc

SEQ ID NO: 1316529 - RNA, 19 nt, Artificial Sequence
  Description of Artificial Sequence: Synthetic oligonucleotide
uguaccccuaaguucaauu

SEQ ID NO: 1316530 - RNA, 19 nt, Artificial Sequence
  Description of Artificial Sequence: Synthetic oligonucleotide
gaccaaauguguccguuuc

SEQ ID NO: 1316531 - RNA, 19 nt, Artificial Sequence
  Description of Artificial Sequence: Synthetic oligonucleotide
cucuacgcaaguaucaaaa

SEQ ID NO: 1316532 - RNA, 19 nt, Artificial Sequence
  Description of Artificial Sequence: Synthetic oligonucleotide
cuauagcauuaaauuacuc

SEQ ID NO: 1316533 - RNA, 19 nt, Artificial Sequence
  Description of Artificial Sequence: Synthetic oligonucleotide
acucaagucucaaagcaca

SEQ ID NO: 1316534 - RNA, 19 nt, Artificial Sequence
  Description of Artificial Sequence: Synthetic oligonucleotide
uacccaaccuacuuugcaa

SEQ ID NO: 1316535 - RNA, 19 nt, Artificial Sequence
  Description of Artificial Sequence: Synthetic oligonucleotide
agugguagaucugaaguaa

SEQ ID NO: 1316536 - RNA, 19 nt, Artificial Sequence
  Description of Artificial Sequence: Synthetic oligonucleotide
uucaccucgcagaaccgcu

SEQ ID NO: 1316537 - RNA, 19 nt, Artificial Sequence
  Description of Artificial Sequence: Synthetic oligonucleotide
auggcauggcuccauaaau

SEQ ID NO: 1316538 - RNA, 19 nt, Artificial Sequence
  Description of Artificial Sequence: Synthetic oligonucleotide
cucaagucucaaagcacag

SEQ ID NO: 1316539 - RNA, 19 nt, Artificial Sequence
  Description of Artificial Sequence: Synthetic oligonucleotide
ucaauacaguagcuaacuu

SEQ ID NO: 1316540 - RNA, 19 nt, Artificial Sequence
  Description of Artificial Sequence: Synthetic oligonucleotide
cagaugugugggaacuagg

SEQ ID NO: 1316541 - RNA, 19 nt, Artificial Sequence
  Description of Artificial Sequence: Synthetic oligonucleotide
cagacuuacauuaucugua

SEQ ID NO: 1316542 - RNA, 19 nt, Artificial Sequence
  Description of Artificial Sequence: Synthetic oligonucleotide
acuucggcccaugauguuc

SEQ ID NO: 1316543 - RNA, 19 nt, Artificial Sequence
  Description of Artificial Sequence: Synthetic oligonucleotide
ugaagcagaugugugggaa

SEQ ID NO: 1316544 - RNA, 19 nt, Artificial Sequence
  Description of Artificial Sequence: Synthetic oligonucleotide
guaauuaacuuuaaccuau

SEQ ID NO: 1316545 - RNA, 19 nt, Artificial Sequence
  Description of Artificial Sequence: Synthetic oligonucleotide
ugcauucuaucugacucca

SEQ ID NO: 1316546 - RNA, 19 nt, Artificial Sequence
  Description of Artificial Sequence: Synthetic oligonucleotide
gcauuuaauuucugcaaug

SEQ ID NO: 1316547 - RNA, 19 nt, Artificial Sequence
  Description of Artificial Sequence: Synthetic oligonucleotide
cagauggaaaggcagucuc

SEQ ID NO: 1316548 - RNA, 19 nt, Artificial Sequence
  Description of Artificial Sequence: Synthetic oligonucleotide
gcuauaaugaguguauaga

SEQ ID NO: 1316549 - RNA, 19 nt, Artificial Sequence
  Description of Artificial Sequence: Synthetic oligonucleotide
aaaauggcauggcuccaua

SEQ ID NO: 1316550 - RNA, 19 nt, Artificial Sequence
  Description of Artificial Sequence: Synthetic oligonucleotide
uaugugcuaucaacaucca

SEQ ID NO: 1316551 - RNA, 19 nt, Artificial Sequence
  Description of Artificial Sequence: Synthetic oligonucleotide
acugcuagccauguaauuu

SEQ ID NO: 1316552 - RNA, 19 nt, Artificial Sequence
  Description of Artificial Sequence: Synthetic oligonucleotide
uggcuccauaaauacaaaa

SEQ ID NO: 1316553 - RNA, 19 nt, Artificial Sequence
  Description of Artificial Sequence: Synthetic oligonucleotide
gguagaucugaaguaacug

SEQ ID NO: 1316554 - RNA, 19 nt, Artificial Sequence
  Description of Artificial Sequence: Synthetic oligonucleotide
agucucaauaguguauacu

SEQ ID NO: 1316555 - RNA, 19 nt, Artificial Sequence
  Description of Artificial Sequence: Synthetic oligonucleotide
aaauuucucuacgcaagua

SEQ ID NO: 1316556 - RNA, 19 nt, Artificial Sequence
  Description of Artificial Sequence: Synthetic oligonucleotide
cucaauaguguauacugcu

SEQ ID NO: 1316557 - RNA, 19 nt, Artificial Sequence
  Description of Artificial Sequence: Synthetic oligonucleotide
aacugcuagccauguaauu

SEQ ID NO: 1316558 - RNA, 19 nt, Artificial Sequence
  Description of Artificial Sequence: Synthetic oligonucleotide
uggcauggcuccauaaaua

SEQ ID NO: 1316559 - RNA, 19 nt, Artificial Sequence
  Description of Artificial Sequence: Synthetic oligonucleotide
gaacaaaguguuaacauuu

SEQ ID NO: 1316560 - RNA, 19 nt, Artificial Sequence
  Description of Artificial Sequence: Synthetic oligonucleotide
cauucuaucugacuccaaa

SEQ ID NO: 1316561 - RNA, 19 nt, Artificial Sequence
  Description of Artificial Sequence: Synthetic oligonucleotide
uuucugcaaugacuaauuu

SEQ ID NO: 1316562 - RNA, 19 nt, Artificial Sequence
  Description of Artificial Sequence: Synthetic oligonucleotide
uaauuucugcaaugacuaa

SEQ ID NO: 1316563 - RNA, 19 nt, Artificial Sequence
  Description of Artificial Sequence: Synthetic oligonucleotide
gcuucaauacaguagcuaa

SEQ ID NO: 1316564 - RNA, 19 nt, Artificial Sequence
  Description of Artificial Sequence: Synthetic oligonucleotide
gacgcaaaacacacagaug

SEQ ID NO: 1316565 - RNA, 19 nt, Artificial Sequence
  Description of Artificial Sequence: Synthetic oligonucleotide
ucucuacgcaaguaucaaa

SEQ ID NO: 1316566 - RNA, 19 nt, Artificial Sequence
  Description of Artificial Sequence: Synthetic oligonucleotide
ggcauggcuccauaaauac

SEQ ID NO: 1316567 - RNA, 19 nt, Artificial Sequence
  Description of Artificial Sequence: Synthetic oligonucleotide
aaacugcuagccauguaau

SEQ ID NO: 1316568 - RNA, 19 nt, Artificial Sequence
  Description of Artificial Sequence: Synthetic oligonucleotide
agccagaugacuaggacau

SEQ ID NO: 1316569 - RNA, 19 nt, Artificial Sequence
  Description of Artificial Sequence: Synthetic oligonucleotide
accuucuuugaaaauuucu

SEQ ID NO: 1316570 - RNA, 19 nt, Artificial Sequence
  Description of Artificial Sequence: Synthetic oligonucleotide
gacauggggccugaagcag

SEQ ID NO: 1316571 - RNA, 19 nt, Artificial Sequence
  Description of Artificial Sequence: Synthetic oligonucleotide
accuaagcauuuaauuucu

SEQ ID NO: 1316572 - RNA, 19 nt, Artificial Sequence
  Description of Artificial Sequence: Synthetic oligonucleotide
cuguaaaucugacucaagu

SEQ ID NO: 1316573 - RNA, 19 nt, Artificial Sequence
  Description of Artificial Sequence: Synthetic oligonucleotide
aucuguaaaucugacucaa

SEQ ID NO: 1316574 - RNA, 19 nt, Artificial Sequence
  Description of Artificial Sequence: Synthetic oligonucleotide
ccuauuuaugggcagcaac

SEQ ID NO: 1316575 - RNA, 19 nt, Artificial Sequence
  Description of Artificial Sequence: Synthetic oligonucleotide
ucauccccuggaccaaaug

SEQ ID NO: 1316576 - RNA, 19 nt, Artificial Sequence
  Description of Artificial Sequence: Synthetic oligonucleotide
uguuaacauuuaagauaac

SEQ ID NO: 1316577 - RNA, 19 nt, Artificial Sequence
  Description of Artificial Sequence: Synthetic oligonucleotide
gccugaagcagaugugugg

SEQ ID NO: 1316578 - RNA, 19 nt, Artificial Sequence
  Description of Artificial Sequence: Synthetic oligonucleotide
uucucuacgcaaguaucaa

SEQ ID NO: 1316579 - RNA, 19 nt, Artificial Sequence
  Description of Artificial Sequence: Synthetic oligonucleotide
ccagaugacuaggacaugg

SEQ ID NO: 1316580 - RNA, 19 nt, Artificial Sequence
  Description of Artificial Sequence: Synthetic oligonucleotide
aaaugcagacuuacauuau

SEQ ID NO: 1316581 - RNA, 19 nt, Artificial Sequence
  Description of Artificial Sequence: Synthetic oligonucleotide
augcauuagaaaaguaaaa

SEQ ID NO: 1316582 - RNA, 19 nt, Artificial Sequence
  Description of Artificial Sequence: Synthetic oligonucleotide
accuacuuugcaaaguaaa

SEQ ID NO: 1316583 - RNA, 19 nt, Artificial Sequence
  Description of Artificial Sequence: Synthetic oligonucleotide
gcccaugauguucaccucg

SEQ ID NO: 1316584 - RNA, 19 nt, Artificial Sequence
  Description of Artificial Sequence: Synthetic oligonucleotide
agcugcauucuaucugacu

SEQ ID NO: 1316585 - RNA, 19 nt, Artificial Sequence
  Description of Artificial Sequence: Synthetic oligonucleotide
ucaccucgcagaaccgcug

SEQ ID NO: 1316586 - RNA, 19 nt, Artificial Sequence
  Description of Artificial Sequence: Synthetic oligonucleotide
cagccagaugacuaggaca

SEQ ID NO: 1316587 - RNA, 19 nt, Artificial Sequence
  Description of Artificial Sequence: Synthetic oligonucleotide
agaacaugcaaagcauaaa

SEQ ID NO: 1316588 - RNA, 19 nt, Artificial Sequence
  Description of Artificial Sequence: Synthetic oligonucleotide
acccaaccuacuuugcaaa

SEQ ID NO: 1316589 - RNA, 19 nt, Artificial Sequence
  Description of Artificial Sequence: Synthetic oligonucleotide
acagauggaaaggcagucu

SEQ ID NO: 1316590 - RNA, 19 nt, Artificial Sequence
  Description of Artificial Sequence: Synthetic oligonucleotide
gcauaaaauggcauggcuc

SEQ ID NO: 1316591 - RNA, 19 nt, Artificial Sequence
  Description of Artificial Sequence: Synthetic oligonucleotide
caauaguguauacugcugu

SEQ ID NO: 1316592 - RNA, 19 nt, Artificial Sequence
  Description of Artificial Sequence: Synthetic oligonucleotide
aacuaggggcacacuucgg

SEQ ID NO: 1316593 - RNA, 19 nt, Artificial Sequence
  Description of Artificial Sequence: Synthetic oligonucleotide
aaccuaucuauagcauuaa

SEQ ID NO: 1316594 - RNA, 19 nt, Artificial Sequence
  Description of Artificial Sequence: Synthetic oligonucleotide
gacaauugauuaucaccua

SEQ ID NO: 1316595 - RNA, 19 nt, Artificial Sequence
  Description of Artificial Sequence: Synthetic oligonucleotide
aagcacagccagaugacua

SEQ ID NO: 1316596 - RNA, 19 nt, Artificial Sequence
  Description of Artificial Sequence: Synthetic oligonucleotide
auagaacaugcaaagcaua

SEQ ID NO: 1316597 - RNA, 19 nt, Artificial Sequence
  Description of Artificial Sequence: Synthetic oligonucleotide
cauccaccuucuuugaaaa

SEQ ID NO: 1316598 - RNA, 19 nt, Artificial Sequence
  Description of Artificial Sequence: Synthetic oligonucleotide
caauacaguagcuaacuuu

SEQ ID NO: 1316599 - RNA, 19 nt, Artificial Sequence
  Description of Artificial Sequence: Synthetic oligonucleotide
accgcugacgcaaaacaca

SEQ ID NO: 1316600 - RNA, 19 nt, Artificial Sequence
  Description of Artificial Sequence: Synthetic oligonucleotide
accccuaaguucaauuaca

SEQ ID NO: 1316601 - RNA, 19 nt, Artificial Sequence
  Description of Artificial Sequence: Synthetic oligonucleotide
auaaaauggcauggcucca

SEQ ID NO: 1316602 - RNA, 19 nt, Artificial Sequence
  Description of Artificial Sequence: Synthetic oligonucleotide
gugcuaucaacauccaccu

SEQ ID NO: 1316603 - RNA, 19 nt, Artificial Sequence
  Description of Artificial Sequence: Synthetic oligonucleotide
cacagauggaaaggcaguc

SEQ ID NO: 1316604 - RNA, 19 nt, Artificial Sequence
  Description of Artificial Sequence: Synthetic oligonucleotide
guaccccuaaguucaauua

SEQ ID NO: 1316605 - RNA, 19 nt, Artificial Sequence
  Description of Artificial Sequence: Synthetic oligonucleotide
accuaucuauagcauuaaa

SEQ ID NO: 1316606 - RNA, 19 nt, Artificial Sequence
  Description of Artificial Sequence: Synthetic oligonucleotide
gacuuacauuaucuguaaa

SEQ ID NO: 1316607 - RNA, 19 nt, Artificial Sequence
  Description of Artificial Sequence: Synthetic oligonucleotide
cagucucaauaguguauac

SEQ ID NO: 1316608 - RNA, 19 nt, Artificial Sequence
  Description of Artificial Sequence: Synthetic oligonucleotide
auuaucaccuaagcauuua

SEQ ID NO: 1316609 - RNA, 19 nt, Artificial Sequence
  Description of Artificial Sequence: Synthetic oligonucleotide
ccaauaucaucaaacugga

SEQ ID NO: 1316610 - RNA, 19 nt, Artificial Sequence
  Description of Artificial Sequence: Synthetic oligonucleotide
agcuucaauacaguagcua

SEQ ID NO: 1316611 - RNA, 19 nt, Artificial Sequence
  Description of Artificial Sequence: Synthetic oligonucleotide
acacagauggaaaggcagu

SEQ ID NO: 1316612 - RNA, 19 nt, Artificial Sequence
  Description of Artificial Sequence: Synthetic oligonucleotide
accucgcagaaccgcugac

SEQ ID NO: 1316613 - RNA, 19 nt, Artificial Sequence
  Description of Artificial Sequence: Synthetic oligonucleotide
cuaucaacauccaccuucu

SEQ ID NO: 1316614 - RNA, 19 nt, Artificial Sequence
  Description of Artificial Sequence: Synthetic oligonucleotide
aagcuucaauacaguagcu

SEQ ID NO: 1316615 - RNA, 19 nt, Artificial Sequence
  Description of Artificial Sequence: Synthetic oligonucleotide
uagcauguucuggaaguuc

SEQ ID NO: 1316616 - RNA, 19 nt, Artificial Sequence
  Description of Artificial Sequence: Synthetic oligonucleotide
guucaccucgcagaaccgc

SEQ ID NO: 1316617 - RNA, 19 nt, Artificial Sequence
  Description of Artificial Sequence: Synthetic oligonucleotide
cuucggcccaugauguuca

SEQ ID NO: 1316618 - RNA, 19 nt, Artificial Sequence
  Description of Artificial Sequence: Synthetic oligonucleotide
aucugacucaagucucaaa

SEQ ID NO: 1316619 - RNA, 19 nt, Artificial Sequence
  Description of Artificial Sequence: Synthetic oligonucleotide
agccuauuuaugggcagca

SEQ ID NO: 1316620 - RNA, 19 nt, Artificial Sequence
  Description of Artificial Sequence: Synthetic oligonucleotide
cccuggaccaaaugugucc

SEQ ID NO: 1316621 - RNA, 19 nt, Artificial Sequence
  Description of Artificial Sequence: Synthetic oligonucleotide
aggcagucucaauagugua

SEQ ID NO: 1316622 - RNA, 19 nt, Artificial Sequence
  Description of Artificial Sequence: Synthetic oligonucleotide
gacuaggacauggggccug

SEQ ID NO: 1316623 - RNA, 19 nt, Artificial Sequence
  Description of Artificial Sequence: Synthetic oligonucleotide
gugguagaucugaaguaac

SEQ ID NO: 1316624 - RNA, 19 nt, Artificial Sequence
  Description of Artificial Sequence: Synthetic oligonucleotide
cugcuagccauguaauuua

SEQ ID NO: 1316625 - RNA, 19 nt, Artificial Sequence
  Description of Artificial Sequence: Synthetic oligonucleotide
ugugggaacuaggggcaca

SEQ ID NO: 1316626 - RNA, 19 nt, Artificial Sequence
  Description of Artificial Sequence: Synthetic oligonucleotide
gcagacuuacauuaucugu

SEQ ID NO: 1316627 - RNA, 19 nt, Artificial Sequence
  Description of Artificial Sequence: Synthetic oligonucleotide
gcagaugugugggaacuag

SEQ ID NO: 1316628 - RNA, 19 nt, Artificial Sequence
  Description of Artificial Sequence: Synthetic oligonucleotide
ggacauggggccugaagca

SEQ ID NO: 1316629 - RNA, 19 nt, Artificial Sequence
  Description of Artificial Sequence: Synthetic oligonucleotide
ucgcagaaccgcugacgca

SEQ ID NO: 1316630 - RNA, 19 nt, Artificial Sequence
  Description of Artificial Sequence: Synthetic oligonucleotide
uggaccaaauguguccguu

SEQ ID NO: 1316631 - RNA, 19 nt, Artificial Sequence
  Description of Artificial Sequence: Synthetic oligonucleotide
cuccaaaugcagacuuaca

SEQ ID NO: 1316632 - RNA, 19 nt, Artificial Sequence
  Description of Artificial Sequence: Synthetic oligonucleotide
ccuacuuugcaaaguaaaa

SEQ ID NO: 1316633 - RNA, 19 nt, Artificial Sequence
  Description of Artificial Sequence: Synthetic oligonucleotide
gggcagcaacaacauaaag

SEQ ID NO: 1316634 - RNA, 19 nt, Artificial Sequence
  Description of Artificial Sequence: Synthetic oligonucleotide
ggaacuaggggcacacuuc

SEQ ID NO: 1316635 - RNA, 19 nt, Artificial Sequence
  Description of Artificial Sequence: Synthetic oligonucleotide
cccaugauguucaccucgc

SEQ ID NO: 1316636 - RNA, 19 nt, Artificial Sequence
  Description of Artificial Sequence: Synthetic oligonucleotide
aggggcacacuucggccca

SEQ ID NO: 1316637 - RNA, 19 nt, Artificial Sequence
  Description of Artificial Sequence: Synthetic oligonucleotide
ugacuaggacauggggccu

SEQ ID NO: 1316638 - RNA, 19 nt, Artificial Sequence
  Description of Artificial Sequence: Synthetic oligonucleotide
ucaucauccccuggaccaa

SEQ ID NO: 1316639 - RNA, 19 nt, Artificial Sequence
  Description of Artificial Sequence: Synthetic oligonucleotide
cugacgcaaaacacacaga

SEQ ID NO: 1316640 - RNA, 19 nt, Artificial Sequence
  Description of Artificial Sequence: Synthetic oligonucleotide
ccgcugacgcaaaacacac

SEQ ID NO: 1316641 - RNA, 19 nt, Artificial Sequence
  Description of Artificial Sequence: Synthetic oligonucleotide
gugggaacuaggggcacac

SEQ ID NO: 1316642 - RNA, 19 nt, Artificial Sequence
  Description of Artificial Sequence: Synthetic oligonucleotide
ugcuaucaacauccaccuu

SEQ ID NO: 1316643 - RNA, 19 nt, Artificial Sequence
  Description of Artificial Sequence: Synthetic oligonucleotide
cugaagcagauguguggga

SEQ ID NO: 1316644 - RNA, 19 nt, Artificial Sequence
  Description of Artificial Sequence: Synthetic oligonucleotide
uaucaacauccaccuucuu

SEQ ID NO: 1316645 - RNA, 19 nt, Artificial Sequence
  Description of Artificial Sequence: Synthetic oligonucleotide
cccaaccuacuuugcaaag

SEQ ID NO: 1316646 - RNA, 19 nt, Artificial Sequence
  Description of Artificial Sequence: Synthetic oligonucleotide
ucggcccaugauguucacc

SEQ ID NO: 1316647 - RNA, 19 nt, Artificial Sequence
  Description of Artificial Sequence: Synthetic oligonucleotide
gucaacuauuguauuucua

SEQ ID NO: 1316648 - RNA, 19 nt, Artificial Sequence
  Description of Artificial Sequence: Synthetic oligonucleotide
acgcaaguaucaaaacaua

SEQ ID NO: 1316649 - RNA, 19 nt, Artificial Sequence
  Description of Artificial Sequence: Synthetic oligonucleotide
cugcacugugaaaagccua

SEQ ID NO: 1316650 - RNA, 19 nt, Artificial Sequence
  Description of Artificial Sequence: Synthetic oligonucleotide
acauggggccugaagcaga

SEQ ID NO: 1316651 - RNA, 19 nt, Artificial Sequence
  Description of Artificial Sequence: Synthetic oligonucleotide
cccuaaguucaauuacauc

SEQ ID NO: 1316652 - RNA, 19 nt, Artificial Sequence
  Description of Artificial Sequence: Synthetic oligonucleotide
gauuaucaccuaagcauuu

SEQ ID NO: 1316653 - RNA, 19 nt, Artificial Sequence
  Description of Artificial Sequence: Synthetic oligonucleotide
aggcuauaaugaguguaua

SEQ ID NO: 1316654 - RNA, 19 nt, Artificial Sequence
  Description of Artificial Sequence: Synthetic oligonucleotide
acuaggacauggggccuga

SEQ ID NO: 1316655 - RNA, 19 nt, Artificial Sequence
  Description of Artificial Sequence: Synthetic oligonucleotide
cauugucaacuauuguauu

SEQ ID NO: 1316656 - RNA, 19 nt, Artificial Sequence
  Description of Artificial Sequence: Synthetic oligonucleotide
ccucgcagaaccgcugacg

SEQ ID NO: 1316657 - RNA, 19 nt, Artificial Sequence
  Description of Artificial Sequence: Synthetic oligonucleotide
ggguaugcauuagaaaagu

SEQ ID NO: 1316658 - RNA, 19 nt, Artificial Sequence
  Description of Artificial Sequence: Synthetic oligonucleotide
auggcuccauaaauacaaa

SEQ ID NO: 1316659 - RNA, 19 nt, Artificial Sequence
  Description of Artificial Sequence: Synthetic oligonucleotide
ggccugaagcagaugugug

SEQ ID NO: 1316660 - RNA, 19 nt, Artificial Sequence
  Description of Artificial Sequence: Synthetic oligonucleotide
uucggcccaugauguucac

SEQ ID NO: 1316661 - RNA, 19 nt, Artificial Sequence
  Description of Artificial Sequence: Synthetic oligonucleotide
gguaugcauuagaaaagua

SEQ ID NO: 1316662 - RNA, 19 nt, Artificial Sequence
  Description of Artificial Sequence: Synthetic oligonucleotide
ugggaacuaggggcacacu

SEQ ID NO: 1316663 - RNA, 19 nt, Artificial Sequence
  Description of Artificial Sequence: Synthetic oligonucleotide
caccucgcagaaccgcuga

SEQ ID NO: 1316664 - RNA, 19 nt, Artificial Sequence
  Description of Artificial Sequence: Synthetic oligonucleotide
gggaacuaggggcacacuu

SEQ ID NO: 1316665 - RNA, 19 nt, Artificial Sequence
  Description of Artificial Sequence: Synthetic oligonucleotide
agcagaugugugggaacua

SEQ ID NO: 1316666 - RNA, 19 nt, Artificial Sequence
  Description of Artificial Sequence: Synthetic oligonucleotide
caaauguguccguuucauu

SEQ ID NO: 1316667 - RNA, 19 nt, Artificial Sequence
  Description of Artificial Sequence: Synthetic oligonucleotide
ccccuggaccaaauguguc

SEQ ID NO: 1316668 - RNA, 19 nt, Artificial Sequence
  Description of Artificial Sequence: Synthetic oligonucleotide
cauggggccugaagcagau

SEQ ID NO: 1316669 - RNA, 19 nt, Artificial Sequence
  Description of Artificial Sequence: Synthetic oligonucleotide
cucuuucaauuuucauuuu

SEQ ID NO: 1316670 - RNA, 19 nt, Artificial Sequence
  Description of Artificial Sequence: Synthetic oligonucleotide
cgcaaguaucaaaacauau

SEQ ID NO: 1316671 - RNA, 19 nt, Artificial Sequence
  Description of Artificial Sequence: Synthetic oligonucleotide
ggcagucucaauaguguau

SEQ ID NO: 1316672 - RNA, 19 nt, Artificial Sequence
  Description of Artificial Sequence: Synthetic oligonucleotide
cagaaccgcugacgcaaaa

SEQ ID NO: 1316673 - RNA, 19 nt, Artificial Sequence
  Description of Artificial Sequence: Synthetic oligonucleotide
gggccugaagcagaugugu

SEQ ID NO: 1316674 - RNA, 19 nt, Artificial Sequence
  Description of Artificial Sequence: Synthetic oligonucleotide
ggaccaaauguguccguuu

SEQ ID NO: 1316675 - RNA, 19 nt, Artificial Sequence
  Description of Artificial Sequence: Synthetic oligonucleotide
cuggaccaaauguguccgu

SEQ ID NO: 1316676 - RNA, 19 nt, Artificial Sequence
  Description of Artificial Sequence: Synthetic oligonucleotide
caacaacauaaaggcuaua

SEQ ID NO: 1316677 - RNA, 19 nt, Artificial Sequence
  Description of Artificial Sequence: Synthetic oligonucleotide
cgcagaaccgcugacgcaa

SEQ ID NO: 1316678 - RNA, 19 nt, Artificial Sequence
  Description of Artificial Sequence: Synthetic oligonucleotide
ccaaauguguccguuucau

SEQ ID NO: 1316679 - RNA, 19 nt, Artificial Sequence
  Description of Artificial Sequence: Synthetic oligonucleotide
gccagaugacuaggacaug

SEQ ID NO: 1316680 - RNA, 19 nt, Artificial Sequence
  Description of Artificial Sequence: Synthetic oligonucleotide
ccaugauguucaccucgca

SEQ ID NO: 1316681 - RNA, 19 nt, Artificial Sequence
  Description of Artificial Sequence: Synthetic oligonucleotide
ccaaccuacuuugcaaagu

SEQ ID NO: 1316682 - RNA, 19 nt, Artificial Sequence
  Description of Artificial Sequence: Synthetic oligonucleotide
gccuauuuaugggcagcaa

SEQ ID NO: 1316683 - RNA, 19 nt, Artificial Sequence
  Description of Artificial Sequence: Synthetic oligonucleotide
gcacacuucggcccaugau

SEQ ID NO: 1316684 - RNA, 19 nt, Artificial Sequence
  Description of Artificial Sequence: Synthetic oligonucleotide
gcagaaccgcugacgcaaa

SEQ ID NO: 1316685 - RNA, 19 nt, Artificial Sequence
  Description of Artificial Sequence: Synthetic oligonucleotide
cacuucggcccaugauguu

SEQ ID NO: 1316686 - RNA, 19 nt, Artificial Sequence
  Description of Artificial Sequence: Synthetic oligonucleotide
cgcugacgcaaaacacaca

SEQ ID NO: 1316687 - RNA, 19 nt, Artificial Sequence
  Description of Artificial Sequence: Synthetic oligonucleotide
cuguaccccuaaguucaau

SEQ ID NO: 1316688 - RNA, 19 nt, Artificial Sequence
  Description of Artificial Sequence: Synthetic oligonucleotide
gcacugugaaaagccuauu

SEQ ID NO: 1316689 - RNA, 19 nt, Artificial Sequence
  Description of Artificial Sequence: Synthetic oligonucleotide
ggggcacacuucggcccau

SEQ ID NO: 1316690 - RNA, 19 nt, Artificial Sequence
  Description of Artificial Sequence: Synthetic oligonucleotide
uuggcgaaaauacucagcg

SEQ ID NO: 1316691 - RNA, 19 nt, Artificial Sequence
  Description of Artificial Sequence: Synthetic oligonucleotide
uccuuugcugccaagaugg

SEQ ID NO: 1316692 - RNA, 19 nt, Artificial Sequence
  Description of Artificial Sequence: Synthetic oligonucleotide
uucaaauacacacugcugu

SEQ ID NO: 1316693 - RNA, 19 nt, Artificial Sequence
  Description of Artificial Sequence: Synthetic oligonucleotide
guuguaguuaauaaggagg

SEQ ID NO: 1316694 - RNA, 19 nt, Artificial Sequence
  Description of Artificial Sequence: Synthetic oligonucleotide
uuaauaaggaggcagcgcu

SEQ ID NO: 1316695 - RNA, 19 nt, Artificial Sequence
  Description of Artificial Sequence: Synthetic oligonucleotide
ugugauauugugcucacca

SEQ ID NO: 1316696 - RNA, 19 nt, Artificial Sequence
  Description of Artificial Sequence: Synthetic oligonucleotide
aagugcgugacaccgaggg

SEQ ID NO: 1316697 - RNA, 19 nt, Artificial Sequence
  Description of Artificial Sequence: Synthetic oligonucleotide
agagacaacgucucguacc

SEQ ID NO: 1316698 - RNA, 19 nt, Artificial Sequence
  Description of Artificial Sequence: Synthetic oligonucleotide
uguagugucauccggggcc

SEQ ID NO: 1316699 - RNA, 19 nt, Artificial Sequence
  Description of Artificial Sequence: Synthetic oligonucleotide
cuucuuucgaaccugcagg

SEQ ID NO: 1316700 - RNA, 19 nt, Artificial Sequence
  Description of Artificial Sequence: Synthetic oligonucleotide
uauugugcucaccaucugg

SEQ ID NO: 1316701 - RNA, 19 nt, Artificial Sequence
  Description of Artificial Sequence: Synthetic oligonucleotide
acuuugaugcuguaguguc

SEQ ID NO: 1316702 - RNA, 19 nt, Artificial Sequence
  Description of Artificial Sequence: Synthetic oligonucleotide
accauguugagguuuauug

SEQ ID NO: 1316703 - RNA, 19 nt, Artificial Sequence
  Description of Artificial Sequence: Synthetic oligonucleotide
aaggaagugcgugacaccg

SEQ ID NO: 1316704 - RNA, 19 nt, Artificial Sequence
  Description of Artificial Sequence: Synthetic oligonucleotide
auaaggaagugcgugacac

SEQ ID NO: 1316705 - RNA, 19 nt, Artificial Sequence
  Description of Artificial Sequence: Synthetic oligonucleotide
gugaacacgaacgagugcg

SEQ ID NO: 1316706 - RNA, 19 nt, Artificial Sequence
  Description of Artificial Sequence: Synthetic oligonucleotide
guaguuaauaaggaggcag

SEQ ID NO: 1316707 - RNA, 19 nt, Artificial Sequence
  Description of Artificial Sequence: Synthetic oligonucleotide
ucaaagucgggccucccgg

SEQ ID NO: 1316708 - RNA, 19 nt, Artificial Sequence
  Description of Artificial Sequence: Synthetic oligonucleotide
uguugagguuuauuggagg

SEQ ID NO: 1316709 - RNA, 19 nt, Artificial Sequence
  Description of Artificial Sequence: Synthetic oligonucleotide
uuugaugcuguagugucgg

SEQ ID NO: 1316710 - RNA, 19 nt, Artificial Sequence
  Description of Artificial Sequence: Synthetic oligonucleotide
uaguuaauaaggaggcagc

SEQ ID NO: 1316711 - RNA, 19 nt, Artificial Sequence
  Description of Artificial Sequence: Synthetic oligonucleotide
aagagacaacgucucguac

SEQ ID NO: 1316712 - RNA, 19 nt, Artificial Sequence
  Description of Artificial Sequence: Synthetic oligonucleotide
aacgucucguaccagugug

SEQ ID NO: 1316713 - RNA, 19 nt, Artificial Sequence
  Description of Artificial Sequence: Synthetic oligonucleotide
ugggugguuaaacugcugc

SEQ ID NO: 1316714 - RNA, 19 nt, Artificial Sequence
  Description of Artificial Sequence: Synthetic oligonucleotide
cuuucgaaccugcaggcgg

SEQ ID NO: 1316715 - RNA, 19 nt, Artificial Sequence
  Description of Artificial Sequence: Synthetic oligonucleotide
caauguggggcauccaugg

SEQ ID NO: 1316716 - RNA, 19 nt, Artificial Sequence
  Description of Artificial Sequence: Synthetic oligonucleotide
ugagcuguagugucauccg

SEQ ID NO: 1316717 - RNA, 19 nt, Artificial Sequence
  Description of Artificial Sequence: Synthetic oligonucleotide
acccuuugguuuuggaggc

SEQ ID NO: 1316718 - RNA, 19 nt, Artificial Sequence
  Description of Artificial Sequence: Synthetic oligonucleotide
aguuaauaaggaggcagcg

SEQ ID NO: 1316719 - RNA, 19 nt, Artificial Sequence
  Description of Artificial Sequence: Synthetic oligonucleotide
uuucgaaccugcaggcggg

SEQ ID NO: 1316720 - RNA, 19 nt, Artificial Sequence
  Description of Artificial Sequence: Synthetic oligonucleotide
ugagguuuauuggagguga

SEQ ID NO: 1316721 - RNA, 19 nt, Artificial Sequence
  Description of Artificial Sequence: Synthetic oligonucleotide
gacuccuugggaucuaccc

SEQ ID NO: 1316722 - RNA, 19 nt, Artificial Sequence
  Description of Artificial Sequence: Synthetic oligonucleotide
ucuuaaugagcuguagugu

SEQ ID NO: 1316723 - RNA, 19 nt, Artificial Sequence
  Description of Artificial Sequence: Synthetic oligonucleotide
caagauaaggaagugcgug

SEQ ID NO: 1316724 - RNA, 19 nt, Artificial Sequence
  Description of Artificial Sequence: Synthetic oligonucleotide
ucagucuugugcacaaaac

SEQ ID NO: 1316725 - RNA, 19 nt, Artificial Sequence
  Description of Artificial Sequence: Synthetic oligonucleotide
uauuggaggugagaacugg

SEQ ID NO: 1316726 - RNA, 19 nt, Artificial Sequence
  Description of Artificial Sequence: Synthetic oligonucleotide
ucucguaccaguguguacu

SEQ ID NO: 1316727 - RNA, 19 nt, Artificial Sequence
  Description of Artificial Sequence: Synthetic oligonucleotide
uucuuucgaaccugcaggc

SEQ ID NO: 1316728 - RNA, 19 nt, Artificial Sequence
  Description of Artificial Sequence: Synthetic oligonucleotide
agguucuggaacauggugg

SEQ ID NO: 1316729 - RNA, 19 nt, Artificial Sequence
  Description of Artificial Sequence: Synthetic oligonucleotide
uuauuggaggugagaacug

SEQ ID NO: 1316730 - RNA, 19 nt, Artificial Sequence
  Description of Artificial Sequence: Synthetic oligonucleotide
aacgagugcggcugugcgg

SEQ ID NO: 1316731 - RNA, 19 nt, Artificial Sequence
  Description of Artificial Sequence: Synthetic oligonucleotide
ugcagucggcucauguugg

SEQ ID NO: 1316732 - RNA, 19 nt, Artificial Sequence
  Description of Artificial Sequence: Synthetic oligonucleotide
ugaacacgaacgagugcgg

SEQ ID NO: 1316733 - RNA, 19 nt, Artificial Sequence
  Description of Artificial Sequence: Synthetic oligonucleotide
cuuugaugcuguagugucg

SEQ ID NO: 1316734 - RNA, 19 nt, Artificial Sequence
  Description of Artificial Sequence: Synthetic oligonucleotide
gguuguaguuaauaaggag

SEQ ID NO: 1316735 - RNA, 19 nt, Artificial Sequence
  Description of Artificial Sequence: Synthetic oligonucleotide
ugaugugcaugcccugggg

SEQ ID NO: 1316736 - RNA, 19 nt, Artificial Sequence
  Description of Artificial Sequence: Synthetic oligonucleotide
aacacgaacgagugcggcu

SEQ ID NO: 1316737 - RNA, 19 nt, Artificial Sequence
  Description of Artificial Sequence: Synthetic oligonucleotide
ucaagauaaggaagugcgu

SEQ ID NO: 1316738 - RNA, 19 nt, Artificial Sequence
  Description of Artificial Sequence: Synthetic oligonucleotide
ugugcacguugauggaugg

SEQ ID NO: 1316739 - RNA, 19 nt, Artificial Sequence
  Description of Artificial Sequence: Synthetic oligonucleotide
agucuugugcacaaaacug

SEQ ID NO: 1316740 - RNA, 19 nt, Artificial Sequence
  Description of Artificial Sequence: Synthetic oligonucleotide
agucugauggcacucugcu

SEQ ID NO: 1316741 - RNA, 19 nt, Artificial Sequence
  Description of Artificial Sequence: Synthetic oligonucleotide
uugcguucuaaguucucag

SEQ ID NO: 1316742 - RNA, 19 nt, Artificial Sequence
  Description of Artificial Sequence: Synthetic oligonucleotide
gaacgagugcggcugugcg

SEQ ID NO: 1316743 - RNA, 19 nt, Artificial Sequence
  Description of Artificial Sequence: Synthetic oligonucleotide
gcuaaaacuguugagcacc

SEQ ID NO: 1316744 - RNA, 19 nt, Artificial Sequence
  Description of Artificial Sequence: Synthetic oligonucleotide
agugucggaaguccagcuc

SEQ ID NO: 1316745 - RNA, 19 nt, Artificial Sequence
  Description of Artificial Sequence: Synthetic oligonucleotide
gagacaacgucucguacca

SEQ ID NO: 1316746 - RNA, 19 nt, Artificial Sequence
  Description of Artificial Sequence: Synthetic oligonucleotide
ggcgaaaauacucagcguc

SEQ ID NO: 1316747 - RNA, 19 nt, Artificial Sequence
  Description of Artificial Sequence: Synthetic oligonucleotide
uaagucugauggcacucug

SEQ ID NO: 1316748 - RNA, 19 nt, Artificial Sequence
  Description of Artificial Sequence: Synthetic oligonucleotide
ugcauguugccacggccag

SEQ ID NO: 1316749 - RNA, 19 nt, Artificial Sequence
  Description of Artificial Sequence: Synthetic oligonucleotide
uccggguuguaguuaauaa

SEQ ID NO: 1316750 - RNA, 19 nt, Artificial Sequence
  Description of Artificial Sequence: Synthetic oligonucleotide
uggucuugacuccuuggga

SEQ ID NO: 1316751 - RNA, 19 nt, Artificial Sequence
  Description of Artificial Sequence: Synthetic oligonucleotide
cuggguaguuccuuuauga

SEQ ID NO: 1316752 - RNA, 19 nt, Artificial Sequence
  Description of Artificial Sequence: Synthetic oligonucleotide
uccaugguccauccacugc

SEQ ID NO: 1316753 - RNA, 19 nt, Artificial Sequence
  Description of Artificial Sequence: Synthetic oligonucleotide
uaaggaagugcgugacacc

SEQ ID NO: 1316754 - RNA, 19 nt, Artificial Sequence
  Description of Artificial Sequence: Synthetic oligonucleotide
ucugccugaaacaggccuc

SEQ ID NO: 1316755 - RNA, 19 nt, Artificial Sequence
  Description of Artificial Sequence: Synthetic oligonucleotide
guuucuugccuggaggacc

SEQ ID NO: 1316756 - RNA, 19 nt, Artificial Sequence
  Description of Artificial Sequence: Synthetic oligonucleotide
uguaguuaauaaggaggca

SEQ ID NO: 1316757 - RNA, 19 nt, Artificial Sequence
  Description of Artificial Sequence: Synthetic oligonucleotide
cagcuuggcgaaaauacuc

SEQ ID NO: 1316758 - RNA, 19 nt, Artificial Sequence
  Description of Artificial Sequence: Synthetic oligonucleotide
ucuuucgaaccugcaggcg

SEQ ID NO: 1316759 - RNA, 19 nt, Artificial Sequence
  Description of Artificial Sequence: Synthetic oligonucleotide
aacuggguaguuccuuuau

SEQ ID NO: 1316760 - RNA, 19 nt, Artificial Sequence
  Description of Artificial Sequence: Synthetic oligonucleotide
ccauguugagguuuauugg

SEQ ID NO: 1316761 - RNA, 19 nt, Artificial Sequence
  Description of Artificial Sequence: Synthetic oligonucleotide
gucaaagucgggccucccg

SEQ ID NO: 1316762 - RNA, 19 nt, Artificial Sequence
  Description of Artificial Sequence: Synthetic oligonucleotide
acuggguaguuccuuuaug

SEQ ID NO: 1316763 - RNA, 19 nt, Artificial Sequence
  Description of Artificial Sequence: Synthetic oligonucleotide
uugagguuuauuggaggug

SEQ ID NO: 1316764 - RNA, 19 nt, Artificial Sequence
  Description of Artificial Sequence: Synthetic oligonucleotide
ugugcacaaaacuguggaa

SEQ ID NO: 1316765 - RNA, 19 nt, Artificial Sequence
  Description of Artificial Sequence: Synthetic oligonucleotide
guuuugcucaagauaagga

SEQ ID NO: 1316766 - RNA, 19 nt, Artificial Sequence
  Description of Artificial Sequence: Synthetic oligonucleotide
aaacugcugcucgugcauc

SEQ ID NO: 1316767 - RNA, 19 nt, Artificial Sequence
  Description of Artificial Sequence: Synthetic oligonucleotide
aggacauugccauucccaa

SEQ ID NO: 1316768 - RNA, 19 nt, Artificial Sequence
  Description of Artificial Sequence: Synthetic oligonucleotide
ucaugccccggcuugcacc

SEQ ID NO: 1316769 - RNA, 19 nt, Artificial Sequence
  Description of Artificial Sequence: Synthetic oligonucleotide
uguugccacggccagccac

SEQ ID NO: 1316770 - RNA, 19 nt, Artificial Sequence
  Description of Artificial Sequence: Synthetic oligonucleotide
ggggcuaaaacuguugagc

SEQ ID NO: 1316771 - RNA, 19 nt, Artificial Sequence
  Description of Artificial Sequence: Synthetic oligonucleotide
ccucgcgugaacacgaacg

SEQ ID NO: 1316772 - RNA, 19 nt, Artificial Sequence
  Description of Artificial Sequence: Synthetic oligonucleotide
gaagagacaacgucucgua

SEQ ID NO: 1316773 - RNA, 19 nt, Artificial Sequence
  Description of Artificial Sequence: Synthetic oligonucleotide
ugguccauccacugccaag

SEQ ID NO: 1316774 - RNA, 19 nt, Artificial Sequence
  Description of Artificial Sequence: Synthetic oligonucleotide
ucauccggggcccaaucuc

SEQ ID NO: 1316775 - RNA, 19 nt, Artificial Sequence
  Description of Artificial Sequence: Synthetic oligonucleotide
cucgagguugcggagcugg

SEQ ID NO: 1316776 - RNA, 19 nt, Artificial Sequence
  Description of Artificial Sequence: Synthetic oligonucleotide
gaggacauugccauuccca

SEQ ID NO: 1316777 - RNA, 19 nt, Artificial Sequence
  Description of Artificial Sequence: Synthetic oligonucleotide
auguugagguuuauuggag

SEQ ID NO: 1316778 - RNA, 19 nt, Artificial Sequence
  Description of Artificial Sequence: Synthetic oligonucleotide
gcguucuaaguucucagcc

SEQ ID NO: 1316779 - RNA, 19 nt, Artificial Sequence
  Description of Artificial Sequence: Synthetic oligonucleotide
gaggcagcgcuuaauggug

SEQ ID NO: 1316780 - RNA, 19 nt, Artificial Sequence
  Description of Artificial Sequence: Synthetic oligonucleotide
ugggaguccggguuguagu

SEQ ID NO: 1316781 - RNA, 19 nt, Artificial Sequence
  Description of Artificial Sequence: Synthetic oligonucleotide
auauugugcucaccaucug

SEQ ID NO: 1316782 - RNA, 19 nt, Artificial Sequence
  Description of Artificial Sequence: Synthetic oligonucleotide
agugcgugacaccgagggg

SEQ ID NO: 1316783 - RNA, 19 nt, Artificial Sequence
  Description of Artificial Sequence: Synthetic oligonucleotide
caaagucgggccucccggg

SEQ ID NO: 1316784 - RNA, 19 nt, Artificial Sequence
  Description of Artificial Sequence: Synthetic oligonucleotide
cuugccuggaggaccuccc

SEQ ID NO: 1316785 - RNA, 19 nt, Artificial Sequence
  Description of Artificial Sequence: Synthetic oligonucleotide
ccggcuugcacccacaggc

SEQ ID NO: 1316786 - RNA, 19 nt, Artificial Sequence
  Description of Artificial Sequence: Synthetic oligonucleotide
ggaagugcgugacaccgag

SEQ ID NO: 1316787 - RNA, 19 nt, Artificial Sequence
  Description of Artificial Sequence: Synthetic oligonucleotide
aacaccuucuuggaucuua

SEQ ID NO: 1316788 - RNA, 19 nt, Artificial Sequence
  Description of Artificial Sequence: Synthetic oligonucleotide
ugcucaagauaaggaagug

SEQ ID NO: 1316789 - RNA, 19 nt, Artificial Sequence
  Description of Artificial Sequence: Synthetic oligonucleotide
ucuacccuuugguuuugga

SEQ ID NO: 1316790 - RNA, 19 nt, Artificial Sequence
  Description of Artificial Sequence: Synthetic oligonucleotide
uagugucggaaguccagcu

SEQ ID NO: 1316791 - RNA, 19 nt, Artificial Sequence
  Description of Artificial Sequence: Synthetic oligonucleotide
cuccgcuuggccacucugg

SEQ ID NO: 1316792 - RNA, 19 nt, Artificial Sequence
  Description of Artificial Sequence: Synthetic oligonucleotide
cacguugauggaugggaac

SEQ ID NO: 1316793 - RNA, 19 nt, Artificial Sequence
  Description of Artificial Sequence: Synthetic oligonucleotide
guugagguuuauuggaggu

SEQ ID NO: 1316794 - RNA, 19 nt, Artificial Sequence
  Description of Artificial Sequence: Synthetic oligonucleotide
agaacuggguaguuccuuu

SEQ ID NO: 1316795 - RNA, 19 nt, Artificial Sequence
  Description of Artificial Sequence: Synthetic oligonucleotide
uaauaaggaggcagcgcuu

SEQ ID NO: 1316796 - RNA, 19 nt, Artificial Sequence
  Description of Artificial Sequence: Synthetic oligonucleotide
acacgaacgagugcggcug

SEQ ID NO: 1316797 - RNA, 19 nt, Artificial Sequence
  Description of Artificial Sequence: Synthetic oligonucleotide
ucuccgcuuggccacucug

SEQ ID NO: 1316798 - RNA, 19 nt, Artificial Sequence
  Description of Artificial Sequence: Synthetic oligonucleotide
gaacacgaacgagugcggc

SEQ ID NO: 1316799 - RNA, 19 nt, Artificial Sequence
  Description of Artificial Sequence: Synthetic oligonucleotide
ugacuccuugggaucuacc

SEQ ID NO: 1316800 - RNA, 19 nt, Artificial Sequence
  Description of Artificial Sequence: Synthetic oligonucleotide
guagugucggaaguccagc

SEQ ID NO: 1316801 - RNA, 19 nt, Artificial Sequence
  Description of Artificial Sequence: Synthetic oligonucleotide
gggcuaaaacuguugagca

SEQ ID NO: 1316802 - RNA, 19 nt, Artificial Sequence
  Description of Artificial Sequence: Synthetic oligonucleotide
ugcucgugcauccgguguc

SEQ ID NO: 1316803 - RNA, 19 nt, Artificial Sequence
  Description of Artificial Sequence: Synthetic oligonucleotide
uggcgaaaauacucagcgu

SEQ ID NO: 1316804 - RNA, 19 nt, Artificial Sequence
  Description of Artificial Sequence: Synthetic oligonucleotide
ugggaucuacccuuugguu

SEQ ID NO: 1316805 - RNA, 19 nt, Artificial Sequence
  Description of Artificial Sequence: Synthetic oligonucleotide
aggucaaagucgggccucc

SEQ ID NO: 1316806 - RNA, 19 nt, Artificial Sequence
  Description of Artificial Sequence: Synthetic oligonucleotide
gucgccgcagggaagagac

SEQ ID NO: 1316807 - RNA, 19 nt, Artificial Sequence
  Description of Artificial Sequence: Synthetic oligonucleotide
acaacgucucguaccagug

SEQ ID NO: 1316808 - RNA, 19 nt, Artificial Sequence
  Description of Artificial Sequence: Synthetic oligonucleotide
ccggguuguaguuaauaag

SEQ ID NO: 1316809 - RNA, 19 nt, Artificial Sequence
  Description of Artificial Sequence: Synthetic oligonucleotide
caucuguccuuguccgggc

SEQ ID NO: 1316810 - RNA, 19 nt, Artificial Sequence
  Description of Artificial Sequence: Synthetic oligonucleotide
cuugcguucuaaguucuca

SEQ ID NO: 1316811 - RNA, 19 nt, Artificial Sequence
  Description of Artificial Sequence: Synthetic oligonucleotide
cccaaucucuguaagucug

SEQ ID NO: 1316812 - RNA, 19 nt, Artificial Sequence
  Description of Artificial Sequence: Synthetic oligonucleotide
uucccgcuugcguucuaag

SEQ ID NO: 1316813 - RNA, 19 nt, Artificial Sequence
  Description of Artificial Sequence: Synthetic oligonucleotide
gggaagagacaacgucucg

SEQ ID NO: 1316814 - RNA, 19 nt, Artificial Sequence
  Description of Artificial Sequence: Synthetic oligonucleotide
gcucaagauaaggaagugc

SEQ ID NO: 1316815 - RNA, 19 nt, Artificial Sequence
  Description of Artificial Sequence: Synthetic oligonucleotide
cugcauguugccacggcca

SEQ ID NO: 1316816 - RNA, 19 nt, Artificial Sequence
  Description of Artificial Sequence: Synthetic oligonucleotide
ucgcgugaacacgaacgag

SEQ ID NO: 1316817 - RNA, 19 nt, Artificial Sequence
  Description of Artificial Sequence: Synthetic oligonucleotide
cagcuacugccacacaguc

SEQ ID NO: 1316818 - RNA, 19 nt, Artificial Sequence
  Description of Artificial Sequence: Synthetic oligonucleotide
cagucuugugcacaaaacu

SEQ ID NO: 1316819 - RNA, 19 nt, Artificial Sequence
  Description of Artificial Sequence: Synthetic oligonucleotide
gugugcacguugauggaug

SEQ ID NO: 1316820 - RNA, 19 nt, Artificial Sequence
  Description of Artificial Sequence: Synthetic oligonucleotide
gaagugcgugacaccgagg

SEQ ID NO: 1316821 - RNA, 19 nt, Artificial Sequence
  Description of Artificial Sequence: Synthetic oligonucleotide
gaguccggguuguaguuaa

SEQ ID NO: 1316822 - RNA, 19 nt, Artificial Sequence
  Description of Artificial Sequence: Synthetic oligonucleotide
ggcuaaaacuguugagcac

SEQ ID NO: 1316823 - RNA, 19 nt, Artificial Sequence
  Description of Artificial Sequence: Synthetic oligonucleotide
cucgaaguucccgcuugcg

SEQ ID NO: 1316824 - RNA, 19 nt, Artificial Sequence
  Description of Artificial Sequence: Synthetic oligonucleotide
guagugucauccggggccc

SEQ ID NO: 1316825 - RNA, 19 nt, Artificial Sequence
  Description of Artificial Sequence: Synthetic oligonucleotide
gacgcugcgccccgcccgg

SEQ ID NO: 1316826 - RNA, 19 nt, Artificial Sequence
  Description of Artificial Sequence: Synthetic oligonucleotide
ugcuggacgcugcgccccg

SEQ ID NO: 1316827 - RNA, 19 nt, Artificial Sequence
  Description of Artificial Sequence: Synthetic oligonucleotide
uucaugccccggcuugcac

SEQ ID NO: 1316828 - RNA, 19 nt, Artificial Sequence
  Description of Artificial Sequence: Synthetic oligonucleotide
cucgcgugaacacgaacga

SEQ ID NO: 1316829 - RNA, 19 nt, Artificial Sequence
  Description of Artificial Sequence: Synthetic oligonucleotide
gaggggugggugguuaaac

SEQ ID NO: 1316830 - RNA, 19 nt, Artificial Sequence
  Description of Artificial Sequence: Synthetic oligonucleotide
acccgccgcacauccuggc

SEQ ID NO: 1316831 - RNA, 19 nt, Artificial Sequence
  Description of Artificial Sequence: Synthetic oligonucleotide
uugccauucccaacaccuu

SEQ ID NO: 1316832 - RNA, 19 nt, Artificial Sequence
  Description of Artificial Sequence: Synthetic oligonucleotide
ucggcucauguugggaaac

SEQ ID NO: 1316833 - RNA, 19 nt, Artificial Sequence
  Description of Artificial Sequence: Synthetic oligonucleotide
ggcccaaucucuguaaguc

SEQ ID NO: 1316834 - RNA, 19 nt, Artificial Sequence
  Description of Artificial Sequence: Synthetic oligonucleotide
cuugugggcuucucgaagu

SEQ ID NO: 1316835 - RNA, 19 nt, Artificial Sequence
  Description of Artificial Sequence: Synthetic oligonucleotide
ccaauguggggcauccaug

SEQ ID NO: 1316836 - RNA, 19 nt, Artificial Sequence
  Description of Artificial Sequence: Synthetic oligonucleotide
uugacuccuugggaucuac

SEQ ID NO: 1316837 - RNA, 19 nt, Artificial Sequence
  Description of Artificial Sequence: Synthetic oligonucleotide
ccaucuguccuuguccggg

SEQ ID NO: 1316838 - RNA, 19 nt, Artificial Sequence
  Description of Artificial Sequence: Synthetic oligonucleotide
gucucguaccaguguguac

SEQ ID NO: 1316839 - RNA, 19 nt, Artificial Sequence
  Description of Artificial Sequence: Synthetic oligonucleotide
cugguuccgccucacucuc

SEQ ID NO: 1316840 - RNA, 19 nt, Artificial Sequence
  Description of Artificial Sequence: Synthetic oligonucleotide
aucuacccuuugguuuugg

SEQ ID NO: 1316841 - RNA, 19 nt, Artificial Sequence
  Description of Artificial Sequence: Synthetic oligonucleotide
ggaggcagcgcuuaauggu

SEQ ID NO: 1316842 - RNA, 19 nt, Artificial Sequence
  Description of Artificial Sequence: Synthetic oligonucleotide
guguacuuguugaucugga

SEQ ID NO: 1316843 - RNA, 19 nt, Artificial Sequence
  Description of Artificial Sequence: Synthetic oligonucleotide
ucguaccaguguguacuug

SEQ ID NO: 1316844 - RNA, 19 nt, Artificial Sequence
  Description of Artificial Sequence: Synthetic oligonucleotide
ggacauugccauucccaac

SEQ ID NO: 1316845 - RNA, 19 nt, Artificial Sequence
  Description of Artificial Sequence: Synthetic oligonucleotide
ugguuccgccucacucucc

SEQ ID NO: 1316846 - RNA, 19 nt, Artificial Sequence
  Description of Artificial Sequence: Synthetic oligonucleotide
ggguuguaguuaauaagga

SEQ ID NO: 1316847 - RNA, 19 nt, Artificial Sequence
  Description of Artificial Sequence: Synthetic oligonucleotide
ggcgcaucagcuucaaaua

SEQ ID NO: 1316848 - RNA, 19 nt, Artificial Sequence
  Description of Artificial Sequence: Synthetic oligonucleotide
cagcgcuuaaugguguuca

SEQ ID NO: 1316849 - RNA, 19 nt, Artificial Sequence
  Description of Artificial Sequence: Synthetic oligonucleotide
guugccacggccagccaca

SEQ ID NO: 1316850 - RNA, 19 nt, Artificial Sequence
  Description of Artificial Sequence: Synthetic oligonucleotide
uucuggugccgggaccgcc

SEQ ID NO: 1316851 - RNA, 19 nt, Artificial Sequence
  Description of Artificial Sequence: Synthetic oligonucleotide
gccgggaccgccccgacug

SEQ ID NO: 1316852 - RNA, 19 nt, Artificial Sequence
  Description of Artificial Sequence: Synthetic oligonucleotide
gcgaaaauacucagcguca

SEQ ID NO: 1316853 - RNA, 19 nt, Artificial Sequence
  Description of Artificial Sequence: Synthetic oligonucleotide
gugcacguugauggauggg

SEQ ID NO: 1316854 - RNA, 19 nt, Artificial Sequence
  Description of Artificial Sequence: Synthetic oligonucleotide
ggcguaggccucgagguug

SEQ ID NO: 1316855 - RNA, 19 nt, Artificial Sequence
  Description of Artificial Sequence: Synthetic oligonucleotide
uccggggcccaaucucugu

SEQ ID NO: 1316856 - RNA, 19 nt, Artificial Sequence
  Description of Artificial Sequence: Synthetic oligonucleotide
ggugagaacuggguaguuc

SEQ ID NO: 1316857 - RNA, 19 nt, Artificial Sequence
  Description of Artificial Sequence: Synthetic oligonucleotide
gacccgccgcacauccugg

SEQ ID NO: 1316858 - RNA, 19 nt, Artificial Sequence
  Description of Artificial Sequence: Synthetic oligonucleotide
ccgcagggaagagacaacg

SEQ ID NO: 1316859 - RNA, 19 nt, Artificial Sequence
  Description of Artificial Sequence: Synthetic oligonucleotide
ugucgccgcagggaagaga

SEQ ID NO: 1316860 - RNA, 19 nt, Artificial Sequence
  Description of Artificial Sequence: Synthetic oligonucleotide
ggcguguggcucugggucc

SEQ ID NO: 1316861 - RNA, 19 nt, Artificial Sequence
  Description of Artificial Sequence: Synthetic oligonucleotide
cgaaccugcaggcgggugg

SEQ ID NO: 1316862 - RNA, 19 nt, Artificial Sequence
  Description of Artificial Sequence: Synthetic oligonucleotide
gcucauguugggaaacuuc

SEQ ID NO: 1316863 - RNA, 19 nt, Artificial Sequence
  Description of Artificial Sequence: Synthetic oligonucleotide
cuguaagucugauggcacu

SEQ ID NO: 1316864 - RNA, 19 nt, Artificial Sequence
  Description of Artificial Sequence: Synthetic oligonucleotide
gugcauccggugucgccgc

SEQ ID NO: 1316865 - RNA, 19 nt, Artificial Sequence
  Description of Artificial Sequence: Synthetic oligonucleotide
cauccaugguccauccacu

SEQ ID NO: 1316866 - RNA, 19 nt, Artificial Sequence
  Description of Artificial Sequence: Synthetic oligonucleotide
ucgaaccugcaggcgggug

SEQ ID NO: 1316867 - RNA, 19 nt, Artificial Sequence
  Description of Artificial Sequence: Synthetic oligonucleotide
agccuggggcaguucugug

SEQ ID NO: 1316868 - RNA, 19 nt, Artificial Sequence
  Description of Artificial Sequence: Synthetic oligonucleotide
gucggcucauguugggaaa

SEQ ID NO: 1316869 - RNA, 19 nt, Artificial Sequence
  Description of Artificial Sequence: Synthetic oligonucleotide
cgugcauccggugucgccg

SEQ ID NO: 1316870 - RNA, 19 nt, Artificial Sequence
  Description of Artificial Sequence: Synthetic oligonucleotide
agacaacgucucguaccag

SEQ ID NO: 1316871 - RNA, 19 nt, Artificial Sequence
  Description of Artificial Sequence: Synthetic oligonucleotide
cacuuugaugcuguagugu

SEQ ID NO: 1316872 - RNA, 19 nt, Artificial Sequence
  Description of Artificial Sequence: Synthetic oligonucleotide
ccgcuugcguucuaaguuc

SEQ ID NO: 1316873 - RNA, 19 nt, Artificial Sequence
  Description of Artificial Sequence: Synthetic oligonucleotide
guugcggagcugggccugg

SEQ ID NO: 1316874 - RNA, 19 nt, Artificial Sequence
  Description of Artificial Sequence: Synthetic oligonucleotide
agguugcggcguguggcuc

SEQ ID NO: 1316875 - RNA, 19 nt, Artificial Sequence
  Description of Artificial Sequence: Synthetic oligonucleotide
cuggacgcugcgccccgcc

SEQ ID NO: 1316876 - RNA, 19 nt, Artificial Sequence
  Description of Artificial Sequence: Synthetic oligonucleotide
ggaucuacccuuugguuuu

SEQ ID NO: 1316877 - RNA, 19 nt, Artificial Sequence
  Description of Artificial Sequence: Synthetic oligonucleotide
augguggccaugagcuuga

SEQ ID NO: 1316878 - RNA, 19 nt, Artificial Sequence
  Description of Artificial Sequence: Synthetic oligonucleotide
ugcauccggugucgccgca

SEQ ID NO: 1316879 - RNA, 19 nt, Artificial Sequence
  Description of Artificial Sequence: Synthetic oligonucleotide
gucggaaguccagcucuug

SEQ ID NO: 1316880 - RNA, 19 nt, Artificial Sequence
  Description of Artificial Sequence: Synthetic oligonucleotide
agccccaauguggggcauc

SEQ ID NO: 1316881 - RNA, 19 nt, Artificial Sequence
  Description of Artificial Sequence: Synthetic oligonucleotide
caccuugaccucugccuga

SEQ ID NO: 1316882 - RNA, 19 nt, Artificial Sequence
  Description of Artificial Sequence: Synthetic oligonucleotide
gugggugguuaaacugcug

SEQ ID NO: 1316883 - RNA, 19 nt, Artificial Sequence
  Description of Artificial Sequence: Synthetic oligonucleotide
cugugcggcguaggccucg

SEQ ID NO: 1316884 - RNA, 19 nt, Artificial Sequence
  Description of Artificial Sequence: Synthetic oligonucleotide
acgucucguaccagugugu

SEQ ID NO: 1316885 - RNA, 19 nt, Artificial Sequence
  Description of Artificial Sequence: Synthetic oligonucleotide
cugucgccaucuguccuug

SEQ ID NO: 1316886 - RNA, 19 nt, Artificial Sequence
  Description of Artificial Sequence: Synthetic oligonucleotide
aggaagugcgugacaccga

SEQ ID NO: 1316887 - RNA, 19 nt, Artificial Sequence
  Description of Artificial Sequence: Synthetic oligonucleotide
ucgccgcagggaagagaca

SEQ ID NO: 1316888 - RNA, 19 nt, Artificial Sequence
  Description of Artificial Sequence: Synthetic oligonucleotide
ugccugaaacaggccucug

SEQ ID NO: 1316889 - RNA, 19 nt, Artificial Sequence
  Description of Artificial Sequence: Synthetic oligonucleotide
gcucgugcauccggugucg

SEQ ID NO: 1316890 - RNA, 19 nt, Artificial Sequence
  Description of Artificial Sequence: Synthetic oligonucleotide
cuuguccgggcucgcuuca

SEQ ID NO: 1316891 - RNA, 19 nt, Artificial Sequence
  Description of Artificial Sequence: Synthetic oligonucleotide
cauccggggcccaaucucu

SEQ ID NO: 1316892 - RNA, 19 nt, Artificial Sequence
  Description of Artificial Sequence: Synthetic oligonucleotide
ggugccccaggguccucgg

SEQ ID NO: 1316893 - RNA, 19 nt, Artificial Sequence
  Description of Artificial Sequence: Synthetic oligonucleotide
caccgccucuagaggugcc

SEQ ID NO: 1316894 - RNA, 19 nt, Artificial Sequence
  Description of Artificial Sequence: Synthetic oligonucleotide
ugugcggcguaggccucga

SEQ ID NO: 1316895 - RNA, 19 nt, Artificial Sequence
  Description of Artificial Sequence: Synthetic oligonucleotide
ugccgggaccgccccgacu

SEQ ID NO: 1316896 - RNA, 19 nt, Artificial Sequence
  Description of Artificial Sequence: Synthetic oligonucleotide
aggcagcgcuuaauggugu

SEQ ID NO: 1316897 - RNA, 19 nt, Artificial Sequence
  Description of Artificial Sequence: Synthetic oligonucleotide
gucauccggggcccaaucu

SEQ ID NO: 1316898 - RNA, 19 nt, Artificial Sequence
  Description of Artificial Sequence: Synthetic oligonucleotide
ugucgccaucuguccuugu

SEQ ID NO: 1316899 - RNA, 19 nt, Artificial Sequence
  Description of Artificial Sequence: Synthetic oligonucleotide
cucgugcauccggugucgc

SEQ ID NO: 1316900 - RNA, 19 nt, Artificial Sequence
  Description of Artificial Sequence: Synthetic oligonucleotide
agugucauccggggcccaa

SEQ ID NO: 1316901 - RNA, 19 nt, Artificial Sequence
  Description of Artificial Sequence: Synthetic oligonucleotide
ccuuguccgggcucgcuuc

SEQ ID NO: 1316902 - RNA, 19 nt, Artificial Sequence
  Description of Artificial Sequence: Synthetic oligonucleotide
guugcggcguguggcucug

SEQ ID NO: 1316903 - RNA, 19 nt, Artificial Sequence
  Description of Artificial Sequence: Synthetic oligonucleotide
gcggcugugcggcguaggc

SEQ ID NO: 1316904 - RNA, 19 nt, Artificial Sequence
  Description of Artificial Sequence: Synthetic oligonucleotide
gggccagcuacugccacac

SEQ ID NO: 1316905 - RNA, 19 nt, Artificial Sequence
  Description of Artificial Sequence: Synthetic oligonucleotide
guugagcaccaggaggggu

SEQ ID NO: 1316906 - RNA, 19 nt, Artificial Sequence
  Description of Artificial Sequence: Synthetic oligonucleotide
ggcggugagcggcuccaug

SEQ ID NO: 1316907 - RNA, 19 nt, Artificial Sequence
  Description of Artificial Sequence: Synthetic oligonucleotide
ggcgcgcgcgcgcuucugg

SEQ ID NO: 1316908 - RNA, 19 nt, Artificial Sequence
  Description of Artificial Sequence: Synthetic oligonucleotide
caacgucucguaccagugu

SEQ ID NO: 1316909 - RNA, 19 nt, Artificial Sequence
  Description of Artificial Sequence: Synthetic oligonucleotide
gccccaauguggggcaucc

SEQ ID NO: 1316910 - RNA, 19 nt, Artificial Sequence
  Description of Artificial Sequence: Synthetic oligonucleotide
gguucugacgcugugccuu

SEQ ID NO: 1316911 - RNA, 19 nt, Artificial Sequence
  Description of Artificial Sequence: Synthetic oligonucleotide
gguugcggagcugggccug

SEQ ID NO: 1316912 - RNA, 19 nt, Artificial Sequence
  Description of Artificial Sequence: Synthetic oligonucleotide
ggaccgccccgacugcccc

SEQ ID NO: 1316913 - RNA, 19 nt, Artificial Sequence
  Description of Artificial Sequence: Synthetic oligonucleotide
uagugucauccggggccca

SEQ ID NO: 1316914 - RNA, 19 nt, Artificial Sequence
  Description of Artificial Sequence: Synthetic oligonucleotide
guucccgcuugcguucuaa

SEQ ID NO: 1316915 - RNA, 19 nt, Artificial Sequence
  Description of Artificial Sequence: Synthetic oligonucleotide
cccggcuugcacccacagg

SEQ ID NO: 1316916 - RNA, 19 nt, Artificial Sequence
  Description of Artificial Sequence: Synthetic oligonucleotide
gcccaaucucuguaagucu

SEQ ID NO: 1316917 - RNA, 19 nt, Artificial Sequence
  Description of Artificial Sequence: Synthetic oligonucleotide
cagguugcggcguguggcu

SEQ ID NO: 1316918 - RNA, 19 nt, Artificial Sequence
  Description of Artificial Sequence: Synthetic oligonucleotide
ugggcgcgcgcgcgcuucu

SEQ ID NO: 1316919 - RNA, 19 nt, Artificial Sequence
  Description of Artificial Sequence: Synthetic oligonucleotide
aggugagaacuggguaguu

SEQ ID NO: 1316920 - RNA, 19 nt, Artificial Sequence
  Description of Artificial Sequence: Synthetic oligonucleotide
ccggccucgcgugaacacg

SEQ ID NO: 1316921 - RNA, 19 nt, Artificial Sequence
  Description of Artificial Sequence: Synthetic oligonucleotide
ccgccgcacauccuggcug

SEQ ID NO: 1316922 - RNA, 19 nt, Artificial Sequence
  Description of Artificial Sequence: Synthetic oligonucleotide
caaucucuguaagucugau

SEQ ID NO: 1316923 - RNA, 19 nt, Artificial Sequence
  Description of Artificial Sequence: Synthetic oligonucleotide
ccugccgucuccgcuuggc

SEQ ID NO: 1316924 - RNA, 19 nt, Artificial Sequence
  Description of Artificial Sequence: Synthetic oligonucleotide
aggccgccaguugccaccu

SEQ ID NO: 1316925 - RNA, 19 nt, Artificial Sequence
  Description of Artificial Sequence: Synthetic oligonucleotide
gucgggccucccgggaggc

SEQ ID NO: 1316926 - RNA, 19 nt, Artificial Sequence
  Description of Artificial Sequence: Synthetic oligonucleotide
gccucgcgugaacacgaac

SEQ ID NO: 1316927 - RNA, 19 nt, Artificial Sequence
  Description of Artificial Sequence: Synthetic oligonucleotide
uuguccgggcucgcuucau

SEQ ID NO: 1316928 - RNA, 19 nt, Artificial Sequence
  Description of Artificial Sequence: Synthetic oligonucleotide
cgggaggcgcaucagcuuc

SEQ ID NO: 1316929 - RNA, 19 nt, Artificial Sequence
  Description of Artificial Sequence: Synthetic oligonucleotide
gcauguugccacggccagc

SEQ ID NO: 1316930 - RNA, 19 nt, Artificial Sequence
  Description of Artificial Sequence: Synthetic oligonucleotide
ggucaaagucgggccuccc

SEQ ID NO: 1316931 - RNA, 19 nt, Artificial Sequence
  Description of Artificial Sequence: Synthetic oligonucleotide
gcagcgcuuaaugguguuc

SEQ ID NO: 1316932 - RNA, 19 nt, Artificial Sequence
  Description of Artificial Sequence: Synthetic oligonucleotide
gggcucgcuucaugccugc

SEQ ID NO: 1316933 - RNA, 19 nt, Artificial Sequence
  Description of Artificial Sequence: Synthetic oligonucleotide
gugucgccgcagggaagag

SEQ ID NO: 1316934 - RNA, 19 nt, Artificial Sequence
  Description of Artificial Sequence: Synthetic oligonucleotide
gaccgccccgacugcccca

SEQ ID NO: 1316935 - RNA, 19 nt, Artificial Sequence
  Description of Artificial Sequence: Synthetic oligonucleotide
gcacguugauggaugggaa

SEQ ID NO: 1316936 - RNA, 19 nt, Artificial Sequence
  Description of Artificial Sequence: Synthetic oligonucleotide
cgaacgagugcggcugugc

SEQ ID NO: 1316937 - RNA, 19 nt, Artificial Sequence
  Description of Artificial Sequence: Synthetic oligonucleotide
cgcgugaacacgaacgagu

SEQ ID NO: 1316938 - RNA, 19 nt, Artificial Sequence
  Description of Artificial Sequence: Synthetic oligonucleotide
gcauccggugucgccgcag

SEQ ID NO: 1316939 - RNA, 19 nt, Artificial Sequence
  Description of Artificial Sequence: Synthetic oligonucleotide
gguugcggcguguggcucu

SEQ ID NO: 1316940 - RNA, 19 nt, Artificial Sequence
  Description of Artificial Sequence: Synthetic oligonucleotide
gggaccgccccgacugccc

SEQ ID NO: 1316941 - RNA, 19 nt, Artificial Sequence
  Description of Artificial Sequence: Synthetic oligonucleotide
cgagguugcggagcugggc

SEQ ID NO: 1316942 - RNA, 19 nt, Artificial Sequence
  Description of Artificial Sequence: Synthetic oligonucleotide
gugcggcguaggccucgag

SEQ ID NO: 1316943 - RNA, 19 nt, Artificial Sequence
  Description of Artificial Sequence: Synthetic oligonucleotide
cuugacuccuugggaucua

SEQ ID NO: 1316944 - RNA, 19 nt, Artificial Sequence
  Description of Artificial Sequence: Synthetic oligonucleotide
gcguguggcucuggguccc

SEQ ID NO: 1316945 - RNA, 19 nt, Artificial Sequence
  Description of Artificial Sequence: Synthetic oligonucleotide
cucguaccaguguguacuu

SEQ ID NO: 1316946 - RNA, 19 nt, Artificial Sequence
  Description of Artificial Sequence: Synthetic oligonucleotide
cugggcgcgcgcgcgcuuc

SEQ ID NO: 1316947 - RNA, 19 nt, Artificial Sequence
  Description of Artificial Sequence: Synthetic oligonucleotide
cccggccucgcgugaacac

SEQ ID NO: 1316948 - RNA, 19 nt, Artificial Sequence
  Description of Artificial Sequence: Synthetic oligonucleotide
ggugccgggaccgccccga

SEQ ID NO: 1316949 - RNA, 19 nt, Artificial Sequence
  Description of Artificial Sequence: Synthetic oligonucleotide
ccgccucuagaggugcccc

SEQ ID NO: 1316950 - RNA, 19 nt, Artificial Sequence
  Description of Artificial Sequence: Synthetic oligonucleotide
aguccggguuguaguuaau

SEQ ID NO: 1316951 - RNA, 19 nt, Artificial Sequence
  Description of Artificial Sequence: Synthetic oligonucleotide
ggaguccggguuguaguua

SEQ ID NO: 1316952 - RNA, 19 nt, Artificial Sequence
  Description of Artificial Sequence: Synthetic oligonucleotide
cccgcuugcguucuaaguu

SEQ ID NO: 1316953 - RNA, 19 nt, Artificial Sequence
  Description of Artificial Sequence: Synthetic oligonucleotide
ggaggaccucccugccguc

SEQ ID NO: 1316954 - RNA, 19 nt, Artificial Sequence
  Description of Artificial Sequence: Synthetic oligonucleotide
cccaauguggggcauccau

SEQ ID NO: 1316955 - RNA, 19 nt, Artificial Sequence
  Description of Artificial Sequence: Synthetic oligonucleotide
gccgcagggaagagacaac

SEQ ID NO: 1316956 - RNA, 19 nt, Artificial Sequence
  Description of Artificial Sequence: Synthetic oligonucleotide
ccgccaguugccaccuuga

SEQ ID NO: 1316957 - RNA, 19 nt, Artificial Sequence
  Description of Artificial Sequence: Synthetic oligonucleotide
caggcaccacuuugaugcu

SEQ ID NO: 1316958 - RNA, 19 nt, Artificial Sequence
  Description of Artificial Sequence: Synthetic oligonucleotide
cagccuggggcaguucugu

SEQ ID NO: 1316959 - RNA, 19 nt, Artificial Sequence
  Description of Artificial Sequence: Synthetic oligonucleotide
gagugcggcugugcggcgu

SEQ ID NO: 1316960 - RNA, 19 nt, Artificial Sequence
  Description of Artificial Sequence: Synthetic oligonucleotide
ccucccgggaggcgcauca

SEQ ID NO: 1316961 - RNA, 19 nt, Artificial Sequence
  Description of Artificial Sequence: Synthetic oligonucleotide
cuggggcaguucugugaua

SEQ ID NO: 1316962 - RNA, 19 nt, Artificial Sequence
  Description of Artificial Sequence: Synthetic oligonucleotide
cacgaacgagugcggcugu

SEQ ID NO: 1316963 - RNA, 19 nt, Artificial Sequence
  Description of Artificial Sequence: Synthetic oligonucleotide
ggccugggcgcgcgcgcgc

SEQ ID NO: 1316964 - RNA, 19 nt, Artificial Sequence
  Description of Artificial Sequence: Synthetic oligonucleotide
cuugggaguccggguugua

SEQ ID NO: 1316965 - RNA, 19 nt, Artificial Sequence
  Description of Artificial Sequence: Synthetic oligonucleotide
cggcugugcggcguaggcc

SEQ ID NO: 1316966 - RNA, 19 nt, Artificial Sequence
  Description of Artificial Sequence: Synthetic oligonucleotide
cgccgcagggaagagacaa

SEQ ID NO: 1316967 - RNA, 19 nt, Artificial Sequence
  Description of Artificial Sequence: Synthetic oligonucleotide
cgagugcggcugugcggcg

SEQ ID NO: 1316968 - RNA, 19 nt, Artificial Sequence
  Description of Artificial Sequence: Synthetic oligonucleotide
cggccucgcgugaacacga

SEQ ID NO: 1316969 - RNA, 19 nt, Artificial Sequence
  Description of Artificial Sequence: Synthetic oligonucleotide
cggugucgccgcagggaag

SEQ ID NO: 1316970 - RNA, 19 nt, Artificial Sequence
  Description of Artificial Sequence: Synthetic oligonucleotide
gugucauccggggcccaau

SEQ ID NO: 1316971 - RNA, 19 nt, Artificial Sequence
  Description of Artificial Sequence: Synthetic oligonucleotide
ggcagcgcuuaaugguguu

SEQ ID NO: 1316972 - RNA, 19 nt, Artificial Sequence
  Description of Artificial Sequence: Synthetic oligonucleotide
cgccucacucuccgacagc

SEQ ID NO: 1316973 - RNA, 19 nt, Artificial Sequence
  Description of Artificial Sequence: Synthetic oligonucleotide
gcgcgcgcuucuggugccg

SEQ ID NO: 1316974 - RNA, 19 nt, Artificial Sequence
  Description of Artificial Sequence: Synthetic oligonucleotide
ccgggaccgccccgacugc

SEQ ID NO: 1316975 - RNA, 19 nt, Artificial Sequence
  Description of Artificial Sequence: Synthetic oligonucleotide
cgcgcgcgcuucuggugcc

SEQ ID NO: 1316976 - RNA, 19 nt, Artificial Sequence
  Description of Artificial Sequence: Synthetic oligonucleotide
gcggcguguggcucugggu

SEQ ID NO: 1316977 - RNA, 19 nt, Artificial Sequence
  Description of Artificial Sequence: Synthetic oligonucleotide
gccccgacugccccaugcu

SEQ ID NO: 1316978 - RNA, 19 nt, Artificial Sequence
  Description of Artificial Sequence: Synthetic oligonucleotide
gcuggacgcugcgccccgc

SEQ ID NO: 1316979 - RNA, 19 nt, Artificial Sequence
  Description of Artificial Sequence: Synthetic oligonucleotide
cgcuugcguucuaaguucu

SEQ ID NO: 1316980 - RNA, 19 nt, Artificial Sequence
  Description of Artificial Sequence: Synthetic oligonucleotide
cgucucguaccagugugua

SEQ ID NO: 1316981 - RNA, 19 nt, Artificial Sequence
  Description of Artificial Sequence: Synthetic oligonucleotide
gcugugcggcguaggccuc

SEQ ID NO: 1316982 - RNA, 19 nt, Artificial Sequence
  Description of Artificial Sequence: Synthetic oligonucleotide
ccggggcccaaucucugua

SEQ ID NO: 1316983 - RNA, 19 nt, Artificial Sequence
  Description of Artificial Sequence: Synthetic oligonucleotide
ccgacagccccgcacccgu

SEQ ID NO: 1316984 - RNA, 19 nt, Artificial Sequence
  Description of Artificial Sequence: Synthetic oligonucleotide
gcccggccucgcgugaaca

SEQ ID NO: 1316985 - RNA, 19 nt, Artificial Sequence
  Description of Artificial Sequence: Synthetic oligonucleotide
ccucgagguugcggagcug

SEQ ID NO: 1316986 - RNA, 19 nt, Artificial Sequence
  Description of Artificial Sequence: Synthetic oligonucleotide
cgcgcgcuucuggugccgg

SEQ ID NO: 1316987 - RNA, 19 nt, Artificial Sequence
  Description of Artificial Sequence: Synthetic oligonucleotide
ggccucgcgugaacacgaa

SEQ ID NO: 1316988 - RNA, 19 nt, Artificial Sequence
  Description of Artificial Sequence: Synthetic oligonucleotide
ccuugaccucugccugaaa

SEQ ID NO: 1316989 - RNA, 19 nt, Artificial Sequence
  Description of Artificial Sequence: Synthetic oligonucleotide
gcgcgcgcgcgcuucuggu

SEQ ID NO: 1316990 - RNA, 19 nt, Artificial Sequence
  Description of Artificial Sequence: Synthetic oligonucleotide
cccgcacccguggccagca

SEQ ID NO: 1316991 - RNA, 19 nt, Artificial Sequence
  Description of Artificial Sequence: Synthetic oligonucleotide
gggcgcgcgcgcgcuucug

SEQ ID NO: 1316992 - RNA, 19 nt, Artificial Sequence
  Description of Artificial Sequence: Synthetic oligonucleotide
ccgcacccguggccagcag

SEQ ID NO: 1316993 - RNA, 19 nt, Artificial Sequence
  Description of Artificial Sequence: Synthetic oligonucleotide
cugccccaugcugccugcu

SEQ ID NO: 1316994 - RNA, 19 nt, Artificial Sequence
  Description of Artificial Sequence: Synthetic oligonucleotide
cccgccgcacauccuggcu

SEQ ID NO: 1316995 - RNA, 19 nt, Artificial Sequence
  Description of Artificial Sequence: Synthetic oligonucleotide
ccccaauguggggcaucca

SEQ ID NO: 1316996 - RNA, 19 nt, Artificial Sequence
  Description of Artificial Sequence: Synthetic oligonucleotide
gccucccgggaggcgcauc

SEQ ID NO: 1316997 - RNA, 19 nt, Artificial Sequence
  Description of Artificial Sequence: Synthetic oligonucleotide
cgcccggccucgcgugaac

SEQ ID NO: 1316998 - RNA, 19 nt, Artificial Sequence
  Description of Artificial Sequence: Synthetic oligonucleotide
gccugggcgcgcgcgcgcu

SEQ ID NO: 1316999 - RNA, 19 nt, Artificial Sequence
  Description of Artificial Sequence: Synthetic oligonucleotide
gccccagguugcggcgugu

SEQ ID NO: 1317000 - RNA, 19 nt, Artificial Sequence
  Description of Artificial Sequence: Synthetic oligonucleotide
ggccgccaguugccaccuu

SEQ ID NO: 1317001 - RNA, 19 nt, Artificial Sequence
  Description of Artificial Sequence: Synthetic oligonucleotide
ggccucccgggaggcgcau

SEQ ID NO: 1317002 - RNA, 19 nt, Artificial Sequence
  Description of Artificial Sequence: Synthetic oligonucleotide
ccugggcgcgcgcgcgcuu

SEQ ID NO: 1317003 - RNA, 19 nt, Artificial Sequence
  Description of Artificial Sequence: Synthetic oligonucleotide
ugaauagacaaauaaaagg

SEQ ID NO: 1317004 - RNA, 19 nt, Artificial Sequence
  Description of Artificial Sequence: Synthetic oligonucleotide
gaaaagauccucuugaaag

SEQ ID NO: 1317005 - RNA, 19 nt, Artificial Sequence
  Description of Artificial Sequence: Synthetic oligonucleotide
uaaacaaagguugagaucc

SEQ ID NO: 1317006 - RNA, 19 nt, Artificial Sequence
  Description of Artificial Sequence: Synthetic oligonucleotide
uuauuguacuccaugaaag

SEQ ID NO: 1317007 - RNA, 19 nt, Artificial Sequence
  Description of Artificial Sequence: Synthetic oligonucleotide
aagucuaagacagugaucu

SEQ ID NO: 1317008 - RNA, 19 nt, Artificial Sequence
  Description of Artificial Sequence: Synthetic oligonucleotide
aagguugagauccugaggu

SEQ ID NO: 1317009 - RNA, 19 nt, Artificial Sequence
  Description of Artificial Sequence: Synthetic oligonucleotide
agucaauaaugacaggacc

SEQ ID NO: 1317010 - RNA, 19 nt, Artificial Sequence
  Description of Artificial Sequence: Synthetic oligonucleotide
aauagacaaauaaaagggg

SEQ ID NO: 1317011 - RNA, 19 nt, Artificial Sequence
  Description of Artificial Sequence: Synthetic oligonucleotide
  modified_base (12)..(12): a, c, u, g, unknown or other
  modified_base (16)..(16): a, c, u, g, unknown or other
aaacaaacaaanaaanaaa

SEQ ID NO: 1317012 - RNA, 19 nt, Artificial Sequence
  Description of Artificial Sequence: Synthetic oligonucleotide
agauucgcagccuugaggg

SEQ ID NO: 1317013 - RNA, 19 nt, Artificial Sequence
  Description of Artificial Sequence: Synthetic oligonucleotide
  modified_base (13)..(13): a, c, u, g, unknown or other
  modified_base (17)..(17): a, c, u, g, unknown or other
caaacaaacaaanaaanaa

SEQ ID NO: 1317014 - RNA, 19 nt, Artificial Sequence
  Description of Artificial Sequence: Synthetic oligonucleotide
uucaucuccgaacacagcc

SEQ ID NO: 1317015 - RNA, 19 nt, Artificial Sequence
  Description of Artificial Sequence: Synthetic oligonucleotide
aauaauuggucguuugccu

SEQ ID NO: 1317016 - RNA, 19 nt, Artificial Sequence
  Description of Artificial Sequence: Synthetic oligonucleotide
auauacgucagauucgcag

SEQ ID NO: 1317017 - RNA, 19 nt, Artificial Sequence
  Description of Artificial Sequence: Synthetic oligonucleotide
ugagguagcaugcucgagg

SEQ ID NO: 1317018 - RNA, 19 nt, Artificial Sequence
  Description of Artificial Sequence: Synthetic oligonucleotide
ucuaagacagugaucuugc

SEQ ID NO: 1317019 - RNA, 19 nt, Artificial Sequence
  Description of Artificial Sequence: Synthetic oligonucleotide
ugcuucaucaaguaggcga

SEQ ID NO: 1317020 - RNA, 19 nt, Artificial Sequence
  Description of Artificial Sequence: Synthetic oligonucleotide
ugaguggugacguucauga

SEQ ID NO: 1317021 - RNA, 19 nt, Artificial Sequence
  Description of Artificial Sequence: Synthetic oligonucleotide
gacuaugugaaguggcugg

SEQ ID NO: 1317022 - RNA, 19 nt, Artificial Sequence
  Description of Artificial Sequence: Synthetic oligonucleotide
aaucaagucuaagacagug

SEQ ID NO: 1317023 - RNA, 19 nt, Artificial Sequence
  Description of Artificial Sequence: Synthetic oligonucleotide
ucuaaacaaagguugagau

SEQ ID NO: 1317024 - RNA, 19 nt, Artificial Sequence
  Description of Artificial Sequence: Synthetic oligonucleotide
uuugguguaaggauccgug

SEQ ID NO: 1317025 - RNA, 19 nt, Artificial Sequence
  Description of Artificial Sequence: Synthetic oligonucleotide
aacuauaauuucuuuggaa

SEQ ID NO: 1317026 - RNA, 19 nt, Artificial Sequence
  Description of Artificial Sequence: Synthetic oligonucleotide
ugauccuugucguagguug

SEQ ID NO: 1317027 - RNA, 19 nt, Artificial Sequence
  Description of Artificial Sequence: Synthetic oligonucleotide
uagacaaauaaaaggggac

SEQ ID NO: 1317028 - RNA, 19 nt, Artificial Sequence
  Description of Artificial Sequence: Synthetic oligonucleotide
gacggcaucacucggcucg

SEQ ID NO: 1317029 - RNA, 19 nt, Artificial Sequence
  Description of Artificial Sequence: Synthetic oligonucleotide
uucucguagugguacagcg

SEQ ID NO: 1317030 - RNA, 19 nt, Artificial Sequence
  Description of Artificial Sequence: Synthetic oligonucleotide
uauacgucagauucgcagc

SEQ ID NO: 1317031 - RNA, 19 nt, Artificial Sequence
  Description of Artificial Sequence: Synthetic oligonucleotide
acguagccgauguugagcc

SEQ ID NO: 1317032 - RNA, 19 nt, Artificial Sequence
  Description of Artificial Sequence: Synthetic oligonucleotide
ugacgaugguggcagaacg

SEQ ID NO: 1317033 - RNA, 19 nt, Artificial Sequence
  Description of Artificial Sequence: Synthetic oligonucleotide
cugcagucaauaaugacag

SEQ ID NO: 1317034 - RNA, 19 nt, Artificial Sequence
  Description of Artificial Sequence: Synthetic oligonucleotide
ucaagucuaagacagugau

SEQ ID NO: 1317035 - RNA, 19 nt, Artificial Sequence
  Description of Artificial Sequence: Synthetic oligonucleotide
acccgauggacuuaaagag

SEQ ID NO: 1317036 - RNA, 19 nt, Artificial Sequence
  Description of Artificial Sequence: Synthetic oligonucleotide
ugguuagcagggcaggugg

SEQ ID NO: 1317037 - RNA, 19 nt, Artificial Sequence
  Description of Artificial Sequence: Synthetic oligonucleotide
auacgucagauucgcagcc

SEQ ID NO: 1317038 - RNA, 19 nt, Artificial Sequence
  Description of Artificial Sequence: Synthetic oligonucleotide
uggucguuugccuuugacg

SEQ ID NO: 1317039 - RNA, 19 nt, Artificial Sequence
  Description of Artificial Sequence: Synthetic oligonucleotide
guugucaccguacagcagc

SEQ ID NO: 1317040 - RNA, 19 nt, Artificial Sequence
  Description of Artificial Sequence: Synthetic oligonucleotide
ucugcguucucgaugucag

SEQ ID NO: 1317041 - RNA, 19 nt, Artificial Sequence
  Description of Artificial Sequence: Synthetic oligonucleotide
uccgaacacagccagggcc

SEQ ID NO: 1317042 - RNA, 19 nt, Artificial Sequence
  Description of Artificial Sequence: Synthetic oligonucleotide
aguugaagaggccuuucuc

SEQ ID NO: 1317043 - RNA, 19 nt, Artificial Sequence
  Description of Artificial Sequence: Synthetic oligonucleotide
uguacuccaugaaaggccu

SEQ ID NO: 1317044 - RNA, 19 nt, Artificial Sequence
  Description of Artificial Sequence: Synthetic oligonucleotide
cucguagugguacagcggg

SEQ ID NO: 1317045 - RNA, 19 nt, Artificial Sequence
  Description of Artificial Sequence: Synthetic oligonucleotide
uugucguagguugucaccg

SEQ ID NO: 1317046 - RNA, 19 nt, Artificial Sequence
  Description of Artificial Sequence: Synthetic oligonucleotide
augauuuugaugcuggcua

SEQ ID NO: 1317047 - RNA, 19 nt, Artificial Sequence
  Description of Artificial Sequence: Synthetic oligonucleotide
agacagugucacuacuacc

SEQ ID NO: 1317048 - RNA, 19 nt, Artificial Sequence
  Description of Artificial Sequence: Synthetic oligonucleotide
gaagaggccuuucucguag

SEQ ID NO: 1317049 - RNA, 19 nt, Artificial Sequence
  Description of Artificial Sequence: Synthetic oligonucleotide
acguucaugacguagccga

SEQ ID NO: 1317050 - RNA, 19 nt, Artificial Sequence
  Description of Artificial Sequence: Synthetic oligonucleotide
gauaugacucuuauuguac

SEQ ID NO: 1317051 - RNA, 19 nt, Artificial Sequence
  Description of Artificial Sequence: Synthetic oligonucleotide
ugucacuacuacccugucg

SEQ ID NO: 1317052 - RNA, 19 nt, Artificial Sequence
  Description of Artificial Sequence: Synthetic oligonucleotide
uuugacgaauuuguaagca

SEQ ID NO: 1317053 - RNA, 19 nt, Artificial Sequence
  Description of Artificial Sequence: Synthetic oligonucleotide
ugauuuugaugcuggcuag

SEQ ID NO: 1317054 - RNA, 19 nt, Artificial Sequence
  Description of Artificial Sequence: Synthetic oligonucleotide
uucaugacguagccgaugu

SEQ ID NO: 1317055 - RNA, 19 nt, Artificial Sequence
  Description of Artificial Sequence: Synthetic oligonucleotide
cuuugacgaauuuguaagc

SEQ ID NO: 1317056 - RNA, 19 nt, Artificial Sequence
  Description of Artificial Sequence: Synthetic oligonucleotide
cuuaucggcacaguuaaug

SEQ ID NO: 1317057 - RNA, 19 nt, Artificial Sequence
  Description of Artificial Sequence: Synthetic oligonucleotide
cuggaugagggcauauacg

SEQ ID NO: 1317058 - RNA, 19 nt, Artificial Sequence
  Description of Artificial Sequence: Synthetic oligonucleotide
uuaucggcacaguuaaugu

SEQ ID NO: 1317059 - RNA, 19 nt, Artificial Sequence
  Description of Artificial Sequence: Synthetic oligonucleotide
uugguguaaggauccgugg

SEQ ID NO: 1317060 - RNA, 19 nt, Artificial Sequence
  Description of Artificial Sequence: Synthetic oligonucleotide
agauccucuugaaagaguc

SEQ ID NO: 1317061 - RNA, 19 nt, Artificial Sequence
  Description of Artificial Sequence: Synthetic oligonucleotide
aucuuaucggcacaguuaa

SEQ ID NO: 1317062 - RNA, 19 nt, Artificial Sequence
  Description of Artificial Sequence: Synthetic oligonucleotide
gacugagguagcaugcucg

SEQ ID NO: 1317063 - RNA, 19 nt, Artificial Sequence
  Description of Artificial Sequence: Synthetic oligonucleotide
ucucguagugguacagcgg

SEQ ID NO: 1317064 - RNA, 19 nt, Artificial Sequence
  Description of Artificial Sequence: Synthetic oligonucleotide
uucucaucauaaacuauaa

SEQ ID NO: 1317065 - RNA, 19 nt, Artificial Sequence
  Description of Artificial Sequence: Synthetic oligonucleotide
cugcauccacaauugaggg

SEQ ID NO: 1317066 - RNA, 19 nt, Artificial Sequence
  Description of Artificial Sequence: Synthetic oligonucleotide
gacaggugacucuugcugc

SEQ ID NO: 1317067 - RNA, 19 nt, Artificial Sequence
  Description of Artificial Sequence: Synthetic oligonucleotide
ugagcauccugcucguugc

SEQ ID NO: 1317068 - RNA, 19 nt, Artificial Sequence
  Description of Artificial Sequence: Synthetic oligonucleotide
auaugacucuuauuguacu

SEQ ID NO: 1317069 - RNA, 19 nt, Artificial Sequence
  Description of Artificial Sequence: Synthetic oligonucleotide
agauccugaggucggacag

SEQ ID NO: 1317070 - RNA, 19 nt, Artificial Sequence
  Description of Artificial Sequence: Synthetic oligonucleotide
acagacugagguagcaugc

SEQ ID NO: 1317071 - RNA, 19 nt, Artificial Sequence
  Description of Artificial Sequence: Synthetic oligonucleotide
cagucaauaaugacaggac

SEQ ID NO: 1317072 - RNA, 19 nt, Artificial Sequence
  Description of Artificial Sequence: Synthetic oligonucleotide
uuuugaugcuggcuagcug

SEQ ID NO: 1317073 - RNA, 19 nt, Artificial Sequence
  Description of Artificial Sequence: Synthetic oligonucleotide
agacaaauaaaaggggaca

SEQ ID NO: 1317074 - RNA, 19 nt, Artificial Sequence
  Description of Artificial Sequence: Synthetic oligonucleotide
uuagcagggcagguggucg

SEQ ID NO: 1317075 - RNA, 19 nt, Artificial Sequence
  Description of Artificial Sequence: Synthetic oligonucleotide
ugcucguugccaaggaaca

SEQ ID NO: 1317076 - RNA, 19 nt, Artificial Sequence
  Description of Artificial Sequence: Synthetic oligonucleotide
ugguguaaggauccguggu

SEQ ID NO: 1317077 - RNA, 19 nt, Artificial Sequence
  Description of Artificial Sequence: Synthetic oligonucleotide
uggggaaauaauuggucgu

SEQ ID NO: 1317078 - RNA, 19 nt, Artificial Sequence
  Description of Artificial Sequence: Synthetic oligonucleotide
uuugccuucccuacaggaa

SEQ ID NO: 1317079 - RNA, 19 nt, Artificial Sequence
  Description of Artificial Sequence: Synthetic oligonucleotide
uaugacucuuauuguacuc

SEQ ID NO: 1317080 - RNA, 19 nt, Artificial Sequence
  Description of Artificial Sequence: Synthetic oligonucleotide
ucacacaaccgucuccaug

SEQ ID NO: 1317081 - RNA, 19 nt, Artificial Sequence
  Description of Artificial Sequence: Synthetic oligonucleotide
gggcauauacgucagauuc

SEQ ID NO: 1317082 - RNA, 19 nt, Artificial Sequence
  Description of Artificial Sequence: Synthetic oligonucleotide
ugacguucaugacguagcc

SEQ ID NO: 1317083 - RNA, 19 nt, Artificial Sequence
  Description of Artificial Sequence: Synthetic oligonucleotide
caugacguagccgauguug

SEQ ID NO: 1317084 - RNA, 19 nt, Artificial Sequence
  Description of Artificial Sequence: Synthetic oligonucleotide
ucaucuccgaacacagcca

SEQ ID NO: 1317085 - RNA, 19 nt, Artificial Sequence
  Description of Artificial Sequence: Synthetic oligonucleotide
uucgccaggucauuggggu

SEQ ID NO: 1317086 - RNA, 19 nt, Artificial Sequence
  Description of Artificial Sequence: Synthetic oligonucleotide
gucaccguacagcagcuag

SEQ ID NO: 1317087 - RNA, 19 nt, Artificial Sequence
  Description of Artificial Sequence: Synthetic oligonucleotide
gaaguugagguuuggggaa

SEQ ID NO: 1317088 - RNA, 19 nt, Artificial Sequence
  Description of Artificial Sequence: Synthetic oligonucleotide
uugccuucccuacaggaaa

SEQ ID NO: 1317089 - RNA, 19 nt, Artificial Sequence
  Description of Artificial Sequence: Synthetic oligonucleotide
agguagcuagagucuaaac

SEQ ID NO: 1317090 - RNA, 19 nt, Artificial Sequence
  Description of Artificial Sequence: Synthetic oligonucleotide
gaaguacugccgcagguuc

SEQ ID NO: 1317091 - RNA, 19 nt, Artificial Sequence
  Description of Artificial Sequence: Synthetic oligonucleotide
gcauccacaauugagggag

SEQ ID NO: 1317092 - RNA, 19 nt, Artificial Sequence
  Description of Artificial Sequence: Synthetic oligonucleotide
uaaagagccuguguucuca

SEQ ID NO: 1317093 - RNA, 19 nt, Artificial Sequence
  Description of Artificial Sequence: Synthetic oligonucleotide
gagucuuugccuucccuac

SEQ ID NO: 1317094 - RNA, 19 nt, Artificial Sequence
  Description of Artificial Sequence: Synthetic oligonucleotide
auugugccugcugucacac

SEQ ID NO: 1317095 - RNA, 19 nt, Artificial Sequence
  Description of Artificial Sequence: Synthetic oligonucleotide
uugacgaauuuguaagcau

SEQ ID NO: 1317096 - RNA, 19 nt, Artificial Sequence
  Description of Artificial Sequence: Synthetic oligonucleotide
auaauuggucguuugccuu

SEQ ID NO: 1317097 - RNA, 19 nt, Artificial Sequence
  Description of Artificial Sequence: Synthetic oligonucleotide
ucucaucauaaacuauaau

SEQ ID NO: 1317098 - RNA, 19 nt, Artificial Sequence
  Description of Artificial Sequence: Synthetic oligonucleotide
ugaugcgcuuccucaauga

SEQ ID NO: 1317099 - RNA, 19 nt, Artificial Sequence
  Description of Artificial Sequence: Synthetic oligonucleotide
ggugucuagguccugagca

SEQ ID NO: 1317100 - RNA, 19 nt, Artificial Sequence
  Description of Artificial Sequence: Synthetic oligonucleotide
gacaaauaaaaggggacaa

SEQ ID NO: 1317101 - RNA, 19 nt, Artificial Sequence
  Description of Artificial Sequence: Synthetic oligonucleotide
agguuuggggaaauaauug

SEQ ID NO: 1317102 - RNA, 19 nt, Artificial Sequence
  Description of Artificial Sequence: Synthetic oligonucleotide
ugccugcugucacacaacc

SEQ ID NO: 1317103 - RNA, 19 nt, Artificial Sequence
  Description of Artificial Sequence: Synthetic oligonucleotide
cugcucguugccaaggaac

SEQ ID NO: 1317104 - RNA, 19 nt, Artificial Sequence
  Description of Artificial Sequence: Synthetic oligonucleotide
gcacaguuaauguggacag

SEQ ID NO: 1317105 - RNA, 19 nt, Artificial Sequence
  Description of Artificial Sequence: Synthetic oligonucleotide
aggccuuucucguaguggu

SEQ ID NO: 1317106 - RNA, 19 nt, Artificial Sequence
  Description of Artificial Sequence: Synthetic oligonucleotide
aacaaagguugagauccug

SEQ ID NO: 1317107 - RNA, 19 nt, Artificial Sequence
  Description of Artificial Sequence: Synthetic oligonucleotide
gucacuacuacccugucgu

SEQ ID NO: 1317108 - RNA, 19 nt, Artificial Sequence
  Description of Artificial Sequence: Synthetic oligonucleotide
gguugagauccugaggucg

SEQ ID NO: 1317109 - RNA, 19 nt, Artificial Sequence
  Description of Artificial Sequence: Synthetic oligonucleotide
cuugaaagagucuuugccu

SEQ ID NO: 1317110 - RNA, 19 nt, Artificial Sequence
  Description of Artificial Sequence: Synthetic oligonucleotide
ucuucgaaguacugccgca

SEQ ID NO: 1317111 - RNA, 19 nt, Artificial Sequence
  Description of Artificial Sequence: Synthetic oligonucleotide
uccacaauugagggagcgg

SEQ ID NO: 1317112 - RNA, 19 nt, Artificial Sequence
  Description of Artificial Sequence: Synthetic oligonucleotide
guugagauccugaggucgg

SEQ ID NO: 1317113 - RNA, 19 nt, Artificial Sequence
  Description of Artificial Sequence: Synthetic oligonucleotide
uggacuuaaagagccugug

SEQ ID NO: 1317114 - RNA, 19 nt, Artificial Sequence
  Description of Artificial Sequence: Synthetic oligonucleotide
cacccgauggacuuaaaga

SEQ ID NO: 1317115 - RNA, 19 nt, Artificial Sequence
  Description of Artificial Sequence: Synthetic oligonucleotide
agcgguggcaaugacagga

SEQ ID NO: 1317116 - RNA, 19 nt, Artificial Sequence
  Description of Artificial Sequence: Synthetic oligonucleotide
gacgaugguggcagaacgg

SEQ ID NO: 1317117 - RNA, 19 nt, Artificial Sequence
  Description of Artificial Sequence: Synthetic oligonucleotide
ucccuacaggaaaucaagu

SEQ ID NO: 1317118 - RNA, 19 nt, Artificial Sequence
  Description of Artificial Sequence: Synthetic oligonucleotide
gacguagccgauguugagc

SEQ ID NO: 1317119 - RNA, 19 nt, Artificial Sequence
  Description of Artificial Sequence: Synthetic oligonucleotide
uggugucacaccauuguuu

SEQ ID NO: 1317120 - RNA, 19 nt, Artificial Sequence
  Description of Artificial Sequence: Synthetic oligonucleotide
auccgcgugugcuucauca

SEQ ID NO: 1317121 - RNA, 19 nt, Artificial Sequence
  Description of Artificial Sequence: Synthetic oligonucleotide
ucgaaguacugccgcaggu

SEQ ID NO: 1317122 - RNA, 19 nt, Artificial Sequence
  Description of Artificial Sequence: Synthetic oligonucleotide
cuuguugcuaucaguggca

SEQ ID NO: 1317123 - RNA, 19 nt, Artificial Sequence
  Description of Artificial Sequence: Synthetic oligonucleotide
uaaggauccguggugucac

SEQ ID NO: 1317124 - RNA, 19 nt, Artificial Sequence
  Description of Artificial Sequence: Synthetic oligonucleotide
gacuuaaagagccuguguu

SEQ ID NO: 1317125 - RNA, 19 nt, Artificial Sequence
  Description of Artificial Sequence: Synthetic oligonucleotide
ugcagucaauaaugacagg

SEQ ID NO: 1317126 - RNA, 19 nt, Artificial Sequence
  Description of Artificial Sequence: Synthetic oligonucleotide
augacgaugguggcagaac

SEQ ID NO: 1317127 - RNA, 19 nt, Artificial Sequence
  Description of Artificial Sequence: Synthetic oligonucleotide
guagguugucaccguacag

SEQ ID NO: 1317128 - RNA, 19 nt, Artificial Sequence
  Description of Artificial Sequence: Synthetic oligonucleotide
aauugagggagcgggcaga

SEQ ID NO: 1317129 - RNA, 19 nt, Artificial Sequence
  Description of Artificial Sequence: Synthetic oligonucleotide
acacaaccgucuccaugcc

SEQ ID NO: 1317130 - RNA, 19 nt, Artificial Sequence
  Description of Artificial Sequence: Synthetic oligonucleotide
agagucuuugccuucccua

SEQ ID NO: 1317131 - RNA, 19 nt, Artificial Sequence
  Description of Artificial Sequence: Synthetic oligonucleotide
agguugagauccugagguc

SEQ ID NO: 1317132 - RNA, 19 nt, Artificial Sequence
  Description of Artificial Sequence: Synthetic oligonucleotide
ucguagguugucaccguac

SEQ ID NO: 1317133 - RNA, 19 nt, Artificial Sequence
  Description of Artificial Sequence: Synthetic oligonucleotide
uuguaguugaagaggccuu

SEQ ID NO: 1317134 - RNA, 19 nt, Artificial Sequence
  Description of Artificial Sequence: Synthetic oligonucleotide
cuaagacagugaucuugcc

SEQ ID NO: 1317135 - RNA, 19 nt, Artificial Sequence
  Description of Artificial Sequence: Synthetic oligonucleotide
cacaauugagggagcgggc

SEQ ID NO: 1317136 - RNA, 19 nt, Artificial Sequence
  Description of Artificial Sequence: Synthetic oligonucleotide
aacgggacacgcccgccug

SEQ ID NO: 1317137 - RNA, 19 nt, Artificial Sequence
  Description of Artificial Sequence: Synthetic oligonucleotide
gguguaaggauccguggug

SEQ ID NO: 1317138 - RNA, 19 nt, Artificial Sequence
  Description of Artificial Sequence: Synthetic oligonucleotide
acugagguagcaugcucga

SEQ ID NO: 1317139 - RNA, 19 nt, Artificial Sequence
  Description of Artificial Sequence: Synthetic oligonucleotide
ugacguagccgauguugag

SEQ ID NO: 1317140 - RNA, 19 nt, Artificial Sequence
  Description of Artificial Sequence: Synthetic oligonucleotide
gagaugaguggugacguuc

SEQ ID NO: 1317141 - RNA, 19 nt, Artificial Sequence
  Description of Artificial Sequence: Synthetic oligonucleotide
gaucuuaucggcacaguua

SEQ ID NO: 1317142 - RNA, 19 nt, Artificial Sequence
  Description of Artificial Sequence: Synthetic oligonucleotide
auccacaauugagggagcg

SEQ ID NO: 1317143 - RNA, 19 nt, Artificial Sequence
  Description of Artificial Sequence: Synthetic oligonucleotide
uucgcagccuugaggguca

SEQ ID NO: 1317144 - RNA, 19 nt, Artificial Sequence
  Description of Artificial Sequence: Synthetic oligonucleotide
ugggacggcaucacucggc

SEQ ID NO: 1317145 - RNA, 19 nt, Artificial Sequence
  Description of Artificial Sequence: Synthetic oligonucleotide
gguauucucaucauaaacu

SEQ ID NO: 1317146 - RNA, 19 nt, Artificial Sequence
  Description of Artificial Sequence: Synthetic oligonucleotide
agugccagcggcaauggcu

SEQ ID NO: 1317147 - RNA, 19 nt, Artificial Sequence
  Description of Artificial Sequence: Synthetic oligonucleotide
aacagcgguggcaaugaca

SEQ ID NO: 1317148 - RNA, 19 nt, Artificial Sequence
  Description of Artificial Sequence: Synthetic oligonucleotide
acaauugagggagcgggca

SEQ ID NO: 1317149 - RNA, 19 nt, Artificial Sequence
  Description of Artificial Sequence: Synthetic oligonucleotide
acgaauuuguaagcaucag

SEQ ID NO: 1317150 - RNA, 19 nt, Artificial Sequence
  Description of Artificial Sequence: Synthetic oligonucleotide
ggucgagguuccuauggcg

SEQ ID NO: 1317151 - RNA, 19 nt, Artificial Sequence
  Description of Artificial Sequence: Synthetic oligonucleotide
accguacagcagcuaguac

SEQ ID NO: 1317152 - RNA, 19 nt, Artificial Sequence
  Description of Artificial Sequence: Synthetic oligonucleotide
aagguagcuagagucuaaa

SEQ ID NO: 1317153 - RNA, 19 nt, Artificial Sequence
  Description of Artificial Sequence: Synthetic oligonucleotide
ucauugguauucucaucau

SEQ ID NO: 1317154 - RNA, 19 nt, Artificial Sequence
  Description of Artificial Sequence: Synthetic oligonucleotide
ggcauauacgucagauucg

SEQ ID NO: 1317155 - RNA, 19 nt, Artificial Sequence
  Description of Artificial Sequence: Synthetic oligonucleotide
gauccugaggucggacagg

SEQ ID NO: 1317156 - RNA, 19 nt, Artificial Sequence
  Description of Artificial Sequence: Synthetic oligonucleotide
acaaagguugagauccuga

SEQ ID NO: 1317157 - RNA, 19 nt, Artificial Sequence
  Description of Artificial Sequence: Synthetic oligonucleotide
cuucgaaguacugccgcag

SEQ ID NO: 1317158 - RNA, 19 nt, Artificial Sequence
  Description of Artificial Sequence: Synthetic oligonucleotide
gaugauuuugaugcuggcu

SEQ ID NO: 1317159 - RNA, 19 nt, Artificial Sequence
  Description of Artificial Sequence: Synthetic oligonucleotide
augggcgucagcucugcgu

SEQ ID NO: 1317160 - RNA, 19 nt, Artificial Sequence
  Description of Artificial Sequence: Synthetic oligonucleotide
gcauauacgucagauucgc

SEQ ID NO: 1317161 - RNA, 19 nt, Artificial Sequence
  Description of Artificial Sequence: Synthetic oligonucleotide
gcugggacggcaucacucg

SEQ ID NO: 1317162 - RNA, 19 nt, Artificial Sequence
  Description of Artificial Sequence: Synthetic oligonucleotide
cuuucucguagugguacag

SEQ ID NO: 1317163 - RNA, 19 nt, Artificial Sequence
  Description of Artificial Sequence: Synthetic oligonucleotide
ucgagguuccuauggcggu

SEQ ID NO: 1317164 - RNA, 19 nt, Artificial Sequence
  Description of Artificial Sequence: Synthetic oligonucleotide
  modified_base (19)..(19): a, c, u, g, unknown or other
aggggacaaacaaacaaan

SEQ ID NO: 1317165 - RNA, 19 nt, Artificial Sequence
  Description of Artificial Sequence: Synthetic oligonucleotide
ggugacguucaugacguag

SEQ ID NO: 1317166 - RNA, 19 nt, Artificial Sequence
  Description of Artificial Sequence: Synthetic oligonucleotide
acucggcucggcucauugg

SEQ ID NO: 1317167 - RNA, 19 nt, Artificial Sequence
  Description of Artificial Sequence: Synthetic oligonucleotide
ccacaauugagggagcggg

SEQ ID NO: 1317168 - RNA, 19 nt, Artificial Sequence
  Description of Artificial Sequence: Synthetic oligonucleotide
aucaagucuaagacaguga

SEQ ID NO: 1317169 - RNA, 19 nt, Artificial Sequence
  Description of Artificial Sequence: Synthetic oligonucleotide
aaguuccuucacuccaguu

SEQ ID NO: 1317170 - RNA, 19 nt, Artificial Sequence
  Description of Artificial Sequence: Synthetic oligonucleotide
agucuuugccuucccuaca

SEQ ID NO: 1317171 - RNA, 19 nt, Artificial Sequence
  Description of Artificial Sequence: Synthetic oligonucleotide
caucagcuuugguguaagg

SEQ ID NO: 1317172 - RNA, 19 nt, Artificial Sequence
  Description of Artificial Sequence: Synthetic oligonucleotide
uuaauguggacagcuccuu

SEQ ID NO: 1317173 - RNA, 19 nt, Artificial Sequence
  Description of Artificial Sequence: Synthetic oligonucleotide
agaugaguggugacguuca

SEQ ID NO: 1317174 - RNA, 19 nt, Artificial Sequence
  Description of Artificial Sequence: Synthetic oligonucleotide
cuagacagugucacuacua

SEQ ID NO: 1317175 - RNA, 19 nt, Artificial Sequence
  Description of Artificial Sequence: Synthetic oligonucleotide
agaggccuuucucguagug

SEQ ID NO: 1317176 - RNA, 19 nt, Artificial Sequence
  Description of Artificial Sequence: Synthetic oligonucleotide
aguacugccgcagguucug

SEQ ID NO: 1317177 - RNA, 19 nt, Artificial Sequence
  Description of Artificial Sequence: Synthetic oligonucleotide
cugaugcgcuuccucaaug

SEQ ID NO: 1317178 - RNA, 19 nt, Artificial Sequence
  Description of Artificial Sequence: Synthetic oligonucleotide
ucguuugccuuugacgaau

SEQ ID NO: 1317179 - RNA, 19 nt, Artificial Sequence
  Description of Artificial Sequence: Synthetic oligonucleotide
agaacgggacacgcccgcc

SEQ ID NO: 1317180 - RNA, 19 nt, Artificial Sequence
  Description of Artificial Sequence: Synthetic oligonucleotide
gaugcgcuuccucaaugaa

SEQ ID NO: 1317181 - RNA, 19 nt, Artificial Sequence
  Description of Artificial Sequence: Synthetic oligonucleotide
augacguagccgauguuga

SEQ ID NO: 1317182 - RNA, 19 nt, Artificial Sequence
  Description of Artificial Sequence: Synthetic oligonucleotide
acugaugcgcuuccucaau

SEQ ID NO: 1317183 - RNA, 19 nt, Artificial Sequence
  Description of Artificial Sequence: Synthetic oligonucleotide
ugacacagggcugcccacc

SEQ ID NO: 1317184 - RNA, 19 nt, Artificial Sequence
  Description of Artificial Sequence: Synthetic oligonucleotide
ugucguagguugucaccgu

SEQ ID NO: 1317185 - RNA, 19 nt, Artificial Sequence
  Description of Artificial Sequence: Synthetic oligonucleotide
ucguagugguacagcggga

SEQ ID NO: 1317186 - RNA, 19 nt, Artificial Sequence
  Description of Artificial Sequence: Synthetic oligonucleotide
ucugguuagcagggcaggu

SEQ ID NO: 1317187 - RNA, 19 nt, Artificial Sequence
  Description of Artificial Sequence: Synthetic oligonucleotide
ugagggcauauacgucaga

SEQ ID NO: 1317188 - RNA, 19 nt, Artificial Sequence
  Description of Artificial Sequence: Synthetic oligonucleotide
cacaaccgucuccaugccc

SEQ ID NO: 1317189 - RNA, 19 nt, Artificial Sequence
  Description of Artificial Sequence: Synthetic oligonucleotide
guagccgauguugagccuc

SEQ ID NO: 1317190 - RNA, 19 nt, Artificial Sequence
  Description of Artificial Sequence: Synthetic oligonucleotide
cccgauggacuuaaagagc

SEQ ID NO: 1317191 - RNA, 19 nt, Artificial Sequence
  Description of Artificial Sequence: Synthetic oligonucleotide
auccuugucguagguuguc

SEQ ID NO: 1317192 - RNA, 19 nt, Artificial Sequence
  Description of Artificial Sequence: Synthetic oligonucleotide
cagaacgggacacgcccgc

SEQ ID NO: 1317193 - RNA, 19 nt, Artificial Sequence
  Description of Artificial Sequence: Synthetic oligonucleotide
guaaggauccgugguguca

SEQ ID NO: 1317194 - RNA, 19 nt, Artificial Sequence
  Description of Artificial Sequence: Synthetic oligonucleotide
guacagcgggagaugagug

SEQ ID NO: 1317195 - RNA, 19 nt, Artificial Sequence
  Description of Artificial Sequence: Synthetic oligonucleotide
cccuacaggaaaucaaguc

SEQ ID NO: 1317196 - RNA, 19 nt, Artificial Sequence
  Description of Artificial Sequence: Synthetic oligonucleotide
gaugggcgucagcucugcg

SEQ ID NO: 1317197 - RNA, 19 nt, Artificial Sequence
  Description of Artificial Sequence: Synthetic oligonucleotide
uccuuggauaugacucuua

SEQ ID NO: 1317198 - RNA, 19 nt, Artificial Sequence
  Description of Artificial Sequence: Synthetic oligonucleotide
augagggcauauacgucag

SEQ ID NO: 1317199 - RNA, 19 nt, Artificial Sequence
  Description of Artificial Sequence: Synthetic oligonucleotide
ugccuucccuacaggaaau

SEQ ID NO: 1317200 - RNA, 19 nt, Artificial Sequence
  Description of Artificial Sequence: Synthetic oligonucleotide
cacaguuaauguggacagc

SEQ ID NO: 1317201 - RNA, 19 nt, Artificial Sequence
  Description of Artificial Sequence: Synthetic oligonucleotide
gcugaucuuaucggcacag

SEQ ID NO: 1317202 - RNA, 19 nt, Artificial Sequence
  Description of Artificial Sequence: Synthetic oligonucleotide
guggcagaacgggacacgc

SEQ ID NO: 1317203 - RNA, 19 nt, Artificial Sequence
  Description of Artificial Sequence: Synthetic oligonucleotide
aaggauccguggugucaca

SEQ ID NO: 1317204 - RNA, 19 nt, Artificial Sequence
  Description of Artificial Sequence: Synthetic oligonucleotide
gagguuuggggaaauaauu

SEQ ID NO: 1317205 - RNA, 19 nt, Artificial Sequence
  Description of Artificial Sequence: Synthetic oligonucleotide
ucuuaucggcacaguuaau

SEQ ID NO: 1317206 - RNA, 19 nt, Artificial Sequence
  Description of Artificial Sequence: Synthetic oligonucleotide
cagcucugcguucucgaug

SEQ ID NO: 1317207 - RNA, 19 nt, Artificial Sequence
  Description of Artificial Sequence: Synthetic oligonucleotide
ucgaggccgcagaugcggc

SEQ ID NO: 1317208 - RNA, 19 nt, Artificial Sequence
  Description of Artificial Sequence: Synthetic oligonucleotide
gucagauucgcagccuuga

SEQ ID NO: 1317209 - RNA, 19 nt, Artificial Sequence
  Description of Artificial Sequence: Synthetic oligonucleotide
cugggacggcaucacucgg

SEQ ID NO: 1317210 - RNA, 19 nt, Artificial Sequence
  Description of Artificial Sequence: Synthetic oligonucleotide
ccucacggcacucuuggag

SEQ ID NO: 1317211 - RNA, 19 nt, Artificial Sequence
  Description of Artificial Sequence: Synthetic oligonucleotide
gaguggugacguucaugac

SEQ ID NO: 1317212 - RNA, 19 nt, Artificial Sequence
  Description of Artificial Sequence: Synthetic oligonucleotide
guggugacguucaugacgu

SEQ ID NO: 1317213 - RNA, 19 nt, Artificial Sequence
  Description of Artificial Sequence: Synthetic oligonucleotide
gucauggucauccgcgugu

SEQ ID NO: 1317214 - RNA, 19 nt, Artificial Sequence
  Description of Artificial Sequence: Synthetic oligonucleotide
ccuacaggaaaucaagucu

SEQ ID NO: 1317215 - RNA, 19 nt, Artificial Sequence
  Description of Artificial Sequence: Synthetic oligonucleotide
aaccgucuccaugcccauc

SEQ ID NO: 1317216 - RNA, 19 nt, Artificial Sequence
  Description of Artificial Sequence: Synthetic oligonucleotide
uccuauggcggugguggca

SEQ ID NO: 1317217 - RNA, 19 nt, Artificial Sequence
  Description of Artificial Sequence: Synthetic oligonucleotide
cagcuaguacugcugcauc

SEQ ID NO: 1317218 - RNA, 19 nt, Artificial Sequence
  Description of Artificial Sequence: Synthetic oligonucleotide
guagugguacagcgggaga

SEQ ID NO: 1317219 - RNA, 19 nt, Artificial Sequence
  Description of Artificial Sequence: Synthetic oligonucleotide
cugcguucucgaugucagg

SEQ ID NO: 1317220 - RNA, 19 nt, Artificial Sequence
  Description of Artificial Sequence: Synthetic oligonucleotide
uacgucagauucgcagccu

SEQ ID NO: 1317221 - RNA, 19 nt, Artificial Sequence
  Description of Artificial Sequence: Synthetic oligonucleotide
cauauacgucagauucgca

SEQ ID NO: 1317222 - RNA, 19 nt, Artificial Sequence
  Description of Artificial Sequence: Synthetic oligonucleotide
uugagauccugaggucgga

SEQ ID NO: 1317223 - RNA, 19 nt, Artificial Sequence
  Description of Artificial Sequence: Synthetic oligonucleotide
uugcuaucaguggcaggca

SEQ ID NO: 1317224 - RNA, 19 nt, Artificial Sequence
  Description of Artificial Sequence: Synthetic oligonucleotide
agcaucagucauggucauc

SEQ ID NO: 1317225 - RNA, 19 nt, Artificial Sequence
  Description of Artificial Sequence: Synthetic oligonucleotide
uccuucacuccaguucauc

SEQ ID NO: 1317226 - RNA, 19 nt, Artificial Sequence
  Description of Artificial Sequence: Synthetic oligonucleotide
acgggacacgcccgccugg

SEQ ID NO: 1317227 - RNA, 19 nt, Artificial Sequence
  Description of Artificial Sequence: Synthetic oligonucleotide
gaaaggccugcagucaaua

SEQ ID NO: 1317228 - RNA, 19 nt, Artificial Sequence
  Description of Artificial Sequence: Synthetic oligonucleotide
uccgcgugugcuucaucaa

SEQ ID NO: 1317229 - RNA, 19 nt, Artificial Sequence
  Description of Artificial Sequence: Synthetic oligonucleotide
acgucagauucgcagccuu

SEQ ID NO: 1317230 - RNA, 19 nt, Artificial Sequence
  Description of Artificial Sequence: Synthetic oligonucleotide
ucggcucauugguauucuc

SEQ ID NO: 1317231 - RNA, 19 nt, Artificial Sequence
  Description of Artificial Sequence: Synthetic oligonucleotide
cauggucauccgcgugugc

SEQ ID NO: 1317232 - RNA, 19 nt, Artificial Sequence
  Description of Artificial Sequence: Synthetic oligonucleotide
cugacacagggcugcccac

SEQ ID NO: 1317233 - RNA, 19 nt, Artificial Sequence
  Description of Artificial Sequence: Synthetic oligonucleotide
gccggcugaucuuaucggc

SEQ ID NO: 1317234 - RNA, 19 nt, Artificial Sequence
  Description of Artificial Sequence: Synthetic oligonucleotide
ucggcucggcucauuggua

SEQ ID NO: 1317235 - RNA, 19 nt, Artificial Sequence
  Description of Artificial Sequence: Synthetic oligonucleotide
ccacccgauggacuuaaag

SEQ ID NO: 1317236 - RNA, 19 nt, Artificial Sequence
  Description of Artificial Sequence: Synthetic oligonucleotide
gcuaucaguggcaggcagc

SEQ ID NO: 1317237 - RNA, 19 nt, Artificial Sequence
  Description of Artificial Sequence: Synthetic oligonucleotide
gucggacagggccuagaca

SEQ ID NO: 1317238 - RNA, 19 nt, Artificial Sequence
  Description of Artificial Sequence: Synthetic oligonucleotide
ucaugacguagccgauguu

SEQ ID NO: 1317239 - RNA, 19 nt, Artificial Sequence
  Description of Artificial Sequence: Synthetic oligonucleotide
gcaauggcuugagucuggg

SEQ ID NO: 1317240 - RNA, 19 nt, Artificial Sequence
  Description of Artificial Sequence: Synthetic oligonucleotide
ggacagggccuagacagug

SEQ ID NO: 1317241 - RNA, 19 nt, Artificial Sequence
  Description of Artificial Sequence: Synthetic oligonucleotide
gucguuugccuuugacgaa

SEQ ID NO: 1317242 - RNA, 19 nt, Artificial Sequence
  Description of Artificial Sequence: Synthetic oligonucleotide
agccuccgccggcugaucu

SEQ ID NO: 1317243 - RNA, 19 nt, Artificial Sequence
  Description of Artificial Sequence: Synthetic oligonucleotide
gacaggacccuggcuggac

SEQ ID NO: 1317244 - RNA, 19 nt, Artificial Sequence
  Description of Artificial Sequence: Synthetic oligonucleotide
gccuagacagugucacuac

SEQ ID NO: 1317245 - RNA, 19 nt, Artificial Sequence
  Description of Artificial Sequence: Synthetic oligonucleotide
uugugccugcugucacaca

SEQ ID NO: 1317246 - RNA, 19 nt, Artificial Sequence
  Description of Artificial Sequence: Synthetic oligonucleotide
acggcaucacucggcucgg

SEQ ID NO: 1317247 - RNA, 19 nt, Artificial Sequence
  Description of Artificial Sequence: Synthetic oligonucleotide
cuaugugaaguggcuggga

SEQ ID NO: 1317248 - RNA, 19 nt, Artificial Sequence
  Description of Artificial Sequence: Synthetic oligonucleotide
guguaaggauccguggugu

SEQ ID NO: 1317249 - RNA, 19 nt, Artificial Sequence
  Description of Artificial Sequence: Synthetic oligonucleotide
gauccucuugaaagagucu

SEQ ID NO: 1317250 - RNA, 19 nt, Artificial Sequence
  Description of Artificial Sequence: Synthetic oligonucleotide
uaucaguggcaggcagccu

SEQ ID NO: 1317251 - RNA, 19 nt, Artificial Sequence
  Description of Artificial Sequence: Synthetic oligonucleotide
ggacuuaaagagccugugu

SEQ ID NO: 1317252 - RNA, 19 nt, Artificial Sequence
  Description of Artificial Sequence: Synthetic oligonucleotide
gcagaacgggacacgcccg

SEQ ID NO: 1317253 - RNA, 19 nt, Artificial Sequence
  Description of Artificial Sequence: Synthetic oligonucleotide
ccguacagcagcuaguacu

SEQ ID NO: 1317254 - RNA, 19 nt, Artificial Sequence
  Description of Artificial Sequence: Synthetic oligonucleotide
ggucacaacagcgguggca

SEQ ID NO: 1317255 - RNA, 19 nt, Artificial Sequence
  Description of Artificial Sequence: Synthetic oligonucleotide
gucguagguugucaccgua

SEQ ID NO: 1317256 - RNA, 19 nt, Artificial Sequence
  Description of Artificial Sequence: Synthetic oligonucleotide
ugccagcggcaauggcuug

SEQ ID NO: 1317257 - RNA, 19 nt, Artificial Sequence
  Description of Artificial Sequence: Synthetic oligonucleotide
caacagcgguggcaaugac

SEQ ID NO: 1317258 - RNA, 19 nt, Artificial Sequence
  Description of Artificial Sequence: Synthetic oligonucleotide
cucggcucggcucauuggu

SEQ ID NO: 1317259 - RNA, 19 nt, Artificial Sequence
  Description of Artificial Sequence: Synthetic oligonucleotide
gguacagcgggagaugagu

SEQ ID NO: 1317260 - RNA, 19 nt, Artificial Sequence
  Description of Artificial Sequence: Synthetic oligonucleotide
gaacgggacacgcccgccu

SEQ ID NO: 1317261 - RNA, 19 nt, Artificial Sequence
  Description of Artificial Sequence: Synthetic oligonucleotide
ccgcgugugcuucaucaag

SEQ ID NO: 1317262 - RNA, 19 nt, Artificial Sequence
  Description of Artificial Sequence: Synthetic oligonucleotide
accucacggcacucuugga

SEQ ID NO: 1317263 - RNA, 19 nt, Artificial Sequence
  Description of Artificial Sequence: Synthetic oligonucleotide
cagggccuagacaguguca

SEQ ID NO: 1317264 - RNA, 19 nt, Artificial Sequence
  Description of Artificial Sequence: Synthetic oligonucleotide
cgggagaugaguggugacg

SEQ ID NO: 1317265 - RNA, 19 nt, Artificial Sequence
  Description of Artificial Sequence: Synthetic oligonucleotide
ucauccgcgugugcuucau

SEQ ID NO: 1317266 - RNA, 19 nt, Artificial Sequence
  Description of Artificial Sequence: Synthetic oligonucleotide
cacuacuacccugucgucu

SEQ ID NO: 1317267 - RNA, 19 nt, Artificial Sequence
  Description of Artificial Sequence: Synthetic oligonucleotide
ggccuagacagugucacua

SEQ ID NO: 1317268 - RNA, 19 nt, Artificial Sequence
  Description of Artificial Sequence: Synthetic oligonucleotide
acgcccgccuggcagugaa

SEQ ID NO: 1317269 - RNA, 19 nt, Artificial Sequence
  Description of Artificial Sequence: Synthetic oligonucleotide
gaugaguggugacguucau

SEQ ID NO: 1317270 - RNA, 19 nt, Artificial Sequence
  Description of Artificial Sequence: Synthetic oligonucleotide
caccguacagcagcuagua

SEQ ID NO: 1317271 - RNA, 19 nt, Artificial Sequence
  Description of Artificial Sequence: Synthetic oligonucleotide
ggcugaucuuaucggcaca

SEQ ID NO: 1317272 - RNA, 19 nt, Artificial Sequence
  Description of Artificial Sequence: Synthetic oligonucleotide
gcucguugccaaggaacag

SEQ ID NO: 1317273 - RNA, 19 nt, Artificial Sequence
  Description of Artificial Sequence: Synthetic oligonucleotide
gucauccgcgugugcuuca

SEQ ID NO: 1317274 - RNA, 19 nt, Artificial Sequence
  Description of Artificial Sequence: Synthetic oligonucleotide
gugccugcugucacacaac

SEQ ID NO: 1317275 - RNA, 19 nt, Artificial Sequence
  Description of Artificial Sequence: Synthetic oligonucleotide
guggugucacaccauuguu

SEQ ID NO: 1317276 - RNA, 19 nt, Artificial Sequence
  Description of Artificial Sequence: Synthetic oligonucleotide
cugcugcauccacaauuga

SEQ ID NO: 1317277 - RNA, 19 nt, Artificial Sequence
  Description of Artificial Sequence: Synthetic oligonucleotide
ggucauccgcgugugcuuc

SEQ ID NO: 1317278 - RNA, 19 nt, Artificial Sequence
  Description of Artificial Sequence: Synthetic oligonucleotide
cggcugaucuuaucggcac

SEQ ID NO: 1317279 - RNA, 19 nt, Artificial Sequence
  Description of Artificial Sequence: Synthetic oligonucleotide
cauccgcgugugcuucauc

SEQ ID NO: 1317280 - RNA, 19 nt, Artificial Sequence
  Description of Artificial Sequence: Synthetic oligonucleotide
cgaauuuguaagcaucagu

SEQ ID NO: 1317281 - RNA, 19 nt, Artificial Sequence
  Description of Artificial Sequence: Synthetic oligonucleotide
ccggcugaucuuaucggca

SEQ ID NO: 1317282 - RNA, 19 nt, Artificial Sequence
  Description of Artificial Sequence: Synthetic oligonucleotide
ggggacagacugagguagc

SEQ ID NO: 1317283 - RNA, 19 nt, Artificial Sequence
  Description of Artificial Sequence: Synthetic oligonucleotide
ggaugggcgucagcucugc

SEQ ID NO: 1317284 - RNA, 19 nt, Artificial Sequence
  Description of Artificial Sequence: Synthetic oligonucleotide
ggugauccuugucguaggu

SEQ ID NO: 1317285 - RNA, 19 nt, Artificial Sequence
  Description of Artificial Sequence: Synthetic oligonucleotide
ggccugcagucaauaauga

SEQ ID NO: 1317286 - RNA, 19 nt, Artificial Sequence
  Description of Artificial Sequence: Synthetic oligonucleotide
gcccgccuggcagugaaug

SEQ ID NO: 1317287 - RNA, 19 nt, Artificial Sequence
  Description of Artificial Sequence: Synthetic oligonucleotide
uggugacguucaugacgua

SEQ ID NO: 1317288 - RNA, 19 nt, Artificial Sequence
  Description of Artificial Sequence: Synthetic oligonucleotide
gcgggagaugaguggugac

SEQ ID NO: 1317289 - RNA, 19 nt, Artificial Sequence
  Description of Artificial Sequence: Synthetic oligonucleotide
gggacggcaucacucggcu

SEQ ID NO: 1317290 - RNA, 19 nt, Artificial Sequence
  Description of Artificial Sequence: Synthetic oligonucleotide
ggggaaauaauuggucguu

SEQ ID NO: 1317291 - RNA, 19 nt, Artificial Sequence
  Description of Artificial Sequence: Synthetic oligonucleotide
ggcaucacucggcucggcu

SEQ ID NO: 1317292 - RNA, 19 nt, Artificial Sequence
  Description of Artificial Sequence: Synthetic oligonucleotide
ccagcggcaauggcuugag

SEQ ID NO: 1317293 - RNA, 19 nt, Artificial Sequence
  Description of Artificial Sequence: Synthetic oligonucleotide
agccgcuggaugagggcau

SEQ ID NO: 1317294 - RNA, 19 nt, Artificial Sequence
  Description of Artificial Sequence: Synthetic oligonucleotide
gcucgaggccgcagaugcg

SEQ ID NO: 1317295 - RNA, 19 nt, Artificial Sequence
  Description of Artificial Sequence: Synthetic oligonucleotide
gugccagcggcaauggcuu

SEQ ID NO: 1317296 - RNA, 19 nt, Artificial Sequence
  Description of Artificial Sequence: Synthetic oligonucleotide
gcagcuaguacugcugcau

SEQ ID NO: 1317297 - RNA, 19 nt, Artificial Sequence
  Description of Artificial Sequence: Synthetic oligonucleotide
gggaaauaauuggucguuu

SEQ ID NO: 1317298 - RNA, 19 nt, Artificial Sequence
  Description of Artificial Sequence: Synthetic oligonucleotide
cugaucuuaucggcacagu

SEQ ID NO: 1317299 - RNA, 19 nt, Artificial Sequence
  Description of Artificial Sequence: Synthetic oligonucleotide
caccccacccgauggacuu

SEQ ID NO: 1317300 - RNA, 19 nt, Artificial Sequence
  Description of Artificial Sequence: Synthetic oligonucleotide
ccuagacagugucacuacu

SEQ ID NO: 1317301 - RNA, 19 nt, Artificial Sequence
  Description of Artificial Sequence: Synthetic oligonucleotide
gugauccuugucguagguu

SEQ ID NO: 1317302 - RNA, 19 nt, Artificial Sequence
  Description of Artificial Sequence: Synthetic oligonucleotide
ccacggguucuuugccuuc

SEQ ID NO: 1317303 - RNA, 19 nt, Artificial Sequence
  Description of Artificial Sequence: Synthetic oligonucleotide
gucacacaaccgucuccau

SEQ ID NO: 1317304 - RNA, 19 nt, Artificial Sequence
  Description of Artificial Sequence: Synthetic oligonucleotide
cacggguucuuugccuucu

SEQ ID NO: 1317305 - RNA, 19 nt, Artificial Sequence
  Description of Artificial Sequence: Synthetic oligonucleotide
caugcccaucagcuuuggu

SEQ ID NO: 1317306 - RNA, 19 nt, Artificial Sequence
  Description of Artificial Sequence: Synthetic oligonucleotide
gccgcagaugcggcgcccc

SEQ ID NO: 1317307 - RNA, 19 nt, Artificial Sequence
  Description of Artificial Sequence: Synthetic oligonucleotide
ucgcagccuugagggucac

SEQ ID NO: 1317308 - RNA, 19 nt, Artificial Sequence
  Description of Artificial Sequence: Synthetic oligonucleotide
ggacagacugagguagcau

SEQ ID NO: 1317309 - RNA, 19 nt, Artificial Sequence
  Description of Artificial Sequence: Synthetic oligonucleotide
gggcgucagcucugcguuc

SEQ ID NO: 1317310 - RNA, 19 nt, Artificial Sequence
  Description of Artificial Sequence: Synthetic oligonucleotide
gguuagcagggcagguggu

SEQ ID NO: 1317311 - RNA, 19 nt, Artificial Sequence
  Description of Artificial Sequence: Synthetic oligonucleotide
ggcggugguggcagugcca

SEQ ID NO: 1317312 - RNA, 19 nt, Artificial Sequence
  Description of Artificial Sequence: Synthetic oligonucleotide
gggacacgcccgccuggca

SEQ ID NO: 1317313 - RNA, 19 nt, Artificial Sequence
  Description of Artificial Sequence: Synthetic oligonucleotide
cgcgugugcuucaucaagu

SEQ ID NO: 1317314 - RNA, 19 nt, Artificial Sequence
  Description of Artificial Sequence: Synthetic oligonucleotide
caaccgucuccaugcccau

SEQ ID NO: 1317315 - RNA, 19 nt, Artificial Sequence
  Description of Artificial Sequence: Synthetic oligonucleotide
accccacccgauggacuua

SEQ ID NO: 1317316 - RNA, 19 nt, Artificial Sequence
  Description of Artificial Sequence: Synthetic oligonucleotide
gggccuagacagugucacu

SEQ ID NO: 1317317 - RNA, 19 nt, Artificial Sequence
  Description of Artificial Sequence: Synthetic oligonucleotide
cccaucagcuuugguguaa

SEQ ID NO: 1317318 - RNA, 19 nt, Artificial Sequence
  Description of Artificial Sequence: Synthetic oligonucleotide
ggccgcagaugcggcgccc

SEQ ID NO: 1317319 - RNA, 19 nt, Artificial Sequence
  Description of Artificial Sequence: Synthetic oligonucleotide
gcgucagcucugcguucuc

SEQ ID NO: 1317320 - RNA, 19 nt, Artificial Sequence
  Description of Artificial Sequence: Synthetic oligonucleotide
cgggacacgcccgccuggc

SEQ ID NO: 1317321 - RNA, 19 nt, Artificial Sequence
  Description of Artificial Sequence: Synthetic oligonucleotide
gcucugcguucucgauguc

SEQ ID NO: 1317322 - RNA, 19 nt, Artificial Sequence
  Description of Artificial Sequence: Synthetic oligonucleotide
ggcucggcucauugguauu

SEQ ID NO: 1317323 - RNA, 19 nt, Artificial Sequence
  Description of Artificial Sequence: Synthetic oligonucleotide
ccuccgccggcugaucuua

SEQ ID NO: 1317324 - RNA, 19 nt, Artificial Sequence
  Description of Artificial Sequence: Synthetic oligonucleotide
cacgcccgccuggcaguga

SEQ ID NO: 1317325 - RNA, 19 nt, Artificial Sequence
  Description of Artificial Sequence: Synthetic oligonucleotide
cuccgccggcugaucuuau

SEQ ID NO: 1317326 - RNA, 19 nt, Artificial Sequence
  Description of Artificial Sequence: Synthetic oligonucleotide
ccccacccgauggacuuaa

SEQ ID NO: 1317327 - RNA, 19 nt, Artificial Sequence
  Description of Artificial Sequence: Synthetic oligonucleotide
gccgcuggaugagggcaua

SEQ ID NO: 1317328 - RNA, 19 nt, Artificial Sequence
  Description of Artificial Sequence: Synthetic oligonucleotide
cggcucggcucauugguau

SEQ ID NO: 1317329 - RNA, 19 nt, Artificial Sequence
  Description of Artificial Sequence: Synthetic oligonucleotide
gccuccgccggcugaucuu

SEQ ID NO: 1317330 - RNA, 19 nt, Artificial Sequence
  Description of Artificial Sequence: Synthetic oligonucleotide
cguagccgauguugagccu

SEQ ID NO: 1317331 - RNA, 19 nt, Artificial Sequence
  Description of Artificial Sequence: Synthetic oligonucleotide
cguuugccuuugacgaauu

SEQ ID NO: 1317332 - RNA, 19 nt, Artificial Sequence
  Description of Artificial Sequence: Synthetic oligonucleotide
cccacccgauggacuuaaa

SEQ ID NO: 1317333 - RNA, 19 nt, Artificial Sequence
  Description of Artificial Sequence: Synthetic oligonucleotide
gccgcagguucugcuuguu

SEQ ID NO: 1317334 - RNA, 19 nt, Artificial Sequence
  Description of Artificial Sequence: Synthetic oligonucleotide
cgcccgccuggcagugaau

SEQ ID NO: 1317335 - RNA, 19 nt, Artificial Sequence
  Description of Artificial Sequence: Synthetic oligonucleotide
uucugaauaauaaaacugg

SEQ ID NO: 1317336 - RNA, 19 nt, Artificial Sequence
  Description of Artificial Sequence: Synthetic oligonucleotide
ugaauaauaaaacuggauc

SEQ ID NO: 1317337 - RNA, 19 nt, Artificial Sequence
  Description of Artificial Sequence: Synthetic oligonucleotide
ugaguuacgagauuucugg

SEQ ID NO: 1317338 - RNA, 19 nt, Artificial Sequence
  Description of Artificial Sequence: Synthetic oligonucleotide
uugacuauuacaaacuuga

SEQ ID NO: 1317339 - RNA, 19 nt, Artificial Sequence
  Description of Artificial Sequence: Synthetic oligonucleotide
uauucagugaagaaccggg

SEQ ID NO: 1317340 - RNA, 19 nt, Artificial Sequence
  Description of Artificial Sequence: Synthetic oligonucleotide
agauucaagucucagacuc

SEQ ID NO: 1317341 - RNA, 19 nt, Artificial Sequence
  Description of Artificial Sequence: Synthetic oligonucleotide
aaugaugcccuauugugag

SEQ ID NO: 1317342 - RNA, 19 nt, Artificial Sequence
  Description of Artificial Sequence: Synthetic oligonucleotide
aagacaccguacuuaaagc

SEQ ID NO: 1317343 - RNA, 19 nt, Artificial Sequence
  Description of Artificial Sequence: Synthetic oligonucleotide
aacccauagaaagucagcc

SEQ ID NO: 1317344 - RNA, 19 nt, Artificial Sequence
  Description of Artificial Sequence: Synthetic oligonucleotide
uguacgugaggacaugucg

SEQ ID NO: 1317345 - RNA, 19 nt, Artificial Sequence
  Description of Artificial Sequence: Synthetic oligonucleotide
gagaaugugaguuccuugg

SEQ ID NO: 1317346 - RNA, 19 nt, Artificial Sequence
  Description of Artificial Sequence: Synthetic oligonucleotide
uugaagccgauuuugaaag

SEQ ID NO: 1317347 - RNA, 19 nt, Artificial Sequence
  Description of Artificial Sequence: Synthetic oligonucleotide
uguauaaagcugaauuccc

SEQ ID NO: 1317348 - RNA, 19 nt, Artificial Sequence
  Description of Artificial Sequence: Synthetic oligonucleotide
augagcacgauccuggccg

SEQ ID NO: 1317349 - RNA, 19 nt, Artificial Sequence
  Description of Artificial Sequence: Synthetic oligonucleotide
acucaauugggcuggaggg

SEQ ID NO: 1317350 - RNA, 19 nt, Artificial Sequence
  Description of Artificial Sequence: Synthetic oligonucleotide
cucacgaggaggaucaugg

SEQ ID NO: 1317351 - RNA, 19 nt, Artificial Sequence
  Description of Artificial Sequence: Synthetic oligonucleotide
agggcuguuauucauucac

SEQ ID NO: 1317352 - RNA, 19 nt, Artificial Sequence
  Description of Artificial Sequence: Synthetic oligonucleotide
gaugggacccuucagauuc

SEQ ID NO: 1317353 - RNA, 19 nt, Artificial Sequence
  Description of Artificial Sequence: Synthetic oligonucleotide
ugaaagugaaauucuugcc

SEQ ID NO: 1317354 - RNA, 19 nt, Artificial Sequence
  Description of Artificial Sequence: Synthetic oligonucleotide
agaaagucagccucuggac

SEQ ID NO: 1317355 - RNA, 19 nt, Artificial Sequence
  Description of Artificial Sequence: Synthetic oligonucleotide
gagagcaugaguuacgaga

SEQ ID NO: 1317356 - RNA, 19 nt, Artificial Sequence
  Description of Artificial Sequence: Synthetic oligonucleotide
auucugaauaauaaaacug

SEQ ID NO: 1317357 - RNA, 19 nt, Artificial Sequence
  Description of Artificial Sequence: Synthetic oligonucleotide
accggcgucacccaaggcc

SEQ ID NO: 1317358 - RNA, 19 nt, Artificial Sequence
  Description of Artificial Sequence: Synthetic oligonucleotide
uucugagugaguuccagug

SEQ ID NO: 1317359 - RNA, 19 nt, Artificial Sequence
  Description of Artificial Sequence: Synthetic oligonucleotide
acagauuugacuauuacaa

SEQ ID NO: 1317360 - RNA, 19 nt, Artificial Sequence
  Description of Artificial Sequence: Synthetic oligonucleotide
ucugagugaguuccagugg

SEQ ID NO: 1317361 - RNA, 19 nt, Artificial Sequence
  Description of Artificial Sequence: Synthetic oligonucleotide
aguugauagucuucccagc

SEQ ID NO: 1317362 - RNA, 19 nt, Artificial Sequence
  Description of Artificial Sequence: Synthetic oligonucleotide
uuagacucauugcuuacca

SEQ ID NO: 1317363 - RNA, 19 nt, Artificial Sequence
  Description of Artificial Sequence: Synthetic oligonucleotide
agaaugugaguuccuuggc

SEQ ID NO: 1317364 - RNA, 19 nt, Artificial Sequence
  Description of Artificial Sequence: Synthetic oligonucleotide
aaaaugacccucacgagga

SEQ ID NO: 1317365 - RNA, 19 nt, Artificial Sequence
  Description of Artificial Sequence: Synthetic oligonucleotide
uuaaagcauaagcagcacu

SEQ ID NO: 1317366 - RNA, 19 nt, Artificial Sequence
  Description of Artificial Sequence: Synthetic oligonucleotide
uugccuacaguucggaagc

SEQ ID NO: 1317367 - RNA, 19 nt, Artificial Sequence
  Description of Artificial Sequence: Synthetic oligonucleotide
cuugccuacaguucggaag

SEQ ID NO: 1317368 - RNA, 19 nt, Artificial Sequence
  Description of Artificial Sequence: Synthetic oligonucleotide
aauauucagugaagaaccg

SEQ ID NO: 1317369 - RNA, 19 nt, Artificial Sequence
  Description of Artificial Sequence: Synthetic oligonucleotide
gauacucguaguccgguag

SEQ ID NO: 1317370 - RNA, 19 nt, Artificial Sequence
  Description of Artificial Sequence: Synthetic oligonucleotide
uggcuuuagacucauugcu

SEQ ID NO: 1317371 - RNA, 19 nt, Artificial Sequence
  Description of Artificial Sequence: Synthetic oligonucleotide
gauagaacagcgcugccuc

SEQ ID NO: 1317372 - RNA, 19 nt, Artificial Sequence
  Description of Artificial Sequence: Synthetic oligonucleotide
gaauucccgaaagagaaug

SEQ ID NO: 1317373 - RNA, 19 nt, Artificial Sequence
  Description of Artificial Sequence: Synthetic oligonucleotide
uuuaccuccccuuagccua

SEQ ID NO: 1317374 - RNA, 19 nt, Artificial Sequence
  Description of Artificial Sequence: Synthetic oligonucleotide
agacaagggacuuuauuca

SEQ ID NO: 1317375 - RNA, 19 nt, Artificial Sequence
  Description of Artificial Sequence: Synthetic oligonucleotide
uucagugaagaaccgggca

SEQ ID NO: 1317376 - RNA, 19 nt, Artificial Sequence
  Description of Artificial Sequence: Synthetic oligonucleotide
cacaaucacgguauugggg

SEQ ID NO: 1317377 - RNA, 19 nt, Artificial Sequence
  Description of Artificial Sequence: Synthetic oligonucleotide
cacucaauugggcuggagg

SEQ ID NO: 1317378 - RNA, 19 nt, Artificial Sequence
  Description of Artificial Sequence: Synthetic oligonucleotide
ucauucacccaucucucca

SEQ ID NO: 1317379 - RNA, 19 nt, Artificial Sequence
  Description of Artificial Sequence: Synthetic oligonucleotide
gaucacucaauugggcugg

SEQ ID NO: 1317380 - RNA, 19 nt, Artificial Sequence
  Description of Artificial Sequence: Synthetic oligonucleotide
auuacaaacuugaagccga

SEQ ID NO: 1317381 - RNA, 19 nt, Artificial Sequence
  Description of Artificial Sequence: Synthetic oligonucleotide
aguuacgagauuucuggga

SEQ ID NO: 1317382 - RNA, 19 nt, Artificial Sequence
  Description of Artificial Sequence: Synthetic oligonucleotide
cugaauucccgaaagagaa

SEQ ID NO: 1317383 - RNA, 19 nt, Artificial Sequence
  Description of Artificial Sequence: Synthetic oligonucleotide
aaugacccucacgaggagg

SEQ ID NO: 1317384 - RNA, 19 nt, Artificial Sequence
  Description of Artificial Sequence: Synthetic oligonucleotide
caauuugcgggagcgaugg

SEQ ID NO: 1317385 - RNA, 19 nt, Artificial Sequence
  Description of Artificial Sequence: Synthetic oligonucleotide
uuuagacucauugcuuacc

SEQ ID NO: 1317386 - RNA, 19 nt, Artificial Sequence
  Description of Artificial Sequence: Synthetic oligonucleotide
ucguugacgaugcugccca

SEQ ID NO: 1317387 - RNA, 19 nt, Artificial Sequence
  Description of Artificial Sequence: Synthetic oligonucleotide
auauucagugaagaaccgg

SEQ ID NO: 1317388 - RNA, 19 nt, Artificial Sequence
  Description of Artificial Sequence: Synthetic oligonucleotide
agacaccguacuuaaagca

SEQ ID NO: 1317389 - RNA, 19 nt, Artificial Sequence
  Description of Artificial Sequence: Synthetic oligonucleotide
gaguuacgagauuucuggg

SEQ ID NO: 1317390 - RNA, 19 nt, Artificial Sequence
  Description of Artificial Sequence: Synthetic oligonucleotide
ugaccggguaguuuccacg

SEQ ID NO: 1317391 - RNA, 19 nt, Artificial Sequence
  Description of Artificial Sequence: Synthetic oligonucleotide
gacucauugcuuaccagag

SEQ ID NO: 1317392 - RNA, 19 nt, Artificial Sequence
  Description of Artificial Sequence: Synthetic oligonucleotide
uuuuaccuccccuuagccu

SEQ ID NO: 1317393 - RNA, 19 nt, Artificial Sequence
  Description of Artificial Sequence: Synthetic oligonucleotide
agagaaugugaguuccuug

SEQ ID NO: 1317394 - RNA, 19 nt, Artificial Sequence
  Description of Artificial Sequence: Synthetic oligonucleotide
ugcauuacuaauucauguu

SEQ ID NO: 1317395 - RNA, 19 nt, Artificial Sequence
  Description of Artificial Sequence: Synthetic oligonucleotide
cagugguacucccucaugg

SEQ ID NO: 1317396 - RNA, 19 nt, Artificial Sequence
  Description of Artificial Sequence: Synthetic oligonucleotide
cuuuuaccuccccuuagcc

SEQ ID NO: 1317397 - RNA, 19 nt, Artificial Sequence
  Description of Artificial Sequence: Synthetic oligonucleotide
uacgagauuucugggauca

SEQ ID NO: 1317398 - RNA, 19 nt, Artificial Sequence
  Description of Artificial Sequence: Synthetic oligonucleotide
aaagggcuacaaggaaccc

SEQ ID NO: 1317399 - RNA, 19 nt, Artificial Sequence
  Description of Artificial Sequence: Synthetic oligonucleotide
auagaacagcgcugccucc

SEQ ID NO: 1317400 - RNA, 19 nt, Artificial Sequence
  Description of Artificial Sequence: Synthetic oligonucleotide
accaugaagacccugcauu

SEQ ID NO: 1317401 - RNA, 19 nt, Artificial Sequence
  Description of Artificial Sequence: Synthetic oligonucleotide
cccuugaccaugaagaccc

SEQ ID NO: 1317402 - RNA, 19 nt, Artificial Sequence
  Description of Artificial Sequence: Synthetic oligonucleotide
ggcacaaucacgguauugg

SEQ ID NO: 1317403 - RNA, 19 nt, Artificial Sequence
  Description of Artificial Sequence: Synthetic oligonucleotide
gaagccgauuuugaaagug

SEQ ID NO: 1317404 - RNA, 19 nt, Artificial Sequence
  Description of Artificial Sequence: Synthetic oligonucleotide
uguuauucauucacccauc

SEQ ID NO: 1317405 - RNA, 19 nt, Artificial Sequence
  Description of Artificial Sequence: Synthetic oligonucleotide
gauucaagucucagacucg

SEQ ID NO: 1317406 - RNA, 19 nt, Artificial Sequence
  Description of Artificial Sequence: Synthetic oligonucleotide
uucaguggagccaucgcuc

SEQ ID NO: 1317407 - RNA, 19 nt, Artificial Sequence
  Description of Artificial Sequence: Synthetic oligonucleotide
uuccauggggaaccaaccc

SEQ ID NO: 1317408 - RNA, 19 nt, Artificial Sequence
  Description of Artificial Sequence: Synthetic oligonucleotide
ugcuuaccagagacaaggg

SEQ ID NO: 1317409 - RNA, 19 nt, Artificial Sequence
  Description of Artificial Sequence: Synthetic oligonucleotide
auucagugaagaaccgggc

SEQ ID NO: 1317410 - RNA, 19 nt, Artificial Sequence
  Description of Artificial Sequence: Synthetic oligonucleotide
cuacaaggaacccauagaa

SEQ ID NO: 1317411 - RNA, 19 nt, Artificial Sequence
  Description of Artificial Sequence: Synthetic oligonucleotide
guccgguagagcuaggcgc

SEQ ID NO: 1317412 - RNA, 19 nt, Artificial Sequence
  Description of Artificial Sequence: Synthetic oligonucleotide
gagggcggcacagugaugc

SEQ ID NO: 1317413 - RNA, 19 nt, Artificial Sequence
  Description of Artificial Sequence: Synthetic oligonucleotide
cauccaauuugcgggagcg

SEQ ID NO: 1317414 - RNA, 19 nt, Artificial Sequence
  Description of Artificial Sequence: Synthetic oligonucleotide
gacccuucagauucaaguc

SEQ ID NO: 1317415 - RNA, 19 nt, Artificial Sequence
  Description of Artificial Sequence: Synthetic oligonucleotide
guugauagucuucccagca

SEQ ID NO: 1317416 - RNA, 19 nt, Artificial Sequence
  Description of Artificial Sequence: Synthetic oligonucleotide
uuauucauucacccaucuc

SEQ ID NO: 1317417 - RNA, 19 nt, Artificial Sequence
  Description of Artificial Sequence: Synthetic oligonucleotide
augaagacccugcauuacu

SEQ ID NO: 1317418 - RNA, 19 nt, Artificial Sequence
  Description of Artificial Sequence: Synthetic oligonucleotide
aaaugacccucacgaggag

SEQ ID NO: 1317419 - RNA, 19 nt, Artificial Sequence
  Description of Artificial Sequence: Synthetic oligonucleotide
guauuuguggcggucacac

SEQ ID NO: 1317420 - RNA, 19 nt, Artificial Sequence
  Description of Artificial Sequence: Synthetic oligonucleotide
cuugaagccgauuuugaaa

SEQ ID NO: 1317421 - RNA, 19 nt, Artificial Sequence
  Description of Artificial Sequence: Synthetic oligonucleotide
cuuuagacucauugcuuac

SEQ ID NO: 1317422 - RNA, 19 nt, Artificial Sequence
  Description of Artificial Sequence: Synthetic oligonucleotide
ugauagaacagcgcugccu

SEQ ID NO: 1317423 - RNA, 19 nt, Artificial Sequence
  Description of Artificial Sequence: Synthetic oligonucleotide
ugccauacuggccaauauc

SEQ ID NO: 1317424 - RNA, 19 nt, Artificial Sequence
  Description of Artificial Sequence: Synthetic oligonucleotide
agugaaauucuugcccauc

SEQ ID NO: 1317425 - RNA, 19 nt, Artificial Sequence
  Description of Artificial Sequence: Synthetic oligonucleotide
auuugcgggagcgauggag

SEQ ID NO: 1317426 - RNA, 19 nt, Artificial Sequence
  Description of Artificial Sequence: Synthetic oligonucleotide
uguggaaaaugacccucac

SEQ ID NO: 1317427 - RNA, 19 nt, Artificial Sequence
  Description of Artificial Sequence: Synthetic oligonucleotide
aagcugaauucccgaaaga

SEQ ID NO: 1317428 - RNA, 19 nt, Artificial Sequence
  Description of Artificial Sequence: Synthetic oligonucleotide
ucggaagcaucuccagaag

SEQ ID NO: 1317429 - RNA, 19 nt, Artificial Sequence
  Description of Artificial Sequence: Synthetic oligonucleotide
gacccugcauuacuaauuc

SEQ ID NO: 1317430 - RNA, 19 nt, Artificial Sequence
  Description of Artificial Sequence: Synthetic oligonucleotide
ccguacuuaaagcauaagc

SEQ ID NO: 1317431 - RNA, 19 nt, Artificial Sequence
  Description of Artificial Sequence: Synthetic oligonucleotide
caagucucagacucgucug

SEQ ID NO: 1317432 - RNA, 19 nt, Artificial Sequence
  Description of Artificial Sequence: Synthetic oligonucleotide
uagacucauugcuuaccag

SEQ ID NO: 1317433 - RNA, 19 nt, Artificial Sequence
  Description of Artificial Sequence: Synthetic oligonucleotide
ggcuguuauucauucaccc

SEQ ID NO: 1317434 - RNA, 19 nt, Artificial Sequence
  Description of Artificial Sequence: Synthetic oligonucleotide
gagauuucugggaucacuc

SEQ ID NO: 1317435 - RNA, 19 nt, Artificial Sequence
  Description of Artificial Sequence: Synthetic oligonucleotide
gaccggguaguuuccacgc

SEQ ID NO: 1317436 - RNA, 19 nt, Artificial Sequence
  Description of Artificial Sequence: Synthetic oligonucleotide
ugacgaugcugcccacucg

SEQ ID NO: 1317437 - RNA, 19 nt, Artificial Sequence
  Description of Artificial Sequence: Synthetic oligonucleotide
ugacuauuacaaacuugaa

SEQ ID NO: 1317438 - RNA, 19 nt, Artificial Sequence
  Description of Artificial Sequence: Synthetic oligonucleotide
ucgcugagccagauacucg

SEQ ID NO: 1317439 - RNA, 19 nt, Artificial Sequence
  Description of Artificial Sequence: Synthetic oligonucleotide
gcauuacuaauucauguuc

SEQ ID NO: 1317440 - RNA, 19 nt, Artificial Sequence
  Description of Artificial Sequence: Synthetic oligonucleotide
accgcauccuccauguacg

SEQ ID NO: 1317441 - RNA, 19 nt, Artificial Sequence
  Description of Artificial Sequence: Synthetic oligonucleotide
uuacuaauucauguuccuc

SEQ ID NO: 1317442 - RNA, 19 nt, Artificial Sequence
  Description of Artificial Sequence: Synthetic oligonucleotide
uacgugaggacaugucgcu

SEQ ID NO: 1317443 - RNA, 19 nt, Artificial Sequence
  Description of Artificial Sequence: Synthetic oligonucleotide
ugcccuauugugaggugug

SEQ ID NO: 1317444 - RNA, 19 nt, Artificial Sequence
  Description of Artificial Sequence: Synthetic oligonucleotide
uggccaauaucuuccuugu

SEQ ID NO: 1317445 - RNA, 19 nt, Artificial Sequence
  Description of Artificial Sequence: Synthetic oligonucleotide
uggucagcaagucaccguu

SEQ ID NO: 1317446 - RNA, 19 nt, Artificial Sequence
  Description of Artificial Sequence: Synthetic oligonucleotide
agagacaagggacuuuauu

SEQ ID NO: 1317447 - RNA, 19 nt, Artificial Sequence
  Description of Artificial Sequence: Synthetic oligonucleotide
gaacccauagaaagucagc

SEQ ID NO: 1317448 - RNA, 19 nt, Artificial Sequence
  Description of Artificial Sequence: Synthetic oligonucleotide
guacgugaggacaugucgc

SEQ ID NO: 1317449 - RNA, 19 nt, Artificial Sequence
  Description of Artificial Sequence: Synthetic oligonucleotide
agaacagcgcugccuccac

SEQ ID NO: 1317450 - RNA, 19 nt, Artificial Sequence
  Description of Artificial Sequence: Synthetic oligonucleotide
ggaucacucaauugggcug

SEQ ID NO: 1317451 - RNA, 19 nt, Artificial Sequence
  Description of Artificial Sequence: Synthetic oligonucleotide
ugaauucccgaaagagaau

SEQ ID NO: 1317452 - RNA, 19 nt, Artificial Sequence
  Description of Artificial Sequence: Synthetic oligonucleotide
aauucccgaaagagaaugu

SEQ ID NO: 1317453 - RNA, 19 nt, Artificial Sequence
  Description of Artificial Sequence: Synthetic oligonucleotide
agcaugaguuacgagauuu

SEQ ID NO: 1317454 - RNA, 19 nt, Artificial Sequence
  Description of Artificial Sequence: Synthetic oligonucleotide
agagcaugaguuacgagau

SEQ ID NO: 1317455 - RNA, 19 nt, Artificial Sequence
  Description of Artificial Sequence: Synthetic oligonucleotide
cucuaugggagcuguugug

SEQ ID NO: 1317456 - RNA, 19 nt, Artificial Sequence
  Description of Artificial Sequence: Synthetic oligonucleotide
uccaauuugcgggagcgau

SEQ ID NO: 1317457 - RNA, 19 nt, Artificial Sequence
  Description of Artificial Sequence: Synthetic oligonucleotide
cuuugaccggguaguuucc

SEQ ID NO: 1317458 - RNA, 19 nt, Artificial Sequence
  Description of Artificial Sequence: Synthetic oligonucleotide
gcugauagaacagcgcugc

SEQ ID NO: 1317459 - RNA, 19 nt, Artificial Sequence
  Description of Artificial Sequence: Synthetic oligonucleotide
auacucguaguccgguaga

SEQ ID NO: 1317460 - RNA, 19 nt, Artificial Sequence
  Description of Artificial Sequence: Synthetic oligonucleotide
cauugcuuaccagagacaa

SEQ ID NO: 1317461 - RNA, 19 nt, Artificial Sequence
  Description of Artificial Sequence: Synthetic oligonucleotide
cuuaaagcauaagcagcac

SEQ ID NO: 1317462 - RNA, 19 nt, Artificial Sequence
  Description of Artificial Sequence: Synthetic oligonucleotide
ccaucucuccagcagaggg

SEQ ID NO: 1317463 - RNA, 19 nt, Artificial Sequence
  Description of Artificial Sequence: Synthetic oligonucleotide
gaagaaccgggcaaugcca

SEQ ID NO: 1317464 - RNA, 19 nt, Artificial Sequence
  Description of Artificial Sequence: Synthetic oligonucleotide
ucuccagaaggcccguaaa

SEQ ID NO: 1317465 - RNA, 19 nt, Artificial Sequence
  Description of Artificial Sequence: Synthetic oligonucleotide
acaccggcgucacccaagg

SEQ ID NO: 1317466 - RNA, 19 nt, Artificial Sequence
  Description of Artificial Sequence: Synthetic oligonucleotide
gacagcaaauccugauaga

SEQ ID NO: 1317467 - RNA, 19 nt, Artificial Sequence
  Description of Artificial Sequence: Synthetic oligonucleotide
guauugggguucuucccug

SEQ ID NO: 1317468 - RNA, 19 nt, Artificial Sequence
  Description of Artificial Sequence: Synthetic oligonucleotide
uuauuccagcuaguggcug

SEQ ID NO: 1317469 - RNA, 19 nt, Artificial Sequence
  Description of Artificial Sequence: Synthetic oligonucleotide
uacucguaguccgguagag

SEQ ID NO: 1317470 - RNA, 19 nt, Artificial Sequence
  Description of Artificial Sequence: Synthetic oligonucleotide
cagacagugguacucccuc

SEQ ID NO: 1317471 - RNA, 19 nt, Artificial Sequence
  Description of Artificial Sequence: Synthetic oligonucleotide
aagucaccguucuugccua

SEQ ID NO: 1317472 - RNA, 19 nt, Artificial Sequence
  Description of Artificial Sequence: Synthetic oligonucleotide
cacaguugauagucuuccc

SEQ ID NO: 1317473 - RNA, 19 nt, Artificial Sequence
  Description of Artificial Sequence: Synthetic oligonucleotide
uuacaaacuugaagccgau

SEQ ID NO: 1317474 - RNA, 19 nt, Artificial Sequence
  Description of Artificial Sequence: Synthetic oligonucleotide
guuacgagauuucugggau

SEQ ID NO: 1317475 - RNA, 19 nt, Artificial Sequence
  Description of Artificial Sequence: Synthetic oligonucleotide
ugaagccgauuuugaaagu

SEQ ID NO: 1317476 - RNA, 19 nt, Artificial Sequence
  Description of Artificial Sequence: Synthetic oligonucleotide
uguauuuguggcggucaca

SEQ ID NO: 1317477 - RNA, 19 nt, Artificial Sequence
  Description of Artificial Sequence: Synthetic oligonucleotide
cuaguggcugauuucucca

SEQ ID NO: 1317478 - RNA, 19 nt, Artificial Sequence
  Description of Artificial Sequence: Synthetic oligonucleotide
gcacaaucacgguauuggg

SEQ ID NO: 1317479 - RNA, 19 nt, Artificial Sequence
  Description of Artificial Sequence: Synthetic oligonucleotide
uuacgagauuucugggauc

SEQ ID NO: 1317480 - RNA, 19 nt, Artificial Sequence
  Description of Artificial Sequence: Synthetic oligonucleotide
cugaauaauaaaacuggau

SEQ ID NO: 1317481 - RNA, 19 nt, Artificial Sequence
  Description of Artificial Sequence: Synthetic oligonucleotide
gaagcgagagcaugaguua

SEQ ID NO: 1317482 - RNA, 19 nt, Artificial Sequence
  Description of Artificial Sequence: Synthetic oligonucleotide
uccccuuagccuacuggcu

SEQ ID NO: 1317483 - RNA, 19 nt, Artificial Sequence
  Description of Artificial Sequence: Synthetic oligonucleotide
gcuuugaaagggcuacaag

SEQ ID NO: 1317484 - RNA, 19 nt, Artificial Sequence
  Description of Artificial Sequence: Synthetic oligonucleotide
cagcacaccggcgucaccc

SEQ ID NO: 1317485 - RNA, 19 nt, Artificial Sequence
  Description of Artificial Sequence: Synthetic oligonucleotide
ggaaccaacccggggaggg

SEQ ID NO: 1317486 - RNA, 19 nt, Artificial Sequence
  Description of Artificial Sequence: Synthetic oligonucleotide
cucccucauggucagcaag

SEQ ID NO: 1317487 - RNA, 19 nt, Artificial Sequence
  Description of Artificial Sequence: Synthetic oligonucleotide
ccugcauuacuaauucaug

SEQ ID NO: 1317488 - RNA, 19 nt, Artificial Sequence
  Description of Artificial Sequence: Synthetic oligonucleotide
cuguuauucauucacccau

SEQ ID NO: 1317489 - RNA, 19 nt, Artificial Sequence
  Description of Artificial Sequence: Synthetic oligonucleotide
auguacgugaggacauguc

SEQ ID NO: 1317490 - RNA, 19 nt, Artificial Sequence
  Description of Artificial Sequence: Synthetic oligonucleotide
agcgagagcaugaguuacg

SEQ ID NO: 1317491 - RNA, 19 nt, Artificial Sequence
  Description of Artificial Sequence: Synthetic oligonucleotide
gauccuggccgccuucuga

SEQ ID NO: 1317492 - RNA, 19 nt, Artificial Sequence
  Description of Artificial Sequence: Synthetic oligonucleotide
caugaagacccugcauuac

SEQ ID NO: 1317493 - RNA, 19 nt, Artificial Sequence
  Description of Artificial Sequence: Synthetic oligonucleotide
gcuacaaggaacccauaga

SEQ ID NO: 1317494 - RNA, 19 nt, Artificial Sequence
  Description of Artificial Sequence: Synthetic oligonucleotide
gaugcccuauugugaggug

SEQ ID NO: 1317495 - RNA, 19 nt, Artificial Sequence
  Description of Artificial Sequence: Synthetic oligonucleotide
uugaccggguaguuuccac

SEQ ID NO: 1317496 - RNA, 19 nt, Artificial Sequence
  Description of Artificial Sequence: Synthetic oligonucleotide
gccuacuggcuuuagacuc

SEQ ID NO: 1317497 - RNA, 19 nt, Artificial Sequence
  Description of Artificial Sequence: Synthetic oligonucleotide
aagguacaggccacagaug

SEQ ID NO: 1317498 - RNA, 19 nt, Artificial Sequence
  Description of Artificial Sequence: Synthetic oligonucleotide
augaugcuuugaaagggcu

SEQ ID NO: 1317499 - RNA, 19 nt, Artificial Sequence
  Description of Artificial Sequence: Synthetic oligonucleotide
ugucgcugagccagauacu

SEQ ID NO: 1317500 - RNA, 19 nt, Artificial Sequence
  Description of Artificial Sequence: Synthetic oligonucleotide
uuugaccggguaguuucca

SEQ ID NO: 1317501 - RNA, 19 nt, Artificial Sequence
  Description of Artificial Sequence: Synthetic oligonucleotide
gguacucccucauggucag

SEQ ID NO: 1317502 - RNA, 19 nt, Artificial Sequence
  Description of Artificial Sequence: Synthetic oligonucleotide
gucgcugagccagauacuc

SEQ ID NO: 1317503 - RNA, 19 nt, Artificial Sequence
  Description of Artificial Sequence: Synthetic oligonucleotide
agggcuacaaggaacccau

SEQ ID NO: 1317504 - RNA, 19 nt, Artificial Sequence
  Description of Artificial Sequence: Synthetic oligonucleotide
uucaagucucagacucguc

SEQ ID NO: 1317505 - RNA, 19 nt, Artificial Sequence
  Description of Artificial Sequence: Synthetic oligonucleotide
ugcauccaauuugcgggag

SEQ ID NO: 1317506 - RNA, 19 nt, Artificial Sequence
  Description of Artificial Sequence: Synthetic oligonucleotide
augacccucacgaggagga

SEQ ID NO: 1317507 - RNA, 19 nt, Artificial Sequence
  Description of Artificial Sequence: Synthetic oligonucleotide
uuaccuccccuuagccuac

SEQ ID NO: 1317508 - RNA, 19 nt, Artificial Sequence
  Description of Artificial Sequence: Synthetic oligonucleotide
gcuguuauucauucaccca

SEQ ID NO: 1317509 - RNA, 19 nt, Artificial Sequence
  Description of Artificial Sequence: Synthetic oligonucleotide
aagaaccgggcaaugccau

SEQ ID NO: 1317510 - RNA, 19 nt, Artificial Sequence
  Description of Artificial Sequence: Synthetic oligonucleotide
ccuuuuaccuccccuuagc

SEQ ID NO: 1317511 - RNA, 19 nt, Artificial Sequence
  Description of Artificial Sequence: Synthetic oligonucleotide
cugggucaugcaucaaguc

SEQ ID NO: 1317512 - RNA, 19 nt, Artificial Sequence
  Description of Artificial Sequence: Synthetic oligonucleotide
aauuugcgggagcgaugga

SEQ ID NO: 1317513 - RNA, 19 nt, Artificial Sequence
  Description of Artificial Sequence: Synthetic oligonucleotide
cugauagaacagcgcugcc

SEQ ID NO: 1317514 - RNA, 19 nt, Artificial Sequence
  Description of Artificial Sequence: Synthetic oligonucleotide
uggcacaaucacgguauug

SEQ ID NO: 1317515 - RNA, 19 nt, Artificial Sequence
  Description of Artificial Sequence: Synthetic oligonucleotide
cuaugggagcuguugugga

SEQ ID NO: 1317516 - RNA, 19 nt, Artificial Sequence
  Description of Artificial Sequence: Synthetic oligonucleotide
gguagagcuaggcgcucgg

SEQ ID NO: 1317517 - RNA, 19 nt, Artificial Sequence
  Description of Artificial Sequence: Synthetic oligonucleotide
agugggaaaucugggcaca

SEQ ID NO: 1317518 - RNA, 19 nt, Artificial Sequence
  Description of Artificial Sequence: Synthetic oligonucleotide
ggcggcacagugaugcugg

SEQ ID NO: 1317519 - RNA, 19 nt, Artificial Sequence
  Description of Artificial Sequence: Synthetic oligonucleotide
cuuggcauacacuguuaaa

SEQ ID NO: 1317520 - RNA, 19 nt, Artificial Sequence
  Description of Artificial Sequence: Synthetic oligonucleotide
gaaccaacccggggagggg

SEQ ID NO: 1317521 - RNA, 19 nt, Artificial Sequence
  Description of Artificial Sequence: Synthetic oligonucleotide
uucuucccugacagcaaau

SEQ ID NO: 1317522 - RNA, 19 nt, Artificial Sequence
  Description of Artificial Sequence: Synthetic oligonucleotide
gcuuuagacucauugcuua

SEQ ID NO: 1317523 - RNA, 19 nt, Artificial Sequence
  Description of Artificial Sequence: Synthetic oligonucleotide
ucguaguccgguagagcua

SEQ ID NO: 1317524 - RNA, 19 nt, Artificial Sequence
  Description of Artificial Sequence: Synthetic oligonucleotide
cacaccggcgucacccaag

SEQ ID NO: 1317525 - RNA, 19 nt, Artificial Sequence
  Description of Artificial Sequence: Synthetic oligonucleotide
augcccuauugugaggugu

SEQ ID NO: 1317526 - RNA, 19 nt, Artificial Sequence
  Description of Artificial Sequence: Synthetic oligonucleotide
ccuacaguucggaagcauc

SEQ ID NO: 1317527 - RNA, 19 nt, Artificial Sequence
  Description of Artificial Sequence: Synthetic oligonucleotide
cagcacgugcucucaggag

SEQ ID NO: 1317528 - RNA, 19 nt, Artificial Sequence
  Description of Artificial Sequence: Synthetic oligonucleotide
ccggcgucacccaaggccg

SEQ ID NO: 1317529 - RNA, 19 nt, Artificial Sequence
  Description of Artificial Sequence: Synthetic oligonucleotide
cggucguugacgaugcugc

SEQ ID NO: 1317530 - RNA, 19 nt, Artificial Sequence
  Description of Artificial Sequence: Synthetic oligonucleotide
gcugaauucccgaaagaga

SEQ ID NO: 1317531 - RNA, 19 nt, Artificial Sequence
  Description of Artificial Sequence: Synthetic oligonucleotide
caugcaucaagucuccuuu

SEQ ID NO: 1317532 - RNA, 19 nt, Artificial Sequence
  Description of Artificial Sequence: Synthetic oligonucleotide
acgugcucucaggagucac

SEQ ID NO: 1317533 - RNA, 19 nt, Artificial Sequence
  Description of Artificial Sequence: Synthetic oligonucleotide
agauacucguaguccggua

SEQ ID NO: 1317534 - RNA, 19 nt, Artificial Sequence
  Description of Artificial Sequence: Synthetic oligonucleotide
accguacuuaaagcauaag

SEQ ID NO: 1317535 - RNA, 19 nt, Artificial Sequence
  Description of Artificial Sequence: Synthetic oligonucleotide
aggccggucguugacgaug

SEQ ID NO: 1317536 - RNA, 19 nt, Artificial Sequence
  Description of Artificial Sequence: Synthetic oligonucleotide
gagggcuguuauucauuca

SEQ ID NO: 1317537 - RNA, 19 nt, Artificial Sequence
  Description of Artificial Sequence: Synthetic oligonucleotide
gagugaguuccagugggaa

SEQ ID NO: 1317538 - RNA, 19 nt, Artificial Sequence
  Description of Artificial Sequence: Synthetic oligonucleotide
ucacucaauugggcuggag

SEQ ID NO: 1317539 - RNA, 19 nt, Artificial Sequence
  Description of Artificial Sequence: Synthetic oligonucleotide
cuucaguggagccaucgcu

SEQ ID NO: 1317540 - RNA, 19 nt, Artificial Sequence
  Description of Artificial Sequence: Synthetic oligonucleotide
caagggacuuuauucauuu

SEQ ID NO: 1317541 - RNA, 19 nt, Artificial Sequence
  Description of Artificial Sequence: Synthetic oligonucleotide
gacaccguacuuaaagcau

SEQ ID NO: 1317542 - RNA, 19 nt, Artificial Sequence
  Description of Artificial Sequence: Synthetic oligonucleotide
gcccacucgaggauguugg

SEQ ID NO: 1317543 - RNA, 19 nt, Artificial Sequence
  Description of Artificial Sequence: Synthetic oligonucleotide
caauugggcuggagggcug

SEQ ID NO: 1317544 - RNA, 19 nt, Artificial Sequence
  Description of Artificial Sequence: Synthetic oligonucleotide
agcuaguggcugauuucuc

SEQ ID NO: 1317545 - RNA, 19 nt, Artificial Sequence
  Description of Artificial Sequence: Synthetic oligonucleotide
gcugagaagacaccguacu

SEQ ID NO: 1317546 - RNA, 19 nt, Artificial Sequence
  Description of Artificial Sequence: Synthetic oligonucleotide
acgagauuucugggaucac

SEQ ID NO: 1317547 - RNA, 19 nt, Artificial Sequence
  Description of Artificial Sequence: Synthetic oligonucleotide
agccgauuuugaaagugaa

SEQ ID NO: 1317548 - RNA, 19 nt, Artificial Sequence
  Description of Artificial Sequence: Synthetic oligonucleotide
aggguggguaggagcaagg

SEQ ID NO: 1317549 - RNA, 19 nt, Artificial Sequence
  Description of Artificial Sequence: Synthetic oligonucleotide
gauagucuucccagcacgu

SEQ ID NO: 1317550 - RNA, 19 nt, Artificial Sequence
  Description of Artificial Sequence: Synthetic oligonucleotide
agucagccucuggacauug

SEQ ID NO: 1317551 - RNA, 19 nt, Artificial Sequence
  Description of Artificial Sequence: Synthetic oligonucleotide
caugaguuacgagauuucu

SEQ ID NO: 1317552 - RNA, 19 nt, Artificial Sequence
  Description of Artificial Sequence: Synthetic oligonucleotide
acaccguacuuaaagcaua

SEQ ID NO: 1317553 - RNA, 19 nt, Artificial Sequence
  Description of Artificial Sequence: Synthetic oligonucleotide
cuccagaaggcccguaaaa

SEQ ID NO: 1317554 - RNA, 19 nt, Artificial Sequence
  Description of Artificial Sequence: Synthetic oligonucleotide
uaggcgcucgggacucagc

SEQ ID NO: 1317555 - RNA, 19 nt, Artificial Sequence
  Description of Artificial Sequence: Synthetic oligonucleotide
caccguacuuaaagcauaa

SEQ ID NO: 1317556 - RNA, 19 nt, Artificial Sequence
  Description of Artificial Sequence: Synthetic oligonucleotide
caaggccggucguugacga

SEQ ID NO: 1317557 - RNA, 19 nt, Artificial Sequence
  Description of Artificial Sequence: Synthetic oligonucleotide
gggaucacucaauugggcu

SEQ ID NO: 1317558 - RNA, 19 nt, Artificial Sequence
  Description of Artificial Sequence: Synthetic oligonucleotide
accggguaguuuccacgcu

SEQ ID NO: 1317559 - RNA, 19 nt, Artificial Sequence
  Description of Artificial Sequence: Synthetic oligonucleotide
gacccucacgaggaggauc

SEQ ID NO: 1317560 - RNA, 19 nt, Artificial Sequence
  Description of Artificial Sequence: Synthetic oligonucleotide
uuggcacaaucacgguauu

SEQ ID NO: 1317561 - RNA, 19 nt, Artificial Sequence
  Description of Artificial Sequence: Synthetic oligonucleotide
uggagccaucgcucucugc

SEQ ID NO: 1317562 - RNA, 19 nt, Artificial Sequence
  Description of Artificial Sequence: Synthetic oligonucleotide
gcauccaauuugcgggagc

SEQ ID NO: 1317563 - RNA, 19 nt, Artificial Sequence
  Description of Artificial Sequence: Synthetic oligonucleotide
agcacaccggcgucaccca

SEQ ID NO: 1317564 - RNA, 19 nt, Artificial Sequence
  Description of Artificial Sequence: Synthetic oligonucleotide
aacccggggagggguucgg

SEQ ID NO: 1317565 - RNA, 19 nt, Artificial Sequence
  Description of Artificial Sequence: Synthetic oligonucleotide
agcgauggagggguuucca

SEQ ID NO: 1317566 - RNA, 19 nt, Artificial Sequence
  Description of Artificial Sequence: Synthetic oligonucleotide
gggcuguuauucauucacc

SEQ ID NO: 1317567 - RNA, 19 nt, Artificial Sequence
  Description of Artificial Sequence: Synthetic oligonucleotide
acgugaggacaugucgcug

SEQ ID NO: 1317568 - RNA, 19 nt, Artificial Sequence
  Description of Artificial Sequence: Synthetic oligonucleotide
ccaauuugcgggagcgaug

SEQ ID NO: 1317569 - RNA, 19 nt, Artificial Sequence
  Description of Artificial Sequence: Synthetic oligonucleotide
ggcgcugauagaacagcgc

SEQ ID NO: 1317570 - RNA, 19 nt, Artificial Sequence
  Description of Artificial Sequence: Synthetic oligonucleotide
aaggccggucguugacgau

SEQ ID NO: 1317571 - RNA, 19 nt, Artificial Sequence
  Description of Artificial Sequence: Synthetic oligonucleotide
cauccuuugaccggguagu

SEQ ID NO: 1317572 - RNA, 19 nt, Artificial Sequence
  Description of Artificial Sequence: Synthetic oligonucleotide
gagcgauggagggguuucc

SEQ ID NO: 1317573 - RNA, 19 nt, Artificial Sequence
  Description of Artificial Sequence: Synthetic oligonucleotide
uguggcggucacacagguu

SEQ ID NO: 1317574 - RNA, 19 nt, Artificial Sequence
  Description of Artificial Sequence: Synthetic oligonucleotide
agcacgauccuggccgccu

SEQ ID NO: 1317575 - RNA, 19 nt, Artificial Sequence
  Description of Artificial Sequence: Synthetic oligonucleotide
aggagucacccuugaccau

SEQ ID NO: 1317576 - RNA, 19 nt, Artificial Sequence
  Description of Artificial Sequence: Synthetic oligonucleotide
acccaaggccggucguuga

SEQ ID NO: 1317577 - RNA, 19 nt, Artificial Sequence
  Description of Artificial Sequence: Synthetic oligonucleotide
ccagcuaguggcugauuuc

SEQ ID NO: 1317578 - RNA, 19 nt, Artificial Sequence
  Description of Artificial Sequence: Synthetic oligonucleotide
cguaguccgguagagcuag

SEQ ID NO: 1317579 - RNA, 19 nt, Artificial Sequence
  Description of Artificial Sequence: Synthetic oligonucleotide
ugccuacaguucggaagca

SEQ ID NO: 1317580 - RNA, 19 nt, Artificial Sequence
  Description of Artificial Sequence: Synthetic oligonucleotide
caacccggggagggguucg

SEQ ID NO: 1317581 - RNA, 19 nt, Artificial Sequence
  Description of Artificial Sequence: Synthetic oligonucleotide
cacccaaggccggucguug

SEQ ID NO: 1317582 - RNA, 19 nt, Artificial Sequence
  Description of Artificial Sequence: Synthetic oligonucleotide
cuaggcgcucgggacucag

SEQ ID NO: 1317583 - RNA, 19 nt, Artificial Sequence
  Description of Artificial Sequence: Synthetic oligonucleotide
gagcuaggcgcucgggacu

SEQ ID NO: 1317584 - RNA, 19 nt, Artificial Sequence
  Description of Artificial Sequence: Synthetic oligonucleotide
gcgcugauagaacagcgcu

SEQ ID NO: 1317585 - RNA, 19 nt, Artificial Sequence
  Description of Artificial Sequence: Synthetic oligonucleotide
ccaugagcacgauccuggc

SEQ ID NO: 1317586 - RNA, 19 nt, Artificial Sequence
  Description of Artificial Sequence: Synthetic oligonucleotide
cggguaguuuccacgcucc

SEQ ID NO: 1317587 - RNA, 19 nt, Artificial Sequence
  Description of Artificial Sequence: Synthetic oligonucleotide
cccuauugugagguguggc

SEQ ID NO: 1317588 - RNA, 19 nt, Artificial Sequence
  Description of Artificial Sequence: Synthetic oligonucleotide
cgguauugggguucuuccc

SEQ ID NO: 1317589 - RNA, 19 nt, Artificial Sequence
  Description of Artificial Sequence: Synthetic oligonucleotide
cugggaccuggaccagcag

SEQ ID NO: 1317590 - RNA, 19 nt, Artificial Sequence
  Description of Artificial Sequence: Synthetic oligonucleotide
ccguucuugccuacaguuc

SEQ ID NO: 1317591 - RNA, 19 nt, Artificial Sequence
  Description of Artificial Sequence: Synthetic oligonucleotide
ggagcgauggagggguuuc

SEQ ID NO: 1317592 - RNA, 19 nt, Artificial Sequence
  Description of Artificial Sequence: Synthetic oligonucleotide
gcaugaguuacgagauuuc

SEQ ID NO: 1317593 - RNA, 19 nt, Artificial Sequence
  Description of Artificial Sequence: Synthetic oligonucleotide
ucacccaaggccggucguu

SEQ ID NO: 1317594 - RNA, 19 nt, Artificial Sequence
  Description of Artificial Sequence: Synthetic oligonucleotide
cauguacgugaggacaugu

SEQ ID NO: 1317595 - RNA, 19 nt, Artificial Sequence
  Description of Artificial Sequence: Synthetic oligonucleotide
cgcugauagaacagcgcug

SEQ ID NO: 1317596 - RNA, 19 nt, Artificial Sequence
  Description of Artificial Sequence: Synthetic oligonucleotide
agggcggcacagugaugcu

SEQ ID NO: 1317597 - RNA, 19 nt, Artificial Sequence
  Description of Artificial Sequence: Synthetic oligonucleotide
guaguccgguagagcuagg

SEQ ID NO: 1317598 - RNA, 19 nt, Artificial Sequence
  Description of Artificial Sequence: Synthetic oligonucleotide
gcccuauugugaggugugg

SEQ ID NO: 1317599 - RNA, 19 nt, Artificial Sequence
  Description of Artificial Sequence: Synthetic oligonucleotide
accuggaccagcagccuuu

SEQ ID NO: 1317600 - RNA, 19 nt, Artificial Sequence
  Description of Artificial Sequence: Synthetic oligonucleotide
ccggguaguuuccacgcuc

SEQ ID NO: 1317601 - RNA, 19 nt, Artificial Sequence
  Description of Artificial Sequence: Synthetic oligonucleotide
cacgauccuggccgccuuc

SEQ ID NO: 1317602 - RNA, 19 nt, Artificial Sequence
  Description of Artificial Sequence: Synthetic oligonucleotide
acaugucgcugagccagau

SEQ ID NO: 1317603 - RNA, 19 nt, Artificial Sequence
  Description of Artificial Sequence: Synthetic oligonucleotide
gcgagagcaugaguuacga

SEQ ID NO: 1317604 - RNA, 19 nt, Artificial Sequence
  Description of Artificial Sequence: Synthetic oligonucleotide
gucaggcaaagcucccagu

SEQ ID NO: 1317605 - RNA, 19 nt, Artificial Sequence
  Description of Artificial Sequence: Synthetic oligonucleotide
gggaaccaacccggggagg

SEQ ID NO: 1317606 - RNA, 19 nt, Artificial Sequence
  Description of Artificial Sequence: Synthetic oligonucleotide
ccgaaagagaaugugaguu

SEQ ID NO: 1317607 - RNA, 19 nt, Artificial Sequence
  Description of Artificial Sequence: Synthetic oligonucleotide
ggccggucguugacgaugc

SEQ ID NO: 1317608 - RNA, 19 nt, Artificial Sequence
  Description of Artificial Sequence: Synthetic oligonucleotide
ugacccucacgaggaggau

SEQ ID NO: 1317609 - RNA, 19 nt, Artificial Sequence
  Description of Artificial Sequence: Synthetic oligonucleotide
guugacgaugcugcccacu

SEQ ID NO: 1317610 - RNA, 19 nt, Artificial Sequence
  Description of Artificial Sequence: Synthetic oligonucleotide
auccuuugaccggguaguu

SEQ ID NO: 1317611 - RNA, 19 nt, Artificial Sequence
  Description of Artificial Sequence: Synthetic oligonucleotide
cgagagcaugaguuacgag

SEQ ID NO: 1317612 - RNA, 19 nt, Artificial Sequence
  Description of Artificial Sequence: Synthetic oligonucleotide
ccucauggucagcaaguca

SEQ ID NO: 1317613 - RNA, 19 nt, Artificial Sequence
  Description of Artificial Sequence: Synthetic oligonucleotide
caugucgcugagccagaua

SEQ ID NO: 1317614 - RNA, 19 nt, Artificial Sequence
  Description of Artificial Sequence: Synthetic oligonucleotide
cagauacucguaguccggu

SEQ ID NO: 1317615 - RNA, 19 nt, Artificial Sequence
  Description of Artificial Sequence: Synthetic oligonucleotide
gagcaugaguuacgagauu

SEQ ID NO: 1317616 - RNA, 19 nt, Artificial Sequence
  Description of Artificial Sequence: Synthetic oligonucleotide
caccggcgucacccaaggc

SEQ ID NO: 1317617 - RNA, 19 nt, Artificial Sequence
  Description of Artificial Sequence: Synthetic oligonucleotide
gcacgugcucucaggaguc

SEQ ID NO: 1317618 - RNA, 19 nt, Artificial Sequence
  Description of Artificial Sequence: Synthetic oligonucleotide
ccauguacgugaggacaug

SEQ ID NO: 1317619 - RNA, 19 nt, Artificial Sequence
  Description of Artificial Sequence: Synthetic oligonucleotide
gucacccaaggccggucgu

SEQ ID NO: 1317620 - RNA, 19 nt, Artificial Sequence
  Description of Artificial Sequence: Synthetic oligonucleotide
caccguucuugccuacagu

SEQ ID NO: 1317621 - RNA, 19 nt, Artificial Sequence
  Description of Artificial Sequence: Synthetic oligonucleotide
ggcggucacacagguuuuc

SEQ ID NO: 1317622 - RNA, 19 nt, Artificial Sequence
  Description of Artificial Sequence: Synthetic oligonucleotide
cacgugcucucaggaguca

SEQ ID NO: 1317623 - RNA, 19 nt, Artificial Sequence
  Description of Artificial Sequence: Synthetic oligonucleotide
cccgaaagagaaugugagu

SEQ ID NO: 1317624 - RNA, 19 nt, Artificial Sequence
  Description of Artificial Sequence: Synthetic oligonucleotide
cgguagagcuaggcgcucg

SEQ ID NO: 1317625 - RNA, 19 nt, Artificial Sequence
  Description of Artificial Sequence: Synthetic oligonucleotide
ccaacccggggagggguuc

SEQ ID NO: 1317626 - RNA, 19 nt, Artificial Sequence
  Description of Artificial Sequence: Synthetic oligonucleotide
gcacaccggcgucacccaa

SEQ ID NO: 1317627 - RNA, 19 nt, Artificial Sequence
  Description of Artificial Sequence: Synthetic oligonucleotide
cguugacgaugcugcccac

SEQ ID NO: 1317628 - RNA, 19 nt, Artificial Sequence
  Description of Artificial Sequence: Synthetic oligonucleotide
cggcgucacccaaggccgg

SEQ ID NO: 1317629 - RNA, 19 nt, Artificial Sequence
  Description of Artificial Sequence: Synthetic oligonucleotide
ggccaauaucuuccuuguu

SEQ ID NO: 1317630 - RNA, 19 nt, Artificial Sequence
  Description of Artificial Sequence: Synthetic oligonucleotide
caaugccauacuggccaau

SEQ ID NO: 1317631 - RNA, 19 nt, Artificial Sequence
  Description of Artificial Sequence: Synthetic oligonucleotide
gcgucacccaaggccgguc

SEQ ID NO: 1317632 - RNA, 19 nt, Artificial Sequence
  Description of Artificial Sequence: Synthetic oligonucleotide
caucauccaugagcacgau

SEQ ID NO: 1317633 - RNA, 19 nt, Artificial Sequence
  Description of Artificial Sequence: Synthetic oligonucleotide
ggcgucacccaaggccggu

SEQ ID NO: 1317634 - RNA, 19 nt, Artificial Sequence
  Description of Artificial Sequence: Synthetic oligonucleotide
gggagcgauggagggguuu

SEQ ID NO: 1317635 - RNA, 19 nt, Artificial Sequence
  Description of Artificial Sequence: Synthetic oligonucleotide
gcacgauccuggccgccuu

SEQ ID NO: 1317636 - RNA, 19 nt, Artificial Sequence
  Description of Artificial Sequence: Synthetic oligonucleotide
ccgcauccuccauguacgu

SEQ ID NO: 1317637 - RNA, 19 nt, Artificial Sequence
  Description of Artificial Sequence: Synthetic oligonucleotide
gccggucguugacgaugcu

SEQ ID NO: 1317638 - RNA, 19 nt, Artificial Sequence
  Description of Artificial Sequence: Synthetic oligonucleotide
ggccgccuucugagugagu

SEQ ID NO: 1317639 - RNA, 19 nt, Artificial Sequence
  Description of Artificial Sequence: Synthetic oligonucleotide
cgggagcgauggagggguu

SEQ ID NO: 1317640 - RNA, 19 nt, Artificial Sequence
  Description of Artificial Sequence: Synthetic oligonucleotide
aaauacugaagccagaggc

SEQ ID NO: 1317641 - RNA, 19 nt, Artificial Sequence
  Description of Artificial Sequence: Synthetic oligonucleotide
uguagugaggcuuuggagg

SEQ ID NO: 1317642 - RNA, 19 nt, Artificial Sequence
  Description of Artificial Sequence: Synthetic oligonucleotide
accauugucggucacaucg

SEQ ID NO: 1317643 - RNA, 19 nt, Artificial Sequence
  Description of Artificial Sequence: Synthetic oligonucleotide
aauuagauuacacugcuua

SEQ ID NO: 1317644 - RNA, 19 nt, Artificial Sequence
  Description of Artificial Sequence: Synthetic oligonucleotide
aagaacguagcacaucagg

SEQ ID NO: 1317645 - RNA, 19 nt, Artificial Sequence
  Description of Artificial Sequence: Synthetic oligonucleotide
gaugucaagacucauggug

SEQ ID NO: 1317646 - RNA, 19 nt, Artificial Sequence
  Description of Artificial Sequence: Synthetic oligonucleotide
uaaagaacguagcacauca

SEQ ID NO: 1317647 - RNA, 19 nt, Artificial Sequence
  Description of Artificial Sequence: Synthetic oligonucleotide
auaugugggaacaacaggc

SEQ ID NO: 1317648 - RNA, 19 nt, Artificial Sequence
  Description of Artificial Sequence: Synthetic oligonucleotide
cacgacaucgcacagaucc

SEQ ID NO: 1317649 - RNA, 19 nt, Artificial Sequence
  Description of Artificial Sequence: Synthetic oligonucleotide
agcucauuggugcauaggc

SEQ ID NO: 1317650 - RNA, 19 nt, Artificial Sequence
  Description of Artificial Sequence: Synthetic oligonucleotide
auaucacacucccacaacc

SEQ ID NO: 1317651 - RNA, 19 nt, Artificial Sequence
  Description of Artificial Sequence: Synthetic oligonucleotide
uagauuacacugcuuaucc

SEQ ID NO: 1317652 - RNA, 19 nt, Artificial Sequence
  Description of Artificial Sequence: Synthetic oligonucleotide
cuguaauuagauuacacug

SEQ ID NO: 1317653 - RNA, 19 nt, Artificial Sequence
  Description of Artificial Sequence: Synthetic oligonucleotide
gauuacacugcuuaucccc

SEQ ID NO: 1317654 - RNA, 19 nt, Artificial Sequence
  Description of Artificial Sequence: Synthetic oligonucleotide
cagacuuucacacagcagc

SEQ ID NO: 1317655 - RNA, 19 nt, Artificial Sequence
  Description of Artificial Sequence: Synthetic oligonucleotide
ugugauaccacaguucucc

SEQ ID NO: 1317656 - RNA, 19 nt, Artificial Sequence
  Description of Artificial Sequence: Synthetic oligonucleotide
aacguagcacaucaggcag

SEQ ID NO: 1317657 - RNA, 19 nt, Artificial Sequence
  Description of Artificial Sequence: Synthetic oligonucleotide
gauaccacaguucuccagc

SEQ ID NO: 1317658 - RNA, 19 nt, Artificial Sequence
  Description of Artificial Sequence: Synthetic oligonucleotide
ucuuuauccacagugacuc

SEQ ID NO: 1317659 - RNA, 19 nt, Artificial Sequence
  Description of Artificial Sequence: Synthetic oligonucleotide
uggguuucacccuaaauac

SEQ ID NO: 1317660 - RNA, 19 nt, Artificial Sequence
  Description of Artificial Sequence: Synthetic oligonucleotide
aaugucguguguccagagg

SEQ ID NO: 1317661 - RNA, 19 nt, Artificial Sequence
  Description of Artificial Sequence: Synthetic oligonucleotide
ugagauguagcucccgcag

SEQ ID NO: 1317662 - RNA, 19 nt, Artificial Sequence
  Description of Artificial Sequence: Synthetic oligonucleotide
agaacguagcacaucaggc

SEQ ID NO: 1317663 - RNA, 19 nt, Artificial Sequence
  Description of Artificial Sequence: Synthetic oligonucleotide
agguaaagaacguagcaca

SEQ ID NO: 1317664 - RNA, 19 nt, Artificial Sequence
  Description of Artificial Sequence: Synthetic oligonucleotide
aacaacaggcagcugugag

SEQ ID NO: 1317665 - RNA, 19 nt, Artificial Sequence
  Description of Artificial Sequence: Synthetic oligonucleotide
aaugccugcauuacccagc

SEQ ID NO: 1317666 - RNA, 19 nt, Artificial Sequence
  Description of Artificial Sequence: Synthetic oligonucleotide
acugagauguagcucccgc

SEQ ID NO: 1317667 - RNA, 19 nt, Artificial Sequence
  Description of Artificial Sequence: Synthetic oligonucleotide
aguuauaaagugucucaag

SEQ ID NO: 1317668 - RNA, 19 nt, Artificial Sequence
  Description of Artificial Sequence: Synthetic oligonucleotide
ucccagaggauuaucacug

SEQ ID NO: 1317669 - RNA, 19 nt, Artificial Sequence
  Description of Artificial Sequence: Synthetic oligonucleotide
acagucauccaaccugacc

SEQ ID NO: 1317670 - RNA, 19 nt, Artificial Sequence
  Description of Artificial Sequence: Synthetic oligonucleotide
ucaacacuaggacacccag

SEQ ID NO: 1317671 - RNA, 19 nt, Artificial Sequence
  Description of Artificial Sequence: Synthetic oligonucleotide
ucaagcugcaauucugcag

SEQ ID NO: 1317672 - RNA, 19 nt, Artificial Sequence
  Description of Artificial Sequence: Synthetic oligonucleotide
auaggcugagcucuguuag

SEQ ID NO: 1317673 - RNA, 19 nt, Artificial Sequence
  Description of Artificial Sequence: Synthetic oligonucleotide
agauuacacugcuuauccc

SEQ ID NO: 1317674 - RNA, 19 nt, Artificial Sequence
  Description of Artificial Sequence: Synthetic oligonucleotide
caguaaaugucauacagga

SEQ ID NO: 1317675 - RNA, 19 nt, Artificial Sequence
  Description of Artificial Sequence: Synthetic oligonucleotide
accacagucauccaaccug

SEQ ID NO: 1317676 - RNA, 19 nt, Artificial Sequence
  Description of Artificial Sequence: Synthetic oligonucleotide
aacgguucuuggucaacac

SEQ ID NO: 1317677 - RNA, 19 nt, Artificial Sequence
  Description of Artificial Sequence: Synthetic oligonucleotide
uaauaguuauaaagugucu

SEQ ID NO: 1317678 - RNA, 19 nt, Artificial Sequence
  Description of Artificial Sequence: Synthetic oligonucleotide
ucaacaccgagcauaugug

SEQ ID NO: 1317679 - RNA, 19 nt, Artificial Sequence
  Description of Artificial Sequence: Synthetic oligonucleotide
ugauaucacacucccacaa

SEQ ID NO: 1317680 - RNA, 19 nt, Artificial Sequence
  Description of Artificial Sequence: Synthetic oligonucleotide
caggucuuuauccacagug

SEQ ID NO: 1317681 - RNA, 19 nt, Artificial Sequence
  Description of Artificial Sequence: Synthetic oligonucleotide
gagguuacaguauuccaac

SEQ ID NO: 1317682 - RNA, 19 nt, Artificial Sequence
  Description of Artificial Sequence: Synthetic oligonucleotide
ugcagugauaucacacucc

SEQ ID NO: 1317683 - RNA, 19 nt, Artificial Sequence
  Description of Artificial Sequence: Synthetic oligonucleotide
aacaccgagcauauguggg

SEQ ID NO: 1317684 - RNA, 19 nt, Artificial Sequence
  Description of Artificial Sequence: Synthetic oligonucleotide
agcacagugcggcaaugcc

SEQ ID NO: 1317685 - RNA, 19 nt, Artificial Sequence
  Description of Artificial Sequence: Synthetic oligonucleotide
caugcaguuguuacugagg

SEQ ID NO: 1317686 - RNA, 19 nt, Artificial Sequence
  Description of Artificial Sequence: Synthetic oligonucleotide
uaaaugucauacaggacua

SEQ ID NO: 1317687 - RNA, 19 nt, Artificial Sequence
  Description of Artificial Sequence: Synthetic oligonucleotide
gaugugauaccacaguucu

SEQ ID NO: 1317688 - RNA, 19 nt, Artificial Sequence
  Description of Artificial Sequence: Synthetic oligonucleotide
uuguugcucaacacuaucu

SEQ ID NO: 1317689 - RNA, 19 nt, Artificial Sequence
  Description of Artificial Sequence: Synthetic oligonucleotide
ugucaagacucaugguggg

SEQ ID NO: 1317690 - RNA, 19 nt, Artificial Sequence
  Description of Artificial Sequence: Synthetic oligonucleotide
uguugcucaacacuaucuc

SEQ ID NO: 1317691 - RNA, 19 nt, Artificial Sequence
  Description of Artificial Sequence: Synthetic oligonucleotide
gagaugacccucaaggaug

SEQ ID NO: 1317692 - RNA, 19 nt, Artificial Sequence
  Description of Artificial Sequence: Synthetic oligonucleotide
acgguucuuggucaacacc

SEQ ID NO: 1317693 - RNA, 19 nt, Artificial Sequence
  Description of Artificial Sequence: Synthetic oligonucleotide
uuugcaccgcaccucagug

SEQ ID NO: 1317694 - RNA, 19 nt, Artificial Sequence
  Description of Artificial Sequence: Synthetic oligonucleotide
augucaagacucauggugg

SEQ ID NO: 1317695 - RNA, 19 nt, Artificial Sequence
  Description of Artificial Sequence: Synthetic oligonucleotide
uccccagucaacacuagga

SEQ ID NO: 1317696 - RNA, 19 nt, Artificial Sequence
  Description of Artificial Sequence: Synthetic oligonucleotide
uagguaaagaacguagcac

SEQ ID NO: 1317697 - RNA, 19 nt, Artificial Sequence
  Description of Artificial Sequence: Synthetic oligonucleotide
uguagcucccgcaggguag

SEQ ID NO: 1317698 - RNA, 19 nt, Artificial Sequence
  Description of Artificial Sequence: Synthetic oligonucleotide
gacugaauggcugagcuga

SEQ ID NO: 1317699 - RNA, 19 nt, Artificial Sequence
  Description of Artificial Sequence: Synthetic oligonucleotide
acaucgcacagauccuugc

SEQ ID NO: 1317700 - RNA, 19 nt, Artificial Sequence
  Description of Artificial Sequence: Synthetic oligonucleotide
uuagauuacacugcuuauc

SEQ ID NO: 1317701 - RNA, 19 nt, Artificial Sequence
  Description of Artificial Sequence: Synthetic oligonucleotide
cugaagcuucucaaggcgg

SEQ ID NO: 1317702 - RNA, 19 nt, Artificial Sequence
  Description of Artificial Sequence: Synthetic oligonucleotide
agaggcucgcaacugguag

SEQ ID NO: 1317703 - RNA, 19 nt, Artificial Sequence
  Description of Artificial Sequence: Synthetic oligonucleotide
uuacccagcuuguugcugc

SEQ ID NO: 1317704 - RNA, 19 nt, Artificial Sequence
  Description of Artificial Sequence: Synthetic oligonucleotide
gaacguagcacaucaggca

SEQ ID NO: 1317705 - RNA, 19 nt, Artificial Sequence
  Description of Artificial Sequence: Synthetic oligonucleotide
augucguguguccagaggu

SEQ ID NO: 1317706 - RNA, 19 nt, Artificial Sequence
  Description of Artificial Sequence: Synthetic oligonucleotide
ucaagacucauggugggug

SEQ ID NO: 1317707 - RNA, 19 nt, Artificial Sequence
  Description of Artificial Sequence: Synthetic oligonucleotide
guagguaaagaacguagca

SEQ ID NO: 1317708 - RNA, 19 nt, Artificial Sequence
  Description of Artificial Sequence: Synthetic oligonucleotide
cuuagcuucuggaucuuac

SEQ ID NO: 1317709 - RNA, 19 nt, Artificial Sequence
  Description of Artificial Sequence: Synthetic oligonucleotide
gaucuuacaggugggauuc

SEQ ID NO: 1317710 - RNA, 19 nt, Artificial Sequence
  Description of Artificial Sequence: Synthetic oligonucleotide
uauugcuggaucaggggaa

SEQ ID NO: 1317711 - RNA, 19 nt, Artificial Sequence
  Description of Artificial Sequence: Synthetic oligonucleotide
uccaguugcuguagugagg

SEQ ID NO: 1317712 - RNA, 19 nt, Artificial Sequence
  Description of Artificial Sequence: Synthetic oligonucleotide
uccuucacagagcagcuuc

SEQ ID NO: 1317713 - RNA, 19 nt, Artificial Sequence
  Description of Artificial Sequence: Synthetic oligonucleotide
gauccuugcaguuggcuga

SEQ ID NO: 1317714 - RNA, 19 nt, Artificial Sequence
  Description of Artificial Sequence: Synthetic oligonucleotide
cagaacagugucuggcugg

SEQ ID NO: 1317715 - RNA, 19 nt, Artificial Sequence
  Description of Artificial Sequence: Synthetic oligonucleotide
auuagauuacacugcuuau

SEQ ID NO: 1317716 - RNA, 19 nt, Artificial Sequence
  Description of Artificial Sequence: Synthetic oligonucleotide
acacuggaugucaagacuc

SEQ ID NO: 1317717 - RNA, 19 nt, Artificial Sequence
  Description of Artificial Sequence: Synthetic oligonucleotide
uccuccguccaguaaaugu

SEQ ID NO: 1317718 - RNA, 19 nt, Artificial Sequence
  Description of Artificial Sequence: Synthetic oligonucleotide
ugcauuaaugucguguguc

SEQ ID NO: 1317719 - RNA, 19 nt, Artificial Sequence
  Description of Artificial Sequence: Synthetic oligonucleotide
ucguuguugcucaacacua

SEQ ID NO: 1317720 - RNA, 19 nt, Artificial Sequence
  Description of Artificial Sequence: Synthetic oligonucleotide
gcugcugcaaccauugucg

SEQ ID NO: 1317721 - RNA, 19 nt, Artificial Sequence
  Description of Artificial Sequence: Synthetic oligonucleotide
aguaaaugucauacaggac

SEQ ID NO: 1317722 - RNA, 19 nt, Artificial Sequence
  Description of Artificial Sequence: Synthetic oligonucleotide
uauuccaacugaagcuucu

SEQ ID NO: 1317723 - RNA, 19 nt, Artificial Sequence
  Description of Artificial Sequence: Synthetic oligonucleotide
caguccugagcacagugcg

SEQ ID NO: 1317724 - RNA, 19 nt, Artificial Sequence
  Description of Artificial Sequence: Synthetic oligonucleotide
gagauguagcucccgcagg

SEQ ID NO: 1317725 - RNA, 19 nt, Artificial Sequence
  Description of Artificial Sequence: Synthetic oligonucleotide
ugauaccacaguucuccag

SEQ ID NO: 1317726 - RNA, 19 nt, Artificial Sequence
  Description of Artificial Sequence: Synthetic oligonucleotide
caacaccgagcauaugugg

SEQ ID NO: 1317727 - RNA, 19 nt, Artificial Sequence
  Description of Artificial Sequence: Synthetic oligonucleotide
ucauuggugcauaggcuga

SEQ ID NO: 1317728 - RNA, 19 nt, Artificial Sequence
  Description of Artificial Sequence: Synthetic oligonucleotide
aaccugaccacuugguauu

SEQ ID NO: 1317729 - RNA, 19 nt, Artificial Sequence
  Description of Artificial Sequence: Synthetic oligonucleotide
gguuacaguauuccaacug

SEQ ID NO: 1317730 - RNA, 19 nt, Artificial Sequence
  Description of Artificial Sequence: Synthetic oligonucleotide
gaggcuacaggucuuuauc

SEQ ID NO: 1317731 - RNA, 19 nt, Artificial Sequence
  Description of Artificial Sequence: Synthetic oligonucleotide
agagaacgguucuugguca

SEQ ID NO: 1317732 - RNA, 19 nt, Artificial Sequence
  Description of Artificial Sequence: Synthetic oligonucleotide
aggugcacaucucaggaga

SEQ ID NO: 1317733 - RNA, 19 nt, Artificial Sequence
  Description of Artificial Sequence: Synthetic oligonucleotide
ugagaccacagucauccaa

SEQ ID NO: 1317734 - RNA, 19 nt, Artificial Sequence
  Description of Artificial Sequence: Synthetic oligonucleotide
acugcuuauccccagucaa

SEQ ID NO: 1317735 - RNA, 19 nt, Artificial Sequence
  Description of Artificial Sequence: Synthetic oligonucleotide
uuggucaacaccgagcaua

SEQ ID NO: 1317736 - RNA, 19 nt, Artificial Sequence
  Description of Artificial Sequence: Synthetic oligonucleotide
ucacacuggaugucaagac

SEQ ID NO: 1317737 - RNA, 19 nt, Artificial Sequence
  Description of Artificial Sequence: Synthetic oligonucleotide
uuggugcauaggcugagcu

SEQ ID NO: 1317738 - RNA, 19 nt, Artificial Sequence
  Description of Artificial Sequence: Synthetic oligonucleotide
uugcaguuggcugauguga

SEQ ID NO: 1317739 - RNA, 19 nt, Artificial Sequence
  Description of Artificial Sequence: Synthetic oligonucleotide
aaaugucauacaggacuag

SEQ ID NO: 1317740 - RNA, 19 nt, Artificial Sequence
  Description of Artificial Sequence: Synthetic oligonucleotide
cacagugcggcaaugccug

SEQ ID NO: 1317741 - RNA, 19 nt, Artificial Sequence
  Description of Artificial Sequence: Synthetic oligonucleotide
ugucugacgcucuccacca

SEQ ID NO: 1317742 - RNA, 19 nt, Artificial Sequence
  Description of Artificial Sequence: Synthetic oligonucleotide
aagccagaggcucgcaacu

SEQ ID NO: 1317743 - RNA, 19 nt, Artificial Sequence
  Description of Artificial Sequence: Synthetic oligonucleotide
ucugauccuacagcugggg

SEQ ID NO: 1317744 - RNA, 19 nt, Artificial Sequence
  Description of Artificial Sequence: Synthetic oligonucleotide
guaauuagauuacacugcu

SEQ ID NO: 1317745 - RNA, 19 nt, Artificial Sequence
  Description of Artificial Sequence: Synthetic oligonucleotide
ugaccacuugguauugcug

SEQ ID NO: 1317746 - RNA, 19 nt, Artificial Sequence
  Description of Artificial Sequence: Synthetic oligonucleotide
cagagaacgguucuugguc

SEQ ID NO: 1317747 - RNA, 19 nt, Artificial Sequence
  Description of Artificial Sequence: Synthetic oligonucleotide
aguccuucaagcccuggca

SEQ ID NO: 1317748 - RNA, 19 nt, Artificial Sequence
  Description of Artificial Sequence: Synthetic oligonucleotide
uuucacccuaaauacugaa

SEQ ID NO: 1317749 - RNA, 19 nt, Artificial Sequence
  Description of Artificial Sequence: Synthetic oligonucleotide
ccagucaacacuaggacac

SEQ ID NO: 1317750 - RNA, 19 nt, Artificial Sequence
  Description of Artificial Sequence: Synthetic oligonucleotide
guauugcuggaucagggga

SEQ ID NO: 1317751 - RNA, 19 nt, Artificial Sequence
  Description of Artificial Sequence: Synthetic oligonucleotide
acacugcuuauccccaguc

SEQ ID NO: 1317752 - RNA, 19 nt, Artificial Sequence
  Description of Artificial Sequence: Synthetic oligonucleotide
ugcuuauccccagucaaca

SEQ ID NO: 1317753 - RNA, 19 nt, Artificial Sequence
  Description of Artificial Sequence: Synthetic oligonucleotide
aaguucucugcuguaauua

SEQ ID NO: 1317754 - RNA, 19 nt, Artificial Sequence
  Description of Artificial Sequence: Synthetic oligonucleotide
cuggaugucaagacucaug

SEQ ID NO: 1317755 - RNA, 19 nt, Artificial Sequence
  Description of Artificial Sequence: Synthetic oligonucleotide
ucucccagaggauuaucac

SEQ ID NO: 1317756 - RNA, 19 nt, Artificial Sequence
  Description of Artificial Sequence: Synthetic oligonucleotide
gucaacaccgagcauaugu

SEQ ID NO: 1317757 - RNA, 19 nt, Artificial Sequence
  Description of Artificial Sequence: Synthetic oligonucleotide
uuucacacagcagcugggc

SEQ ID NO: 1317758 - RNA, 19 nt, Artificial Sequence
  Description of Artificial Sequence: Synthetic oligonucleotide
uggaggucguuguugcuca

SEQ ID NO: 1317759 - RNA, 19 nt, Artificial Sequence
  Description of Artificial Sequence: Synthetic oligonucleotide
ugucguguguccagaggug

SEQ ID NO: 1317760 - RNA, 19 nt, Artificial Sequence
  Description of Artificial Sequence: Synthetic oligonucleotide
cucaacacuaucuccuuga

SEQ ID NO: 1317761 - RNA, 19 nt, Artificial Sequence
  Description of Artificial Sequence: Synthetic oligonucleotide
ucggucaagcugcaauucu

SEQ ID NO: 1317762 - RNA, 19 nt, Artificial Sequence
  Description of Artificial Sequence: Synthetic oligonucleotide
gccugcauuacccagcuug

SEQ ID NO: 1317763 - RNA, 19 nt, Artificial Sequence
  Description of Artificial Sequence: Synthetic oligonucleotide
caagacucauggugggugc

SEQ ID NO: 1317764 - RNA, 19 nt, Artificial Sequence
  Description of Artificial Sequence: Synthetic oligonucleotide
cacaucucaggagaugacc

SEQ ID NO: 1317765 - RNA, 19 nt, Artificial Sequence
  Description of Artificial Sequence: Synthetic oligonucleotide
ugguccugaggacacggca

SEQ ID NO: 1317766 - RNA, 19 nt, Artificial Sequence
  Description of Artificial Sequence: Synthetic oligonucleotide
gcauuacccagcuuguugc

SEQ ID NO: 1317767 - RNA, 19 nt, Artificial Sequence
  Description of Artificial Sequence: Synthetic oligonucleotide
gcugcauuaaugucgugug

SEQ ID NO: 1317768 - RNA, 19 nt, Artificial Sequence
  Description of Artificial Sequence: Synthetic oligonucleotide
gacccuacagccagccucg

SEQ ID NO: 1317769 - RNA, 19 nt, Artificial Sequence
  Description of Artificial Sequence: Synthetic oligonucleotide
uccaaccugaccacuuggu

SEQ ID NO: 1317770 - RNA, 19 nt, Artificial Sequence
  Description of Artificial Sequence: Synthetic oligonucleotide
cuugguauugcuggaucag

SEQ ID NO: 1317771 - RNA, 19 nt, Artificial Sequence
  Description of Artificial Sequence: Synthetic oligonucleotide
agcaguccugagcacagug

SEQ ID NO: 1317772 - RNA, 19 nt, Artificial Sequence
  Description of Artificial Sequence: Synthetic oligonucleotide
ucgcaggacaccugagucc

SEQ ID NO: 1317773 - RNA, 19 nt, Artificial Sequence
  Description of Artificial Sequence: Synthetic oligonucleotide
ggugggguuggacugaaug

SEQ ID NO: 1317774 - RNA, 19 nt, Artificial Sequence
  Description of Artificial Sequence: Synthetic oligonucleotide
uugagugacuccaguugac

SEQ ID NO: 1317775 - RNA, 19 nt, Artificial Sequence
  Description of Artificial Sequence: Synthetic oligonucleotide
aggucguuguugcucaaca

SEQ ID NO: 1317776 - RNA, 19 nt, Artificial Sequence
  Description of Artificial Sequence: Synthetic oligonucleotide
uuacacugcuuauccccag

SEQ ID NO: 1317777 - RNA, 19 nt, Artificial Sequence
  Description of Artificial Sequence: Synthetic oligonucleotide
cuccaggacucccaagucc

SEQ ID NO: 1317778 - RNA, 19 nt, Artificial Sequence
  Description of Artificial Sequence: Synthetic oligonucleotide
auccccagucaacacuagg

SEQ ID NO: 1317779 - RNA, 19 nt, Artificial Sequence
  Description of Artificial Sequence: Synthetic oligonucleotide
uugcugcucauuugcagcu

SEQ ID NO: 1317780 - RNA, 19 nt, Artificial Sequence
  Description of Artificial Sequence: Synthetic oligonucleotide
cuugcaguuggcugaugug

SEQ ID NO: 1317781 - RNA, 19 nt, Artificial Sequence
  Description of Artificial Sequence: Synthetic oligonucleotide
agaugacccucaaggaugg

SEQ ID NO: 1317782 - RNA, 19 nt, Artificial Sequence
  Description of Artificial Sequence: Synthetic oligonucleotide
aaccauugucggucacauc

SEQ ID NO: 1317783 - RNA, 19 nt, Artificial Sequence
  Description of Artificial Sequence: Synthetic oligonucleotide
auuggugcauaggcugagc

SEQ ID NO: 1317784 - RNA, 19 nt, Artificial Sequence
  Description of Artificial Sequence: Synthetic oligonucleotide
uucccguagacugcgguug

SEQ ID NO: 1317785 - RNA, 19 nt, Artificial Sequence
  Description of Artificial Sequence: Synthetic oligonucleotide
auacaggacuagcugcuga

SEQ ID NO: 1317786 - RNA, 19 nt, Artificial Sequence
  Description of Artificial Sequence: Synthetic oligonucleotide
agccaaagcacacgcagaa

SEQ ID NO: 1317787 - RNA, 19 nt, Artificial Sequence
  Description of Artificial Sequence: Synthetic oligonucleotide
guuguugcucaacacuauc

SEQ ID NO: 1317788 - RNA, 19 nt, Artificial Sequence
  Description of Artificial Sequence: Synthetic oligonucleotide
caguuggcugaugugauac

SEQ ID NO: 1317789 - RNA, 19 nt, Artificial Sequence
  Description of Artificial Sequence: Synthetic oligonucleotide
gaggcucgcaacugguagc

SEQ ID NO: 1317790 - RNA, 19 nt, Artificial Sequence
  Description of Artificial Sequence: Synthetic oligonucleotide
uaauuagauuacacugcuu

SEQ ID NO: 1317791 - RNA, 19 nt, Artificial Sequence
  Description of Artificial Sequence: Synthetic oligonucleotide
ggcagaguccuucaagccc

SEQ ID NO: 1317792 - RNA, 19 nt, Artificial Sequence
  Description of Artificial Sequence: Synthetic oligonucleotide
cccuaaauacugaagccag

SEQ ID NO: 1317793 - RNA, 19 nt, Artificial Sequence
  Description of Artificial Sequence: Synthetic oligonucleotide
uggucaacaccgagcauau

SEQ ID NO: 1317794 - RNA, 19 nt, Artificial Sequence
  Description of Artificial Sequence: Synthetic oligonucleotide
gcauuaaugucgugugucc

SEQ ID NO: 1317795 - RNA, 19 nt, Artificial Sequence
  Description of Artificial Sequence: Synthetic oligonucleotide
ucuuacaggugggauucug

SEQ ID NO: 1317796 - RNA, 19 nt, Artificial Sequence
  Description of Artificial Sequence: Synthetic oligonucleotide
cuuuauccacagugacucc

SEQ ID NO: 1317797 - RNA, 19 nt, Artificial Sequence
  Description of Artificial Sequence: Synthetic oligonucleotide
acaccgagcauauguggga

SEQ ID NO: 1317798 - RNA, 19 nt, Artificial Sequence
  Description of Artificial Sequence: Synthetic oligonucleotide
cgguucuuggucaacaccg

SEQ ID NO: 1317799 - RNA, 19 nt, Artificial Sequence
  Description of Artificial Sequence: Synthetic oligonucleotide
acugguagcugugagguua

SEQ ID NO: 1317800 - RNA, 19 nt, Artificial Sequence
  Description of Artificial Sequence: Synthetic oligonucleotide
gguagguaaagaacguagc

SEQ ID NO: 1317801 - RNA, 19 nt, Artificial Sequence
  Description of Artificial Sequence: Synthetic oligonucleotide
ggucuuuauccacagugac

SEQ ID NO: 1317802 - RNA, 19 nt, Artificial Sequence
  Description of Artificial Sequence: Synthetic oligonucleotide
uacacugcuuauccccagu

SEQ ID NO: 1317803 - RNA, 19 nt, Artificial Sequence
  Description of Artificial Sequence: Synthetic oligonucleotide
accgagcauaugugggaac

SEQ ID NO: 1317804 - RNA, 19 nt, Artificial Sequence
  Description of Artificial Sequence: Synthetic oligonucleotide
gcauaugugggaacaacag

SEQ ID NO: 1317805 - RNA, 19 nt, Artificial Sequence
  Description of Artificial Sequence: Synthetic oligonucleotide
ccagcagacuuucacacag

SEQ ID NO: 1317806 - RNA, 19 nt, Artificial Sequence
  Description of Artificial Sequence: Synthetic oligonucleotide
ugaggcuacaggucuuuau

SEQ ID NO: 1317807 - RNA, 19 nt, Artificial Sequence
  Description of Artificial Sequence: Synthetic oligonucleotide
ucauccaaccugaccacuu

SEQ ID NO: 1317808 - RNA, 19 nt, Artificial Sequence
  Description of Artificial Sequence: Synthetic oligonucleotide
cacagaguucugauccuac

SEQ ID NO: 1317809 - RNA, 19 nt, Artificial Sequence
  Description of Artificial Sequence: Synthetic oligonucleotide
gucgcaggacaccugaguc

SEQ ID NO: 1317810 - RNA, 19 nt, Artificial Sequence
  Description of Artificial Sequence: Synthetic oligonucleotide
ccagccucggucaagcugc

SEQ ID NO: 1317811 - RNA, 19 nt, Artificial Sequence
  Description of Artificial Sequence: Synthetic oligonucleotide
ugaagccagaggcucgcaa

SEQ ID NO: 1317812 - RNA, 19 nt, Artificial Sequence
  Description of Artificial Sequence: Synthetic oligonucleotide
ucuaccuccuccguccagu

SEQ ID NO: 1317813 - RNA, 19 nt, Artificial Sequence
  Description of Artificial Sequence: Synthetic oligonucleotide
cacccagagccagacaucc

SEQ ID NO: 1317814 - RNA, 19 nt, Artificial Sequence
  Description of Artificial Sequence: Synthetic oligonucleotide
agguuacaguauuccaacu

SEQ ID NO: 1317815 - RNA, 19 nt, Artificial Sequence
  Description of Artificial Sequence: Synthetic oligonucleotide
agcagcuucagaccugcau

SEQ ID NO: 1317816 - RNA, 19 nt, Artificial Sequence
  Description of Artificial Sequence: Synthetic oligonucleotide
auugcuggaucaggggaag

SEQ ID NO: 1317817 - RNA, 19 nt, Artificial Sequence
  Description of Artificial Sequence: Synthetic oligonucleotide
gcuguaauuagauuacacu

SEQ ID NO: 1317818 - RNA, 19 nt, Artificial Sequence
  Description of Artificial Sequence: Synthetic oligonucleotide
uauccccagucaacacuag

SEQ ID NO: 1317819 - RNA, 19 nt, Artificial Sequence
  Description of Artificial Sequence: Synthetic oligonucleotide
agcucuguuaggguggggu

SEQ ID NO: 1317820 - RNA, 19 nt, Artificial Sequence
  Description of Artificial Sequence: Synthetic oligonucleotide
cugcuuauccccagucaac

SEQ ID NO: 1317821 - RNA, 19 nt, Artificial Sequence
  Description of Artificial Sequence: Synthetic oligonucleotide
guuagggugggguuggacu

SEQ ID NO: 1317822 - RNA, 19 nt, Artificial Sequence
  Description of Artificial Sequence: Synthetic oligonucleotide
aguucccguagacugcggu

SEQ ID NO: 1317823 - RNA, 19 nt, Artificial Sequence
  Description of Artificial Sequence: Synthetic oligonucleotide
ggcaggacccuacagccag

SEQ ID NO: 1317824 - RNA, 19 nt, Artificial Sequence
  Description of Artificial Sequence: Synthetic oligonucleotide
gcugagcucuguuagggug

SEQ ID NO: 1317825 - RNA, 19 nt, Artificial Sequence
  Description of Artificial Sequence: Synthetic oligonucleotide
acaucaggcaggacccuac

SEQ ID NO: 1317826 - RNA, 19 nt, Artificial Sequence
  Description of Artificial Sequence: Synthetic oligonucleotide
guaaagaacguagcacauc

SEQ ID NO: 1317827 - RNA, 19 nt, Artificial Sequence
  Description of Artificial Sequence: Synthetic oligonucleotide
guccugagcacagugcggc

SEQ ID NO: 1317828 - RNA, 19 nt, Artificial Sequence
  Description of Artificial Sequence: Synthetic oligonucleotide
cuucucaaggcggcauugg

SEQ ID NO: 1317829 - RNA, 19 nt, Artificial Sequence
  Description of Artificial Sequence: Synthetic oligonucleotide
ugaggcuuuggaggccacg

SEQ ID NO: 1317830 - RNA, 19 nt, Artificial Sequence
  Description of Artificial Sequence: Synthetic oligonucleotide
acggcacagguccuugcag

SEQ ID NO: 1317831 - RNA, 19 nt, Artificial Sequence
  Description of Artificial Sequence: Synthetic oligonucleotide
caggcacacgccagggucc

SEQ ID NO: 1317832 - RNA, 19 nt, Artificial Sequence
  Description of Artificial Sequence: Synthetic oligonucleotide
agaacgguucuuggucaac

SEQ ID NO: 1317833 - RNA, 19 nt, Artificial Sequence
  Description of Artificial Sequence: Synthetic oligonucleotide
cucgcaacugguagcugug

SEQ ID NO: 1317834 - RNA, 19 nt, Artificial Sequence
  Description of Artificial Sequence: Synthetic oligonucleotide
ucuuugcaccgcaccucag

SEQ ID NO: 1317835 - RNA, 19 nt, Artificial Sequence
  Description of Artificial Sequence: Synthetic oligonucleotide
gaguaccaggcacacgcca

SEQ ID NO: 1317836 - RNA, 19 nt, Artificial Sequence
  Description of Artificial Sequence: Synthetic oligonucleotide
agacucauggugggugcac

SEQ ID NO: 1317837 - RNA, 19 nt, Artificial Sequence
  Description of Artificial Sequence: Synthetic oligonucleotide
agcugugaggcuacagguc

SEQ ID NO: 1317838 - RNA, 19 nt, Artificial Sequence
  Description of Artificial Sequence: Synthetic oligonucleotide
gacaucgcacagauccuug

SEQ ID NO: 1317839 - RNA, 19 nt, Artificial Sequence
  Description of Artificial Sequence: Synthetic oligonucleotide
uggaucuuacaggugggau

SEQ ID NO: 1317840 - RNA, 19 nt, Artificial Sequence
  Description of Artificial Sequence: Synthetic oligonucleotide
uuggacugaauggcugagc

SEQ ID NO: 1317841 - RNA, 19 nt, Artificial Sequence
  Description of Artificial Sequence: Synthetic oligonucleotide
gaacgguucuuggucaaca

SEQ ID NO: 1317842 - RNA, 19 nt, Artificial Sequence
  Description of Artificial Sequence: Synthetic oligonucleotide
agcuugagugacuccaguu

SEQ ID NO: 1317843 - RNA, 19 nt, Artificial Sequence
  Description of Artificial Sequence: Synthetic oligonucleotide
gucguuguugcucaacacu

SEQ ID NO: 1317844 - RNA, 19 nt, Artificial Sequence
  Description of Artificial Sequence: Synthetic oligonucleotide
acagugcggcaaugccugc

SEQ ID NO: 1317845 - RNA, 19 nt, Artificial Sequence
  Description of Artificial Sequence: Synthetic oligonucleotide
auugucggucacaucgcag

SEQ ID NO: 1317846 - RNA, 19 nt, Artificial Sequence
  Description of Artificial Sequence: Synthetic oligonucleotide
auuacccagcuuguugcug

SEQ ID NO: 1317847 - RNA, 19 nt, Artificial Sequence
  Description of Artificial Sequence: Synthetic oligonucleotide
uucagaccugcaucuccca

SEQ ID NO: 1317848 - RNA, 19 nt, Artificial Sequence
  Description of Artificial Sequence: Synthetic oligonucleotide
acauccuggggcugcauua

SEQ ID NO: 1317849 - RNA, 19 nt, Artificial Sequence
  Description of Artificial Sequence: Synthetic oligonucleotide
agacuuucacacagcagcu

SEQ ID NO: 1317850 - RNA, 19 nt, Artificial Sequence
  Description of Artificial Sequence: Synthetic oligonucleotide
ucccacaaccacagaguuc

SEQ ID NO: 1317851 - RNA, 19 nt, Artificial Sequence
  Description of Artificial Sequence: Synthetic oligonucleotide
cacgcagaacagugucugg

SEQ ID NO: 1317852 - RNA, 19 nt, Artificial Sequence
  Description of Artificial Sequence: Synthetic oligonucleotide
cucuguuagggugggguug

SEQ ID NO: 1317853 - RNA, 19 nt, Artificial Sequence
  Description of Artificial Sequence: Synthetic oligonucleotide
gucguguguccagaggugc

SEQ ID NO: 1317854 - RNA, 19 nt, Artificial Sequence
  Description of Artificial Sequence: Synthetic oligonucleotide
gcuacaggucuuuauccac

SEQ ID NO: 1317855 - RNA, 19 nt, Artificial Sequence
  Description of Artificial Sequence: Synthetic oligonucleotide
aagacucauggugggugca

SEQ ID NO: 1317856 - RNA, 19 nt, Artificial Sequence
  Description of Artificial Sequence: Synthetic oligonucleotide
gucaagcugcaauucugca

SEQ ID NO: 1317857 - RNA, 19 nt, Artificial Sequence
  Description of Artificial Sequence: Synthetic oligonucleotide
agcagcaguccugagcaca

SEQ ID NO: 1317858 - RNA, 19 nt, Artificial Sequence
  Description of Artificial Sequence: Synthetic oligonucleotide
cugacgcucuccaccaguc

SEQ ID NO: 1317859 - RNA, 19 nt, Artificial Sequence
  Description of Artificial Sequence: Synthetic oligonucleotide
acaggacuagcugcugaag

SEQ ID NO: 1317860 - RNA, 19 nt, Artificial Sequence
  Description of Artificial Sequence: Synthetic oligonucleotide
agccucauggaggucguug

SEQ ID NO: 1317861 - RNA, 19 nt, Artificial Sequence
  Description of Artificial Sequence: Synthetic oligonucleotide
cguccaguaaaugucauac

SEQ ID NO: 1317862 - RNA, 19 nt, Artificial Sequence
  Description of Artificial Sequence: Synthetic oligonucleotide
ccuacagccagccucgguc

SEQ ID NO: 1317863 - RNA, 19 nt, Artificial Sequence
  Description of Artificial Sequence: Synthetic oligonucleotide
ggucaagcugcaauucugc

SEQ ID NO: 1317864 - RNA, 19 nt, Artificial Sequence
  Description of Artificial Sequence: Synthetic oligonucleotide
cauuaaugucgugugucca

SEQ ID NO: 1317865 - RNA, 19 nt, Artificial Sequence
  Description of Artificial Sequence: Synthetic oligonucleotide
ucucugcuguaauuagauu

SEQ ID NO: 1317866 - RNA, 19 nt, Artificial Sequence
  Description of Artificial Sequence: Synthetic oligonucleotide
guagcucccgcaggguagg

SEQ ID NO: 1317867 - RNA, 19 nt, Artificial Sequence
  Description of Artificial Sequence: Synthetic oligonucleotide
agugcggcaaugccugcau

SEQ ID NO: 1317868 - RNA, 19 nt, Artificial Sequence
  Description of Artificial Sequence: Synthetic oligonucleotide
aguccugagcacagugcgg

SEQ ID NO: 1317869 - RNA, 19 nt, Artificial Sequence
  Description of Artificial Sequence: Synthetic oligonucleotide
ugcucaacacuaucuccuu

SEQ ID NO: 1317870 - RNA, 19 nt, Artificial Sequence
  Description of Artificial Sequence: Synthetic oligonucleotide
cauuggugcauaggcugag

SEQ ID NO: 1317871 - RNA, 19 nt, Artificial Sequence
  Description of Artificial Sequence: Synthetic oligonucleotide
ggaacaacaggcagcugug

SEQ ID NO: 1317872 - RNA, 19 nt, Artificial Sequence
  Description of Artificial Sequence: Synthetic oligonucleotide
ugcucacacuggaugucaa

SEQ ID NO: 1317873 - RNA, 19 nt, Artificial Sequence
  Description of Artificial Sequence: Synthetic oligonucleotide
uccguccaguaaaugucau

SEQ ID NO: 1317874 - RNA, 19 nt, Artificial Sequence
  Description of Artificial Sequence: Synthetic oligonucleotide
acguagcacaucaggcagg

SEQ ID NO: 1317875 - RNA, 19 nt, Artificial Sequence
  Description of Artificial Sequence: Synthetic oligonucleotide
uguuagggugggguuggac

SEQ ID NO: 1317876 - RNA, 19 nt, Artificial Sequence
  Description of Artificial Sequence: Synthetic oligonucleotide
ggcuccagcagacuuucac

SEQ ID NO: 1317877 - RNA, 19 nt, Artificial Sequence
  Description of Artificial Sequence: Synthetic oligonucleotide
augugauaccacaguucuc

SEQ ID NO: 1317878 - RNA, 19 nt, Artificial Sequence
  Description of Artificial Sequence: Synthetic oligonucleotide
aagcuucucaaggcggcau

SEQ ID NO: 1317879 - RNA, 19 nt, Artificial Sequence
  Description of Artificial Sequence: Synthetic oligonucleotide
gaucaggggaaggagcucu

SEQ ID NO: 1317880 - RNA, 19 nt, Artificial Sequence
  Description of Artificial Sequence: Synthetic oligonucleotide
ccuccguccaguaaauguc

SEQ ID NO: 1317881 - RNA, 19 nt, Artificial Sequence
  Description of Artificial Sequence: Synthetic oligonucleotide
guuucacccuaaauacuga

SEQ ID NO: 1317882 - RNA, 19 nt, Artificial Sequence
  Description of Artificial Sequence: Synthetic oligonucleotide
agcugcugaagggcacagc

SEQ ID NO: 1317883 - RNA, 19 nt, Artificial Sequence
  Description of Artificial Sequence: Synthetic oligonucleotide
aggugggauucugcaggcc

SEQ ID NO: 1317884 - RNA, 19 nt, Artificial Sequence
  Description of Artificial Sequence: Synthetic oligonucleotide
gguuggacugaauggcuga

SEQ ID NO: 1317885 - RNA, 19 nt, Artificial Sequence
  Description of Artificial Sequence: Synthetic oligonucleotide
auguagcucccgcagggua

SEQ ID NO: 1317886 - RNA, 19 nt, Artificial Sequence
  Description of Artificial Sequence: Synthetic oligonucleotide
ggcuacaggucuuuaucca

SEQ ID NO: 1317887 - RNA, 19 nt, Artificial Sequence
  Description of Artificial Sequence: Synthetic oligonucleotide
ugcaaccauugucggucac

SEQ ID NO: 1317888 - RNA, 19 nt, Artificial Sequence
  Description of Artificial Sequence: Synthetic oligonucleotide
accgcaccucagugagacc

SEQ ID NO: 1317889 - RNA, 19 nt, Artificial Sequence
  Description of Artificial Sequence: Synthetic oligonucleotide
ucccguagacugcgguugu

SEQ ID NO: 1317890 - RNA, 19 nt, Artificial Sequence
  Description of Artificial Sequence: Synthetic oligonucleotide
gagaacgguucuuggucaa

SEQ ID NO: 1317891 - RNA, 19 nt, Artificial Sequence
  Description of Artificial Sequence: Synthetic oligonucleotide
cacuggaugucaagacuca

SEQ ID NO: 1317892 - RNA, 19 nt, Artificial Sequence
  Description of Artificial Sequence: Synthetic oligonucleotide
aguuggguuucacccuaaa

SEQ ID NO: 1317893 - RNA, 19 nt, Artificial Sequence
  Description of Artificial Sequence: Synthetic oligonucleotide
agcuucagaccugcaucuc

SEQ ID NO: 1317894 - RNA, 19 nt, Artificial Sequence
  Description of Artificial Sequence: Synthetic oligonucleotide
caacacuaggacacccaga

SEQ ID NO: 1317895 - RNA, 19 nt, Artificial Sequence
  Description of Artificial Sequence: Synthetic oligonucleotide
caaccugaccacuugguau

SEQ ID NO: 1317896 - RNA, 19 nt, Artificial Sequence
  Description of Artificial Sequence: Synthetic oligonucleotide
cauugucggucacaucgca

SEQ ID NO: 1317897 - RNA, 19 nt, Artificial Sequence
  Description of Artificial Sequence: Synthetic oligonucleotide
cucggucaagcugcaauuc

SEQ ID NO: 1317898 - RNA, 19 nt, Artificial Sequence
  Description of Artificial Sequence: Synthetic oligonucleotide
ggcuuuggaggccacgaca

SEQ ID NO: 1317899 - RNA, 19 nt, Artificial Sequence
  Description of Artificial Sequence: Synthetic oligonucleotide
caucgcacagauccuugca

SEQ ID NO: 1317900 - RNA, 19 nt, Artificial Sequence
  Description of Artificial Sequence: Synthetic oligonucleotide
gucaacacuaggacaccca

SEQ ID NO: 1317901 - RNA, 19 nt, Artificial Sequence
  Description of Artificial Sequence: Synthetic oligonucleotide
cagucaacacuaggacacc

SEQ ID NO: 1317902 - RNA, 19 nt, Artificial Sequence
  Description of Artificial Sequence: Synthetic oligonucleotide
ugggcugucugacgcucuc

SEQ ID NO: 1317903 - RNA, 19 nt, Artificial Sequence
  Description of Artificial Sequence: Synthetic oligonucleotide
gaagcuucucaaggcggca

SEQ ID NO: 1317904 - RNA, 19 nt, Artificial Sequence
  Description of Artificial Sequence: Synthetic oligonucleotide
uccugagcacagugcggca

SEQ ID NO: 1317905 - RNA, 19 nt, Artificial Sequence
  Description of Artificial Sequence: Synthetic oligonucleotide
ggucguuguugcucaacac

SEQ ID NO: 1317906 - RNA, 19 nt, Artificial Sequence
  Description of Artificial Sequence: Synthetic oligonucleotide
caggacccuacagccagcc

SEQ ID NO: 1317907 - RNA, 19 nt, Artificial Sequence
  Description of Artificial Sequence: Synthetic oligonucleotide
uagugaggcuuuggaggcc

SEQ ID NO: 1317908 - RNA, 19 nt, Artificial Sequence
  Description of Artificial Sequence: Synthetic oligonucleotide
cacugcuuauccccaguca

SEQ ID NO: 1317909 - RNA, 19 nt, Artificial Sequence
  Description of Artificial Sequence: Synthetic oligonucleotide
ucaagcccuggcacagcau

SEQ ID NO: 1317910 - RNA, 19 nt, Artificial Sequence
  Description of Artificial Sequence: Synthetic oligonucleotide
cugaauggcugagcugaug

SEQ ID NO: 1317911 - RNA, 19 nt, Artificial Sequence
  Description of Artificial Sequence: Synthetic oligonucleotide
ccauugucggucacaucgc

SEQ ID NO: 1317912 - RNA, 19 nt, Artificial Sequence
  Description of Artificial Sequence: Synthetic oligonucleotide
cacagucauccaaccugac

SEQ ID NO: 1317913 - RNA, 19 nt, Artificial Sequence
  Description of Artificial Sequence: Synthetic oligonucleotide
agcugugagguuacaguau

SEQ ID NO: 1317914 - RNA, 19 nt, Artificial Sequence
  Description of Artificial Sequence: Synthetic oligonucleotide
cugauccuacagcugggga

SEQ ID NO: 1317915 - RNA, 19 nt, Artificial Sequence
  Description of Artificial Sequence: Synthetic oligonucleotide
gacucauggugggugcaca

SEQ ID NO: 1317916 - RNA, 19 nt, Artificial Sequence
  Description of Artificial Sequence: Synthetic oligonucleotide
gaggucguuguugcucaac

SEQ ID NO: 1317917 - RNA, 19 nt, Artificial Sequence
  Description of Artificial Sequence: Synthetic oligonucleotide
cagccaaagcacacgcaga

SEQ ID NO: 1317918 - RNA, 19 nt, Artificial Sequence
  Description of Artificial Sequence: Synthetic oligonucleotide
ugcauaggcugagcucugu

SEQ ID NO: 1317919 - RNA, 19 nt, Artificial Sequence
  Description of Artificial Sequence: Synthetic oligonucleotide
agcacacgcagaacagugu

SEQ ID NO: 1317920 - RNA, 19 nt, Artificial Sequence
  Description of Artificial Sequence: Synthetic oligonucleotide
acuggaugucaagacucau

SEQ ID NO: 1317921 - RNA, 19 nt, Artificial Sequence
  Description of Artificial Sequence: Synthetic oligonucleotide
ccaccuggcaucacucagc

SEQ ID NO: 1317922 - RNA, 19 nt, Artificial Sequence
  Description of Artificial Sequence: Synthetic oligonucleotide
ugcagcccucugcagugau

SEQ ID NO: 1317923 - RNA, 19 nt, Artificial Sequence
  Description of Artificial Sequence: Synthetic oligonucleotide
ggguccagaaguccuucac

SEQ ID NO: 1317924 - RNA, 19 nt, Artificial Sequence
  Description of Artificial Sequence: Synthetic oligonucleotide
ccccagucaacacuaggac

SEQ ID NO: 1317925 - RNA, 19 nt, Artificial Sequence
  Description of Artificial Sequence: Synthetic oligonucleotide
cagucgcaggacaccugag

SEQ ID NO: 1317926 - RNA, 19 nt, Artificial Sequence
  Description of Artificial Sequence: Synthetic oligonucleotide
agcccucugcagugauauc

SEQ ID NO: 1317927 - RNA, 19 nt, Artificial Sequence
  Description of Artificial Sequence: Synthetic oligonucleotide
ucgcaacugguagcuguga

SEQ ID NO: 1317928 - RNA, 19 nt, Artificial Sequence
  Description of Artificial Sequence: Synthetic oligonucleotide
cugaccacuugguauugcu

SEQ ID NO: 1317929 - RNA, 19 nt, Artificial Sequence
  Description of Artificial Sequence: Synthetic oligonucleotide
uaccuccuccguccaguaa

SEQ ID NO: 1317930 - RNA, 19 nt, Artificial Sequence
  Description of Artificial Sequence: Synthetic oligonucleotide
ccaguucccguagacugcg

SEQ ID NO: 1317931 - RNA, 19 nt, Artificial Sequence
  Description of Artificial Sequence: Synthetic oligonucleotide
aggccacgacaucgcacag

SEQ ID NO: 1317932 - RNA, 19 nt, Artificial Sequence
  Description of Artificial Sequence: Synthetic oligonucleotide
gguccugaggacacggcac

SEQ ID NO: 1317933 - RNA, 19 nt, Artificial Sequence
  Description of Artificial Sequence: Synthetic oligonucleotide
cugcaauucugcaggcuua

SEQ ID NO: 1317934 - RNA, 19 nt, Artificial Sequence
  Description of Artificial Sequence: Synthetic oligonucleotide
gugucucaaguucucugcu

SEQ ID NO: 1317935 - RNA, 19 nt, Artificial Sequence
  Description of Artificial Sequence: Synthetic oligonucleotide
agccagaggcucgcaacug

SEQ ID NO: 1317936 - RNA, 19 nt, Artificial Sequence
  Description of Artificial Sequence: Synthetic oligonucleotide
caguucccguagacugcgg

SEQ ID NO: 1317937 - RNA, 19 nt, Artificial Sequence
  Description of Artificial Sequence: Synthetic oligonucleotide
cccagucaacacuaggaca

SEQ ID NO: 1317938 - RNA, 19 nt, Artificial Sequence
  Description of Artificial Sequence: Synthetic oligonucleotide
acgacaucgcacagauccu

SEQ ID NO: 1317939 - RNA, 19 nt, Artificial Sequence
  Description of Artificial Sequence: Synthetic oligonucleotide
cugcgguugugcagcagga

SEQ ID NO: 1317940 - RNA, 19 nt, Artificial Sequence
  Description of Artificial Sequence: Synthetic oligonucleotide
aaguuggguuucacccuaa

SEQ ID NO: 1317941 - RNA, 19 nt, Artificial Sequence
  Description of Artificial Sequence: Synthetic oligonucleotide
caggguagguaaagaacgu

SEQ ID NO: 1317942 - RNA, 19 nt, Artificial Sequence
  Description of Artificial Sequence: Synthetic oligonucleotide
caucucaggagaugacccu

SEQ ID NO: 1317943 - RNA, 19 nt, Artificial Sequence
  Description of Artificial Sequence: Synthetic oligonucleotide
ggcugagcugaugucuuug

SEQ ID NO: 1317944 - RNA, 19 nt, Artificial Sequence
  Description of Artificial Sequence: Synthetic oligonucleotide
ccuaaauacugaagccaga

SEQ ID NO: 1317945 - RNA, 19 nt, Artificial Sequence
  Description of Artificial Sequence: Synthetic oligonucleotide
ggaucuuacaggugggauu

SEQ ID NO: 1317946 - RNA, 19 nt, Artificial Sequence
  Description of Artificial Sequence: Synthetic oligonucleotide
aggacccuacagccagccu

SEQ ID NO: 1317947 - RNA, 19 nt, Artificial Sequence
  Description of Artificial Sequence: Synthetic oligonucleotide
ccacagucauccaaccuga

SEQ ID NO: 1317948 - RNA, 19 nt, Artificial Sequence
  Description of Artificial Sequence: Synthetic oligonucleotide
gcucccgcaggguagguaa

SEQ ID NO: 1317949 - RNA, 19 nt, Artificial Sequence
  Description of Artificial Sequence: Synthetic oligonucleotide
cuggaucuuacagguggga

SEQ ID NO: 1317950 - RNA, 19 nt, Artificial Sequence
  Description of Artificial Sequence: Synthetic oligonucleotide
cugcaaccauugucgguca

SEQ ID NO: 1317951 - RNA, 19 nt, Artificial Sequence
  Description of Artificial Sequence: Synthetic oligonucleotide
ggauucugcaggcccugga

SEQ ID NO: 1317952 - RNA, 19 nt, Artificial Sequence
  Description of Artificial Sequence: Synthetic oligonucleotide
cauuacccagcuuguugcu

SEQ ID NO: 1317953 - RNA, 19 nt, Artificial Sequence
  Description of Artificial Sequence: Synthetic oligonucleotide
caaguucucugcuguaauu

SEQ ID NO: 1317954 - RNA, 19 nt, Artificial Sequence
  Description of Artificial Sequence: Synthetic oligonucleotide
uggcugagcugaugucuuu

SEQ ID NO: 1317955 - RNA, 19 nt, Artificial Sequence
  Description of Artificial Sequence: Synthetic oligonucleotide
gauguagcucccgcagggu

SEQ ID NO: 1317956 - RNA, 19 nt, Artificial Sequence
  Description of Artificial Sequence: Synthetic oligonucleotide
gguucuuggucaacaccga

SEQ ID NO: 1317957 - RNA, 19 nt, Artificial Sequence
  Description of Artificial Sequence: Synthetic oligonucleotide
ggaguaccaggcacacgcc

SEQ ID NO: 1317958 - RNA, 19 nt, Artificial Sequence
  Description of Artificial Sequence: Synthetic oligonucleotide
cauuuccagccaggcugag

SEQ ID NO: 1317959 - RNA, 19 nt, Artificial Sequence
  Description of Artificial Sequence: Synthetic oligonucleotide
aucuuacaggugggauucu

SEQ ID NO: 1317960 - RNA, 19 nt, Artificial Sequence
  Description of Artificial Sequence: Synthetic oligonucleotide
gcaaccauugucggucaca

SEQ ID NO: 1317961 - RNA, 19 nt, Artificial Sequence
  Description of Artificial Sequence: Synthetic oligonucleotide
gguaaagaacguagcacau

SEQ ID NO: 1317962 - RNA, 19 nt, Artificial Sequence
  Description of Artificial Sequence: Synthetic oligonucleotide
gcucgcaacugguagcugu

SEQ ID NO: 1317963 - RNA, 19 nt, Artificial Sequence
  Description of Artificial Sequence: Synthetic oligonucleotide
acacucccacaaccacaga

SEQ ID NO: 1317964 - RNA, 19 nt, Artificial Sequence
  Description of Artificial Sequence: Synthetic oligonucleotide
cccgcagcuggucuucuac

SEQ ID NO: 1317965 - RNA, 19 nt, Artificial Sequence
  Description of Artificial Sequence: Synthetic oligonucleotide
gugcauaggcugagcucug

SEQ ID NO: 1317966 - RNA, 19 nt, Artificial Sequence
  Description of Artificial Sequence: Synthetic oligonucleotide
acugaauggcugagcugau

SEQ ID NO: 1317967 - RNA, 19 nt, Artificial Sequence
  Description of Artificial Sequence: Synthetic oligonucleotide
ggaggccacgacaucgcac

SEQ ID NO: 1317968 - RNA, 19 nt, Artificial Sequence
  Description of Artificial Sequence: Synthetic oligonucleotide
gcgguugugcagcaggacu

SEQ ID NO: 1317969 - RNA, 19 nt, Artificial Sequence
  Description of Artificial Sequence: Synthetic oligonucleotide
accagucgcaggacaccug

SEQ ID NO: 1317970 - RNA, 19 nt, Artificial Sequence
  Description of Artificial Sequence: Synthetic oligonucleotide
ccagucgcaggacaccuga

SEQ ID NO: 1317971 - RNA, 19 nt, Artificial Sequence
  Description of Artificial Sequence: Synthetic oligonucleotide
gcggcaaugccugcauuac

SEQ ID NO: 1317972 - RNA, 19 nt, Artificial Sequence
  Description of Artificial Sequence: Synthetic oligonucleotide
ccuggaguaccaggcacac

SEQ ID NO: 1317973 - RNA, 19 nt, Artificial Sequence
  Description of Artificial Sequence: Synthetic oligonucleotide
cagaggcucgcaacuggua

SEQ ID NO: 1317974 - RNA, 19 nt, Artificial Sequence
  Description of Artificial Sequence: Synthetic oligonucleotide
ggaugucaagacucauggu

SEQ ID NO: 1317975 - RNA, 19 nt, Artificial Sequence
  Description of Artificial Sequence: Synthetic oligonucleotide
ccgagcauaugugggaaca

SEQ ID NO: 1317976 - RNA, 19 nt, Artificial Sequence
  Description of Artificial Sequence: Synthetic oligonucleotide
ccgcaccucagugagacca

SEQ ID NO: 1317977 - RNA, 19 nt, Artificial Sequence
  Description of Artificial Sequence: Synthetic oligonucleotide
cuaccuccuccguccagua

SEQ ID NO: 1317978 - RNA, 19 nt, Artificial Sequence
  Description of Artificial Sequence: Synthetic oligonucleotide
aggacacggcacagguccu

SEQ ID NO: 1317979 - RNA, 19 nt, Artificial Sequence
  Description of Artificial Sequence: Synthetic oligonucleotide
gcacaucucaggagaugac

SEQ ID NO: 1317980 - RNA, 19 nt, Artificial Sequence
  Description of Artificial Sequence: Synthetic oligonucleotide
gccucauggaggucguugu

SEQ ID NO: 1317981 - RNA, 19 nt, Artificial Sequence
  Description of Artificial Sequence: Synthetic oligonucleotide
cagugcggcaaugccugca

SEQ ID NO: 1317982 - RNA, 19 nt, Artificial Sequence
  Description of Artificial Sequence: Synthetic oligonucleotide
cacaucaggcaggacccua

SEQ ID NO: 1317983 - RNA, 19 nt, Artificial Sequence
  Description of Artificial Sequence: Synthetic oligonucleotide
gccucggucaagcugcaau

SEQ ID NO: 1317984 - RNA, 19 nt, Artificial Sequence
  Description of Artificial Sequence: Synthetic oligonucleotide
ggaucaggggaaggagcuc

SEQ ID NO: 1317985 - RNA, 19 nt, Artificial Sequence
  Description of Artificial Sequence: Synthetic oligonucleotide
ggggcugcauuaaugucgu

SEQ ID NO: 1317986 - RNA, 19 nt, Artificial Sequence
  Description of Artificial Sequence: Synthetic oligonucleotide
ggguuucacccuaaauacu

SEQ ID NO: 1317987 - RNA, 19 nt, Artificial Sequence
  Description of Artificial Sequence: Synthetic oligonucleotide
ugccugcauuacccagcuu

SEQ ID NO: 1317988 - RNA, 19 nt, Artificial Sequence
  Description of Artificial Sequence: Synthetic oligonucleotide
gcaguuggcugaugugaua

SEQ ID NO: 1317989 - RNA, 19 nt, Artificial Sequence
  Description of Artificial Sequence: Synthetic oligonucleotide
ccugcauuacccagcuugu

SEQ ID NO: 1317990 - RNA, 19 nt, Artificial Sequence
  Description of Artificial Sequence: Synthetic oligonucleotide
ggguugcugcucauuugca

SEQ ID NO: 1317991 - RNA, 19 nt, Artificial Sequence
  Description of Artificial Sequence: Synthetic oligonucleotide
caccagucgcaggacaccu

SEQ ID NO: 1317992 - RNA, 19 nt, Artificial Sequence
  Description of Artificial Sequence: Synthetic oligonucleotide
ggucaacaccgagcauaug

SEQ ID NO: 1317993 - RNA, 19 nt, Artificial Sequence
  Description of Artificial Sequence: Synthetic oligonucleotide
agacauccuggggcugcau

SEQ ID NO: 1317994 - RNA, 19 nt, Artificial Sequence
  Description of Artificial Sequence: Synthetic oligonucleotide
gcaggacuguggcaaggcu

SEQ ID NO: 1317995 - RNA, 19 nt, Artificial Sequence
  Description of Artificial Sequence: Synthetic oligonucleotide
cucccgcaggguagguaaa

SEQ ID NO: 1317996 - RNA, 19 nt, Artificial Sequence
  Description of Artificial Sequence: Synthetic oligonucleotide
gguugugcagcaggacugu

SEQ ID NO: 1317997 - RNA, 19 nt, Artificial Sequence
  Description of Artificial Sequence: Synthetic oligonucleotide
ggucuucuaccuccuccgu

SEQ ID NO: 1317998 - RNA, 19 nt, Artificial Sequence
  Description of Artificial Sequence: Synthetic oligonucleotide
cuuggucaacaccgagcau

SEQ ID NO: 1317999 - RNA, 19 nt, Artificial Sequence
  Description of Artificial Sequence: Synthetic oligonucleotide
gggguuggacugaauggcu

SEQ ID NO: 1318000 - RNA, 19 nt, Artificial Sequence
  Description of Artificial Sequence: Synthetic oligonucleotide
ggccacgacaucgcacaga

SEQ ID NO: 1318001 - RNA, 19 nt, Artificial Sequence
  Description of Artificial Sequence: Synthetic oligonucleotide
cagccucggucaagcugca

SEQ ID NO: 1318002 - RNA, 19 nt, Artificial Sequence
  Description of Artificial Sequence: Synthetic oligonucleotide
cgcaccucagugagaccac

SEQ ID NO: 1318003 - RNA, 19 nt, Artificial Sequence
  Description of Artificial Sequence: Synthetic oligonucleotide
gcaggacccuacagccagc

SEQ ID NO: 1318004 - RNA, 19 nt, Artificial Sequence
  Description of Artificial Sequence: Synthetic oligonucleotide
cugugaggcuacaggucuu

SEQ ID NO: 1318005 - RNA, 19 nt, Artificial Sequence
  Description of Artificial Sequence: Synthetic oligonucleotide
caguugcuguagugaggcu

SEQ ID NO: 1318006 - RNA, 19 nt, Artificial Sequence
  Description of Artificial Sequence: Synthetic oligonucleotide
gccaggcuccagcagacuu

SEQ ID NO: 1318007 - RNA, 19 nt, Artificial Sequence
  Description of Artificial Sequence: Synthetic oligonucleotide
ggcucgcaacugguagcug

SEQ ID NO: 1318008 - RNA, 19 nt, Artificial Sequence
  Description of Artificial Sequence: Synthetic oligonucleotide
ccagaggcucgcaacuggu

SEQ ID NO: 1318009 - RNA, 19 nt, Artificial Sequence
  Description of Artificial Sequence: Synthetic oligonucleotide
ggaggucguuguugcucaa

SEQ ID NO: 1318010 - RNA, 19 nt, Artificial Sequence
  Description of Artificial Sequence: Synthetic oligonucleotide
ccguccaguaaaugucaua

SEQ ID NO: 1318011 - RNA, 19 nt, Artificial Sequence
  Description of Artificial Sequence: Synthetic oligonucleotide
gcuuagcuucuggaucuua

SEQ ID NO: 1318012 - RNA, 19 nt, Artificial Sequence
  Description of Artificial Sequence: Synthetic oligonucleotide
ccugagcacagugcggcaa

SEQ ID NO: 1318013 - RNA, 19 nt, Artificial Sequence
  Description of Artificial Sequence: Synthetic oligonucleotide
ccucggucaagcugcaauu

SEQ ID NO: 1318014 - RNA, 19 nt, Artificial Sequence
  Description of Artificial Sequence: Synthetic oligonucleotide
ccacgacaucgcacagauc

SEQ ID NO: 1318015 - RNA, 19 nt, Artificial Sequence
  Description of Artificial Sequence: Synthetic oligonucleotide
caccagccucauggagguc

SEQ ID NO: 1318016 - RNA, 19 nt, Artificial Sequence
  Description of Artificial Sequence: Synthetic oligonucleotide
gugcggcaaugccugcauu

SEQ ID NO: 1318017 - RNA, 19 nt, Artificial Sequence
  Description of Artificial Sequence: Synthetic oligonucleotide
cguuguugcucaacacuau

SEQ ID NO: 1318018 - RNA, 19 nt, Artificial Sequence
  Description of Artificial Sequence: Synthetic oligonucleotide
ggcacacgccagggucccc

SEQ ID NO: 1318019 - RNA, 19 nt, Artificial Sequence
  Description of Artificial Sequence: Synthetic oligonucleotide
ccuccuccguccaguaaau

SEQ ID NO: 1318020 - RNA, 19 nt, Artificial Sequence
  Description of Artificial Sequence: Synthetic oligonucleotide
caguggguugcugcucauu

SEQ ID NO: 1318021 - RNA, 19 nt, Artificial Sequence
  Description of Artificial Sequence: Synthetic oligonucleotide
ccucauggaggucguuguu

SEQ ID NO: 1318022 - RNA, 19 nt, Artificial Sequence
  Description of Artificial Sequence: Synthetic oligonucleotide
cccuacagccagccucggu

SEQ ID NO: 1318023 - RNA, 19 nt, Artificial Sequence
  Description of Artificial Sequence: Synthetic oligonucleotide
cagccucauggaggucguu

SEQ ID NO: 1318024 - RNA, 19 nt, Artificial Sequence
  Description of Artificial Sequence: Synthetic oligonucleotide
aauuuaaguuugucuaagc

SEQ ID NO: 1318025 - RNA, 19 nt, Artificial Sequence
  Description of Artificial Sequence: Synthetic oligonucleotide
uuuuguucaccaaggaugg

SEQ ID NO: 1318026 - RNA, 19 nt, Artificial Sequence
  Description of Artificial Sequence: Synthetic oligonucleotide
ugugguuugcaccuuaggg

SEQ ID NO: 1318027 - RNA, 19 nt, Artificial Sequence
  Description of Artificial Sequence: Synthetic oligonucleotide
auuucacacaucgagagcc

SEQ ID NO: 1318028 - RNA, 19 nt, Artificial Sequence
  Description of Artificial Sequence: Synthetic oligonucleotide
uauuugaaggacuaggugu

SEQ ID NO: 1318029 - RNA, 19 nt, Artificial Sequence
  Description of Artificial Sequence: Synthetic oligonucleotide
caagauuucacacaucgag

SEQ ID NO: 1318030 - RNA, 19 nt, Artificial Sequence
  Description of Artificial Sequence: Synthetic oligonucleotide
aauagaaggccauggagga

SEQ ID NO: 1318031 - RNA, 19 nt, Artificial Sequence
  Description of Artificial Sequence: Synthetic oligonucleotide
aacauuuuguucaccaagg

SEQ ID NO: 1318032 - RNA, 19 nt, Artificial Sequence
  Description of Artificial Sequence: Synthetic oligonucleotide
agauuucacacaucgagag

SEQ ID NO: 1318033 - RNA, 19 nt, Artificial Sequence
  Description of Artificial Sequence: Synthetic oligonucleotide
uuuaaguuugucuaagcau

SEQ ID NO: 1318034 - RNA, 19 nt, Artificial Sequence
  Description of Artificial Sequence: Synthetic oligonucleotide
acgaucauggaguugaucu

SEQ ID NO: 1318035 - RNA, 19 nt, Artificial Sequence
  Description of Artificial Sequence: Synthetic oligonucleotide
auaauguagggcuuggcug

SEQ ID NO: 1318036 - RNA, 19 nt, Artificial Sequence
  Description of Artificial Sequence: Synthetic oligonucleotide
auuuaaguuugucuaagca

SEQ ID NO: 1318037 - RNA, 19 nt, Artificial Sequence
  Description of Artificial Sequence: Synthetic oligonucleotide
uggccuagggaucagaggc

SEQ ID NO: 1318038 - RNA, 19 nt, Artificial Sequence
  Description of Artificial Sequence: Synthetic oligonucleotide
auuaagucuggcuuugcag

SEQ ID NO: 1318039 - RNA, 19 nt, Artificial Sequence
  Description of Artificial Sequence: Synthetic oligonucleotide
ucucucacgaucauggagu

SEQ ID NO: 1318040 - RNA, 19 nt, Artificial Sequence
  Description of Artificial Sequence: Synthetic oligonucleotide
ugaucugauagcaauuuaa

SEQ ID NO: 1318041 - RNA, 19 nt, Artificial Sequence
  Description of Artificial Sequence: Synthetic oligonucleotide
gauggguagaguuucccag

SEQ ID NO: 1318042 - RNA, 19 nt, Artificial Sequence
  Description of Artificial Sequence: Synthetic oligonucleotide
aagcaucuggcauaguucu

SEQ ID NO: 1318043 - RNA, 19 nt, Artificial Sequence
  Description of Artificial Sequence: Synthetic oligonucleotide
aaauaugaaaaggcagcuc

SEQ ID NO: 1318044 - RNA, 19 nt, Artificial Sequence
  Description of Artificial Sequence: Synthetic oligonucleotide
uguucagcccuucaggcug

SEQ ID NO: 1318045 - RNA, 19 nt, Artificial Sequence
  Description of Artificial Sequence: Synthetic oligonucleotide
uauuaucagccguugaacu

SEQ ID NO: 1318046 - RNA, 19 nt, Artificial Sequence
  Description of Artificial Sequence: Synthetic oligonucleotide
uguagguagugcaagaguu

SEQ ID NO: 1318047 - RNA, 19 nt, Artificial Sequence
  Description of Artificial Sequence: Synthetic oligonucleotide
ugauagcaauuuaaguuug

SEQ ID NO: 1318048 - RNA, 19 nt, Artificial Sequence
  Description of Artificial Sequence: Synthetic oligonucleotide
auacaugccauugaucagg

SEQ ID NO: 1318049 - RNA, 19 nt, Artificial Sequence
  Description of Artificial Sequence: Synthetic oligonucleotide
guugguaggagacacuggc

SEQ ID NO: 1318050 - RNA, 19 nt, Artificial Sequence
  Description of Artificial Sequence: Synthetic oligonucleotide
ucugagauugcaaccaaaa

SEQ ID NO: 1318051 - RNA, 19 nt, Artificial Sequence
  Description of Artificial Sequence: Synthetic oligonucleotide
uguaucuggguaccugagg

SEQ ID NO: 1318052 - RNA, 19 nt, Artificial Sequence
  Description of Artificial Sequence: Synthetic oligonucleotide
cacaucgagagccaagugg

SEQ ID NO: 1318053 - RNA, 19 nt, Artificial Sequence
  Description of Artificial Sequence: Synthetic oligonucleotide
gaucugauagcaauuuaag

SEQ ID NO: 1318054 - RNA, 19 nt, Artificial Sequence
  Description of Artificial Sequence: Synthetic oligonucleotide
cucacuucgcuuuacugcc

SEQ ID NO: 1318055 - RNA, 19 nt, Artificial Sequence
  Description of Artificial Sequence: Synthetic oligonucleotide
gaugugacaggaguaggcg

SEQ ID NO: 1318056 - RNA, 19 nt, Artificial Sequence
  Description of Artificial Sequence: Synthetic oligonucleotide
ugacaauguagguagugca

SEQ ID NO: 1318057 - RNA, 19 nt, Artificial Sequence
  Description of Artificial Sequence: Synthetic oligonucleotide
aagagggucaccccaagaa

SEQ ID NO: 1318058 - RNA, 19 nt, Artificial Sequence
  Description of Artificial Sequence: Synthetic oligonucleotide
uguaucugggugguggugg

SEQ ID NO: 1318059 - RNA, 19 nt, Artificial Sequence
  Description of Artificial Sequence: Synthetic oligonucleotide
uugguuuauuaucagccgu

SEQ ID NO: 1318060 - RNA, 19 nt, Artificial Sequence
  Description of Artificial Sequence: Synthetic oligonucleotide
uuaaucuauuugcugugcu

SEQ ID NO: 1318061 - RNA, 19 nt, Artificial Sequence
  Description of Artificial Sequence: Synthetic oligonucleotide
uacuuggcacuucugcacg

SEQ ID NO: 1318062 - RNA, 19 nt, Artificial Sequence
  Description of Artificial Sequence: Synthetic oligonucleotide
uaauguagggcuuggcugu

SEQ ID NO: 1318063 - RNA, 19 nt, Artificial Sequence
  Description of Artificial Sequence: Synthetic oligonucleotide
ucugaggcaauagaaggcc

SEQ ID NO: 1318064 - RNA, 19 nt, Artificial Sequence
  Description of Artificial Sequence: Synthetic oligonucleotide
cuugccauauuaagucugg

SEQ ID NO: 1318065 - RNA, 19 nt, Artificial Sequence
  Description of Artificial Sequence: Synthetic oligonucleotide
ggcuugacaauguagguag

SEQ ID NO: 1318066 - RNA, 19 nt, Artificial Sequence
  Description of Artificial Sequence: Synthetic oligonucleotide
uggcauaguucugagauug

SEQ ID NO: 1318067 - RNA, 19 nt, Artificial Sequence
  Description of Artificial Sequence: Synthetic oligonucleotide
ugugcuacgcacuggcugc

SEQ ID NO: 1318068 - RNA, 19 nt, Artificial Sequence
  Description of Artificial Sequence: Synthetic oligonucleotide
gaguaggcgacacuguggc

SEQ ID NO: 1318069 - RNA, 19 nt, Artificial Sequence
  Description of Artificial Sequence: Synthetic oligonucleotide
aacagucaugguauguggg

SEQ ID NO: 1318070 - RNA, 19 nt, Artificial Sequence
  Description of Artificial Sequence: Synthetic oligonucleotide
uuauuaucagccguugaac

SEQ ID NO: 1318071 - RNA, 19 nt, Artificial Sequence
  Description of Artificial Sequence: Synthetic oligonucleotide
uugacaauguagguagugc

SEQ ID NO: 1318072 - RNA, 19 nt, Artificial Sequence
  Description of Artificial Sequence: Synthetic oligonucleotide
ucgcuuuacugccuuaggc

SEQ ID NO: 1318073 - RNA, 19 nt, Artificial Sequence
  Description of Artificial Sequence: Synthetic oligonucleotide
gagaugaggggcuugacaa

SEQ ID NO: 1318074 - RNA, 19 nt, Artificial Sequence
  Description of Artificial Sequence: Synthetic oligonucleotide
ucaccaaggauggagugag

SEQ ID NO: 1318075 - RNA, 19 nt, Artificial Sequence
  Description of Artificial Sequence: Synthetic oligonucleotide
uggucgaugugacaggagu

SEQ ID NO: 1318076 - RNA, 19 nt, Artificial Sequence
  Description of Artificial Sequence: Synthetic oligonucleotide
gcauacaugccauugauca

SEQ ID NO: 1318077 - RNA, 19 nt, Artificial Sequence
  Description of Artificial Sequence: Synthetic oligonucleotide
uucuggucaagauuucaca

SEQ ID NO: 1318078 - RNA, 19 nt, Artificial Sequence
  Description of Artificial Sequence: Synthetic oligonucleotide
uccuguacuugccauauua

SEQ ID NO: 1318079 - RNA, 19 nt, Artificial Sequence
  Description of Artificial Sequence: Synthetic oligonucleotide
agcucucucacgaucaugg

SEQ ID NO: 1318080 - RNA, 19 nt, Artificial Sequence
  Description of Artificial Sequence: Synthetic oligonucleotide
caacagucaugguaugugg

SEQ ID NO: 1318081 - RNA, 19 nt, Artificial Sequence
  Description of Artificial Sequence: Synthetic oligonucleotide
aagauuucacacaucgaga

SEQ ID NO: 1318082 - RNA, 19 nt, Artificial Sequence
  Description of Artificial Sequence: Synthetic oligonucleotide
uaugcuggcauuuguacuu

SEQ ID NO: 1318083 - RNA, 19 nt, Artificial Sequence
  Description of Artificial Sequence: Synthetic oligonucleotide
ucuauuugcugugcuacgc

SEQ ID NO: 1318084 - RNA, 19 nt, Artificial Sequence
  Description of Artificial Sequence: Synthetic oligonucleotide
ugguuugcaccuuaggguc

SEQ ID NO: 1318085 - RNA, 19 nt, Artificial Sequence
  Description of Artificial Sequence: Synthetic oligonucleotide
gauuucacacaucgagagc

SEQ ID NO: 1318086 - RNA, 19 nt, Artificial Sequence
  Description of Artificial Sequence: Synthetic oligonucleotide
ucagccguugaacuugugu

SEQ ID NO: 1318087 - RNA, 19 nt, Artificial Sequence
  Description of Artificial Sequence: Synthetic oligonucleotide
uucgcuuuacugccuuagg

SEQ ID NO: 1318088 - RNA, 19 nt, Artificial Sequence
  Description of Artificial Sequence: Synthetic oligonucleotide
cugguuguuggaaugcuug

SEQ ID NO: 1318089 - RNA, 19 nt, Artificial Sequence
  Description of Artificial Sequence: Synthetic oligonucleotide
caauuuaaguuugucuaag

SEQ ID NO: 1318090 - RNA, 19 nt, Artificial Sequence
  Description of Artificial Sequence: Synthetic oligonucleotide
aucuauuugcugugcuacg

SEQ ID NO: 1318091 - RNA, 19 nt, Artificial Sequence
  Description of Artificial Sequence: Synthetic oligonucleotide
ugcauaugugaucguuuag

SEQ ID NO: 1318092 - RNA, 19 nt, Artificial Sequence
  Description of Artificial Sequence: Synthetic oligonucleotide
gauaauguagggcuuggcu

SEQ ID NO: 1318093 - RNA, 19 nt, Artificial Sequence
  Description of Artificial Sequence: Synthetic oligonucleotide
ugccauauuaagucuggcu

SEQ ID NO: 1318094 - RNA, 19 nt, Artificial Sequence
  Description of Artificial Sequence: Synthetic oligonucleotide
aauucuggucaagauuuca

SEQ ID NO: 1318095 - RNA, 19 nt, Artificial Sequence
  Description of Artificial Sequence: Synthetic oligonucleotide
auucuggucaagauuucac

SEQ ID NO: 1318096 - RNA, 19 nt, Artificial Sequence
  Description of Artificial Sequence: Synthetic oligonucleotide
aucuggguaccugaggugg

SEQ ID NO: 1318097 - RNA, 19 nt, Artificial Sequence
  Description of Artificial Sequence: Synthetic oligonucleotide
agccguugaacuuguguuc

SEQ ID NO: 1318098 - RNA, 19 nt, Artificial Sequence
  Description of Artificial Sequence: Synthetic oligonucleotide
aacgagcaccgccaaaagu

SEQ ID NO: 1318099 - RNA, 19 nt, Artificial Sequence
  Description of Artificial Sequence: Synthetic oligonucleotide
guguuagcccagcagaggc

SEQ ID NO: 1318100 - RNA, 19 nt, Artificial Sequence
  Description of Artificial Sequence: Synthetic oligonucleotide
uaugccugguccaacgguc

SEQ ID NO: 1318101 - RNA, 19 nt, Artificial Sequence
  Description of Artificial Sequence: Synthetic oligonucleotide
uauuugcugugcuacgcac

SEQ ID NO: 1318102 - RNA, 19 nt, Artificial Sequence
  Description of Artificial Sequence: Synthetic oligonucleotide
acaggaguaggcgacacug

SEQ ID NO: 1318103 - RNA, 19 nt, Artificial Sequence
  Description of Artificial Sequence: Synthetic oligonucleotide
gguagugcaagaguucugg

SEQ ID NO: 1318104 - RNA, 19 nt, Artificial Sequence
  Description of Artificial Sequence: Synthetic oligonucleotide
aaagaucuggaagcacuug

SEQ ID NO: 1318105 - RNA, 19 nt, Artificial Sequence
  Description of Artificial Sequence: Synthetic oligonucleotide
cauacaugccauugaucag

SEQ ID NO: 1318106 - RNA, 19 nt, Artificial Sequence
  Description of Artificial Sequence: Synthetic oligonucleotide
uuuguacuuggcacuucug

SEQ ID NO: 1318107 - RNA, 19 nt, Artificial Sequence
  Description of Artificial Sequence: Synthetic oligonucleotide
guggcuauucgcucgguug

SEQ ID NO: 1318108 - RNA, 19 nt, Artificial Sequence
  Description of Artificial Sequence: Synthetic oligonucleotide
cuuggccuagggaucagag

SEQ ID NO: 1318109 - RNA, 19 nt, Artificial Sequence
  Description of Artificial Sequence: Synthetic oligonucleotide
uagguagugcaagaguucu

SEQ ID NO: 1318110 - RNA, 19 nt, Artificial Sequence
  Description of Artificial Sequence: Synthetic oligonucleotide
ugaucagguaguccaccug

SEQ ID NO: 1318111 - RNA, 19 nt, Artificial Sequence
  Description of Artificial Sequence: Synthetic oligonucleotide
auggugguaccuuguaucu

SEQ ID NO: 1318112 - RNA, 19 nt, Artificial Sequence
  Description of Artificial Sequence: Synthetic oligonucleotide
ugccuuaggcaacauguuc

SEQ ID NO: 1318113 - RNA, 19 nt, Artificial Sequence
  Description of Artificial Sequence: Synthetic oligonucleotide
ugguuuauuaucagccguu

SEQ ID NO: 1318114 - RNA, 19 nt, Artificial Sequence
  Description of Artificial Sequence: Synthetic oligonucleotide
acaucucagagucagcaua

SEQ ID NO: 1318115 - RNA, 19 nt, Artificial Sequence
  Description of Artificial Sequence: Synthetic oligonucleotide
uacuugccauauuaagucu

SEQ ID NO: 1318116 - RNA, 19 nt, Artificial Sequence
  Description of Artificial Sequence: Synthetic oligonucleotide
cucgguugguuuauuauca

SEQ ID NO: 1318117 - RNA, 19 nt, Artificial Sequence
  Description of Artificial Sequence: Synthetic oligonucleotide
cauauuaagucuggcuuug

SEQ ID NO: 1318118 - RNA, 19 nt, Artificial Sequence
  Description of Artificial Sequence: Synthetic oligonucleotide
uugucagggguaugccugg

SEQ ID NO: 1318119 - RNA, 19 nt, Artificial Sequence
  Description of Artificial Sequence: Synthetic oligonucleotide
auauuaagucuggcuuugc

SEQ ID NO: 1318120 - RNA, 19 nt, Artificial Sequence
  Description of Artificial Sequence: Synthetic oligonucleotide
cucacgaucauggaguuga

SEQ ID NO: 1318121 - RNA, 19 nt, Artificial Sequence
  Description of Artificial Sequence: Synthetic oligonucleotide
ggacucagaguacuugugg

SEQ ID NO: 1318122 - RNA, 19 nt, Artificial Sequence
  Description of Artificial Sequence: Synthetic oligonucleotide
aggaguaggcgacacugug

SEQ ID NO: 1318123 - RNA, 19 nt, Artificial Sequence
  Description of Artificial Sequence: Synthetic oligonucleotide
uguugucagggguaugccu

SEQ ID NO: 1318124 - RNA, 19 nt, Artificial Sequence
  Description of Artificial Sequence: Synthetic oligonucleotide
accgccaaaaguaacauuu

SEQ ID NO: 1318125 - RNA, 19 nt, Artificial Sequence
  Description of Artificial Sequence: Synthetic oligonucleotide
aggcaauagaaggccaugg

SEQ ID NO: 1318126 - RNA, 19 nt, Artificial Sequence
  Description of Artificial Sequence: Synthetic oligonucleotide
guacuuggcacuucugcac

SEQ ID NO: 1318127 - RNA, 19 nt, Artificial Sequence
  Description of Artificial Sequence: Synthetic oligonucleotide
uuucacacaucgagagcca

SEQ ID NO: 1318128 - RNA, 19 nt, Artificial Sequence
  Description of Artificial Sequence: Synthetic oligonucleotide
uugguaggagacacuggca

SEQ ID NO: 1318129 - RNA, 19 nt, Artificial Sequence
  Description of Artificial Sequence: Synthetic oligonucleotide
auaugaaaaggcagcucuc

SEQ ID NO: 1318130 - RNA, 19 nt, Artificial Sequence
  Description of Artificial Sequence: Synthetic oligonucleotide
ugaggcaauagaaggccau

SEQ ID NO: 1318131 - RNA, 19 nt, Artificial Sequence
  Description of Artificial Sequence: Synthetic oligonucleotide
ucgaugugacaggaguagg

SEQ ID NO: 1318132 - RNA, 19 nt, Artificial Sequence
  Description of Artificial Sequence: Synthetic oligonucleotide
gcucacuucgcuuuacugc

SEQ ID NO: 1318133 - RNA, 19 nt, Artificial Sequence
  Description of Artificial Sequence: Synthetic oligonucleotide
cuugguuuggucugaggca

SEQ ID NO: 1318134 - RNA, 19 nt, Artificial Sequence
  Description of Artificial Sequence: Synthetic oligonucleotide
gagaggaaaguccagcagu

SEQ ID NO: 1318135 - RNA, 19 nt, Artificial Sequence
  Description of Artificial Sequence: Synthetic oligonucleotide
ugguguucaugguggaugu

SEQ ID NO: 1318136 - RNA, 19 nt, Artificial Sequence
  Description of Artificial Sequence: Synthetic oligonucleotide
cuuguaucuggguaccuga

SEQ ID NO: 1318137 - RNA, 19 nt, Artificial Sequence
  Description of Artificial Sequence: Synthetic oligonucleotide
cauaugugaucguuuagaa

SEQ ID NO: 1318138 - RNA, 19 nt, Artificial Sequence
  Description of Artificial Sequence: Synthetic oligonucleotide
uguuagcccagcagaggca

SEQ ID NO: 1318139 - RNA, 19 nt, Artificial Sequence
  Description of Artificial Sequence: Synthetic oligonucleotide
aggacuagguguuaaucua

SEQ ID NO: 1318140 - RNA, 19 nt, Artificial Sequence
  Description of Artificial Sequence: Synthetic oligonucleotide
gaaggacuagguguuaauc

SEQ ID NO: 1318141 - RNA, 19 nt, Artificial Sequence
  Description of Artificial Sequence: Synthetic oligonucleotide
cuugacaauguagguagug

SEQ ID NO: 1318142 - RNA, 19 nt, Artificial Sequence
  Description of Artificial Sequence: Synthetic oligonucleotide
accuuaggguccccagagc

SEQ ID NO: 1318143 - RNA, 19 nt, Artificial Sequence
  Description of Artificial Sequence: Synthetic oligonucleotide
cuguguguaguccuucuuc

SEQ ID NO: 1318144 - RNA, 19 nt, Artificial Sequence
  Description of Artificial Sequence: Synthetic oligonucleotide
ugcuuuuaauucuggucaa

SEQ ID NO: 1318145 - RNA, 19 nt, Artificial Sequence
  Description of Artificial Sequence: Synthetic oligonucleotide
acguggugugcugagagag

SEQ ID NO: 1318146 - RNA, 19 nt, Artificial Sequence
  Description of Artificial Sequence: Synthetic oligonucleotide
uugaucugauagcaauuua

SEQ ID NO: 1318147 - RNA, 19 nt, Artificial Sequence
  Description of Artificial Sequence: Synthetic oligonucleotide
gguaugcuggcauuuguac

SEQ ID NO: 1318148 - RNA, 19 nt, Artificial Sequence
  Description of Artificial Sequence: Synthetic oligonucleotide
agaacgagcaccgccaaaa

SEQ ID NO: 1318149 - RNA, 19 nt, Artificial Sequence
  Description of Artificial Sequence: Synthetic oligonucleotide
cauugaucagguaguccac

SEQ ID NO: 1318150 - RNA, 19 nt, Artificial Sequence
  Description of Artificial Sequence: Synthetic oligonucleotide
uugccaccguagcuguugg

SEQ ID NO: 1318151 - RNA, 19 nt, Artificial Sequence
  Description of Artificial Sequence: Synthetic oligonucleotide
cugugcuacgcacuggcug

SEQ ID NO: 1318152 - RNA, 19 nt, Artificial Sequence
  Description of Artificial Sequence: Synthetic oligonucleotide
gaacgagcaccgccaaaag

SEQ ID NO: 1318153 - RNA, 19 nt, Artificial Sequence
  Description of Artificial Sequence: Synthetic oligonucleotide
caccuuaggguccccagag

SEQ ID NO: 1318154 - RNA, 19 nt, Artificial Sequence
  Description of Artificial Sequence: Synthetic oligonucleotide
uacugccuuaggcaacaug

SEQ ID NO: 1318155 - RNA, 19 nt, Artificial Sequence
  Description of Artificial Sequence: Synthetic oligonucleotide
uaauucuggucaagauuuc

SEQ ID NO: 1318156 - RNA, 19 nt, Artificial Sequence
  Description of Artificial Sequence: Synthetic oligonucleotide
acuugccauauuaagucug

SEQ ID NO: 1318157 - RNA, 19 nt, Artificial Sequence
  Description of Artificial Sequence: Synthetic oligonucleotide
augugacaggaguaggcga

SEQ ID NO: 1318158 - RNA, 19 nt, Artificial Sequence
  Description of Artificial Sequence: Synthetic oligonucleotide
gucacugcuuuuaauucug

SEQ ID NO: 1318159 - RNA, 19 nt, Artificial Sequence
  Description of Artificial Sequence: Synthetic oligonucleotide
guucaccaaggauggagug

SEQ ID NO: 1318160 - RNA, 19 nt, Artificial Sequence
  Description of Artificial Sequence: Synthetic oligonucleotide
uguggucgaugugacagga

SEQ ID NO: 1318161 - RNA, 19 nt, Artificial Sequence
  Description of Artificial Sequence: Synthetic oligonucleotide
guaucuggguggugguggg

SEQ ID NO: 1318162 - RNA, 19 nt, Artificial Sequence
  Description of Artificial Sequence: Synthetic oligonucleotide
ugguaugcuggcauuugua

SEQ ID NO: 1318163 - RNA, 19 nt, Artificial Sequence
  Description of Artificial Sequence: Synthetic oligonucleotide
acugucuguagugccaucu

SEQ ID NO: 1318164 - RNA, 19 nt, Artificial Sequence
  Description of Artificial Sequence: Synthetic oligonucleotide
acuagguguuaaucuauuu

SEQ ID NO: 1318165 - RNA, 19 nt, Artificial Sequence
  Description of Artificial Sequence: Synthetic oligonucleotide
ugugggcuuggcauccugu

SEQ ID NO: 1318166 - RNA, 19 nt, Artificial Sequence
  Description of Artificial Sequence: Synthetic oligonucleotide
auguucagcccuucaggcu

SEQ ID NO: 1318167 - RNA, 19 nt, Artificial Sequence
  Description of Artificial Sequence: Synthetic oligonucleotide
gugguuugcaccuuagggu

SEQ ID NO: 1318168 - RNA, 19 nt, Artificial Sequence
  Description of Artificial Sequence: Synthetic oligonucleotide
ugguauguggggccacugu

SEQ ID NO: 1318169 - RNA, 19 nt, Artificial Sequence
  Description of Artificial Sequence: Synthetic oligonucleotide
uauucgcucgguugguuua

SEQ ID NO: 1318170 - RNA, 19 nt, Artificial Sequence
  Description of Artificial Sequence: Synthetic oligonucleotide
guaccugagguggguaugg

SEQ ID NO: 1318171 - RNA, 19 nt, Artificial Sequence
  Description of Artificial Sequence: Synthetic oligonucleotide
agggguucaguggugacca

SEQ ID NO: 1318172 - RNA, 19 nt, Artificial Sequence
  Description of Artificial Sequence: Synthetic oligonucleotide
caagaguucuggaggucac

SEQ ID NO: 1318173 - RNA, 19 nt, Artificial Sequence
  Description of Artificial Sequence: Synthetic oligonucleotide
uaccuuguaucuggguacc

SEQ ID NO: 1318174 - RNA, 19 nt, Artificial Sequence
  Description of Artificial Sequence: Synthetic oligonucleotide
aguucaggcuggcugccca

SEQ ID NO: 1318175 - RNA, 19 nt, Artificial Sequence
  Description of Artificial Sequence: Synthetic oligonucleotide
caucuggcauaguucugag

SEQ ID NO: 1318176 - RNA, 19 nt, Artificial Sequence
  Description of Artificial Sequence: Synthetic oligonucleotide
cuguggucgaugugacagg

SEQ ID NO: 1318177 - RNA, 19 nt, Artificial Sequence
  Description of Artificial Sequence: Synthetic oligonucleotide
acgagcaccgccaaaagua

SEQ ID NO: 1318178 - RNA, 19 nt, Artificial Sequence
  Description of Artificial Sequence: Synthetic oligonucleotide
ggaccgcuuguguucaugg

SEQ ID NO: 1318179 - RNA, 19 nt, Artificial Sequence
  Description of Artificial Sequence: Synthetic oligonucleotide
ucggggauguggcugccac

SEQ ID NO: 1318180 - RNA, 19 nt, Artificial Sequence
  Description of Artificial Sequence: Synthetic oligonucleotide
uugaaggacuagguguuaa

SEQ ID NO: 1318181 - RNA, 19 nt, Artificial Sequence
  Description of Artificial Sequence: Synthetic oligonucleotide
ggguaugguguucauggug

SEQ ID NO: 1318182 - RNA, 19 nt, Artificial Sequence
  Description of Artificial Sequence: Synthetic oligonucleotide
gguaccuuguaucugggua

SEQ ID NO: 1318183 - RNA, 19 nt, Artificial Sequence
  Description of Artificial Sequence: Synthetic oligonucleotide
agcaccgccaaaaguaaca

SEQ ID NO: 1318184 - RNA, 19 nt, Artificial Sequence
  Description of Artificial Sequence: Synthetic oligonucleotide
uuggcaggacucagaguac

SEQ ID NO: 1318185 - RNA, 19 nt, Artificial Sequence
  Description of Artificial Sequence: Synthetic oligonucleotide
agugcagacugggaggcca

SEQ ID NO: 1318186 - RNA, 19 nt, Artificial Sequence
  Description of Artificial Sequence: Synthetic oligonucleotide
uacuugugggaccgcuugu

SEQ ID NO: 1318187 - RNA, 19 nt, Artificial Sequence
  Description of Artificial Sequence: Synthetic oligonucleotide
uugccauauuaagucuggc

SEQ ID NO: 1318188 - RNA, 19 nt, Artificial Sequence
  Description of Artificial Sequence: Synthetic oligonucleotide
gcaacagucaugguaugug

SEQ ID NO: 1318189 - RNA, 19 nt, Artificial Sequence
  Description of Artificial Sequence: Synthetic oligonucleotide
cugaccuugggugcugagc

SEQ ID NO: 1318190 - RNA, 19 nt, Artificial Sequence
  Description of Artificial Sequence: Synthetic oligonucleotide
ugguuuguaucuggguggu

SEQ ID NO: 1318191 - RNA, 19 nt, Artificial Sequence
  Description of Artificial Sequence: Synthetic oligonucleotide
uccaacgguccccugugua

SEQ ID NO: 1318192 - RNA, 19 nt, Artificial Sequence
  Description of Artificial Sequence: Synthetic oligonucleotide
gguuuauuaucagccguug

SEQ ID NO: 1318193 - RNA, 19 nt, Artificial Sequence
  Description of Artificial Sequence: Synthetic oligonucleotide
cucacaucucagagucagc

SEQ ID NO: 1318194 - RNA, 19 nt, Artificial Sequence
  Description of Artificial Sequence: Synthetic oligonucleotide
ucugcacguggugugcuga

SEQ ID NO: 1318195 - RNA, 19 nt, Artificial Sequence
  Description of Artificial Sequence: Synthetic oligonucleotide
cauggugccugcagcaaca

SEQ ID NO: 1318196 - RNA, 19 nt, Artificial Sequence
  Description of Artificial Sequence: Synthetic oligonucleotide
aaggcagcucucucacgau

SEQ ID NO: 1318197 - RNA, 19 nt, Artificial Sequence
  Description of Artificial Sequence: Synthetic oligonucleotide
uggguaugguguucauggu

SEQ ID NO: 1318198 - RNA, 19 nt, Artificial Sequence
  Description of Artificial Sequence: Synthetic oligonucleotide
gugguauuugaaggacuag

SEQ ID NO: 1318199 - RNA, 19 nt, Artificial Sequence
  Description of Artificial Sequence: Synthetic oligonucleotide
ccgcuuguguucauggugc

SEQ ID NO: 1318200 - RNA, 19 nt, Artificial Sequence
  Description of Artificial Sequence: Synthetic oligonucleotide
guagguagugcaagaguuc

SEQ ID NO: 1318201 - RNA, 19 nt, Artificial Sequence
  Description of Artificial Sequence: Synthetic oligonucleotide
uguggcuauucgcucgguu

SEQ ID NO: 1318202 - RNA, 19 nt, Artificial Sequence
  Description of Artificial Sequence: Synthetic oligonucleotide
guuugcaccuuaggguccc

SEQ ID NO: 1318203 - RNA, 19 nt, Artificial Sequence
  Description of Artificial Sequence: Synthetic oligonucleotide
ucacuucgcuuuacugccu

SEQ ID NO: 1318204 - RNA, 19 nt, Artificial Sequence
  Description of Artificial Sequence: Synthetic oligonucleotide
cuuggcuguguggucgggg

SEQ ID NO: 1318205 - RNA, 19 nt, Artificial Sequence
  Description of Artificial Sequence: Synthetic oligonucleotide
cuaagcaucuggcauaguu

SEQ ID NO: 1318206 - RNA, 19 nt, Artificial Sequence
  Description of Artificial Sequence: Synthetic oligonucleotide
ucccuguggucgaugugac

SEQ ID NO: 1318207 - RNA, 19 nt, Artificial Sequence
  Description of Artificial Sequence: Synthetic oligonucleotide
uucugcacguggugugcug

SEQ ID NO: 1318208 - RNA, 19 nt, Artificial Sequence
  Description of Artificial Sequence: Synthetic oligonucleotide
auuugcugugcuacgcacu

SEQ ID NO: 1318209 - RNA, 19 nt, Artificial Sequence
  Description of Artificial Sequence: Synthetic oligonucleotide
ugccugguccaacgguccc

SEQ ID NO: 1318210 - RNA, 19 nt, Artificial Sequence
  Description of Artificial Sequence: Synthetic oligonucleotide
guaugcuggcauuuguacu

SEQ ID NO: 1318211 - RNA, 19 nt, Artificial Sequence
  Description of Artificial Sequence: Synthetic oligonucleotide
aacgguccccuguguagau

SEQ ID NO: 1318212 - RNA, 19 nt, Artificial Sequence
  Description of Artificial Sequence: Synthetic oligonucleotide
aucuggcauaguucugaga

SEQ ID NO: 1318213 - RNA, 19 nt, Artificial Sequence
  Description of Artificial Sequence: Synthetic oligonucleotide
guuccuaggcucacuucgc

SEQ ID NO: 1318214 - RNA, 19 nt, Artificial Sequence
  Description of Artificial Sequence: Synthetic oligonucleotide
uggcaggacucagaguacu

SEQ ID NO: 1318215 - RNA, 19 nt, Artificial Sequence
  Description of Artificial Sequence: Synthetic oligonucleotide
gucccuguggucgauguga

SEQ ID NO: 1318216 - RNA, 19 nt, Artificial Sequence
  Description of Artificial Sequence: Synthetic oligonucleotide
ccucacaucucagagucag

SEQ ID NO: 1318217 - RNA, 19 nt, Artificial Sequence
  Description of Artificial Sequence: Synthetic oligonucleotide
uggugguaccuuguaucug

SEQ ID NO: 1318218 - RNA, 19 nt, Artificial Sequence
  Description of Artificial Sequence: Synthetic oligonucleotide
guccccuguguagauaaug

SEQ ID NO: 1318219 - RNA, 19 nt, Artificial Sequence
  Description of Artificial Sequence: Synthetic oligonucleotide
agaguacuugugggaccgc

SEQ ID NO: 1318220 - RNA, 19 nt, Artificial Sequence
  Description of Artificial Sequence: Synthetic oligonucleotide
guaggcgacacuguggcua

SEQ ID NO: 1318221 - RNA, 19 nt, Artificial Sequence
  Description of Artificial Sequence: Synthetic oligonucleotide
uguggucggggauguggcu

SEQ ID NO: 1318222 - RNA, 19 nt, Artificial Sequence
  Description of Artificial Sequence: Synthetic oligonucleotide
ggcucacuucgcuuuacug

SEQ ID NO: 1318223 - RNA, 19 nt, Artificial Sequence
  Description of Artificial Sequence: Synthetic oligonucleotide
acugaccuugggugcugag

SEQ ID NO: 1318224 - RNA, 19 nt, Artificial Sequence
  Description of Artificial Sequence: Synthetic oligonucleotide
uuugaaggacuagguguua

SEQ ID NO: 1318225 - RNA, 19 nt, Artificial Sequence
  Description of Artificial Sequence: Synthetic oligonucleotide
agagcggucacugcuuuua

SEQ ID NO: 1318226 - RNA, 19 nt, Artificial Sequence
  Description of Artificial Sequence: Synthetic oligonucleotide
uaggcgacacuguggcuau

SEQ ID NO: 1318227 - RNA, 19 nt, Artificial Sequence
  Description of Artificial Sequence: Synthetic oligonucleotide
gagguggguaugguguuca

SEQ ID NO: 1318228 - RNA, 19 nt, Artificial Sequence
  Description of Artificial Sequence: Synthetic oligonucleotide
cuacgcacuggcugcucug

SEQ ID NO: 1318229 - RNA, 19 nt, Artificial Sequence
  Description of Artificial Sequence: Synthetic oligonucleotide
cgaugugacaggaguaggc

SEQ ID NO: 1318230 - RNA, 19 nt, Artificial Sequence
  Description of Artificial Sequence: Synthetic oligonucleotide
cugaggcaauagaaggcca

SEQ ID NO: 1318231 - RNA, 19 nt, Artificial Sequence
  Description of Artificial Sequence: Synthetic oligonucleotide
ucucacgaucauggaguug

SEQ ID NO: 1318232 - RNA, 19 nt, Artificial Sequence
  Description of Artificial Sequence: Synthetic oligonucleotide
uccuaggcucacuucgcuu

SEQ ID NO: 1318233 - RNA, 19 nt, Artificial Sequence
  Description of Artificial Sequence: Synthetic oligonucleotide
ccaacgguccccuguguag

SEQ ID NO: 1318234 - RNA, 19 nt, Artificial Sequence
  Description of Artificial Sequence: Synthetic oligonucleotide
gccuuaggcaacauguuca

SEQ ID NO: 1318235 - RNA, 19 nt, Artificial Sequence
  Description of Artificial Sequence: Synthetic oligonucleotide
ccaagaacgagcaccgcca

SEQ ID NO: 1318236 - RNA, 19 nt, Artificial Sequence
  Description of Artificial Sequence: Synthetic oligonucleotide
guggucggggauguggcug

SEQ ID NO: 1318237 - RNA, 19 nt, Artificial Sequence
  Description of Artificial Sequence: Synthetic oligonucleotide
ugccauugaucagguaguc

SEQ ID NO: 1318238 - RNA, 19 nt, Artificial Sequence
  Description of Artificial Sequence: Synthetic oligonucleotide
aggcucacuucgcuuuacu

SEQ ID NO: 1318239 - RNA, 19 nt, Artificial Sequence
  Description of Artificial Sequence: Synthetic oligonucleotide
gccguugaacuuguguucc

SEQ ID NO: 1318240 - RNA, 19 nt, Artificial Sequence
  Description of Artificial Sequence: Synthetic oligonucleotide
aguaggcgacacuguggcu

SEQ ID NO: 1318241 - RNA, 19 nt, Artificial Sequence
  Description of Artificial Sequence: Synthetic oligonucleotide
uccacccgcucuguuguca

SEQ ID NO: 1318242 - RNA, 19 nt, Artificial Sequence
  Description of Artificial Sequence: Synthetic oligonucleotide
ggcauuuguacuuggcacu

SEQ ID NO: 1318243 - RNA, 19 nt, Artificial Sequence
  Description of Artificial Sequence: Synthetic oligonucleotide
agcggucacugcuuuuaau

SEQ ID NO: 1318244 - RNA, 19 nt, Artificial Sequence
  Description of Artificial Sequence: Synthetic oligonucleotide
caccaaggauggagugagg

SEQ ID NO: 1318245 - RNA, 19 nt, Artificial Sequence
  Description of Artificial Sequence: Synthetic oligonucleotide
gcgacacuguggcuauucg

SEQ ID NO: 1318246 - RNA, 19 nt, Artificial Sequence
  Description of Artificial Sequence: Synthetic oligonucleotide
cugcacguggugugcugag

SEQ ID NO: 1318247 - RNA, 19 nt, Artificial Sequence
  Description of Artificial Sequence: Synthetic oligonucleotide
gguucaguggugaccacca

SEQ ID NO: 1318248 - RNA, 19 nt, Artificial Sequence
  Description of Artificial Sequence: Synthetic oligonucleotide
ccauggcauucacugaggc

SEQ ID NO: 1318249 - RNA, 19 nt, Artificial Sequence
  Description of Artificial Sequence: Synthetic oligonucleotide
ugagguggguaugguguuc

SEQ ID NO: 1318250 - RNA, 19 nt, Artificial Sequence
  Description of Artificial Sequence: Synthetic oligonucleotide
augcuggcauuuguacuug

SEQ ID NO: 1318251 - RNA, 19 nt, Artificial Sequence
  Description of Artificial Sequence: Synthetic oligonucleotide
ggugguauuugaaggacua

SEQ ID NO: 1318252 - RNA, 19 nt, Artificial Sequence
  Description of Artificial Sequence: Synthetic oligonucleotide
augguauguggggccacug

SEQ ID NO: 1318253 - RNA, 19 nt, Artificial Sequence
  Description of Artificial Sequence: Synthetic oligonucleotide
ucacgaucauggaguugau

SEQ ID NO: 1318254 - RNA, 19 nt, Artificial Sequence
  Description of Artificial Sequence: Synthetic oligonucleotide
caggacucagaguacuugu

SEQ ID NO: 1318255 - RNA, 19 nt, Artificial Sequence
  Description of Artificial Sequence: Synthetic oligonucleotide
ucgcucgguugguuuauua

SEQ ID NO: 1318256 - RNA, 19 nt, Artificial Sequence
  Description of Artificial Sequence: Synthetic oligonucleotide
ggugguaugcuggcauuug

SEQ ID NO: 1318257 - RNA, 19 nt, Artificial Sequence
  Description of Artificial Sequence: Synthetic oligonucleotide
augaagagggucaccccaa

SEQ ID NO: 1318258 - RNA, 19 nt, Artificial Sequence
  Description of Artificial Sequence: Synthetic oligonucleotide
ucaugguauguggggccac

SEQ ID NO: 1318259 - RNA, 19 nt, Artificial Sequence
  Description of Artificial Sequence: Synthetic oligonucleotide
guaugccugguccaacggu

SEQ ID NO: 1318260 - RNA, 19 nt, Artificial Sequence
  Description of Artificial Sequence: Synthetic oligonucleotide
gagcaccgccaaaaguaac

SEQ ID NO: 1318261 - RNA, 19 nt, Artificial Sequence
  Description of Artificial Sequence: Synthetic oligonucleotide
agguagugcaagaguucug

SEQ ID NO: 1318262 - RNA, 19 nt, Artificial Sequence
  Description of Artificial Sequence: Synthetic oligonucleotide
aucauggaguugaucugau

SEQ ID NO: 1318263 - RNA, 19 nt, Artificial Sequence
  Description of Artificial Sequence: Synthetic oligonucleotide
gguuugcaccuuagggucc

SEQ ID NO: 1318264 - RNA, 19 nt, Artificial Sequence
  Description of Artificial Sequence: Synthetic oligonucleotide
cacgaucauggaguugauc

SEQ ID NO: 1318265 - RNA, 19 nt, Artificial Sequence
  Description of Artificial Sequence: Synthetic oligonucleotide
cagccguugaacuuguguu

SEQ ID NO: 1318266 - RNA, 19 nt, Artificial Sequence
  Description of Artificial Sequence: Synthetic oligonucleotide
ggugcugagcugacaggag

SEQ ID NO: 1318267 - RNA, 19 nt, Artificial Sequence
  Description of Artificial Sequence: Synthetic oligonucleotide
gugcuuuuggcaggacuca

SEQ ID NO: 1318268 - RNA, 19 nt, Artificial Sequence
  Description of Artificial Sequence: Synthetic oligonucleotide
uacugaccuugggugcuga

SEQ ID NO: 1318269 - RNA, 19 nt, Artificial Sequence
  Description of Artificial Sequence: Synthetic oligonucleotide
cagggguaugccuggucca

SEQ ID NO: 1318270 - RNA, 19 nt, Artificial Sequence
  Description of Artificial Sequence: Synthetic oligonucleotide
agcaucuggcauaguucug

SEQ ID NO: 1318271 - RNA, 19 nt, Artificial Sequence
  Description of Artificial Sequence: Synthetic oligonucleotide
accguagcuguugguggug

SEQ ID NO: 1318272 - RNA, 19 nt, Artificial Sequence
  Description of Artificial Sequence: Synthetic oligonucleotide
cugcgaugaagagggucac

SEQ ID NO: 1318273 - RNA, 19 nt, Artificial Sequence
  Description of Artificial Sequence: Synthetic oligonucleotide
cgcuuuacugccuuaggca

SEQ ID NO: 1318274 - RNA, 19 nt, Artificial Sequence
  Description of Artificial Sequence: Synthetic oligonucleotide
gugguaugcuggcauuugu

SEQ ID NO: 1318275 - RNA, 19 nt, Artificial Sequence
  Description of Artificial Sequence: Synthetic oligonucleotide
cgaucauggaguugaucug

SEQ ID NO: 1318276 - RNA, 19 nt, Artificial Sequence
  Description of Artificial Sequence: Synthetic oligonucleotide
uuugcaccuuagggucccc

SEQ ID NO: 1318277 - RNA, 19 nt, Artificial Sequence
  Description of Artificial Sequence: Synthetic oligonucleotide
guguguugucaucucugcu

SEQ ID NO: 1318278 - RNA, 19 nt, Artificial Sequence
  Description of Artificial Sequence: Synthetic oligonucleotide
ccacuguugccaccguagc

SEQ ID NO: 1318279 - RNA, 19 nt, Artificial Sequence
  Description of Artificial Sequence: Synthetic oligonucleotide
auucgcucgguugguuuau

SEQ ID NO: 1318280 - RNA, 19 nt, Artificial Sequence
  Description of Artificial Sequence: Synthetic oligonucleotide
cacguggugugcugagaga

SEQ ID NO: 1318281 - RNA, 19 nt, Artificial Sequence
  Description of Artificial Sequence: Synthetic oligonucleotide
gaguacuugugggaccgcu

SEQ ID NO: 1318282 - RNA, 19 nt, Artificial Sequence
  Description of Artificial Sequence: Synthetic oligonucleotide
caacgguccccuguguaga

SEQ ID NO: 1318283 - RNA, 19 nt, Artificial Sequence
  Description of Artificial Sequence: Synthetic oligonucleotide
ugucagggguaugccuggu

SEQ ID NO: 1318284 - RNA, 19 nt, Artificial Sequence
  Description of Artificial Sequence: Synthetic oligonucleotide
gagcggucacugcuuuuaa

SEQ ID NO: 1318285 - RNA, 19 nt, Artificial Sequence
  Description of Artificial Sequence: Synthetic oligonucleotide
ggcacucccaggccauggc

SEQ ID NO: 1318286 - RNA, 19 nt, Artificial Sequence
  Description of Artificial Sequence: Synthetic oligonucleotide
ucuaagcaucuggcauagu

SEQ ID NO: 1318287 - RNA, 19 nt, Artificial Sequence
  Description of Artificial Sequence: Synthetic oligonucleotide
guacugaccuugggugcug

SEQ ID NO: 1318288 - RNA, 19 nt, Artificial Sequence
  Description of Artificial Sequence: Synthetic oligonucleotide
cagcucucucacgaucaug

SEQ ID NO: 1318289 - RNA, 19 nt, Artificial Sequence
  Description of Artificial Sequence: Synthetic oligonucleotide
gguaggagacacuggcacu

SEQ ID NO: 1318290 - RNA, 19 nt, Artificial Sequence
  Description of Artificial Sequence: Synthetic oligonucleotide
ugguuuccacccgcucugu

SEQ ID NO: 1318291 - RNA, 19 nt, Artificial Sequence
  Description of Artificial Sequence: Synthetic oligonucleotide
gugacaggaguaggcgaca

SEQ ID NO: 1318292 - RNA, 19 nt, Artificial Sequence
  Description of Artificial Sequence: Synthetic oligonucleotide
gacuagguguuaaucuauu

SEQ ID NO: 1318293 - RNA, 19 nt, Artificial Sequence
  Description of Artificial Sequence: Synthetic oligonucleotide
gguggugguaugcuggcau

SEQ ID NO: 1318294 - RNA, 19 nt, Artificial Sequence
  Description of Artificial Sequence: Synthetic oligonucleotide
cuugugggaccgcuugugu

SEQ ID NO: 1318295 - RNA, 19 nt, Artificial Sequence
  Description of Artificial Sequence: Synthetic oligonucleotide
cuauucgcucgguugguuu

SEQ ID NO: 1318296 - RNA, 19 nt, Artificial Sequence
  Description of Artificial Sequence: Synthetic oligonucleotide
gugggaccgcuuguguuca

SEQ ID NO: 1318297 - RNA, 19 nt, Artificial Sequence
  Description of Artificial Sequence: Synthetic oligonucleotide
gcggucacugcuuuuaauu

SEQ ID NO: 1318298 - RNA, 19 nt, Artificial Sequence
  Description of Artificial Sequence: Synthetic oligonucleotide
cacuguugccaccguagcu

SEQ ID NO: 1318299 - RNA, 19 nt, Artificial Sequence
  Description of Artificial Sequence: Synthetic oligonucleotide
auccuguacuugccauauu

SEQ ID NO: 1318300 - RNA, 19 nt, Artificial Sequence
  Description of Artificial Sequence: Synthetic oligonucleotide
ggcgacacuguggcuauuc

SEQ ID NO: 1318301 - RNA, 19 nt, Artificial Sequence
  Description of Artificial Sequence: Synthetic oligonucleotide
ggguagaguuucccagaga

SEQ ID NO: 1318302 - RNA, 19 nt, Artificial Sequence
  Description of Artificial Sequence: Synthetic oligonucleotide
cagugcagacugggaggcc

SEQ ID NO: 1318303 - RNA, 19 nt, Artificial Sequence
  Description of Artificial Sequence: Synthetic oligonucleotide
gggucaccccaagaacgag

SEQ ID NO: 1318304 - RNA, 19 nt, Artificial Sequence
  Description of Artificial Sequence: Synthetic oligonucleotide
ggucgaugugacaggagua

SEQ ID NO: 1318305 - RNA, 19 nt, Artificial Sequence
  Description of Artificial Sequence: Synthetic oligonucleotide
ggucaagauuucacacauc

SEQ ID NO: 1318306 - RNA, 19 nt, Artificial Sequence
  Description of Artificial Sequence: Synthetic oligonucleotide
caggaguaggcgacacugu

SEQ ID NO: 1318307 - RNA, 19 nt, Artificial Sequence
  Description of Artificial Sequence: Synthetic oligonucleotide
ugcuacgcacuggcugcuc

SEQ ID NO: 1318308 - RNA, 19 nt, Artificial Sequence
  Description of Artificial Sequence: Synthetic oligonucleotide
caccguagcuguugguggu

SEQ ID NO: 1318309 - RNA, 19 nt, Artificial Sequence
  Description of Artificial Sequence: Synthetic oligonucleotide
gguuuguaucuggguggug

SEQ ID NO: 1318310 - RNA, 19 nt, Artificial Sequence
  Description of Artificial Sequence: Synthetic oligonucleotide
gggaccgcuuguguucaug

SEQ ID NO: 1318311 - RNA, 19 nt, Artificial Sequence
  Description of Artificial Sequence: Synthetic oligonucleotide
cauaggcuugcagggcaaa

SEQ ID NO: 1318312 - RNA, 19 nt, Artificial Sequence
  Description of Artificial Sequence: Synthetic oligonucleotide
uucgcucgguugguuuauu

SEQ ID NO: 1318313 - RNA, 19 nt, Artificial Sequence
  Description of Artificial Sequence: Synthetic oligonucleotide
ggcauccuguacuugccau

SEQ ID NO: 1318314 - RNA, 19 nt, Artificial Sequence
  Description of Artificial Sequence: Synthetic oligonucleotide
ggacuagguguuaaucuau

SEQ ID NO: 1318315 - RNA, 19 nt, Artificial Sequence
  Description of Artificial Sequence: Synthetic oligonucleotide
gguuuggucugaggcaaua

SEQ ID NO: 1318316 - RNA, 19 nt, Artificial Sequence
  Description of Artificial Sequence: Synthetic oligonucleotide
cgcuuguguucauggugcc

SEQ ID NO: 1318317 - RNA, 19 nt, Artificial Sequence
  Description of Artificial Sequence: Synthetic oligonucleotide
cucucacgaucauggaguu

SEQ ID NO: 1318318 - RNA, 19 nt, Artificial Sequence
  Description of Artificial Sequence: Synthetic oligonucleotide
ggccuagggaucagaggca

SEQ ID NO: 1318319 - RNA, 19 nt, Artificial Sequence
  Description of Artificial Sequence: Synthetic oligonucleotide
aucagccguugaacuugug

SEQ ID NO: 1318320 - RNA, 19 nt, Artificial Sequence
  Description of Artificial Sequence: Synthetic oligonucleotide
ccuugggugcugagcugac

SEQ ID NO: 1318321 - RNA, 19 nt, Artificial Sequence
  Description of Artificial Sequence: Synthetic oligonucleotide
ugggaccgcuuguguucau

SEQ ID NO: 1318322 - RNA, 19 nt, Artificial Sequence
  Description of Artificial Sequence: Synthetic oligonucleotide
gcuacgcacuggcugcucu

SEQ ID NO: 1318323 - RNA, 19 nt, Artificial Sequence
  Description of Artificial Sequence: Synthetic oligonucleotide
gggguaugccugguccaac

SEQ ID NO: 1318324 - RNA, 19 nt, Artificial Sequence
  Description of Artificial Sequence: Synthetic oligonucleotide
ccuaggcucacuucgcuuu

SEQ ID NO: 1318325 - RNA, 19 nt, Artificial Sequence
  Description of Artificial Sequence: Synthetic oligonucleotide
caccugaauggugguaccu

SEQ ID NO: 1318326 - RNA, 19 nt, Artificial Sequence
  Description of Artificial Sequence: Synthetic oligonucleotide
gagagcggucacugcuuuu

SEQ ID NO: 1318327 - RNA, 19 nt, Artificial Sequence
  Description of Artificial Sequence: Synthetic oligonucleotide
acgguccccuguguagaua

SEQ ID NO: 1318328 - RNA, 19 nt, Artificial Sequence
  Description of Artificial Sequence: Synthetic oligonucleotide
guucagcccuucaggcugu

SEQ ID NO: 1318329 - RNA, 19 nt, Artificial Sequence
  Description of Artificial Sequence: Synthetic oligonucleotide
gguagaguucaggcuggcu

SEQ ID NO: 1318330 - RNA, 19 nt, Artificial Sequence
  Description of Artificial Sequence: Synthetic oligonucleotide
gucggggauguggcugcca

SEQ ID NO: 1318331 - RNA, 19 nt, Artificial Sequence
  Description of Artificial Sequence: Synthetic oligonucleotide
guccaacgguccccugugu

SEQ ID NO: 1318332 - RNA, 19 nt, Artificial Sequence
  Description of Artificial Sequence: Synthetic oligonucleotide
gggguucaguggugaccac

SEQ ID NO: 1318333 - RNA, 19 nt, Artificial Sequence
  Description of Artificial Sequence: Synthetic oligonucleotide
caccgccaaaaguaacauu

SEQ ID NO: 1318334 - RNA, 19 nt, Artificial Sequence
  Description of Artificial Sequence: Synthetic oligonucleotide
ggugugcuuuuggcaggac

SEQ ID NO: 1318335 - RNA, 19 nt, Artificial Sequence
  Description of Artificial Sequence: Synthetic oligonucleotide
cgguccccuguguagauaa

SEQ ID NO: 1318336 - RNA, 19 nt, Artificial Sequence
  Description of Artificial Sequence: Synthetic oligonucleotide
ggagagcggucacugcuuu

SEQ ID NO: 1318337 - RNA, 19 nt, Artificial Sequence
  Description of Artificial Sequence: Synthetic oligonucleotide
gcuuguguucauggugccu

SEQ ID NO: 1318338 - RNA, 19 nt, Artificial Sequence
  Description of Artificial Sequence: Synthetic oligonucleotide
gcaccgccaaaaguaacau

SEQ ID NO: 1318339 - RNA, 19 nt, Artificial Sequence
  Description of Artificial Sequence: Synthetic oligonucleotide
ccucgacccuggccacucc

SEQ ID NO: 1318340 - RNA, 19 nt, Artificial Sequence
  Description of Artificial Sequence: Synthetic oligonucleotide
cccucacaucucagaguca

SEQ ID NO: 1318341 - RNA, 19 nt, Artificial Sequence
  Description of Artificial Sequence: Synthetic oligonucleotide
ggcuauucgcucgguuggu

SEQ ID NO: 1318342 - RNA, 19 nt, Artificial Sequence
  Description of Artificial Sequence: Synthetic oligonucleotide
ccccaagaacgagcaccgc

SEQ ID NO: 1318343 - RNA, 19 nt, Artificial Sequence
  Description of Artificial Sequence: Synthetic oligonucleotide
cccucgacccuggccacuc

SEQ ID NO: 1318344 - RNA, 19 nt, Artificial Sequence
  Description of Artificial Sequence: Synthetic oligonucleotide
gguuuccacccgcucuguu

SEQ ID NO: 1318345 - RNA, 19 nt, Artificial Sequence
  Description of Artificial Sequence: Synthetic oligonucleotide
ccgccaaaaguaacauuuu

SEQ ID NO: 1318346 - RNA, 19 nt, Artificial Sequence
  Description of Artificial Sequence: Synthetic oligonucleotide
cgcucgguugguuuauuau

SEQ ID NO: 1318347 - RNA, 19 nt, Artificial Sequence
  Description of Artificial Sequence: Synthetic oligonucleotide
gcugugcuacgcacuggcu

SEQ ID NO: 1318348 - RNA, 19 nt, Artificial Sequence
  Description of Artificial Sequence: Synthetic oligonucleotide
gcuauucgcucgguugguu

SEQ ID NO: 1318349 - RNA, 19 nt, Artificial Sequence
  Description of Artificial Sequence: Synthetic oligonucleotide
ccguugaacuuguguuccu

SEQ ID NO: 1318350 - RNA, 19 nt, Artificial Sequence
  Description of Artificial Sequence: Synthetic oligonucleotide
ccgcucuguugucaggggu

SEQ ID NO: 1318351 - RNA, 19 nt, Artificial Sequence
  Description of Artificial Sequence: Synthetic oligonucleotide
ccuggccacuccugcauau

SEQ ID NO: 1318352 - RNA, 19 nt, Artificial Sequence
  Description of Artificial Sequence: Synthetic oligonucleotide
ggcaggacucagaguacuu

SEQ ID NO: 1318353 - RNA, 19 nt, Artificial Sequence
  Description of Artificial Sequence: Synthetic oligonucleotide
aggcgacacuguggcuauu

SEQ ID NO: 1318354 - RNA, 19 nt, Artificial Sequence
  Description of Artificial Sequence: Synthetic oligonucleotide
gguccccuguguagauaau

SEQ ID NO: 1318355 - RNA, 19 nt, Artificial Sequence
  Description of Artificial Sequence: Synthetic oligonucleotide
ggacugcgaugaagagggu

SEQ ID NO: 1318356 - RNA, 19 nt, Artificial Sequence
  Description of Artificial Sequence: Synthetic oligonucleotide
ccccucgacccuggccacu

SEQ ID NO: 1318357 - RNA, 19 nt, Artificial Sequence
  Description of Artificial Sequence: Synthetic oligonucleotide
aaaggaguggcucugaccc

SEQ ID NO: 1318358 - RNA, 19 nt, Artificial Sequence
  Description of Artificial Sequence: Synthetic oligonucleotide
ugucaauucacauaggcag

SEQ ID NO: 1318359 - RNA, 19 nt, Artificial Sequence
  Description of Artificial Sequence: Synthetic oligonucleotide
ugucugucaauucacauag

SEQ ID NO: 1318360 - RNA, 19 nt, Artificial Sequence
  Description of Artificial Sequence: Synthetic oligonucleotide
acuugugcaaauucaauac

SEQ ID NO: 1318361 - RNA, 19 nt, Artificial Sequence
  Description of Artificial Sequence: Synthetic oligonucleotide
agucacaugagucaccuac

SEQ ID NO: 1318362 - RNA, 19 nt, Artificial Sequence
  Description of Artificial Sequence: Synthetic oligonucleotide
agauccauggcacucagcg

SEQ ID NO: 1318363 - RNA, 19 nt, Artificial Sequence
  Description of Artificial Sequence: Synthetic oligonucleotide
aaauucaauaccaggacag

SEQ ID NO: 1318364 - RNA, 19 nt, Artificial Sequence
  Description of Artificial Sequence: Synthetic oligonucleotide
aguucuaaggcgcccagcc

SEQ ID NO: 1318365 - RNA, 19 nt, Artificial Sequence
  Description of Artificial Sequence: Synthetic oligonucleotide
ucugucaauucacauaggc

SEQ ID NO: 1318366 - RNA, 19 nt, Artificial Sequence
  Description of Artificial Sequence: Synthetic oligonucleotide
ucaauaccaggacagaggc

SEQ ID NO: 1318367 - RNA, 19 nt, Artificial Sequence
  Description of Artificial Sequence: Synthetic oligonucleotide
aaaccuauccaucacugca

SEQ ID NO: 1318368 - RNA, 19 nt, Artificial Sequence
  Description of Artificial Sequence: Synthetic oligonucleotide
acaugaguaaacuucagga

SEQ ID NO: 1318369 - RNA, 19 nt, Artificial Sequence
  Description of Artificial Sequence: Synthetic oligonucleotide
uggucuaagaccuccaagc

SEQ ID NO: 1318370 - RNA, 19 nt, Artificial Sequence
  Description of Artificial Sequence: Synthetic oligonucleotide
aaguccacacaucuucugg

SEQ ID NO: 1318371 - RNA, 19 nt, Artificial Sequence
  Description of Artificial Sequence: Synthetic oligonucleotide
uucguugugaucugaaggc

SEQ ID NO: 1318372 - RNA, 19 nt, Artificial Sequence
  Description of Artificial Sequence: Synthetic oligonucleotide
aacagcguaucguccaugg

SEQ ID NO: 1318373 - RNA, 19 nt, Artificial Sequence
  Description of Artificial Sequence: Synthetic oligonucleotide
ugugcuuucuacuuuggca

SEQ ID NO: 1318374 - RNA, 19 nt, Artificial Sequence
  Description of Artificial Sequence: Synthetic oligonucleotide
ugaguaaacuucaggagac

SEQ ID NO: 1318375 - RNA, 19 nt, Artificial Sequence
  Description of Artificial Sequence: Synthetic oligonucleotide
aacuucaacuggaacagcg

SEQ ID NO: 1318376 - RNA, 19 nt, Artificial Sequence
  Description of Artificial Sequence: Synthetic oligonucleotide
aagggugaggaucucuagg

SEQ ID NO: 1318377 - RNA, 19 nt, Artificial Sequence
  Description of Artificial Sequence: Synthetic oligonucleotide
augaguaaacuucaggaga

SEQ ID NO: 1318378 - RNA, 19 nt, Artificial Sequence
  Description of Artificial Sequence: Synthetic oligonucleotide
ucaaaccuauccaucacug

SEQ ID NO: 1318379 - RNA, 19 nt, Artificial Sequence
  Description of Artificial Sequence: Synthetic oligonucleotide
agaaggcugggacaaacac

SEQ ID NO: 1318380 - RNA, 19 nt, Artificial Sequence
  Description of Artificial Sequence: Synthetic oligonucleotide
cuaaggcucaguucuaagg

SEQ ID NO: 1318381 - RNA, 19 nt, Artificial Sequence
  Description of Artificial Sequence: Synthetic oligonucleotide
ugugcguucguugugaucu

SEQ ID NO: 1318382 - RNA, 19 nt, Artificial Sequence
  Description of Artificial Sequence: Synthetic oligonucleotide
aaggggacgagaucuuacg

SEQ ID NO: 1318383 - RNA, 19 nt, Artificial Sequence
  Description of Artificial Sequence: Synthetic oligonucleotide
acuggaacagcguaucguc

SEQ ID NO: 1318384 - RNA, 19 nt, Artificial Sequence
  Description of Artificial Sequence: Synthetic oligonucleotide
caugaguaaacuucaggag

SEQ ID NO: 1318385 - RNA, 19 nt, Artificial Sequence
  Description of Artificial Sequence: Synthetic oligonucleotide
gaacaagggagacagcacc

SEQ ID NO: 1318386 - RNA, 19 nt, Artificial Sequence
  Description of Artificial Sequence: Synthetic oligonucleotide
ucguccauggccaaucgag

SEQ ID NO: 1318387 - RNA, 19 nt, Artificial Sequence
  Description of Artificial Sequence: Synthetic oligonucleotide
agaagcgcccucuggaagc

SEQ ID NO: 1318388 - RNA, 19 nt, Artificial Sequence
  Description of Artificial Sequence: Synthetic oligonucleotide
acagaauccuccauuaccg

SEQ ID NO: 1318389 - RNA, 19 nt, Artificial Sequence
  Description of Artificial Sequence: Synthetic oligonucleotide
uuuucagcauacacacggg

SEQ ID NO: 1318390 - RNA, 19 nt, Artificial Sequence
  Description of Artificial Sequence: Synthetic oligonucleotide
auaggcagaggacaaaaca

SEQ ID NO: 1318391 - RNA, 19 nt, Artificial Sequence
  Description of Artificial Sequence: Synthetic oligonucleotide
aguagugcaccccucgggg

SEQ ID NO: 1318392 - RNA, 19 nt, Artificial Sequence
  Description of Artificial Sequence: Synthetic oligonucleotide
gucaccuacacacuugugc

SEQ ID NO: 1318393 - RNA, 19 nt, Artificial Sequence
  Description of Artificial Sequence: Synthetic oligonucleotide
uucuaaggcgcccagccug

SEQ ID NO: 1318394 - RNA, 19 nt, Artificial Sequence
  Description of Artificial Sequence: Synthetic oligonucleotide
uaaccaucuugcaaaggcc

SEQ ID NO: 1318395 - RNA, 19 nt, Artificial Sequence
  Description of Artificial Sequence: Synthetic oligonucleotide
aaguugagcgcagagugag

SEQ ID NO: 1318396 - RNA, 19 nt, Artificial Sequence
  Description of Artificial Sequence: Synthetic oligonucleotide
augcuaauuucucagggca

SEQ ID NO: 1318397 - RNA, 19 nt, Artificial Sequence
  Description of Artificial Sequence: Synthetic oligonucleotide
uccauuaccgaugugugca

SEQ ID NO: 1318398 - RNA, 19 nt, Artificial Sequence
  Description of Artificial Sequence: Synthetic oligonucleotide
uucagcauacacacgggca

SEQ ID NO: 1318399 - RNA, 19 nt, Artificial Sequence
  Description of Artificial Sequence: Synthetic oligonucleotide
uuucagcauacacacgggc

SEQ ID NO: 1318400 - RNA, 19 nt, Artificial Sequence
  Description of Artificial Sequence: Synthetic oligonucleotide
gugcaaauucaauaccagg

SEQ ID NO: 1318401 - RNA, 19 nt, Artificial Sequence
  Description of Artificial Sequence: Synthetic oligonucleotide
cucaacccugggaagaugg

SEQ ID NO: 1318402 - RNA, 19 nt, Artificial Sequence
  Description of Artificial Sequence: Synthetic oligonucleotide
aaucgaguagugcaccccu

SEQ ID NO: 1318403 - RNA, 19 nt, Artificial Sequence
  Description of Artificial Sequence: Synthetic oligonucleotide
uggccaaucgaguagugca

SEQ ID NO: 1318404 - RNA, 19 nt, Artificial Sequence
  Description of Artificial Sequence: Synthetic oligonucleotide
acagugguagccaagagcu

SEQ ID NO: 1318405 - RNA, 19 nt, Artificial Sequence
  Description of Artificial Sequence: Synthetic oligonucleotide
aaacacaccccaucugcug

SEQ ID NO: 1318406 - RNA, 19 nt, Artificial Sequence
  Description of Artificial Sequence: Synthetic oligonucleotide
accuucauucuucuugcgg

SEQ ID NO: 1318407 - RNA, 19 nt, Artificial Sequence
  Description of Artificial Sequence: Synthetic oligonucleotide
agagcucacagaauccucc

SEQ ID NO: 1318408 - RNA, 19 nt, Artificial Sequence
  Description of Artificial Sequence: Synthetic oligonucleotide
caugcuaauuucucagggc

SEQ ID NO: 1318409 - RNA, 19 nt, Artificial Sequence
  Description of Artificial Sequence: Synthetic oligonucleotide
ucaauucacauaggcagag

SEQ ID NO: 1318410 - RNA, 19 nt, Artificial Sequence
  Description of Artificial Sequence: Synthetic oligonucleotide
ucgaguagugcaccccucg

SEQ ID NO: 1318411 - RNA, 19 nt, Artificial Sequence
  Description of Artificial Sequence: Synthetic oligonucleotide
acugcauccacacgggaug

SEQ ID NO: 1318412 - RNA, 19 nt, Artificial Sequence
  Description of Artificial Sequence: Synthetic oligonucleotide
cacaaaaguccacaggaac

SEQ ID NO: 1318413 - RNA, 19 nt, Artificial Sequence
  Description of Artificial Sequence: Synthetic oligonucleotide
ugcuaauuucucagggcag

SEQ ID NO: 1318414 - RNA, 19 nt, Artificial Sequence
  Description of Artificial Sequence: Synthetic oligonucleotide
uaugagggguuggagaaag

SEQ ID NO: 1318415 - RNA, 19 nt, Artificial Sequence
  Description of Artificial Sequence: Synthetic oligonucleotide
ggcuacugcauccacacgg

SEQ ID NO: 1318416 - RNA, 19 nt, Artificial Sequence
  Description of Artificial Sequence: Synthetic oligonucleotide
aaucaccaggaguuuuaag

SEQ ID NO: 1318417 - RNA, 19 nt, Artificial Sequence
  Description of Artificial Sequence: Synthetic oligonucleotide
acaaaacagagcuugccau

SEQ ID NO: 1318418 - RNA, 19 nt, Artificial Sequence
  Description of Artificial Sequence: Synthetic oligonucleotide
cagcguaucguccauggcc

SEQ ID NO: 1318419 - RNA, 19 nt, Artificial Sequence
  Description of Artificial Sequence: Synthetic oligonucleotide
cuguuugcaccuuggaggc

SEQ ID NO: 1318420 - RNA, 19 nt, Artificial Sequence
  Description of Artificial Sequence: Synthetic oligonucleotide
uccuccauuaccgaugugu

SEQ ID NO: 1318421 - RNA, 19 nt, Artificial Sequence
  Description of Artificial Sequence: Synthetic oligonucleotide
aacacaccccaucugcugu

SEQ ID NO: 1318422 - RNA, 19 nt, Artificial Sequence
  Description of Artificial Sequence: Synthetic oligonucleotide
uuuacaccuucauucuucu

SEQ ID NO: 1318423 - RNA, 19 nt, Artificial Sequence
  Description of Artificial Sequence: Synthetic oligonucleotide
cagcgcuuuguccagagcc

SEQ ID NO: 1318424 - RNA, 19 nt, Artificial Sequence
  Description of Artificial Sequence: Synthetic oligonucleotide
uucgcuaguuucucuagcu

SEQ ID NO: 1318425 - RNA, 19 nt, Artificial Sequence
  Description of Artificial Sequence: Synthetic oligonucleotide
agaacaugaguaaacuuca

SEQ ID NO: 1318426 - RNA, 19 nt, Artificial Sequence
  Description of Artificial Sequence: Synthetic oligonucleotide
aagaccuuccagaggcagc

SEQ ID NO: 1318427 - RNA, 19 nt, Artificial Sequence
  Description of Artificial Sequence: Synthetic oligonucleotide
uagugcaccccucggggcg

SEQ ID NO: 1318428 - RNA, 19 nt, Artificial Sequence
  Description of Artificial Sequence: Synthetic oligonucleotide
gcaaucuguacaaugaggc

SEQ ID NO: 1318429 - RNA, 19 nt, Artificial Sequence
  Description of Artificial Sequence: Synthetic oligonucleotide
gacgagaucuuacggacca

SEQ ID NO: 1318430 - RNA, 19 nt, Artificial Sequence
  Description of Artificial Sequence: Synthetic oligonucleotide
aauucaauaccaggacaga

SEQ ID NO: 1318431 - RNA, 19 nt, Artificial Sequence
  Description of Artificial Sequence: Synthetic oligonucleotide
gaauccuccauuaccgaug

SEQ ID NO: 1318432 - RNA, 19 nt, Artificial Sequence
  Description of Artificial Sequence: Synthetic oligonucleotide
ucuucgcuaguuucucuag

SEQ ID NO: 1318433 - RNA, 19 nt, Artificial Sequence
  Description of Artificial Sequence: Synthetic oligonucleotide
uggaacagcguaucgucca

SEQ ID NO: 1318434 - RNA, 19 nt, Artificial Sequence
  Description of Artificial Sequence: Synthetic oligonucleotide
auucacauaggcagaggac

SEQ ID NO: 1318435 - RNA, 19 nt, Artificial Sequence
  Description of Artificial Sequence: Synthetic oligonucleotide
aaccuauccaucacugcag

SEQ ID NO: 1318436 - RNA, 19 nt, Artificial Sequence
  Description of Artificial Sequence: Synthetic oligonucleotide
uucaacuggaacagcguau

SEQ ID NO: 1318437 - RNA, 19 nt, Artificial Sequence
  Description of Artificial Sequence: Synthetic oligonucleotide
accuacucagggcugucac

SEQ ID NO: 1318438 - RNA, 19 nt, Artificial Sequence
  Description of Artificial Sequence: Synthetic oligonucleotide
uaucguccauggccaaucg

SEQ ID NO: 1318439 - RNA, 19 nt, Artificial Sequence
  Description of Artificial Sequence: Synthetic oligonucleotide
ugaggaucucuagggaggg

SEQ ID NO: 1318440 - RNA, 19 nt, Artificial Sequence
  Description of Artificial Sequence: Synthetic oligonucleotide
caaauucaauaccaggaca

SEQ ID NO: 1318441 - RNA, 19 nt, Artificial Sequence
  Description of Artificial Sequence: Synthetic oligonucleotide
gagaguaaccaucuugcaa

SEQ ID NO: 1318442 - RNA, 19 nt, Artificial Sequence
  Description of Artificial Sequence: Synthetic oligonucleotide
acaccuggacuugagauug

SEQ ID NO: 1318443 - RNA, 19 nt, Artificial Sequence
  Description of Artificial Sequence: Synthetic oligonucleotide
caaaccuauccaucacugc

SEQ ID NO: 1318444 - RNA, 19 nt, Artificial Sequence
  Description of Artificial Sequence: Synthetic oligonucleotide
aggggacgagaucuuacgg

SEQ ID NO: 1318445 - RNA, 19 nt, Artificial Sequence
  Description of Artificial Sequence: Synthetic oligonucleotide
gaagggugaggaucucuag

SEQ ID NO: 1318446 - RNA, 19 nt, Artificial Sequence
  Description of Artificial Sequence: Synthetic oligonucleotide
auaaaacagcagcccauca

SEQ ID NO: 1318447 - RNA, 19 nt, Artificial Sequence
  Description of Artificial Sequence: Synthetic oligonucleotide
ggugaggaucucuagggag

SEQ ID NO: 1318448 - RNA, 19 nt, Artificial Sequence
  Description of Artificial Sequence: Synthetic oligonucleotide
agcccaagcagcccgaaga

SEQ ID NO: 1318449 - RNA, 19 nt, Artificial Sequence
  Description of Artificial Sequence: Synthetic oligonucleotide
uacacacgggcacauucca

SEQ ID NO: 1318450 - RNA, 19 nt, Artificial Sequence
  Description of Artificial Sequence: Synthetic oligonucleotide
auggccaaucgaguagugc

SEQ ID NO: 1318451 - RNA, 19 nt, Artificial Sequence
  Description of Artificial Sequence: Synthetic oligonucleotide
acgggaugccauccggagc

SEQ ID NO: 1318452 - RNA, 19 nt, Artificial Sequence
  Description of Artificial Sequence: Synthetic oligonucleotide
uuucgcccacggcagaagc

SEQ ID NO: 1318453 - RNA, 19 nt, Artificial Sequence
  Description of Artificial Sequence: Synthetic oligonucleotide
ucaguucuaaggcgcccag

SEQ ID NO: 1318454 - RNA, 19 nt, Artificial Sequence
  Description of Artificial Sequence: Synthetic oligonucleotide
acagcguaucguccauggc

SEQ ID NO: 1318455 - RNA, 19 nt, Artificial Sequence
  Description of Artificial Sequence: Synthetic oligonucleotide
guugagcgcagagugaggc

SEQ ID NO: 1318456 - RNA, 19 nt, Artificial Sequence
  Description of Artificial Sequence: Synthetic oligonucleotide
gguagacucagccagcuga

SEQ ID NO: 1318457 - RNA, 19 nt, Artificial Sequence
  Description of Artificial Sequence: Synthetic oligonucleotide
agcugcuuugcugugaacu

SEQ ID NO: 1318458 - RNA, 19 nt, Artificial Sequence
  Description of Artificial Sequence: Synthetic oligonucleotide
gaagaccuuccagaggcag

SEQ ID NO: 1318459 - RNA, 19 nt, Artificial Sequence
  Description of Artificial Sequence: Synthetic oligonucleotide
gaccgcucagcccaagcag

SEQ ID NO: 1318460 - RNA, 19 nt, Artificial Sequence
  Description of Artificial Sequence: Synthetic oligonucleotide
agcccgaagaccuuccaga

SEQ ID NO: 1318461 - RNA, 19 nt, Artificial Sequence
  Description of Artificial Sequence: Synthetic oligonucleotide
cugucaauucacauaggca

SEQ ID NO: 1318462 - RNA, 19 nt, Artificial Sequence
  Description of Artificial Sequence: Synthetic oligonucleotide
uacugcauccacacgggau

SEQ ID NO: 1318463 - RNA, 19 nt, Artificial Sequence
  Description of Artificial Sequence: Synthetic oligonucleotide
agagcucaacccugggaag

SEQ ID NO: 1318464 - RNA, 19 nt, Artificial Sequence
  Description of Artificial Sequence: Synthetic oligonucleotide
ucacagaauccuccauuac

SEQ ID NO: 1318465 - RNA, 19 nt, Artificial Sequence
  Description of Artificial Sequence: Synthetic oligonucleotide
aucucuagggagggaacac

SEQ ID NO: 1318466 - RNA, 19 nt, Artificial Sequence
  Description of Artificial Sequence: Synthetic oligonucleotide
caaccuaaggcucaguucu

SEQ ID NO: 1318467 - RNA, 19 nt, Artificial Sequence
  Description of Artificial Sequence: Synthetic oligonucleotide
cauaggcagaggacaaaac

SEQ ID NO: 1318468 - RNA, 19 nt, Artificial Sequence
  Description of Artificial Sequence: Synthetic oligonucleotide
ucuaaggcgcccagccuga

SEQ ID NO: 1318469 - RNA, 19 nt, Artificial Sequence
  Description of Artificial Sequence: Synthetic oligonucleotide
cuggaacagcguaucgucc

SEQ ID NO: 1318470 - RNA, 19 nt, Artificial Sequence
  Description of Artificial Sequence: Synthetic oligonucleotide
cuggucuaagaccuccaag

SEQ ID NO: 1318471 - RNA, 19 nt, Artificial Sequence
  Description of Artificial Sequence: Synthetic oligonucleotide
cuccaguacaucacagaac

SEQ ID NO: 1318472 - RNA, 19 nt, Artificial Sequence
  Description of Artificial Sequence: Synthetic oligonucleotide
cuucgcuaguuucucuagc

SEQ ID NO: 1318473 - RNA, 19 nt, Artificial Sequence
  Description of Artificial Sequence: Synthetic oligonucleotide
gaacaugaguaaacuucag

SEQ ID NO: 1318474 - RNA, 19 nt, Artificial Sequence
  Description of Artificial Sequence: Synthetic oligonucleotide
agagccaaggcagcuauga

SEQ ID NO: 1318475 - RNA, 19 nt, Artificial Sequence
  Description of Artificial Sequence: Synthetic oligonucleotide
uucuucgcuaguuucucua

SEQ ID NO: 1318476 - RNA, 19 nt, Artificial Sequence
  Description of Artificial Sequence: Synthetic oligonucleotide
acagaauuuccugucugca

SEQ ID NO: 1318477 - RNA, 19 nt, Artificial Sequence
  Description of Artificial Sequence: Synthetic oligonucleotide
auuaccgaugugugcacau

SEQ ID NO: 1318478 - RNA, 19 nt, Artificial Sequence
  Description of Artificial Sequence: Synthetic oligonucleotide
cuccauuaccgaugugugc

SEQ ID NO: 1318479 - RNA, 19 nt, Artificial Sequence
  Description of Artificial Sequence: Synthetic oligonucleotide
ucguugugaucugaaggcc

SEQ ID NO: 1318480 - RNA, 19 nt, Artificial Sequence
  Description of Artificial Sequence: Synthetic oligonucleotide
aaaggcccuggucaguguu

SEQ ID NO: 1318481 - RNA, 19 nt, Artificial Sequence
  Description of Artificial Sequence: Synthetic oligonucleotide
ucucuagggagggaacacc

SEQ ID NO: 1318482 - RNA, 19 nt, Artificial Sequence
  Description of Artificial Sequence: Synthetic oligonucleotide
ggucuaagaccuccaagcc

SEQ ID NO: 1318483 - RNA, 19 nt, Artificial Sequence
  Description of Artificial Sequence: Synthetic oligonucleotide
caccaggaguuuuaagaac

SEQ ID NO: 1318484 - RNA, 19 nt, Artificial Sequence
  Description of Artificial Sequence: Synthetic oligonucleotide
acgggcacauuccacauuu

SEQ ID NO: 1318485 - RNA, 19 nt, Artificial Sequence
  Description of Artificial Sequence: Synthetic oligonucleotide
guccacacaucuucuggcc

SEQ ID NO: 1318486 - RNA, 19 nt, Artificial Sequence
  Description of Artificial Sequence: Synthetic oligonucleotide
aaaucaccaggaguuuuaa

SEQ ID NO: 1318487 - RNA, 19 nt, Artificial Sequence
  Description of Artificial Sequence: Synthetic oligonucleotide
caauaccaggacagaggcc

SEQ ID NO: 1318488 - RNA, 19 nt, Artificial Sequence
  Description of Artificial Sequence: Synthetic oligonucleotide
auccacacgggaugccauc

SEQ ID NO: 1318489 - RNA, 19 nt, Artificial Sequence
  Description of Artificial Sequence: Synthetic oligonucleotide
acacacuugugcaaauuca

SEQ ID NO: 1318490 - RNA, 19 nt, Artificial Sequence
  Description of Artificial Sequence: Synthetic oligonucleotide
acucagggcugucacacaa

SEQ ID NO: 1318491 - RNA, 19 nt, Artificial Sequence
  Description of Artificial Sequence: Synthetic oligonucleotide
agaccgcucagcccaagca

SEQ ID NO: 1318492 - RNA, 19 nt, Artificial Sequence
  Description of Artificial Sequence: Synthetic oligonucleotide
gggacgagaucuuacggac

SEQ ID NO: 1318493 - RNA, 19 nt, Artificial Sequence
  Description of Artificial Sequence: Synthetic oligonucleotide
uuggucaccugugccaugu

SEQ ID NO: 1318494 - RNA, 19 nt, Artificial Sequence
  Description of Artificial Sequence: Synthetic oligonucleotide
cacacgggaugccauccgg

SEQ ID NO: 1318495 - RNA, 19 nt, Artificial Sequence
  Description of Artificial Sequence: Synthetic oligonucleotide
agcgugguggcagagcuca

SEQ ID NO: 1318496 - RNA, 19 nt, Artificial Sequence
  Description of Artificial Sequence: Synthetic oligonucleotide
gaaggggacgagaucuuac

SEQ ID NO: 1318497 - RNA, 19 nt, Artificial Sequence
  Description of Artificial Sequence: Synthetic oligonucleotide
cugagcuggucuaagaccu

SEQ ID NO: 1318498 - RNA, 19 nt, Artificial Sequence
  Description of Artificial Sequence: Synthetic oligonucleotide
guacugcucagcuugugaa

SEQ ID NO: 1318499 - RNA, 19 nt, Artificial Sequence
  Description of Artificial Sequence: Synthetic oligonucleotide
caauucacauaggcagagg

SEQ ID NO: 1318500 - RNA, 19 nt, Artificial Sequence
  Description of Artificial Sequence: Synthetic oligonucleotide
aaggaguggcucugacccu

SEQ ID NO: 1318501 - RNA, 19 nt, Artificial Sequence
  Description of Artificial Sequence: Synthetic oligonucleotide
agcguaucguccauggcca

SEQ ID NO: 1318502 - RNA, 19 nt, Artificial Sequence
  Description of Artificial Sequence: Synthetic oligonucleotide
cugcucaaaccuauccauc

SEQ ID NO: 1318503 - RNA, 19 nt, Artificial Sequence
  Description of Artificial Sequence: Synthetic oligonucleotide
caccccaucugcugugugc

SEQ ID NO: 1318504 - RNA, 19 nt, Artificial Sequence
  Description of Artificial Sequence: Synthetic oligonucleotide
caaucgaguagugcacccc

SEQ ID NO: 1318505 - RNA, 19 nt, Artificial Sequence
  Description of Artificial Sequence: Synthetic oligonucleotide
gagccuuggucaccugugc

SEQ ID NO: 1318506 - RNA, 19 nt, Artificial Sequence
  Description of Artificial Sequence: Synthetic oligonucleotide
uccacacgggaugccaucc

SEQ ID NO: 1318507 - RNA, 19 nt, Artificial Sequence
  Description of Artificial Sequence: Synthetic oligonucleotide
cccacaagucacaugaguc

SEQ ID NO: 1318508 - RNA, 19 nt, Artificial Sequence
  Description of Artificial Sequence: Synthetic oligonucleotide
gcuaauuucucagggcagc

SEQ ID NO: 1318509 - RNA, 19 nt, Artificial Sequence
  Description of Artificial Sequence: Synthetic oligonucleotide
ugcuuucuacuuuggcaaa

SEQ ID NO: 1318510 - RNA, 19 nt, Artificial Sequence
  Description of Artificial Sequence: Synthetic oligonucleotide
guagugcaccccucggggc

SEQ ID NO: 1318511 - RNA, 19 nt, Artificial Sequence
  Description of Artificial Sequence: Synthetic oligonucleotide
ucgcccacggcagaagcgc

SEQ ID NO: 1318512 - RNA, 19 nt, Artificial Sequence
  Description of Artificial Sequence: Synthetic oligonucleotide
cugaugcacaaaaguccac

SEQ ID NO: 1318513 - RNA, 19 nt, Artificial Sequence
  Description of Artificial Sequence: Synthetic oligonucleotide
guaucguccauggccaauc

SEQ ID NO: 1318514 - RNA, 19 nt, Artificial Sequence
  Description of Artificial Sequence: Synthetic oligonucleotide
gaacuucaacuggaacagc

SEQ ID NO: 1318515 - RNA, 19 nt, Artificial Sequence
  Description of Artificial Sequence: Synthetic oligonucleotide
caggaguuuuaagaacaug

SEQ ID NO: 1318516 - RNA, 19 nt, Artificial Sequence
  Description of Artificial Sequence: Synthetic oligonucleotide
ccuguaggcaguacuguac

SEQ ID NO: 1318517 - RNA, 19 nt, Artificial Sequence
  Description of Artificial Sequence: Synthetic oligonucleotide
gaagagccaaggcagcuau

SEQ ID NO: 1318518 - RNA, 19 nt, Artificial Sequence
  Description of Artificial Sequence: Synthetic oligonucleotide
uaaggcgcccagccugaca

SEQ ID NO: 1318519 - RNA, 19 nt, Artificial Sequence
  Description of Artificial Sequence: Synthetic oligonucleotide
aaccuacucagggcuguca

SEQ ID NO: 1318520 - RNA, 19 nt, Artificial Sequence
  Description of Artificial Sequence: Synthetic oligonucleotide
aggcuacugcauccacacg

SEQ ID NO: 1318521 - RNA, 19 nt, Artificial Sequence
  Description of Artificial Sequence: Synthetic oligonucleotide
cugacccucacuggccacg

SEQ ID NO: 1318522 - RNA, 19 nt, Artificial Sequence
  Description of Artificial Sequence: Synthetic oligonucleotide
accuacacacuugugcaaa

SEQ ID NO: 1318523 - RNA, 19 nt, Artificial Sequence
  Description of Artificial Sequence: Synthetic oligonucleotide
aucguccauggccaaucga

SEQ ID NO: 1318524 - RNA, 19 nt, Artificial Sequence
  Description of Artificial Sequence: Synthetic oligonucleotide
cgaugugugcacauccagg

SEQ ID NO: 1318525 - RNA, 19 nt, Artificial Sequence
  Description of Artificial Sequence: Synthetic oligonucleotide
ccuccauuaccgaugugug

SEQ ID NO: 1318526 - RNA, 19 nt, Artificial Sequence
  Description of Artificial Sequence: Synthetic oligonucleotide
ccaguucuguuccugugag

SEQ ID NO: 1318527 - RNA, 19 nt, Artificial Sequence
  Description of Artificial Sequence: Synthetic oligonucleotide
cucagggcugucacacaac

SEQ ID NO: 1318528 - RNA, 19 nt, Artificial Sequence
  Description of Artificial Sequence: Synthetic oligonucleotide
gagcucaacccugggaaga

SEQ ID NO: 1318529 - RNA, 19 nt, Artificial Sequence
  Description of Artificial Sequence: Synthetic oligonucleotide
uuaccgaugugugcacauc

SEQ ID NO: 1318530 - RNA, 19 nt, Artificial Sequence
  Description of Artificial Sequence: Synthetic oligonucleotide
aguugagcgcagagugagg

SEQ ID NO: 1318531 - RNA, 19 nt, Artificial Sequence
  Description of Artificial Sequence: Synthetic oligonucleotide
ggggacgagaucuuacgga

SEQ ID NO: 1318532 - RNA, 19 nt, Artificial Sequence
  Description of Artificial Sequence: Synthetic oligonucleotide
gcgcacagagcuuucgccc

SEQ ID NO: 1318533 - RNA, 19 nt, Artificial Sequence
  Description of Artificial Sequence: Synthetic oligonucleotide
ugagcuggucuaagaccuc

SEQ ID NO: 1318534 - RNA, 19 nt, Artificial Sequence
  Description of Artificial Sequence: Synthetic oligonucleotide
gaacagcguaucguccaug

SEQ ID NO: 1318535 - RNA, 19 nt, Artificial Sequence
  Description of Artificial Sequence: Synthetic oligonucleotide
cguugugaucugaaggccc

SEQ ID NO: 1318536 - RNA, 19 nt, Artificial Sequence
  Description of Artificial Sequence: Synthetic oligonucleotide
cauggccaaucgaguagug

SEQ ID NO: 1318537 - RNA, 19 nt, Artificial Sequence
  Description of Artificial Sequence: Synthetic oligonucleotide
agguagacucagccagcug

SEQ ID NO: 1318538 - RNA, 19 nt, Artificial Sequence
  Description of Artificial Sequence: Synthetic oligonucleotide
ccaaucgaguagugcaccc

SEQ ID NO: 1318539 - RNA, 19 nt, Artificial Sequence
  Description of Artificial Sequence: Synthetic oligonucleotide
ccaaccuaaggcucaguuc

SEQ ID NO: 1318540 - RNA, 19 nt, Artificial Sequence
  Description of Artificial Sequence: Synthetic oligonucleotide
acacgggcacauuccacau

SEQ ID NO: 1318541 - RNA, 19 nt, Artificial Sequence
  Description of Artificial Sequence: Synthetic oligonucleotide
aggugugcguucguuguga

SEQ ID NO: 1318542 - RNA, 19 nt, Artificial Sequence
  Description of Artificial Sequence: Synthetic oligonucleotide
gcugggacaaacacacccc

SEQ ID NO: 1318543 - RNA, 19 nt, Artificial Sequence
  Description of Artificial Sequence: Synthetic oligonucleotide
ucugacccucacuggccac

SEQ ID NO: 1318544 - RNA, 19 nt, Artificial Sequence
  Description of Artificial Sequence: Synthetic oligonucleotide
cagaauccuccauuaccga

SEQ ID NO: 1318545 - RNA, 19 nt, Artificial Sequence
  Description of Artificial Sequence: Synthetic oligonucleotide
aucgaguagugcaccccuc

SEQ ID NO: 1318546 - RNA, 19 nt, Artificial Sequence
  Description of Artificial Sequence: Synthetic oligonucleotide
cagaccgcucagcccaagc

SEQ ID NO: 1318547 - RNA, 19 nt, Artificial Sequence
  Description of Artificial Sequence: Synthetic oligonucleotide
cugcauccacacgggaugc

SEQ ID NO: 1318548 - RNA, 19 nt, Artificial Sequence
  Description of Artificial Sequence: Synthetic oligonucleotide
agcgcuuuguccagagccu

SEQ ID NO: 1318549 - RNA, 19 nt, Artificial Sequence
  Description of Artificial Sequence: Synthetic oligonucleotide
ccuaaggcucaguucuaag

SEQ ID NO: 1318550 - RNA, 19 nt, Artificial Sequence
  Description of Artificial Sequence: Synthetic oligonucleotide
guuugcaccuuggaggcua

SEQ ID NO: 1318551 - RNA, 19 nt, Artificial Sequence
  Description of Artificial Sequence: Synthetic oligonucleotide
ugcguucguugugaucuga

SEQ ID NO: 1318552 - RNA, 19 nt, Artificial Sequence
  Description of Artificial Sequence: Synthetic oligonucleotide
acuugagauuggugccagu

SEQ ID NO: 1318553 - RNA, 19 nt, Artificial Sequence
  Description of Artificial Sequence: Synthetic oligonucleotide
ggacaaacacaccccaucu

SEQ ID NO: 1318554 - RNA, 19 nt, Artificial Sequence
  Description of Artificial Sequence: Synthetic oligonucleotide
agugcaccccucggggcgg

SEQ ID NO: 1318555 - RNA, 19 nt, Artificial Sequence
  Description of Artificial Sequence: Synthetic oligonucleotide
gcugaagggccuucuuuac

SEQ ID NO: 1318556 - RNA, 19 nt, Artificial Sequence
  Description of Artificial Sequence: Synthetic oligonucleotide
aagucacaugagucaccua

SEQ ID NO: 1318557 - RNA, 19 nt, Artificial Sequence
  Description of Artificial Sequence: Synthetic oligonucleotide
cucuagggagggaacaccu

SEQ ID NO: 1318558 - RNA, 19 nt, Artificial Sequence
  Description of Artificial Sequence: Synthetic oligonucleotide
cuuucgcccacggcagaag

SEQ ID NO: 1318559 - RNA, 19 nt, Artificial Sequence
  Description of Artificial Sequence: Synthetic oligonucleotide
cugugaacuucaacuggaa

SEQ ID NO: 1318560 - RNA, 19 nt, Artificial Sequence
  Description of Artificial Sequence: Synthetic oligonucleotide
ugcauccacacgggaugcc

SEQ ID NO: 1318561 - RNA, 19 nt, Artificial Sequence
  Description of Artificial Sequence: Synthetic oligonucleotide
caaacacaccccaucugcu

SEQ ID NO: 1318562 - RNA, 19 nt, Artificial Sequence
  Description of Artificial Sequence: Synthetic oligonucleotide
cucaguucuaaggcgccca

SEQ ID NO: 1318563 - RNA, 19 nt, Artificial Sequence
  Description of Artificial Sequence: Synthetic oligonucleotide
ggaacaccuggacuugaga

SEQ ID NO: 1318564 - RNA, 19 nt, Artificial Sequence
  Description of Artificial Sequence: Synthetic oligonucleotide
cagcuaugagggguuggag

SEQ ID NO: 1318565 - RNA, 19 nt, Artificial Sequence
  Description of Artificial Sequence: Synthetic oligonucleotide
caguucuaaggcgcccagc

SEQ ID NO: 1318566 - RNA, 19 nt, Artificial Sequence
  Description of Artificial Sequence: Synthetic oligonucleotide
accuggacuugagauuggu

SEQ ID NO: 1318567 - RNA, 19 nt, Artificial Sequence
  Description of Artificial Sequence: Synthetic oligonucleotide
guggcccacaagucacaug

SEQ ID NO: 1318568 - RNA, 19 nt, Artificial Sequence
  Description of Artificial Sequence: Synthetic oligonucleotide
accuaaggcucaguucuaa

SEQ ID NO: 1318569 - RNA, 19 nt, Artificial Sequence
  Description of Artificial Sequence: Synthetic oligonucleotide
cugcccaaccuaaggcuca

SEQ ID NO: 1318570 - RNA, 19 nt, Artificial Sequence
  Description of Artificial Sequence: Synthetic oligonucleotide
gagccaguuuacaccuuca

SEQ ID NO: 1318571 - RNA, 19 nt, Artificial Sequence
  Description of Artificial Sequence: Synthetic oligonucleotide
caaggcagcuaugaggggu

SEQ ID NO: 1318572 - RNA, 19 nt, Artificial Sequence
  Description of Artificial Sequence: Synthetic oligonucleotide
ccagguagacucagccagc

SEQ ID NO: 1318573 - RNA, 19 nt, Artificial Sequence
  Description of Artificial Sequence: Synthetic oligonucleotide
acgagaucuuacggaccag

SEQ ID NO: 1318574 - RNA, 19 nt, Artificial Sequence
  Description of Artificial Sequence: Synthetic oligonucleotide
gccaaucgaguagugcacc

SEQ ID NO: 1318575 - RNA, 19 nt, Artificial Sequence
  Description of Artificial Sequence: Synthetic oligonucleotide
ggacgagaucuuacggacc

SEQ ID NO: 1318576 - RNA, 19 nt, Artificial Sequence
  Description of Artificial Sequence: Synthetic oligonucleotide
agcucaacccugggaagau

SEQ ID NO: 1318577 - RNA, 19 nt, Artificial Sequence
  Description of Artificial Sequence: Synthetic oligonucleotide
ccaaccuccgagacagcug

SEQ ID NO: 1318578 - RNA, 19 nt, Artificial Sequence
  Description of Artificial Sequence: Synthetic oligonucleotide
guaacccuguaggcaguac

SEQ ID NO: 1318579 - RNA, 19 nt, Artificial Sequence
  Description of Artificial Sequence: Synthetic oligonucleotide
cacggcaagcagcaggugu

SEQ ID NO: 1318580 - RNA, 19 nt, Artificial Sequence
  Description of Artificial Sequence: Synthetic oligonucleotide
gugcguucguugugaucug

SEQ ID NO: 1318581 - RNA, 19 nt, Artificial Sequence
  Description of Artificial Sequence: Synthetic oligonucleotide
agucaccuacacacuugug

SEQ ID NO: 1318582 - RNA, 19 nt, Artificial Sequence
  Description of Artificial Sequence: Synthetic oligonucleotide
aaccuaaggcucaguucua

SEQ ID NO: 1318583 - RNA, 19 nt, Artificial Sequence
  Description of Artificial Sequence: Synthetic oligonucleotide
ugguagccaagagcucaac

SEQ ID NO: 1318584 - RNA, 19 nt, Artificial Sequence
  Description of Artificial Sequence: Synthetic oligonucleotide
cuacugcauccacacggga

SEQ ID NO: 1318585 - RNA, 19 nt, Artificial Sequence
  Description of Artificial Sequence: Synthetic oligonucleotide
cauuaccgaugugugcaca

SEQ ID NO: 1318586 - RNA, 19 nt, Artificial Sequence
  Description of Artificial Sequence: Synthetic oligonucleotide
acacgggaugccauccgga

SEQ ID NO: 1318587 - RNA, 19 nt, Artificial Sequence
  Description of Artificial Sequence: Synthetic oligonucleotide
ggacuugagauuggugcca

SEQ ID NO: 1318588 - RNA, 19 nt, Artificial Sequence
  Description of Artificial Sequence: Synthetic oligonucleotide
cuguacugcucagcuugug

SEQ ID NO: 1318589 - RNA, 19 nt, Artificial Sequence
  Description of Artificial Sequence: Synthetic oligonucleotide
gcugacagugguagccaag

SEQ ID NO: 1318590 - RNA, 19 nt, Artificial Sequence
  Description of Artificial Sequence: Synthetic oligonucleotide
caccuacacacuugugcaa

SEQ ID NO: 1318591 - RNA, 19 nt, Artificial Sequence
  Description of Artificial Sequence: Synthetic oligonucleotide
gcugcgcacagagcuuucg

SEQ ID NO: 1318592 - RNA, 19 nt, Artificial Sequence
  Description of Artificial Sequence: Synthetic oligonucleotide
ggccaaucgaguagugcac

SEQ ID NO: 1318593 - RNA, 19 nt, Artificial Sequence
  Description of Artificial Sequence: Synthetic oligonucleotide
guucuaaggcgcccagccu

SEQ ID NO: 1318594 - RNA, 19 nt, Artificial Sequence
  Description of Artificial Sequence: Synthetic oligonucleotide
ccauuaccgaugugugcac

SEQ ID NO: 1318595 - RNA, 19 nt, Artificial Sequence
  Description of Artificial Sequence: Synthetic oligonucleotide
gcagcuaugagggguugga

SEQ ID NO: 1318596 - RNA, 19 nt, Artificial Sequence
  Description of Artificial Sequence: Synthetic oligonucleotide
ugccauccggagccaguuu

SEQ ID NO: 1318597 - RNA, 19 nt, Artificial Sequence
  Description of Artificial Sequence: Synthetic oligonucleotide
augccauccggagccaguu

SEQ ID NO: 1318598 - RNA, 19 nt, Artificial Sequence
  Description of Artificial Sequence: Synthetic oligonucleotide
ccaucaggcagaccgcuca

SEQ ID NO: 1318599 - RNA, 19 nt, Artificial Sequence
  Description of Artificial Sequence: Synthetic oligonucleotide
ccauccggagccaguuuac

SEQ ID NO: 1318600 - RNA, 19 nt, Artificial Sequence
  Description of Artificial Sequence: Synthetic oligonucleotide
gaugccauccggagccagu

SEQ ID NO: 1318601 - RNA, 19 nt, Artificial Sequence
  Description of Artificial Sequence: Synthetic oligonucleotide
cauccggagccaguuuaca

SEQ ID NO: 1318602 - RNA, 19 nt, Artificial Sequence
  Description of Artificial Sequence: Synthetic oligonucleotide
auccuccauuaccgaugug

SEQ ID NO: 1318603 - RNA, 19 nt, Artificial Sequence
  Description of Artificial Sequence: Synthetic oligonucleotide
gccauccggagccaguuua

SEQ ID NO: 1318604 - RNA, 19 nt, Artificial Sequence
  Description of Artificial Sequence: Synthetic oligonucleotide
ccacacgggaugccauccg

SEQ ID NO: 1318605 - RNA, 19 nt, Artificial Sequence
  Description of Artificial Sequence: Synthetic oligonucleotide
aagcgcccucuggaagcug

SEQ ID NO: 1318606 - RNA, 19 nt, Artificial Sequence
  Description of Artificial Sequence: Synthetic oligonucleotide
ggcacuggacauuucugau

SEQ ID NO: 1318607 - RNA, 19 nt, Artificial Sequence
  Description of Artificial Sequence: Synthetic oligonucleotide
cacauaggcagaggacaaa

SEQ ID NO: 1318608 - RNA, 19 nt, Artificial Sequence
  Description of Artificial Sequence: Synthetic oligonucleotide
gagcgcagagugaggcaga

SEQ ID NO: 1318609 - RNA, 19 nt, Artificial Sequence
  Description of Artificial Sequence: Synthetic oligonucleotide
gcccagguagacucagcca

SEQ ID NO: 1318610 - RNA, 19 nt, Artificial Sequence
  Description of Artificial Sequence: Synthetic oligonucleotide
cagcgugguggcagagcuc

SEQ ID NO: 1318611 - RNA, 19 nt, Artificial Sequence
  Description of Artificial Sequence: Synthetic oligonucleotide
gcucacagaauccuccauu

SEQ ID NO: 1318612 - RNA, 19 nt, Artificial Sequence
  Description of Artificial Sequence: Synthetic oligonucleotide
gaagcgcccucuggaagcu

SEQ ID NO: 1318613 - RNA, 19 nt, Artificial Sequence
  Description of Artificial Sequence: Synthetic oligonucleotide
agccaaccuccgagacagc

SEQ ID NO: 1318614 - RNA, 19 nt, Artificial Sequence
  Description of Artificial Sequence: Synthetic oligonucleotide
gcccacaagucacaugagu

SEQ ID NO: 1318615 - RNA, 19 nt, Artificial Sequence
  Description of Artificial Sequence: Synthetic oligonucleotide
gaggcccacugcccaaccu

SEQ ID NO: 1318616 - RNA, 19 nt, Artificial Sequence
  Description of Artificial Sequence: Synthetic oligonucleotide
cuaaggcgcccagccugac

SEQ ID NO: 1318617 - RNA, 19 nt, Artificial Sequence
  Description of Artificial Sequence: Synthetic oligonucleotide
ccuacucagggcugucaca

SEQ ID NO: 1318618 - RNA, 19 nt, Artificial Sequence
  Description of Artificial Sequence: Synthetic oligonucleotide
gccaguuuacaccuucauu

SEQ ID NO: 1318619 - RNA, 19 nt, Artificial Sequence
  Description of Artificial Sequence: Synthetic oligonucleotide
cagguagacucagccagcu

SEQ ID NO: 1318620 - RNA, 19 nt, Artificial Sequence
  Description of Artificial Sequence: Synthetic oligonucleotide
cauccacacgggaugccau

SEQ ID NO: 1318621 - RNA, 19 nt, Artificial Sequence
  Description of Artificial Sequence: Synthetic oligonucleotide
ugcaccccucggggcggcg

SEQ ID NO: 1318622 - RNA, 19 nt, Artificial Sequence
  Description of Artificial Sequence: Synthetic oligonucleotide
ggaaccuacucagggcugu

SEQ ID NO: 1318623 - RNA, 19 nt, Artificial Sequence
  Description of Artificial Sequence: Synthetic oligonucleotide
ggaacagcguaucguccau

SEQ ID NO: 1318624 - RNA, 19 nt, Artificial Sequence
  Description of Artificial Sequence: Synthetic oligonucleotide
cuacacacuugugcaaauu

SEQ ID NO: 1318625 - RNA, 19 nt, Artificial Sequence
  Description of Artificial Sequence: Synthetic oligonucleotide
ccggagccaguuuacaccu

SEQ ID NO: 1318626 - RNA, 19 nt, Artificial Sequence
  Description of Artificial Sequence: Synthetic oligonucleotide
cccaucaggcagaccgcuc

SEQ ID NO: 1318627 - RNA, 19 nt, Artificial Sequence
  Description of Artificial Sequence: Synthetic oligonucleotide
ggggcggcgaaggggacga

SEQ ID NO: 1318628 - RNA, 19 nt, Artificial Sequence
  Description of Artificial Sequence: Synthetic oligonucleotide
accccucggggcggcgaag

SEQ ID NO: 1318629 - RNA, 19 nt, Artificial Sequence
  Description of Artificial Sequence: Synthetic oligonucleotide
gcuuucgcccacggcagaa

SEQ ID NO: 1318630 - RNA, 19 nt, Artificial Sequence
  Description of Artificial Sequence: Synthetic oligonucleotide
guggcagagcucacagaau

SEQ ID NO: 1318631 - RNA, 19 nt, Artificial Sequence
  Description of Artificial Sequence: Synthetic oligonucleotide
gcguucguugugaucugaa

SEQ ID NO: 1318632 - RNA, 19 nt, Artificial Sequence
  Description of Artificial Sequence: Synthetic oligonucleotide
caagcagcccgaagaccuu

SEQ ID NO: 1318633 - RNA, 19 nt, Artificial Sequence
  Description of Artificial Sequence: Synthetic oligonucleotide
ggugugcguucguugugau

SEQ ID NO: 1318634 - RNA, 19 nt, Artificial Sequence
  Description of Artificial Sequence: Synthetic oligonucleotide
cccaaccuaaggcucaguu

SEQ ID NO: 1318635 - RNA, 19 nt, Artificial Sequence
  Description of Artificial Sequence: Synthetic oligonucleotide
cgcccacggcagaagcgcc

SEQ ID NO: 1318636 - RNA, 19 nt, Artificial Sequence
  Description of Artificial Sequence: Synthetic oligonucleotide
caccccucggggcggcgaa

SEQ ID NO: 1318637 - RNA, 19 nt, Artificial Sequence
  Description of Artificial Sequence: Synthetic oligonucleotide
ggcgcccagccugacaggu

SEQ ID NO: 1318638 - RNA, 19 nt, Artificial Sequence
  Description of Artificial Sequence: Synthetic oligonucleotide
cgaagaccuuccagaggca

SEQ ID NO: 1318639 - RNA, 19 nt, Artificial Sequence
  Description of Artificial Sequence: Synthetic oligonucleotide
cacaccccaucugcugugu

SEQ ID NO: 1318640 - RNA, 19 nt, Artificial Sequence
  Description of Artificial Sequence: Synthetic oligonucleotide
gcguaucguccauggccaa

SEQ ID NO: 1318641 - RNA, 19 nt, Artificial Sequence
  Description of Artificial Sequence: Synthetic oligonucleotide
cacgggcacauuccacauu

SEQ ID NO: 1318642 - RNA, 19 nt, Artificial Sequence
  Description of Artificial Sequence: Synthetic oligonucleotide
gcccaucaggcagaccgcu

SEQ ID NO: 1318643 - RNA, 19 nt, Artificial Sequence
  Description of Artificial Sequence: Synthetic oligonucleotide
ccaaacccugucugucaau

SEQ ID NO: 1318644 - RNA, 19 nt, Artificial Sequence
  Description of Artificial Sequence: Synthetic oligonucleotide
ggcagaccgcucagcccaa

SEQ ID NO: 1318645 - RNA, 19 nt, Artificial Sequence
  Description of Artificial Sequence: Synthetic oligonucleotide
cgaaggggacgagaucuua

SEQ ID NO: 1318646 - RNA, 19 nt, Artificial Sequence
  Description of Artificial Sequence: Synthetic oligonucleotide
gcaccccucggggcggcga

SEQ ID NO: 1318647 - RNA, 19 nt, Artificial Sequence
  Description of Artificial Sequence: Synthetic oligonucleotide
gcauacacacgggcacauu

SEQ ID NO: 1318648 - RNA, 19 nt, Artificial Sequence
  Description of Artificial Sequence: Synthetic oligonucleotide
gcgaaggggacgagaucuu

SEQ ID NO: 1318649 - RNA, 19 nt, Artificial Sequence
  Description of Artificial Sequence: Synthetic oligonucleotide
cccacggcagaagcgcccu

SEQ ID NO: 1318650 - RNA, 19 nt, Artificial Sequence
  Description of Artificial Sequence: Synthetic oligonucleotide
cguaucguccauggccaau

SEQ ID NO: 1318651 - RNA, 19 nt, Artificial Sequence
  Description of Artificial Sequence: Synthetic oligonucleotide
gcgcccagccugacagguu

SEQ ID NO: 1318652 - RNA, 19 nt, Artificial Sequence
  Description of Artificial Sequence: Synthetic oligonucleotide
uguagcuuaacacaggugu

SEQ ID NO: 1318653 - RNA, 19 nt, Artificial Sequence
  Description of Artificial Sequence: Synthetic oligonucleotide
aauuucuggaagcccagcc

SEQ ID NO: 1318654 - RNA, 19 nt, Artificial Sequence
  Description of Artificial Sequence: Synthetic oligonucleotide
uugaauguagaauuucugg

SEQ ID NO: 1318655 - RNA, 19 nt, Artificial Sequence
  Description of Artificial Sequence: Synthetic oligonucleotide
aagccauguagcuuaacac

SEQ ID NO: 1318656 - RNA, 19 nt, Artificial Sequence
  Description of Artificial Sequence: Synthetic oligonucleotide
ugcaccaucagcaagggcu

SEQ ID NO: 1318657 - RNA, 19 nt, Artificial Sequence
  Description of Artificial Sequence: Synthetic oligonucleotide
auaaaagccauguucaagu

SEQ ID NO: 1318658 - RNA, 19 nt, Artificial Sequence
  Description of Artificial Sequence: Synthetic oligonucleotide
caugcaguaucucugaagg

SEQ ID NO: 1318659 - RNA, 19 nt, Artificial Sequence
  Description of Artificial Sequence: Synthetic oligonucleotide
ugccuauggaccaugaugc

SEQ ID NO: 1318660 - RNA, 19 nt, Artificial Sequence
  Description of Artificial Sequence: Synthetic oligonucleotide
uagaucaugauguuaguca

SEQ ID NO: 1318661 - RNA, 19 nt, Artificial Sequence
  Description of Artificial Sequence: Synthetic oligonucleotide
ugcugcuaaagccaugugg

SEQ ID NO: 1318662 - RNA, 19 nt, Artificial Sequence
  Description of Artificial Sequence: Synthetic oligonucleotide
ugguguaaguccuugaucu

SEQ ID NO: 1318663 - RNA, 19 nt, Artificial Sequence
  Description of Artificial Sequence: Synthetic oligonucleotide
caugacucgguuaggaucg

SEQ ID NO: 1318664 - RNA, 19 nt, Artificial Sequence
  Description of Artificial Sequence: Synthetic oligonucleotide
aacuuuucuaagauguagg

SEQ ID NO: 1318665 - RNA, 19 nt, Artificial Sequence
  Description of Artificial Sequence: Synthetic oligonucleotide
aaguagagaacuuuucuaa

SEQ ID NO: 1318666 - RNA, 19 nt, Artificial Sequence
  Description of Artificial Sequence: Synthetic oligonucleotide
cucagcaugacugaggagg

SEQ ID NO: 1318667 - RNA, 19 nt, Artificial Sequence
  Description of Artificial Sequence: Synthetic oligonucleotide
acccauuuaucaucaaagc

SEQ ID NO: 1318668 - RNA, 19 nt, Artificial Sequence
  Description of Artificial Sequence: Synthetic oligonucleotide
gauccugugguguaagucc

SEQ ID NO: 1318669 - RNA, 19 nt, Artificial Sequence
  Description of Artificial Sequence: Synthetic oligonucleotide
ugaggguacugguugaggg

SEQ ID NO: 1318670 - RNA, 19 nt, Artificial Sequence
  Description of Artificial Sequence: Synthetic oligonucleotide
agaucaugauguuagucag

SEQ ID NO: 1318671 - RNA, 19 nt, Artificial Sequence
  Description of Artificial Sequence: Synthetic oligonucleotide
uuccauguaggaauaggag

SEQ ID NO: 1318672 - RNA, 19 nt, Artificial Sequence
  Description of Artificial Sequence: Synthetic oligonucleotide
cucgauaucccucucagug

SEQ ID NO: 1318673 - RNA, 19 nt, Artificial Sequence
  Description of Artificial Sequence: Synthetic oligonucleotide
acuugguccaaguagagaa

SEQ ID NO: 1318674 - RNA, 19 nt, Artificial Sequence
  Description of Artificial Sequence: Synthetic oligonucleotide
ugggcuagaagcuugggcu

SEQ ID NO: 1318675 - RNA, 19 nt, Artificial Sequence
  Description of Artificial Sequence: Synthetic oligonucleotide
aagaccuucauccucucau

SEQ ID NO: 1318676 - RNA, 19 nt, Artificial Sequence
  Description of Artificial Sequence: Synthetic oligonucleotide
gaacuuuucuaagauguag

SEQ ID NO: 1318677 - RNA, 19 nt, Artificial Sequence
  Description of Artificial Sequence: Synthetic oligonucleotide
uucacguggaugaagugga

SEQ ID NO: 1318678 - RNA, 19 nt, Artificial Sequence
  Description of Artificial Sequence: Synthetic oligonucleotide
aggcagaauagccaguggg

SEQ ID NO: 1318679 - RNA, 19 nt, Artificial Sequence
  Description of Artificial Sequence: Synthetic oligonucleotide
aacccaucgauccuguggu

SEQ ID NO: 1318680 - RNA, 19 nt, Artificial Sequence
  Description of Artificial Sequence: Synthetic oligonucleotide
uguagaauuucuggaagcc

SEQ ID NO: 1318681 - RNA, 19 nt, Artificial Sequence
  Description of Artificial Sequence: Synthetic oligonucleotide
gaagccauaguggaagcgg

SEQ ID NO: 1318682 - RNA, 19 nt, Artificial Sequence
  Description of Artificial Sequence: Synthetic oligonucleotide
guggccaccguauugaagc

SEQ ID NO: 1318683 - RNA, 19 nt, Artificial Sequence
  Description of Artificial Sequence: Synthetic oligonucleotide
cuugaauguagaauuucug

SEQ ID NO: 1318684 - RNA, 19 nt, Artificial Sequence
  Description of Artificial Sequence: Synthetic oligonucleotide
augccuauggaccaugaug

SEQ ID NO: 1318685 - RNA, 19 nt, Artificial Sequence
  Description of Artificial Sequence: Synthetic oligonucleotide
ugcaguaucucugaaggga

SEQ ID NO: 1318686 - RNA, 19 nt, Artificial Sequence
  Description of Artificial Sequence: Synthetic oligonucleotide
guagcuagcgacaucacug

SEQ ID NO: 1318687 - RNA, 19 nt, Artificial Sequence
  Description of Artificial Sequence: Synthetic oligonucleotide
ugucccgggagacaaacca

SEQ ID NO: 1318688 - RNA, 19 nt, Artificial Sequence
  Description of Artificial Sequence: Synthetic oligonucleotide
gauguuagucagcagaucu

SEQ ID NO: 1318689 - RNA, 19 nt, Artificial Sequence
  Description of Artificial Sequence: Synthetic oligonucleotide
cuugaagugaggguacugg

SEQ ID NO: 1318690 - RNA, 19 nt, Artificial Sequence
  Description of Artificial Sequence: Synthetic oligonucleotide
cuuccuccagucaaacucg

SEQ ID NO: 1318691 - RNA, 19 nt, Artificial Sequence
  Description of Artificial Sequence: Synthetic oligonucleotide
uacaacagcucgauauccc

SEQ ID NO: 1318692 - RNA, 19 nt, Artificial Sequence
  Description of Artificial Sequence: Synthetic oligonucleotide
acuuuucuggagcaugcag

SEQ ID NO: 1318693 - RNA, 19 nt, Artificial Sequence
  Description of Artificial Sequence: Synthetic oligonucleotide
cuucacguggaugaagugg

SEQ ID NO: 1318694 - RNA, 19 nt, Artificial Sequence
  Description of Artificial Sequence: Synthetic oligonucleotide
agccauguagcuuaacaca

SEQ ID NO: 1318695 - RNA, 19 nt, Artificial Sequence
  Description of Artificial Sequence: Synthetic oligonucleotide
ucauagaaggagccaggcc

SEQ ID NO: 1318696 - RNA, 19 nt, Artificial Sequence
  Description of Artificial Sequence: Synthetic oligonucleotide
cuagcgacaucacugcagc

SEQ ID NO: 1318697 - RNA, 19 nt, Artificial Sequence
  Description of Artificial Sequence: Synthetic oligonucleotide
ugacuucaaacacaugcuc

SEQ ID NO: 1318698 - RNA, 19 nt, Artificial Sequence
  Description of Artificial Sequence: Synthetic oligonucleotide
gagaacuuuucuaagaugu

SEQ ID NO: 1318699 - RNA, 19 nt, Artificial Sequence
  Description of Artificial Sequence: Synthetic oligonucleotide
cauguggguagcuagcgac

SEQ ID NO: 1318700 - RNA, 19 nt, Artificial Sequence
  Description of Artificial Sequence: Synthetic oligonucleotide
acgggugagucauucagag

SEQ ID NO: 1318701 - RNA, 19 nt, Artificial Sequence
  Description of Artificial Sequence: Synthetic oligonucleotide
uuucacgugguugggaacc

SEQ ID NO: 1318702 - RNA, 19 nt, Artificial Sequence
  Description of Artificial Sequence: Synthetic oligonucleotide
ucaaacucguuccuccagu

SEQ ID NO: 1318703 - RNA, 19 nt, Artificial Sequence
  Description of Artificial Sequence: Synthetic oligonucleotide
acgguauucugacuugguc

SEQ ID NO: 1318704 - RNA, 19 nt, Artificial Sequence
  Description of Artificial Sequence: Synthetic oligonucleotide
cuccagucaaacucguucc

SEQ ID NO: 1318705 - RNA, 19 nt, Artificial Sequence
  Description of Artificial Sequence: Synthetic oligonucleotide
ucuugagauaaaagccaug

SEQ ID NO: 1318706 - RNA, 19 nt, Artificial Sequence
  Description of Artificial Sequence: Synthetic oligonucleotide
aucaugauguuagucagca

SEQ ID NO: 1318707 - RNA, 19 nt, Artificial Sequence
  Description of Artificial Sequence: Synthetic oligonucleotide
gggugagucauucagagca

SEQ ID NO: 1318708 - RNA, 19 nt, Artificial Sequence
  Description of Artificial Sequence: Synthetic oligonucleotide
agcaugacugaggaggaac

SEQ ID NO: 1318709 - RNA, 19 nt, Artificial Sequence
  Description of Artificial Sequence: Synthetic oligonucleotide
uguguagguagccacucuc

SEQ ID NO: 1318710 - RNA, 19 nt, Artificial Sequence
  Description of Artificial Sequence: Synthetic oligonucleotide
ugugguguaaguccuugau

SEQ ID NO: 1318711 - RNA, 19 nt, Artificial Sequence
  Description of Artificial Sequence: Synthetic oligonucleotide
uuaacacaggugugcagug

SEQ ID NO: 1318712 - RNA, 19 nt, Artificial Sequence
  Description of Artificial Sequence: Synthetic oligonucleotide
uggagcaugcaguaucucu

SEQ ID NO: 1318713 - RNA, 19 nt, Artificial Sequence
  Description of Artificial Sequence: Synthetic oligonucleotide
gaauaggagaugagcuugg

SEQ ID NO: 1318714 - RNA, 19 nt, Artificial Sequence
  Description of Artificial Sequence: Synthetic oligonucleotide
agcucgauaucccucucag

SEQ ID NO: 1318715 - RNA, 19 nt, Artificial Sequence
  Description of Artificial Sequence: Synthetic oligonucleotide
ucaugaugcuguagaaaac

SEQ ID NO: 1318716 - RNA, 19 nt, Artificial Sequence
  Description of Artificial Sequence: Synthetic oligonucleotide
gguguagagacuucuugag

SEQ ID NO: 1318717 - RNA, 19 nt, Artificial Sequence
  Description of Artificial Sequence: Synthetic oligonucleotide
agacaaugguuccuguugu

SEQ ID NO: 1318718 - RNA, 19 nt, Artificial Sequence
  Description of Artificial Sequence: Synthetic oligonucleotide
uguuagucagcagaucuuc

SEQ ID NO: 1318719 - RNA, 19 nt, Artificial Sequence
  Description of Artificial Sequence: Synthetic oligonucleotide
uugaagugaggguacuggu

SEQ ID NO: 1318720 - RNA, 19 nt, Artificial Sequence
  Description of Artificial Sequence: Synthetic oligonucleotide
agcgacaucacugcagcuc

SEQ ID NO: 1318721 - RNA, 19 nt, Artificial Sequence
  Description of Artificial Sequence: Synthetic oligonucleotide
cuucaagugguaagguuuc

SEQ ID NO: 1318722 - RNA, 19 nt, Artificial Sequence
  Description of Artificial Sequence: Synthetic oligonucleotide
cuuguagaagauccuagca

SEQ ID NO: 1318723 - RNA, 19 nt, Artificial Sequence
  Description of Artificial Sequence: Synthetic oligonucleotide
uugaaaggucggaugcucu

SEQ ID NO: 1318724 - RNA, 19 nt, Artificial Sequence
  Description of Artificial Sequence: Synthetic oligonucleotide
aagauccuagcaguggcca

SEQ ID NO: 1318725 - RNA, 19 nt, Artificial Sequence
  Description of Artificial Sequence: Synthetic oligonucleotide
acaacagcucgauaucccu

SEQ ID NO: 1318726 - RNA, 19 nt, Artificial Sequence
  Description of Artificial Sequence: Synthetic oligonucleotide
gaugcccuggcccauguuc

SEQ ID NO: 1318727 - RNA, 19 nt, Artificial Sequence
  Description of Artificial Sequence: Synthetic oligonucleotide
uagcuagcgacaucacugc

SEQ ID NO: 1318728 - RNA, 19 nt, Artificial Sequence
  Description of Artificial Sequence: Synthetic oligonucleotide
aggucggaugcucucaucu

SEQ ID NO: 1318729 - RNA, 19 nt, Artificial Sequence
  Description of Artificial Sequence: Synthetic oligonucleotide
caagugguaagguuuccuc

SEQ ID NO: 1318730 - RNA, 19 nt, Artificial Sequence
  Description of Artificial Sequence: Synthetic oligonucleotide
cccauuuaucaucaaagcc

SEQ ID NO: 1318731 - RNA, 19 nt, Artificial Sequence
  Description of Artificial Sequence: Synthetic oligonucleotide
uauucugacuugguccaag

SEQ ID NO: 1318732 - RNA, 19 nt, Artificial Sequence
  Description of Artificial Sequence: Synthetic oligonucleotide
aguguagccgagaaaucuc

SEQ ID NO: 1318733 - RNA, 19 nt, Artificial Sequence
  Description of Artificial Sequence: Synthetic oligonucleotide
ucacgguauucugacuugg

SEQ ID NO: 1318734 - RNA, 19 nt, Artificial Sequence
  Description of Artificial Sequence: Synthetic oligonucleotide
cugacuugguccaaguaga

SEQ ID NO: 1318735 - RNA, 19 nt, Artificial Sequence
  Description of Artificial Sequence: Synthetic oligonucleotide
ucgauaucccucucagugu

SEQ ID NO: 1318736 - RNA, 19 nt, Artificial Sequence
  Description of Artificial Sequence: Synthetic oligonucleotide
agauccuagcaguggccac

SEQ ID NO: 1318737 - RNA, 19 nt, Artificial Sequence
  Description of Artificial Sequence: Synthetic oligonucleotide
accguauugaagccuuucu

SEQ ID NO: 1318738 - RNA, 19 nt, Artificial Sequence
  Description of Artificial Sequence: Synthetic oligonucleotide
aagugaggguacugguuga

SEQ ID NO: 1318739 - RNA, 19 nt, Artificial Sequence
  Description of Artificial Sequence: Synthetic oligonucleotide
aggguacugguugaggguc

SEQ ID NO: 1318740 - RNA, 19 nt, Artificial Sequence
  Description of Artificial Sequence: Synthetic oligonucleotide
gaaacgcgggcccaggaga

SEQ ID NO: 1318741 - RNA, 19 nt, Artificial Sequence
  Description of Artificial Sequence: Synthetic oligonucleotide
aguagaucaugauguuagu

SEQ ID NO: 1318742 - RNA, 19 nt, Artificial Sequence
  Description of Artificial Sequence: Synthetic oligonucleotide
ugguaagguuuccuccuug

SEQ ID NO: 1318743 - RNA, 19 nt, Artificial Sequence
  Description of Artificial Sequence: Synthetic oligonucleotide
gacugaggaggaaccaggg

SEQ ID NO: 1318744 - RNA, 19 nt, Artificial Sequence
  Description of Artificial Sequence: Synthetic oligonucleotide
ucucccgaaacgcgggccc

SEQ ID NO: 1318745 - RNA, 19 nt, Artificial Sequence
  Description of Artificial Sequence: Synthetic oligonucleotide
aaaggucggaugcucucau

SEQ ID NO: 1318746 - RNA, 19 nt, Artificial Sequence
  Description of Artificial Sequence: Synthetic oligonucleotide
caggucacgguauucugac

SEQ ID NO: 1318747 - RNA, 19 nt, Artificial Sequence
  Description of Artificial Sequence: Synthetic oligonucleotide
aaggucggaugcucucauc

SEQ ID NO: 1318748 - RNA, 19 nt, Artificial Sequence
  Description of Artificial Sequence: Synthetic oligonucleotide
guacaacagcucgauaucc

SEQ ID NO: 1318749 - RNA, 19 nt, Artificial Sequence
  Description of Artificial Sequence: Synthetic oligonucleotide
gguauucugacuuggucca

SEQ ID NO: 1318750 - RNA, 19 nt, Artificial Sequence
  Description of Artificial Sequence: Synthetic oligonucleotide
uguuuccaccuugaaaggu

SEQ ID NO: 1318751 - RNA, 19 nt, Artificial Sequence
  Description of Artificial Sequence: Synthetic oligonucleotide
gauccuagcaguggccacc

SEQ ID NO: 1318752 - RNA, 19 nt, Artificial Sequence
  Description of Artificial Sequence: Synthetic oligonucleotide
ucaugauguuagucagcag

SEQ ID NO: 1318753 - RNA, 19 nt, Artificial Sequence
  Description of Artificial Sequence: Synthetic oligonucleotide
guacuugaccuucacccac

SEQ ID NO: 1318754 - RNA, 19 nt, Artificial Sequence
  Description of Artificial Sequence: Synthetic oligonucleotide
auaguggaagcggcugccc

SEQ ID NO: 1318755 - RNA, 19 nt, Artificial Sequence
  Description of Artificial Sequence: Synthetic oligonucleotide
gaagauccuagcaguggcc

SEQ ID NO: 1318756 - RNA, 19 nt, Artificial Sequence
  Description of Artificial Sequence: Synthetic oligonucleotide
uccagucaaacucguuccu

SEQ ID NO: 1318757 - RNA, 19 nt, Artificial Sequence
  Description of Artificial Sequence: Synthetic oligonucleotide
uaucccucucaguguagcc

SEQ ID NO: 1318758 - RNA, 19 nt, Artificial Sequence
  Description of Artificial Sequence: Synthetic oligonucleotide
augacugaggaggaaccag

SEQ ID NO: 1318759 - RNA, 19 nt, Artificial Sequence
  Description of Artificial Sequence: Synthetic oligonucleotide
uacuugaccuucacccacu

SEQ ID NO: 1318760 - RNA, 19 nt, Artificial Sequence
  Description of Artificial Sequence: Synthetic oligonucleotide
uagaagcuugggcucuuca

SEQ ID NO: 1318761 - RNA, 19 nt, Artificial Sequence
  Description of Artificial Sequence: Synthetic oligonucleotide
cuugagauaaaagccaugu

SEQ ID NO: 1318762 - RNA, 19 nt, Artificial Sequence
  Description of Artificial Sequence: Synthetic oligonucleotide
gcuuguagaagauccuagc

SEQ ID NO: 1318763 - RNA, 19 nt, Artificial Sequence
  Description of Artificial Sequence: Synthetic oligonucleotide
aguaggacaccacuuucuu

SEQ ID NO: 1318764 - RNA, 19 nt, Artificial Sequence
  Description of Artificial Sequence: Synthetic oligonucleotide
cagcccuucaaucuugguc

SEQ ID NO: 1318765 - RNA, 19 nt, Artificial Sequence
  Description of Artificial Sequence: Synthetic oligonucleotide
ucccgggagacaaaccagu

SEQ ID NO: 1318766 - RNA, 19 nt, Artificial Sequence
  Description of Artificial Sequence: Synthetic oligonucleotide
ucguuccuccaguaggaca

SEQ ID NO: 1318767 - RNA, 19 nt, Artificial Sequence
  Description of Artificial Sequence: Synthetic oligonucleotide
uccaggucacgguauucug

SEQ ID NO: 1318768 - RNA, 19 nt, Artificial Sequence
  Description of Artificial Sequence: Synthetic oligonucleotide
guagaucaugauguuaguc

SEQ ID NO: 1318769 - RNA, 19 nt, Artificial Sequence
  Description of Artificial Sequence: Synthetic oligonucleotide
ucaguguagccgagaaauc

SEQ ID NO: 1318770 - RNA, 19 nt, Artificial Sequence
  Description of Artificial Sequence: Synthetic oligonucleotide
agcggcugcccuccaaagg

SEQ ID NO: 1318771 - RNA, 19 nt, Artificial Sequence
  Description of Artificial Sequence: Synthetic oligonucleotide
cuugaaaggucggaugcuc

SEQ ID NO: 1318772 - RNA, 19 nt, Artificial Sequence
  Description of Artificial Sequence: Synthetic oligonucleotide
gacucgguuaggaucgcgc

SEQ ID NO: 1318773 - RNA, 19 nt, Artificial Sequence
  Description of Artificial Sequence: Synthetic oligonucleotide
uccaaaggcggggaugccc

SEQ ID NO: 1318774 - RNA, 19 nt, Artificial Sequence
  Description of Artificial Sequence: Synthetic oligonucleotide
acucgguuaggaucgcgcu

SEQ ID NO: 1318775 - RNA, 19 nt, Artificial Sequence
  Description of Artificial Sequence: Synthetic oligonucleotide
cguauugaagccuuucuug

SEQ ID NO: 1318776 - RNA, 19 nt, Artificial Sequence
  Description of Artificial Sequence: Synthetic oligonucleotide
ugcuaaagccaugugggua

SEQ ID NO: 1318777 - RNA, 19 nt, Artificial Sequence
  Description of Artificial Sequence: Synthetic oligonucleotide
cauaguggaagcggcugcc

SEQ ID NO: 1318778 - RNA, 19 nt, Artificial Sequence
  Description of Artificial Sequence: Synthetic oligonucleotide
uucuccuugaagggguaca

SEQ ID NO: 1318779 - RNA, 19 nt, Artificial Sequence
  Description of Artificial Sequence: Synthetic oligonucleotide
uccaccugcuuccuccagu

SEQ ID NO: 1318780 - RNA, 19 nt, Artificial Sequence
  Description of Artificial Sequence: Synthetic oligonucleotide
gccaucuucaagugguaag

SEQ ID NO: 1318781 - RNA, 19 nt, Artificial Sequence
  Description of Artificial Sequence: Synthetic oligonucleotide
guuuccaccuugaaagguc

SEQ ID NO: 1318782 - RNA, 19 nt, Artificial Sequence
  Description of Artificial Sequence: Synthetic oligonucleotide
aaagccauguggguagcua

SEQ ID NO: 1318783 - RNA, 19 nt, Artificial Sequence
  Description of Artificial Sequence: Synthetic oligonucleotide
aucucccgaaacgcgggcc

SEQ ID NO: 1318784 - RNA, 19 nt, Artificial Sequence
  Description of Artificial Sequence: Synthetic oligonucleotide
aaacgcgggcccaggagag

SEQ ID NO: 1318785 - RNA, 19 nt, Artificial Sequence
  Description of Artificial Sequence: Synthetic oligonucleotide
gucacgguauucugacuug

SEQ ID NO: 1318786 - RNA, 19 nt, Artificial Sequence
  Description of Artificial Sequence: Synthetic oligonucleotide
cuauggaccaugaugcccu

SEQ ID NO: 1318787 - RNA, 19 nt, Artificial Sequence
  Description of Artificial Sequence: Synthetic oligonucleotide
augauguuagucagcagau

SEQ ID NO: 1318788 - RNA, 19 nt, Artificial Sequence
  Description of Artificial Sequence: Synthetic oligonucleotide
cagccgugcaccaucagca

SEQ ID NO: 1318789 - RNA, 19 nt, Artificial Sequence
  Description of Artificial Sequence: Synthetic oligonucleotide
gacaaugguuccuguuguc

SEQ ID NO: 1318790 - RNA, 19 nt, Artificial Sequence
  Description of Artificial Sequence: Synthetic oligonucleotide
gcaugcaguaucucugaag

SEQ ID NO: 1318791 - RNA, 19 nt, Artificial Sequence
  Description of Artificial Sequence: Synthetic oligonucleotide
uccucucuaggccuccguc

SEQ ID NO: 1318792 - RNA, 19 nt, Artificial Sequence
  Description of Artificial Sequence: Synthetic oligonucleotide
ucgacccugggccccacca

SEQ ID NO: 1318793 - RNA, 19 nt, Artificial Sequence
  Description of Artificial Sequence: Synthetic oligonucleotide
acagcccacggugucuggc

SEQ ID NO: 1318794 - RNA, 19 nt, Artificial Sequence
  Description of Artificial Sequence: Synthetic oligonucleotide
gaaaggucggaugcucuca

SEQ ID NO: 1318795 - RNA, 19 nt, Artificial Sequence
  Description of Artificial Sequence: Synthetic oligonucleotide
cuuaacacaggugugcagu

SEQ ID NO: 1318796 - RNA, 19 nt, Artificial Sequence
  Description of Artificial Sequence: Synthetic oligonucleotide
guaggacaccacuuucuuc

SEQ ID NO: 1318797 - RNA, 19 nt, Artificial Sequence
  Description of Artificial Sequence: Synthetic oligonucleotide
ugauguuagucagcagauc

SEQ ID NO: 1318798 - RNA, 19 nt, Artificial Sequence
  Description of Artificial Sequence: Synthetic oligonucleotide
aagggguacaacagcucga

SEQ ID NO: 1318799 - RNA, 19 nt, Artificial Sequence
  Description of Artificial Sequence: Synthetic oligonucleotide
ccaaaggcggggaugcccg

SEQ ID NO: 1318800 - RNA, 19 nt, Artificial Sequence
  Description of Artificial Sequence: Synthetic oligonucleotide
acagcucgauaucccucuc

SEQ ID NO: 1318801 - RNA, 19 nt, Artificial Sequence
  Description of Artificial Sequence: Synthetic oligonucleotide
uguggguagcuagcgacau

SEQ ID NO: 1318802 - RNA, 19 nt, Artificial Sequence
  Description of Artificial Sequence: Synthetic oligonucleotide
ugacucgguuaggaucgcg

SEQ ID NO: 1318803 - RNA, 19 nt, Artificial Sequence
  Description of Artificial Sequence: Synthetic oligonucleotide
augcccggaacccaucgau

SEQ ID NO: 1318804 - RNA, 19 nt, Artificial Sequence
  Description of Artificial Sequence: Synthetic oligonucleotide
ggaugcccggaacccaucg

SEQ ID NO: 1318805 - RNA, 19 nt, Artificial Sequence
  Description of Artificial Sequence: Synthetic oligonucleotide
ggguacaacagcucgauau

SEQ ID NO: 1318806 - RNA, 19 nt, Artificial Sequence
  Description of Artificial Sequence: Synthetic oligonucleotide
auccucucaugccuaugga

SEQ ID NO: 1318807 - RNA, 19 nt, Artificial Sequence
  Description of Artificial Sequence: Synthetic oligonucleotide
gguacuugaccuucaccca

SEQ ID NO: 1318808 - RNA, 19 nt, Artificial Sequence
  Description of Artificial Sequence: Synthetic oligonucleotide
uauggaccaugaugcccug

SEQ ID NO: 1318809 - RNA, 19 nt, Artificial Sequence
  Description of Artificial Sequence: Synthetic oligonucleotide
gaagcggcugcccuccaaa

SEQ ID NO: 1318810 - RNA, 19 nt, Artificial Sequence
  Description of Artificial Sequence: Synthetic oligonucleotide
aucgauccugugguguaag

SEQ ID NO: 1318811 - RNA, 19 nt, Artificial Sequence
  Description of Artificial Sequence: Synthetic oligonucleotide
gcuagcgacaucacugcag

SEQ ID NO: 1318812 - RNA, 19 nt, Artificial Sequence
  Description of Artificial Sequence: Synthetic oligonucleotide
cacguggaugaaguggaug

SEQ ID NO: 1318813 - RNA, 19 nt, Artificial Sequence
  Description of Artificial Sequence: Synthetic oligonucleotide
cucgguuaggaucgcgcuc

SEQ ID NO: 1318814 - RNA, 19 nt, Artificial Sequence
  Description of Artificial Sequence: Synthetic oligonucleotide
ucgauccugugguguaagu

SEQ ID NO: 1318815 - RNA, 19 nt, Artificial Sequence
  Description of Artificial Sequence: Synthetic oligonucleotide
gcuuaacacaggugugcag

SEQ ID NO: 1318816 - RNA, 19 nt, Artificial Sequence
  Description of Artificial Sequence: Synthetic oligonucleotide
agcuagcgacaucacugca

SEQ ID NO: 1318817 - RNA, 19 nt, Artificial Sequence
  Description of Artificial Sequence: Synthetic oligonucleotide
gcccggaacccaucgaucc

SEQ ID NO: 1318818 - RNA, 19 nt, Artificial Sequence
  Description of Artificial Sequence: Synthetic oligonucleotide
cagcuggggaggcuucacg

SEQ ID NO: 1318819 - RNA, 19 nt, Artificial Sequence
  Description of Artificial Sequence: Synthetic oligonucleotide
aguggauguccagcccuuc

SEQ ID NO: 1318820 - RNA, 19 nt, Artificial Sequence
  Description of Artificial Sequence: Synthetic oligonucleotide
ccuauggaccaugaugccc

SEQ ID NO: 1318821 - RNA, 19 nt, Artificial Sequence
  Description of Artificial Sequence: Synthetic oligonucleotide
uucacgugguugggaacca

SEQ ID NO: 1318822 - RNA, 19 nt, Artificial Sequence
  Description of Artificial Sequence: Synthetic oligonucleotide
aacgcgggcccaggagagg

SEQ ID NO: 1318823 - RNA, 19 nt, Artificial Sequence
  Description of Artificial Sequence: Synthetic oligonucleotide
ccacgggugagucauucag

SEQ ID NO: 1318824 - RNA, 19 nt, Artificial Sequence
  Description of Artificial Sequence: Synthetic oligonucleotide
ccgagaaaucucccgaaac

SEQ ID NO: 1318825 - RNA, 19 nt, Artificial Sequence
  Description of Artificial Sequence: Synthetic oligonucleotide
agcaugcaguaucucugaa

SEQ ID NO: 1318826 - RNA, 19 nt, Artificial Sequence
  Description of Artificial Sequence: Synthetic oligonucleotide
gaugcccggaacccaucga

SEQ ID NO: 1318827 - RNA, 19 nt, Artificial Sequence
  Description of Artificial Sequence: Synthetic oligonucleotide
augacucgguuaggaucgc

SEQ ID NO: 1318828 - RNA, 19 nt, Artificial Sequence
  Description of Artificial Sequence: Synthetic oligonucleotide
gcaugacugaggaggaacc

SEQ ID NO: 1318829 - RNA, 19 nt, Artificial Sequence
  Description of Artificial Sequence: Synthetic oligonucleotide
ugcggauguccugggcuag

SEQ ID NO: 1318830 - RNA, 19 nt, Artificial Sequence
  Description of Artificial Sequence: Synthetic oligonucleotide
ccucucuaggccuccgucc

SEQ ID NO: 1318831 - RNA, 19 nt, Artificial Sequence
  Description of Artificial Sequence: Synthetic oligonucleotide
uagaagcgcugggaggaga

SEQ ID NO: 1318832 - RNA, 19 nt, Artificial Sequence
  Description of Artificial Sequence: Synthetic oligonucleotide
ugcucgucacucaggccau

SEQ ID NO: 1318833 - RNA, 19 nt, Artificial Sequence
  Description of Artificial Sequence: Synthetic oligonucleotide
acgugguugggaaccagcu

SEQ ID NO: 1318834 - RNA, 19 nt, Artificial Sequence
  Description of Artificial Sequence: Synthetic oligonucleotide
caaaggcggggaugcccgg

SEQ ID NO: 1318835 - RNA, 19 nt, Artificial Sequence
  Description of Artificial Sequence: Synthetic oligonucleotide
auuuaucaucaaagccaug

SEQ ID NO: 1318836 - RNA, 19 nt, Artificial Sequence
  Description of Artificial Sequence: Synthetic oligonucleotide
agcagcgggaugaucuugu

SEQ ID NO: 1318837 - RNA, 19 nt, Artificial Sequence
  Description of Artificial Sequence: Synthetic oligonucleotide
ucacgugguugggaaccag

SEQ ID NO: 1318838 - RNA, 19 nt, Artificial Sequence
  Description of Artificial Sequence: Synthetic oligonucleotide
gcgacaucacugcagcuca

SEQ ID NO: 1318839 - RNA, 19 nt, Artificial Sequence
  Description of Artificial Sequence: Synthetic oligonucleotide
gccauguggguagcuagcg

SEQ ID NO: 1318840 - RNA, 19 nt, Artificial Sequence
  Description of Artificial Sequence: Synthetic oligonucleotide
gcagaauagccagugggca

SEQ ID NO: 1318841 - RNA, 19 nt, Artificial Sequence
  Description of Artificial Sequence: Synthetic oligonucleotide
cacgggugagucauucaga

SEQ ID NO: 1318842 - RNA, 19 nt, Artificial Sequence
  Description of Artificial Sequence: Synthetic oligonucleotide
ccauaguggaagcggcugc

SEQ ID NO: 1318843 - RNA, 19 nt, Artificial Sequence
  Description of Artificial Sequence: Synthetic oligonucleotide
aggcggggaugcccggaac

SEQ ID NO: 1318844 - RNA, 19 nt, Artificial Sequence
  Description of Artificial Sequence: Synthetic oligonucleotide
auguuagucagcagaucuu

SEQ ID NO: 1318845 - RNA, 19 nt, Artificial Sequence
  Description of Artificial Sequence: Synthetic oligonucleotide
ggagaugagcuugggguac

SEQ ID NO: 1318846 - RNA, 19 nt, Artificial Sequence
  Description of Artificial Sequence: Synthetic oligonucleotide
aggucacgguauucugacu

SEQ ID NO: 1318847 - RNA, 19 nt, Artificial Sequence
  Description of Artificial Sequence: Synthetic oligonucleotide
ccuccaaaggcggggaugc

SEQ ID NO: 1318848 - RNA, 19 nt, Artificial Sequence
  Description of Artificial Sequence: Synthetic oligonucleotide
gugagucauucagagcaca

SEQ ID NO: 1318849 - RNA, 19 nt, Artificial Sequence
  Description of Artificial Sequence: Synthetic oligonucleotide
auguggguagcuagcgaca

SEQ ID NO: 1318850 - RNA, 19 nt, Artificial Sequence
  Description of Artificial Sequence: Synthetic oligonucleotide
ccagccgugcaccaucagc

SEQ ID NO: 1318851 - RNA, 19 nt, Artificial Sequence
  Description of Artificial Sequence: Synthetic oligonucleotide
gccuccguccuccagguca

SEQ ID NO: 1318852 - RNA, 19 nt, Artificial Sequence
  Description of Artificial Sequence: Synthetic oligonucleotide
caaacucguuccuccagua

SEQ ID NO: 1318853 - RNA, 19 nt, Artificial Sequence
  Description of Artificial Sequence: Synthetic oligonucleotide
uagcgacaucacugcagcu

SEQ ID NO: 1318854 - RNA, 19 nt, Artificial Sequence
  Description of Artificial Sequence: Synthetic oligonucleotide
caguaggacaccacuuucu

SEQ ID NO: 1318855 - RNA, 19 nt, Artificial Sequence
  Description of Artificial Sequence: Synthetic oligonucleotide
caccguauugaagccuuuc

SEQ ID NO: 1318856 - RNA, 19 nt, Artificial Sequence
  Description of Artificial Sequence: Synthetic oligonucleotide
caguguagccgagaaaucu

SEQ ID NO: 1318857 - RNA, 19 nt, Artificial Sequence
  Description of Artificial Sequence: Synthetic oligonucleotide
gccagugggcacaaagacc

SEQ ID NO: 1318858 - RNA, 19 nt, Artificial Sequence
  Description of Artificial Sequence: Synthetic oligonucleotide
aaguggauguccagcccuu

SEQ ID NO: 1318859 - RNA, 19 nt, Artificial Sequence
  Description of Artificial Sequence: Synthetic oligonucleotide
ggucuugaagugaggguac

SEQ ID NO: 1318860 - RNA, 19 nt, Artificial Sequence
  Description of Artificial Sequence: Synthetic oligonucleotide
acguuccauguaggaauag

SEQ ID NO: 1318861 - RNA, 19 nt, Artificial Sequence
  Description of Artificial Sequence: Synthetic oligonucleotide
ggcggggaugcccggaacc

SEQ ID NO: 1318862 - RNA, 19 nt, Artificial Sequence
  Description of Artificial Sequence: Synthetic oligonucleotide
cacccacuuuucuggagca

SEQ ID NO: 1318863 - RNA, 19 nt, Artificial Sequence
  Description of Artificial Sequence: Synthetic oligonucleotide
aggcccacgggugagucau

SEQ ID NO: 1318864 - RNA, 19 nt, Artificial Sequence
  Description of Artificial Sequence: Synthetic oligonucleotide
cuuccucucuaggccuccg

SEQ ID NO: 1318865 - RNA, 19 nt, Artificial Sequence
  Description of Artificial Sequence: Synthetic oligonucleotide
agccgugacaucagcuugu

SEQ ID NO: 1318866 - RNA, 19 nt, Artificial Sequence
  Description of Artificial Sequence: Synthetic oligonucleotide
ccgggagacaaaccaguag

SEQ ID NO: 1318867 - RNA, 19 nt, Artificial Sequence
  Description of Artificial Sequence: Synthetic oligonucleotide
ggaccaugaugcccuggcc

SEQ ID NO: 1318868 - RNA, 19 nt, Artificial Sequence
  Description of Artificial Sequence: Synthetic oligonucleotide
cugugguguaaguccuuga

SEQ ID NO: 1318869 - RNA, 19 nt, Artificial Sequence
  Description of Artificial Sequence: Synthetic oligonucleotide
acccaucgauccuguggug

SEQ ID NO: 1318870 - RNA, 19 nt, Artificial Sequence
  Description of Artificial Sequence: Synthetic oligonucleotide
uucgacccugggccccacc

SEQ ID NO: 1318871 - RNA, 19 nt, Artificial Sequence
  Description of Artificial Sequence: Synthetic oligonucleotide
ggucacgguauucugacuu

SEQ ID NO: 1318872 - RNA, 19 nt, Artificial Sequence
  Description of Artificial Sequence: Synthetic oligonucleotide
gguagcuagcgacaucacu

SEQ ID NO: 1318873 - RNA, 19 nt, Artificial Sequence
  Description of Artificial Sequence: Synthetic oligonucleotide
ucccgaaacgcgggcccag

SEQ ID NO: 1318874 - RNA, 19 nt, Artificial Sequence
  Description of Artificial Sequence: Synthetic oligonucleotide
gccuauggaccaugaugcc

SEQ ID NO: 1318875 - RNA, 19 nt, Artificial Sequence
  Description of Artificial Sequence: Synthetic oligonucleotide
ggugagucauucagagcac

SEQ ID NO: 1318876 - RNA, 19 nt, Artificial Sequence
  Description of Artificial Sequence: Synthetic oligonucleotide
ccuuucacgugguugggaa

SEQ ID NO: 1318877 - RNA, 19 nt, Artificial Sequence
  Description of Artificial Sequence: Synthetic oligonucleotide
cagcucgauaucccucuca

SEQ ID NO: 1318878 - RNA, 19 nt, Artificial Sequence
  Description of Artificial Sequence: Synthetic oligonucleotide
cuagaagcuugggcucuuc

SEQ ID NO: 1318879 - RNA, 19 nt, Artificial Sequence
  Description of Artificial Sequence: Synthetic oligonucleotide
gcaguaucucugaagggaa

SEQ ID NO: 1318880 - RNA, 19 nt, Artificial Sequence
  Description of Artificial Sequence: Synthetic oligonucleotide
aauagccagugggcacaaa

SEQ ID NO: 1318881 - RNA, 19 nt, Artificial Sequence
  Description of Artificial Sequence: Synthetic oligonucleotide
gaauagccagugggcacaa

SEQ ID NO: 1318882 - RNA, 19 nt, Artificial Sequence
  Description of Artificial Sequence: Synthetic oligonucleotide
ggcugcccuccaaaggcgg

SEQ ID NO: 1318883 - RNA, 19 nt, Artificial Sequence
  Description of Artificial Sequence: Synthetic oligonucleotide
auguucaagugcaggccuu

SEQ ID NO: 1318884 - RNA, 19 nt, Artificial Sequence
  Description of Artificial Sequence: Synthetic oligonucleotide
cugcuaaagccaugugggu

SEQ ID NO: 1318885 - RNA, 19 nt, Artificial Sequence
  Description of Artificial Sequence: Synthetic oligonucleotide
caucuucaagugguaaggu

SEQ ID NO: 1318886 - RNA, 19 nt, Artificial Sequence
  Description of Artificial Sequence: Synthetic oligonucleotide
agcccacggugucuggcuu

SEQ ID NO: 1318887 - RNA, 19 nt, Artificial Sequence
  Description of Artificial Sequence: Synthetic oligonucleotide
cgaaacgcgggcccaggag

SEQ ID NO: 1318888 - RNA, 19 nt, Artificial Sequence
  Description of Artificial Sequence: Synthetic oligonucleotide
cacgguauucugacuuggu

SEQ ID NO: 1318889 - RNA, 19 nt, Artificial Sequence
  Description of Artificial Sequence: Synthetic oligonucleotide
ggccaugggccuugggguc

SEQ ID NO: 1318890 - RNA, 19 nt, Artificial Sequence
  Description of Artificial Sequence: Synthetic oligonucleotide
gagggacagaugacuucaa

SEQ ID NO: 1318891 - RNA, 19 nt, Artificial Sequence
  Description of Artificial Sequence: Synthetic oligonucleotide
gccgagaaaucucccgaaa

SEQ ID NO: 1318892 - RNA, 19 nt, Artificial Sequence
  Description of Artificial Sequence: Synthetic oligonucleotide
guauucugacuugguccaa

SEQ ID NO: 1318893 - RNA, 19 nt, Artificial Sequence
  Description of Artificial Sequence: Synthetic oligonucleotide
cgugguugggaaccagcug

SEQ ID NO: 1318894 - RNA, 19 nt, Artificial Sequence
  Description of Artificial Sequence: Synthetic oligonucleotide
gcggggaugcccggaaccc

SEQ ID NO: 1318895 - RNA, 19 nt, Artificial Sequence
  Description of Artificial Sequence: Synthetic oligonucleotide
ccgccuugaauguagaauu

SEQ ID NO: 1318896 - RNA, 19 nt, Artificial Sequence
  Description of Artificial Sequence: Synthetic oligonucleotide
caucgauccugugguguaa

SEQ ID NO: 1318897 - RNA, 19 nt, Artificial Sequence
  Description of Artificial Sequence: Synthetic oligonucleotide
ccggaacccaucgauccug

SEQ ID NO: 1318898 - RNA, 19 nt, Artificial Sequence
  Description of Artificial Sequence: Synthetic oligonucleotide
gguacugguugagggucuc

SEQ ID NO: 1318899 - RNA, 19 nt, Artificial Sequence
  Description of Artificial Sequence: Synthetic oligonucleotide
gguccaaguagagaacuuu

SEQ ID NO: 1318900 - RNA, 19 nt, Artificial Sequence
  Description of Artificial Sequence: Synthetic oligonucleotide
cgauccugugguguaaguc

SEQ ID NO: 1318901 - RNA, 19 nt, Artificial Sequence
  Description of Artificial Sequence: Synthetic oligonucleotide
agcgcugggaggagacaau

SEQ ID NO: 1318902 - RNA, 19 nt, Artificial Sequence
  Description of Artificial Sequence: Synthetic oligonucleotide
ggcuucgacccugggcccc

SEQ ID NO: 1318903 - RNA, 19 nt, Artificial Sequence
  Description of Artificial Sequence: Synthetic oligonucleotide
aguccccgccuugaaugua

SEQ ID NO: 1318904 - RNA, 19 nt, Artificial Sequence
  Description of Artificial Sequence: Synthetic oligonucleotide
ccuccaguaggacaccacu

SEQ ID NO: 1318905 - RNA, 19 nt, Artificial Sequence
  Description of Artificial Sequence: Synthetic oligonucleotide
cgauaucccucucagugua

SEQ ID NO: 1318906 - RNA, 19 nt, Artificial Sequence
  Description of Artificial Sequence: Synthetic oligonucleotide
caggcccacgggugaguca

SEQ ID NO: 1318907 - RNA, 19 nt, Artificial Sequence
  Description of Artificial Sequence: Synthetic oligonucleotide
ccauguggguagcuagcga

SEQ ID NO: 1318908 - RNA, 19 nt, Artificial Sequence
  Description of Artificial Sequence: Synthetic oligonucleotide
ccaucgauccuguggugua

SEQ ID NO: 1318909 - RNA, 19 nt, Artificial Sequence
  Description of Artificial Sequence: Synthetic oligonucleotide
gcccagccgugacaucagc

SEQ ID NO: 1318910 - RNA, 19 nt, Artificial Sequence
  Description of Artificial Sequence: Synthetic oligonucleotide
cucccgaaacgcgggccca

SEQ ID NO: 1318911 - RNA, 19 nt, Artificial Sequence
  Description of Artificial Sequence: Synthetic oligonucleotide
ggguagcuagcgacaucac

SEQ ID NO: 1318912 - RNA, 19 nt, Artificial Sequence
  Description of Artificial Sequence: Synthetic oligonucleotide
cccuucaaucuuggucuug

SEQ ID NO: 1318913 - RNA, 19 nt, Artificial Sequence
  Description of Artificial Sequence: Synthetic oligonucleotide
gccagccgugcaccaucag

SEQ ID NO: 1318914 - RNA, 19 nt, Artificial Sequence
  Description of Artificial Sequence: Synthetic oligonucleotide
gcucgauaucccucucagu

SEQ ID NO: 1318915 - RNA, 19 nt, Artificial Sequence
  Description of Artificial Sequence: Synthetic oligonucleotide
cccgaaacgcgggcccagg

SEQ ID NO: 1318916 - RNA, 19 nt, Artificial Sequence
  Description of Artificial Sequence: Synthetic oligonucleotide
cuugaccuucacccacuuu

SEQ ID NO: 1318917 - RNA, 19 nt, Artificial Sequence
  Description of Artificial Sequence: Synthetic oligonucleotide
cagcaugacugaggaggaa

SEQ ID NO: 1318918 - RNA, 19 nt, Artificial Sequence
  Description of Artificial Sequence: Synthetic oligonucleotide
ccguauugaagccuuucuu

SEQ ID NO: 1318919 - RNA, 19 nt, Artificial Sequence
  Description of Artificial Sequence: Synthetic oligonucleotide
gggguacaacagcucgaua

SEQ ID NO: 1318920 - RNA, 19 nt, Artificial Sequence
  Description of Artificial Sequence: Synthetic oligonucleotide
cucuggcugagggcuucga

SEQ ID NO: 1318921 - RNA, 19 nt, Artificial Sequence
  Description of Artificial Sequence: Synthetic oligonucleotide
cuucgacccugggccccac

SEQ ID NO: 1318922 - RNA, 19 nt, Artificial Sequence
  Description of Artificial Sequence: Synthetic oligonucleotide
cccacgggugagucauuca

SEQ ID NO: 1318923 - RNA, 19 nt, Artificial Sequence
  Description of Artificial Sequence: Synthetic oligonucleotide
cccgggagacaaaccagua

SEQ ID NO: 1318924 - RNA, 19 nt, Artificial Sequence
  Description of Artificial Sequence: Synthetic oligonucleotide
cccgccuugaauguagaau

SEQ ID NO: 1318925 - RNA, 19 nt, Artificial Sequence
  Description of Artificial Sequence: Synthetic oligonucleotide
gccaccguauugaagccuu

SEQ ID NO: 1318926 - RNA, 19 nt, Artificial Sequence
  Description of Artificial Sequence: Synthetic oligonucleotide
gggaugcccggaacccauc

SEQ ID NO: 1318927 - RNA, 19 nt, Artificial Sequence
  Description of Artificial Sequence: Synthetic oligonucleotide
ccgaaacgcgggcccagga

SEQ ID NO: 1318928 - RNA, 19 nt, Artificial Sequence
  Description of Artificial Sequence: Synthetic oligonucleotide
ggagccccaguccccgccu

SEQ ID NO: 1318929 - RNA, 19 nt, Artificial Sequence
  Description of Artificial Sequence: Synthetic oligonucleotide
ggccaccguauugaagccu

SEQ ID NO: 1318930 - RNA, 19 nt, Artificial Sequence
  Description of Artificial Sequence: Synthetic oligonucleotide
gcucgucacucaggccaug

SEQ ID NO: 1318931 - RNA, 19 nt, Artificial Sequence
  Description of Artificial Sequence: Synthetic oligonucleotide
gcuucgacccugggcccca

SEQ ID NO: 1318932 - RNA, 19 nt, Artificial Sequence
  Description of Artificial Sequence: Synthetic oligonucleotide
gcggauguccugggcuaga

SEQ ID NO: 1318933 - RNA, 19 nt, Artificial Sequence
  Description of Artificial Sequence: Synthetic oligonucleotide
ggggaugcccggaacccau

SEQ ID NO: 1318934 - RNA, 19 nt, Artificial Sequence
  Description of Artificial Sequence: Synthetic oligonucleotide
ccccgccuugaauguagaa

SEQ ID NO: 1318935 - RNA, 19 nt, Artificial Sequence
  Description of Artificial Sequence: Synthetic oligonucleotide
cagugggcacaaagaccuu

SEQ ID NO: 1318936 - RNA, 19 nt, Artificial Sequence
  Description of Artificial Sequence: Synthetic oligonucleotide
cccggaacccaucgauccu

SEQ ID NO: 1318937 - RNA, 19 nt, Artificial Sequence
  Description of Artificial Sequence: Synthetic oligonucleotide
cgccuugaauguagaauuu

SEQ ID NO: 1318938 - RNA, 19 nt, Artificial Sequence
  Description of Artificial Sequence: Synthetic oligonucleotide
cggaacccaucgauccugu

SEQ ID NO: 1318939 - RNA, 19 nt, Artificial Sequence
  Description of Artificial Sequence: Synthetic oligonucleotide
cggggaugcccggaaccca

SEQ ID NO: 1318940 - RNA, 19 nt, Artificial Sequence
  Description of Artificial Sequence: Synthetic oligonucleotide
ccaccguauugaagccuuu

SEQ ID NO: 1318941 - RNA, 19 nt, Artificial Sequence
  Description of Artificial Sequence: Synthetic oligonucleotide
ggcccacgggugagucauu

SEQ ID NO: 1318942 - RNA, 19 nt, Artificial Sequence
  Description of Artificial Sequence: Synthetic oligonucleotide
aauauuaggguuauaauuc

SEQ ID NO: 1318943 - RNA, 19 nt, Artificial Sequence
  Description of Artificial Sequence: Synthetic oligonucleotide
aaaacaaaacaaaacaaac

SEQ ID NO: 1318944 - RNA, 19 nt, Artificial Sequence
  Description of Artificial Sequence: Synthetic oligonucleotide
aagaguagggcguugaagg

SEQ ID NO: 1318945 - RNA, 19 nt, Artificial Sequence
  Description of Artificial Sequence: Synthetic oligonucleotide
aaguuaguguauuacacag

SEQ ID NO: 1318946 - RNA, 19 nt, Artificial Sequence
  Description of Artificial Sequence: Synthetic oligonucleotide
aaauauuaggguuauaauu

SEQ ID NO: 1318947 - RNA, 19 nt, Artificial Sequence
  Description of Artificial Sequence: Synthetic oligonucleotide
uaguguauuacacagaaau

SEQ ID NO: 1318948 - RNA, 19 nt, Artificial Sequence
  Description of Artificial Sequence: Synthetic oligonucleotide
ugaugaucaacaaaucacc

SEQ ID NO: 1318949 - RNA, 19 nt, Artificial Sequence
  Description of Artificial Sequence: Synthetic oligonucleotide
aaagcuagauaaucuacug

SEQ ID NO: 1318950 - RNA, 19 nt, Artificial Sequence
  Description of Artificial Sequence: Synthetic oligonucleotide
uuuugcaggaagaacucgg

SEQ ID NO: 1318951 - RNA, 19 nt, Artificial Sequence
  Description of Artificial Sequence: Synthetic oligonucleotide
aaagcguguugauggagcc

SEQ ID NO: 1318952 - RNA, 19 nt, Artificial Sequence
  Description of Artificial Sequence: Synthetic oligonucleotide
aaaccaaggaucugcagug

SEQ ID NO: 1318953 - RNA, 19 nt, Artificial Sequence
  Description of Artificial Sequence: Synthetic oligonucleotide
agucaugucacacagggcu

SEQ ID NO: 1318954 - RNA, 19 nt, Artificial Sequence
  Description of Artificial Sequence: Synthetic oligonucleotide
aaaggagucagcugggaug

SEQ ID NO: 1318955 - RNA, 19 nt, Artificial Sequence
  Description of Artificial Sequence: Synthetic oligonucleotide
cacuaaaggagucagcugg

SEQ ID NO: 1318956 - RNA, 19 nt, Artificial Sequence
  Description of Artificial Sequence: Synthetic oligonucleotide
agucggauugucuuguggc

SEQ ID NO: 1318957 - RNA, 19 nt, Artificial Sequence
  Description of Artificial Sequence: Synthetic oligonucleotide
augaugaucaacaaaucac

SEQ ID NO: 1318958 - RNA, 19 nt, Artificial Sequence
  Description of Artificial Sequence: Synthetic oligonucleotide
aggugagaucacuugaacc

SEQ ID NO: 1318959 - RNA, 19 nt, Artificial Sequence
  Description of Artificial Sequence: Synthetic oligonucleotide
gaugaagaaaccaaggauc

SEQ ID NO: 1318960 - RNA, 19 nt, Artificial Sequence
  Description of Artificial Sequence: Synthetic oligonucleotide
acuggucauguucagggcc

SEQ ID NO: 1318961 - RNA, 19 nt, Artificial Sequence
  Description of Artificial Sequence: Synthetic oligonucleotide
acuguaacaaguuagugua

SEQ ID NO: 1318962 - RNA, 19 nt, Artificial Sequence
  Description of Artificial Sequence: Synthetic oligonucleotide
gauaaucuacuguaacaag

SEQ ID NO: 1318963 - RNA, 19 nt, Artificial Sequence
  Description of Artificial Sequence: Synthetic oligonucleotide
uauaauuccugccauucaa

SEQ ID NO: 1318964 - RNA, 19 nt, Artificial Sequence
  Description of Artificial Sequence: Synthetic oligonucleotide
uacuguaacaaguuagugu

SEQ ID NO: 1318965 - RNA, 19 nt, Artificial Sequence
  Description of Artificial Sequence: Synthetic oligonucleotide
gugacuucgacucaagagc

SEQ ID NO: 1318966 - RNA, 19 nt, Artificial Sequence
  Description of Artificial Sequence: Synthetic oligonucleotide
acguacaugaggcugguuc

SEQ ID NO: 1318967 - RNA, 19 nt, Artificial Sequence
  Description of Artificial Sequence: Synthetic oligonucleotide
ugucccaacauuauaggcu

SEQ ID NO: 1318968 - RNA, 19 nt, Artificial Sequence
  Description of Artificial Sequence: Synthetic oligonucleotide
gcugaaagcguguugaugg

SEQ ID NO: 1318969 - RNA, 19 nt, Artificial Sequence
  Description of Artificial Sequence: Synthetic oligonucleotide
ucuacuguaacaaguuagu

SEQ ID NO: 1318970 - RNA, 19 nt, Artificial Sequence
  Description of Artificial Sequence: Synthetic oligonucleotide
aaaggggucaauagggagg

SEQ ID NO: 1318971 - RNA, 19 nt, Artificial Sequence
  Description of Artificial Sequence: Synthetic oligonucleotide
uuaggguuauaauuccugc

SEQ ID NO: 1318972 - RNA, 19 nt, Artificial Sequence
  Description of Artificial Sequence: Synthetic oligonucleotide
ugugucccaacauuauagg

SEQ ID NO: 1318973 - RNA, 19 nt, Artificial Sequence
  Description of Artificial Sequence: Synthetic oligonucleotide
caaaacaaaacaaaacaaa

SEQ ID NO: 1318974 - RNA, 19 nt, Artificial Sequence
  Description of Artificial Sequence: Synthetic oligonucleotide
ucaacaaaucaccugugau

SEQ ID NO: 1318975 - RNA, 19 nt, Artificial Sequence
  Description of Artificial Sequence: Synthetic oligonucleotide
cuagauaaucuacuguaac

SEQ ID NO: 1318976 - RNA, 19 nt, Artificial Sequence
  Description of Artificial Sequence: Synthetic oligonucleotide
cuugguccaggccauagcg

SEQ ID NO: 1318977 - RNA, 19 nt, Artificial Sequence
  Description of Artificial Sequence: Synthetic oligonucleotide
aagcuagauaaucuacugu

SEQ ID NO: 1318978 - RNA, 19 nt, Artificial Sequence
  Description of Artificial Sequence: Synthetic oligonucleotide
uguauuacacagaaauauu

SEQ ID NO: 1318979 - RNA, 19 nt, Artificial Sequence
  Description of Artificial Sequence: Synthetic oligonucleotide
ucugaugcggcucuacacu

SEQ ID NO: 1318980 - RNA, 19 nt, Artificial Sequence
  Description of Artificial Sequence: Synthetic oligonucleotide
augaccacggugcguaagc

SEQ ID NO: 1318981 - RNA, 19 nt, Artificial Sequence
  Description of Artificial Sequence: Synthetic oligonucleotide
aggguuauaauuccugcca

SEQ ID NO: 1318982 - RNA, 19 nt, Artificial Sequence
  Description of Artificial Sequence: Synthetic oligonucleotide
augaucaacaaaucaccug

SEQ ID NO: 1318983 - RNA, 19 nt, Artificial Sequence
  Description of Artificial Sequence: Synthetic oligonucleotide
agcuagauaaucuacugua

SEQ ID NO: 1318984 - RNA, 19 nt, Artificial Sequence
  Description of Artificial Sequence: Synthetic oligonucleotide
auaaucuacuguaacaagu

SEQ ID NO: 1318985 - RNA, 19 nt, Artificial Sequence
  Description of Artificial Sequence: Synthetic oligonucleotide
ugacuucgacucaagagcu

SEQ ID NO: 1318986 - RNA, 19 nt, Artificial Sequence
  Description of Artificial Sequence: Synthetic oligonucleotide
agauaaucuacuguaacaa

SEQ ID NO: 1318987 - RNA, 19 nt, Artificial Sequence
  Description of Artificial Sequence: Synthetic oligonucleotide
guggacauuguguuuguag

SEQ ID NO: 1318988 - RNA, 19 nt, Artificial Sequence
  Description of Artificial Sequence: Synthetic oligonucleotide
uacaugggcacgaggagca

SEQ ID NO: 1318989 - RNA, 19 nt, Artificial Sequence
  Description of Artificial Sequence: Synthetic oligonucleotide
caugaugaucaacaaauca

SEQ ID NO: 1318990 - RNA, 19 nt, Artificial Sequence
  Description of Artificial Sequence: Synthetic oligonucleotide
uucagcucugaaguugucg

SEQ ID NO: 1318991 - RNA, 19 nt, Artificial Sequence
  Description of Artificial Sequence: Synthetic oligonucleotide
uaacaaguuaguguauuac

SEQ ID NO: 1318992 - RNA, 19 nt, Artificial Sequence
  Description of Artificial Sequence: Synthetic oligonucleotide
ggugagaucacuugaacca

SEQ ID NO: 1318993 - RNA, 19 nt, Artificial Sequence
  Description of Artificial Sequence: Synthetic oligonucleotide
agaugaucacugcaccccg

SEQ ID NO: 1318994 - RNA, 19 nt, Artificial Sequence
  Description of Artificial Sequence: Synthetic oligonucleotide
uuugcaggaagaacucgga

SEQ ID NO: 1318995 - RNA, 19 nt, Artificial Sequence
  Description of Artificial Sequence: Synthetic oligonucleotide
uacaaaccgggucauccgc

SEQ ID NO: 1318996 - RNA, 19 nt, Artificial Sequence
  Description of Artificial Sequence: Synthetic oligonucleotide
ugcaccccgaagcaucugg

SEQ ID NO: 1318997 - RNA, 19 nt, Artificial Sequence
  Description of Artificial Sequence: Synthetic oligonucleotide
gauguaguacaugggcacg

SEQ ID NO: 1318998 - RNA, 19 nt, Artificial Sequence
  Description of Artificial Sequence: Synthetic oligonucleotide
ucauugauaggaguccggc

SEQ ID NO: 1318999 - RNA, 19 nt, Artificial Sequence
  Description of Artificial Sequence: Synthetic oligonucleotide
aaucuacuguaacaaguua

SEQ ID NO: 1319000 - RNA, 19 nt, Artificial Sequence
  Description of Artificial Sequence: Synthetic oligonucleotide
gaacucggagggcugagag

SEQ ID NO: 1319001 - RNA, 19 nt, Artificial Sequence
  Description of Artificial Sequence: Synthetic oligonucleotide
caaaggggucaauagggag

SEQ ID NO: 1319002 - RNA, 19 nt, Artificial Sequence
  Description of Artificial Sequence: Synthetic oligonucleotide
cagugcaaggcucaaggcc

SEQ ID NO: 1319003 - RNA, 19 nt, Artificial Sequence
  Description of Artificial Sequence: Synthetic oligonucleotide
aaccgggucauccgcgagg

SEQ ID NO: 1319004 - RNA, 19 nt, Artificial Sequence
  Description of Artificial Sequence: Synthetic oligonucleotide
gaaagcguguugauggagc

SEQ ID NO: 1319005 - RNA, 19 nt, Artificial Sequence
  Description of Artificial Sequence: Synthetic oligonucleotide
auuaggguuauaauuccug

SEQ ID NO: 1319006 - RNA, 19 nt, Artificial Sequence
  Description of Artificial Sequence: Synthetic oligonucleotide
ugacugucaugcuugcuca

SEQ ID NO: 1319007 - RNA, 19 nt, Artificial Sequence
  Description of Artificial Sequence: Synthetic oligonucleotide
gaagaguagggcguugaag

SEQ ID NO: 1319008 - RNA, 19 nt, Artificial Sequence
  Description of Artificial Sequence: Synthetic oligonucleotide
uguguugacugucaugcuu

SEQ ID NO: 1319009 - RNA, 19 nt, Artificial Sequence
  Description of Artificial Sequence: Synthetic oligonucleotide
aucaacaaaucaccuguga

SEQ ID NO: 1319010 - RNA, 19 nt, Artificial Sequence
  Description of Artificial Sequence: Synthetic oligonucleotide
auccccgcaaaguugaaga

SEQ ID NO: 1319011 - RNA, 19 nt, Artificial Sequence
  Description of Artificial Sequence: Synthetic oligonucleotide
ccagucaugucacacaggg

SEQ ID NO: 1319012 - RNA, 19 nt, Artificial Sequence
  Description of Artificial Sequence: Synthetic oligonucleotide
cuacaaaccgggucauccg

SEQ ID NO: 1319013 - RNA, 19 nt, Artificial Sequence
  Description of Artificial Sequence: Synthetic oligonucleotide
aucaccugugaugacuucg

SEQ ID NO: 1319014 - RNA, 19 nt, Artificial Sequence
  Description of Artificial Sequence: Synthetic oligonucleotide
gaagaccugguguucugcc

SEQ ID NO: 1319015 - RNA, 19 nt, Artificial Sequence
  Description of Artificial Sequence: Synthetic oligonucleotide
ugguguucugccauccucu

SEQ ID NO: 1319016 - RNA, 19 nt, Artificial Sequence
  Description of Artificial Sequence: Synthetic oligonucleotide
agcgagagggucacaaagc

SEQ ID NO: 1319017 - RNA, 19 nt, Artificial Sequence
  Description of Artificial Sequence: Synthetic oligonucleotide
ggcacgaaaacucucccag

SEQ ID NO: 1319018 - RNA, 19 nt, Artificial Sequence
  Description of Artificial Sequence: Synthetic oligonucleotide
augaagaaaccaaggaucu

SEQ ID NO: 1319019 - RNA, 19 nt, Artificial Sequence
  Description of Artificial Sequence: Synthetic oligonucleotide
ugucggcccacuuugcuga

SEQ ID NO: 1319020 - RNA, 19 nt, Artificial Sequence
  Description of Artificial Sequence: Synthetic oligonucleotide
aggccugugaagaugauca

SEQ ID NO: 1319021 - RNA, 19 nt, Artificial Sequence
  Description of Artificial Sequence: Synthetic oligonucleotide
cauagcguuggacagguga

SEQ ID NO: 1319022 - RNA, 19 nt, Artificial Sequence
  Description of Artificial Sequence: Synthetic oligonucleotide
gaaauauuaggguuauaau

SEQ ID NO: 1319023 - RNA, 19 nt, Artificial Sequence
  Description of Artificial Sequence: Synthetic oligonucleotide
caucauugauaggaguccg

SEQ ID NO: 1319024 - RNA, 19 nt, Artificial Sequence
  Description of Artificial Sequence: Synthetic oligonucleotide
gacaggugagaucacuuga

SEQ ID NO: 1319025 - RNA, 19 nt, Artificial Sequence
  Description of Artificial Sequence: Synthetic oligonucleotide
ucauagcccaccagucugc

SEQ ID NO: 1319026 - RNA, 19 nt, Artificial Sequence
  Description of Artificial Sequence: Synthetic oligonucleotide
uguaacaaguuaguguauu

SEQ ID NO: 1319027 - RNA, 19 nt, Artificial Sequence
  Description of Artificial Sequence: Synthetic oligonucleotide
uggauggugcaguccauug

SEQ ID NO: 1319028 - RNA, 19 nt, Artificial Sequence
  Description of Artificial Sequence: Synthetic oligonucleotide
acaaaucaccugugaugac

SEQ ID NO: 1319029 - RNA, 19 nt, Artificial Sequence
  Description of Artificial Sequence: Synthetic oligonucleotide
gugucccaacauuauaggc

SEQ ID NO: 1319030 - RNA, 19 nt, Artificial Sequence
  Description of Artificial Sequence: Synthetic oligonucleotide
ucacccaacagucucucuu

SEQ ID NO: 1319031 - RNA, 19 nt, Artificial Sequence
  Description of Artificial Sequence: Synthetic oligonucleotide
ugaaagcguguugauggag

SEQ ID NO: 1319032 - RNA, 19 nt, Artificial Sequence
  Description of Artificial Sequence: Synthetic oligonucleotide
uccagucaugucacacagg

SEQ ID NO: 1319033 - RNA, 19 nt, Artificial Sequence
  Description of Artificial Sequence: Synthetic oligonucleotide
uucccacuaaaggagucag

SEQ ID NO: 1319034 - RNA, 19 nt, Artificial Sequence
  Description of Artificial Sequence: Synthetic oligonucleotide
ugagcggguggacauugug

SEQ ID NO: 1319035 - RNA, 19 nt, Artificial Sequence
  Description of Artificial Sequence: Synthetic oligonucleotide
gauggugcaguccauugua

SEQ ID NO: 1319036 - RNA, 19 nt, Artificial Sequence
  Description of Artificial Sequence: Synthetic oligonucleotide
aggaauaagagaagaccug

SEQ ID NO: 1319037 - RNA, 19 nt, Artificial Sequence
  Description of Artificial Sequence: Synthetic oligonucleotide
uucgcugagcuuguguuga

SEQ ID NO: 1319038 - RNA, 19 nt, Artificial Sequence
  Description of Artificial Sequence: Synthetic oligonucleotide
gauguucgaaguugugcuc

SEQ ID NO: 1319039 - RNA, 19 nt, Artificial Sequence
  Description of Artificial Sequence: Synthetic oligonucleotide
acuaaaggagucagcuggg

SEQ ID NO: 1319040 - RNA, 19 nt, Artificial Sequence
  Description of Artificial Sequence: Synthetic oligonucleotide
guguauuacacagaaauau

SEQ ID NO: 1319041 - RNA, 19 nt, Artificial Sequence
  Description of Artificial Sequence: Synthetic oligonucleotide
auagcguuggacaggugag

SEQ ID NO: 1319042 - RNA, 19 nt, Artificial Sequence
  Description of Artificial Sequence: Synthetic oligonucleotide
gaggcacgaaaacucuccc

SEQ ID NO: 1319043 - RNA, 19 nt, Artificial Sequence
  Description of Artificial Sequence: Synthetic oligonucleotide
uguugacugucaugcuugc

SEQ ID NO: 1319044 - RNA, 19 nt, Artificial Sequence
  Description of Artificial Sequence: Synthetic oligonucleotide
acuucgcugagcuuguguu

SEQ ID NO: 1319045 - RNA, 19 nt, Artificial Sequence
  Description of Artificial Sequence: Synthetic oligonucleotide
uugucggcccacuuugcug

SEQ ID NO: 1319046 - RNA, 19 nt, Artificial Sequence
  Description of Artificial Sequence: Synthetic oligonucleotide
aagccaaagaagcccucaa

SEQ ID NO: 1319047 - RNA, 19 nt, Artificial Sequence
  Description of Artificial Sequence: Synthetic oligonucleotide
aagcguguugauggagccg

SEQ ID NO: 1319048 - RNA, 19 nt, Artificial Sequence
  Description of Artificial Sequence: Synthetic oligonucleotide
aaaucaccugugaugacuu

SEQ ID NO: 1319049 - RNA, 19 nt, Artificial Sequence
  Description of Artificial Sequence: Synthetic oligonucleotide
ugcugaaagcguguugaug

SEQ ID NO: 1319050 - RNA, 19 nt, Artificial Sequence
  Description of Artificial Sequence: Synthetic oligonucleotide
aacucggagggcugagagu

SEQ ID NO: 1319051 - RNA, 19 nt, Artificial Sequence
  Description of Artificial Sequence: Synthetic oligonucleotide
gcugucuagcaccaugcgg

SEQ ID NO: 1319052 - RNA, 19 nt, Artificial Sequence
  Description of Artificial Sequence: Synthetic oligonucleotide
gaucaacaaaucaccugug

SEQ ID NO: 1319053 - RNA, 19 nt, Artificial Sequence
  Description of Artificial Sequence: Synthetic oligonucleotide
gucaauagggagggguggg

SEQ ID NO: 1319054 - RNA, 19 nt, Artificial Sequence
  Description of Artificial Sequence: Synthetic oligonucleotide
agucccacaaugguggcca

SEQ ID NO: 1319055 - RNA, 19 nt, Artificial Sequence
  Description of Artificial Sequence: Synthetic oligonucleotide
uggugacuucgacucaaga

SEQ ID NO: 1319056 - RNA, 19 nt, Artificial Sequence
  Description of Artificial Sequence: Synthetic oligonucleotide
cagcgaggcacgaaaacuc

SEQ ID NO: 1319057 - RNA, 19 nt, Artificial Sequence
  Description of Artificial Sequence: Synthetic oligonucleotide
gugagaucacuugaaccag

SEQ ID NO: 1319058 - RNA, 19 nt, Artificial Sequence
  Description of Artificial Sequence: Synthetic oligonucleotide
agcaguugcccaaaggggu

SEQ ID NO: 1319059 - RNA, 19 nt, Artificial Sequence
  Description of Artificial Sequence: Synthetic oligonucleotide
cacgaaaacucucccagga

SEQ ID NO: 1319060 - RNA, 19 nt, Artificial Sequence
  Description of Artificial Sequence: Synthetic oligonucleotide
acagaaauauuaggguuau

SEQ ID NO: 1319061 - RNA, 19 nt, Artificial Sequence
  Description of Artificial Sequence: Synthetic oligonucleotide
ucuacacuggagucggauu

SEQ ID NO: 1319062 - RNA, 19 nt, Artificial Sequence
  Description of Artificial Sequence: Synthetic oligonucleotide
aucauugauaggaguccgg

SEQ ID NO: 1319063 - RNA, 19 nt, Artificial Sequence
  Description of Artificial Sequence: Synthetic oligonucleotide
uauaggcuucaggaauaag

SEQ ID NO: 1319064 - RNA, 19 nt, Artificial Sequence
  Description of Artificial Sequence: Synthetic oligonucleotide
ucauccgcgagguggugac

SEQ ID NO: 1319065 - RNA, 19 nt, Artificial Sequence
  Description of Artificial Sequence: Synthetic oligonucleotide
guaacaaguuaguguauua

SEQ ID NO: 1319066 - RNA, 19 nt, Artificial Sequence
  Description of Artificial Sequence: Synthetic oligonucleotide
gcguaagcugucuagcacc

SEQ ID NO: 1319067 - RNA, 19 nt, Artificial Sequence
  Description of Artificial Sequence: Synthetic oligonucleotide
cacccaacagucucucuug

SEQ ID NO: 1319068 - RNA, 19 nt, Artificial Sequence
  Description of Artificial Sequence: Synthetic oligonucleotide
uacuugguccaggccauag

SEQ ID NO: 1319069 - RNA, 19 nt, Artificial Sequence
  Description of Artificial Sequence: Synthetic oligonucleotide
cuucgcugagcuuguguug

SEQ ID NO: 1319070 - RNA, 19 nt, Artificial Sequence
  Description of Artificial Sequence: Synthetic oligonucleotide
ugccauucaaguucacauu

SEQ ID NO: 1319071 - RNA, 19 nt, Artificial Sequence
  Description of Artificial Sequence: Synthetic oligonucleotide
cugauccccgcaaaguuga

SEQ ID NO: 1319072 - RNA, 19 nt, Artificial Sequence
  Description of Artificial Sequence: Synthetic oligonucleotide
acugauccccgcaaaguug

SEQ ID NO: 1319073 - RNA, 19 nt, Artificial Sequence
  Description of Artificial Sequence: Synthetic oligonucleotide
agcggguggacauuguguu

SEQ ID NO: 1319074 - RNA, 19 nt, Artificial Sequence
  Description of Artificial Sequence: Synthetic oligonucleotide
acaaaccgggucauccgcg

SEQ ID NO: 1319075 - RNA, 19 nt, Artificial Sequence
  Description of Artificial Sequence: Synthetic oligonucleotide
cuccgguugaggaaggcca

SEQ ID NO: 1319076 - RNA, 19 nt, Artificial Sequence
  Description of Artificial Sequence: Synthetic oligonucleotide
ucccacuaaaggagucagc

SEQ ID NO: 1319077 - RNA, 19 nt, Artificial Sequence
  Description of Artificial Sequence: Synthetic oligonucleotide
gaggcacuggucauguuca

SEQ ID NO: 1319078 - RNA, 19 nt, Artificial Sequence
  Description of Artificial Sequence: Synthetic oligonucleotide
gucagcgaggccaaccacc

SEQ ID NO: 1319079 - RNA, 19 nt, Artificial Sequence
  Description of Artificial Sequence: Synthetic oligonucleotide
agaacaggccugugaagau

SEQ ID NO: 1319080 - RNA, 19 nt, Artificial Sequence
  Description of Artificial Sequence: Synthetic oligonucleotide
gaagcuugaggcacugguc

SEQ ID NO: 1319081 - RNA, 19 nt, Artificial Sequence
  Description of Artificial Sequence: Synthetic oligonucleotide
cuggagucggauugucuug

SEQ ID NO: 1319082 - RNA, 19 nt, Artificial Sequence
  Description of Artificial Sequence: Synthetic oligonucleotide
uacaugaggcugguuccag

SEQ ID NO: 1319083 - RNA, 19 nt, Artificial Sequence
  Description of Artificial Sequence: Synthetic oligonucleotide
agugccagccuccgguuga

SEQ ID NO: 1319084 - RNA, 19 nt, Artificial Sequence
  Description of Artificial Sequence: Synthetic oligonucleotide
agggcacucauagcccacc

SEQ ID NO: 1319085 - RNA, 19 nt, Artificial Sequence
  Description of Artificial Sequence: Synthetic oligonucleotide
gauccccgcaaaguugaag

SEQ ID NO: 1319086 - RNA, 19 nt, Artificial Sequence
  Description of Artificial Sequence: Synthetic oligonucleotide
gaugaccacggugcguaag

SEQ ID NO: 1319087 - RNA, 19 nt, Artificial Sequence
  Description of Artificial Sequence: Synthetic oligonucleotide
gggauguucgaaguugugc

SEQ ID NO: 1319088 - RNA, 19 nt, Artificial Sequence
  Description of Artificial Sequence: Synthetic oligonucleotide
aguuaguguauuacacaga

SEQ ID NO: 1319089 - RNA, 19 nt, Artificial Sequence
  Description of Artificial Sequence: Synthetic oligonucleotide
guugauggagccggugacc

SEQ ID NO: 1319090 - RNA, 19 nt, Artificial Sequence
  Description of Artificial Sequence: Synthetic oligonucleotide
uuggacaggugagaucacu

SEQ ID NO: 1319091 - RNA, 19 nt, Artificial Sequence
  Description of Artificial Sequence: Synthetic oligonucleotide
ggcaucauugauaggaguc

SEQ ID NO: 1319092 - RNA, 19 nt, Artificial Sequence
  Description of Artificial Sequence: Synthetic oligonucleotide
acgaaaacucucccaggaa

SEQ ID NO: 1319093 - RNA, 19 nt, Artificial Sequence
  Description of Artificial Sequence: Synthetic oligonucleotide
ugucuagcaccaugcgggu

SEQ ID NO: 1319094 - RNA, 19 nt, Artificial Sequence
  Description of Artificial Sequence: Synthetic oligonucleotide
cacuggucauguucagggc

SEQ ID NO: 1319095 - RNA, 19 nt, Artificial Sequence
  Description of Artificial Sequence: Synthetic oligonucleotide
ggauguucgaaguugugcu

SEQ ID NO: 1319096 - RNA, 19 nt, Artificial Sequence
  Description of Artificial Sequence: Synthetic oligonucleotide
ggacaggugagaucacuug

SEQ ID NO: 1319097 - RNA, 19 nt, Artificial Sequence
  Description of Artificial Sequence: Synthetic oligonucleotide
aggcacgaaaacucuccca

SEQ ID NO: 1319098 - RNA, 19 nt, Artificial Sequence
  Description of Artificial Sequence: Synthetic oligonucleotide
ggcucuacacuggagucgg

SEQ ID NO: 1319099 - RNA, 19 nt, Artificial Sequence
  Description of Artificial Sequence: Synthetic oligonucleotide
ggucaauagggaggggugg

SEQ ID NO: 1319100 - RNA, 19 nt, Artificial Sequence
  Description of Artificial Sequence: Synthetic oligonucleotide
aggccacugagaacaggcc

SEQ ID NO: 1319101 - RNA, 19 nt, Artificial Sequence
  Description of Artificial Sequence: Synthetic oligonucleotide
aguugucggcccacuuugc

SEQ ID NO: 1319102 - RNA, 19 nt, Artificial Sequence
  Description of Artificial Sequence: Synthetic oligonucleotide
cagucaugucacacagggc

SEQ ID NO: 1319103 - RNA, 19 nt, Artificial Sequence
  Description of Artificial Sequence: Synthetic oligonucleotide
agaagaguagggcguugaa

SEQ ID NO: 1319104 - RNA, 19 nt, Artificial Sequence
  Description of Artificial Sequence: Synthetic oligonucleotide
gaggucagcgaggccaacc

SEQ ID NO: 1319105 - RNA, 19 nt, Artificial Sequence
  Description of Artificial Sequence: Synthetic oligonucleotide
uuguguugacugucaugcu

SEQ ID NO: 1319106 - RNA, 19 nt, Artificial Sequence
  Description of Artificial Sequence: Synthetic oligonucleotide
ucggauugucuuguggcuc

SEQ ID NO: 1319107 - RNA, 19 nt, Artificial Sequence
  Description of Artificial Sequence: Synthetic oligonucleotide
auguaguacaugggcacga

SEQ ID NO: 1319108 - RNA, 19 nt, Artificial Sequence
  Description of Artificial Sequence: Synthetic oligonucleotide
caccaucuggauggcaacg

SEQ ID NO: 1319109 - RNA, 19 nt, Artificial Sequence
  Description of Artificial Sequence: Synthetic oligonucleotide
gaaguugugcuccuugcuu

SEQ ID NO: 1319110 - RNA, 19 nt, Artificial Sequence
  Description of Artificial Sequence: Synthetic oligonucleotide
ugccauacccaggucugug

SEQ ID NO: 1319111 - RNA, 19 nt, Artificial Sequence
  Description of Artificial Sequence: Synthetic oligonucleotide
cugccauucaaguucacau

SEQ ID NO: 1319112 - RNA, 19 nt, Artificial Sequence
  Description of Artificial Sequence: Synthetic oligonucleotide
cgaaaacucucccaggaac

SEQ ID NO: 1319113 - RNA, 19 nt, Artificial Sequence
  Description of Artificial Sequence: Synthetic oligonucleotide
ugucggcccaccuggcaga

SEQ ID NO: 1319114 - RNA, 19 nt, Artificial Sequence
  Description of Artificial Sequence: Synthetic oligonucleotide
cguacaugaggcugguucc

SEQ ID NO: 1319115 - RNA, 19 nt, Artificial Sequence
  Description of Artificial Sequence: Synthetic oligonucleotide
gcacgaaaacucucccagg

SEQ ID NO: 1319116 - RNA, 19 nt, Artificial Sequence
  Description of Artificial Sequence: Synthetic oligonucleotide
ggugcguaagcugucuagc

SEQ ID NO: 1319117 - RNA, 19 nt, Artificial Sequence
  Description of Artificial Sequence: Synthetic oligonucleotide
gugcguaagcugucuagca

SEQ ID NO: 1319118 - RNA, 19 nt, Artificial Sequence
  Description of Artificial Sequence: Synthetic oligonucleotide
uugugcuccuugcuuccuc

SEQ ID NO: 1319119 - RNA, 19 nt, Artificial Sequence
  Description of Artificial Sequence: Synthetic oligonucleotide
cugucaugcuugcucagga

SEQ ID NO: 1319120 - RNA, 19 nt, Artificial Sequence
  Description of Artificial Sequence: Synthetic oligonucleotide
ccacuuugcugaaagcgug

SEQ ID NO: 1319121 - RNA, 19 nt, Artificial Sequence
  Description of Artificial Sequence: Synthetic oligonucleotide
uccccgcaaaguugaagaa

SEQ ID NO: 1319122 - RNA, 19 nt, Artificial Sequence
  Description of Artificial Sequence: Synthetic oligonucleotide
accaucuggauggcaacga

SEQ ID NO: 1319123 - RNA, 19 nt, Artificial Sequence
  Description of Artificial Sequence: Synthetic oligonucleotide
uggaagcuugaggcacugg

SEQ ID NO: 1319124 - RNA, 19 nt, Artificial Sequence
  Description of Artificial Sequence: Synthetic oligonucleotide
acacuggagucggauuguc

SEQ ID NO: 1319125 - RNA, 19 nt, Artificial Sequence
  Description of Artificial Sequence: Synthetic oligonucleotide
caaaucaccugugaugacu

SEQ ID NO: 1319126 - RNA, 19 nt, Artificial Sequence
  Description of Artificial Sequence: Synthetic oligonucleotide
cucccaggaacaugcccac

SEQ ID NO: 1319127 - RNA, 19 nt, Artificial Sequence
  Description of Artificial Sequence: Synthetic oligonucleotide
uugcugaaagcguguugau

SEQ ID NO: 1319128 - RNA, 19 nt, Artificial Sequence
  Description of Artificial Sequence: Synthetic oligonucleotide
gguuccagucaugucacac

SEQ ID NO: 1319129 - RNA, 19 nt, Artificial Sequence
  Description of Artificial Sequence: Synthetic oligonucleotide
uagcguuggacaggugaga

SEQ ID NO: 1319130 - RNA, 19 nt, Artificial Sequence
  Description of Artificial Sequence: Synthetic oligonucleotide
ucggagggcugagagugga

SEQ ID NO: 1319131 - RNA, 19 nt, Artificial Sequence
  Description of Artificial Sequence: Synthetic oligonucleotide
cugaaagcguguugaugga

SEQ ID NO: 1319132 - RNA, 19 nt, Artificial Sequence
  Description of Artificial Sequence: Synthetic oligonucleotide
agcguuggacaggugagau

SEQ ID NO: 1319133 - RNA, 19 nt, Artificial Sequence
  Description of Artificial Sequence: Synthetic oligonucleotide
cgaggcacgaaaacucucc

SEQ ID NO: 1319134 - RNA, 19 nt, Artificial Sequence
  Description of Artificial Sequence: Synthetic oligonucleotide
ggcacucaguuccuuggug

SEQ ID NO: 1319135 - RNA, 19 nt, Artificial Sequence
  Description of Artificial Sequence: Synthetic oligonucleotide
gucccaacauuauaggcuu

SEQ ID NO: 1319136 - RNA, 19 nt, Artificial Sequence
  Description of Artificial Sequence: Synthetic oligonucleotide
accaugcgggugguggcac

SEQ ID NO: 1319137 - RNA, 19 nt, Artificial Sequence
  Description of Artificial Sequence: Synthetic oligonucleotide
ugaccacggugcguaagcu

SEQ ID NO: 1319138 - RNA, 19 nt, Artificial Sequence
  Description of Artificial Sequence: Synthetic oligonucleotide
ccaugaugaucaacaaauc

SEQ ID NO: 1319139 - RNA, 19 nt, Artificial Sequence
  Description of Artificial Sequence: Synthetic oligonucleotide
ucccacgaggguucccacu

SEQ ID NO: 1319140 - RNA, 19 nt, Artificial Sequence
  Description of Artificial Sequence: Synthetic oligonucleotide
aacgaugaucugggccaug

SEQ ID NO: 1319141 - RNA, 19 nt, Artificial Sequence
  Description of Artificial Sequence: Synthetic oligonucleotide
agcgaggcacgaaaacucu

SEQ ID NO: 1319142 - RNA, 19 nt, Artificial Sequence
  Description of Artificial Sequence: Synthetic oligonucleotide
ucccaacauuauaggcuuc

SEQ ID NO: 1319143 - RNA, 19 nt, Artificial Sequence
  Description of Artificial Sequence: Synthetic oligonucleotide
ggugacacugauccccgca

SEQ ID NO: 1319144 - RNA, 19 nt, Artificial Sequence
  Description of Artificial Sequence: Synthetic oligonucleotide
cguugaaggucugaugcgg

SEQ ID NO: 1319145 - RNA, 19 nt, Artificial Sequence
  Description of Artificial Sequence: Synthetic oligonucleotide
caaaccgggucauccgcga

SEQ ID NO: 1319146 - RNA, 19 nt, Artificial Sequence
  Description of Artificial Sequence: Synthetic oligonucleotide
gggucaauagggaggggug

SEQ ID NO: 1319147 - RNA, 19 nt, Artificial Sequence
  Description of Artificial Sequence: Synthetic oligonucleotide
agggcguugaaggucugau

SEQ ID NO: 1319148 - RNA, 19 nt, Artificial Sequence
  Description of Artificial Sequence: Synthetic oligonucleotide
cauugauaggaguccggcu

SEQ ID NO: 1319149 - RNA, 19 nt, Artificial Sequence
  Description of Artificial Sequence: Synthetic oligonucleotide
cguuggacaggugagauca

SEQ ID NO: 1319150 - RNA, 19 nt, Artificial Sequence
  Description of Artificial Sequence: Synthetic oligonucleotide
cuaaaggagucagcuggga

SEQ ID NO: 1319151 - RNA, 19 nt, Artificial Sequence
  Description of Artificial Sequence: Synthetic oligonucleotide
ggcacucauagcccaccag

SEQ ID NO: 1319152 - RNA, 19 nt, Artificial Sequence
  Description of Artificial Sequence: Synthetic oligonucleotide
ugcccacccacuggcuuag

SEQ ID NO: 1319153 - RNA, 19 nt, Artificial Sequence
  Description of Artificial Sequence: Synthetic oligonucleotide
gucggauugucuuguggcu

SEQ ID NO: 1319154 - RNA, 19 nt, Artificial Sequence
  Description of Artificial Sequence: Synthetic oligonucleotide
ugcccugagcggguggaca

SEQ ID NO: 1319155 - RNA, 19 nt, Artificial Sequence
  Description of Artificial Sequence: Synthetic oligonucleotide
ggcagcgaggcacgaaaac

SEQ ID NO: 1319156 - RNA, 19 nt, Artificial Sequence
  Description of Artificial Sequence: Synthetic oligonucleotide
agaacucggagggcugaga

SEQ ID NO: 1319157 - RNA, 19 nt, Artificial Sequence
  Description of Artificial Sequence: Synthetic oligonucleotide
accgggucauccgcgaggu

SEQ ID NO: 1319158 - RNA, 19 nt, Artificial Sequence
  Description of Artificial Sequence: Synthetic oligonucleotide
gaguccggcugucacccaa

SEQ ID NO: 1319159 - RNA, 19 nt, Artificial Sequence
  Description of Artificial Sequence: Synthetic oligonucleotide
augcccacccacuggcuua

SEQ ID NO: 1319160 - RNA, 19 nt, Artificial Sequence
  Description of Artificial Sequence: Synthetic oligonucleotide
gcuagauaaucuacuguaa

SEQ ID NO: 1319161 - RNA, 19 nt, Artificial Sequence
  Description of Artificial Sequence: Synthetic oligonucleotide
agguggugacuucgacuca

SEQ ID NO: 1319162 - RNA, 19 nt, Artificial Sequence
  Description of Artificial Sequence: Synthetic oligonucleotide
ugauccccgcaaaguugaa

SEQ ID NO: 1319163 - RNA, 19 nt, Artificial Sequence
  Description of Artificial Sequence: Synthetic oligonucleotide
guggguggaaggucuccca

SEQ ID NO: 1319164 - RNA, 19 nt, Artificial Sequence
  Description of Artificial Sequence: Synthetic oligonucleotide
uagggcguugaaggucuga

SEQ ID NO: 1319165 - RNA, 19 nt, Artificial Sequence
  Description of Artificial Sequence: Synthetic oligonucleotide
caguggguggaaggucucc

SEQ ID NO: 1319166 - RNA, 19 nt, Artificial Sequence
  Description of Artificial Sequence: Synthetic oligonucleotide
ggucucccagcccagugca

SEQ ID NO: 1319167 - RNA, 19 nt, Artificial Sequence
  Description of Artificial Sequence: Synthetic oligonucleotide
agggauguucgaaguugug

SEQ ID NO: 1319168 - RNA, 19 nt, Artificial Sequence
  Description of Artificial Sequence: Synthetic oligonucleotide
ggaagaacucggagggcug

SEQ ID NO: 1319169 - RNA, 19 nt, Artificial Sequence
  Description of Artificial Sequence: Synthetic oligonucleotide
caucccacgaggguuccca

SEQ ID NO: 1319170 - RNA, 19 nt, Artificial Sequence
  Description of Artificial Sequence: Synthetic oligonucleotide
guggugacuucgacucaag

SEQ ID NO: 1319171 - RNA, 19 nt, Artificial Sequence
  Description of Artificial Sequence: Synthetic oligonucleotide
gccggugaccagcaugagc

SEQ ID NO: 1319172 - RNA, 19 nt, Artificial Sequence
  Description of Artificial Sequence: Synthetic oligonucleotide
gcacucauagcccaccagu

SEQ ID NO: 1319173 - RNA, 19 nt, Artificial Sequence
  Description of Artificial Sequence: Synthetic oligonucleotide
caaugguggccaggaugcc

SEQ ID NO: 1319174 - RNA, 19 nt, Artificial Sequence
  Description of Artificial Sequence: Synthetic oligonucleotide
gcacgaggagcagcgagag

SEQ ID NO: 1319175 - RNA, 19 nt, Artificial Sequence
  Description of Artificial Sequence: Synthetic oligonucleotide
gguguucugccauccucuc

SEQ ID NO: 1319176 - RNA, 19 nt, Artificial Sequence
  Description of Artificial Sequence: Synthetic oligonucleotide
auagcccaccagucugcau

SEQ ID NO: 1319177 - RNA, 19 nt, Artificial Sequence
  Description of Artificial Sequence: Synthetic oligonucleotide
ggcaagaagaguagggcgu

SEQ ID NO: 1319178 - RNA, 19 nt, Artificial Sequence
  Description of Artificial Sequence: Synthetic oligonucleotide
ccaacauuauaggcuucag

SEQ ID NO: 1319179 - RNA, 19 nt, Artificial Sequence
  Description of Artificial Sequence: Synthetic oligonucleotide
uccgcgagguggugacuuc

SEQ ID NO: 1319180 - RNA, 19 nt, Artificial Sequence
  Description of Artificial Sequence: Synthetic oligonucleotide
agaugaccacggugcguaa

SEQ ID NO: 1319181 - RNA, 19 nt, Artificial Sequence
  Description of Artificial Sequence: Synthetic oligonucleotide
gaagcccucaaugcccacu

SEQ ID NO: 1319182 - RNA, 19 nt, Artificial Sequence
  Description of Artificial Sequence: Synthetic oligonucleotide
ggggcugucggcccaccug

SEQ ID NO: 1319183 - RNA, 19 nt, Artificial Sequence
  Description of Artificial Sequence: Synthetic oligonucleotide
gucuagcaccaugcgggug

SEQ ID NO: 1319184 - RNA, 19 nt, Artificial Sequence
  Description of Artificial Sequence: Synthetic oligonucleotide
gcggcucuacacuggaguc

SEQ ID NO: 1319185 - RNA, 19 nt, Artificial Sequence
  Description of Artificial Sequence: Synthetic oligonucleotide
gucauccgcgaggugguga

SEQ ID NO: 1319186 - RNA, 19 nt, Artificial Sequence
  Description of Artificial Sequence: Synthetic oligonucleotide
caugcgggugguggcacuc

SEQ ID NO: 1319187 - RNA, 19 nt, Artificial Sequence
  Description of Artificial Sequence: Synthetic oligonucleotide
ggucauguucagggccacg

SEQ ID NO: 1319188 - RNA, 19 nt, Artificial Sequence
  Description of Artificial Sequence: Synthetic oligonucleotide
gucccacaaugguggccag

SEQ ID NO: 1319189 - RNA, 19 nt, Artificial Sequence
  Description of Artificial Sequence: Synthetic oligonucleotide
ggcccacuuugcugaaagc

SEQ ID NO: 1319190 - RNA, 19 nt, Artificial Sequence
  Description of Artificial Sequence: Synthetic oligonucleotide
gguucccacuaaaggaguc

SEQ ID NO: 1319191 - RNA, 19 nt, Artificial Sequence
  Description of Artificial Sequence: Synthetic oligonucleotide
gguggugacuucgacucaa

SEQ ID NO: 1319192 - RNA, 19 nt, Artificial Sequence
  Description of Artificial Sequence: Synthetic oligonucleotide
acggugcguaagcugucua

SEQ ID NO: 1319193 - RNA, 19 nt, Artificial Sequence
  Description of Artificial Sequence: Synthetic oligonucleotide
accagucugcauggccuca

SEQ ID NO: 1319194 - RNA, 19 nt, Artificial Sequence
  Description of Artificial Sequence: Synthetic oligonucleotide
ggccacugagaacaggccu

SEQ ID NO: 1319195 - RNA, 19 nt, Artificial Sequence
  Description of Artificial Sequence: Synthetic oligonucleotide
gcaguggauggugcagucc

SEQ ID NO: 1319196 - RNA, 19 nt, Artificial Sequence
  Description of Artificial Sequence: Synthetic oligonucleotide
ggauggugcaguccauugu

SEQ ID NO: 1319197 - RNA, 19 nt, Artificial Sequence
  Description of Artificial Sequence: Synthetic oligonucleotide
cauagcccaccagucugca

SEQ ID NO: 1319198 - RNA, 19 nt, Artificial Sequence
  Description of Artificial Sequence: Synthetic oligonucleotide
cccacuaaaggagucagcu

SEQ ID NO: 1319199 - RNA, 19 nt, Artificial Sequence
  Description of Artificial Sequence: Synthetic oligonucleotide
cuggacaggcaggcuagca

SEQ ID NO: 1319200 - RNA, 19 nt, Artificial Sequence
  Description of Artificial Sequence: Synthetic oligonucleotide
cggugcguaagcugucuag

SEQ ID NO: 1319201 - RNA, 19 nt, Artificial Sequence
  Description of Artificial Sequence: Synthetic oligonucleotide
guccggcugucacccaaca

SEQ ID NO: 1319202 - RNA, 19 nt, Artificial Sequence
  Description of Artificial Sequence: Synthetic oligonucleotide
gcaguugcccaaagggguc

SEQ ID NO: 1319203 - RNA, 19 nt, Artificial Sequence
  Description of Artificial Sequence: Synthetic oligonucleotide
aguugcccaaaggggucaa

SEQ ID NO: 1319204 - RNA, 19 nt, Artificial Sequence
  Description of Artificial Sequence: Synthetic oligonucleotide
gcagcgaggcacgaaaacu

SEQ ID NO: 1319205 - RNA, 19 nt, Artificial Sequence
  Description of Artificial Sequence: Synthetic oligonucleotide
ccugagcggguggacauug

SEQ ID NO: 1319206 - RNA, 19 nt, Artificial Sequence
  Description of Artificial Sequence: Synthetic oligonucleotide
aaggucugaugcggcucua

SEQ ID NO: 1319207 - RNA, 19 nt, Artificial Sequence
  Description of Artificial Sequence: Synthetic oligonucleotide
gcgagguggugacuucgac

SEQ ID NO: 1319208 - RNA, 19 nt, Artificial Sequence
  Description of Artificial Sequence: Synthetic oligonucleotide
cacuggagucggauugucu

SEQ ID NO: 1319209 - RNA, 19 nt, Artificial Sequence
  Description of Artificial Sequence: Synthetic oligonucleotide
cacugagaacaggccugug

SEQ ID NO: 1319210 - RNA, 19 nt, Artificial Sequence
  Description of Artificial Sequence: Synthetic oligonucleotide
ccggcugucacccaacagu

SEQ ID NO: 1319211 - RNA, 19 nt, Artificial Sequence
  Description of Artificial Sequence: Synthetic oligonucleotide
gcccacugccuggaggaag

SEQ ID NO: 1319212 - RNA, 19 nt, Artificial Sequence
  Description of Artificial Sequence: Synthetic oligonucleotide
agccggugaccagcaugag

SEQ ID NO: 1319213 - RNA, 19 nt, Artificial Sequence
  Description of Artificial Sequence: Synthetic oligonucleotide
augcgggugguggcacuca

SEQ ID NO: 1319214 - RNA, 19 nt, Artificial Sequence
  Description of Artificial Sequence: Synthetic oligonucleotide
cggcucuacacuggagucg

SEQ ID NO: 1319215 - RNA, 19 nt, Artificial Sequence
  Description of Artificial Sequence: Synthetic oligonucleotide
caccaugcgggugguggca

SEQ ID NO: 1319216 - RNA, 19 nt, Artificial Sequence
  Description of Artificial Sequence: Synthetic oligonucleotide
guagggcguugaaggucug

SEQ ID NO: 1319217 - RNA, 19 nt, Artificial Sequence
  Description of Artificial Sequence: Synthetic oligonucleotide
ucggcccacuuugcugaaa

SEQ ID NO: 1319218 - RNA, 19 nt, Artificial Sequence
  Description of Artificial Sequence: Synthetic oligonucleotide
ccgcgagguggugacuucg

SEQ ID NO: 1319219 - RNA, 19 nt, Artificial Sequence
  Description of Artificial Sequence: Synthetic oligonucleotide
gucacccaacagucucucu

SEQ ID NO: 1319220 - RNA, 19 nt, Artificial Sequence
  Description of Artificial Sequence: Synthetic oligonucleotide
ccaaggaucugcagugggu

SEQ ID NO: 1319221 - RNA, 19 nt, Artificial Sequence
  Description of Artificial Sequence: Synthetic oligonucleotide
ggaucugcaguggguggaa

SEQ ID NO: 1319222 - RNA, 19 nt, Artificial Sequence
  Description of Artificial Sequence: Synthetic oligonucleotide
caccugugaugacuucgcu

SEQ ID NO: 1319223 - RNA, 19 nt, Artificial Sequence
  Description of Artificial Sequence: Synthetic oligonucleotide
gacuucgacucaagagcuu

SEQ ID NO: 1319224 - RNA, 19 nt, Artificial Sequence
  Description of Artificial Sequence: Synthetic oligonucleotide
ccaccagucccacaauggu

SEQ ID NO: 1319225 - RNA, 19 nt, Artificial Sequence
  Description of Artificial Sequence: Synthetic oligonucleotide
ggucauccgcgagguggug

SEQ ID NO: 1319226 - RNA, 19 nt, Artificial Sequence
  Description of Artificial Sequence: Synthetic oligonucleotide
gcaccccgaagcaucugga

SEQ ID NO: 1319227 - RNA, 19 nt, Artificial Sequence
  Description of Artificial Sequence: Synthetic oligonucleotide
ggguucccacuaaaggagu

SEQ ID NO: 1319228 - RNA, 19 nt, Artificial Sequence
  Description of Artificial Sequence: Synthetic oligonucleotide
ggguggacauuguguuugu

SEQ ID NO: 1319229 - RNA, 19 nt, Artificial Sequence
  Description of Artificial Sequence: Synthetic oligonucleotide
cacggugcguaagcugucu

SEQ ID NO: 1319230 - RNA, 19 nt, Artificial Sequence
  Description of Artificial Sequence: Synthetic oligonucleotide
cugagcggguggacauugu

SEQ ID NO: 1319231 - RNA, 19 nt, Artificial Sequence
  Description of Artificial Sequence: Synthetic oligonucleotide
gcaagaagaguagggcguu

SEQ ID NO: 1319232 - RNA, 19 nt, Artificial Sequence
  Description of Artificial Sequence: Synthetic oligonucleotide
gguggacauuguguuugua

SEQ ID NO: 1319233 - RNA, 19 nt, Artificial Sequence
  Description of Artificial Sequence: Synthetic oligonucleotide
guaagcugucuagcaccau

SEQ ID NO: 1319234 - RNA, 19 nt, Artificial Sequence
  Description of Artificial Sequence: Synthetic oligonucleotide
guacuugguccaggccaua

SEQ ID NO: 1319235 - RNA, 19 nt, Artificial Sequence
  Description of Artificial Sequence: Synthetic oligonucleotide
gccuccgguugaggaaggc

SEQ ID NO: 1319236 - RNA, 19 nt, Artificial Sequence
  Description of Artificial Sequence: Synthetic oligonucleotide
gucggcccaccuggcagaa

SEQ ID NO: 1319237 - RNA, 19 nt, Artificial Sequence
  Description of Artificial Sequence: Synthetic oligonucleotide
gcaucccacgaggguuccc

SEQ ID NO: 1319238 - RNA, 19 nt, Artificial Sequence
  Description of Artificial Sequence: Synthetic oligonucleotide
caacgaugaucugggccau

SEQ ID NO: 1319239 - RNA, 19 nt, Artificial Sequence
  Description of Artificial Sequence: Synthetic oligonucleotide
aggagucagcugggaugua

SEQ ID NO: 1319240 - RNA, 19 nt, Artificial Sequence
  Description of Artificial Sequence: Synthetic oligonucleotide
guucgaaguugugcuccuu

SEQ ID NO: 1319241 - RNA, 19 nt, Artificial Sequence
  Description of Artificial Sequence: Synthetic oligonucleotide
gcccugagcggguggacau

SEQ ID NO: 1319242 - RNA, 19 nt, Artificial Sequence
  Description of Artificial Sequence: Synthetic oligonucleotide
cgcgagguggugacuucga

SEQ ID NO: 1319243 - RNA, 19 nt, Artificial Sequence
  Description of Artificial Sequence: Synthetic oligonucleotide
gcggguggacauuguguuu

SEQ ID NO: 1319244 - RNA, 19 nt, Artificial Sequence
  Description of Artificial Sequence: Synthetic oligonucleotide
ccacgaggguucccacuaa

SEQ ID NO: 1319245 - RNA, 19 nt, Artificial Sequence
  Description of Artificial Sequence: Synthetic oligonucleotide
cauccgcgagguggugacu

SEQ ID NO: 1319246 - RNA, 19 nt, Artificial Sequence
  Description of Artificial Sequence: Synthetic oligonucleotide
ccgggucauccgcgaggug

SEQ ID NO: 1319247 - RNA, 19 nt, Artificial Sequence
  Description of Artificial Sequence: Synthetic oligonucleotide
gcguguugauggagccggu

SEQ ID NO: 1319248 - RNA, 19 nt, Artificial Sequence
  Description of Artificial Sequence: Synthetic oligonucleotide
gccuggaggaagggauguu

SEQ ID NO: 1319249 - RNA, 19 nt, Artificial Sequence
  Description of Artificial Sequence: Synthetic oligonucleotide
ccgaagcaucuggaagcuu

SEQ ID NO: 1319250 - RNA, 19 nt, Artificial Sequence
  Description of Artificial Sequence: Synthetic oligonucleotide
cccugagcggguggacauu

SEQ ID NO: 1319251 - RNA, 19 nt, Artificial Sequence
  Description of Artificial Sequence: Synthetic oligonucleotide
aguuuaaugauuucaauuc

SEQ ID NO: 1319252 - RNA, 19 nt, Artificial Sequence
  Description of Artificial Sequence: Synthetic oligonucleotide
uuagauuucugaaugagca

SEQ ID NO: 1319253 - RNA, 19 nt, Artificial Sequence
  Description of Artificial Sequence: Synthetic oligonucleotide
uuucaauucaauacaauug

SEQ ID NO: 1319254 - RNA, 19 nt, Artificial Sequence
  Description of Artificial Sequence: Synthetic oligonucleotide
uuauuaaguaagaugacug

SEQ ID NO: 1319255 - RNA, 19 nt, Artificial Sequence
  Description of Artificial Sequence: Synthetic oligonucleotide
aaucaauuccaucauccac

SEQ ID NO: 1319256 - RNA, 19 nt, Artificial Sequence
  Description of Artificial Sequence: Synthetic oligonucleotide
uccgauuuaaaucaauucc

SEQ ID NO: 1319257 - RNA, 19 nt, Artificial Sequence
  Description of Artificial Sequence: Synthetic oligonucleotide
ucacauuccaauuuggucc

SEQ ID NO: 1319258 - RNA, 19 nt, Artificial Sequence
  Description of Artificial Sequence: Synthetic oligonucleotide
agcaaauggcaacugaucc

SEQ ID NO: 1319259 - RNA, 19 nt, Artificial Sequence
  Description of Artificial Sequence: Synthetic oligonucleotide
aacaccaucaccgagagga

SEQ ID NO: 1319260 - RNA, 19 nt, Artificial Sequence
  Description of Artificial Sequence: Synthetic oligonucleotide
uguucauucauaaauucca

SEQ ID NO: 1319261 - RNA, 19 nt, Artificial Sequence
  Description of Artificial Sequence: Synthetic oligonucleotide
caugaugagguuaugaagc

SEQ ID NO: 1319262 - RNA, 19 nt, Artificial Sequence
  Description of Artificial Sequence: Synthetic oligonucleotide
aaaauacaacccaaugucc

SEQ ID NO: 1319263 - RNA, 19 nt, Artificial Sequence
  Description of Artificial Sequence: Synthetic oligonucleotide
uuugguccgauuuaaauca

SEQ ID NO: 1319264 - RNA, 19 nt, Artificial Sequence
  Description of Artificial Sequence: Synthetic oligonucleotide
aguugaacaacuuuauuug

SEQ ID NO: 1319265 - RNA, 19 nt, Artificial Sequence
  Description of Artificial Sequence: Synthetic oligonucleotide
uuaaguaagaugacugcag

SEQ ID NO: 1319266 - RNA, 19 nt, Artificial Sequence
  Description of Artificial Sequence: Synthetic oligonucleotide
auuugguccgauuuaaauc

SEQ ID NO: 1319267 - RNA, 19 nt, Artificial Sequence
  Description of Artificial Sequence: Synthetic oligonucleotide
uggaguacacauuuggagg

SEQ ID NO: 1319268 - RNA, 19 nt, Artificial Sequence
  Description of Artificial Sequence: Synthetic oligonucleotide
aauacagguaaagucacag

SEQ ID NO: 1319269 - RNA, 19 nt, Artificial Sequence
  Description of Artificial Sequence: Synthetic oligonucleotide
auuuggaguacacauuugg

SEQ ID NO: 1319270 - RNA, 19 nt, Artificial Sequence
  Description of Artificial Sequence: Synthetic oligonucleotide
agcguugugguuaaaaucc

SEQ ID NO: 1319271 - RNA, 19 nt, Artificial Sequence
  Description of Artificial Sequence: Synthetic oligonucleotide
agaguuaagagauaggcau

SEQ ID NO: 1319272 - RNA, 19 nt, Artificial Sequence
  Description of Artificial Sequence: Synthetic oligonucleotide
aguuugagaucuaacaacc

SEQ ID NO: 1319273 - RNA, 19 nt, Artificial Sequence
  Description of Artificial Sequence: Synthetic oligonucleotide
uucaguuugagaucuaaca

SEQ ID NO: 1319274 - RNA, 19 nt, Artificial Sequence
  Description of Artificial Sequence: Synthetic oligonucleotide
aagcauucggcuuauuaag

SEQ ID NO: 1319275 - RNA, 19 nt, Artificial Sequence
  Description of Artificial Sequence: Synthetic oligonucleotide
gauaaaagguccaugauga

SEQ ID NO: 1319276 - RNA, 19 nt, Artificial Sequence
  Description of Artificial Sequence: Synthetic oligonucleotide
aagcguugugguuaaaauc

SEQ ID NO: 1319277 - RNA, 19 nt, Artificial Sequence
  Description of Artificial Sequence: Synthetic oligonucleotide
agauaaaagguccaugaug

SEQ ID NO: 1319278 - RNA, 19 nt, Artificial Sequence
  Description of Artificial Sequence: Synthetic oligonucleotide
acugauauuaguaaaauaa

SEQ ID NO: 1319279 - RNA, 19 nt, Artificial Sequence
  Description of Artificial Sequence: Synthetic oligonucleotide
uucauaaauuccaagucac

SEQ ID NO: 1319280 - RNA, 19 nt, Artificial Sequence
  Description of Artificial Sequence: Synthetic oligonucleotide
aauaccuacugauauuagu

SEQ ID NO: 1319281 - RNA, 19 nt, Artificial Sequence
  Description of Artificial Sequence: Synthetic oligonucleotide
aauggcaacugauccuggc

SEQ ID NO: 1319282 - RNA, 19 nt, Artificial Sequence
  Description of Artificial Sequence: Synthetic oligonucleotide
uuggaguacacauuuggag

SEQ ID NO: 1319283 - RNA, 19 nt, Artificial Sequence
  Description of Artificial Sequence: Synthetic oligonucleotide
ucugacaugcauauaacuc

SEQ ID NO: 1319284 - RNA, 19 nt, Artificial Sequence
  Description of Artificial Sequence: Synthetic oligonucleotide
uuugagaucuaacaaccac

SEQ ID NO: 1319285 - RNA, 19 nt, Artificial Sequence
  Description of Artificial Sequence: Synthetic oligonucleotide
uuguucauucauaaauucc

SEQ ID NO: 1319286 - RNA, 19 nt, Artificial Sequence
  Description of Artificial Sequence: Synthetic oligonucleotide
uuugcuuaaagaugguucu

SEQ ID NO: 1319287 - RNA, 19 nt, Artificial Sequence
  Description of Artificial Sequence: Synthetic oligonucleotide
uuagacuggaauauaacua

SEQ ID NO: 1319288 - RNA, 19 nt, Artificial Sequence
  Description of Artificial Sequence: Synthetic oligonucleotide
aauuugguccgauuuaaau

SEQ ID NO: 1319289 - RNA, 19 nt, Artificial Sequence
  Description of Artificial Sequence: Synthetic oligonucleotide
auuucaauucaauacaauu

SEQ ID NO: 1319290 - RNA, 19 nt, Artificial Sequence
  Description of Artificial Sequence: Synthetic oligonucleotide
ugaauuucugguuuagacu

SEQ ID NO: 1319291 - RNA, 19 nt, Artificial Sequence
  Description of Artificial Sequence: Synthetic oligonucleotide
uuuaaugauuucaauucaa

SEQ ID NO: 1319292 - RNA, 19 nt, Artificial Sequence
  Description of Artificial Sequence: Synthetic oligonucleotide
aaaccaaagcuaaugcaac

SEQ ID NO: 1319293 - RNA, 19 nt, Artificial Sequence
  Description of Artificial Sequence: Synthetic oligonucleotide
ugcaacuaacaaaauaccu

SEQ ID NO: 1319294 - RNA, 19 nt, Artificial Sequence
  Description of Artificial Sequence: Synthetic oligonucleotide
augagcaagauucaccuug

SEQ ID NO: 1319295 - RNA, 19 nt, Artificial Sequence
  Description of Artificial Sequence: Synthetic oligonucleotide
ucuuccuuaggguaggugu

SEQ ID NO: 1319296 - RNA, 19 nt, Artificial Sequence
  Description of Artificial Sequence: Synthetic oligonucleotide
cugaauuucugguuuagac

SEQ ID NO: 1319297 - RNA, 19 nt, Artificial Sequence
  Description of Artificial Sequence: Synthetic oligonucleotide
aaaauaccuacugauauua

SEQ ID NO: 1319298 - RNA, 19 nt, Artificial Sequence
  Description of Artificial Sequence: Synthetic oligonucleotide
guucucgcaaguuuguagg

SEQ ID NO: 1319299 - RNA, 19 nt, Artificial Sequence
  Description of Artificial Sequence: Synthetic oligonucleotide
aaagcuaaugcaacuaaca

SEQ ID NO: 1319300 - RNA, 19 nt, Artificial Sequence
  Description of Artificial Sequence: Synthetic oligonucleotide
gacaaugaucagcucauag

SEQ ID NO: 1319301 - RNA, 19 nt, Artificial Sequence
  Description of Artificial Sequence: Synthetic oligonucleotide
gagguuaugaagcucugug

SEQ ID NO: 1319302 - RNA, 19 nt, Artificial Sequence
  Description of Artificial Sequence: Synthetic oligonucleotide
auacagguaaagucacagc

SEQ ID NO: 1319303 - RNA, 19 nt, Artificial Sequence
  Description of Artificial Sequence: Synthetic oligonucleotide
ugcauauaacuccucuucc

SEQ ID NO: 1319304 - RNA, 19 nt, Artificial Sequence
  Description of Artificial Sequence: Synthetic oligonucleotide
aagcuaaugcaacuaacaa

SEQ ID NO: 1319305 - RNA, 19 nt, Artificial Sequence
  Description of Artificial Sequence: Synthetic oligonucleotide
cauagaauuuggcuaagac

SEQ ID NO: 1319306 - RNA, 19 nt, Artificial Sequence
  Description of Artificial Sequence: Synthetic oligonucleotide
uuuggaguacacauuugga

SEQ ID NO: 1319307 - RNA, 19 nt, Artificial Sequence
  Description of Artificial Sequence: Synthetic oligonucleotide
ugcgcaacagauccaaagc

SEQ ID NO: 1319308 - RNA, 19 nt, Artificial Sequence
  Description of Artificial Sequence: Synthetic oligonucleotide
agauucacauuccaauuug

SEQ ID NO: 1319309 - RNA, 19 nt, Artificial Sequence
  Description of Artificial Sequence: Synthetic oligonucleotide
uagacuggaauauaacuau

SEQ ID NO: 1319310 - RNA, 19 nt, Artificial Sequence
  Description of Artificial Sequence: Synthetic oligonucleotide
uucucauuuguagauagga

SEQ ID NO: 1319311 - RNA, 19 nt, Artificial Sequence
  Description of Artificial Sequence: Synthetic oligonucleotide
caucagguugggaauaugc

SEQ ID NO: 1319312 - RNA, 19 nt, Artificial Sequence
  Description of Artificial Sequence: Synthetic oligonucleotide
agagauaggcaucuuaaaa

SEQ ID NO: 1319313 - RNA, 19 nt, Artificial Sequence
  Description of Artificial Sequence: Synthetic oligonucleotide
caagauucaccuugguggg

SEQ ID NO: 1319314 - RNA, 19 nt, Artificial Sequence
  Description of Artificial Sequence: Synthetic oligonucleotide
gauuuaaaucaauuccauc

SEQ ID NO: 1319315 - RNA, 19 nt, Artificial Sequence
  Description of Artificial Sequence: Synthetic oligonucleotide
caguuugagaucuaacaac

SEQ ID NO: 1319316 - RNA, 19 nt, Artificial Sequence
  Description of Artificial Sequence: Synthetic oligonucleotide
ucucauuuguagauaggac

SEQ ID NO: 1319317 - RNA, 19 nt, Artificial Sequence
  Description of Artificial Sequence: Synthetic oligonucleotide
ugugcaagggguaggucag

SEQ ID NO: 1319318 - RNA, 19 nt, Artificial Sequence
  Description of Artificial Sequence: Synthetic oligonucleotide
gaaguuuaugugucaauga

SEQ ID NO: 1319319 - RNA, 19 nt, Artificial Sequence
  Description of Artificial Sequence: Synthetic oligonucleotide
agucaaacgcuucggccgc

SEQ ID NO: 1319320 - RNA, 19 nt, Artificial Sequence
  Description of Artificial Sequence: Synthetic oligonucleotide
augcaacuaacaaaauacc

SEQ ID NO: 1319321 - RNA, 19 nt, Artificial Sequence
  Description of Artificial Sequence: Synthetic oligonucleotide
ucacauccuaagcauucgg

SEQ ID NO: 1319322 - RNA, 19 nt, Artificial Sequence
  Description of Artificial Sequence: Synthetic oligonucleotide
uaagaugacugcaggguac

SEQ ID NO: 1319323 - RNA, 19 nt, Artificial Sequence
  Description of Artificial Sequence: Synthetic oligonucleotide
ggcuuauuaaguaagauga

SEQ ID NO: 1319324 - RNA, 19 nt, Artificial Sequence
  Description of Artificial Sequence: Synthetic oligonucleotide
auuaaguaagaugacugca

SEQ ID NO: 1319325 - RNA, 19 nt, Artificial Sequence
  Description of Artificial Sequence: Synthetic oligonucleotide
aaguuuguaggcuccugcu

SEQ ID NO: 1319326 - RNA, 19 nt, Artificial Sequence
  Description of Artificial Sequence: Synthetic oligonucleotide
ugucuuaaaugacuagaaa

SEQ ID NO: 1319327 - RNA, 19 nt, Artificial Sequence
  Description of Artificial Sequence: Synthetic oligonucleotide
ucaauucaauacaauugaa

SEQ ID NO: 1319328 - RNA, 19 nt, Artificial Sequence
  Description of Artificial Sequence: Synthetic oligonucleotide
uucaagguaguuccugugu

SEQ ID NO: 1319329 - RNA, 19 nt, Artificial Sequence
  Description of Artificial Sequence: Synthetic oligonucleotide
gaaugagcaagauucaccu

SEQ ID NO: 1319330 - RNA, 19 nt, Artificial Sequence
  Description of Artificial Sequence: Synthetic oligonucleotide
uauuguuccacggcuguag

SEQ ID NO: 1319331 - RNA, 19 nt, Artificial Sequence
  Description of Artificial Sequence: Synthetic oligonucleotide
agcaagauucaccuuggug

SEQ ID NO: 1319332 - RNA, 19 nt, Artificial Sequence
  Description of Artificial Sequence: Synthetic oligonucleotide
aagaugacugcaggguacg

SEQ ID NO: 1319333 - RNA, 19 nt, Artificial Sequence
  Description of Artificial Sequence: Synthetic oligonucleotide
aguuuguaggcuccugcuc

SEQ ID NO: 1319334 - RNA, 19 nt, Artificial Sequence
  Description of Artificial Sequence: Synthetic oligonucleotide
ugggaauaugcuucugugc

SEQ ID NO: 1319335 - RNA, 19 nt, Artificial Sequence
  Description of Artificial Sequence: Synthetic oligonucleotide
ugugaauuucucauuugua

SEQ ID NO: 1319336 - RNA, 19 nt, Artificial Sequence
  Description of Artificial Sequence: Synthetic oligonucleotide
acauccuaagcauucggcu

SEQ ID NO: 1319337 - RNA, 19 nt, Artificial Sequence
  Description of Artificial Sequence: Synthetic oligonucleotide
acauuuggaggccauuucu

SEQ ID NO: 1319338 - RNA, 19 nt, Artificial Sequence
  Description of Artificial Sequence: Synthetic oligonucleotide
cuaacaaaauaccuacuga

SEQ ID NO: 1319339 - RNA, 19 nt, Artificial Sequence
  Description of Artificial Sequence: Synthetic oligonucleotide
guuaugaagcucugugcag

SEQ ID NO: 1319340 - RNA, 19 nt, Artificial Sequence
  Description of Artificial Sequence: Synthetic oligonucleotide
gaccucaccagaguuagag

SEQ ID NO: 1319341 - RNA, 19 nt, Artificial Sequence
  Description of Artificial Sequence: Synthetic oligonucleotide
uuaugaagcucugugcaga

SEQ ID NO: 1319342 - RNA, 19 nt, Artificial Sequence
  Description of Artificial Sequence: Synthetic oligonucleotide
uguccaaugaaaccauuuu

SEQ ID NO: 1319343 - RNA, 19 nt, Artificial Sequence
  Description of Artificial Sequence: Synthetic oligonucleotide
uaugaagcucugugcagag

SEQ ID NO: 1319344 - RNA, 19 nt, Artificial Sequence
  Description of Artificial Sequence: Synthetic oligonucleotide
aguuagagggaaaaggaga

SEQ ID NO: 1319345 - RNA, 19 nt, Artificial Sequence
  Description of Artificial Sequence: Synthetic oligonucleotide
agaguuagagggaaaagga

SEQ ID NO: 1319346 - RNA, 19 nt, Artificial Sequence
  Description of Artificial Sequence: Synthetic oligonucleotide
uauuuggaguacacauuug

SEQ ID NO: 1319347 - RNA, 19 nt, Artificial Sequence
  Description of Artificial Sequence: Synthetic oligonucleotide
cagguugggaauaugcuuc

SEQ ID NO: 1319348 - RNA, 19 nt, Artificial Sequence
  Description of Artificial Sequence: Synthetic oligonucleotide
cauaaauuccaagucacca

SEQ ID NO: 1319349 - RNA, 19 nt, Artificial Sequence
  Description of Artificial Sequence: Synthetic oligonucleotide
uuuggcgccgccaucuugu

SEQ ID NO: 1319350 - RNA, 19 nt, Artificial Sequence
  Description of Artificial Sequence: Synthetic oligonucleotide
ugcuauauuuggaguacac

SEQ ID NO: 1319351 - RNA, 19 nt, Artificial Sequence
  Description of Artificial Sequence: Synthetic oligonucleotide
uucugcuauauuuggagua

SEQ ID NO: 1319352 - RNA, 19 nt, Artificial Sequence
  Description of Artificial Sequence: Synthetic oligonucleotide
aguuaagagauaggcaucu

SEQ ID NO: 1319353 - RNA, 19 nt, Artificial Sequence
  Description of Artificial Sequence: Synthetic oligonucleotide
guaaagucacagcaaauaa

SEQ ID NO: 1319354 - RNA, 19 nt, Artificial Sequence
  Description of Artificial Sequence: Synthetic oligonucleotide
aauccacccagaguuaaga

SEQ ID NO: 1319355 - RNA, 19 nt, Artificial Sequence
  Description of Artificial Sequence: Synthetic oligonucleotide
gaggaauggaaguuuaugu

SEQ ID NO: 1319356 - RNA, 19 nt, Artificial Sequence
  Description of Artificial Sequence: Synthetic oligonucleotide
gaccgagucaaacgcuucg

SEQ ID NO: 1319357 - RNA, 19 nt, Artificial Sequence
  Description of Artificial Sequence: Synthetic oligonucleotide
gaagcuggguaucugcuca

SEQ ID NO: 1319358 - RNA, 19 nt, Artificial Sequence
  Description of Artificial Sequence: Synthetic oligonucleotide
uuccucgugaucuucaguu

SEQ ID NO: 1319359 - RNA, 19 nt, Artificial Sequence
  Description of Artificial Sequence: Synthetic oligonucleotide
caauucaauacaauugaaa

SEQ ID NO: 1319360 - RNA, 19 nt, Artificial Sequence
  Description of Artificial Sequence: Synthetic oligonucleotide
cacauccuaagcauucggc

SEQ ID NO: 1319361 - RNA, 19 nt, Artificial Sequence
  Description of Artificial Sequence: Synthetic oligonucleotide
agccugaagauaaaagguc

SEQ ID NO: 1319362 - RNA, 19 nt, Artificial Sequence
  Description of Artificial Sequence: Synthetic oligonucleotide
auaaaagguccaugaugag

SEQ ID NO: 1319363 - RNA, 19 nt, Artificial Sequence
  Description of Artificial Sequence: Synthetic oligonucleotide
uucggcuuauuaaguaaga

SEQ ID NO: 1319364 - RNA, 19 nt, Artificial Sequence
  Description of Artificial Sequence: Synthetic oligonucleotide
uuaaggccuauguccaaug

SEQ ID NO: 1319365 - RNA, 19 nt, Artificial Sequence
  Description of Artificial Sequence: Synthetic oligonucleotide
cuauauuuggaguacacau

SEQ ID NO: 1319366 - RNA, 19 nt, Artificial Sequence
  Description of Artificial Sequence: Synthetic oligonucleotide
cuuggcaucagggacauga

SEQ ID NO: 1319367 - RNA, 19 nt, Artificial Sequence
  Description of Artificial Sequence: Synthetic oligonucleotide
uaccuacugauauuaguaa

SEQ ID NO: 1319368 - RNA, 19 nt, Artificial Sequence
  Description of Artificial Sequence: Synthetic oligonucleotide
aaauaccuacugauauuag

SEQ ID NO: 1319369 - RNA, 19 nt, Artificial Sequence
  Description of Artificial Sequence: Synthetic oligonucleotide
agcauauugcucaucaggu

SEQ ID NO: 1319370 - RNA, 19 nt, Artificial Sequence
  Description of Artificial Sequence: Synthetic oligonucleotide
gggaacauauuguuccacg

SEQ ID NO: 1319371 - RNA, 19 nt, Artificial Sequence
  Description of Artificial Sequence: Synthetic oligonucleotide
ccucaccagaguuagaggg

SEQ ID NO: 1319372 - RNA, 19 nt, Artificial Sequence
  Description of Artificial Sequence: Synthetic oligonucleotide
ccacaagagaagaagcugg

SEQ ID NO: 1319373 - RNA, 19 nt, Artificial Sequence
  Description of Artificial Sequence: Synthetic oligonucleotide
caagguaguuccugugugc

SEQ ID NO: 1319374 - RNA, 19 nt, Artificial Sequence
  Description of Artificial Sequence: Synthetic oligonucleotide
ucagcugacaggcccggug

SEQ ID NO: 1319375 - RNA, 19 nt, Artificial Sequence
  Description of Artificial Sequence: Synthetic oligonucleotide
ggaaguuuaugugucaaug

SEQ ID NO: 1319376 - RNA, 19 nt, Artificial Sequence
  Description of Artificial Sequence: Synthetic oligonucleotide
ugugugcuugugaauuucu

SEQ ID NO: 1319377 - RNA, 19 nt, Artificial Sequence
  Description of Artificial Sequence: Synthetic oligonucleotide
ugguuaaaauccacccaga

SEQ ID NO: 1319378 - RNA, 19 nt, Artificial Sequence
  Description of Artificial Sequence: Synthetic oligonucleotide
cucucugacaugcauauaa

SEQ ID NO: 1319379 - RNA, 19 nt, Artificial Sequence
  Description of Artificial Sequence: Synthetic oligonucleotide
auaacuccucuuccuuagg

SEQ ID NO: 1319380 - RNA, 19 nt, Artificial Sequence
  Description of Artificial Sequence: Synthetic oligonucleotide
ccagaguuaagagauaggc

SEQ ID NO: 1319381 - RNA, 19 nt, Artificial Sequence
  Description of Artificial Sequence: Synthetic oligonucleotide
ucuaugaggaauggaaguu

SEQ ID NO: 1319382 - RNA, 19 nt, Artificial Sequence
  Description of Artificial Sequence: Synthetic oligonucleotide
auucggcuuauuaaguaag

SEQ ID NO: 1319383 - RNA, 19 nt, Artificial Sequence
  Description of Artificial Sequence: Synthetic oligonucleotide
gggaauaugcuucugugca

SEQ ID NO: 1319384 - RNA, 19 nt, Artificial Sequence
  Description of Artificial Sequence: Synthetic oligonucleotide
gaugagguuaugaagcucu

SEQ ID NO: 1319385 - RNA, 19 nt, Artificial Sequence
  Description of Artificial Sequence: Synthetic oligonucleotide
cuuccuuaggguaggugug

SEQ ID NO: 1319386 - RNA, 19 nt, Artificial Sequence
  Description of Artificial Sequence: Synthetic oligonucleotide
aucaccgagaggacaagcg

SEQ ID NO: 1319387 - RNA, 19 nt, Artificial Sequence
  Description of Artificial Sequence: Synthetic oligonucleotide
gguaggucagcugacaggc

SEQ ID NO: 1319388 - RNA, 19 nt, Artificial Sequence
  Description of Artificial Sequence: Synthetic oligonucleotide
aucaucagccugaagauaa

SEQ ID NO: 1319389 - RNA, 19 nt, Artificial Sequence
  Description of Artificial Sequence: Synthetic oligonucleotide
auaccuacugauauuagua

SEQ ID NO: 1319390 - RNA, 19 nt, Artificial Sequence
  Description of Artificial Sequence: Synthetic oligonucleotide
gauaggacauuuugcuuaa

SEQ ID NO: 1319391 - RNA, 19 nt, Artificial Sequence
  Description of Artificial Sequence: Synthetic oligonucleotide
accuacugauauuaguaaa

SEQ ID NO: 1319392 - RNA, 19 nt, Artificial Sequence
  Description of Artificial Sequence: Synthetic oligonucleotide
uucucgcaaguuuguaggc

SEQ ID NO: 1319393 - RNA, 19 nt, Artificial Sequence
  Description of Artificial Sequence: Synthetic oligonucleotide
cuuaaagaugguucucgca

SEQ ID NO: 1319394 - RNA, 19 nt, Artificial Sequence
  Description of Artificial Sequence: Synthetic oligonucleotide
cagaacgaccucaccagag

SEQ ID NO: 1319395 - RNA, 19 nt, Artificial Sequence
  Description of Artificial Sequence: Synthetic oligonucleotide
agaacgaccucaccagagu

SEQ ID NO: 1319396 - RNA, 19 nt, Artificial Sequence
  Description of Artificial Sequence: Synthetic oligonucleotide
acuccagaacgaccucacc

SEQ ID NO: 1319397 - RNA, 19 nt, Artificial Sequence
  Description of Artificial Sequence: Synthetic oligonucleotide
gguucucgcaaguuuguag

SEQ ID NO: 1319398 - RNA, 19 nt, Artificial Sequence
  Description of Artificial Sequence: Synthetic oligonucleotide
aacuaacaaaauaccuacu

SEQ ID NO: 1319399 - RNA, 19 nt, Artificial Sequence
  Description of Artificial Sequence: Synthetic oligonucleotide
uguggugcauacugaauuu

SEQ ID NO: 1319400 - RNA, 19 nt, Artificial Sequence
  Description of Artificial Sequence: Synthetic oligonucleotide
guuaaaauccacccagagu

SEQ ID NO: 1319401 - RNA, 19 nt, Artificial Sequence
  Description of Artificial Sequence: Synthetic oligonucleotide
aacgcuucggccgcugcag

SEQ ID NO: 1319402 - RNA, 19 nt, Artificial Sequence
  Description of Artificial Sequence: Synthetic oligonucleotide
aucuaacaaccacaagaga

SEQ ID NO: 1319403 - RNA, 19 nt, Artificial Sequence
  Description of Artificial Sequence: Synthetic oligonucleotide
ccaacuguggugcauacug

SEQ ID NO: 1319404 - RNA, 19 nt, Artificial Sequence
  Description of Artificial Sequence: Synthetic oligonucleotide
cucgcaaguuuguaggcuc

SEQ ID NO: 1319405 - RNA, 19 nt, Artificial Sequence
  Description of Artificial Sequence: Synthetic oligonucleotide
uagauaggacauuuugcuu

SEQ ID NO: 1319406 - RNA, 19 nt, Artificial Sequence
  Description of Artificial Sequence: Synthetic oligonucleotide
cagaguuaagagauaggca

SEQ ID NO: 1319407 - RNA, 19 nt, Artificial Sequence
  Description of Artificial Sequence: Synthetic oligonucleotide
acgaccucaccagaguuag

SEQ ID NO: 1319408 - RNA, 19 nt, Artificial Sequence
  Description of Artificial Sequence: Synthetic oligonucleotide
aaauacagguaaagucaca

SEQ ID NO: 1319409 - RNA, 19 nt, Artificial Sequence
  Description of Artificial Sequence: Synthetic oligonucleotide
aagucacagcaaauaaagu

SEQ ID NO: 1319410 - RNA, 19 nt, Artificial Sequence
  Description of Artificial Sequence: Synthetic oligonucleotide
cuuauuaaguaagaugacu

SEQ ID NO: 1319411 - RNA, 19 nt, Artificial Sequence
  Description of Artificial Sequence: Synthetic oligonucleotide
uccccucugucacagccgc

SEQ ID NO: 1319412 - RNA, 19 nt, Artificial Sequence
  Description of Artificial Sequence: Synthetic oligonucleotide
aaauccacccagaguuaag

SEQ ID NO: 1319413 - RNA, 19 nt, Artificial Sequence
  Description of Artificial Sequence: Synthetic oligonucleotide
auuucuaggcagaggcauc

SEQ ID NO: 1319414 - RNA, 19 nt, Artificial Sequence
  Description of Artificial Sequence: Synthetic oligonucleotide
augaguuguucuugucuca

SEQ ID NO: 1319415 - RNA, 19 nt, Artificial Sequence
  Description of Artificial Sequence: Synthetic oligonucleotide
gcuuagauuucugaaugag

SEQ ID NO: 1319416 - RNA, 19 nt, Artificial Sequence
  Description of Artificial Sequence: Synthetic oligonucleotide
aacccaauguccgugucuu

SEQ ID NO: 1319417 - RNA, 19 nt, Artificial Sequence
  Description of Artificial Sequence: Synthetic oligonucleotide
guagcaacagcugcgcaac

SEQ ID NO: 1319418 - RNA, 19 nt, Artificial Sequence
  Description of Artificial Sequence: Synthetic oligonucleotide
aggacaagcguugugguua

SEQ ID NO: 1319419 - RNA, 19 nt, Artificial Sequence
  Description of Artificial Sequence: Synthetic oligonucleotide
gguaguuccugugugcuug

SEQ ID NO: 1319420 - RNA, 19 nt, Artificial Sequence
  Description of Artificial Sequence: Synthetic oligonucleotide
auccuaagcauucggcuua

SEQ ID NO: 1319421 - RNA, 19 nt, Artificial Sequence
  Description of Artificial Sequence: Synthetic oligonucleotide
auacaacccaauguccgug

SEQ ID NO: 1319422 - RNA, 19 nt, Artificial Sequence
  Description of Artificial Sequence: Synthetic oligonucleotide
ccgauuuaaaucaauucca

SEQ ID NO: 1319423 - RNA, 19 nt, Artificial Sequence
  Description of Artificial Sequence: Synthetic oligonucleotide
gaguuaagagauaggcauc

SEQ ID NO: 1319424 - RNA, 19 nt, Artificial Sequence
  Description of Artificial Sequence: Synthetic oligonucleotide
agaugcauucuuggcauca

SEQ ID NO: 1319425 - RNA, 19 nt, Artificial Sequence
  Description of Artificial Sequence: Synthetic oligonucleotide
cuaagcauucggcuuauua

SEQ ID NO: 1319426 - RNA, 19 nt, Artificial Sequence
  Description of Artificial Sequence: Synthetic oligonucleotide
guccaaugaaaccauuuua

SEQ ID NO: 1319427 - RNA, 19 nt, Artificial Sequence
  Description of Artificial Sequence: Synthetic oligonucleotide
guaggugugcaagggguag

SEQ ID NO: 1319428 - RNA, 19 nt, Artificial Sequence
  Description of Artificial Sequence: Synthetic oligonucleotide
cauucggcuuauuaaguaa

SEQ ID NO: 1319429 - RNA, 19 nt, Artificial Sequence
  Description of Artificial Sequence: Synthetic oligonucleotide
ucucgcaaguuuguaggcu

SEQ ID NO: 1319430 - RNA, 19 nt, Artificial Sequence
  Description of Artificial Sequence: Synthetic oligonucleotide
guaagaugacugcagggua

SEQ ID NO: 1319431 - RNA, 19 nt, Artificial Sequence
  Description of Artificial Sequence: Synthetic oligonucleotide
ucggcuuauuaaguaagau

SEQ ID NO: 1319432 - RNA, 19 nt, Artificial Sequence
  Description of Artificial Sequence: Synthetic oligonucleotide
gcuuaaagaugguucucgc

SEQ ID NO: 1319433 - RNA, 19 nt, Artificial Sequence
  Description of Artificial Sequence: Synthetic oligonucleotide
agcaacagcugcgcaacag

SEQ ID NO: 1319434 - RNA, 19 nt, Artificial Sequence
  Description of Artificial Sequence: Synthetic oligonucleotide
cagguaaagucacagcaaa

SEQ ID NO: 1319435 - RNA, 19 nt, Artificial Sequence
  Description of Artificial Sequence: Synthetic oligonucleotide
gccuauguccaaugaaacc

SEQ ID NO: 1319436 - RNA, 19 nt, Artificial Sequence
  Description of Artificial Sequence: Synthetic oligonucleotide
caaugacacuucuuuaaaa

SEQ ID NO: 1319437 - RNA, 19 nt, Artificial Sequence
  Description of Artificial Sequence: Synthetic oligonucleotide
gaguacacauuuggaggcc

SEQ ID NO: 1319438 - RNA, 19 nt, Artificial Sequence
  Description of Artificial Sequence: Synthetic oligonucleotide
cacauuuggaggccauuuc

SEQ ID NO: 1319439 - RNA, 19 nt, Artificial Sequence
  Description of Artificial Sequence: Synthetic oligonucleotide
ugagguuaugaagcucugu

SEQ ID NO: 1319440 - RNA, 19 nt, Artificial Sequence
  Description of Artificial Sequence: Synthetic oligonucleotide
ucgugaucuucaguuugag

SEQ ID NO: 1319441 - RNA, 19 nt, Artificial Sequence
  Description of Artificial Sequence: Synthetic oligonucleotide
ggguaggucagcugacagg

SEQ ID NO: 1319442 - RNA, 19 nt, Artificial Sequence
  Description of Artificial Sequence: Synthetic oligonucleotide
agguugggaauaugcuucu

SEQ ID NO: 1319443 - RNA, 19 nt, Artificial Sequence
  Description of Artificial Sequence: Synthetic oligonucleotide
ccaggaccgagucaaacgc

SEQ ID NO: 1319444 - RNA, 19 nt, Artificial Sequence
  Description of Artificial Sequence: Synthetic oligonucleotide
cucuaugaggaauggaagu

SEQ ID NO: 1319445 - RNA, 19 nt, Artificial Sequence
  Description of Artificial Sequence: Synthetic oligonucleotide
ucuuaaggccuauguccaa

SEQ ID NO: 1319446 - RNA, 19 nt, Artificial Sequence
  Description of Artificial Sequence: Synthetic oligonucleotide
gugucuuaaaugacuagaa

SEQ ID NO: 1319447 - RNA, 19 nt, Artificial Sequence
  Description of Artificial Sequence: Synthetic oligonucleotide
ugguccgauuuaaaucaau

SEQ ID NO: 1319448 - RNA, 19 nt, Artificial Sequence
  Description of Artificial Sequence: Synthetic oligonucleotide
acaagcguugugguuaaaa

SEQ ID NO: 1319449 - RNA, 19 nt, Artificial Sequence
  Description of Artificial Sequence: Synthetic oligonucleotide
aggccuauguccaaugaaa

SEQ ID NO: 1319450 - RNA, 19 nt, Artificial Sequence
  Description of Artificial Sequence: Synthetic oligonucleotide
ugauccuggcagccaagau

SEQ ID NO: 1319451 - RNA, 19 nt, Artificial Sequence
  Description of Artificial Sequence: Synthetic oligonucleotide
gacagaguugaacaacuuu

SEQ ID NO: 1319452 - RNA, 19 nt, Artificial Sequence
  Description of Artificial Sequence: Synthetic oligonucleotide
gacaggacgccgugucccc

SEQ ID NO: 1319453 - RNA, 19 nt, Artificial Sequence
  Description of Artificial Sequence: Synthetic oligonucleotide
uugguccgauuuaaaucaa

SEQ ID NO: 1319454 - RNA, 19 nt, Artificial Sequence
  Description of Artificial Sequence: Synthetic oligonucleotide
accaaagcuaaugcaacua

SEQ ID NO: 1319455 - RNA, 19 nt, Artificial Sequence
  Description of Artificial Sequence: Synthetic oligonucleotide
agcauucggcuuauuaagu

SEQ ID NO: 1319456 - RNA, 19 nt, Artificial Sequence
  Description of Artificial Sequence: Synthetic oligonucleotide
aagcucuaugaggaaugga

SEQ ID NO: 1319457 - RNA, 19 nt, Artificial Sequence
  Description of Artificial Sequence: Synthetic oligonucleotide
agcuggguaucugcucagc

SEQ ID NO: 1319458 - RNA, 19 nt, Artificial Sequence
  Description of Artificial Sequence: Synthetic oligonucleotide
cucaccagaguuagaggga

SEQ ID NO: 1319459 - RNA, 19 nt, Artificial Sequence
  Description of Artificial Sequence: Synthetic oligonucleotide
cccaggaccgagucaaacg

SEQ ID NO: 1319460 - RNA, 19 nt, Artificial Sequence
  Description of Artificial Sequence: Synthetic oligonucleotide
ugcaagggguaggucagcu

SEQ ID NO: 1319461 - RNA, 19 nt, Artificial Sequence
  Description of Artificial Sequence: Synthetic oligonucleotide
guuagagggaaaaggagau

SEQ ID NO: 1319462 - RNA, 19 nt, Artificial Sequence
  Description of Artificial Sequence: Synthetic oligonucleotide
ucaucagguugggaauaug

SEQ ID NO: 1319463 - RNA, 19 nt, Artificial Sequence
  Description of Artificial Sequence: Synthetic oligonucleotide
cucgugaucuucaguuuga

SEQ ID NO: 1319464 - RNA, 19 nt, Artificial Sequence
  Description of Artificial Sequence: Synthetic oligonucleotide
accgagaggacaagcguug

SEQ ID NO: 1319465 - RNA, 19 nt, Artificial Sequence
  Description of Artificial Sequence: Synthetic oligonucleotide
gguuuagacuggaauauaa

SEQ ID NO: 1319466 - RNA, 19 nt, Artificial Sequence
  Description of Artificial Sequence: Synthetic oligonucleotide
cauuuggaggccauuucua

SEQ ID NO: 1319467 - RNA, 19 nt, Artificial Sequence
  Description of Artificial Sequence: Synthetic oligonucleotide
cucauagaauuuggcuaag

SEQ ID NO: 1319468 - RNA, 19 nt, Artificial Sequence
  Description of Artificial Sequence: Synthetic oligonucleotide
ccuacugauauuaguaaaa

SEQ ID NO: 1319469 - RNA, 19 nt, Artificial Sequence
  Description of Artificial Sequence: Synthetic oligonucleotide
ugacaggcccggugacagg

SEQ ID NO: 1319470 - RNA, 19 nt, Artificial Sequence
  Description of Artificial Sequence: Synthetic oligonucleotide
cucugacaugcauauaacu

SEQ ID NO: 1319471 - RNA, 19 nt, Artificial Sequence
  Description of Artificial Sequence: Synthetic oligonucleotide
agaugacugcaggguacgg

SEQ ID NO: 1319472 - RNA, 19 nt, Artificial Sequence
  Description of Artificial Sequence: Synthetic oligonucleotide
ugguuuagacuggaauaua

SEQ ID NO: 1319473 - RNA, 19 nt, Artificial Sequence
  Description of Artificial Sequence: Synthetic oligonucleotide
gggguaggucagcugacag

SEQ ID NO: 1319474 - RNA, 19 nt, Artificial Sequence
  Description of Artificial Sequence: Synthetic oligonucleotide
cacggcuguagcaacagcu

SEQ ID NO: 1319475 - RNA, 19 nt, Artificial Sequence
  Description of Artificial Sequence: Synthetic oligonucleotide
acggcuguagcaacagcug

SEQ ID NO: 1319476 - RNA, 19 nt, Artificial Sequence
  Description of Artificial Sequence: Synthetic oligonucleotide
gcuauauuuggaguacaca

SEQ ID NO: 1319477 - RNA, 19 nt, Artificial Sequence
  Description of Artificial Sequence: Synthetic oligonucleotide
agauccaaagcaacaccau

SEQ ID NO: 1319478 - RNA, 19 nt, Artificial Sequence
  Description of Artificial Sequence: Synthetic oligonucleotide
uccucgugaucuucaguuu

SEQ ID NO: 1319479 - RNA, 19 nt, Artificial Sequence
  Description of Artificial Sequence: Synthetic oligonucleotide
gcgcaacagauccaaagca

SEQ ID NO: 1319480 - RNA, 19 nt, Artificial Sequence
  Description of Artificial Sequence: Synthetic oligonucleotide
cuuuggcgccgccaucuug

SEQ ID NO: 1319481 - RNA, 19 nt, Artificial Sequence
  Description of Artificial Sequence: Synthetic oligonucleotide
caaacgcuucggccgcugc

SEQ ID NO: 1319482 - RNA, 19 nt, Artificial Sequence
  Description of Artificial Sequence: Synthetic oligonucleotide
caaaauaccuacugauauu

SEQ ID NO: 1319483 - RNA, 19 nt, Artificial Sequence
  Description of Artificial Sequence: Synthetic oligonucleotide
caagcguugugguuaaaau

SEQ ID NO: 1319484 - RNA, 19 nt, Artificial Sequence
  Description of Artificial Sequence: Synthetic oligonucleotide
uagcaacagcugcgcaaca

SEQ ID NO: 1319485 - RNA, 19 nt, Artificial Sequence
  Description of Artificial Sequence: Synthetic oligonucleotide
ccucgugaucuucaguuug

SEQ ID NO: 1319486 - RNA, 19 nt, Artificial Sequence
  Description of Artificial Sequence: Synthetic oligonucleotide
ucaaacgcuucggccgcug

SEQ ID NO: 1319487 - RNA, 19 nt, Artificial Sequence
  Description of Artificial Sequence: Synthetic oligonucleotide
cauauaacuccucuuccuu

SEQ ID NO: 1319488 - RNA, 19 nt, Artificial Sequence
  Description of Artificial Sequence: Synthetic oligonucleotide
gcuguagcaacagcugcgc

SEQ ID NO: 1319489 - RNA, 19 nt, Artificial Sequence
  Description of Artificial Sequence: Synthetic oligonucleotide
guggugcauacugaauuuc

SEQ ID NO: 1319490 - RNA, 19 nt, Artificial Sequence
  Description of Artificial Sequence: Synthetic oligonucleotide
cuucggccgcugcaguccc

SEQ ID NO: 1319491 - RNA, 19 nt, Artificial Sequence
  Description of Artificial Sequence: Synthetic oligonucleotide
cagaguugaacaacuuuau

SEQ ID NO: 1319492 - RNA, 19 nt, Artificial Sequence
  Description of Artificial Sequence: Synthetic oligonucleotide
ggccuauguccaaugaaac

SEQ ID NO: 1319493 - RNA, 19 nt, Artificial Sequence
  Description of Artificial Sequence: Synthetic oligonucleotide
agguaaagucacagcaaau

SEQ ID NO: 1319494 - RNA, 19 nt, Artificial Sequence
  Description of Artificial Sequence: Synthetic oligonucleotide
cauuucuaggcagaggcau

SEQ ID NO: 1319495 - RNA, 19 nt, Artificial Sequence
  Description of Artificial Sequence: Synthetic oligonucleotide
gcauauaacuccucuuccu

SEQ ID NO: 1319496 - RNA, 19 nt, Artificial Sequence
  Description of Artificial Sequence: Synthetic oligonucleotide
augguucucgcaaguuugu

SEQ ID NO: 1319497 - RNA, 19 nt, Artificial Sequence
  Description of Artificial Sequence: Synthetic oligonucleotide
cuauguccaaugaaaccau

SEQ ID NO: 1319498 - RNA, 19 nt, Artificial Sequence
  Description of Artificial Sequence: Synthetic oligonucleotide
uggcaagcauauugcucau

SEQ ID NO: 1319499 - RNA, 19 nt, Artificial Sequence
  Description of Artificial Sequence: Synthetic oligonucleotide
gaacgaccucaccagaguu

SEQ ID NO: 1319500 - RNA, 19 nt, Artificial Sequence
  Description of Artificial Sequence: Synthetic oligonucleotide
caugcauauaacuccucuu

SEQ ID NO: 1319501 - RNA, 19 nt, Artificial Sequence
  Description of Artificial Sequence: Synthetic oligonucleotide
agaggcccggcuuccucgu

SEQ ID NO: 1319502 - RNA, 19 nt, Artificial Sequence
  Description of Artificial Sequence: Synthetic oligonucleotide
gcauucggcuuauuaagua

SEQ ID NO: 1319503 - RNA, 19 nt, Artificial Sequence
  Description of Artificial Sequence: Synthetic oligonucleotide
cauccuaagcauucggcuu

SEQ ID NO: 1319504 - RNA, 19 nt, Artificial Sequence
  Description of Artificial Sequence: Synthetic oligonucleotide
ccgagucaaacgcuucggc

SEQ ID NO: 1319505 - RNA, 19 nt, Artificial Sequence
  Description of Artificial Sequence: Synthetic oligonucleotide
ugguucucgcaaguuugua

SEQ ID NO: 1319506 - RNA, 19 nt, Artificial Sequence
  Description of Artificial Sequence: Synthetic oligonucleotide
auauuguuccacggcugua

SEQ ID NO: 1319507 - RNA, 19 nt, Artificial Sequence
  Description of Artificial Sequence: Synthetic oligonucleotide
cugcuauauuuggaguaca

SEQ ID NO: 1319508 - RNA, 19 nt, Artificial Sequence
  Description of Artificial Sequence: Synthetic oligonucleotide
ccaaagcuaaugcaacuaa

SEQ ID NO: 1319509 - RNA, 19 nt, Artificial Sequence
  Description of Artificial Sequence: Synthetic oligonucleotide
uccuaagcauucggcuuau

SEQ ID NO: 1319510 - RNA, 19 nt, Artificial Sequence
  Description of Artificial Sequence: Synthetic oligonucleotide
ccugcaaccucucugacau

SEQ ID NO: 1319511 - RNA, 19 nt, Artificial Sequence
  Description of Artificial Sequence: Synthetic oligonucleotide
cgugucuuaaaugacuaga

SEQ ID NO: 1319512 - RNA, 19 nt, Artificial Sequence
  Description of Artificial Sequence: Synthetic oligonucleotide
gcaagggguaggucagcug

SEQ ID NO: 1319513 - RNA, 19 nt, Artificial Sequence
  Description of Artificial Sequence: Synthetic oligonucleotide
cuaugaggaauggaaguuu

SEQ ID NO: 1319514 - RNA, 19 nt, Artificial Sequence
  Description of Artificial Sequence: Synthetic oligonucleotide
cuguagcaacagcugcgca

SEQ ID NO: 1319515 - RNA, 19 nt, Artificial Sequence
  Description of Artificial Sequence: Synthetic oligonucleotide
caucaucagccugaagaua

SEQ ID NO: 1319516 - RNA, 19 nt, Artificial Sequence
  Description of Artificial Sequence: Synthetic oligonucleotide
agacaaugaucagcucaua

SEQ ID NO: 1319517 - RNA, 19 nt, Artificial Sequence
  Description of Artificial Sequence: Synthetic oligonucleotide
ggaauaugcuucugugcau

SEQ ID NO: 1319518 - RNA, 19 nt, Artificial Sequence
  Description of Artificial Sequence: Synthetic oligonucleotide
cuggguaucugcucagcuu

SEQ ID NO: 1319519 - RNA, 19 nt, Artificial Sequence
  Description of Artificial Sequence: Synthetic oligonucleotide
gguugggaauaugcuucug

SEQ ID NO: 1319520 - RNA, 19 nt, Artificial Sequence
  Description of Artificial Sequence: Synthetic oligonucleotide
gccugcaaccucucugaca

SEQ ID NO: 1319521 - RNA, 19 nt, Artificial Sequence
  Description of Artificial Sequence: Synthetic oligonucleotide
ggacaagcguugugguuaa

SEQ ID NO: 1319522 - RNA, 19 nt, Artificial Sequence
  Description of Artificial Sequence: Synthetic oligonucleotide
caccgagaggacaagcguu

SEQ ID NO: 1319523 - RNA, 19 nt, Artificial Sequence
  Description of Artificial Sequence: Synthetic oligonucleotide
guaguuccugugugcuugu

SEQ ID NO: 1319524 - RNA, 19 nt, Artificial Sequence
  Description of Artificial Sequence: Synthetic oligonucleotide
gaggcccggcuuccucgug

SEQ ID NO: 1319525 - RNA, 19 nt, Artificial Sequence
  Description of Artificial Sequence: Synthetic oligonucleotide
gguccgauuuaaaucaauu

SEQ ID NO: 1319526 - RNA, 19 nt, Artificial Sequence
  Description of Artificial Sequence: Synthetic oligonucleotide
gugcaagggguaggucagc

SEQ ID NO: 1319527 - RNA, 19 nt, Artificial Sequence
  Description of Artificial Sequence: Synthetic oligonucleotide
uuggcgccgccaucuuguu

SEQ ID NO: 1319528 - RNA, 19 nt, Artificial Sequence
  Description of Artificial Sequence: Synthetic oligonucleotide
cgauuuaaaucaauuccau

SEQ ID NO: 1319529 - RNA, 19 nt, Artificial Sequence
  Description of Artificial Sequence: Synthetic oligonucleotide
ccuggacccaaagcuuccc

SEQ ID NO: 1319530 - RNA, 19 nt, Artificial Sequence
  Description of Artificial Sequence: Synthetic oligonucleotide
gcguugugguuaaaaucca

SEQ ID NO: 1319531 - RNA, 19 nt, Artificial Sequence
  Description of Artificial Sequence: Synthetic oligonucleotide
gcauauugcucaucagguu

SEQ ID NO: 1319532 - RNA, 19 nt, Artificial Sequence
  Description of Artificial Sequence: Synthetic oligonucleotide
ccaauguccgugucuuaaa

SEQ ID NO: 1319533 - RNA, 19 nt, Artificial Sequence
  Description of Artificial Sequence: Synthetic oligonucleotide
cgagaggacaagcguugug

SEQ ID NO: 1319534 - RNA, 19 nt, Artificial Sequence
  Description of Artificial Sequence: Synthetic oligonucleotide
ccagaacgaccucaccaga

SEQ ID NO: 1319535 - RNA, 19 nt, Artificial Sequence
  Description of Artificial Sequence: Synthetic oligonucleotide
cauuuguagauaggacauu

SEQ ID NO: 1319536 - RNA, 19 nt, Artificial Sequence
  Description of Artificial Sequence: Synthetic oligonucleotide
caccauagaugcucagcuu

SEQ ID NO: 1319537 - RNA, 19 nt, Artificial Sequence
  Description of Artificial Sequence: Synthetic oligonucleotide
ggcccggugacaggacgcc

SEQ ID NO: 1319538 - RNA, 19 nt, Artificial Sequence
  Description of Artificial Sequence: Synthetic oligonucleotide
cauuccaauuugguccgau

SEQ ID NO: 1319539 - RNA, 19 nt, Artificial Sequence
  Description of Artificial Sequence: Synthetic oligonucleotide
ggugugcaagggguagguc

SEQ ID NO: 1319540 - RNA, 19 nt, Artificial Sequence
  Description of Artificial Sequence: Synthetic oligonucleotide
gugauuucuuaaggccuau

SEQ ID NO: 1319541 - RNA, 19 nt, Artificial Sequence
  Description of Artificial Sequence: Synthetic oligonucleotide
gcucaucagguugggaaua

SEQ ID NO: 1319542 - RNA, 19 nt, Artificial Sequence
  Description of Artificial Sequence: Synthetic oligonucleotide
cucaucagguugggaauau

SEQ ID NO: 1319543 - RNA, 19 nt, Artificial Sequence
  Description of Artificial Sequence: Synthetic oligonucleotide
ccaucaccgagaggacaag

SEQ ID NO: 1319544 - RNA, 19 nt, Artificial Sequence
  Description of Artificial Sequence: Synthetic oligonucleotide
gcaaccucucugacaugca

SEQ ID NO: 1319545 - RNA, 19 nt, Artificial Sequence
  Description of Artificial Sequence: Synthetic oligonucleotide
gcccggugacaggacgccg

SEQ ID NO: 1319546 - RNA, 19 nt, Artificial Sequence
  Description of Artificial Sequence: Synthetic oligonucleotide
cugucacagccgcucggcu

SEQ ID NO: 1319547 - RNA, 19 nt, Artificial Sequence
  Description of Artificial Sequence: Synthetic oligonucleotide
gacaagcguugugguuaaa

SEQ ID NO: 1319548 - RNA, 19 nt, Artificial Sequence
  Description of Artificial Sequence: Synthetic oligonucleotide
gcuucugugcaugcagauu

SEQ ID NO: 1319549 - RNA, 19 nt, Artificial Sequence
  Description of Artificial Sequence: Synthetic oligonucleotide
gucaaacgcuucggccgcu

SEQ ID NO: 1319550 - RNA, 19 nt, Artificial Sequence
  Description of Artificial Sequence: Synthetic oligonucleotide
ccugugugcuugugaauuu

SEQ ID NO: 1319551 - RNA, 19 nt, Artificial Sequence
  Description of Artificial Sequence: Synthetic oligonucleotide
gcugcgcaacagauccaaa

SEQ ID NO: 1319552 - RNA, 19 nt, Artificial Sequence
  Description of Artificial Sequence: Synthetic oligonucleotide
gcccggcuuccucgugauc

SEQ ID NO: 1319553 - RNA, 19 nt, Artificial Sequence
  Description of Artificial Sequence: Synthetic oligonucleotide
ccgagaggacaagcguugu

SEQ ID NO: 1319554 - RNA, 19 nt, Artificial Sequence
  Description of Artificial Sequence: Synthetic oligonucleotide
ccuuuggcgccgccaucuu

SEQ ID NO: 1319555 - RNA, 19 nt, Artificial Sequence
  Description of Artificial Sequence: Synthetic oligonucleotide
ccuaagcauucggcuuauu

SEQ ID NO: 1319556 - RNA, 19 nt, Artificial Sequence
  Description of Artificial Sequence: Synthetic oligonucleotide
aauagaacuagauacaacc

SEQ ID NO: 1319557 - RNA, 19 nt, Artificial Sequence
  Description of Artificial Sequence: Synthetic oligonucleotide
aguuaguguagucauaucc

SEQ ID NO: 1319558 - RNA, 19 nt, Artificial Sequence
  Description of Artificial Sequence: Synthetic oligonucleotide
aauccaaugucugucaugc

SEQ ID NO: 1319559 - RNA, 19 nt, Artificial Sequence
  Description of Artificial Sequence: Synthetic oligonucleotide
cuacaauagaacuagauac

SEQ ID NO: 1319560 - RNA, 19 nt, Artificial Sequence
  Description of Artificial Sequence: Synthetic oligonucleotide
uguaauagggccugcaugg

SEQ ID NO: 1319561 - RNA, 19 nt, Artificial Sequence
  Description of Artificial Sequence: Synthetic oligonucleotide
acuuuuaucaagcugacga

SEQ ID NO: 1319562 - RNA, 19 nt, Artificial Sequence
  Description of Artificial Sequence: Synthetic oligonucleotide
aagagguaauucuauuacc

SEQ ID NO: 1319563 - RNA, 19 nt, Artificial Sequence
  Description of Artificial Sequence: Synthetic oligonucleotide
aaaaguguuuucccagugc

SEQ ID NO: 1319564 - RNA, 19 nt, Artificial Sequence
  Description of Artificial Sequence: Synthetic oligonucleotide
uauauuaauccaaugucug

SEQ ID NO: 1319565 - RNA, 19 nt, Artificial Sequence
  Description of Artificial Sequence: Synthetic oligonucleotide
agguauuauuccuacacgc

SEQ ID NO: 1319566 - RNA, 19 nt, Artificial Sequence
  Description of Artificial Sequence: Synthetic oligonucleotide
acuagcaacagcucgugcc

SEQ ID NO: 1319567 - RNA, 19 nt, Artificial Sequence
  Description of Artificial Sequence: Synthetic oligonucleotide
gaagccgucgcucauaggg

SEQ ID NO: 1319568 - RNA, 19 nt, Artificial Sequence
  Description of Artificial Sequence: Synthetic oligonucleotide
cagaguaucaaaaccaucc

SEQ ID NO: 1319569 - RNA, 19 nt, Artificial Sequence
  Description of Artificial Sequence: Synthetic oligonucleotide
acuagauacaaccuuuagg

SEQ ID NO: 1319570 - RNA, 19 nt, Artificial Sequence
  Description of Artificial Sequence: Synthetic oligonucleotide
uauuauguugcucauacau

SEQ ID NO: 1319571 - RNA, 19 nt, Artificial Sequence
  Description of Artificial Sequence: Synthetic oligonucleotide
uauuauuccuacacgcugg

SEQ ID NO: 1319572 - RNA, 19 nt, Artificial Sequence
  Description of Artificial Sequence: Synthetic oligonucleotide
cuagauacaaccuuuagga

SEQ ID NO: 1319573 - RNA, 19 nt, Artificial Sequence
  Description of Artificial Sequence: Synthetic oligonucleotide
uucaauaugucuuuuguaa

SEQ ID NO: 1319574 - RNA, 19 nt, Artificial Sequence
  Description of Artificial Sequence: Synthetic oligonucleotide
uaguaaauuacacagguuu

SEQ ID NO: 1319575 - RNA, 19 nt, Artificial Sequence
  Description of Artificial Sequence: Synthetic oligonucleotide
uaugaaaagcuucaauaug

SEQ ID NO: 1319576 - RNA, 19 nt, Artificial Sequence
  Description of Artificial Sequence: Synthetic oligonucleotide
aguaacuccauuaaaguuc

SEQ ID NO: 1319577 - RNA, 19 nt, Artificial Sequence
  Description of Artificial Sequence: Synthetic oligonucleotide
ugauaguaaauuacacagg

SEQ ID NO: 1319578 - RNA, 19 nt, Artificial Sequence
  Description of Artificial Sequence: Synthetic oligonucleotide
ucauuuuaacucuaugcag

SEQ ID NO: 1319579 - RNA, 19 nt, Artificial Sequence
  Description of Artificial Sequence: Synthetic oligonucleotide
aauguuguacaaaaugcuc

SEQ ID NO: 1319580 - RNA, 19 nt, Artificial Sequence
  Description of Artificial Sequence: Synthetic oligonucleotide
uauugcugcaauaaauuca

SEQ ID NO: 1319581 - RNA, 19 nt, Artificial Sequence
  Description of Artificial Sequence: Synthetic oligonucleotide
uaagagguaauucuauuac

SEQ ID NO: 1319582 - RNA, 19 nt, Artificial Sequence
  Description of Artificial Sequence: Synthetic oligonucleotide
auaauucuggguuuguaag

SEQ ID NO: 1319583 - RNA, 19 nt, Artificial Sequence
  Description of Artificial Sequence: Synthetic oligonucleotide
aaaggauccaccucucuug

SEQ ID NO: 1319584 - RNA, 19 nt, Artificial Sequence
  Description of Artificial Sequence: Synthetic oligonucleotide
cauacuauuauguugcuca

SEQ ID NO: 1319585 - RNA, 19 nt, Artificial Sequence
  Description of Artificial Sequence: Synthetic oligonucleotide
uuacaauugcuucauaauc

SEQ ID NO: 1319586 - RNA, 19 nt, Artificial Sequence
  Description of Artificial Sequence: Synthetic oligonucleotide
uguuguaaaccaaaggauc

SEQ ID NO: 1319587 - RNA, 19 nt, Artificial Sequence
  Description of Artificial Sequence: Synthetic oligonucleotide
aauucuauuaccucucgua

SEQ ID NO: 1319588 - RNA, 19 nt, Artificial Sequence
  Description of Artificial Sequence: Synthetic oligonucleotide
aguacaaaauaagucauag

SEQ ID NO: 1319589 - RNA, 19 nt, Artificial Sequence
  Description of Artificial Sequence: Synthetic oligonucleotide
uuaguaacuccauuaaagu

SEQ ID NO: 1319590 - RNA, 19 nt, Artificial Sequence
  Description of Artificial Sequence: Synthetic oligonucleotide
ucuauuaccucucguaacu

SEQ ID NO: 1319591 - RNA, 19 nt, Artificial Sequence
  Description of Artificial Sequence: Synthetic oligonucleotide
auauugcugcaauaaauuc

SEQ ID NO: 1319592 - RNA, 19 nt, Artificial Sequence
  Description of Artificial Sequence: Synthetic oligonucleotide
ucuacaauagaacuagaua

SEQ ID NO: 1319593 - RNA, 19 nt, Artificial Sequence
  Description of Artificial Sequence: Synthetic oligonucleotide
uccaaugucugucaugcag

SEQ ID NO: 1319594 - RNA, 19 nt, Artificial Sequence
  Description of Artificial Sequence: Synthetic oligonucleotide
ucaugauccgcacgaaugg

SEQ ID NO: 1319595 - RNA, 19 nt, Artificial Sequence
  Description of Artificial Sequence: Synthetic oligonucleotide
uuuaacuguucccuuagcu

SEQ ID NO: 1319596 - RNA, 19 nt, Artificial Sequence
  Description of Artificial Sequence: Synthetic oligonucleotide
uacaauagaacuagauaca

SEQ ID NO: 1319597 - RNA, 19 nt, Artificial Sequence
  Description of Artificial Sequence: Synthetic oligonucleotide
cauguuguaaaccaaagga

SEQ ID NO: 1319598 - RNA, 19 nt, Artificial Sequence
  Description of Artificial Sequence: Synthetic oligonucleotide
acuaucucaaaccauuuga

SEQ ID NO: 1319599 - RNA, 19 nt, Artificial Sequence
  Description of Artificial Sequence: Synthetic oligonucleotide
ucaauauaucuaaucuugc

SEQ ID NO: 1319600 - RNA, 19 nt, Artificial Sequence
  Description of Artificial Sequence: Synthetic oligonucleotide
ugucuuuuguaaauauugc

SEQ ID NO: 1319601 - RNA, 19 nt, Artificial Sequence
  Description of Artificial Sequence: Synthetic oligonucleotide
uuuaucaagcugacgacga

SEQ ID NO: 1319602 - RNA, 19 nt, Artificial Sequence
  Description of Artificial Sequence: Synthetic oligonucleotide
uuucuaucuaaucuuccug

SEQ ID NO: 1319603 - RNA, 19 nt, Artificial Sequence
  Description of Artificial Sequence: Synthetic oligonucleotide
uuuucauacugcuugguaa

SEQ ID NO: 1319604 - RNA, 19 nt, Artificial Sequence
  Description of Artificial Sequence: Synthetic oligonucleotide
acugccaauacauacauua

SEQ ID NO: 1319605 - RNA, 19 nt, Artificial Sequence
  Description of Artificial Sequence: Synthetic oligonucleotide
aguaaaugcucucccguac

SEQ ID NO: 1319606 - RNA, 19 nt, Artificial Sequence
  Description of Artificial Sequence: Synthetic oligonucleotide
caauacauacauuagucuc

SEQ ID NO: 1319607 - RNA, 19 nt, Artificial Sequence
  Description of Artificial Sequence: Synthetic oligonucleotide
uacauuagucuccuuaacu

SEQ ID NO: 1319608 - RNA, 19 nt, Artificial Sequence
  Description of Artificial Sequence: Synthetic oligonucleotide
aagacggccgucaaucucc

SEQ ID NO: 1319609 - RNA, 19 nt, Artificial Sequence
  Description of Artificial Sequence: Synthetic oligonucleotide
uucucuaaucaaacgagca

SEQ ID NO: 1319610 - RNA, 19 nt, Artificial Sequence
  Description of Artificial Sequence: Synthetic oligonucleotide
aacccugauaguaaauuac

SEQ ID NO: 1319611 - RNA, 19 nt, Artificial Sequence
  Description of Artificial Sequence: Synthetic oligonucleotide
auuuuaacucuaugcagag

SEQ ID NO: 1319612 - RNA, 19 nt, Artificial Sequence
  Description of Artificial Sequence: Synthetic oligonucleotide
aacuagauacaaccuuuag

SEQ ID NO: 1319613 - RNA, 19 nt, Artificial Sequence
  Description of Artificial Sequence: Synthetic oligonucleotide
ucauaguaaaugcucuccc

SEQ ID NO: 1319614 - RNA, 19 nt, Artificial Sequence
  Description of Artificial Sequence: Synthetic oligonucleotide
uuucucuaaucaaacgagc

SEQ ID NO: 1319615 - RNA, 19 nt, Artificial Sequence
  Description of Artificial Sequence: Synthetic oligonucleotide
uaaucaaacgagcacuuuc

SEQ ID NO: 1319616 - RNA, 19 nt, Artificial Sequence
  Description of Artificial Sequence: Synthetic oligonucleotide
agaauuacuaaauuacaua

SEQ ID NO: 1319617 - RNA, 19 nt, Artificial Sequence
  Description of Artificial Sequence: Synthetic oligonucleotide
gagguauuauuccuacacg

SEQ ID NO: 1319618 - RNA, 19 nt, Artificial Sequence
  Description of Artificial Sequence: Synthetic oligonucleotide
agguuuguaguccaguuug

SEQ ID NO: 1319619 - RNA, 19 nt, Artificial Sequence
  Description of Artificial Sequence: Synthetic oligonucleotide
uuuucuaucuaaucuuccu

SEQ ID NO: 1319620 - RNA, 19 nt, Artificial Sequence
  Description of Artificial Sequence: Synthetic oligonucleotide
aaugagaucacugccaaua

SEQ ID NO: 1319621 - RNA, 19 nt, Artificial Sequence
  Description of Artificial Sequence: Synthetic oligonucleotide
ugaacuacaaaaucaugau

SEQ ID NO: 1319622 - RNA, 19 nt, Artificial Sequence
  Description of Artificial Sequence: Synthetic oligonucleotide
acauuucucuaaucaaacg

SEQ ID NO: 1319623 - RNA, 19 nt, Artificial Sequence
  Description of Artificial Sequence: Synthetic oligonucleotide
uaaucuauuucaccgugcu

SEQ ID NO: 1319624 - RNA, 19 nt, Artificial Sequence
  Description of Artificial Sequence: Synthetic oligonucleotide
uguucauuugguaaaucaa

SEQ ID NO: 1319625 - RNA, 19 nt, Artificial Sequence
  Description of Artificial Sequence: Synthetic oligonucleotide
ucuaugcagaguaucaaaa

SEQ ID NO: 1319626 - RNA, 19 nt, Artificial Sequence
  Description of Artificial Sequence: Synthetic oligonucleotide
aguacacacauuucucagg

SEQ ID NO: 1319627 - RNA, 19 nt, Artificial Sequence
  Description of Artificial Sequence: Synthetic oligonucleotide
uccauuaaaguucucugaa

SEQ ID NO: 1319628 - RNA, 19 nt, Artificial Sequence
  Description of Artificial Sequence: Synthetic oligonucleotide
cugaacuacaaaaucauga

SEQ ID NO: 1319629 - RNA, 19 nt, Artificial Sequence
  Description of Artificial Sequence: Synthetic oligonucleotide
acaaaaucaugauccgcac

SEQ ID NO: 1319630 - RNA, 19 nt, Artificial Sequence
  Description of Artificial Sequence: Synthetic oligonucleotide
cauaguaaaugcucucccg

SEQ ID NO: 1319631 - RNA, 19 nt, Artificial Sequence
  Description of Artificial Sequence: Synthetic oligonucleotide
agcaaauaugaaaagcuuc

SEQ ID NO: 1319632 - RNA, 19 nt, Artificial Sequence
  Description of Artificial Sequence: Synthetic oligonucleotide
ugguaaguucuuuuaacug

SEQ ID NO: 1319633 - RNA, 19 nt, Artificial Sequence
  Description of Artificial Sequence: Synthetic oligonucleotide
uuaaugagaucacugccaa

SEQ ID NO: 1319634 - RNA, 19 nt, Artificial Sequence
  Description of Artificial Sequence: Synthetic oligonucleotide
aauauugcugcaauaaauu

SEQ ID NO: 1319635 - RNA, 19 nt, Artificial Sequence
  Description of Artificial Sequence: Synthetic oligonucleotide
acgacaaccuacuacauau

SEQ ID NO: 1319636 - RNA, 19 nt, Artificial Sequence
  Description of Artificial Sequence: Synthetic oligonucleotide
aagaauuacuaaauuacau

SEQ ID NO: 1319637 - RNA, 19 nt, Artificial Sequence
  Description of Artificial Sequence: Synthetic oligonucleotide
agguaauucuauuaccucu

SEQ ID NO: 1319638 - RNA, 19 nt, Artificial Sequence
  Description of Artificial Sequence: Synthetic oligonucleotide
ucucuaaucaaacgagcac

SEQ ID NO: 1319639 - RNA, 19 nt, Artificial Sequence
  Description of Artificial Sequence: Synthetic oligonucleotide
uuaacuguucccuuagcuc

SEQ ID NO: 1319640 - RNA, 19 nt, Artificial Sequence
  Description of Artificial Sequence: Synthetic oligonucleotide
uguacccucagaaaaccga

SEQ ID NO: 1319641 - RNA, 19 nt, Artificial Sequence
  Description of Artificial Sequence: Synthetic oligonucleotide
ucaguacacacauuucuca

SEQ ID NO: 1319642 - RNA, 19 nt, Artificial Sequence
  Description of Artificial Sequence: Synthetic oligonucleotide
ugcuuuaacaaugaauuuc

SEQ ID NO: 1319643 - RNA, 19 nt, Artificial Sequence
  Description of Artificial Sequence: Synthetic oligonucleotide
uccauuuguugcuuuaaca

SEQ ID NO: 1319644 - RNA, 19 nt, Artificial Sequence
  Description of Artificial Sequence: Synthetic oligonucleotide
auuucucuaaucaaacgag

SEQ ID NO: 1319645 - RNA, 19 nt, Artificial Sequence
  Description of Artificial Sequence: Synthetic oligonucleotide
cuugguaaguucuuuuaac

SEQ ID NO: 1319646 - RNA, 19 nt, Artificial Sequence
  Description of Artificial Sequence: Synthetic oligonucleotide
acgacgacaaccuacuaca

SEQ ID NO: 1319647 - RNA, 19 nt, Artificial Sequence
  Description of Artificial Sequence: Synthetic oligonucleotide
guauuauuccuacacgcug

SEQ ID NO: 1319648 - RNA, 19 nt, Artificial Sequence
  Description of Artificial Sequence: Synthetic oligonucleotide
cauuuuaacucuaugcaga

SEQ ID NO: 1319649 - RNA, 19 nt, Artificial Sequence
  Description of Artificial Sequence: Synthetic oligonucleotide
uaucuaaucuugcuuguuc

SEQ ID NO: 1319650 - RNA, 19 nt, Artificial Sequence
  Description of Artificial Sequence: Synthetic oligonucleotide
auaguaaaugcucucccgu

SEQ ID NO: 1319651 - RNA, 19 nt, Artificial Sequence
  Description of Artificial Sequence: Synthetic oligonucleotide
auacauuagucuccuuaac

SEQ ID NO: 1319652 - RNA, 19 nt, Artificial Sequence
  Description of Artificial Sequence: Synthetic oligonucleotide
aacuccauuaaaguucucu

SEQ ID NO: 1319653 - RNA, 19 nt, Artificial Sequence
  Description of Artificial Sequence: Synthetic oligonucleotide
ugcuucaguacacacauuu

SEQ ID NO: 1319654 - RNA, 19 nt, Artificial Sequence
  Description of Artificial Sequence: Synthetic oligonucleotide
ugccaauacauacauuagu

SEQ ID NO: 1319655 - RNA, 19 nt, Artificial Sequence
  Description of Artificial Sequence: Synthetic oligonucleotide
cuggacgaagcaaagcagg

SEQ ID NO: 1319656 - RNA, 19 nt, Artificial Sequence
  Description of Artificial Sequence: Synthetic oligonucleotide
ucccguacuaucucaaacc

SEQ ID NO: 1319657 - RNA, 19 nt, Artificial Sequence
  Description of Artificial Sequence: Synthetic oligonucleotide
uccgccaugaugagaagcc

SEQ ID NO: 1319658 - RNA, 19 nt, Artificial Sequence
  Description of Artificial Sequence: Synthetic oligonucleotide
uuuguaguccaguuuggac

SEQ ID NO: 1319659 - RNA, 19 nt, Artificial Sequence
  Description of Artificial Sequence: Synthetic oligonucleotide
cauuucucuaaucaaacga

SEQ ID NO: 1319660 - RNA, 19 nt, Artificial Sequence
  Description of Artificial Sequence: Synthetic oligonucleotide
aaucaaacgagcacuuuca

SEQ ID NO: 1319661 - RNA, 19 nt, Artificial Sequence
  Description of Artificial Sequence: Synthetic oligonucleotide
auuaccucucguaacuccc

SEQ ID NO: 1319662 - RNA, 19 nt, Artificial Sequence
  Description of Artificial Sequence: Synthetic oligonucleotide
ugauguacccucagaaaac

SEQ ID NO: 1319663 - RNA, 19 nt, Artificial Sequence
  Description of Artificial Sequence: Synthetic oligonucleotide
ucugcucugacaacccucc

SEQ ID NO: 1319664 - RNA, 19 nt, Artificial Sequence
  Description of Artificial Sequence: Synthetic oligonucleotide
ucuaggguccgccaugaug

SEQ ID NO: 1319665 - RNA, 19 nt, Artificial Sequence
  Description of Artificial Sequence: Synthetic oligonucleotide
caagcugacgacgacaacc

SEQ ID NO: 1319666 - RNA, 19 nt, Artificial Sequence
  Description of Artificial Sequence: Synthetic oligonucleotide
auauuaauccaaugucugu

SEQ ID NO: 1319667 - RNA, 19 nt, Artificial Sequence
  Description of Artificial Sequence: Synthetic oligonucleotide
ucauaaucuauuucaccgu

SEQ ID NO: 1319668 - RNA, 19 nt, Artificial Sequence
  Description of Artificial Sequence: Synthetic oligonucleotide
uacuaucucaaaccauuug

SEQ ID NO: 1319669 - RNA, 19 nt, Artificial Sequence
  Description of Artificial Sequence: Synthetic oligonucleotide
uaauucuggguuuguaaga

SEQ ID NO: 1319670 - RNA, 19 nt, Artificial Sequence
  Description of Artificial Sequence: Synthetic oligonucleotide
cauaaucuauuucaccgug

SEQ ID NO: 1319671 - RNA, 19 nt, Artificial Sequence
  Description of Artificial Sequence: Synthetic oligonucleotide
uuaaaguucucugaaucuc

SEQ ID NO: 1319672 - RNA, 19 nt, Artificial Sequence
  Description of Artificial Sequence: Synthetic oligonucleotide
uucaguacacacauuucuc

SEQ ID NO: 1319673 - RNA, 19 nt, Artificial Sequence
  Description of Artificial Sequence: Synthetic oligonucleotide
uagucauauccaaagcaac

SEQ ID NO: 1319674 - RNA, 19 nt, Artificial Sequence
  Description of Artificial Sequence: Synthetic oligonucleotide
aacauuuccaggguccuca

SEQ ID NO: 1319675 - RNA, 19 nt, Artificial Sequence
  Description of Artificial Sequence: Synthetic oligonucleotide
gacgaagcaaagcaggauc

SEQ ID NO: 1319676 - RNA, 19 nt, Artificial Sequence
  Description of Artificial Sequence: Synthetic oligonucleotide
uccucaugagacauguugu

SEQ ID NO: 1319677 - RNA, 19 nt, Artificial Sequence
  Description of Artificial Sequence: Synthetic oligonucleotide
uucacccacaaucugccca

SEQ ID NO: 1319678 - RNA, 19 nt, Artificial Sequence
  Description of Artificial Sequence: Synthetic oligonucleotide
cuuaagacggccgucaauc

SEQ ID NO: 1319679 - RNA, 19 nt, Artificial Sequence
  Description of Artificial Sequence: Synthetic oligonucleotide
uccauuugauuuaguaacu

SEQ ID NO: 1319680 - RNA, 19 nt, Artificial Sequence
  Description of Artificial Sequence: Synthetic oligonucleotide
auaaucuauuucaccgugc

SEQ ID NO: 1319681 - RNA, 19 nt, Artificial Sequence
  Description of Artificial Sequence: Synthetic oligonucleotide
guaauucuauuaccucucg

SEQ ID NO: 1319682 - RNA, 19 nt, Artificial Sequence
  Description of Artificial Sequence: Synthetic oligonucleotide
cuuuuaucaagcugacgac

SEQ ID NO: 1319683 - RNA, 19 nt, Artificial Sequence
  Description of Artificial Sequence: Synthetic oligonucleotide
aucuaaucuugcuuguuca

SEQ ID NO: 1319684 - RNA, 19 nt, Artificial Sequence
  Description of Artificial Sequence: Synthetic oligonucleotide
ucccuuagcuccuuaagac

SEQ ID NO: 1319685 - RNA, 19 nt, Artificial Sequence
  Description of Artificial Sequence: Synthetic oligonucleotide
gccaugaucauuuuaacuc

SEQ ID NO: 1319686 - RNA, 19 nt, Artificial Sequence
  Description of Artificial Sequence: Synthetic oligonucleotide
gaacuacaaaaucaugauc

SEQ ID NO: 1319687 - RNA, 19 nt, Artificial Sequence
  Description of Artificial Sequence: Synthetic oligonucleotide
auucuauuaccucucguaa

SEQ ID NO: 1319688 - RNA, 19 nt, Artificial Sequence
  Description of Artificial Sequence: Synthetic oligonucleotide
ucuugaagcgccuuaucuc

SEQ ID NO: 1319689 - RNA, 19 nt, Artificial Sequence
  Description of Artificial Sequence: Synthetic oligonucleotide
aucaaacgagcacuuucac

SEQ ID NO: 1319690 - RNA, 19 nt, Artificial Sequence
  Description of Artificial Sequence: Synthetic oligonucleotide
uuaguguagucauauccaa

SEQ ID NO: 1319691 - RNA, 19 nt, Artificial Sequence
  Description of Artificial Sequence: Synthetic oligonucleotide
ucuaucuaaucuuccugga

SEQ ID NO: 1319692 - RNA, 19 nt, Artificial Sequence
  Description of Artificial Sequence: Synthetic oligonucleotide
acgaagcaaagcaggaucc

SEQ ID NO: 1319693 - RNA, 19 nt, Artificial Sequence
  Description of Artificial Sequence: Synthetic oligonucleotide
auugcuucauaaucuauuu

SEQ ID NO: 1319694 - RNA, 19 nt, Artificial Sequence
  Description of Artificial Sequence: Synthetic oligonucleotide
aaccuuuaggaaguugcag

SEQ ID NO: 1319695 - RNA, 19 nt, Artificial Sequence
  Description of Artificial Sequence: Synthetic oligonucleotide
uuaccucucguaacucccg

SEQ ID NO: 1319696 - RNA, 19 nt, Artificial Sequence
  Description of Artificial Sequence: Synthetic oligonucleotide
uuuguaauagggccugcau

SEQ ID NO: 1319697 - RNA, 19 nt, Artificial Sequence
  Description of Artificial Sequence: Synthetic oligonucleotide
aaauaccucauuauaguua

SEQ ID NO: 1319698 - RNA, 19 nt, Artificial Sequence
  Description of Artificial Sequence: Synthetic oligonucleotide
uucuauuaccucucguaac

SEQ ID NO: 1319699 - RNA, 19 nt, Artificial Sequence
  Description of Artificial Sequence: Synthetic oligonucleotide
aguaaauuacacagguuug

SEQ ID NO: 1319700 - RNA, 19 nt, Artificial Sequence
  Description of Artificial Sequence: Synthetic oligonucleotide
gacgacgacaaccuacuac

SEQ ID NO: 1319701 - RNA, 19 nt, Artificial Sequence
  Description of Artificial Sequence: Synthetic oligonucleotide
uuguaagagguaauucuau

SEQ ID NO: 1319702 - RNA, 19 nt, Artificial Sequence
  Description of Artificial Sequence: Synthetic oligonucleotide
uuagagucagccacuuuuc

SEQ ID NO: 1319703 - RNA, 19 nt, Artificial Sequence
  Description of Artificial Sequence: Synthetic oligonucleotide
aacucuaugcagaguauca

SEQ ID NO: 1319704 - RNA, 19 nt, Artificial Sequence
  Description of Artificial Sequence: Synthetic oligonucleotide
uuuguagugccuucagauc

SEQ ID NO: 1319705 - RNA, 19 nt, Artificial Sequence
  Description of Artificial Sequence: Synthetic oligonucleotide
aaucaugauccgcacgaau

SEQ ID NO: 1319706 - RNA, 19 nt, Artificial Sequence
  Description of Artificial Sequence: Synthetic oligonucleotide
uaauucuauuaccucucgu

SEQ ID NO: 1319707 - RNA, 19 nt, Artificial Sequence
  Description of Artificial Sequence: Synthetic oligonucleotide
uguugcucauacauguuua

SEQ ID NO: 1319708 - RNA, 19 nt, Artificial Sequence
  Description of Artificial Sequence: Synthetic oligonucleotide
ucuaaucaaacgagcacuu

SEQ ID NO: 1319709 - RNA, 19 nt, Artificial Sequence
  Description of Artificial Sequence: Synthetic oligonucleotide
ggauuuucaauauaucuaa

SEQ ID NO: 1319710 - RNA, 19 nt, Artificial Sequence
  Description of Artificial Sequence: Synthetic oligonucleotide
caauagaacuagauacaac

SEQ ID NO: 1319711 - RNA, 19 nt, Artificial Sequence
  Description of Artificial Sequence: Synthetic oligonucleotide
uucagaucauuuucagacu

SEQ ID NO: 1319712 - RNA, 19 nt, Artificial Sequence
  Description of Artificial Sequence: Synthetic oligonucleotide
uacccucagaaaaccgacg

SEQ ID NO: 1319713 - RNA, 19 nt, Artificial Sequence
  Description of Artificial Sequence: Synthetic oligonucleotide
ggcaaauaccucauuauag

SEQ ID NO: 1319714 - RNA, 19 nt, Artificial Sequence
  Description of Artificial Sequence: Synthetic oligonucleotide
uugcgguagucuugaagcg

SEQ ID NO: 1319715 - RNA, 19 nt, Artificial Sequence
  Description of Artificial Sequence: Synthetic oligonucleotide
uguaagagguaauucuauu

SEQ ID NO: 1319716 - RNA, 19 nt, Artificial Sequence
  Description of Artificial Sequence: Synthetic oligonucleotide
ucuugguccauuuguugcu

SEQ ID NO: 1319717 - RNA, 19 nt, Artificial Sequence
  Description of Artificial Sequence: Synthetic oligonucleotide
uggcaaauaccucauuaua

SEQ ID NO: 1319718 - RNA, 19 nt, Artificial Sequence
  Description of Artificial Sequence: Synthetic oligonucleotide
gcugacuagcaacagcucg

SEQ ID NO: 1319719 - RNA, 19 nt, Artificial Sequence
  Description of Artificial Sequence: Synthetic oligonucleotide
caguacacacauuucucag

SEQ ID NO: 1319720 - RNA, 19 nt, Artificial Sequence
  Description of Artificial Sequence: Synthetic oligonucleotide
uacacagguuuguagucca

SEQ ID NO: 1319721 - RNA, 19 nt, Artificial Sequence
  Description of Artificial Sequence: Synthetic oligonucleotide
guuaguguagucauaucca

SEQ ID NO: 1319722 - RNA, 19 nt, Artificial Sequence
  Description of Artificial Sequence: Synthetic oligonucleotide
uggaauaauucuggguuug

SEQ ID NO: 1319723 - RNA, 19 nt, Artificial Sequence
  Description of Artificial Sequence: Synthetic oligonucleotide
ucagaaaaccgacggccac

SEQ ID NO: 1319724 - RNA, 19 nt, Artificial Sequence
  Description of Artificial Sequence: Synthetic oligonucleotide
ccuuagcuccuuaagacgg

SEQ ID NO: 1319725 - RNA, 19 nt, Artificial Sequence
  Description of Artificial Sequence: Synthetic oligonucleotide
cucauacauguuuauucac

SEQ ID NO: 1319726 - RNA, 19 nt, Artificial Sequence
  Description of Artificial Sequence: Synthetic oligonucleotide
ugacaacccuccaaucuca

SEQ ID NO: 1319727 - RNA, 19 nt, Artificial Sequence
  Description of Artificial Sequence: Synthetic oligonucleotide
aaccuacuacauaucuugg

SEQ ID NO: 1319728 - RNA, 19 nt, Artificial Sequence
  Description of Artificial Sequence: Synthetic oligonucleotide
auaagucauaguaaaugcu

SEQ ID NO: 1319729 - RNA, 19 nt, Artificial Sequence
  Description of Artificial Sequence: Synthetic oligonucleotide
uugauuuaguaacuccauu

SEQ ID NO: 1319730 - RNA, 19 nt, Artificial Sequence
  Description of Artificial Sequence: Synthetic oligonucleotide
uggacgaagcaaagcagga

SEQ ID NO: 1319731 - RNA, 19 nt, Artificial Sequence
  Description of Artificial Sequence: Synthetic oligonucleotide
uguaaaccaaaggauccac

SEQ ID NO: 1319732 - RNA, 19 nt, Artificial Sequence
  Description of Artificial Sequence: Synthetic oligonucleotide
cuacacgcuggaauaauuc

SEQ ID NO: 1319733 - RNA, 19 nt, Artificial Sequence
  Description of Artificial Sequence: Synthetic oligonucleotide
ugaagcgccuuaucucuag

SEQ ID NO: 1319734 - RNA, 19 nt, Artificial Sequence
  Description of Artificial Sequence: Synthetic oligonucleotide
guaucuggucuguuuguag

SEQ ID NO: 1319735 - RNA, 19 nt, Artificial Sequence
  Description of Artificial Sequence: Synthetic oligonucleotide
acggccgucaaucuccuug

SEQ ID NO: 1319736 - RNA, 19 nt, Artificial Sequence
  Description of Artificial Sequence: Synthetic oligonucleotide
ucaccgugcuuuguaauag

SEQ ID NO: 1319737 - RNA, 19 nt, Artificial Sequence
  Description of Artificial Sequence: Synthetic oligonucleotide
ucguaacucccgaaucugc

SEQ ID NO: 1319738 - RNA, 19 nt, Artificial Sequence
  Description of Artificial Sequence: Synthetic oligonucleotide
accgacggccaccaauagc

SEQ ID NO: 1319739 - RNA, 19 nt, Artificial Sequence
  Description of Artificial Sequence: Synthetic oligonucleotide
cgugcuuuguaauagggcc

SEQ ID NO: 1319740 - RNA, 19 nt, Artificial Sequence
  Description of Artificial Sequence: Synthetic oligonucleotide
uauaguuaguguagucaua

SEQ ID NO: 1319741 - RNA, 19 nt, Artificial Sequence
  Description of Artificial Sequence: Synthetic oligonucleotide
cauaccugcuucaguacac

SEQ ID NO: 1319742 - RNA, 19 nt, Artificial Sequence
  Description of Artificial Sequence: Synthetic oligonucleotide
cugauguacccucagaaaa

SEQ ID NO: 1319743 - RNA, 19 nt, Artificial Sequence
  Description of Artificial Sequence: Synthetic oligonucleotide
uuguaaaccaaaggaucca

SEQ ID NO: 1319744 - RNA, 19 nt, Artificial Sequence
  Description of Artificial Sequence: Synthetic oligonucleotide
cugccaauacauacauuag

SEQ ID NO: 1319745 - RNA, 19 nt, Artificial Sequence
  Description of Artificial Sequence: Synthetic oligonucleotide
uacuuuuaucaagcugacg

SEQ ID NO: 1319746 - RNA, 19 nt, Artificial Sequence
  Description of Artificial Sequence: Synthetic oligonucleotide
acauacuauuauguugcuc

SEQ ID NO: 1319747 - RNA, 19 nt, Artificial Sequence
  Description of Artificial Sequence: Synthetic oligonucleotide
uuaucaagcugacgacgac

SEQ ID NO: 1319748 - RNA, 19 nt, Artificial Sequence
  Description of Artificial Sequence: Synthetic oligonucleotide
auacaacuuucuuuuguau

SEQ ID NO: 1319749 - RNA, 19 nt, Artificial Sequence
  Description of Artificial Sequence: Synthetic oligonucleotide
auagaacuagauacaaccu

SEQ ID NO: 1319750 - RNA, 19 nt, Artificial Sequence
  Description of Artificial Sequence: Synthetic oligonucleotide
aagcaaauaugaaaagcuu

SEQ ID NO: 1319751 - RNA, 19 nt, Artificial Sequence
  Description of Artificial Sequence: Synthetic oligonucleotide
ucuaaucuugcuuguucau

SEQ ID NO: 1319752 - RNA, 19 nt, Artificial Sequence
  Description of Artificial Sequence: Synthetic oligonucleotide
guacuugucuacaauagaa

SEQ ID NO: 1319753 - RNA, 19 nt, Artificial Sequence
  Description of Artificial Sequence: Synthetic oligonucleotide
ucaugaagucuuccugaac

SEQ ID NO: 1319754 - RNA, 19 nt, Artificial Sequence
  Description of Artificial Sequence: Synthetic oligonucleotide
auguuguaaaccaaaggau

SEQ ID NO: 1319755 - RNA, 19 nt, Artificial Sequence
  Description of Artificial Sequence: Synthetic oligonucleotide
agucuugaagcgccuuauc

SEQ ID NO: 1319756 - RNA, 19 nt, Artificial Sequence
  Description of Artificial Sequence: Synthetic oligonucleotide
cuuagcuccuuaagacggc

SEQ ID NO: 1319757 - RNA, 19 nt, Artificial Sequence
  Description of Artificial Sequence: Synthetic oligonucleotide
uuaucucuaggguccgcca

SEQ ID NO: 1319758 - RNA, 19 nt, Artificial Sequence
  Description of Artificial Sequence: Synthetic oligonucleotide
gaagcgccuuaucucuagg

SEQ ID NO: 1319759 - RNA, 19 nt, Artificial Sequence
  Description of Artificial Sequence: Synthetic oligonucleotide
uuaagacggccgucaaucu

SEQ ID NO: 1319760 - RNA, 19 nt, Artificial Sequence
  Description of Artificial Sequence: Synthetic oligonucleotide
auccgcacgaauggcaaac

SEQ ID NO: 1319761 - RNA, 19 nt, Artificial Sequence
  Description of Artificial Sequence: Synthetic oligonucleotide
uaagacggccgucaaucuc

SEQ ID NO: 1319762 - RNA, 19 nt, Artificial Sequence
  Description of Artificial Sequence: Synthetic oligonucleotide
agcgccuuaucucuagggu

SEQ ID NO: 1319763 - RNA, 19 nt, Artificial Sequence
  Description of Artificial Sequence: Synthetic oligonucleotide
ucaggucugcuccauuaaa

SEQ ID NO: 1319764 - RNA, 19 nt, Artificial Sequence
  Description of Artificial Sequence: Synthetic oligonucleotide
aaucuauuucaccgugcuu

SEQ ID NO: 1319765 - RNA, 19 nt, Artificial Sequence
  Description of Artificial Sequence: Synthetic oligonucleotide
ggucugcuccauuaaagcc

SEQ ID NO: 1319766 - RNA, 19 nt, Artificial Sequence
  Description of Artificial Sequence: Synthetic oligonucleotide
uaaaugcucucccguacua

SEQ ID NO: 1319767 - RNA, 19 nt, Artificial Sequence
  Description of Artificial Sequence: Synthetic oligonucleotide
ugucuacaauagaacuaga

SEQ ID NO: 1319768 - RNA, 19 nt, Artificial Sequence
  Description of Artificial Sequence: Synthetic oligonucleotide
aagcugacgacgacaaccu

SEQ ID NO: 1319769 - RNA, 19 nt, Artificial Sequence
  Description of Artificial Sequence: Synthetic oligonucleotide
uaguaaaugcucucccgua

SEQ ID NO: 1319770 - RNA, 19 nt, Artificial Sequence
  Description of Artificial Sequence: Synthetic oligonucleotide
uuagcuccuuaagacggcc

SEQ ID NO: 1319771 - RNA, 19 nt, Artificial Sequence
  Description of Artificial Sequence: Synthetic oligonucleotide
aauagggccugcauggauu

SEQ ID NO: 1319772 - RNA, 19 nt, Artificial Sequence
  Description of Artificial Sequence: Synthetic oligonucleotide
uucaccgugcuuuguaaua

SEQ ID NO: 1319773 - RNA, 19 nt, Artificial Sequence
  Description of Artificial Sequence: Synthetic oligonucleotide
gguaaguucuuuuaacugu

SEQ ID NO: 1319774 - RNA, 19 nt, Artificial Sequence
  Description of Artificial Sequence: Synthetic oligonucleotide
uaauagggccugcauggau

SEQ ID NO: 1319775 - RNA, 19 nt, Artificial Sequence
  Description of Artificial Sequence: Synthetic oligonucleotide
ucucaggucugcuccauua

SEQ ID NO: 1319776 - RNA, 19 nt, Artificial Sequence
  Description of Artificial Sequence: Synthetic oligonucleotide
ugcauggauuuucaauaua

SEQ ID NO: 1319777 - RNA, 19 nt, Artificial Sequence
  Description of Artificial Sequence: Synthetic oligonucleotide
uugcuuuaacaaugaauuu

SEQ ID NO: 1319778 - RNA, 19 nt, Artificial Sequence
  Description of Artificial Sequence: Synthetic oligonucleotide
uggcauaauuaaacauuuc

SEQ ID NO: 1319779 - RNA, 19 nt, Artificial Sequence
  Description of Artificial Sequence: Synthetic oligonucleotide
cuuccuggacgaagcaaag

SEQ ID NO: 1319780 - RNA, 19 nt, Artificial Sequence
  Description of Artificial Sequence: Synthetic oligonucleotide
aacgagcacuuucaccaau

SEQ ID NO: 1319781 - RNA, 19 nt, Artificial Sequence
  Description of Artificial Sequence: Synthetic oligonucleotide
uacauaucuugguccauuu

SEQ ID NO: 1319782 - RNA, 19 nt, Artificial Sequence
  Description of Artificial Sequence: Synthetic oligonucleotide
ugcgguagucuugaagcgc

SEQ ID NO: 1319783 - RNA, 19 nt, Artificial Sequence
  Description of Artificial Sequence: Synthetic oligonucleotide
ccuacuacauaucuugguc

SEQ ID NO: 1319784 - RNA, 19 nt, Artificial Sequence
  Description of Artificial Sequence: Synthetic oligonucleotide
acagcucgugccaaaagug

SEQ ID NO: 1319785 - RNA, 19 nt, Artificial Sequence
  Description of Artificial Sequence: Synthetic oligonucleotide
aucaaaacccugauaguaa

SEQ ID NO: 1319786 - RNA, 19 nt, Artificial Sequence
  Description of Artificial Sequence: Synthetic oligonucleotide
uaucucuaggguccgccau

SEQ ID NO: 1319787 - RNA, 19 nt, Artificial Sequence
  Description of Artificial Sequence: Synthetic oligonucleotide
caccaauguacuugucuac

SEQ ID NO: 1319788 - RNA, 19 nt, Artificial Sequence
  Description of Artificial Sequence: Synthetic oligonucleotide
aaacgagcacuuucaccaa

SEQ ID NO: 1319789 - RNA, 19 nt, Artificial Sequence
  Description of Artificial Sequence: Synthetic oligonucleotide
accgugcuuuguaauaggg

SEQ ID NO: 1319790 - RNA, 19 nt, Artificial Sequence
  Description of Artificial Sequence: Synthetic oligonucleotide
aaccgacggccaccaauag

SEQ ID NO: 1319791 - RNA, 19 nt, Artificial Sequence
  Description of Artificial Sequence: Synthetic oligonucleotide
cuugaagcgccuuaucucu

SEQ ID NO: 1319792 - RNA, 19 nt, Artificial Sequence
  Description of Artificial Sequence: Synthetic oligonucleotide
auacuauuauguugcucau

SEQ ID NO: 1319793 - RNA, 19 nt, Artificial Sequence
  Description of Artificial Sequence: Synthetic oligonucleotide
caucaaaacccugauagua

SEQ ID NO: 1319794 - RNA, 19 nt, Artificial Sequence
  Description of Artificial Sequence: Synthetic oligonucleotide
cacgaauggcaaacauacc

SEQ ID NO: 1319795 - RNA, 19 nt, Artificial Sequence
  Description of Artificial Sequence: Synthetic oligonucleotide
cuagcaacagcucgugcca

SEQ ID NO: 1319796 - RNA, 19 nt, Artificial Sequence
  Description of Artificial Sequence: Synthetic oligonucleotide
aaaccgacggccaccaaua

SEQ ID NO: 1319797 - RNA, 19 nt, Artificial Sequence
  Description of Artificial Sequence: Synthetic oligonucleotide
ccugauaguaaauuacaca

SEQ ID NO: 1319798 - RNA, 19 nt, Artificial Sequence
  Description of Artificial Sequence: Synthetic oligonucleotide
uacaaccuuuaggaaguug

SEQ ID NO: 1319799 - RNA, 19 nt, Artificial Sequence
  Description of Artificial Sequence: Synthetic oligonucleotide
cucucguaacucccgaauc

SEQ ID NO: 1319800 - RNA, 19 nt, Artificial Sequence
  Description of Artificial Sequence: Synthetic oligonucleotide
uggagguauuauuccuaca

SEQ ID NO: 1319801 - RNA, 19 nt, Artificial Sequence
  Description of Artificial Sequence: Synthetic oligonucleotide
cuucaauaugucuuuugua

SEQ ID NO: 1319802 - RNA, 19 nt, Artificial Sequence
  Description of Artificial Sequence: Synthetic oligonucleotide
aaaugcucucccguacuau

SEQ ID NO: 1319803 - RNA, 19 nt, Artificial Sequence
  Description of Artificial Sequence: Synthetic oligonucleotide
acccugauaguaaauuaca

SEQ ID NO: 1319804 - RNA, 19 nt, Artificial Sequence
  Description of Artificial Sequence: Synthetic oligonucleotide
gguaauucuauuaccucuc

SEQ ID NO: 1319805 - RNA, 19 nt, Artificial Sequence
  Description of Artificial Sequence: Synthetic oligonucleotide
guaucaaaaccauccauuu

SEQ ID NO: 1319806 - RNA, 19 nt, Artificial Sequence
  Description of Artificial Sequence: Synthetic oligonucleotide
caccgugcuuuguaauagg

SEQ ID NO: 1319807 - RNA, 19 nt, Artificial Sequence
  Description of Artificial Sequence: Synthetic oligonucleotide
guaacucccgaaucugcuc

SEQ ID NO: 1319808 - RNA, 19 nt, Artificial Sequence
  Description of Artificial Sequence: Synthetic oligonucleotide
agaaaaccgacggccacca

SEQ ID NO: 1319809 - RNA, 19 nt, Artificial Sequence
  Description of Artificial Sequence: Synthetic oligonucleotide
cagaaaaccgacggccacc

SEQ ID NO: 1319810 - RNA, 19 nt, Artificial Sequence
  Description of Artificial Sequence: Synthetic oligonucleotide
caaacagccuuuuggaggu

SEQ ID NO: 1319811 - RNA, 19 nt, Artificial Sequence
  Description of Artificial Sequence: Synthetic oligonucleotide
caugauccgcacgaauggc

SEQ ID NO: 1319812 - RNA, 19 nt, Artificial Sequence
  Description of Artificial Sequence: Synthetic oligonucleotide
uguaucuggucuguuugua

SEQ ID NO: 1319813 - RNA, 19 nt, Artificial Sequence
  Description of Artificial Sequence: Synthetic oligonucleotide
cucagaaaaccgacggcca

SEQ ID NO: 1319814 - RNA, 19 nt, Artificial Sequence
  Description of Artificial Sequence: Synthetic oligonucleotide
cucuaugcagaguaucaaa

SEQ ID NO: 1319815 - RNA, 19 nt, Artificial Sequence
  Description of Artificial Sequence: Synthetic oligonucleotide
aaucugcccaacacuuugu

SEQ ID NO: 1319816 - RNA, 19 nt, Artificial Sequence
  Description of Artificial Sequence: Synthetic oligonucleotide
ugaugcauggcuggugguc

SEQ ID NO: 1319817 - RNA, 19 nt, Artificial Sequence
  Description of Artificial Sequence: Synthetic oligonucleotide
uguuuguagccaugaucau

SEQ ID NO: 1319818 - RNA, 19 nt, Artificial Sequence
  Description of Artificial Sequence: Synthetic oligonucleotide
ugcagccaucaaaacccug

SEQ ID NO: 1319819 - RNA, 19 nt, Artificial Sequence
  Description of Artificial Sequence: Synthetic oligonucleotide
cccuuagcuccuuaagacg

SEQ ID NO: 1319820 - RNA, 19 nt, Artificial Sequence
  Description of Artificial Sequence: Synthetic oligonucleotide
cucuaaucaaacgagcacu

SEQ ID NO: 1319821 - RNA, 19 nt, Artificial Sequence
  Description of Artificial Sequence: Synthetic oligonucleotide
caauaugucuuuuguaaau

SEQ ID NO: 1319822 - RNA, 19 nt, Artificial Sequence
  Description of Artificial Sequence: Synthetic oligonucleotide
uaguuaguguagucauauc

SEQ ID NO: 1319823 - RNA, 19 nt, Artificial Sequence
  Description of Artificial Sequence: Synthetic oligonucleotide
cucguaacucccgaaucug

SEQ ID NO: 1319824 - RNA, 19 nt, Artificial Sequence
  Description of Artificial Sequence: Synthetic oligonucleotide
guacccucagaaaaccgac

SEQ ID NO: 1319825 - RNA, 19 nt, Artificial Sequence
  Description of Artificial Sequence: Synthetic oligonucleotide
caaccuuuaggaaguugca

SEQ ID NO: 1319826 - RNA, 19 nt, Artificial Sequence
  Description of Artificial Sequence: Synthetic oligonucleotide
gcuggaauaauucuggguu

SEQ ID NO: 1319827 - RNA, 19 nt, Artificial Sequence
  Description of Artificial Sequence: Synthetic oligonucleotide
ggauccaccucucuuggca

SEQ ID NO: 1319828 - RNA, 19 nt, Artificial Sequence
  Description of Artificial Sequence: Synthetic oligonucleotide
caccucucuuggcaaauac

SEQ ID NO: 1319829 - RNA, 19 nt, Artificial Sequence
  Description of Artificial Sequence: Synthetic oligonucleotide
cuuucaccaauguacuugu

SEQ ID NO: 1319830 - RNA, 19 nt, Artificial Sequence
  Description of Artificial Sequence: Synthetic oligonucleotide
aucaagcugacgacgacaa

SEQ ID NO: 1319831 - RNA, 19 nt, Artificial Sequence
  Description of Artificial Sequence: Synthetic oligonucleotide
guaacuccauuaaaguucu

SEQ ID NO: 1319832 - RNA, 19 nt, Artificial Sequence
  Description of Artificial Sequence: Synthetic oligonucleotide
ugcucucccguacuaucuc

SEQ ID NO: 1319833 - RNA, 19 nt, Artificial Sequence
  Description of Artificial Sequence: Synthetic oligonucleotide
ucucuaggguccgccauga

SEQ ID NO: 1319834 - RNA, 19 nt, Artificial Sequence
  Description of Artificial Sequence: Synthetic oligonucleotide
caacagcucgugccaaaag

SEQ ID NO: 1319835 - RNA, 19 nt, Artificial Sequence
  Description of Artificial Sequence: Synthetic oligonucleotide
gacgacaaccuacuacaua

SEQ ID NO: 1319836 - RNA, 19 nt, Artificial Sequence
  Description of Artificial Sequence: Synthetic oligonucleotide
ucaagcugacgacgacaac

SEQ ID NO: 1319837 - RNA, 19 nt, Artificial Sequence
  Description of Artificial Sequence: Synthetic oligonucleotide
cccugauaguaaauuacac

SEQ ID NO: 1319838 - RNA, 19 nt, Artificial Sequence
  Description of Artificial Sequence: Synthetic oligonucleotide
cuauuauguugcucauaca

SEQ ID NO: 1319839 - RNA, 19 nt, Artificial Sequence
  Description of Artificial Sequence: Synthetic oligonucleotide
gguuuguaguccaguuugg

SEQ ID NO: 1319840 - RNA, 19 nt, Artificial Sequence
  Description of Artificial Sequence: Synthetic oligonucleotide
uaaugagaucacugccaau

SEQ ID NO: 1319841 - RNA, 19 nt, Artificial Sequence
  Description of Artificial Sequence: Synthetic oligonucleotide
cuggcauaauuaaacauuu

SEQ ID NO: 1319842 - RNA, 19 nt, Artificial Sequence
  Description of Artificial Sequence: Synthetic oligonucleotide
auaguaaauuacacagguu

SEQ ID NO: 1319843 - RNA, 19 nt, Artificial Sequence
  Description of Artificial Sequence: Synthetic oligonucleotide
gagacauguuguaaaccaa

SEQ ID NO: 1319844 - RNA, 19 nt, Artificial Sequence
  Description of Artificial Sequence: Synthetic oligonucleotide
uacuauuauguugcucaua

SEQ ID NO: 1319845 - RNA, 19 nt, Artificial Sequence
  Description of Artificial Sequence: Synthetic oligonucleotide
ccugcauggauuuucaaua

SEQ ID NO: 1319846 - RNA, 19 nt, Artificial Sequence
  Description of Artificial Sequence: Synthetic oligonucleotide
cuauuaccucucguaacuc

SEQ ID NO: 1319847 - RNA, 19 nt, Artificial Sequence
  Description of Artificial Sequence: Synthetic oligonucleotide
ccgacggccaccaauagca

SEQ ID NO: 1319848 - RNA, 19 nt, Artificial Sequence
  Description of Artificial Sequence: Synthetic oligonucleotide
ggacaacuaaaacauuuua

SEQ ID NO: 1319849 - RNA, 19 nt, Artificial Sequence
  Description of Artificial Sequence: Synthetic oligonucleotide
cgugccaaaaguguuuucc

SEQ ID NO: 1319850 - RNA, 19 nt, Artificial Sequence
  Description of Artificial Sequence: Synthetic oligonucleotide
caugaucauuuuaacucua

SEQ ID NO: 1319851 - RNA, 19 nt, Artificial Sequence
  Description of Artificial Sequence: Synthetic oligonucleotide
uugaagcgccuuaucucua

SEQ ID NO: 1319852 - RNA, 19 nt, Artificial Sequence
  Description of Artificial Sequence: Synthetic oligonucleotide
acgagcacuuucaccaaug

SEQ ID NO: 1319853 - RNA, 19 nt, Artificial Sequence
  Description of Artificial Sequence: Synthetic oligonucleotide
cuuuguaauagggccugca

SEQ ID NO: 1319854 - RNA, 19 nt, Artificial Sequence
  Description of Artificial Sequence: Synthetic oligonucleotide
auaucuaaucuugcuuguu

SEQ ID NO: 1319855 - RNA, 19 nt, Artificial Sequence
  Description of Artificial Sequence: Synthetic oligonucleotide
gaaacauuuccaggguccu

SEQ ID NO: 1319856 - RNA, 19 nt, Artificial Sequence
  Description of Artificial Sequence: Synthetic oligonucleotide
guccgccaugaugagaagc

SEQ ID NO: 1319857 - RNA, 19 nt, Artificial Sequence
  Description of Artificial Sequence: Synthetic oligonucleotide
agccacuuuucugacugcu

SEQ ID NO: 1319858 - RNA, 19 nt, Artificial Sequence
  Description of Artificial Sequence: Synthetic oligonucleotide
guagucuugaagcgccuua

SEQ ID NO: 1319859 - RNA, 19 nt, Artificial Sequence
  Description of Artificial Sequence: Synthetic oligonucleotide
gcugacgacgacaaccuac

SEQ ID NO: 1319860 - RNA, 19 nt, Artificial Sequence
  Description of Artificial Sequence: Synthetic oligonucleotide
cugacuagcaacagcucgu

SEQ ID NO: 1319861 - RNA, 19 nt, Artificial Sequence
  Description of Artificial Sequence: Synthetic oligonucleotide
uaggguccgccaugaugag

SEQ ID NO: 1319862 - RNA, 19 nt, Artificial Sequence
  Description of Artificial Sequence: Synthetic oligonucleotide
gccgucaaucuccuugugc

SEQ ID NO: 1319863 - RNA, 19 nt, Artificial Sequence
  Description of Artificial Sequence: Synthetic oligonucleotide
agcugacuagcaacagcuc

SEQ ID NO: 1319864 - RNA, 19 nt, Artificial Sequence
  Description of Artificial Sequence: Synthetic oligonucleotide
ccgugcuuuguaauagggc

SEQ ID NO: 1319865 - RNA, 19 nt, Artificial Sequence
  Description of Artificial Sequence: Synthetic oligonucleotide
cugacgacgacaaccuacu

SEQ ID NO: 1319866 - RNA, 19 nt, Artificial Sequence
  Description of Artificial Sequence: Synthetic oligonucleotide
uccuacacgcuggaauaau

SEQ ID NO: 1319867 - RNA, 19 nt, Artificial Sequence
  Description of Artificial Sequence: Synthetic oligonucleotide
cucaugagacauguuguaa

SEQ ID NO: 1319868 - RNA, 19 nt, Artificial Sequence
  Description of Artificial Sequence: Synthetic oligonucleotide
uuauuccuacacgcuggaa

SEQ ID NO: 1319869 - RNA, 19 nt, Artificial Sequence
  Description of Artificial Sequence: Synthetic oligonucleotide
uccgcacgaauggcaaaca

SEQ ID NO: 1319870 - RNA, 19 nt, Artificial Sequence
  Description of Artificial Sequence: Synthetic oligonucleotide
agcaacagcucgugccaaa

SEQ ID NO: 1319871 - RNA, 19 nt, Artificial Sequence
  Description of Artificial Sequence: Synthetic oligonucleotide
guaaguucuuuuaacuguu

SEQ ID NO: 1319872 - RNA, 19 nt, Artificial Sequence
  Description of Artificial Sequence: Synthetic oligonucleotide
auccaaugucugucaugca

SEQ ID NO: 1319873 - RNA, 19 nt, Artificial Sequence
  Description of Artificial Sequence: Synthetic oligonucleotide
gguauuauuccuacacgcu

SEQ ID NO: 1319874 - RNA, 19 nt, Artificial Sequence
  Description of Artificial Sequence: Synthetic oligonucleotide
gcgguagucuugaagcgcc

SEQ ID NO: 1319875 - RNA, 19 nt, Artificial Sequence
  Description of Artificial Sequence: Synthetic oligonucleotide
acuacauaucuugguccau

SEQ ID NO: 1319876 - RNA, 19 nt, Artificial Sequence
  Description of Artificial Sequence: Synthetic oligonucleotide
gcgccuuaucucuaggguc

SEQ ID NO: 1319877 - RNA, 19 nt, Artificial Sequence
  Description of Artificial Sequence: Synthetic oligonucleotide
guaauagggccugcaugga

SEQ ID NO: 1319878 - RNA, 19 nt, Artificial Sequence
  Description of Artificial Sequence: Synthetic oligonucleotide
ugacgacgacaaccuacua

SEQ ID NO: 1319879 - RNA, 19 nt, Artificial Sequence
  Description of Artificial Sequence: Synthetic oligonucleotide
cucccgaaucugcucugac

SEQ ID NO: 1319880 - RNA, 19 nt, Artificial Sequence
  Description of Artificial Sequence: Synthetic oligonucleotide
gauccgcacgaauggcaaa

SEQ ID NO: 1319881 - RNA, 19 nt, Artificial Sequence
  Description of Artificial Sequence: Synthetic oligonucleotide
ucgugccaaaaguguuuuc

SEQ ID NO: 1319882 - RNA, 19 nt, Artificial Sequence
  Description of Artificial Sequence: Synthetic oligonucleotide
cccgaaucugcucugacaa

SEQ ID NO: 1319883 - RNA, 19 nt, Artificial Sequence
  Description of Artificial Sequence: Synthetic oligonucleotide
auccaccucucuuggcaaa

SEQ ID NO: 1319884 - RNA, 19 nt, Artificial Sequence
  Description of Artificial Sequence: Synthetic oligonucleotide
ccaugaugagaagccgucg

SEQ ID NO: 1319885 - RNA, 19 nt, Artificial Sequence
  Description of Artificial Sequence: Synthetic oligonucleotide
uaacuccauuaaaguucuc

SEQ ID NO: 1319886 - RNA, 19 nt, Artificial Sequence
  Description of Artificial Sequence: Synthetic oligonucleotide
cucaggucugcuccauuaa

SEQ ID NO: 1319887 - RNA, 19 nt, Artificial Sequence
  Description of Artificial Sequence: Synthetic oligonucleotide
agcucgugccaaaaguguu

SEQ ID NO: 1319888 - RNA, 19 nt, Artificial Sequence
  Description of Artificial Sequence: Synthetic oligonucleotide
cccguacuaucucaaacca

SEQ ID NO: 1319889 - RNA, 19 nt, Artificial Sequence
  Description of Artificial Sequence: Synthetic oligonucleotide
caaaacccugauaguaaau

SEQ ID NO: 1319890 - RNA, 19 nt, Artificial Sequence
  Description of Artificial Sequence: Synthetic oligonucleotide
acaaucugcccaacacuuu

SEQ ID NO: 1319891 - RNA, 19 nt, Artificial Sequence
  Description of Artificial Sequence: Synthetic oligonucleotide
cucucccguacuaucucaa

SEQ ID NO: 1319892 - RNA, 19 nt, Artificial Sequence
  Description of Artificial Sequence: Synthetic oligonucleotide
cagcucgugccaaaagugu

SEQ ID NO: 1319893 - RNA, 19 nt, Artificial Sequence
  Description of Artificial Sequence: Synthetic oligonucleotide
ugcauggcugguggucccu

SEQ ID NO: 1319894 - RNA, 19 nt, Artificial Sequence
  Description of Artificial Sequence: Synthetic oligonucleotide
cuaaucuugcuuguucauu

SEQ ID NO: 1319895 - RNA, 19 nt, Artificial Sequence
  Description of Artificial Sequence: Synthetic oligonucleotide
gcucucccguacuaucuca

SEQ ID NO: 1319896 - RNA, 19 nt, Artificial Sequence
  Description of Artificial Sequence: Synthetic oligonucleotide
agcugacgacgacaaccua

SEQ ID NO: 1319897 - RNA, 19 nt, Artificial Sequence
  Description of Artificial Sequence: Synthetic oligonucleotide
gccugcauggauuuucaau

SEQ ID NO: 1319898 - RNA, 19 nt, Artificial Sequence
  Description of Artificial Sequence: Synthetic oligonucleotide
gaaaaccgacggccaccaa

SEQ ID NO: 1319899 - RNA, 19 nt, Artificial Sequence
  Description of Artificial Sequence: Synthetic oligonucleotide
aggguccgccaugaugaga

SEQ ID NO: 1319900 - RNA, 19 nt, Artificial Sequence
  Description of Artificial Sequence: Synthetic oligonucleotide
auacaaccuuuaggaaguu

SEQ ID NO: 1319901 - RNA, 19 nt, Artificial Sequence
  Description of Artificial Sequence: Synthetic oligonucleotide
guacuaucucaaaccauuu

SEQ ID NO: 1319902 - RNA, 19 nt, Artificial Sequence
  Description of Artificial Sequence: Synthetic oligonucleotide
ccgaaucugcucugacaac

SEQ ID NO: 1319903 - RNA, 19 nt, Artificial Sequence
  Description of Artificial Sequence: Synthetic oligonucleotide
cagguuuguaguccaguuu

SEQ ID NO: 1319904 - RNA, 19 nt, Artificial Sequence
  Description of Artificial Sequence: Synthetic oligonucleotide
gguccgccaugaugagaag

SEQ ID NO: 1319905 - RNA, 19 nt, Artificial Sequence
  Description of Artificial Sequence: Synthetic oligonucleotide
gcuuuguaauagggccugc

SEQ ID NO: 1319906 - RNA, 19 nt, Artificial Sequence
  Description of Artificial Sequence: Synthetic oligonucleotide
ccgccaugaugagaagccg

SEQ ID NO: 1319907 - RNA, 19 nt, Artificial Sequence
  Description of Artificial Sequence: Synthetic oligonucleotide
agacggccgucaaucuccu

SEQ ID NO: 1319908 - RNA, 19 nt, Artificial Sequence
  Description of Artificial Sequence: Synthetic oligonucleotide
caacacuuuguagugccuu

SEQ ID NO: 1319909 - RNA, 19 nt, Artificial Sequence
  Description of Artificial Sequence: Synthetic oligonucleotide
gcaacagcucgugccaaaa

SEQ ID NO: 1319910 - RNA, 19 nt, Artificial Sequence
  Description of Artificial Sequence: Synthetic oligonucleotide
cgacaaccuacuacauauc

SEQ ID NO: 1319911 - RNA, 19 nt, Artificial Sequence
  Description of Artificial Sequence: Synthetic oligonucleotide
gcuccuuaagacggccguc

SEQ ID NO: 1319912 - RNA, 19 nt, Artificial Sequence
  Description of Artificial Sequence: Synthetic oligonucleotide
cgcacgaauggcaaacaua

SEQ ID NO: 1319913 - RNA, 19 nt, Artificial Sequence
  Description of Artificial Sequence: Synthetic oligonucleotide
ccuuaucucuaggguccgc

SEQ ID NO: 1319914 - RNA, 19 nt, Artificial Sequence
  Description of Artificial Sequence: Synthetic oligonucleotide
ccuacacgcuggaauaauu

SEQ ID NO: 1319915 - RNA, 19 nt, Artificial Sequence
  Description of Artificial Sequence: Synthetic oligonucleotide
ccaaaggauccaccucucu

SEQ ID NO: 1319916 - RNA, 19 nt, Artificial Sequence
  Description of Artificial Sequence: Synthetic oligonucleotide
gcucgugccaaaaguguuu

SEQ ID NO: 1319917 - RNA, 19 nt, Artificial Sequence
  Description of Artificial Sequence: Synthetic oligonucleotide
ccguacuaucucaaaccau

SEQ ID NO: 1319918 - RNA, 19 nt, Artificial Sequence
  Description of Artificial Sequence: Synthetic oligonucleotide
ccuuaagacggccgucaau

SEQ ID NO: 1319919 - RNA, 19 nt, Artificial Sequence
  Description of Artificial Sequence: Synthetic oligonucleotide
cucuaggguccgccaugau

SEQ ID NO: 1319920 - RNA, 19 nt, Artificial Sequence
  Description of Artificial Sequence: Synthetic oligonucleotide
ccgcacgaauggcaaacau

SEQ ID NO: 1319921 - RNA, 19 nt, Artificial Sequence
  Description of Artificial Sequence: Synthetic oligonucleotide
cggccgucaaucuccuugu

SEQ ID NO: 1319922 - RNA, 19 nt, Artificial Sequence
  Description of Artificial Sequence: Synthetic oligonucleotide
ccaccucucuuggcaaaua

SEQ ID NO: 1319923 - RNA, 19 nt, Artificial Sequence
  Description of Artificial Sequence: Synthetic oligonucleotide
cgacgacaaccuacuacau

SEQ ID NO: 1319924 - RNA, 19 nt, Artificial Sequence
  Description of Artificial Sequence: Synthetic oligonucleotide
cgacggccaccaauagcau

SEQ ID NO: 1319925 - RNA, 19 nt, Artificial Sequence
  Description of Artificial Sequence: Synthetic oligonucleotide
aaaucuauucuucugauga

SEQ ID NO: 1319926 - RNA, 19 nt, Artificial Sequence
  Description of Artificial Sequence: Synthetic oligonucleotide
uauacauacacaaugagaa

SEQ ID NO: 1319927 - RNA, 19 nt, Artificial Sequence
  Description of Artificial Sequence: Synthetic oligonucleotide
uaucugauacugaagaugg

SEQ ID NO: 1319928 - RNA, 19 nt, Artificial Sequence
  Description of Artificial Sequence: Synthetic oligonucleotide
acagacauuagcuuccugc

SEQ ID NO: 1319929 - RNA, 19 nt, Artificial Sequence
  Description of Artificial Sequence: Synthetic oligonucleotide
ucagacauaaauaaugggu

SEQ ID NO: 1319930 - RNA, 19 nt, Artificial Sequence
  Description of Artificial Sequence: Synthetic oligonucleotide
acugauaacuaguugugcc

SEQ ID NO: 1319931 - RNA, 19 nt, Artificial Sequence
  Description of Artificial Sequence: Synthetic oligonucleotide
uuuaaucaaagacugguga

SEQ ID NO: 1319932 - RNA, 19 nt, Artificial Sequence
  Description of Artificial Sequence: Synthetic oligonucleotide
aacacaugccauuuguacg

SEQ ID NO: 1319933 - RNA, 19 nt, Artificial Sequence
  Description of Artificial Sequence: Synthetic oligonucleotide
uuugagacagacauuagcu

SEQ ID NO: 1319934 - RNA, 19 nt, Artificial Sequence
  Description of Artificial Sequence: Synthetic oligonucleotide
aaaggucuaugcaagauac

SEQ ID NO: 1319935 - RNA, 19 nt, Artificial Sequence
  Description of Artificial Sequence: Synthetic oligonucleotide
uuuccuauccucauaagca

SEQ ID NO: 1319936 - RNA, 19 nt, Artificial Sequence
  Description of Artificial Sequence: Synthetic oligonucleotide
aagaucaacacaugcaugu

SEQ ID NO: 1319937 - RNA, 19 nt, Artificial Sequence
  Description of Artificial Sequence: Synthetic oligonucleotide
uaaggauuccgacagacug

SEQ ID NO: 1319938 - RNA, 19 nt, Artificial Sequence
  Description of Artificial Sequence: Synthetic oligonucleotide
aauuguaagagcaauugug

SEQ ID NO: 1319939 - RNA, 19 nt, Artificial Sequence
  Description of Artificial Sequence: Synthetic oligonucleotide
gauucagacauaaauaaug

SEQ ID NO: 1319940 - RNA, 19 nt, Artificial Sequence
  Description of Artificial Sequence: Synthetic oligonucleotide
aucucaucagcacauauuc

SEQ ID NO: 1319941 - RNA, 19 nt, Artificial Sequence
  Description of Artificial Sequence: Synthetic oligonucleotide
aggacguagacucuagugc

SEQ ID NO: 1319942 - RNA, 19 nt, Artificial Sequence
  Description of Artificial Sequence: Synthetic oligonucleotide
uaugcuaacauauguauaa

SEQ ID NO: 1319943 - RNA, 19 nt, Artificial Sequence
  Description of Artificial Sequence: Synthetic oligonucleotide
ucugaaagaaacuugcagu

SEQ ID NO: 1319944 - RNA, 19 nt, Artificial Sequence
  Description of Artificial Sequence: Synthetic oligonucleotide
agaccaaugaacaauaauc

SEQ ID NO: 1319945 - RNA, 19 nt, Artificial Sequence
  Description of Artificial Sequence: Synthetic oligonucleotide
uagugauuaagauacauuc

SEQ ID NO: 1319946 - RNA, 19 nt, Artificial Sequence
  Description of Artificial Sequence: Synthetic oligonucleotide
ugacugauuugauacaggg

SEQ ID NO: 1319947 - RNA, 19 nt, Artificial Sequence
  Description of Artificial Sequence: Synthetic oligonucleotide
ggugaauaaacauaaauac

SEQ ID NO: 1319948 - RNA, 19 nt, Artificial Sequence
  Description of Artificial Sequence: Synthetic oligonucleotide
aauuguguacaucugagua

SEQ ID NO: 1319949 - RNA, 19 nt, Artificial Sequence
  Description of Artificial Sequence: Synthetic oligonucleotide
gugcaaagaaacuauaugc

SEQ ID NO: 1319950 - RNA, 19 nt, Artificial Sequence
  Description of Artificial Sequence: Synthetic oligonucleotide
agcacaaugacuucagauc

SEQ ID NO: 1319951 - RNA, 19 nt, Artificial Sequence
  Description of Artificial Sequence: Synthetic oligonucleotide
agagcaauuguguacaucu

SEQ ID NO: 1319952 - RNA, 19 nt, Artificial Sequence
  Description of Artificial Sequence: Synthetic oligonucleotide
acacaugcauguuuaauac

SEQ ID NO: 1319953 - RNA, 19 nt, Artificial Sequence
  Description of Artificial Sequence: Synthetic oligonucleotide
aaucuauucuucugaugac

SEQ ID NO: 1319954 - RNA, 19 nt, Artificial Sequence
  Description of Artificial Sequence: Synthetic oligonucleotide
aaauaaugggugcaaagaa

SEQ ID NO: 1319955 - RNA, 19 nt, Artificial Sequence
  Description of Artificial Sequence: Synthetic oligonucleotide
agauguacuguccacuugg

SEQ ID NO: 1319956 - RNA, 19 nt, Artificial Sequence
  Description of Artificial Sequence: Synthetic oligonucleotide
uuccauaaaauccgcaacc

SEQ ID NO: 1319957 - RNA, 19 nt, Artificial Sequence
  Description of Artificial Sequence: Synthetic oligonucleotide
uguauaaccucuguuaaug

SEQ ID NO: 1319958 - RNA, 19 nt, Artificial Sequence
  Description of Artificial Sequence: Synthetic oligonucleotide
ugugauuaguuucuugagc

SEQ ID NO: 1319959 - RNA, 19 nt, Artificial Sequence
  Description of Artificial Sequence: Synthetic oligonucleotide
gugauuaguuucuugagcc

SEQ ID NO: 1319960 - RNA, 19 nt, Artificial Sequence
  Description of Artificial Sequence: Synthetic oligonucleotide
uggugaauaaacauaaaua

SEQ ID NO: 1319961 - RNA, 19 nt, Artificial Sequence
  Description of Artificial Sequence: Synthetic oligonucleotide
uuuuaaucaaagacuggug

SEQ ID NO: 1319962 - RNA, 19 nt, Artificial Sequence
  Description of Artificial Sequence: Synthetic oligonucleotide
acuauaugcuaacauaugu

SEQ ID NO: 1319963 - RNA, 19 nt, Artificial Sequence
  Description of Artificial Sequence: Synthetic oligonucleotide
ugcaaagaaacuauaugcu

SEQ ID NO: 1319964 - RNA, 19 nt, Artificial Sequence
  Description of Artificial Sequence: Synthetic oligonucleotide
auaaaagugacugauuuga

SEQ ID NO: 1319965 - RNA, 19 nt, Artificial Sequence
  Description of Artificial Sequence: Synthetic oligonucleotide
uuagaaucucaucagcaca

SEQ ID NO: 1319966 - RNA, 19 nt, Artificial Sequence
  Description of Artificial Sequence: Synthetic oligonucleotide
uucaguuacugauaacuag

SEQ ID NO: 1319967 - RNA, 19 nt, Artificial Sequence
  Description of Artificial Sequence: Synthetic oligonucleotide
auaaugggugcaaagaaac

SEQ ID NO: 1319968 - RNA, 19 nt, Artificial Sequence
  Description of Artificial Sequence: Synthetic oligonucleotide
uuuguauuccagcaggagu

SEQ ID NO: 1319969 - RNA, 19 nt, Artificial Sequence
  Description of Artificial Sequence: Synthetic oligonucleotide
gauacggugcucuacauuc

SEQ ID NO: 1319970 - RNA, 19 nt, Artificial Sequence
  Description of Artificial Sequence: Synthetic oligonucleotide
uuaucaaaggggaaucgug

SEQ ID NO: 1319971 - RNA, 19 nt, Artificial Sequence
  Description of Artificial Sequence: Synthetic oligonucleotide
cuuuguaauuguaagagca

SEQ ID NO: 1319972 - RNA, 19 nt, Artificial Sequence
  Description of Artificial Sequence: Synthetic oligonucleotide
aguaaguccuacuuucuuc

SEQ ID NO: 1319973 - RNA, 19 nt, Artificial Sequence
  Description of Artificial Sequence: Synthetic oligonucleotide
aaaauccgcaaccagugga

SEQ ID NO: 1319974 - RNA, 19 nt, Artificial Sequence
  Description of Artificial Sequence: Synthetic oligonucleotide
uauagcauacugaacacau

SEQ ID NO: 1319975 - RNA, 19 nt, Artificial Sequence
  Description of Artificial Sequence: Synthetic oligonucleotide
uaucaaaggggaaucgugc

SEQ ID NO: 1319976 - RNA, 19 nt, Artificial Sequence
  Description of Artificial Sequence: Synthetic oligonucleotide
ucaguuacugauaacuagu

SEQ ID NO: 1319977 - RNA, 19 nt, Artificial Sequence
  Description of Artificial Sequence: Synthetic oligonucleotide
cagacauaaauaaugggug

SEQ ID NO: 1319978 - RNA, 19 nt, Artificial Sequence
  Description of Artificial Sequence: Synthetic oligonucleotide
uguaagagcaauuguguac

SEQ ID NO: 1319979 - RNA, 19 nt, Artificial Sequence
  Description of Artificial Sequence: Synthetic oligonucleotide
aaaaucuauucuucugaug

SEQ ID NO: 1319980 - RNA, 19 nt, Artificial Sequence
  Description of Artificial Sequence: Synthetic oligonucleotide
aacauuuccacaccggcau

SEQ ID NO: 1319981 - RNA, 19 nt, Artificial Sequence
  Description of Artificial Sequence: Synthetic oligonucleotide
caugccauuuguacgaggg

SEQ ID NO: 1319982 - RNA, 19 nt, Artificial Sequence
  Description of Artificial Sequence: Synthetic oligonucleotide
ugaguaucggugcacacca

SEQ ID NO: 1319983 - RNA, 19 nt, Artificial Sequence
  Description of Artificial Sequence: Synthetic oligonucleotide
aaaaugaucuuaaaaggau

SEQ ID NO: 1319984 - RNA, 19 nt, Artificial Sequence
  Description of Artificial Sequence: Synthetic oligonucleotide
auccucauaagcaagcuac

SEQ ID NO: 1319985 - RNA, 19 nt, Artificial Sequence
  Description of Artificial Sequence: Synthetic oligonucleotide
caagcuacuuaaaaguuug

SEQ ID NO: 1319986 - RNA, 19 nt, Artificial Sequence
  Description of Artificial Sequence: Synthetic oligonucleotide
uucgccaacaacuacugga

SEQ ID NO: 1319987 - RNA, 19 nt, Artificial Sequence
  Description of Artificial Sequence: Synthetic oligonucleotide
uuuguuauaaaagcccucu

SEQ ID NO: 1319988 - RNA, 19 nt, Artificial Sequence
  Description of Artificial Sequence: Synthetic oligonucleotide
uuuccauaaaauccgcaac

SEQ ID NO: 1319989 - RNA, 19 nt, Artificial Sequence
  Description of Artificial Sequence: Synthetic oligonucleotide
uguuguaucugauacugaa

SEQ ID NO: 1319990 - RNA, 19 nt, Artificial Sequence
  Description of Artificial Sequence: Synthetic oligonucleotide
guaauuguaagagcaauug

SEQ ID NO: 1319991 - RNA, 19 nt, Artificial Sequence
  Description of Artificial Sequence: Synthetic oligonucleotide
uucagaucauccuuuauau

SEQ ID NO: 1319992 - RNA, 19 nt, Artificial Sequence
  Description of Artificial Sequence: Synthetic oligonucleotide
ucggauacugcuuugucca

SEQ ID NO: 1319993 - RNA, 19 nt, Artificial Sequence
  Description of Artificial Sequence: Synthetic oligonucleotide
gaacacaugccauuuguac

SEQ ID NO: 1319994 - RNA, 19 nt, Artificial Sequence
  Description of Artificial Sequence: Synthetic oligonucleotide
ucugauaaaagugacugau

SEQ ID NO: 1319995 - RNA, 19 nt, Artificial Sequence
  Description of Artificial Sequence: Synthetic oligonucleotide
cuaguugugcccagaaggg

SEQ ID NO: 1319996 - RNA, 19 nt, Artificial Sequence
  Description of Artificial Sequence: Synthetic oligonucleotide
uguacugguaaggauuccg

SEQ ID NO: 1319997 - RNA, 19 nt, Artificial Sequence
  Description of Artificial Sequence: Synthetic oligonucleotide
uuaaucaaagacuggugaa

SEQ ID NO: 1319998 - RNA, 19 nt, Artificial Sequence
  Description of Artificial Sequence: Synthetic oligonucleotide
aggauaauacuucuuuuca

SEQ ID NO: 1319999 - RNA, 19 nt, Artificial Sequence
  Description of Artificial Sequence: Synthetic oligonucleotide
aaugaucuuaaaaggauaa

SEQ ID NO: 1320000 - RNA, 19 nt, Artificial Sequence
  Description of Artificial Sequence: Synthetic oligonucleotide
guaaguccuacuuucuucc

SEQ ID NO: 1320001 - RNA, 19 nt, Artificial Sequence
  Description of Artificial Sequence: Synthetic oligonucleotide
uaaaauccgcaaccagugg

SEQ ID NO: 1320002 - RNA, 19 nt, Artificial Sequence
  Description of Artificial Sequence: Synthetic oligonucleotide
uaauuguaagagcaauugu

SEQ ID NO: 1320003 - RNA, 19 nt, Artificial Sequence
  Description of Artificial Sequence: Synthetic oligonucleotide
gucuaugcaagauacggug

SEQ ID NO: 1320004 - RNA, 19 nt, Artificial Sequence
  Description of Artificial Sequence: Synthetic oligonucleotide
guuacugauaacuaguugu

SEQ ID NO: 1320005 - RNA, 19 nt, Artificial Sequence
  Description of Artificial Sequence: Synthetic oligonucleotide
ucuacauucccaaggacua

SEQ ID NO: 1320006 - RNA, 19 nt, Artificial Sequence
  Description of Artificial Sequence: Synthetic oligonucleotide
cugguaaggauuccgacag

SEQ ID NO: 1320007 - RNA, 19 nt, Artificial Sequence
  Description of Artificial Sequence: Synthetic oligonucleotide
uguacgaggguuuccauaa

SEQ ID NO: 1320008 - RNA, 19 nt, Artificial Sequence
  Description of Artificial Sequence: Synthetic oligonucleotide
ugauuaagauacauucagu

SEQ ID NO: 1320009 - RNA, 19 nt, Artificial Sequence
  Description of Artificial Sequence: Synthetic oligonucleotide
uuuguaauuguaagagcaa

SEQ ID NO: 1320010 - RNA, 19 nt, Artificial Sequence
  Description of Artificial Sequence: Synthetic oligonucleotide
gaaacuugcagucagcagu

SEQ ID NO: 1320011 - RNA, 19 nt, Artificial Sequence
  Description of Artificial Sequence: Synthetic oligonucleotide
auacugaagauggaggauc

SEQ ID NO: 1320012 - RNA, 19 nt, Artificial Sequence
  Description of Artificial Sequence: Synthetic oligonucleotide
uuuucgccaacaacuacug

SEQ ID NO: 1320013 - RNA, 19 nt, Artificial Sequence
  Description of Artificial Sequence: Synthetic oligonucleotide
agcagugaaaugcauucag

SEQ ID NO: 1320014 - RNA, 19 nt, Artificial Sequence
  Description of Artificial Sequence: Synthetic oligonucleotide
ugaucuuaaaaggauaaua

SEQ ID NO: 1320015 - RNA, 19 nt, Artificial Sequence
  Description of Artificial Sequence: Synthetic oligonucleotide
auuaagauacauucaguua

SEQ ID NO: 1320016 - RNA, 19 nt, Artificial Sequence
  Description of Artificial Sequence: Synthetic oligonucleotide
cuuauucuaccacugcuac

SEQ ID NO: 1320017 - RNA, 19 nt, Artificial Sequence
  Description of Artificial Sequence: Synthetic oligonucleotide
gauuccgacagacugcuga

SEQ ID NO: 1320018 - RNA, 19 nt, Artificial Sequence
  Description of Artificial Sequence: Synthetic oligonucleotide
uguaauuguaagagcaauu

SEQ ID NO: 1320019 - RNA, 19 nt, Artificial Sequence
  Description of Artificial Sequence: Synthetic oligonucleotide
aacuaguugugcccagaag

SEQ ID NO: 1320020 - RNA, 19 nt, Artificial Sequence
  Description of Artificial Sequence: Synthetic oligonucleotide
cagacauuagcuuccugcc

SEQ ID NO: 1320021 - RNA, 19 nt, Artificial Sequence
  Description of Artificial Sequence: Synthetic oligonucleotide
aauaaugggugcaaagaaa

SEQ ID NO: 1320022 - RNA, 19 nt, Artificial Sequence
  Description of Artificial Sequence: Synthetic oligonucleotide
gauuaagauacauucaguu

SEQ ID NO: 1320023 - RNA, 19 nt, Artificial Sequence
  Description of Artificial Sequence: Synthetic oligonucleotide
guaacaaaugauucagaca

SEQ ID NO: 1320024 - RNA, 19 nt, Artificial Sequence
  Description of Artificial Sequence: Synthetic oligonucleotide
gaggacguagacucuagug

SEQ ID NO: 1320025 - RNA, 19 nt, Artificial Sequence
  Description of Artificial Sequence: Synthetic oligonucleotide
agauucugauaaaagugac

SEQ ID NO: 1320026 - RNA, 19 nt, Artificial Sequence
  Description of Artificial Sequence: Synthetic oligonucleotide
gguugaagagaugaggacg

SEQ ID NO: 1320027 - RNA, 19 nt, Artificial Sequence
  Description of Artificial Sequence: Synthetic oligonucleotide
agugacugauuugauacag

SEQ ID NO: 1320028 - RNA, 19 nt, Artificial Sequence
  Description of Artificial Sequence: Synthetic oligonucleotide
acacaguugagguuugaug

SEQ ID NO: 1320029 - RNA, 19 nt, Artificial Sequence
  Description of Artificial Sequence: Synthetic oligonucleotide
auuguaagagcaauugugu

SEQ ID NO: 1320030 - RNA, 19 nt, Artificial Sequence
  Description of Artificial Sequence: Synthetic oligonucleotide
acugguaaggauuccgaca

SEQ ID NO: 1320031 - RNA, 19 nt, Artificial Sequence
  Description of Artificial Sequence: Synthetic oligonucleotide
agcaauuguguacaucuga

SEQ ID NO: 1320032 - RNA, 19 nt, Artificial Sequence
  Description of Artificial Sequence: Synthetic oligonucleotide
cacacacagaccaaugaac

SEQ ID NO: 1320033 - RNA, 19 nt, Artificial Sequence
  Description of Artificial Sequence: Synthetic oligonucleotide
aacuauaugcuaacauaug

SEQ ID NO: 1320034 - RNA, 19 nt, Artificial Sequence
  Description of Artificial Sequence: Synthetic oligonucleotide
cucggauacugcuuugucc

SEQ ID NO: 1320035 - RNA, 19 nt, Artificial Sequence
  Description of Artificial Sequence: Synthetic oligonucleotide
auuccgacagacugcugac

SEQ ID NO: 1320036 - RNA, 19 nt, Artificial Sequence
  Description of Artificial Sequence: Synthetic oligonucleotide
aauccgcaaccaguggagc

SEQ ID NO: 1320037 - RNA, 19 nt, Artificial Sequence
  Description of Artificial Sequence: Synthetic oligonucleotide
gguuugaugagcaaacagc

SEQ ID NO: 1320038 - RNA, 19 nt, Artificial Sequence
  Description of Artificial Sequence: Synthetic oligonucleotide
guuugcagauggucaaagg

SEQ ID NO: 1320039 - RNA, 19 nt, Artificial Sequence
  Description of Artificial Sequence: Synthetic oligonucleotide
ucagcacauauucuccugu

SEQ ID NO: 1320040 - RNA, 19 nt, Artificial Sequence
  Description of Artificial Sequence: Synthetic oligonucleotide
aacccaguaaguccuacuu

SEQ ID NO: 1320041 - RNA, 19 nt, Artificial Sequence
  Description of Artificial Sequence: Synthetic oligonucleotide
ggauaauacuucuuuucag

SEQ ID NO: 1320042 - RNA, 19 nt, Artificial Sequence
  Description of Artificial Sequence: Synthetic oligonucleotide
acaguugagguuugaugag

SEQ ID NO: 1320043 - RNA, 19 nt, Artificial Sequence
  Description of Artificial Sequence: Synthetic oligonucleotide
uugggaaggugcuacagau

SEQ ID NO: 1320044 - RNA, 19 nt, Artificial Sequence
  Description of Artificial Sequence: Synthetic oligonucleotide
cuagugcugacugagcgcc

SEQ ID NO: 1320045 - RNA, 19 nt, Artificial Sequence
  Description of Artificial Sequence: Synthetic oligonucleotide
aagagcaauuguguacauc

SEQ ID NO: 1320046 - RNA, 19 nt, Artificial Sequence
  Description of Artificial Sequence: Synthetic oligonucleotide
ucaaaggauuuuguauucc

SEQ ID NO: 1320047 - RNA, 19 nt, Artificial Sequence
  Description of Artificial Sequence: Synthetic oligonucleotide
ugauuaguuucuugagcca

SEQ ID NO: 1320048 - RNA, 19 nt, Artificial Sequence
  Description of Artificial Sequence: Synthetic oligonucleotide
aagugacugauuugauaca

SEQ ID NO: 1320049 - RNA, 19 nt, Artificial Sequence
  Description of Artificial Sequence: Synthetic oligonucleotide
gacucuagugcugacugag

SEQ ID NO: 1320050 - RNA, 19 nt, Artificial Sequence
  Description of Artificial Sequence: Synthetic oligonucleotide
ugauaacuaguugugccca

SEQ ID NO: 1320051 - RNA, 19 nt, Artificial Sequence
  Description of Artificial Sequence: Synthetic oligonucleotide
gauaacuaguugugcccag

SEQ ID NO: 1320052 - RNA, 19 nt, Artificial Sequence
  Description of Artificial Sequence: Synthetic oligonucleotide
uucuccuguaacaaaugau

SEQ ID NO: 1320053 - RNA, 19 nt, Artificial Sequence
  Description of Artificial Sequence: Synthetic oligonucleotide
guuuccauaaaauccgcaa

SEQ ID NO: 1320054 - RNA, 19 nt, Artificial Sequence
  Description of Artificial Sequence: Synthetic oligonucleotide
uaaugggugcaaagaaacu

SEQ ID NO: 1320055 - RNA, 19 nt, Artificial Sequence
  Description of Artificial Sequence: Synthetic oligonucleotide
agcauacugaacacaugcc

SEQ ID NO: 1320056 - RNA, 19 nt, Artificial Sequence
  Description of Artificial Sequence: Synthetic oligonucleotide
uccacaccggcauucaaac

SEQ ID NO: 1320057 - RNA, 19 nt, Artificial Sequence
  Description of Artificial Sequence: Synthetic oligonucleotide
uuauagcauacugaacaca

SEQ ID NO: 1320058 - RNA, 19 nt, Artificial Sequence
  Description of Artificial Sequence: Synthetic oligonucleotide
cauuaucaaaggggaaucg

SEQ ID NO: 1320059 - RNA, 19 nt, Artificial Sequence
  Description of Artificial Sequence: Synthetic oligonucleotide
aacauauguauaaccucug

SEQ ID NO: 1320060 - RNA, 19 nt, Artificial Sequence
  Description of Artificial Sequence: Synthetic oligonucleotide
aaacccaguaaguccuacu

SEQ ID NO: 1320061 - RNA, 19 nt, Artificial Sequence
  Description of Artificial Sequence: Synthetic oligonucleotide
ucaaagacuggugaauaaa

SEQ ID NO: 1320062 - RNA, 19 nt, Artificial Sequence
  Description of Artificial Sequence: Synthetic oligonucleotide
uguaucugauacugaagau

SEQ ID NO: 1320063 - RNA, 19 nt, Artificial Sequence
  Description of Artificial Sequence: Synthetic oligonucleotide
uaaucaaagacuggugaau

SEQ ID NO: 1320064 - RNA, 19 nt, Artificial Sequence
  Description of Artificial Sequence: Synthetic oligonucleotide
agugaaaugcauucagcuu

SEQ ID NO: 1320065 - RNA, 19 nt, Artificial Sequence
  Description of Artificial Sequence: Synthetic oligonucleotide
gacauaaauaaugggugca

SEQ ID NO: 1320066 - RNA, 19 nt, Artificial Sequence
  Description of Artificial Sequence: Synthetic oligonucleotide
ucuuuucgccaacaacuac

SEQ ID NO: 1320067 - RNA, 19 nt, Artificial Sequence
  Description of Artificial Sequence: Synthetic oligonucleotide
ucgugcugcagagaaaagc

SEQ ID NO: 1320068 - RNA, 19 nt, Artificial Sequence
  Description of Artificial Sequence: Synthetic oligonucleotide
uuguaauuguaagagcaau

SEQ ID NO: 1320069 - RNA, 19 nt, Artificial Sequence
  Description of Artificial Sequence: Synthetic oligonucleotide
auuaucaaaggggaaucgu

SEQ ID NO: 1320070 - RNA, 19 nt, Artificial Sequence
  Description of Artificial Sequence: Synthetic oligonucleotide
cauaaaauccgcaaccagu

SEQ ID NO: 1320071 - RNA, 19 nt, Artificial Sequence
  Description of Artificial Sequence: Synthetic oligonucleotide
uuucgccaacaacuacugg

SEQ ID NO: 1320072 - RNA, 19 nt, Artificial Sequence
  Description of Artificial Sequence: Synthetic oligonucleotide
agugauuaagauacauuca

SEQ ID NO: 1320073 - RNA, 19 nt, Artificial Sequence
  Description of Artificial Sequence: Synthetic oligonucleotide
agcuauauauacauacaca

SEQ ID NO: 1320074 - RNA, 19 nt, Artificial Sequence
  Description of Artificial Sequence: Synthetic oligonucleotide
uuccuauccucauaagcaa

SEQ ID NO: 1320075 - RNA, 19 nt, Artificial Sequence
  Description of Artificial Sequence: Synthetic oligonucleotide
aguaucggugcacaccaca

SEQ ID NO: 1320076 - RNA, 19 nt, Artificial Sequence
  Description of Artificial Sequence: Synthetic oligonucleotide
cauccuuuauauugugcac

SEQ ID NO: 1320077 - RNA, 19 nt, Artificial Sequence
  Description of Artificial Sequence: Synthetic oligonucleotide
uuguaagagcaauugugua

SEQ ID NO: 1320078 - RNA, 19 nt, Artificial Sequence
  Description of Artificial Sequence: Synthetic oligonucleotide
uacggugcucuacauuccc

SEQ ID NO: 1320079 - RNA, 19 nt, Artificial Sequence
  Description of Artificial Sequence: Synthetic oligonucleotide
ugauuugauacagggccug

SEQ ID NO: 1320080 - RNA, 19 nt, Artificial Sequence
  Description of Artificial Sequence: Synthetic oligonucleotide
ugguugaagagaugaggac

SEQ ID NO: 1320081 - RNA, 19 nt, Artificial Sequence
  Description of Artificial Sequence: Synthetic oligonucleotide
uacugauaacuaguugugc

SEQ ID NO: 1320082 - RNA, 19 nt, Artificial Sequence
  Description of Artificial Sequence: Synthetic oligonucleotide
ugcacucaacuaaaauuaa

SEQ ID NO: 1320083 - RNA, 19 nt, Artificial Sequence
  Description of Artificial Sequence: Synthetic oligonucleotide
gauuugauacagggccugg

SEQ ID NO: 1320084 - RNA, 19 nt, Artificial Sequence
  Description of Artificial Sequence: Synthetic oligonucleotide
ugaugagcaaacagcuguc

SEQ ID NO: 1320085 - RNA, 19 nt, Artificial Sequence
  Description of Artificial Sequence: Synthetic oligonucleotide
uuaguuucuugagccaugu

SEQ ID NO: 1320086 - RNA, 19 nt, Artificial Sequence
  Description of Artificial Sequence: Synthetic oligonucleotide
uaacuaguugugcccagaa

SEQ ID NO: 1320087 - RNA, 19 nt, Artificial Sequence
  Description of Artificial Sequence: Synthetic oligonucleotide
gauguacuguccacuuggg

SEQ ID NO: 1320088 - RNA, 19 nt, Artificial Sequence
  Description of Artificial Sequence: Synthetic oligonucleotide
gacugauuugauacagggc

SEQ ID NO: 1320089 - RNA, 19 nt, Artificial Sequence
  Description of Artificial Sequence: Synthetic oligonucleotide
uucuggaucuuuucgccaa

SEQ ID NO: 1320090 - RNA, 19 nt, Artificial Sequence
  Description of Artificial Sequence: Synthetic oligonucleotide
gaugagcaaacagcugucc

SEQ ID NO: 1320091 - RNA, 19 nt, Artificial Sequence
  Description of Artificial Sequence: Synthetic oligonucleotide
ucgccaacaacuacuggau

SEQ ID NO: 1320092 - RNA, 19 nt, Artificial Sequence
  Description of Artificial Sequence: Synthetic oligonucleotide
auaaccucuguuaaugaaa

SEQ ID NO: 1320093 - RNA, 19 nt, Artificial Sequence
  Description of Artificial Sequence: Synthetic oligonucleotide
uugagacagacauuagcuu

SEQ ID NO: 1320094 - RNA, 19 nt, Artificial Sequence
  Description of Artificial Sequence: Synthetic oligonucleotide
agggcauuaucaaagggga

SEQ ID NO: 1320095 - RNA, 19 nt, Artificial Sequence
  Description of Artificial Sequence: Synthetic oligonucleotide
caaagcauaggugcuuggc

SEQ ID NO: 1320096 - RNA, 19 nt, Artificial Sequence
  Description of Artificial Sequence: Synthetic oligonucleotide
ucaaaggucuaugcaagau

SEQ ID NO: 1320097 - RNA, 19 nt, Artificial Sequence
  Description of Artificial Sequence: Synthetic oligonucleotide
ucacauucaagaggaacaa

SEQ ID NO: 1320098 - RNA, 19 nt, Artificial Sequence
  Description of Artificial Sequence: Synthetic oligonucleotide
acauauucuccuguaacaa

SEQ ID NO: 1320099 - RNA, 19 nt, Artificial Sequence
  Description of Artificial Sequence: Synthetic oligonucleotide
uccucauaagcaagcuacu

SEQ ID NO: 1320100 - RNA, 19 nt, Artificial Sequence
  Description of Artificial Sequence: Synthetic oligonucleotide
caagauacggugcucuaca

SEQ ID NO: 1320101 - RNA, 19 nt, Artificial Sequence
  Description of Artificial Sequence: Synthetic oligonucleotide
cuauucuucugaugacaug

SEQ ID NO: 1320102 - RNA, 19 nt, Artificial Sequence
  Description of Artificial Sequence: Synthetic oligonucleotide
ugcacaugaaacagcgauu

SEQ ID NO: 1320103 - RNA, 19 nt, Artificial Sequence
  Description of Artificial Sequence: Synthetic oligonucleotide
gugcuacagauucugauaa

SEQ ID NO: 1320104 - RNA, 19 nt, Artificial Sequence
  Description of Artificial Sequence: Synthetic oligonucleotide
ucucuuucccuugacuuaa

SEQ ID NO: 1320105 - RNA, 19 nt, Artificial Sequence
  Description of Artificial Sequence: Synthetic oligonucleotide
acaugccauuuguacgagg

SEQ ID NO: 1320106 - RNA, 19 nt, Artificial Sequence
  Description of Artificial Sequence: Synthetic oligonucleotide
aagauacggugcucuacau

SEQ ID NO: 1320107 - RNA, 19 nt, Artificial Sequence
  Description of Artificial Sequence: Synthetic oligonucleotide
guauaaccucuguuaauga

SEQ ID NO: 1320108 - RNA, 19 nt, Artificial Sequence
  Description of Artificial Sequence: Synthetic oligonucleotide
augcaugauucaaaggucu

SEQ ID NO: 1320109 - RNA, 19 nt, Artificial Sequence
  Description of Artificial Sequence: Synthetic oligonucleotide
aucggugcacaccacagua

SEQ ID NO: 1320110 - RNA, 19 nt, Artificial Sequence
  Description of Artificial Sequence: Synthetic oligonucleotide
cuuuucgccaacaacuacu

SEQ ID NO: 1320111 - RNA, 19 nt, Artificial Sequence
  Description of Artificial Sequence: Synthetic oligonucleotide
uaucggugcacaccacagu

SEQ ID NO: 1320112 - RNA, 19 nt, Artificial Sequence
  Description of Artificial Sequence: Synthetic oligonucleotide
cugacugagcgccugcgac

SEQ ID NO: 1320113 - RNA, 19 nt, Artificial Sequence
  Description of Artificial Sequence: Synthetic oligonucleotide
acauaaauaaugggugcaa

SEQ ID NO: 1320114 - RNA, 19 nt, Artificial Sequence
  Description of Artificial Sequence: Synthetic oligonucleotide
gcaauuguguacaucugag

SEQ ID NO: 1320115 - RNA, 19 nt, Artificial Sequence
  Description of Artificial Sequence: Synthetic oligonucleotide
aaaggggaaucgugcugca

SEQ ID NO: 1320116 - RNA, 19 nt, Artificial Sequence
  Description of Artificial Sequence: Synthetic oligonucleotide
ucucggauacugcuuuguc

SEQ ID NO: 1320117 - RNA, 19 nt, Artificial Sequence
  Description of Artificial Sequence: Synthetic oligonucleotide
guaucggugcacaccacag

SEQ ID NO: 1320118 - RNA, 19 nt, Artificial Sequence
  Description of Artificial Sequence: Synthetic oligonucleotide
cucuacauucccaaggacu

SEQ ID NO: 1320119 - RNA, 19 nt, Artificial Sequence
  Description of Artificial Sequence: Synthetic oligonucleotide
auagugauuaagauacauu

SEQ ID NO: 1320120 - RNA, 19 nt, Artificial Sequence
  Description of Artificial Sequence: Synthetic oligonucleotide
gugacugauuugauacagg

SEQ ID NO: 1320121 - RNA, 19 nt, Artificial Sequence
  Description of Artificial Sequence: Synthetic oligonucleotide
uuguacgaggguuuccaua

SEQ ID NO: 1320122 - RNA, 19 nt, Artificial Sequence
  Description of Artificial Sequence: Synthetic oligonucleotide
auacggugcucuacauucc

SEQ ID NO: 1320123 - RNA, 19 nt, Artificial Sequence
  Description of Artificial Sequence: Synthetic oligonucleotide
ucaacacaugcauguuuaa

SEQ ID NO: 1320124 - RNA, 19 nt, Artificial Sequence
  Description of Artificial Sequence: Synthetic oligonucleotide
auuaguuucuugagccaug

SEQ ID NO: 1320125 - RNA, 19 nt, Artificial Sequence
  Description of Artificial Sequence: Synthetic oligonucleotide
agcaaagcauaggugcuug

SEQ ID NO: 1320126 - RNA, 19 nt, Artificial Sequence
  Description of Artificial Sequence: Synthetic oligonucleotide
cagugaaaugcauucagcu

SEQ ID NO: 1320127 - RNA, 19 nt, Artificial Sequence
  Description of Artificial Sequence: Synthetic oligonucleotide
ugccauuuguacgaggguu

SEQ ID NO: 1320128 - RNA, 19 nt, Artificial Sequence
  Description of Artificial Sequence: Synthetic oligonucleotide
ggaaucgugcugcagagaa

SEQ ID NO: 1320129 - RNA, 19 nt, Artificial Sequence
  Description of Artificial Sequence: Synthetic oligonucleotide
aucaacacaugcauguuua

SEQ ID NO: 1320130 - RNA, 19 nt, Artificial Sequence
  Description of Artificial Sequence: Synthetic oligonucleotide
cauauucuccuguaacaaa

SEQ ID NO: 1320131 - RNA, 19 nt, Artificial Sequence
  Description of Artificial Sequence: Synthetic oligonucleotide
ugcgacacugccgucugug

SEQ ID NO: 1320132 - RNA, 19 nt, Artificial Sequence
  Description of Artificial Sequence: Synthetic oligonucleotide
auguacuguccacuuggga

SEQ ID NO: 1320133 - RNA, 19 nt, Artificial Sequence
  Description of Artificial Sequence: Synthetic oligonucleotide
ugggugcaaagaaacuaua

SEQ ID NO: 1320134 - RNA, 19 nt, Artificial Sequence
  Description of Artificial Sequence: Synthetic oligonucleotide
acugaagauggaggaucac

SEQ ID NO: 1320135 - RNA, 19 nt, Artificial Sequence
  Description of Artificial Sequence: Synthetic oligonucleotide
gaacaaggcccucugcucu

SEQ ID NO: 1320136 - RNA, 19 nt, Artificial Sequence
  Description of Artificial Sequence: Synthetic oligonucleotide
ugcagucagcagugaaaug

SEQ ID NO: 1320137 - RNA, 19 nt, Artificial Sequence
  Description of Artificial Sequence: Synthetic oligonucleotide
augcaagauacggugcucu

SEQ ID NO: 1320138 - RNA, 19 nt, Artificial Sequence
  Description of Artificial Sequence: Synthetic oligonucleotide
ggaaauaaauguucagagu

SEQ ID NO: 1320139 - RNA, 19 nt, Artificial Sequence
  Description of Artificial Sequence: Synthetic oligonucleotide
agacuggugaauaaacaua

SEQ ID NO: 1320140 - RNA, 19 nt, Artificial Sequence
  Description of Artificial Sequence: Synthetic oligonucleotide
gcuaacauauguauaaccu

SEQ ID NO: 1320141 - RNA, 19 nt, Artificial Sequence
  Description of Artificial Sequence: Synthetic oligonucleotide
ugcuacuguucugucuuug

SEQ ID NO: 1320142 - RNA, 19 nt, Artificial Sequence
  Description of Artificial Sequence: Synthetic oligonucleotide
auaacuaguugugcccaga

SEQ ID NO: 1320143 - RNA, 19 nt, Artificial Sequence
  Description of Artificial Sequence: Synthetic oligonucleotide
auacacaaugagaaauaaa

SEQ ID NO: 1320144 - RNA, 19 nt, Artificial Sequence
  Description of Artificial Sequence: Synthetic oligonucleotide
auucaguuacugauaacua

SEQ ID NO: 1320145 - RNA, 19 nt, Artificial Sequence
  Description of Artificial Sequence: Synthetic oligonucleotide
ucggugcacaccacaguaa

SEQ ID NO: 1320146 - RNA, 19 nt, Artificial Sequence
  Description of Artificial Sequence: Synthetic oligonucleotide
cauuuguacgaggguuucc

SEQ ID NO: 1320147 - RNA, 19 nt, Artificial Sequence
  Description of Artificial Sequence: Synthetic oligonucleotide
uaugcaagauacggugcuc

SEQ ID NO: 1320148 - RNA, 19 nt, Artificial Sequence
  Description of Artificial Sequence: Synthetic oligonucleotide
agauacggugcucuacauu

SEQ ID NO: 1320149 - RNA, 19 nt, Artificial Sequence
  Description of Artificial Sequence: Synthetic oligonucleotide
gagcaauuguguacaucug

SEQ ID NO: 1320150 - RNA, 19 nt, Artificial Sequence
  Description of Artificial Sequence: Synthetic oligonucleotide
augaucuuaaaaggauaau

SEQ ID NO: 1320151 - RNA, 19 nt, Artificial Sequence
  Description of Artificial Sequence: Synthetic oligonucleotide
gacguagacucuagugcug

SEQ ID NO: 1320152 - RNA, 19 nt, Artificial Sequence
  Description of Artificial Sequence: Synthetic oligonucleotide
gauuaguuucuugagccau

SEQ ID NO: 1320153 - RNA, 19 nt, Artificial Sequence
  Description of Artificial Sequence: Synthetic oligonucleotide
aaggggaaucgugcugcag

SEQ ID NO: 1320154 - RNA, 19 nt, Artificial Sequence
  Description of Artificial Sequence: Synthetic oligonucleotide
cagauguacuguccacuug

SEQ ID NO: 1320155 - RNA, 19 nt, Artificial Sequence
  Description of Artificial Sequence: Synthetic oligonucleotide
cuugggaaggugcuacaga

SEQ ID NO: 1320156 - RNA, 19 nt, Artificial Sequence
  Description of Artificial Sequence: Synthetic oligonucleotide
gcacaugaaacagcgauuc

SEQ ID NO: 1320157 - RNA, 19 nt, Artificial Sequence
  Description of Artificial Sequence: Synthetic oligonucleotide
augccauuuguacgagggu

SEQ ID NO: 1320158 - RNA, 19 nt, Artificial Sequence
  Description of Artificial Sequence: Synthetic oligonucleotide
ggggaaucgugcugcagag

SEQ ID NO: 1320159 - RNA, 19 nt, Artificial Sequence
  Description of Artificial Sequence: Synthetic oligonucleotide
aggugggcuuauucuacca

SEQ ID NO: 1320160 - RNA, 19 nt, Artificial Sequence
  Description of Artificial Sequence: Synthetic oligonucleotide
gaucaacacaugcauguuu

SEQ ID NO: 1320161 - RNA, 19 nt, Artificial Sequence
  Description of Artificial Sequence: Synthetic oligonucleotide
ggugcuacagauucugaua

SEQ ID NO: 1320162 - RNA, 19 nt, Artificial Sequence
  Description of Artificial Sequence: Synthetic oligonucleotide
gacugagcgccugcgacac

SEQ ID NO: 1320163 - RNA, 19 nt, Artificial Sequence
  Description of Artificial Sequence: Synthetic oligonucleotide
gacagacauuagcuuccug

SEQ ID NO: 1320164 - RNA, 19 nt, Artificial Sequence
  Description of Artificial Sequence: Synthetic oligonucleotide
cugugcacuguacugguaa

SEQ ID NO: 1320165 - RNA, 19 nt, Artificial Sequence
  Description of Artificial Sequence: Synthetic oligonucleotide
cugcacaugaaacagcgau

SEQ ID NO: 1320166 - RNA, 19 nt, Artificial Sequence
  Description of Artificial Sequence: Synthetic oligonucleotide
uccgcaaccaguggagcaa

SEQ ID NO: 1320167 - RNA, 19 nt, Artificial Sequence
  Description of Artificial Sequence: Synthetic oligonucleotide
cuacauucccaaggacuag

SEQ ID NO: 1320168 - RNA, 19 nt, Artificial Sequence
  Description of Artificial Sequence: Synthetic oligonucleotide
caugaaacagcgauucuuu

SEQ ID NO: 1320169 - RNA, 19 nt, Artificial Sequence
  Description of Artificial Sequence: Synthetic oligonucleotide
agacucuagugcugacuga

SEQ ID NO: 1320170 - RNA, 19 nt, Artificial Sequence
  Description of Artificial Sequence: Synthetic oligonucleotide
ucaaacccaguaaguccua

SEQ ID NO: 1320171 - RNA, 19 nt, Artificial Sequence
  Description of Artificial Sequence: Synthetic oligonucleotide
cuaugcaagauacggugcu

SEQ ID NO: 1320172 - RNA, 19 nt, Artificial Sequence
  Description of Artificial Sequence: Synthetic oligonucleotide
ugcaagauacggugcucua

SEQ ID NO: 1320173 - RNA, 19 nt, Artificial Sequence
  Description of Artificial Sequence: Synthetic oligonucleotide
agugcugacugagcgccug

SEQ ID NO: 1320174 - RNA, 19 nt, Artificial Sequence
  Description of Artificial Sequence: Synthetic oligonucleotide
gcaaagcauaggugcuugg

SEQ ID NO: 1320175 - RNA, 19 nt, Artificial Sequence
  Description of Artificial Sequence: Synthetic oligonucleotide
uggcugcuguguuguaucu

SEQ ID NO: 1320176 - RNA, 19 nt, Artificial Sequence
  Description of Artificial Sequence: Synthetic oligonucleotide
gcauuaucaaaggggaauc

SEQ ID NO: 1320177 - RNA, 19 nt, Artificial Sequence
  Description of Artificial Sequence: Synthetic oligonucleotide
augaggacguagacucuag

SEQ ID NO: 1320178 - RNA, 19 nt, Artificial Sequence
  Description of Artificial Sequence: Synthetic oligonucleotide
ggugggcuuauucuaccac

SEQ ID NO: 1320179 - RNA, 19 nt, Artificial Sequence
  Description of Artificial Sequence: Synthetic oligonucleotide
gauacugaagauggaggau

SEQ ID NO: 1320180 - RNA, 19 nt, Artificial Sequence
  Description of Artificial Sequence: Synthetic oligonucleotide
aucuuuucgccaacaacua

SEQ ID NO: 1320181 - RNA, 19 nt, Artificial Sequence
  Description of Artificial Sequence: Synthetic oligonucleotide
caaacccaguaaguccuac

SEQ ID NO: 1320182 - RNA, 19 nt, Artificial Sequence
  Description of Artificial Sequence: Synthetic oligonucleotide
caauuguguacaucugagu

SEQ ID NO: 1320183 - RNA, 19 nt, Artificial Sequence
  Description of Artificial Sequence: Synthetic oligonucleotide
cauagugauuaagauacau

SEQ ID NO: 1320184 - RNA, 19 nt, Artificial Sequence
  Description of Artificial Sequence: Synthetic oligonucleotide
ggcugugauuaguuucuug

SEQ ID NO: 1320185 - RNA, 19 nt, Artificial Sequence
  Description of Artificial Sequence: Synthetic oligonucleotide
ggacguagacucuagugcu

SEQ ID NO: 1320186 - RNA, 19 nt, Artificial Sequence
  Description of Artificial Sequence: Synthetic oligonucleotide
uuccgacagacugcugaca

SEQ ID NO: 1320187 - RNA, 19 nt, Artificial Sequence
  Description of Artificial Sequence: Synthetic oligonucleotide
cugauuugauacagggccu

SEQ ID NO: 1320188 - RNA, 19 nt, Artificial Sequence
  Description of Artificial Sequence: Synthetic oligonucleotide
ccaguggagcaaagcauag

SEQ ID NO: 1320189 - RNA, 19 nt, Artificial Sequence
  Description of Artificial Sequence: Synthetic oligonucleotide
ggccugguugaagagauga

SEQ ID NO: 1320190 - RNA, 19 nt, Artificial Sequence
  Description of Artificial Sequence: Synthetic oligonucleotide
gcaaccaguggagcaaagc

SEQ ID NO: 1320191 - RNA, 19 nt, Artificial Sequence
  Description of Artificial Sequence: Synthetic oligonucleotide
caucagcacauauucuccu

SEQ ID NO: 1320192 - RNA, 19 nt, Artificial Sequence
  Description of Artificial Sequence: Synthetic oligonucleotide
acaccggcauucaaaccca

SEQ ID NO: 1320193 - RNA, 19 nt, Artificial Sequence
  Description of Artificial Sequence: Synthetic oligonucleotide
cacaugcauguuuaauacu

SEQ ID NO: 1320194 - RNA, 19 nt, Artificial Sequence
  Description of Artificial Sequence: Synthetic oligonucleotide
gauacagggccugguugaa

SEQ ID NO: 1320195 - RNA, 19 nt, Artificial Sequence
  Description of Artificial Sequence: Synthetic oligonucleotide
acagaccaaugaacaauaa

SEQ ID NO: 1320196 - RNA, 19 nt, Artificial Sequence
  Description of Artificial Sequence: Synthetic oligonucleotide
gguuuccauaaaauccgca

SEQ ID NO: 1320197 - RNA, 19 nt, Artificial Sequence
  Description of Artificial Sequence: Synthetic oligonucleotide
gcaagauacggugcucuac

SEQ ID NO: 1320198 - RNA, 19 nt, Artificial Sequence
  Description of Artificial Sequence: Synthetic oligonucleotide
agcccucugcacucaacua

SEQ ID NO: 1320199 - RNA, 19 nt, Artificial Sequence
  Description of Artificial Sequence: Synthetic oligonucleotide
cugauaaaagugacugauu

SEQ ID NO: 1320200 - RNA, 19 nt, Artificial Sequence
  Description of Artificial Sequence: Synthetic oligonucleotide
ggguuuccauaaaauccgc

SEQ ID NO: 1320201 - RNA, 19 nt, Artificial Sequence
  Description of Artificial Sequence: Synthetic oligonucleotide
aucgugcugcagagaaaag

SEQ ID NO: 1320202 - RNA, 19 nt, Artificial Sequence
  Description of Artificial Sequence: Synthetic oligonucleotide
caccggcauucaaacccag

SEQ ID NO: 1320203 - RNA, 19 nt, Artificial Sequence
  Description of Artificial Sequence: Synthetic oligonucleotide
gcucuacauucccaaggac

SEQ ID NO: 1320204 - RNA, 19 nt, Artificial Sequence
  Description of Artificial Sequence: Synthetic oligonucleotide
cuguguuguaucugauacu

SEQ ID NO: 1320205 - RNA, 19 nt, Artificial Sequence
  Description of Artificial Sequence: Synthetic oligonucleotide
gaaucgugcugcagagaaa

SEQ ID NO: 1320206 - RNA, 19 nt, Artificial Sequence
  Description of Artificial Sequence: Synthetic oligonucleotide
cccauaaauuuagaaucuc

SEQ ID NO: 1320207 - RNA, 19 nt, Artificial Sequence
  Description of Artificial Sequence: Synthetic oligonucleotide
guguuguaucugauacuga

SEQ ID NO: 1320208 - RNA, 19 nt, Artificial Sequence
  Description of Artificial Sequence: Synthetic oligonucleotide
agcccuccagagaauuucu

SEQ ID NO: 1320209 - RNA, 19 nt, Artificial Sequence
  Description of Artificial Sequence: Synthetic oligonucleotide
gugcugacugagcgccugc

SEQ ID NO: 1320210 - RNA, 19 nt, Artificial Sequence
  Description of Artificial Sequence: Synthetic oligonucleotide
gccaacaacuacuggauuu

SEQ ID NO: 1320211 - RNA, 19 nt, Artificial Sequence
  Description of Artificial Sequence: Synthetic oligonucleotide
agucagcagugaaaugcau

SEQ ID NO: 1320212 - RNA, 19 nt, Artificial Sequence
  Description of Artificial Sequence: Synthetic oligonucleotide
cagcacauauucuccugua

SEQ ID NO: 1320213 - RNA, 19 nt, Artificial Sequence
  Description of Artificial Sequence: Synthetic oligonucleotide
gcacucaacuaaaauuaaa

SEQ ID NO: 1320214 - RNA, 19 nt, Artificial Sequence
  Description of Artificial Sequence: Synthetic oligonucleotide
acggugcucuacauuccca

SEQ ID NO: 1320215 - RNA, 19 nt, Artificial Sequence
  Description of Artificial Sequence: Synthetic oligonucleotide
gccugguugaagagaugag

SEQ ID NO: 1320216 - RNA, 19 nt, Artificial Sequence
  Description of Artificial Sequence: Synthetic oligonucleotide
gcgacacugccgucugugc

SEQ ID NO: 1320217 - RNA, 19 nt, Artificial Sequence
  Description of Artificial Sequence: Synthetic oligonucleotide
accggcauucaaacccagu

SEQ ID NO: 1320218 - RNA, 19 nt, Artificial Sequence
  Description of Artificial Sequence: Synthetic oligonucleotide
guacgaggguuuccauaaa

SEQ ID NO: 1320219 - RNA, 19 nt, Artificial Sequence
  Description of Artificial Sequence: Synthetic oligonucleotide
cauaggugcuuggcuguga

SEQ ID NO: 1320220 - RNA, 19 nt, Artificial Sequence
  Description of Artificial Sequence: Synthetic oligonucleotide
ggucuaugcaagauacggu

SEQ ID NO: 1320221 - RNA, 19 nt, Artificial Sequence
  Description of Artificial Sequence: Synthetic oligonucleotide
caggucuucugucucggau

SEQ ID NO: 1320222 - RNA, 19 nt, Artificial Sequence
  Description of Artificial Sequence: Synthetic oligonucleotide
cacaugaaacagcgauucu

SEQ ID NO: 1320223 - RNA, 19 nt, Artificial Sequence
  Description of Artificial Sequence: Synthetic oligonucleotide
gcauucaaacccaguaagu

SEQ ID NO: 1320224 - RNA, 19 nt, Artificial Sequence
  Description of Artificial Sequence: Synthetic oligonucleotide
gcugacugagcgccugcga

SEQ ID NO: 1320225 - RNA, 19 nt, Artificial Sequence
  Description of Artificial Sequence: Synthetic oligonucleotide
gucucggauacugcuuugu

SEQ ID NO: 1320226 - RNA, 19 nt, Artificial Sequence
  Description of Artificial Sequence: Synthetic oligonucleotide
gggugcaaagaaacuauau

SEQ ID NO: 1320227 - RNA, 19 nt, Artificial Sequence
  Description of Artificial Sequence: Synthetic oligonucleotide
acagcccuccagagaauuu

SEQ ID NO: 1320228 - RNA, 19 nt, Artificial Sequence
  Description of Artificial Sequence: Synthetic oligonucleotide
ccauagugauuaagauaca

SEQ ID NO: 1320229 - RNA, 19 nt, Artificial Sequence
  Description of Artificial Sequence: Synthetic oligonucleotide
guugugcccagaagggcau

SEQ ID NO: 1320230 - RNA, 19 nt, Artificial Sequence
  Description of Artificial Sequence: Synthetic oligonucleotide
gcaugauucaaaggucuau

SEQ ID NO: 1320231 - RNA, 19 nt, Artificial Sequence
  Description of Artificial Sequence: Synthetic oligonucleotide
gcgccugcgacacugccgu

SEQ ID NO: 1320232 - RNA, 19 nt, Artificial Sequence
  Description of Artificial Sequence: Synthetic oligonucleotide
cguagacucuagugcugac

SEQ ID NO: 1320233 - RNA, 19 nt, Artificial Sequence
  Description of Artificial Sequence: Synthetic oligonucleotide
ccugcacaugaaacagcga

SEQ ID NO: 1320234 - RNA, 19 nt, Artificial Sequence
  Description of Artificial Sequence: Synthetic oligonucleotide
cagcaggaguucaaaucuu

SEQ ID NO: 1320235 - RNA, 19 nt, Artificial Sequence
  Description of Artificial Sequence: Synthetic oligonucleotide
gggcauuaucaaaggggaa

SEQ ID NO: 1320236 - RNA, 19 nt, Artificial Sequence
  Description of Artificial Sequence: Synthetic oligonucleotide
gggaaucgugcugcagaga

SEQ ID NO: 1320237 - RNA, 19 nt, Artificial Sequence
  Description of Artificial Sequence: Synthetic oligonucleotide
cggauacugcuuuguccac

SEQ ID NO: 1320238 - RNA, 19 nt, Artificial Sequence
  Description of Artificial Sequence: Synthetic oligonucleotide
cugcuguguuguaucugau

SEQ ID NO: 1320239 - RNA, 19 nt, Artificial Sequence
  Description of Artificial Sequence: Synthetic oligonucleotide
gcucuucggauggcugcug

SEQ ID NO: 1320240 - RNA, 19 nt, Artificial Sequence
  Description of Artificial Sequence: Synthetic oligonucleotide
gcagauggucaaaggauuu

SEQ ID NO: 1320241 - RNA, 19 nt, Artificial Sequence
  Description of Artificial Sequence: Synthetic oligonucleotide
cgcaaccaguggagcaaag

SEQ ID NO: 1320242 - RNA, 19 nt, Artificial Sequence
  Description of Artificial Sequence: Synthetic oligonucleotide
gccauuuguacgaggguuu

SEQ ID NO: 1320243 - RNA, 19 nt, Artificial Sequence
  Description of Artificial Sequence: Synthetic oligonucleotide
cggugcacaccacaguaaa

SEQ ID NO: 1320244 - RNA, 19 nt, Artificial Sequence
  Description of Artificial Sequence: Synthetic oligonucleotide
cacagcccuccagagaauu

SEQ ID NO: 1320245 - RNA, 19 nt, Artificial Sequence
  Description of Artificial Sequence: Synthetic oligonucleotide
gcacaccacaguaaacauu

SEQ ID NO: 1320246 - RNA, 19 nt, Artificial Sequence
  Description of Artificial Sequence: Synthetic oligonucleotide
cugcgacacugccgucugu

SEQ ID NO: 1320247 - RNA, 19 nt, Artificial Sequence
  Description of Artificial Sequence: Synthetic oligonucleotide
ccgcaaccaguggagcaaa

SEQ ID NO: 1320248 - RNA, 19 nt, Artificial Sequence
  Description of Artificial Sequence: Synthetic oligonucleotide
aaaucuaugauguggaucu

SEQ ID NO: 1320249 - RNA, 19 nt, Artificial Sequence
  Description of Artificial Sequence: Synthetic oligonucleotide
auuaucauauuuaagagac

SEQ ID NO: 1320250 - RNA, 19 nt, Artificial Sequence
  Description of Artificial Sequence: Synthetic oligonucleotide
aagggaauuaccucauacc

SEQ ID NO: 1320251 - RNA, 19 nt, Artificial Sequence
  Description of Artificial Sequence: Synthetic oligonucleotide
uguuaaacucccaacaccc

SEQ ID NO: 1320252 - RNA, 19 nt, Artificial Sequence
  Description of Artificial Sequence: Synthetic oligonucleotide
auuuaagagacuguguccc

SEQ ID NO: 1320253 - RNA, 19 nt, Artificial Sequence
  Description of Artificial Sequence: Synthetic oligonucleotide
gauaacguuguccugcagg

SEQ ID NO: 1320254 - RNA, 19 nt, Artificial Sequence
  Description of Artificial Sequence: Synthetic oligonucleotide
aguaccaaccagcagugcc

SEQ ID NO: 1320255 - RNA, 19 nt, Artificial Sequence
  Description of Artificial Sequence: Synthetic oligonucleotide
uccuguagaagcaagguug

SEQ ID NO: 1320256 - RNA, 19 nt, Artificial Sequence
  Description of Artificial Sequence: Synthetic oligonucleotide
auguuaaacucccaacacc

SEQ ID NO: 1320257 - RNA, 19 nt, Artificial Sequence
  Description of Artificial Sequence: Synthetic oligonucleotide
uaucauauuuaagagacug

SEQ ID NO: 1320258 - RNA, 19 nt, Artificial Sequence
  Description of Artificial Sequence: Synthetic oligonucleotide
uucucuaugcaguauaucu

SEQ ID NO: 1320259 - RNA, 19 nt, Artificial Sequence
  Description of Artificial Sequence: Synthetic oligonucleotide
caauccacagcauacacgc

SEQ ID NO: 1320260 - RNA, 19 nt, Artificial Sequence
  Description of Artificial Sequence: Synthetic oligonucleotide
aguuugagguguuagagca

SEQ ID NO: 1320261 - RNA, 19 nt, Artificial Sequence
  Description of Artificial Sequence: Synthetic oligonucleotide
auaacguuguccugcaggg

SEQ ID NO: 1320262 - RNA, 19 nt, Artificial Sequence
  Description of Artificial Sequence: Synthetic oligonucleotide
uauaucuggcucaugcucc

SEQ ID NO: 1320263 - RNA, 19 nt, Artificial Sequence
  Description of Artificial Sequence: Synthetic oligonucleotide
uugucaaggugacagagca

SEQ ID NO: 1320264 - RNA, 19 nt, Artificial Sequence
  Description of Artificial Sequence: Synthetic oligonucleotide
aauuaccucauaccugcag

SEQ ID NO: 1320265 - RNA, 19 nt, Artificial Sequence
  Description of Artificial Sequence: Synthetic oligonucleotide
auagccaugggucagcuga

SEQ ID NO: 1320266 - RNA, 19 nt, Artificial Sequence
  Description of Artificial Sequence: Synthetic oligonucleotide
gaccauauuggacaggaug

SEQ ID NO: 1320267 - RNA, 19 nt, Artificial Sequence
  Description of Artificial Sequence: Synthetic oligonucleotide
ugagcauucucuaugcagu

SEQ ID NO: 1320268 - RNA, 19 nt, Artificial Sequence
  Description of Artificial Sequence: Synthetic oligonucleotide
ggagauagagaccauauug

SEQ ID NO: 1320269 - RNA, 19 nt, Artificial Sequence
  Description of Artificial Sequence: Synthetic oligonucleotide
aguaugugguacuucagug

SEQ ID NO: 1320270 - RNA, 19 nt, Artificial Sequence
  Description of Artificial Sequence: Synthetic oligonucleotide
gauaugccagaucucaccc

SEQ ID NO: 1320271 - RNA, 19 nt, Artificial Sequence
  Description of Artificial Sequence: Synthetic oligonucleotide
aagguuggcucacccaugg

SEQ ID NO: 1320272 - RNA, 19 nt, Artificial Sequence
  Description of Artificial Sequence: Synthetic oligonucleotide
uaugcaguauaucuggcuc

SEQ ID NO: 1320273 - RNA, 19 nt, Artificial Sequence
  Description of Artificial Sequence: Synthetic oligonucleotide
ugugcugauagcuucagau

SEQ ID NO: 1320274 - RNA, 19 nt, Artificial Sequence
  Description of Artificial Sequence: Synthetic oligonucleotide
agggaauuaccucauaccu

SEQ ID NO: 1320275 - RNA, 19 nt, Artificial Sequence
  Description of Artificial Sequence: Synthetic oligonucleotide
caguauaucuggcucaugc

SEQ ID NO: 1320276 - RNA, 19 nt, Artificial Sequence
  Description of Artificial Sequence: Synthetic oligonucleotide
uguuagagcacgugccugg

SEQ ID NO: 1320277 - RNA, 19 nt, Artificial Sequence
  Description of Artificial Sequence: Synthetic oligonucleotide
auauuggacaggaugacuc

SEQ ID NO: 1320278 - RNA, 19 nt, Artificial Sequence
  Description of Artificial Sequence: Synthetic oligonucleotide
ggaauuaccucauaccugc

SEQ ID NO: 1320279 - RNA, 19 nt, Artificial Sequence
  Description of Artificial Sequence: Synthetic oligonucleotide
uuccgugugucccagaacu

SEQ ID NO: 1320280 - RNA, 19 nt, Artificial Sequence
  Description of Artificial Sequence: Synthetic oligonucleotide
ucugaaguuuuguuguagc

SEQ ID NO: 1320281 - RNA, 19 nt, Artificial Sequence
  Description of Artificial Sequence: Synthetic oligonucleotide
ucauagguggcgauaacgu

SEQ ID NO: 1320282 - RNA, 19 nt, Artificial Sequence
  Description of Artificial Sequence: Synthetic oligonucleotide
uaugccagaucucacccgc

SEQ ID NO: 1320283 - RNA, 19 nt, Artificial Sequence
  Description of Artificial Sequence: Synthetic oligonucleotide
aagagacugggccaccauc

SEQ ID NO: 1320284 - RNA, 19 nt, Artificial Sequence
  Description of Artificial Sequence: Synthetic oligonucleotide
cagcaaucggccaaaaccc

SEQ ID NO: 1320285 - RNA, 19 nt, Artificial Sequence
  Description of Artificial Sequence: Synthetic oligonucleotide
auaccugcagauuucugag

SEQ ID NO: 1320286 - RNA, 19 nt, Artificial Sequence
  Description of Artificial Sequence: Synthetic oligonucleotide
agugaggaccagcuggucg

SEQ ID NO: 1320287 - RNA, 19 nt, Artificial Sequence
  Description of Artificial Sequence: Synthetic oligonucleotide
uuucugagaaccugccaag

SEQ ID NO: 1320288 - RNA, 19 nt, Artificial Sequence
  Description of Artificial Sequence: Synthetic oligonucleotide
agcaguaugugguacuuca

SEQ ID NO: 1320289 - RNA, 19 nt, Artificial Sequence
  Description of Artificial Sequence: Synthetic oligonucleotide
agcgaauggcaucuguuuc

SEQ ID NO: 1320290 - RNA, 19 nt, Artificial Sequence
  Description of Artificial Sequence: Synthetic oligonucleotide
cuugcuguggccaccuggg

SEQ ID NO: 1320291 - RNA, 19 nt, Artificial Sequence
  Description of Artificial Sequence: Synthetic oligonucleotide
gagguguuagagcacgugc

SEQ ID NO: 1320292 - RNA, 19 nt, Artificial Sequence
  Description of Artificial Sequence: Synthetic oligonucleotide
agauagagaccauauugga

SEQ ID NO: 1320293 - RNA, 19 nt, Artificial Sequence
  Description of Artificial Sequence: Synthetic oligonucleotide
gaaccugccaaguaccaac

SEQ ID NO: 1320294 - RNA, 19 nt, Artificial Sequence
  Description of Artificial Sequence: Synthetic oligonucleotide
gaagcaaauagccaugggu

SEQ ID NO: 1320295 - RNA, 19 nt, Artificial Sequence
  Description of Artificial Sequence: Synthetic oligonucleotide
ucuaauuccuugggcaucc

SEQ ID NO: 1320296 - RNA, 19 nt, Artificial Sequence
  Description of Artificial Sequence: Synthetic oligonucleotide
aucugauuaucauauuuaa

SEQ ID NO: 1320297 - RNA, 19 nt, Artificial Sequence
  Description of Artificial Sequence: Synthetic oligonucleotide
ccagcaaucggccaaaacc

SEQ ID NO: 1320298 - RNA, 19 nt, Artificial Sequence
  Description of Artificial Sequence: Synthetic oligonucleotide
guagaagcaagguuggcuc

SEQ ID NO: 1320299 - RNA, 19 nt, Artificial Sequence
  Description of Artificial Sequence: Synthetic oligonucleotide
ugagcuagccuggaggucc

SEQ ID NO: 1320300 - RNA, 19 nt, Artificial Sequence
  Description of Artificial Sequence: Synthetic oligonucleotide
gaggucacgcaccagcugc

SEQ ID NO: 1320301 - RNA, 19 nt, Artificial Sequence
  Description of Artificial Sequence: Synthetic oligonucleotide
gauaaccagccucccgucg

SEQ ID NO: 1320302 - RNA, 19 nt, Artificial Sequence
  Description of Artificial Sequence: Synthetic oligonucleotide
ugauagcuucagaugagcu

SEQ ID NO: 1320303 - RNA, 19 nt, Artificial Sequence
  Description of Artificial Sequence: Synthetic oligonucleotide
gacucuguugauaaccagc

SEQ ID NO: 1320304 - RNA, 19 nt, Artificial Sequence
  Description of Artificial Sequence: Synthetic oligonucleotide
uucagaugagcuucuggca

SEQ ID NO: 1320305 - RNA, 19 nt, Artificial Sequence
  Description of Artificial Sequence: Synthetic oligonucleotide
ucccuuagaguuccuguag

SEQ ID NO: 1320306 - RNA, 19 nt, Artificial Sequence
  Description of Artificial Sequence: Synthetic oligonucleotide
cugccaaguaccaaccagc

SEQ ID NO: 1320307 - RNA, 19 nt, Artificial Sequence
  Description of Artificial Sequence: Synthetic oligonucleotide
agguguuagagcacgugcc

SEQ ID NO: 1320308 - RNA, 19 nt, Artificial Sequence
  Description of Artificial Sequence: Synthetic oligonucleotide
ucggccaaaacccauucau

SEQ ID NO: 1320309 - RNA, 19 nt, Artificial Sequence
  Description of Artificial Sequence: Synthetic oligonucleotide
guauaucuggcucaugcuc

SEQ ID NO: 1320310 - RNA, 19 nt, Artificial Sequence
  Description of Artificial Sequence: Synthetic oligonucleotide
caggccauagaucaccggc

SEQ ID NO: 1320311 - RNA, 19 nt, Artificial Sequence
  Description of Artificial Sequence: Synthetic oligonucleotide
uguggaucugauuaucaua

SEQ ID NO: 1320312 - RNA, 19 nt, Artificial Sequence
  Description of Artificial Sequence: Synthetic oligonucleotide
uuaaacucccaacacccuu

SEQ ID NO: 1320313 - RNA, 19 nt, Artificial Sequence
  Description of Artificial Sequence: Synthetic oligonucleotide
aguauaucuggcucaugcu

SEQ ID NO: 1320314 - RNA, 19 nt, Artificial Sequence
  Description of Artificial Sequence: Synthetic oligonucleotide
agccucaccagcaaucggc

SEQ ID NO: 1320315 - RNA, 19 nt, Artificial Sequence
  Description of Artificial Sequence: Synthetic oligonucleotide
cauaccugcagauuucuga

SEQ ID NO: 1320316 - RNA, 19 nt, Artificial Sequence
  Description of Artificial Sequence: Synthetic oligonucleotide
ugguacuucagugcccugg

SEQ ID NO: 1320317 - RNA, 19 nt, Artificial Sequence
  Description of Artificial Sequence: Synthetic oligonucleotide
accauauuggacaggauga

SEQ ID NO: 1320318 - RNA, 19 nt, Artificial Sequence
  Description of Artificial Sequence: Synthetic oligonucleotide
auaugccagaucucacccg

SEQ ID NO: 1320319 - RNA, 19 nt, Artificial Sequence
  Description of Artificial Sequence: Synthetic oligonucleotide
auagguggcgauaacguug

SEQ ID NO: 1320320 - RNA, 19 nt, Artificial Sequence
  Description of Artificial Sequence: Synthetic oligonucleotide
guagcagguggcaagcacg

SEQ ID NO: 1320321 - RNA, 19 nt, Artificial Sequence
  Description of Artificial Sequence: Synthetic oligonucleotide
ugcaguuugagguguuaga

SEQ ID NO: 1320322 - RNA, 19 nt, Artificial Sequence
  Description of Artificial Sequence: Synthetic oligonucleotide
aagcgaauggcaucuguuu

SEQ ID NO: 1320323 - RNA, 19 nt, Artificial Sequence
  Description of Artificial Sequence: Synthetic oligonucleotide
uuuaagagacuguguccca

SEQ ID NO: 1320324 - RNA, 19 nt, Artificial Sequence
  Description of Artificial Sequence: Synthetic oligonucleotide
agugccacgggccacuaga

SEQ ID NO: 1320325 - RNA, 19 nt, Artificial Sequence
  Description of Artificial Sequence: Synthetic oligonucleotide
gugagagugguuguagcgg

SEQ ID NO: 1320326 - RNA, 19 nt, Artificial Sequence
  Description of Artificial Sequence: Synthetic oligonucleotide
acacccuuagaacagugaa

SEQ ID NO: 1320327 - RNA, 19 nt, Artificial Sequence
  Description of Artificial Sequence: Synthetic oligonucleotide
uagguggcgauaacguugu

SEQ ID NO: 1320328 - RNA, 19 nt, Artificial Sequence
  Description of Artificial Sequence: Synthetic oligonucleotide
gaugacucugcugucgcug

SEQ ID NO: 1320329 - RNA, 19 nt, Artificial Sequence
  Description of Artificial Sequence: Synthetic oligonucleotide
aguuccuguagaagcaagg

SEQ ID NO: 1320330 - RNA, 19 nt, Artificial Sequence
  Description of Artificial Sequence: Synthetic oligonucleotide
caggaugcggcugucagcc

SEQ ID NO: 1320331 - RNA, 19 nt, Artificial Sequence
  Description of Artificial Sequence: Synthetic oligonucleotide
aagucgaggucacgcacca

SEQ ID NO: 1320332 - RNA, 19 nt, Artificial Sequence
  Description of Artificial Sequence: Synthetic oligonucleotide
accucauaccugcagauuu

SEQ ID NO: 1320333 - RNA, 19 nt, Artificial Sequence
  Description of Artificial Sequence: Synthetic oligonucleotide
uagcagguggcaagcacgc

SEQ ID NO: 1320334 - RNA, 19 nt, Artificial Sequence
  Description of Artificial Sequence: Synthetic oligonucleotide
acgcuccacacccaguggg

SEQ ID NO: 1320335 - RNA, 19 nt, Artificial Sequence
  Description of Artificial Sequence: Synthetic oligonucleotide
aagaagagacugggccacc

SEQ ID NO: 1320336 - RNA, 19 nt, Artificial Sequence
  Description of Artificial Sequence: Synthetic oligonucleotide
ugucaaggugacagagcag

SEQ ID NO: 1320337 - RNA, 19 nt, Artificial Sequence
  Description of Artificial Sequence: Synthetic oligonucleotide
uuggcucacccauggaggc

SEQ ID NO: 1320338 - RNA, 19 nt, Artificial Sequence
  Description of Artificial Sequence: Synthetic oligonucleotide
ggcgagguaauacugcuug

SEQ ID NO: 1320339 - RNA, 19 nt, Artificial Sequence
  Description of Artificial Sequence: Synthetic oligonucleotide
ugcuccgugugucccagcc

SEQ ID NO: 1320340 - RNA, 19 nt, Artificial Sequence
  Description of Artificial Sequence: Synthetic oligonucleotide
gagacugugucccaaccaa

SEQ ID NO: 1320341 - RNA, 19 nt, Artificial Sequence
  Description of Artificial Sequence: Synthetic oligonucleotide
agaagcaagguuggcucac

SEQ ID NO: 1320342 - RNA, 19 nt, Artificial Sequence
  Description of Artificial Sequence: Synthetic oligonucleotide
aaguaccaaccagcagugc

SEQ ID NO: 1320343 - RNA, 19 nt, Artificial Sequence
  Description of Artificial Sequence: Synthetic oligonucleotide
cucggugacauuccgugug

SEQ ID NO: 1320344 - RNA, 19 nt, Artificial Sequence
  Description of Artificial Sequence: Synthetic oligonucleotide
gcugacgucaucaucgucc

SEQ ID NO: 1320345 - RNA, 19 nt, Artificial Sequence
  Description of Artificial Sequence: Synthetic oligonucleotide
ccaaaacccauucauuccc

SEQ ID NO: 1320346 - RNA, 19 nt, Artificial Sequence
  Description of Artificial Sequence: Synthetic oligonucleotide
gaagucgaggucacgcacc

SEQ ID NO: 1320347 - RNA, 19 nt, Artificial Sequence
  Description of Artificial Sequence: Synthetic oligonucleotide
cuggucgugagagugguug

SEQ ID NO: 1320348 - RNA, 19 nt, Artificial Sequence
  Description of Artificial Sequence: Synthetic oligonucleotide
ucccagaacuucaccuugc

SEQ ID NO: 1320349 - RNA, 19 nt, Artificial Sequence
  Description of Artificial Sequence: Synthetic oligonucleotide
ucgugagagugguuguagc

SEQ ID NO: 1320350 - RNA, 19 nt, Artificial Sequence
  Description of Artificial Sequence: Synthetic oligonucleotide
ggauucuaauuccuugggc

SEQ ID NO: 1320351 - RNA, 19 nt, Artificial Sequence
  Description of Artificial Sequence: Synthetic oligonucleotide
cugauagcuucagaugagc

SEQ ID NO: 1320352 - RNA, 19 nt, Artificial Sequence
  Description of Artificial Sequence: Synthetic oligonucleotide
auagaucaccggcgcgucg

SEQ ID NO: 1320353 - RNA, 19 nt, Artificial Sequence
  Description of Artificial Sequence: Synthetic oligonucleotide
ugucccaaccaagaagcga

SEQ ID NO: 1320354 - RNA, 19 nt, Artificial Sequence
  Description of Artificial Sequence: Synthetic oligonucleotide
uuccuuccagagcugcuga

SEQ ID NO: 1320355 - RNA, 19 nt, Artificial Sequence
  Description of Artificial Sequence: Synthetic oligonucleotide
ugagguguuagagcacgug

SEQ ID NO: 1320356 - RNA, 19 nt, Artificial Sequence
  Description of Artificial Sequence: Synthetic oligonucleotide
aaauagccaugggucagcu

SEQ ID NO: 1320357 - RNA, 19 nt, Artificial Sequence
  Description of Artificial Sequence: Synthetic oligonucleotide
agagcacgugccuggaacu

SEQ ID NO: 1320358 - RNA, 19 nt, Artificial Sequence
  Description of Artificial Sequence: Synthetic oligonucleotide
ccacacaugucccuuagag

SEQ ID NO: 1320359 - RNA, 19 nt, Artificial Sequence
  Description of Artificial Sequence: Synthetic oligonucleotide
guggcgauaacguuguccu

SEQ ID NO: 1320360 - RNA, 19 nt, Artificial Sequence
  Description of Artificial Sequence: Synthetic oligonucleotide
ucgaggucacgcaccagcu

SEQ ID NO: 1320361 - RNA, 19 nt, Artificial Sequence
  Description of Artificial Sequence: Synthetic oligonucleotide
ccuguagaagcaagguugg

SEQ ID NO: 1320362 - RNA, 19 nt, Artificial Sequence
  Description of Artificial Sequence: Synthetic oligonucleotide
aucggcucccacacgacac

SEQ ID NO: 1320363 - RNA, 19 nt, Artificial Sequence
  Description of Artificial Sequence: Synthetic oligonucleotide
cagucgucuccgcagcugg

SEQ ID NO: 1320364 - RNA, 19 nt, Artificial Sequence
  Description of Artificial Sequence: Synthetic oligonucleotide
cuucucaguguggugcucc

SEQ ID NO: 1320365 - RNA, 19 nt, Artificial Sequence
  Description of Artificial Sequence: Synthetic oligonucleotide
ugacgcucugcucgccccg

SEQ ID NO: 1320366 - RNA, 19 nt, Artificial Sequence
  Description of Artificial Sequence: Synthetic oligonucleotide
uccucguguuccucauagg

SEQ ID NO: 1320367 - RNA, 19 nt, Artificial Sequence
  Description of Artificial Sequence: Synthetic oligonucleotide
ccaauccacagcauacacg

SEQ ID NO: 1320368 - RNA, 19 nt, Artificial Sequence
  Description of Artificial Sequence: Synthetic oligonucleotide
ucuggcucaugcuccgugu

SEQ ID NO: 1320369 - RNA, 19 nt, Artificial Sequence
  Description of Artificial Sequence: Synthetic oligonucleotide
gacgcuccacacccagugg

SEQ ID NO: 1320370 - RNA, 19 nt, Artificial Sequence
  Description of Artificial Sequence: Synthetic oligonucleotide
ccggauucuaauuccuugg

SEQ ID NO: 1320371 - RNA, 19 nt, Artificial Sequence
  Description of Artificial Sequence: Synthetic oligonucleotide
caggaugacucugcugucg

SEQ ID NO: 1320372 - RNA, 19 nt, Artificial Sequence
  Description of Artificial Sequence: Synthetic oligonucleotide
aggccauagaucaccggcg

SEQ ID NO: 1320373 - RNA, 19 nt, Artificial Sequence
  Description of Artificial Sequence: Synthetic oligonucleotide
uaacguuguccugcagggg

SEQ ID NO: 1320374 - RNA, 19 nt, Artificial Sequence
  Description of Artificial Sequence: Synthetic oligonucleotide
ggcgauaacguuguccugc

SEQ ID NO: 1320375 - RNA, 19 nt, Artificial Sequence
  Description of Artificial Sequence: Synthetic oligonucleotide
acuagagcaguauguggua

SEQ ID NO: 1320376 - RNA, 19 nt, Artificial Sequence
  Description of Artificial Sequence: Synthetic oligonucleotide
cuagagcaguaugugguac

SEQ ID NO: 1320377 - RNA, 19 nt, Artificial Sequence
  Description of Artificial Sequence: Synthetic oligonucleotide
aucuaugauguggaucuga

SEQ ID NO: 1320378 - RNA, 19 nt, Artificial Sequence
  Description of Artificial Sequence: Synthetic oligonucleotide
aaucuaugauguggaucug

SEQ ID NO: 1320379 - RNA, 19 nt, Artificial Sequence
  Description of Artificial Sequence: Synthetic oligonucleotide
uccgugugucccagccucg

SEQ ID NO: 1320380 - RNA, 19 nt, Artificial Sequence
  Description of Artificial Sequence: Synthetic oligonucleotide
ggcucggugacauuccgug

SEQ ID NO: 1320381 - RNA, 19 nt, Artificial Sequence
  Description of Artificial Sequence: Synthetic oligonucleotide
ugauaaccagccucccguc

SEQ ID NO: 1320382 - RNA, 19 nt, Artificial Sequence
  Description of Artificial Sequence: Synthetic oligonucleotide
gacacucaugaaauguuaa

SEQ ID NO: 1320383 - RNA, 19 nt, Artificial Sequence
  Description of Artificial Sequence: Synthetic oligonucleotide
caccaucaauucaugccac

SEQ ID NO: 1320384 - RNA, 19 nt, Artificial Sequence
  Description of Artificial Sequence: Synthetic oligonucleotide
ucaguguggugcuccucug

SEQ ID NO: 1320385 - RNA, 19 nt, Artificial Sequence
  Description of Artificial Sequence: Synthetic oligonucleotide
caccaagaagagacugggc

SEQ ID NO: 1320386 - RNA, 19 nt, Artificial Sequence
  Description of Artificial Sequence: Synthetic oligonucleotide
cacgguucccucccgaguc

SEQ ID NO: 1320387 - RNA, 19 nt, Artificial Sequence
  Description of Artificial Sequence: Synthetic oligonucleotide
gucgugagagugguuguag

SEQ ID NO: 1320388 - RNA, 19 nt, Artificial Sequence
  Description of Artificial Sequence: Synthetic oligonucleotide
uagaucaccggcgcgucgu

SEQ ID NO: 1320389 - RNA, 19 nt, Artificial Sequence
  Description of Artificial Sequence: Synthetic oligonucleotide
cacaugucccuuagaguuc

SEQ ID NO: 1320390 - RNA, 19 nt, Artificial Sequence
  Description of Artificial Sequence: Synthetic oligonucleotide
cccguugucaaggugacag

SEQ ID NO: 1320391 - RNA, 19 nt, Artificial Sequence
  Description of Artificial Sequence: Synthetic oligonucleotide
cacccagugggagugcucc

SEQ ID NO: 1320392 - RNA, 19 nt, Artificial Sequence
  Description of Artificial Sequence: Synthetic oligonucleotide
gcugccggauucuaauucc

SEQ ID NO: 1320393 - RNA, 19 nt, Artificial Sequence
  Description of Artificial Sequence: Synthetic oligonucleotide
uugccgugagccccguugu

SEQ ID NO: 1320394 - RNA, 19 nt, Artificial Sequence
  Description of Artificial Sequence: Synthetic oligonucleotide
ucguaacucagggaagcaa

SEQ ID NO: 1320395 - RNA, 19 nt, Artificial Sequence
  Description of Artificial Sequence: Synthetic oligonucleotide
uugagguguuagagcacgu

SEQ ID NO: 1320396 - RNA, 19 nt, Artificial Sequence
  Description of Artificial Sequence: Synthetic oligonucleotide
gguggcgauaacguugucc

SEQ ID NO: 1320397 - RNA, 19 nt, Artificial Sequence
  Description of Artificial Sequence: Synthetic oligonucleotide
accagccucccgucguaac

SEQ ID NO: 1320398 - RNA, 19 nt, Artificial Sequence
  Description of Artificial Sequence: Synthetic oligonucleotide
ccaaccagcagugccacgg

SEQ ID NO: 1320399 - RNA, 19 nt, Artificial Sequence
  Description of Artificial Sequence: Synthetic oligonucleotide
caagguuggcucacccaug

SEQ ID NO: 1320400 - RNA, 19 nt, Artificial Sequence
  Description of Artificial Sequence: Synthetic oligonucleotide
ugccacgggccacuagagc

SEQ ID NO: 1320401 - RNA, 19 nt, Artificial Sequence
  Description of Artificial Sequence: Synthetic oligonucleotide
aagcacgccuuuaucugcu

SEQ ID NO: 1320402 - RNA, 19 nt, Artificial Sequence
  Description of Artificial Sequence: Synthetic oligonucleotide
gggaauuaccucauaccug

SEQ ID NO: 1320403 - RNA, 19 nt, Artificial Sequence
  Description of Artificial Sequence: Synthetic oligonucleotide
gccggauucuaauuccuug

SEQ ID NO: 1320404 - RNA, 19 nt, Artificial Sequence
  Description of Artificial Sequence: Synthetic oligonucleotide
guaccaaccagcagugcca

SEQ ID NO: 1320405 - RNA, 19 nt, Artificial Sequence
  Description of Artificial Sequence: Synthetic oligonucleotide
ucacccgcuugaugaagga

SEQ ID NO: 1320406 - RNA, 19 nt, Artificial Sequence
  Description of Artificial Sequence: Synthetic oligonucleotide
ugcccaugagcauucucua

SEQ ID NO: 1320407 - RNA, 19 nt, Artificial Sequence
  Description of Artificial Sequence: Synthetic oligonucleotide
ucggcucccacacgacaca

SEQ ID NO: 1320408 - RNA, 19 nt, Artificial Sequence
  Description of Artificial Sequence: Synthetic oligonucleotide
cgugagagugguuguagcg

SEQ ID NO: 1320409 - RNA, 19 nt, Artificial Sequence
  Description of Artificial Sequence: Synthetic oligonucleotide
cagcuggucgugagagugg

SEQ ID NO: 1320410 - RNA, 19 nt, Artificial Sequence
  Description of Artificial Sequence: Synthetic oligonucleotide
agccccguugucaagguga

SEQ ID NO: 1320411 - RNA, 19 nt, Artificial Sequence
  Description of Artificial Sequence: Synthetic oligonucleotide
uggucgugagagugguugu

SEQ ID NO: 1320412 - RNA, 19 nt, Artificial Sequence
  Description of Artificial Sequence: Synthetic oligonucleotide
cccaacacccuuagaacag

SEQ ID NO: 1320413 - RNA, 19 nt, Artificial Sequence
  Description of Artificial Sequence: Synthetic oligonucleotide
ucgucuccgcagcuggcga

SEQ ID NO: 1320414 - RNA, 19 nt, Artificial Sequence
  Description of Artificial Sequence: Synthetic oligonucleotide
gcaaauagccaugggucag

SEQ ID NO: 1320415 - RNA, 19 nt, Artificial Sequence
  Description of Artificial Sequence: Synthetic oligonucleotide
cugacgucaucaucgucca

SEQ ID NO: 1320416 - RNA, 19 nt, Artificial Sequence
  Description of Artificial Sequence: Synthetic oligonucleotide
uggcaagcacgccuuuauc

SEQ ID NO: 1320417 - RNA, 19 nt, Artificial Sequence
  Description of Artificial Sequence: Synthetic oligonucleotide
caggcucggugacauuccg

SEQ ID NO: 1320418 - RNA, 19 nt, Artificial Sequence
  Description of Artificial Sequence: Synthetic oligonucleotide
gucgucuccgcagcuggcg

SEQ ID NO: 1320419 - RNA, 19 nt, Artificial Sequence
  Description of Artificial Sequence: Synthetic oligonucleotide
cuaugcaguauaucuggcu

SEQ ID NO: 1320420 - RNA, 19 nt, Artificial Sequence
  Description of Artificial Sequence: Synthetic oligonucleotide
agacugugucccaaccaag

SEQ ID NO: 1320421 - RNA, 19 nt, Artificial Sequence
  Description of Artificial Sequence: Synthetic oligonucleotide
gccacgggccacuagagca

SEQ ID NO: 1320422 - RNA, 19 nt, Artificial Sequence
  Description of Artificial Sequence: Synthetic oligonucleotide
agaucaccggcgcgucguc

SEQ ID NO: 1320423 - RNA, 19 nt, Artificial Sequence
  Description of Artificial Sequence: Synthetic oligonucleotide
agccucgaagggugguguc

SEQ ID NO: 1320424 - RNA, 19 nt, Artificial Sequence
  Description of Artificial Sequence: Synthetic oligonucleotide
ugagccccguugucaaggu

SEQ ID NO: 1320425 - RNA, 19 nt, Artificial Sequence
  Description of Artificial Sequence: Synthetic oligonucleotide
caagaagcgaauggcaucu

SEQ ID NO: 1320426 - RNA, 19 nt, Artificial Sequence
  Description of Artificial Sequence: Synthetic oligonucleotide
uucaugccacaaggcaggc

SEQ ID NO: 1320427 - RNA, 19 nt, Artificial Sequence
  Description of Artificial Sequence: Synthetic oligonucleotide
cagcacaugccuggacucg

SEQ ID NO: 1320428 - RNA, 19 nt, Artificial Sequence
  Description of Artificial Sequence: Synthetic oligonucleotide
ccaagaagcgaauggcauc

SEQ ID NO: 1320429 - RNA, 19 nt, Artificial Sequence
  Description of Artificial Sequence: Synthetic oligonucleotide
ugcagucgucuccgcagcu

SEQ ID NO: 1320430 - RNA, 19 nt, Artificial Sequence
  Description of Artificial Sequence: Synthetic oligonucleotide
cauuccgugugucccagaa

SEQ ID NO: 1320431 - RNA, 19 nt, Artificial Sequence
  Description of Artificial Sequence: Synthetic oligonucleotide
ggccauagaucaccggcgc

SEQ ID NO: 1320432 - RNA, 19 nt, Artificial Sequence
  Description of Artificial Sequence: Synthetic oligonucleotide
uggcgauaacguuguccug

SEQ ID NO: 1320433 - RNA, 19 nt, Artificial Sequence
  Description of Artificial Sequence: Synthetic oligonucleotide
ucaugccacaaggcaggcc

SEQ ID NO: 1320434 - RNA, 19 nt, Artificial Sequence
  Description of Artificial Sequence: Synthetic oligonucleotide
uacacgcuguccucguguu

SEQ ID NO: 1320435 - RNA, 19 nt, Artificial Sequence
  Description of Artificial Sequence: Synthetic oligonucleotide
augaaauguuaaacuccca

SEQ ID NO: 1320436 - RNA, 19 nt, Artificial Sequence
  Description of Artificial Sequence: Synthetic oligonucleotide
ucgcugacgucaucaucgu

SEQ ID NO: 1320437 - RNA, 19 nt, Artificial Sequence
  Description of Artificial Sequence: Synthetic oligonucleotide
agcuggcgagguaauacug

SEQ ID NO: 1320438 - RNA, 19 nt, Artificial Sequence
  Description of Artificial Sequence: Synthetic oligonucleotide
agugguuguagcggacgcu

SEQ ID NO: 1320439 - RNA, 19 nt, Artificial Sequence
  Description of Artificial Sequence: Synthetic oligonucleotide
aggcccaauccacagcaua

SEQ ID NO: 1320440 - RNA, 19 nt, Artificial Sequence
  Description of Artificial Sequence: Synthetic oligonucleotide
agacugggccaccaucaau

SEQ ID NO: 1320441 - RNA, 19 nt, Artificial Sequence
  Description of Artificial Sequence: Synthetic oligonucleotide
ucgaaggguggugucacuu

SEQ ID NO: 1320442 - RNA, 19 nt, Artificial Sequence
  Description of Artificial Sequence: Synthetic oligonucleotide
gugucccaaccaagaagcg

SEQ ID NO: 1320443 - RNA, 19 nt, Artificial Sequence
  Description of Artificial Sequence: Synthetic oligonucleotide
gugaggaccagcuggucgu

SEQ ID NO: 1320444 - RNA, 19 nt, Artificial Sequence
  Description of Artificial Sequence: Synthetic oligonucleotide
agguggaaagacacucaug

SEQ ID NO: 1320445 - RNA, 19 nt, Artificial Sequence
  Description of Artificial Sequence: Synthetic oligonucleotide
ccuuagaacagugaacaga

SEQ ID NO: 1320446 - RNA, 19 nt, Artificial Sequence
  Description of Artificial Sequence: Synthetic oligonucleotide
agagcaguaugugguacuu

SEQ ID NO: 1320447 - RNA, 19 nt, Artificial Sequence
  Description of Artificial Sequence: Synthetic oligonucleotide
agcaaucggccaaaaccca

SEQ ID NO: 1320448 - RNA, 19 nt, Artificial Sequence
  Description of Artificial Sequence: Synthetic oligonucleotide
ucccgucguaacucaggga

SEQ ID NO: 1320449 - RNA, 19 nt, Artificial Sequence
  Description of Artificial Sequence: Synthetic oligonucleotide
cauagaucaccggcgcguc

SEQ ID NO: 1320450 - RNA, 19 nt, Artificial Sequence
  Description of Artificial Sequence: Synthetic oligonucleotide
gccauagaucaccggcgcg

SEQ ID NO: 1320451 - RNA, 19 nt, Artificial Sequence
  Description of Artificial Sequence: Synthetic oligonucleotide
guggugugggcuccaccgc

SEQ ID NO: 1320452 - RNA, 19 nt, Artificial Sequence
  Description of Artificial Sequence: Synthetic oligonucleotide
ucccaaccaagaagcgaau

SEQ ID NO: 1320453 - RNA, 19 nt, Artificial Sequence
  Description of Artificial Sequence: Synthetic oligonucleotide
cuggaacuccaggccauag

SEQ ID NO: 1320454 - RNA, 19 nt, Artificial Sequence
  Description of Artificial Sequence: Synthetic oligonucleotide
ggugaaccucagcuguccc

SEQ ID NO: 1320455 - RNA, 19 nt, Artificial Sequence
  Description of Artificial Sequence: Synthetic oligonucleotide
agucgucuccgcagcuggc

SEQ ID NO: 1320456 - RNA, 19 nt, Artificial Sequence
  Description of Artificial Sequence: Synthetic oligonucleotide
cagccucaccagcaaucgg

SEQ ID NO: 1320457 - RNA, 19 nt, Artificial Sequence
  Description of Artificial Sequence: Synthetic oligonucleotide
guuccuguagaagcaaggu

SEQ ID NO: 1320458 - RNA, 19 nt, Artificial Sequence
  Description of Artificial Sequence: Synthetic oligonucleotide
agcuggucgugagaguggu

SEQ ID NO: 1320459 - RNA, 19 nt, Artificial Sequence
  Description of Artificial Sequence: Synthetic oligonucleotide
cggauucuaauuccuuggg

SEQ ID NO: 1320460 - RNA, 19 nt, Artificial Sequence
  Description of Artificial Sequence: Synthetic oligonucleotide
ggcugccggauucuaauuc

SEQ ID NO: 1320461 - RNA, 19 nt, Artificial Sequence
  Description of Artificial Sequence: Synthetic oligonucleotide
agcauucucuaugcaguau

SEQ ID NO: 1320462 - RNA, 19 nt, Artificial Sequence
  Description of Artificial Sequence: Synthetic oligonucleotide
uggggacucuguugauaac

SEQ ID NO: 1320463 - RNA, 19 nt, Artificial Sequence
  Description of Artificial Sequence: Synthetic oligonucleotide
gaauuaccucauaccugca

SEQ ID NO: 1320464 - RNA, 19 nt, Artificial Sequence
  Description of Artificial Sequence: Synthetic oligonucleotide
acgcucugcucgccccgcc

SEQ ID NO: 1320465 - RNA, 19 nt, Artificial Sequence
  Description of Artificial Sequence: Synthetic oligonucleotide
uccgugugucccagaacuu

SEQ ID NO: 1320466 - RNA, 19 nt, Artificial Sequence
  Description of Artificial Sequence: Synthetic oligonucleotide
gucuccgcagcuggcgagg

SEQ ID NO: 1320467 - RNA, 19 nt, Artificial Sequence
  Description of Artificial Sequence: Synthetic oligonucleotide
gcagcuggcgagguaauac

SEQ ID NO: 1320468 - RNA, 19 nt, Artificial Sequence
  Description of Artificial Sequence: Synthetic oligonucleotide
gcuggcgagguaauacugc

SEQ ID NO: 1320469 - RNA, 19 nt, Artificial Sequence
  Description of Artificial Sequence: Synthetic oligonucleotide
cacacaugucccuuagagu

SEQ ID NO: 1320470 - RNA, 19 nt, Artificial Sequence
  Description of Artificial Sequence: Synthetic oligonucleotide
gaucaccggcgcgucgucc

SEQ ID NO: 1320471 - RNA, 19 nt, Artificial Sequence
  Description of Artificial Sequence: Synthetic oligonucleotide
cauucucuaugcaguauau

SEQ ID NO: 1320472 - RNA, 19 nt, Artificial Sequence
  Description of Artificial Sequence: Synthetic oligonucleotide
ugaggaccagcuggucgug

SEQ ID NO: 1320473 - RNA, 19 nt, Artificial Sequence
  Description of Artificial Sequence: Synthetic oligonucleotide
cccaauccacagcauacac

SEQ ID NO: 1320474 - RNA, 19 nt, Artificial Sequence
  Description of Artificial Sequence: Synthetic oligonucleotide
ggcccaauccacagcauac

SEQ ID NO: 1320475 - RNA, 19 nt, Artificial Sequence
  Description of Artificial Sequence: Synthetic oligonucleotide
uugagcuagccuggagguc

SEQ ID NO: 1320476 - RNA, 19 nt, Artificial Sequence
  Description of Artificial Sequence: Synthetic oligonucleotide
ccagaacuucaccuugcag

SEQ ID NO: 1320477 - RNA, 19 nt, Artificial Sequence
  Description of Artificial Sequence: Synthetic oligonucleotide
cacccgcuugaugaaggag

SEQ ID NO: 1320478 - RNA, 19 nt, Artificial Sequence
  Description of Artificial Sequence: Synthetic oligonucleotide
ugccacaaggcaggccugu

SEQ ID NO: 1320479 - RNA, 19 nt, Artificial Sequence
  Description of Artificial Sequence: Synthetic oligonucleotide
acgguucccucccgaguca

SEQ ID NO: 1320480 - RNA, 19 nt, Artificial Sequence
  Description of Artificial Sequence: Synthetic oligonucleotide
gaagcgaauggcaucuguu

SEQ ID NO: 1320481 - RNA, 19 nt, Artificial Sequence
  Description of Artificial Sequence: Synthetic oligonucleotide
gggccacuagagcaguaug

SEQ ID NO: 1320482 - RNA, 19 nt, Artificial Sequence
  Description of Artificial Sequence: Synthetic oligonucleotide
cauauuggacaggaugacu

SEQ ID NO: 1320483 - RNA, 19 nt, Artificial Sequence
  Description of Artificial Sequence: Synthetic oligonucleotide
cuggcgagguaauacugcu

SEQ ID NO: 1320484 - RNA, 19 nt, Artificial Sequence
  Description of Artificial Sequence: Synthetic oligonucleotide
ccucauaccugcagauuuc

SEQ ID NO: 1320485 - RNA, 19 nt, Artificial Sequence
  Description of Artificial Sequence: Synthetic oligonucleotide
uguccucguguuccucaua

SEQ ID NO: 1320486 - RNA, 19 nt, Artificial Sequence
  Description of Artificial Sequence: Synthetic oligonucleotide
guuagagcacgugccugga

SEQ ID NO: 1320487 - RNA, 19 nt, Artificial Sequence
  Description of Artificial Sequence: Synthetic oligonucleotide
gguguuagagcacgugccu

SEQ ID NO: 1320488 - RNA, 19 nt, Artificial Sequence
  Description of Artificial Sequence: Synthetic oligonucleotide
caucaucguccaccaggug

SEQ ID NO: 1320489 - RNA, 19 nt, Artificial Sequence
  Description of Artificial Sequence: Synthetic oligonucleotide
gaugcggcugucagccaga

SEQ ID NO: 1320490 - RNA, 19 nt, Artificial Sequence
  Description of Artificial Sequence: Synthetic oligonucleotide
caucggcucccacacgaca

SEQ ID NO: 1320491 - RNA, 19 nt, Artificial Sequence
  Description of Artificial Sequence: Synthetic oligonucleotide
ccauauuggacaggaugac

SEQ ID NO: 1320492 - RNA, 19 nt, Artificial Sequence
  Description of Artificial Sequence: Synthetic oligonucleotide
gguugaagucgaggucacg

SEQ ID NO: 1320493 - RNA, 19 nt, Artificial Sequence
  Description of Artificial Sequence: Synthetic oligonucleotide
gucguaacucagggaagca

SEQ ID NO: 1320494 - RNA, 19 nt, Artificial Sequence
  Description of Artificial Sequence: Synthetic oligonucleotide
uggcacugauaugccagau

SEQ ID NO: 1320495 - RNA, 19 nt, Artificial Sequence
  Description of Artificial Sequence: Synthetic oligonucleotide
uggcugccggauucuaauu

SEQ ID NO: 1320496 - RNA, 19 nt, Artificial Sequence
  Description of Artificial Sequence: Synthetic oligonucleotide
gcucaugcuccgugugucc

SEQ ID NO: 1320497 - RNA, 19 nt, Artificial Sequence
  Description of Artificial Sequence: Synthetic oligonucleotide
guuaaacucccaacacccu

SEQ ID NO: 1320498 - RNA, 19 nt, Artificial Sequence
  Description of Artificial Sequence: Synthetic oligonucleotide
uggcucacccauggaggca

SEQ ID NO: 1320499 - RNA, 19 nt, Artificial Sequence
  Description of Artificial Sequence: Synthetic oligonucleotide
cgcgucguccuccaugacg

SEQ ID NO: 1320500 - RNA, 19 nt, Artificial Sequence
  Description of Artificial Sequence: Synthetic oligonucleotide
cagccucccgucguaacuc

SEQ ID NO: 1320501 - RNA, 19 nt, Artificial Sequence
  Description of Artificial Sequence: Synthetic oligonucleotide
cgucguaacucagggaagc

SEQ ID NO: 1320502 - RNA, 19 nt, Artificial Sequence
  Description of Artificial Sequence: Synthetic oligonucleotide
acuucaccuugcagucguc

SEQ ID NO: 1320503 - RNA, 19 nt, Artificial Sequence
  Description of Artificial Sequence: Synthetic oligonucleotide
ccgcucacgccucaaugcc

SEQ ID NO: 1320504 - RNA, 19 nt, Artificial Sequence
  Description of Artificial Sequence: Synthetic oligonucleotide
ugccgugagccccguuguc

SEQ ID NO: 1320505 - RNA, 19 nt, Artificial Sequence
  Description of Artificial Sequence: Synthetic oligonucleotide
guggcugccggauucuaau

SEQ ID NO: 1320506 - RNA, 19 nt, Artificial Sequence
  Description of Artificial Sequence: Synthetic oligonucleotide
caccgccccgcggugaacc

SEQ ID NO: 1320507 - RNA, 19 nt, Artificial Sequence
  Description of Artificial Sequence: Synthetic oligonucleotide
gcgaauggcaucuguuucu

SEQ ID NO: 1320508 - RNA, 19 nt, Artificial Sequence
  Description of Artificial Sequence: Synthetic oligonucleotide
gcgauaacguuguccugca

SEQ ID NO: 1320509 - RNA, 19 nt, Artificial Sequence
  Description of Artificial Sequence: Synthetic oligonucleotide
acauuccgugugucccaga

SEQ ID NO: 1320510 - RNA, 19 nt, Artificial Sequence
  Description of Artificial Sequence: Synthetic oligonucleotide
cauagguggcgauaacguu

SEQ ID NO: 1320511 - RNA, 19 nt, Artificial Sequence
  Description of Artificial Sequence: Synthetic oligonucleotide
aaccagccucccgucguaa

SEQ ID NO: 1320512 - RNA, 19 nt, Artificial Sequence
  Description of Artificial Sequence: Synthetic oligonucleotide
cagccuggcuugagcuagc

SEQ ID NO: 1320513 - RNA, 19 nt, Artificial Sequence
  Description of Artificial Sequence: Synthetic oligonucleotide
cacaggccacauugccgug

SEQ ID NO: 1320514 - RNA, 19 nt, Artificial Sequence
  Description of Artificial Sequence: Synthetic oligonucleotide
gacgcucugcucgccccgc

SEQ ID NO: 1320515 - RNA, 19 nt, Artificial Sequence
  Description of Artificial Sequence: Synthetic oligonucleotide
caaagggaauuaccucaua

SEQ ID NO: 1320516 - RNA, 19 nt, Artificial Sequence
  Description of Artificial Sequence: Synthetic oligonucleotide
cucauaccugcagauuucu

SEQ ID NO: 1320517 - RNA, 19 nt, Artificial Sequence
  Description of Artificial Sequence: Synthetic oligonucleotide
ggcucaugcuccguguguc

SEQ ID NO: 1320518 - RNA, 19 nt, Artificial Sequence
  Description of Artificial Sequence: Synthetic oligonucleotide
gggucugcgcagugcuugc

SEQ ID NO: 1320519 - RNA, 19 nt, Artificial Sequence
  Description of Artificial Sequence: Synthetic oligonucleotide
cagcuggcgagguaauacu

SEQ ID NO: 1320520 - RNA, 19 nt, Artificial Sequence
  Description of Artificial Sequence: Synthetic oligonucleotide
agucgaggucacgcaccag

SEQ ID NO: 1320521 - RNA, 19 nt, Artificial Sequence
  Description of Artificial Sequence: Synthetic oligonucleotide
aggaugcggcugucagcca

SEQ ID NO: 1320522 - RNA, 19 nt, Artificial Sequence
  Description of Artificial Sequence: Synthetic oligonucleotide
acgcaccagcugcccauga

SEQ ID NO: 1320523 - RNA, 19 nt, Artificial Sequence
  Description of Artificial Sequence: Synthetic oligonucleotide
caaucggccaaaacccauu

SEQ ID NO: 1320524 - RNA, 19 nt, Artificial Sequence
  Description of Artificial Sequence: Synthetic oligonucleotide
cugccggauucuaauuccu

SEQ ID NO: 1320525 - RNA, 19 nt, Artificial Sequence
  Description of Artificial Sequence: Synthetic oligonucleotide
cccaaccaagaagcgaaug

SEQ ID NO: 1320526 - RNA, 19 nt, Artificial Sequence
  Description of Artificial Sequence: Synthetic oligonucleotide
acacgacacaggccacauu

SEQ ID NO: 1320527 - RNA, 19 nt, Artificial Sequence
  Description of Artificial Sequence: Synthetic oligonucleotide
ccucguguuccucauaggu

SEQ ID NO: 1320528 - RNA, 19 nt, Artificial Sequence
  Description of Artificial Sequence: Synthetic oligonucleotide
ccgaguccagccucaccag

SEQ ID NO: 1320529 - RNA, 19 nt, Artificial Sequence
  Description of Artificial Sequence: Synthetic oligonucleotide
augccacaaggcaggccug

SEQ ID NO: 1320530 - RNA, 19 nt, Artificial Sequence
  Description of Artificial Sequence: Synthetic oligonucleotide
cguguuccucauagguggc

SEQ ID NO: 1320531 - RNA, 19 nt, Artificial Sequence
  Description of Artificial Sequence: Synthetic oligonucleotide
cacgcaccagcugcccaug

SEQ ID NO: 1320532 - RNA, 19 nt, Artificial Sequence
  Description of Artificial Sequence: Synthetic oligonucleotide
gguucccucccgagucagg

SEQ ID NO: 1320533 - RNA, 19 nt, Artificial Sequence
  Description of Artificial Sequence: Synthetic oligonucleotide
ggaccagcuggucgugaga

SEQ ID NO: 1320534 - RNA, 19 nt, Artificial Sequence
  Description of Artificial Sequence: Synthetic oligonucleotide
cccgcggugaaccucagcu

SEQ ID NO: 1320535 - RNA, 19 nt, Artificial Sequence
  Description of Artificial Sequence: Synthetic oligonucleotide
ggccacuagagcaguaugu

SEQ ID NO: 1320536 - RNA, 19 nt, Artificial Sequence
  Description of Artificial Sequence: Synthetic oligonucleotide
gcugcccaugagcauucuc

SEQ ID NO: 1320537 - RNA, 19 nt, Artificial Sequence
  Description of Artificial Sequence: Synthetic oligonucleotide
cgcucacgccucaaugccc

SEQ ID NO: 1320538 - RNA, 19 nt, Artificial Sequence
  Description of Artificial Sequence: Synthetic oligonucleotide
ccucauagguggcgauaac

SEQ ID NO: 1320539 - RNA, 19 nt, Artificial Sequence
  Description of Artificial Sequence: Synthetic oligonucleotide
acguuguccugcagggguu

SEQ ID NO: 1320540 - RNA, 19 nt, Artificial Sequence
  Description of Artificial Sequence: Synthetic oligonucleotide
caaugcccgaguccagccu

SEQ ID NO: 1320541 - RNA, 19 nt, Artificial Sequence
  Description of Artificial Sequence: Synthetic oligonucleotide
ccgcggugaaccucagcug

SEQ ID NO: 1320542 - RNA, 19 nt, Artificial Sequence
  Description of Artificial Sequence: Synthetic oligonucleotide
gccgugagccccguuguca

SEQ ID NO: 1320543 - RNA, 19 nt, Artificial Sequence
  Description of Artificial Sequence: Synthetic oligonucleotide
caccggcgcgucguccucc

SEQ ID NO: 1320544 - RNA, 19 nt, Artificial Sequence
  Description of Artificial Sequence: Synthetic oligonucleotide
ucagugcccuggggacucu

SEQ ID NO: 1320545 - RNA, 19 nt, Artificial Sequence
  Description of Artificial Sequence: Synthetic oligonucleotide
ggcugucugaaguuuuguu

SEQ ID NO: 1320546 - RNA, 19 nt, Artificial Sequence
  Description of Artificial Sequence: Synthetic oligonucleotide
cggugaaccucagcugucc

SEQ ID NO: 1320547 - RNA, 19 nt, Artificial Sequence
  Description of Artificial Sequence: Synthetic oligonucleotide
cagguggcaagcacgccuu

SEQ ID NO: 1320548 - RNA, 19 nt, Artificial Sequence
  Description of Artificial Sequence: Synthetic oligonucleotide
cuucagugcccuggggacu

SEQ ID NO: 1320549 - RNA, 19 nt, Artificial Sequence
  Description of Artificial Sequence: Synthetic oligonucleotide
ccagccucgaaggguggug

SEQ ID NO: 1320550 - RNA, 19 nt, Artificial Sequence
  Description of Artificial Sequence: Synthetic oligonucleotide
gcacgugccuggaacucca

SEQ ID NO: 1320551 - RNA, 19 nt, Artificial Sequence
  Description of Artificial Sequence: Synthetic oligonucleotide
ccauagaucaccggcgcgu

SEQ ID NO: 1320552 - RNA, 19 nt, Artificial Sequence
  Description of Artificial Sequence: Synthetic oligonucleotide
gcauacacgcuguccucgu

SEQ ID NO: 1320553 - RNA, 19 nt, Artificial Sequence
  Description of Artificial Sequence: Synthetic oligonucleotide
gacucguggcugccggauu

SEQ ID NO: 1320554 - RNA, 19 nt, Artificial Sequence
  Description of Artificial Sequence: Synthetic oligonucleotide
ggaugacucugcugucgcu

SEQ ID NO: 1320555 - RNA, 19 nt, Artificial Sequence
  Description of Artificial Sequence: Synthetic oligonucleotide
ggucgugagagugguugua

SEQ ID NO: 1320556 - RNA, 19 nt, Artificial Sequence
  Description of Artificial Sequence: Synthetic oligonucleotide
cagugcccuggggacucug

SEQ ID NO: 1320557 - RNA, 19 nt, Artificial Sequence
  Description of Artificial Sequence: Synthetic oligonucleotide
cgucuccgcagcuggcgag

SEQ ID NO: 1320558 - RNA, 19 nt, Artificial Sequence
  Description of Artificial Sequence: Synthetic oligonucleotide
gcgagguaauacugcuugu

SEQ ID NO: 1320559 - RNA, 19 nt, Artificial Sequence
  Description of Artificial Sequence: Synthetic oligonucleotide
ccguugucaaggugacaga

SEQ ID NO: 1320560 - RNA, 19 nt, Artificial Sequence
  Description of Artificial Sequence: Synthetic oligonucleotide
agcggacgcuccacaccca

SEQ ID NO: 1320561 - RNA, 19 nt, Artificial Sequence
  Description of Artificial Sequence: Synthetic oligonucleotide
cacacgacacaggccacau

SEQ ID NO: 1320562 - RNA, 19 nt, Artificial Sequence
  Description of Artificial Sequence: Synthetic oligonucleotide
gcucggugacauuccgugu

SEQ ID NO: 1320563 - RNA, 19 nt, Artificial Sequence
  Description of Artificial Sequence: Synthetic oligonucleotide
ccucaccagcaaucggcca

SEQ ID NO: 1320564 - RNA, 19 nt, Artificial Sequence
  Description of Artificial Sequence: Synthetic oligonucleotide
cagccucgaaggguggugu

SEQ ID NO: 1320565 - RNA, 19 nt, Artificial Sequence
  Description of Artificial Sequence: Synthetic oligonucleotide
ccgugagccccguugucaa

SEQ ID NO: 1320566 - RNA, 19 nt, Artificial Sequence
  Description of Artificial Sequence: Synthetic oligonucleotide
ggucugcgcagugcuugca

SEQ ID NO: 1320567 - RNA, 19 nt, Artificial Sequence
  Description of Artificial Sequence: Synthetic oligonucleotide
gcccaugagcauucucuau

SEQ ID NO: 1320568 - RNA, 19 nt, Artificial Sequence
  Description of Artificial Sequence: Synthetic oligonucleotide
caugucccuuagaguuccu

SEQ ID NO: 1320569 - RNA, 19 nt, Artificial Sequence
  Description of Artificial Sequence: Synthetic oligonucleotide
gccacaaggcaggccuguc

SEQ ID NO: 1320570 - RNA, 19 nt, Artificial Sequence
  Description of Artificial Sequence: Synthetic oligonucleotide
cggcgcgucguccuccaug

SEQ ID NO: 1320571 - RNA, 19 nt, Artificial Sequence
  Description of Artificial Sequence: Synthetic oligonucleotide
ccgcuugaugaaggaggac

SEQ ID NO: 1320572 - RNA, 19 nt, Artificial Sequence
  Description of Artificial Sequence: Synthetic oligonucleotide
ccacacgacacaggccaca

SEQ ID NO: 1320573 - RNA, 19 nt, Artificial Sequence
  Description of Artificial Sequence: Synthetic oligonucleotide
ggaggucccacagcaggau

SEQ ID NO: 1320574 - RNA, 19 nt, Artificial Sequence
  Description of Artificial Sequence: Synthetic oligonucleotide
ccagccucccgucguaacu

SEQ ID NO: 1320575 - RNA, 19 nt, Artificial Sequence
  Description of Artificial Sequence: Synthetic oligonucleotide
caccagcaaucggccaaaa

SEQ ID NO: 1320576 - RNA, 19 nt, Artificial Sequence
  Description of Artificial Sequence: Synthetic oligonucleotide
cacgggccacuagagcagu

SEQ ID NO: 1320577 - RNA, 19 nt, Artificial Sequence
  Description of Artificial Sequence: Synthetic oligonucleotide
ggacucguggcugccggau

SEQ ID NO: 1320578 - RNA, 19 nt, Artificial Sequence
  Description of Artificial Sequence: Synthetic oligonucleotide
cuccgcagcuggcgaggua

SEQ ID NO: 1320579 - RNA, 19 nt, Artificial Sequence
  Description of Artificial Sequence: Synthetic oligonucleotide
ccccgcggugaaccucagc

SEQ ID NO: 1320580 - RNA, 19 nt, Artificial Sequence
  Description of Artificial Sequence: Synthetic oligonucleotide
ccgugugucccagccucga

SEQ ID NO: 1320581 - RNA, 19 nt, Artificial Sequence
  Description of Artificial Sequence: Synthetic oligonucleotide
gcagugcuugcagggucgu

SEQ ID NO: 1320582 - RNA, 19 nt, Artificial Sequence
  Description of Artificial Sequence: Synthetic oligonucleotide
gccccgcggugaaccucag

SEQ ID NO: 1320583 - RNA, 19 nt, Artificial Sequence
  Description of Artificial Sequence: Synthetic oligonucleotide
gcagugccacgggccacua

SEQ ID NO: 1320584 - RNA, 19 nt, Artificial Sequence
  Description of Artificial Sequence: Synthetic oligonucleotide
ccccguugucaaggugaca

SEQ ID NO: 1320585 - RNA, 19 nt, Artificial Sequence
  Description of Artificial Sequence: Synthetic oligonucleotide
ccaccgccccgcggugaac

SEQ ID NO: 1320586 - RNA, 19 nt, Artificial Sequence
  Description of Artificial Sequence: Synthetic oligonucleotide
cgggccacuagagcaguau

SEQ ID NO: 1320587 - RNA, 19 nt, Artificial Sequence
  Description of Artificial Sequence: Synthetic oligonucleotide
gcuggucgugagagugguu

SEQ ID NO: 1320588 - RNA, 19 nt, Artificial Sequence
  Description of Artificial Sequence: Synthetic oligonucleotide
cgcagcuggcgagguaaua

SEQ ID NO: 1320589 - RNA, 19 nt, Artificial Sequence
  Description of Artificial Sequence: Synthetic oligonucleotide
ccgcagcuggcgagguaau

SEQ ID NO: 1320590 - RNA, 19 nt, Artificial Sequence
  Description of Artificial Sequence: Synthetic oligonucleotide
ccgccgcucacgccucaau

SEQ ID NO: 1320591 - RNA, 19 nt, Artificial Sequence
  Description of Artificial Sequence: Synthetic oligonucleotide
ccggcgcgucguccuccau

SEQ ID NO: 1320592 - RNA, 19 nt, Artificial Sequence
  Description of Artificial Sequence: Synthetic oligonucleotide
aaaauagugauuucuauac

SEQ ID NO: 1320593 - RNA, 19 nt, Artificial Sequence
  Description of Artificial Sequence: Synthetic oligonucleotide
uuuaauugcacuuauacca

SEQ ID NO: 1320594 - RNA, 19 nt, Artificial Sequence
  Description of Artificial Sequence: Synthetic oligonucleotide
aaacaucuaucacagaacg

SEQ ID NO: 1320595 - RNA, 19 nt, Artificial Sequence
  Description of Artificial Sequence: Synthetic oligonucleotide
ugcacuuauaccaugaaag

SEQ ID NO: 1320596 - RNA, 19 nt, Artificial Sequence
  Description of Artificial Sequence: Synthetic oligonucleotide
aacgggaacggauaaggcc

SEQ ID NO: 1320597 - RNA, 19 nt, Artificial Sequence
  Description of Artificial Sequence: Synthetic oligonucleotide
agaauaaguuaacaguucg

SEQ ID NO: 1320598 - RNA, 19 nt, Artificial Sequence
  Description of Artificial Sequence: Synthetic oligonucleotide
augucuuaggcuuagcucg

SEQ ID NO: 1320599 - RNA, 19 nt, Artificial Sequence
  Description of Artificial Sequence: Synthetic oligonucleotide
uaaacuaccacgcgcgugg

SEQ ID NO: 1320600 - RNA, 19 nt, Artificial Sequence
  Description of Artificial Sequence: Synthetic oligonucleotide
aaguuaacaguucgcaggg

SEQ ID NO: 1320601 - RNA, 19 nt, Artificial Sequence
  Description of Artificial Sequence: Synthetic oligonucleotide
uuuguaucaauguuugcag

SEQ ID NO: 1320602 - RNA, 19 nt, Artificial Sequence
  Description of Artificial Sequence: Synthetic oligonucleotide
ugcucaaucagauaguaca

SEQ ID NO: 1320603 - RNA, 19 nt, Artificial Sequence
  Description of Artificial Sequence: Synthetic oligonucleotide
aaaacgggaacggauaagg

SEQ ID NO: 1320604 - RNA, 19 nt, Artificial Sequence
  Description of Artificial Sequence: Synthetic oligonucleotide
ugauuucuauacaauaggc

SEQ ID NO: 1320605 - RNA, 19 nt, Artificial Sequence
  Description of Artificial Sequence: Synthetic oligonucleotide
uauacaauaggccaguauu

SEQ ID NO: 1320606 - RNA, 19 nt, Artificial Sequence
  Description of Artificial Sequence: Synthetic oligonucleotide
agaacgaagacacugagaa

SEQ ID NO: 1320607 - RNA, 19 nt, Artificial Sequence
  Description of Artificial Sequence: Synthetic oligonucleotide
aaaacagcacacuaaacua

SEQ ID NO: 1320608 - RNA, 19 nt, Artificial Sequence
  Description of Artificial Sequence: Synthetic oligonucleotide
acuuauaccaugaaagggg

SEQ ID NO: 1320609 - RNA, 19 nt, Artificial Sequence
  Description of Artificial Sequence: Synthetic oligonucleotide
cuaaucacacaauaguuac

SEQ ID NO: 1320610 - RNA, 19 nt, Artificial Sequence
  Description of Artificial Sequence: Synthetic oligonucleotide
agcagaauaaguuaacagu

SEQ ID NO: 1320611 - RNA, 19 nt, Artificial Sequence
  Description of Artificial Sequence: Synthetic oligonucleotide
uuucuauacaauaggccag

SEQ ID NO: 1320612 - RNA, 19 nt, Artificial Sequence
  Description of Artificial Sequence: Synthetic oligonucleotide
acacuaaacuaccacgcgc

SEQ ID NO: 1320613 - RNA, 19 nt, Artificial Sequence
  Description of Artificial Sequence: Synthetic oligonucleotide
cuuuaauugcacuuauacc

SEQ ID NO: 1320614 - RNA, 19 nt, Artificial Sequence
  Description of Artificial Sequence: Synthetic oligonucleotide
acggauaaggccaugaugg

SEQ ID NO: 1320615 - RNA, 19 nt, Artificial Sequence
  Description of Artificial Sequence: Synthetic oligonucleotide
aacgaagacacugagaaaa

SEQ ID NO: 1320616 - RNA, 19 nt, Artificial Sequence
  Description of Artificial Sequence: Synthetic oligonucleotide
gugauuucuauacaauagg

SEQ ID NO: 1320617 - RNA, 19 nt, Artificial Sequence
  Description of Artificial Sequence: Synthetic oligonucleotide
uguuccauaaacaucuauc

SEQ ID NO: 1320618 - RNA, 19 nt, Artificial Sequence
  Description of Artificial Sequence: Synthetic oligonucleotide
agcacacuaaacuaccacg

SEQ ID NO: 1320619 - RNA, 19 nt, Artificial Sequence
  Description of Artificial Sequence: Synthetic oligonucleotide
aaaagguagaaaacagcac

SEQ ID NO: 1320620 - RNA, 19 nt, Artificial Sequence
  Description of Artificial Sequence: Synthetic oligonucleotide
aaagcuguagcacgcggag

SEQ ID NO: 1320621 - RNA, 19 nt, Artificial Sequence
  Description of Artificial Sequence: Synthetic oligonucleotide
uaaacaucuaucacagaac

SEQ ID NO: 1320622 - RNA, 19 nt, Artificial Sequence
  Description of Artificial Sequence: Synthetic oligonucleotide
gaaaacagcacacuaaacu

SEQ ID NO: 1320623 - RNA, 19 nt, Artificial Sequence
  Description of Artificial Sequence: Synthetic oligonucleotide
aauaugccccucucugggc

SEQ ID NO: 1320624 - RNA, 19 nt, Artificial Sequence
  Description of Artificial Sequence: Synthetic oligonucleotide
gauaaggccaugaugguug

SEQ ID NO: 1320625 - RNA, 19 nt, Artificial Sequence
  Description of Artificial Sequence: Synthetic oligonucleotide
uauaccaugaaaggggagc

SEQ ID NO: 1320626 - RNA, 19 nt, Artificial Sequence
  Description of Artificial Sequence: Synthetic oligonucleotide
aacggauaaggccaugaug

SEQ ID NO: 1320627 - RNA, 19 nt, Artificial Sequence
  Description of Artificial Sequence: Synthetic oligonucleotide
cuuaggcuuagcucgaggg

SEQ ID NO: 1320628 - RNA, 19 nt, Artificial Sequence
  Description of Artificial Sequence: Synthetic oligonucleotide
aagguagaaaacagcacac

SEQ ID NO: 1320629 - RNA, 19 nt, Artificial Sequence
  Description of Artificial Sequence: Synthetic oligonucleotide
ucuaucacagaacgaagac

SEQ ID NO: 1320630 - RNA, 19 nt, Artificial Sequence
  Description of Artificial Sequence: Synthetic oligonucleotide
aaagccagggagcagaaua

SEQ ID NO: 1320631 - RNA, 19 nt, Artificial Sequence
  Description of Artificial Sequence: Synthetic oligonucleotide
cacacaauaguuacuuggg

SEQ ID NO: 1320632 - RNA, 19 nt, Artificial Sequence
  Description of Artificial Sequence: Synthetic oligonucleotide
agaaggaccacuugaggag

SEQ ID NO: 1320633 - RNA, 19 nt, Artificial Sequence
  Description of Artificial Sequence: Synthetic oligonucleotide
uagaaggaccacuugagga

SEQ ID NO: 1320634 - RNA, 19 nt, Artificial Sequence
  Description of Artificial Sequence: Synthetic oligonucleotide
cacuaaacuaccacgcgcg

SEQ ID NO: 1320635 - RNA, 19 nt, Artificial Sequence
  Description of Artificial Sequence: Synthetic oligonucleotide
aacgcugcaccacacgguc

SEQ ID NO: 1320636 - RNA, 19 nt, Artificial Sequence
  Description of Artificial Sequence: Synthetic oligonucleotide
ucagauaguacauguacuc

SEQ ID NO: 1320637 - RNA, 19 nt, Artificial Sequence
  Description of Artificial Sequence: Synthetic oligonucleotide
ucucccaugacugcgauug

SEQ ID NO: 1320638 - RNA, 19 nt, Artificial Sequence
  Description of Artificial Sequence: Synthetic oligonucleotide
uuaacaguucgcaggggag

SEQ ID NO: 1320639 - RNA, 19 nt, Artificial Sequence
  Description of Artificial Sequence: Synthetic oligonucleotide
aggugcaacacccacagcu

SEQ ID NO: 1320640 - RNA, 19 nt, Artificial Sequence
  Description of Artificial Sequence: Synthetic oligonucleotide
ucccggauuaccauggagc

SEQ ID NO: 1320641 - RNA, 19 nt, Artificial Sequence
  Description of Artificial Sequence: Synthetic oligonucleotide
uguaccggcuccaugugag

SEQ ID NO: 1320642 - RNA, 19 nt, Artificial Sequence
  Description of Artificial Sequence: Synthetic oligonucleotide
aaucacacaauaguuacuu

SEQ ID NO: 1320643 - RNA, 19 nt, Artificial Sequence
  Description of Artificial Sequence: Synthetic oligonucleotide
gaugucuuaggcuuagcuc

SEQ ID NO: 1320644 - RNA, 19 nt, Artificial Sequence
  Description of Artificial Sequence: Synthetic oligonucleotide
uuaauugcacuuauaccau

SEQ ID NO: 1320645 - RNA, 19 nt, Artificial Sequence
  Description of Artificial Sequence: Synthetic oligonucleotide
acaauaugccccucucugg

SEQ ID NO: 1320646 - RNA, 19 nt, Artificial Sequence
  Description of Artificial Sequence: Synthetic oligonucleotide
agggccugcacgaagaggc

SEQ ID NO: 1320647 - RNA, 19 nt, Artificial Sequence
  Description of Artificial Sequence: Synthetic oligonucleotide
acgugugucgcuccgugcc

SEQ ID NO: 1320648 - RNA, 19 nt, Artificial Sequence
  Description of Artificial Sequence: Synthetic oligonucleotide
cacuuauaccaugaaaggg

SEQ ID NO: 1320649 - RNA, 19 nt, Artificial Sequence
  Description of Artificial Sequence: Synthetic oligonucleotide
uucgguucugcccagccca

SEQ ID NO: 1320650 - RNA, 19 nt, Artificial Sequence
  Description of Artificial Sequence: Synthetic oligonucleotide
uuaggcuuagcucgagggc

SEQ ID NO: 1320651 - RNA, 19 nt, Artificial Sequence
  Description of Artificial Sequence: Synthetic oligonucleotide
gaugucuuguggcagguca

SEQ ID NO: 1320652 - RNA, 19 nt, Artificial Sequence
  Description of Artificial Sequence: Synthetic oligonucleotide
acaucuaucacagaacgaa

SEQ ID NO: 1320653 - RNA, 19 nt, Artificial Sequence
  Description of Artificial Sequence: Synthetic oligonucleotide
acaaaauagugauuucuau

SEQ ID NO: 1320654 - RNA, 19 nt, Artificial Sequence
  Description of Artificial Sequence: Synthetic oligonucleotide
caauaugccccucucuggg

SEQ ID NO: 1320655 - RNA, 19 nt, Artificial Sequence
  Description of Artificial Sequence: Synthetic oligonucleotide
cuuuguaucaauguuugca

SEQ ID NO: 1320656 - RNA, 19 nt, Artificial Sequence
  Description of Artificial Sequence: Synthetic oligonucleotide
uaaggcacgucuuuguauc

SEQ ID NO: 1320657 - RNA, 19 nt, Artificial Sequence
  Description of Artificial Sequence: Synthetic oligonucleotide
caaacgcugcaccacacgg

SEQ ID NO: 1320658 - RNA, 19 nt, Artificial Sequence
  Description of Artificial Sequence: Synthetic oligonucleotide
aaacgggaacggauaaggc

SEQ ID NO: 1320659 - RNA, 19 nt, Artificial Sequence
  Description of Artificial Sequence: Synthetic oligonucleotide
acugagaaaacgggaacgg

SEQ ID NO: 1320660 - RNA, 19 nt, Artificial Sequence
  Description of Artificial Sequence: Synthetic oligonucleotide
agauaguacauguacucau

SEQ ID NO: 1320661 - RNA, 19 nt, Artificial Sequence
  Description of Artificial Sequence: Synthetic oligonucleotide
ucuuaggcuuagcucgagg

SEQ ID NO: 1320662 - RNA, 19 nt, Artificial Sequence
  Description of Artificial Sequence: Synthetic oligonucleotide
uuagcucgagggcagggcc

SEQ ID NO: 1320663 - RNA, 19 nt, Artificial Sequence
  Description of Artificial Sequence: Synthetic oligonucleotide
uagugauuucuauacaaua

SEQ ID NO: 1320664 - RNA, 19 nt, Artificial Sequence
  Description of Artificial Sequence: Synthetic oligonucleotide
ugcgauuggggucucgccc

SEQ ID NO: 1320665 - RNA, 19 nt, Artificial Sequence
  Description of Artificial Sequence: Synthetic oligonucleotide
gucacaagcugauagggca

SEQ ID NO: 1320666 - RNA, 19 nt, Artificial Sequence
  Description of Artificial Sequence: Synthetic oligonucleotide
guccaagggauucagcgag

SEQ ID NO: 1320667 - RNA, 19 nt, Artificial Sequence
  Description of Artificial Sequence: Synthetic oligonucleotide
uuauaccaugaaaggggag

SEQ ID NO: 1320668 - RNA, 19 nt, Artificial Sequence
  Description of Artificial Sequence: Synthetic oligonucleotide
aggaccauacccaaaagcu

SEQ ID NO: 1320669 - RNA, 19 nt, Artificial Sequence
  Description of Artificial Sequence: Synthetic oligonucleotide
gauuguaccggcuccaugu

SEQ ID NO: 1320670 - RNA, 19 nt, Artificial Sequence
  Description of Artificial Sequence: Synthetic oligonucleotide
ucaauguuugcagcuucgg

SEQ ID NO: 1320671 - RNA, 19 nt, Artificial Sequence
  Description of Artificial Sequence: Synthetic oligonucleotide
cucacaacgccguccagcc

SEQ ID NO: 1320672 - RNA, 19 nt, Artificial Sequence
  Description of Artificial Sequence: Synthetic oligonucleotide
uucccugucacagggaccc

SEQ ID NO: 1320673 - RNA, 19 nt, Artificial Sequence
  Description of Artificial Sequence: Synthetic oligonucleotide
gcacuuauaccaugaaagg

SEQ ID NO: 1320674 - RNA, 19 nt, Artificial Sequence
  Description of Artificial Sequence: Synthetic oligonucleotide
uugaaguccugcuccaaac

SEQ ID NO: 1320675 - RNA, 19 nt, Artificial Sequence
  Description of Artificial Sequence: Synthetic oligonucleotide
ugugcaaagccagggagca

SEQ ID NO: 1320676 - RNA, 19 nt, Artificial Sequence
  Description of Artificial Sequence: Synthetic oligonucleotide
agcggcacucacuaaucac

SEQ ID NO: 1320677 - RNA, 19 nt, Artificial Sequence
  Description of Artificial Sequence: Synthetic oligonucleotide
caggaccauacccaaaagc

SEQ ID NO: 1320678 - RNA, 19 nt, Artificial Sequence
  Description of Artificial Sequence: Synthetic oligonucleotide
cacacuaaacuaccacgcg

SEQ ID NO: 1320679 - RNA, 19 nt, Artificial Sequence
  Description of Artificial Sequence: Synthetic oligonucleotide
gaagccggaacuacccugg

SEQ ID NO: 1320680 - RNA, 19 nt, Artificial Sequence
  Description of Artificial Sequence: Synthetic oligonucleotide
uugcacuuauaccaugaaa

SEQ ID NO: 1320681 - RNA, 19 nt, Artificial Sequence
  Description of Artificial Sequence: Synthetic oligonucleotide
uaugagcuggggcaggaaa

SEQ ID NO: 1320682 - RNA, 19 nt, Artificial Sequence
  Description of Artificial Sequence: Synthetic oligonucleotide
gaaccuggcucacaacgcc

SEQ ID NO: 1320683 - RNA, 19 nt, Artificial Sequence
  Description of Artificial Sequence: Synthetic oligonucleotide
agaaccuggcucacaacgc

SEQ ID NO: 1320684 - RNA, 19 nt, Artificial Sequence
  Description of Artificial Sequence: Synthetic oligonucleotide
ggauacuuucaccacuggg

SEQ ID NO: 1320685 - RNA, 19 nt, Artificial Sequence
  Description of Artificial Sequence: Synthetic oligonucleotide
uuaaggcacgucuuuguau

SEQ ID NO: 1320686 - RNA, 19 nt, Artificial Sequence
  Description of Artificial Sequence: Synthetic oligonucleotide
uucacaauaugccccucuc

SEQ ID NO: 1320687 - RNA, 19 nt, Artificial Sequence
  Description of Artificial Sequence: Synthetic oligonucleotide
cuuauaccaugaaagggga

SEQ ID NO: 1320688 - RNA, 19 nt, Artificial Sequence
  Description of Artificial Sequence: Synthetic oligonucleotide
cacaacgccguccagccag

SEQ ID NO: 1320689 - RNA, 19 nt, Artificial Sequence
  Description of Artificial Sequence: Synthetic oligonucleotide
uggauacuuucaccacugg

SEQ ID NO: 1320690 - RNA, 19 nt, Artificial Sequence
  Description of Artificial Sequence: Synthetic oligonucleotide
uaggcuuagcucgagggca

SEQ ID NO: 1320691 - RNA, 19 nt, Artificial Sequence
  Description of Artificial Sequence: Synthetic oligonucleotide
ucacaauaugccccucucu

SEQ ID NO: 1320692 - RNA, 19 nt, Artificial Sequence
  Description of Artificial Sequence: Synthetic oligonucleotide
acucacuaaucacacaaua

SEQ ID NO: 1320693 - RNA, 19 nt, Artificial Sequence
  Description of Artificial Sequence: Synthetic oligonucleotide
aaaagcuguagcacgcgga

SEQ ID NO: 1320694 - RNA, 19 nt, Artificial Sequence
  Description of Artificial Sequence: Synthetic oligonucleotide
cagggagaugucuuguggc

SEQ ID NO: 1320695 - RNA, 19 nt, Artificial Sequence
  Description of Artificial Sequence: Synthetic oligonucleotide
auaaggccaugaugguugg

SEQ ID NO: 1320696 - RNA, 19 nt, Artificial Sequence
  Description of Artificial Sequence: Synthetic oligonucleotide
gagaaggugcaacacccac

SEQ ID NO: 1320697 - RNA, 19 nt, Artificial Sequence
  Description of Artificial Sequence: Synthetic oligonucleotide
agaaaacgggaacggauaa

SEQ ID NO: 1320698 - RNA, 19 nt, Artificial Sequence
  Description of Artificial Sequence: Synthetic oligonucleotide
acugcgauuggggucucgc

SEQ ID NO: 1320699 - RNA, 19 nt, Artificial Sequence
  Description of Artificial Sequence: Synthetic oligonucleotide
uucuauacaauaggccagu

SEQ ID NO: 1320700 - RNA, 19 nt, Artificial Sequence
  Description of Artificial Sequence: Synthetic oligonucleotide
gauaguacauguacucauc

SEQ ID NO: 1320701 - RNA, 19 nt, Artificial Sequence
  Description of Artificial Sequence: Synthetic oligonucleotide
ugcccauugcuccagugaa

SEQ ID NO: 1320702 - RNA, 19 nt, Artificial Sequence
  Description of Artificial Sequence: Synthetic oligonucleotide
acuaaucacacaauaguua

SEQ ID NO: 1320703 - RNA, 19 nt, Artificial Sequence
  Description of Artificial Sequence: Synthetic oligonucleotide
uccaagggauucagcgagg

SEQ ID NO: 1320704 - RNA, 19 nt, Artificial Sequence
  Description of Artificial Sequence: Synthetic oligonucleotide
gccggaacuacccugguag

SEQ ID NO: 1320705 - RNA, 19 nt, Artificial Sequence
  Description of Artificial Sequence: Synthetic oligonucleotide
uaggccaguauuuucuuuu

SEQ ID NO: 1320706 - RNA, 19 nt, Artificial Sequence
  Description of Artificial Sequence: Synthetic oligonucleotide
aagcuguagcacgcggagc

SEQ ID NO: 1320707 - RNA, 19 nt, Artificial Sequence
  Description of Artificial Sequence: Synthetic oligonucleotide
ugcacgaagaggccacgug

SEQ ID NO: 1320708 - RNA, 19 nt, Artificial Sequence
  Description of Artificial Sequence: Synthetic oligonucleotide
gaaaacgggaacggauaag

SEQ ID NO: 1320709 - RNA, 19 nt, Artificial Sequence
  Description of Artificial Sequence: Synthetic oligonucleotide
aucaauguuugcagcuucg

SEQ ID NO: 1320710 - RNA, 19 nt, Artificial Sequence
  Description of Artificial Sequence: Synthetic oligonucleotide
ugauuguaccggcuccaug

SEQ ID NO: 1320711 - RNA, 19 nt, Artificial Sequence
  Description of Artificial Sequence: Synthetic oligonucleotide
cuccgugccagcuucgcag

SEQ ID NO: 1320712 - RNA, 19 nt, Artificial Sequence
  Description of Artificial Sequence: Synthetic oligonucleotide
auaagguggaaggagccga

SEQ ID NO: 1320713 - RNA, 19 nt, Artificial Sequence
  Description of Artificial Sequence: Synthetic oligonucleotide
uguagcacgcggagcacac

SEQ ID NO: 1320714 - RNA, 19 nt, Artificial Sequence
  Description of Artificial Sequence: Synthetic oligonucleotide
aucacacaauaguuacuug

SEQ ID NO: 1320715 - RNA, 19 nt, Artificial Sequence
  Description of Artificial Sequence: Synthetic oligonucleotide
guugaagcggcacucacua

SEQ ID NO: 1320716 - RNA, 19 nt, Artificial Sequence
  Description of Artificial Sequence: Synthetic oligonucleotide
acagggacccucuccagcu

SEQ ID NO: 1320717 - RNA, 19 nt, Artificial Sequence
  Description of Artificial Sequence: Synthetic oligonucleotide
aagcggcacucacuaauca

SEQ ID NO: 1320718 - RNA, 19 nt, Artificial Sequence
  Description of Artificial Sequence: Synthetic oligonucleotide
augacugcgauuggggucu

SEQ ID NO: 1320719 - RNA, 19 nt, Artificial Sequence
  Description of Artificial Sequence: Synthetic oligonucleotide
gagaacccagcucuggaga

SEQ ID NO: 1320720 - RNA, 19 nt, Artificial Sequence
  Description of Artificial Sequence: Synthetic oligonucleotide
ugucuuaggcuuagcucga

SEQ ID NO: 1320721 - RNA, 19 nt, Artificial Sequence
  Description of Artificial Sequence: Synthetic oligonucleotide
cagcccaugauuguaccgg

SEQ ID NO: 1320722 - RNA, 19 nt, Artificial Sequence
  Description of Artificial Sequence: Synthetic oligonucleotide
ucccaugacugcgauuggg

SEQ ID NO: 1320723 - RNA, 19 nt, Artificial Sequence
  Description of Artificial Sequence: Synthetic oligonucleotide
acgggaacggauaaggcca

SEQ ID NO: 1320724 - RNA, 19 nt, Artificial Sequence
  Description of Artificial Sequence: Synthetic oligonucleotide
acgccguccagccaggcug

SEQ ID NO: 1320725 - RNA, 19 nt, Artificial Sequence
  Description of Artificial Sequence: Synthetic oligonucleotide
ggagaugucuuguggcagg

SEQ ID NO: 1320726 - RNA, 19 nt, Artificial Sequence
  Description of Artificial Sequence: Synthetic oligonucleotide
aacaguucgcaggggaggu

SEQ ID NO: 1320727 - RNA, 19 nt, Artificial Sequence
  Description of Artificial Sequence: Synthetic oligonucleotide
acgucuuuguaucaauguu

SEQ ID NO: 1320728 - RNA, 19 nt, Artificial Sequence
  Description of Artificial Sequence: Synthetic oligonucleotide
accacacgguccucgcagc

SEQ ID NO: 1320729 - RNA, 19 nt, Artificial Sequence
  Description of Artificial Sequence: Synthetic oligonucleotide
ucuuguggcaggucauccu

SEQ ID NO: 1320730 - RNA, 19 nt, Artificial Sequence
  Description of Artificial Sequence: Synthetic oligonucleotide
aaccuggcucacaacgccg

SEQ ID NO: 1320731 - RNA, 19 nt, Artificial Sequence
  Description of Artificial Sequence: Synthetic oligonucleotide
aaggcacgucuuuguauca

SEQ ID NO: 1320732 - RNA, 19 nt, Artificial Sequence
  Description of Artificial Sequence: Synthetic oligonucleotide
aaccccguugaagcggcac

SEQ ID NO: 1320733 - RNA, 19 nt, Artificial Sequence
  Description of Artificial Sequence: Synthetic oligonucleotide
cacgaagaggccacgugug

SEQ ID NO: 1320734 - RNA, 19 nt, Artificial Sequence
  Description of Artificial Sequence: Synthetic oligonucleotide
uaccggcuccaugugaggg

SEQ ID NO: 1320735 - RNA, 19 nt, Artificial Sequence
  Description of Artificial Sequence: Synthetic oligonucleotide
auaccaugaaaggggagca

SEQ ID NO: 1320736 - RNA, 19 nt, Artificial Sequence
  Description of Artificial Sequence: Synthetic oligonucleotide
acgaagacacugagaaaac

SEQ ID NO: 1320737 - RNA, 19 nt, Artificial Sequence
  Description of Artificial Sequence: Synthetic oligonucleotide
auagugauuucuauacaau

SEQ ID NO: 1320738 - RNA, 19 nt, Artificial Sequence
  Description of Artificial Sequence: Synthetic oligonucleotide
auuguaccggcuccaugug

SEQ ID NO: 1320739 - RNA, 19 nt, Artificial Sequence
  Description of Artificial Sequence: Synthetic oligonucleotide
uccuuaaggcacgucuuug

SEQ ID NO: 1320740 - RNA, 19 nt, Artificial Sequence
  Description of Artificial Sequence: Synthetic oligonucleotide
acgcggagcacacaaaaua

SEQ ID NO: 1320741 - RNA, 19 nt, Artificial Sequence
  Description of Artificial Sequence: Synthetic oligonucleotide
uccgugccagcuucgcagg

SEQ ID NO: 1320742 - RNA, 19 nt, Artificial Sequence
  Description of Artificial Sequence: Synthetic oligonucleotide
cacacaaaauagugauuuc

SEQ ID NO: 1320743 - RNA, 19 nt, Artificial Sequence
  Description of Artificial Sequence: Synthetic oligonucleotide
uagcacgcggagcacacaa

SEQ ID NO: 1320744 - RNA, 19 nt, Artificial Sequence
  Description of Artificial Sequence: Synthetic oligonucleotide
cagcacacuaaacuaccac

SEQ ID NO: 1320745 - RNA, 19 nt, Artificial Sequence
  Description of Artificial Sequence: Synthetic oligonucleotide
uuguaccggcuccauguga

SEQ ID NO: 1320746 - RNA, 19 nt, Artificial Sequence
  Description of Artificial Sequence: Synthetic oligonucleotide
gagguggucagguuugcaa

SEQ ID NO: 1320747 - RNA, 19 nt, Artificial Sequence
  Description of Artificial Sequence: Synthetic oligonucleotide
gagaagcaucucugggugc

SEQ ID NO: 1320748 - RNA, 19 nt, Artificial Sequence
  Description of Artificial Sequence: Synthetic oligonucleotide
uggucagguuugcaaacuc

SEQ ID NO: 1320749 - RNA, 19 nt, Artificial Sequence
  Description of Artificial Sequence: Synthetic oligonucleotide
acagcuuuaauugcacuua

SEQ ID NO: 1320750 - RNA, 19 nt, Artificial Sequence
  Description of Artificial Sequence: Synthetic oligonucleotide
gguagaaaacagcacacua

SEQ ID NO: 1320751 - RNA, 19 nt, Artificial Sequence
  Description of Artificial Sequence: Synthetic oligonucleotide
gaggugcugaccugcugcc

SEQ ID NO: 1320752 - RNA, 19 nt, Artificial Sequence
  Description of Artificial Sequence: Synthetic oligonucleotide
acuaaacuaccacgcgcgu

SEQ ID NO: 1320753 - RNA, 19 nt, Artificial Sequence
  Description of Artificial Sequence: Synthetic oligonucleotide
caccacacgguccucgcag

SEQ ID NO: 1320754 - RNA, 19 nt, Artificial Sequence
  Description of Artificial Sequence: Synthetic oligonucleotide
caaccuucccugucacagg

SEQ ID NO: 1320755 - RNA, 19 nt, Artificial Sequence
  Description of Artificial Sequence: Synthetic oligonucleotide
uuccuuaaggcacgucuuu

SEQ ID NO: 1320756 - RNA, 19 nt, Artificial Sequence
  Description of Artificial Sequence: Synthetic oligonucleotide
uucagcgagguggucaggu

SEQ ID NO: 1320757 - RNA, 19 nt, Artificial Sequence
  Description of Artificial Sequence: Synthetic oligonucleotide
uccaaacgcugcaccacac

SEQ ID NO: 1320758 - RNA, 19 nt, Artificial Sequence
  Description of Artificial Sequence: Synthetic oligonucleotide
gagaaaacgggaacggaua

SEQ ID NO: 1320759 - RNA, 19 nt, Artificial Sequence
  Description of Artificial Sequence: Synthetic oligonucleotide
auacaauaggccaguauuu

SEQ ID NO: 1320760 - RNA, 19 nt, Artificial Sequence
  Description of Artificial Sequence: Synthetic oligonucleotide
agagcuuggcggccuuggg

SEQ ID NO: 1320761 - RNA, 19 nt, Artificial Sequence
  Description of Artificial Sequence: Synthetic oligonucleotide
gauagggcagaaggcgcag

SEQ ID NO: 1320762 - RNA, 19 nt, Artificial Sequence
  Description of Artificial Sequence: Synthetic oligonucleotide
acgaggagaagcaucucug

SEQ ID NO: 1320763 - RNA, 19 nt, Artificial Sequence
  Description of Artificial Sequence: Synthetic oligonucleotide
cuuagcucgagggcagggc

SEQ ID NO: 1320764 - RNA, 19 nt, Artificial Sequence
  Description of Artificial Sequence: Synthetic oligonucleotide
gcagcggcagcuugggugg

SEQ ID NO: 1320765 - RNA, 19 nt, Artificial Sequence
  Description of Artificial Sequence: Synthetic oligonucleotide
cagggcuaugagcuggggc

SEQ ID NO: 1320766 - RNA, 19 nt, Artificial Sequence
  Description of Artificial Sequence: Synthetic oligonucleotide
agguagaaaacagcacacu

SEQ ID NO: 1320767 - RNA, 19 nt, Artificial Sequence
  Description of Artificial Sequence: Synthetic oligonucleotide
gcacacuaaacuaccacgc

SEQ ID NO: 1320768 - RNA, 19 nt, Artificial Sequence
  Description of Artificial Sequence: Synthetic oligonucleotide
agagggacaccugggcagg

SEQ ID NO: 1320769 - RNA, 19 nt, Artificial Sequence
  Description of Artificial Sequence: Synthetic oligonucleotide
cuucccugucacagggacc

SEQ ID NO: 1320770 - RNA, 19 nt, Artificial Sequence
  Description of Artificial Sequence: Synthetic oligonucleotide
cuaccacgcgcguggauac

SEQ ID NO: 1320771 - RNA, 19 nt, Artificial Sequence
  Description of Artificial Sequence: Synthetic oligonucleotide
cacagggacccucuccagc

SEQ ID NO: 1320772 - RNA, 19 nt, Artificial Sequence
  Description of Artificial Sequence: Synthetic oligonucleotide
aacgccguccagccaggcu

SEQ ID NO: 1320773 - RNA, 19 nt, Artificial Sequence
  Description of Artificial Sequence: Synthetic oligonucleotide
cuucgguucugcccagccc

SEQ ID NO: 1320774 - RNA, 19 nt, Artificial Sequence
  Description of Artificial Sequence: Synthetic oligonucleotide
ggaacuacccugguagggc

SEQ ID NO: 1320775 - RNA, 19 nt, Artificial Sequence
  Description of Artificial Sequence: Synthetic oligonucleotide
ggaagccggaacuacccug

SEQ ID NO: 1320776 - RNA, 19 nt, Artificial Sequence
  Description of Artificial Sequence: Synthetic oligonucleotide
gguuccuuaaggcacgucu

SEQ ID NO: 1320777 - RNA, 19 nt, Artificial Sequence
  Description of Artificial Sequence: Synthetic oligonucleotide
agaaggugcaacacccaca

SEQ ID NO: 1320778 - RNA, 19 nt, Artificial Sequence
  Description of Artificial Sequence: Synthetic oligonucleotide
cccaaaagcuguagcacgc

SEQ ID NO: 1320779 - RNA, 19 nt, Artificial Sequence
  Description of Artificial Sequence: Synthetic oligonucleotide
acacgguccucgcagcgcu

SEQ ID NO: 1320780 - RNA, 19 nt, Artificial Sequence
  Description of Artificial Sequence: Synthetic oligonucleotide
gucccggauuaccauggag

SEQ ID NO: 1320781 - RNA, 19 nt, Artificial Sequence
  Description of Artificial Sequence: Synthetic oligonucleotide
uucgcaggggaggugcuga

SEQ ID NO: 1320782 - RNA, 19 nt, Artificial Sequence
  Description of Artificial Sequence: Synthetic oligonucleotide
cccaugacugcgauugggg

SEQ ID NO: 1320783 - RNA, 19 nt, Artificial Sequence
  Description of Artificial Sequence: Synthetic oligonucleotide
caagcugauagggcagaag

SEQ ID NO: 1320784 - RNA, 19 nt, Artificial Sequence
  Description of Artificial Sequence: Synthetic oligonucleotide
ggaagggaggccccauggg

SEQ ID NO: 1320785 - RNA, 19 nt, Artificial Sequence
  Description of Artificial Sequence: Synthetic oligonucleotide
ggcagguuccuuaaggcac

SEQ ID NO: 1320786 - RNA, 19 nt, Artificial Sequence
  Description of Artificial Sequence: Synthetic oligonucleotide
acgaagaggccacgugugu

SEQ ID NO: 1320787 - RNA, 19 nt, Artificial Sequence
  Description of Artificial Sequence: Synthetic oligonucleotide
cuucgcagguggcuccagg

SEQ ID NO: 1320788 - RNA, 19 nt, Artificial Sequence
  Description of Artificial Sequence: Synthetic oligonucleotide
cagauaguacauguacuca

SEQ ID NO: 1320789 - RNA, 19 nt, Artificial Sequence
  Description of Artificial Sequence: Synthetic oligonucleotide
gaacgaagacacugagaaa

SEQ ID NO: 1320790 - RNA, 19 nt, Artificial Sequence
  Description of Artificial Sequence: Synthetic oligonucleotide
aggagacucgcugccggcg

SEQ ID NO: 1320791 - RNA, 19 nt, Artificial Sequence
  Description of Artificial Sequence: Synthetic oligonucleotide
cacuaaucacacaauaguu

SEQ ID NO: 1320792 - RNA, 19 nt, Artificial Sequence
  Description of Artificial Sequence: Synthetic oligonucleotide
acuaccacgcgcguggaua

SEQ ID NO: 1320793 - RNA, 19 nt, Artificial Sequence
  Description of Artificial Sequence: Synthetic oligonucleotide
caggucccggauuaccaug

SEQ ID NO: 1320794 - RNA, 19 nt, Artificial Sequence
  Description of Artificial Sequence: Synthetic oligonucleotide
ucaggguccaagggauuca

SEQ ID NO: 1320795 - RNA, 19 nt, Artificial Sequence
  Description of Artificial Sequence: Synthetic oligonucleotide
ucgguucugcccagcccag

SEQ ID NO: 1320796 - RNA, 19 nt, Artificial Sequence
  Description of Artificial Sequence: Synthetic oligonucleotide
agccgaagcuggcagcgcu

SEQ ID NO: 1320797 - RNA, 19 nt, Artificial Sequence
  Description of Artificial Sequence: Synthetic oligonucleotide
gggcuugagaaccuggcuc

SEQ ID NO: 1320798 - RNA, 19 nt, Artificial Sequence
  Description of Artificial Sequence: Synthetic oligonucleotide
cugcgauuggggucucgcc

SEQ ID NO: 1320799 - RNA, 19 nt, Artificial Sequence
  Description of Artificial Sequence: Synthetic oligonucleotide
cagggagcagaauaaguua

SEQ ID NO: 1320800 - RNA, 19 nt, Artificial Sequence
  Description of Artificial Sequence: Synthetic oligonucleotide
ggaccauacccaaaagcug

SEQ ID NO: 1320801 - RNA, 19 nt, Artificial Sequence
  Description of Artificial Sequence: Synthetic oligonucleotide
guaccggcuccaugugagg

SEQ ID NO: 1320802 - RNA, 19 nt, Artificial Sequence
  Description of Artificial Sequence: Synthetic oligonucleotide
gguuucagucacaagcuga

SEQ ID NO: 1320803 - RNA, 19 nt, Artificial Sequence
  Description of Artificial Sequence: Synthetic oligonucleotide
cuggcucacaacgccgucc

SEQ ID NO: 1320804 - RNA, 19 nt, Artificial Sequence
  Description of Artificial Sequence: Synthetic oligonucleotide
aggccacgugugucgcucc

SEQ ID NO: 1320805 - RNA, 19 nt, Artificial Sequence
  Description of Artificial Sequence: Synthetic oligonucleotide
cagguuucagucacaagcu

SEQ ID NO: 1320806 - RNA, 19 nt, Artificial Sequence
  Description of Artificial Sequence: Synthetic oligonucleotide
cagcgcaggagacucgcug

SEQ ID NO: 1320807 - RNA, 19 nt, Artificial Sequence
  Description of Artificial Sequence: Synthetic oligonucleotide
agcgagguggucagguuug

SEQ ID NO: 1320808 - RNA, 19 nt, Artificial Sequence
  Description of Artificial Sequence: Synthetic oligonucleotide
cacggcacgaggagaagca

SEQ ID NO: 1320809 - RNA, 19 nt, Artificial Sequence
  Description of Artificial Sequence: Synthetic oligonucleotide
cacgucuuuguaucaaugu

SEQ ID NO: 1320810 - RNA, 19 nt, Artificial Sequence
  Description of Artificial Sequence: Synthetic oligonucleotide
acuacccugguagggcuug

SEQ ID NO: 1320811 - RNA, 19 nt, Artificial Sequence
  Description of Artificial Sequence: Synthetic oligonucleotide
gaacuacccugguagggcu

SEQ ID NO: 1320812 - RNA, 19 nt, Artificial Sequence
  Description of Artificial Sequence: Synthetic oligonucleotide
agaagccacagaagcugag

SEQ ID NO: 1320813 - RNA, 19 nt, Artificial Sequence
  Description of Artificial Sequence: Synthetic oligonucleotide
gaaggcgcagggcgcggcc

SEQ ID NO: 1320814 - RNA, 19 nt, Artificial Sequence
  Description of Artificial Sequence: Synthetic oligonucleotide
ggagacucgcugccggcgg

SEQ ID NO: 1320815 - RNA, 19 nt, Artificial Sequence
  Description of Artificial Sequence: Synthetic oligonucleotide
agccagggagcagaauaag

SEQ ID NO: 1320816 - RNA, 19 nt, Artificial Sequence
  Description of Artificial Sequence: Synthetic oligonucleotide
accccguugaagcggcacu

SEQ ID NO: 1320817 - RNA, 19 nt, Artificial Sequence
  Description of Artificial Sequence: Synthetic oligonucleotide
cacgugugucgcuccgugc

SEQ ID NO: 1320818 - RNA, 19 nt, Artificial Sequence
  Description of Artificial Sequence: Synthetic oligonucleotide
aggccaugaugguugggaa

SEQ ID NO: 1320819 - RNA, 19 nt, Artificial Sequence
  Description of Artificial Sequence: Synthetic oligonucleotide
aagccggaacuacccuggu

SEQ ID NO: 1320820 - RNA, 19 nt, Artificial Sequence
  Description of Artificial Sequence: Synthetic oligonucleotide
agggcgcggccucaggucu

SEQ ID NO: 1320821 - RNA, 19 nt, Artificial Sequence
  Description of Artificial Sequence: Synthetic oligonucleotide
ccaugaaaggggagcagug

SEQ ID NO: 1320822 - RNA, 19 nt, Artificial Sequence
  Description of Artificial Sequence: Synthetic oligonucleotide
cgcggagcacacaaaauag

SEQ ID NO: 1320823 - RNA, 19 nt, Artificial Sequence
  Description of Artificial Sequence: Synthetic oligonucleotide
ugugucgcuccgugccagc

SEQ ID NO: 1320824 - RNA, 19 nt, Artificial Sequence
  Description of Artificial Sequence: Synthetic oligonucleotide
gucgcuccgugccagcuuc

SEQ ID NO: 1320825 - RNA, 19 nt, Artificial Sequence
  Description of Artificial Sequence: Synthetic oligonucleotide
gcagguuccuuaaggcacg

SEQ ID NO: 1320826 - RNA, 19 nt, Artificial Sequence
  Description of Artificial Sequence: Synthetic oligonucleotide
acccugguagggcuugaga

SEQ ID NO: 1320827 - RNA, 19 nt, Artificial Sequence
  Description of Artificial Sequence: Synthetic oligonucleotide
cacgcggugcucaaucaga

SEQ ID NO: 1320828 - RNA, 19 nt, Artificial Sequence
  Description of Artificial Sequence: Synthetic oligonucleotide
acagcacacuaaacuacca

SEQ ID NO: 1320829 - RNA, 19 nt, Artificial Sequence
  Description of Artificial Sequence: Synthetic oligonucleotide
aacuaccacgcgcguggau

SEQ ID NO: 1320830 - RNA, 19 nt, Artificial Sequence
  Description of Artificial Sequence: Synthetic oligonucleotide
caugauuguaccggcucca

SEQ ID NO: 1320831 - RNA, 19 nt, Artificial Sequence
  Description of Artificial Sequence: Synthetic oligonucleotide
caggagacucgcugccggc

SEQ ID NO: 1320832 - RNA, 19 nt, Artificial Sequence
  Description of Artificial Sequence: Synthetic oligonucleotide
cuccaaacgcugcaccaca

SEQ ID NO: 1320833 - RNA, 19 nt, Artificial Sequence
  Description of Artificial Sequence: Synthetic oligonucleotide
aguggggcaggcugugcaa

SEQ ID NO: 1320834 - RNA, 19 nt, Artificial Sequence
  Description of Artificial Sequence: Synthetic oligonucleotide
aaacuaccacgcgcgugga

SEQ ID NO: 1320835 - RNA, 19 nt, Artificial Sequence
  Description of Artificial Sequence: Synthetic oligonucleotide
gcagaauaaguuaacaguu

SEQ ID NO: 1320836 - RNA, 19 nt, Artificial Sequence
  Description of Artificial Sequence: Synthetic oligonucleotide
gggagaugucuuguggcag

SEQ ID NO: 1320837 - RNA, 19 nt, Artificial Sequence
  Description of Artificial Sequence: Synthetic oligonucleotide
ccaaacgcugcaccacacg

SEQ ID NO: 1320838 - RNA, 19 nt, Artificial Sequence
  Description of Artificial Sequence: Synthetic oligonucleotide
cgaggagaagcaucucugg

SEQ ID NO: 1320839 - RNA, 19 nt, Artificial Sequence
  Description of Artificial Sequence: Synthetic oligonucleotide
uuucagucacaagcugaua

SEQ ID NO: 1320840 - RNA, 19 nt, Artificial Sequence
  Description of Artificial Sequence: Synthetic oligonucleotide
gaggccacgugugucgcuc

SEQ ID NO: 1320841 - RNA, 19 nt, Artificial Sequence
  Description of Artificial Sequence: Synthetic oligonucleotide
cuauacaauaggccaguau

SEQ ID NO: 1320842 - RNA, 19 nt, Artificial Sequence
  Description of Artificial Sequence: Synthetic oligonucleotide
gaacggauaaggccaugau

SEQ ID NO: 1320843 - RNA, 19 nt, Artificial Sequence
  Description of Artificial Sequence: Synthetic oligonucleotide
gugcucaaucagauaguac

SEQ ID NO: 1320844 - RNA, 19 nt, Artificial Sequence
  Description of Artificial Sequence: Synthetic oligonucleotide
guuucagucacaagcugau

SEQ ID NO: 1320845 - RNA, 19 nt, Artificial Sequence
  Description of Artificial Sequence: Synthetic oligonucleotide
gcucacaacgccguccagc

SEQ ID NO: 1320846 - RNA, 19 nt, Artificial Sequence
  Description of Artificial Sequence: Synthetic oligonucleotide
cacgaggagaagcaucucu

SEQ ID NO: 1320847 - RNA, 19 nt, Artificial Sequence
  Description of Artificial Sequence: Synthetic oligonucleotide
ggaacggauaaggccauga

SEQ ID NO: 1320848 - RNA, 19 nt, Artificial Sequence
  Description of Artificial Sequence: Synthetic oligonucleotide
cacacgguccucgcagcgc

SEQ ID NO: 1320849 - RNA, 19 nt, Artificial Sequence
  Description of Artificial Sequence: Synthetic oligonucleotide
aggcuuagcucgagggcag

SEQ ID NO: 1320850 - RNA, 19 nt, Artificial Sequence
  Description of Artificial Sequence: Synthetic oligonucleotide
guuugcagcuucgguucug

SEQ ID NO: 1320851 - RNA, 19 nt, Artificial Sequence
  Description of Artificial Sequence: Synthetic oligonucleotide
cuucacaauaugccccucu

SEQ ID NO: 1320852 - RNA, 19 nt, Artificial Sequence
  Description of Artificial Sequence: Synthetic oligonucleotide
cccaugauuguaccggcuc

SEQ ID NO: 1320853 - RNA, 19 nt, Artificial Sequence
  Description of Artificial Sequence: Synthetic oligonucleotide
ugccagcuucgcagguggc

SEQ ID NO: 1320854 - RNA, 19 nt, Artificial Sequence
  Description of Artificial Sequence: Synthetic oligonucleotide
gcuucgguucugcccagcc

SEQ ID NO: 1320855 - RNA, 19 nt, Artificial Sequence
  Description of Artificial Sequence: Synthetic oligonucleotide
cacgcgcguggauacuuuc

SEQ ID NO: 1320856 - RNA, 19 nt, Artificial Sequence
  Description of Artificial Sequence: Synthetic oligonucleotide
gucuuaggcuuagcucgag

SEQ ID NO: 1320857 - RNA, 19 nt, Artificial Sequence
  Description of Artificial Sequence: Synthetic oligonucleotide
gcagaaggcgcagggcgcg

SEQ ID NO: 1320858 - RNA, 19 nt, Artificial Sequence
  Description of Artificial Sequence: Synthetic oligonucleotide
auucagcgagguggucagg

SEQ ID NO: 1320859 - RNA, 19 nt, Artificial Sequence
  Description of Artificial Sequence: Synthetic oligonucleotide
gcacgucuuuguaucaaug

SEQ ID NO: 1320860 - RNA, 19 nt, Artificial Sequence
  Description of Artificial Sequence: Synthetic oligonucleotide
ucucugggugcagguuuca

SEQ ID NO: 1320861 - RNA, 19 nt, Artificial Sequence
  Description of Artificial Sequence: Synthetic oligonucleotide
gauuggggucucgcccuug

SEQ ID NO: 1320862 - RNA, 19 nt, Artificial Sequence
  Description of Artificial Sequence: Synthetic oligonucleotide
gcggcacucacuaaucaca

SEQ ID NO: 1320863 - RNA, 19 nt, Artificial Sequence
  Description of Artificial Sequence: Synthetic oligonucleotide
ggugcucaaucagauagua

SEQ ID NO: 1320864 - RNA, 19 nt, Artificial Sequence
  Description of Artificial Sequence: Synthetic oligonucleotide
cagggcgcggccucagguc

SEQ ID NO: 1320865 - RNA, 19 nt, Artificial Sequence
  Description of Artificial Sequence: Synthetic oligonucleotide
agaggccacgugugucgcu

SEQ ID NO: 1320866 - RNA, 19 nt, Artificial Sequence
  Description of Artificial Sequence: Synthetic oligonucleotide
gcuuagcucgagggcaggg

SEQ ID NO: 1320867 - RNA, 19 nt, Artificial Sequence
  Description of Artificial Sequence: Synthetic oligonucleotide
acaagcugauagggcagaa

SEQ ID NO: 1320868 - RNA, 19 nt, Artificial Sequence
  Description of Artificial Sequence: Synthetic oligonucleotide
ccggaacuacccugguagg

SEQ ID NO: 1320869 - RNA, 19 nt, Artificial Sequence
  Description of Artificial Sequence: Synthetic oligonucleotide
acaguucgcaggggaggug

SEQ ID NO: 1320870 - RNA, 19 nt, Artificial Sequence
  Description of Artificial Sequence: Synthetic oligonucleotide
cacaagcugauagggcaga

SEQ ID NO: 1320871 - RNA, 19 nt, Artificial Sequence
  Description of Artificial Sequence: Synthetic oligonucleotide
cccugguagggcuugagaa

SEQ ID NO: 1320872 - RNA, 19 nt, Artificial Sequence
  Description of Artificial Sequence: Synthetic oligonucleotide
cagcuugggugggcgagag

SEQ ID NO: 1320873 - RNA, 19 nt, Artificial Sequence
  Description of Artificial Sequence: Synthetic oligonucleotide
ucgcaggggaggugcugac

SEQ ID NO: 1320874 - RNA, 19 nt, Artificial Sequence
  Description of Artificial Sequence: Synthetic oligonucleotide
guaucaauguuugcagcuu

SEQ ID NO: 1320875 - RNA, 19 nt, Artificial Sequence
  Description of Artificial Sequence: Synthetic oligonucleotide
gcgcguggauacuuucacc

SEQ ID NO: 1320876 - RNA, 19 nt, Artificial Sequence
  Description of Artificial Sequence: Synthetic oligonucleotide
aacuacccugguagggcuu

SEQ ID NO: 1320877 - RNA, 19 nt, Artificial Sequence
  Description of Artificial Sequence: Synthetic oligonucleotide
agcuagccggaugcuccuc

SEQ ID NO: 1320878 - RNA, 19 nt, Artificial Sequence
  Description of Artificial Sequence: Synthetic oligonucleotide
aggcacgucuuuguaucaa

SEQ ID NO: 1320879 - RNA, 19 nt, Artificial Sequence
  Description of Artificial Sequence: Synthetic oligonucleotide
agccggaacuacccuggua

SEQ ID NO: 1320880 - RNA, 19 nt, Artificial Sequence
  Description of Artificial Sequence: Synthetic oligonucleotide
gcacgcggagcacacaaaa

SEQ ID NO: 1320881 - RNA, 19 nt, Artificial Sequence
  Description of Artificial Sequence: Synthetic oligonucleotide
gcacgaagaggccacgugu

SEQ ID NO: 1320882 - RNA, 19 nt, Artificial Sequence
  Description of Artificial Sequence: Synthetic oligonucleotide
guucgcaggggaggugcug

SEQ ID NO: 1320883 - RNA, 19 nt, Artificial Sequence
  Description of Artificial Sequence: Synthetic oligonucleotide
gagaugucuuguggcaggu

SEQ ID NO: 1320884 - RNA, 19 nt, Artificial Sequence
  Description of Artificial Sequence: Synthetic oligonucleotide
ccauacccaaaagcuguag

SEQ ID NO: 1320885 - RNA, 19 nt, Artificial Sequence
  Description of Artificial Sequence: Synthetic oligonucleotide
ggcacucacuaaucacaca

SEQ ID NO: 1320886 - RNA, 19 nt, Artificial Sequence
  Description of Artificial Sequence: Synthetic oligonucleotide
ggccacgugugucgcuccg

SEQ ID NO: 1320887 - RNA, 19 nt, Artificial Sequence
  Description of Artificial Sequence: Synthetic oligonucleotide
cuguagcacgcggagcaca

SEQ ID NO: 1320888 - RNA, 19 nt, Artificial Sequence
  Description of Artificial Sequence: Synthetic oligonucleotide
gagccgaagcuggcagcgc

SEQ ID NO: 1320889 - RNA, 19 nt, Artificial Sequence
  Description of Artificial Sequence: Synthetic oligonucleotide
gcacggcacgaggagaagc

SEQ ID NO: 1320890 - RNA, 19 nt, Artificial Sequence
  Description of Artificial Sequence: Synthetic oligonucleotide
acgcggugcucaaucagau

SEQ ID NO: 1320891 - RNA, 19 nt, Artificial Sequence
  Description of Artificial Sequence: Synthetic oligonucleotide
ggccacgcggugcucaauc

SEQ ID NO: 1320892 - RNA, 19 nt, Artificial Sequence
  Description of Artificial Sequence: Synthetic oligonucleotide
acgcgcguggauacuuuca

SEQ ID NO: 1320893 - RNA, 19 nt, Artificial Sequence
  Description of Artificial Sequence: Synthetic oligonucleotide
accauacccaaaagcugua

SEQ ID NO: 1320894 - RNA, 19 nt, Artificial Sequence
  Description of Artificial Sequence: Synthetic oligonucleotide
cacucacuaaucacacaau

SEQ ID NO: 1320895 - RNA, 19 nt, Artificial Sequence
  Description of Artificial Sequence: Synthetic oligonucleotide
cuuggggaagccggaacua

SEQ ID NO: 1320896 - RNA, 19 nt, Artificial Sequence
  Description of Artificial Sequence: Synthetic oligonucleotide
guuccuuaaggcacgucuu

SEQ ID NO: 1320897 - RNA, 19 nt, Artificial Sequence
  Description of Artificial Sequence: Synthetic oligonucleotide
cggaacuacccugguaggg

SEQ ID NO: 1320898 - RNA, 19 nt, Artificial Sequence
  Description of Artificial Sequence: Synthetic oligonucleotide
ccacgcggugcucaaucag

SEQ ID NO: 1320899 - RNA, 19 nt, Artificial Sequence
  Description of Artificial Sequence: Synthetic oligonucleotide
cagcuucgguucugcccag

SEQ ID NO: 1320900 - RNA, 19 nt, Artificial Sequence
  Description of Artificial Sequence: Synthetic oligonucleotide
agcccagcccaugauugua

SEQ ID NO: 1320901 - RNA, 19 nt, Artificial Sequence
  Description of Artificial Sequence: Synthetic oligonucleotide
cagcuuuaauugcacuuau

SEQ ID NO: 1320902 - RNA, 19 nt, Artificial Sequence
  Description of Artificial Sequence: Synthetic oligonucleotide
ggagaaggugcaacaccca

SEQ ID NO: 1320903 - RNA, 19 nt, Artificial Sequence
  Description of Artificial Sequence: Synthetic oligonucleotide
ggggucucgcccuuggccu

SEQ ID NO: 1320904 - RNA, 19 nt, Artificial Sequence
  Description of Artificial Sequence: Synthetic oligonucleotide
accacgcgcguggauacuu

SEQ ID NO: 1320905 - RNA, 19 nt, Artificial Sequence
  Description of Artificial Sequence: Synthetic oligonucleotide
aguucgcaggggaggugcu

SEQ ID NO: 1320906 - RNA, 19 nt, Artificial Sequence
  Description of Artificial Sequence: Synthetic oligonucleotide
agcuucgcagguggcucca

SEQ ID NO: 1320907 - RNA, 19 nt, Artificial Sequence
  Description of Artificial Sequence: Synthetic oligonucleotide
ccccauggggaaugugcag

SEQ ID NO: 1320908 - RNA, 19 nt, Artificial Sequence
  Description of Artificial Sequence: Synthetic oligonucleotide
aaaccccguugaagcggca

SEQ ID NO: 1320909 - RNA, 19 nt, Artificial Sequence
  Description of Artificial Sequence: Synthetic oligonucleotide
ccacgugugucgcuccgug

SEQ ID NO: 1320910 - RNA, 19 nt, Artificial Sequence
  Description of Artificial Sequence: Synthetic oligonucleotide
acggcacgaggagaagcau

SEQ ID NO: 1320911 - RNA, 19 nt, Artificial Sequence
  Description of Artificial Sequence: Synthetic oligonucleotide
ggcuuagcucgagggcagg

SEQ ID NO: 1320912 - RNA, 19 nt, Artificial Sequence
  Description of Artificial Sequence: Synthetic oligonucleotide
ccguugaagcggcacucac

SEQ ID NO: 1320913 - RNA, 19 nt, Artificial Sequence
  Description of Artificial Sequence: Synthetic oligonucleotide
ggucucgcccuuggccugg

SEQ ID NO: 1320914 - RNA, 19 nt, Artificial Sequence
  Description of Artificial Sequence: Synthetic oligonucleotide
gggcuucugggcccagcgc

SEQ ID NO: 1320915 - RNA, 19 nt, Artificial Sequence
  Description of Artificial Sequence: Synthetic oligonucleotide
uaccacgcgcguggauacu

SEQ ID NO: 1320916 - RNA, 19 nt, Artificial Sequence
  Description of Artificial Sequence: Synthetic oligonucleotide
gugcaacacccacagcuuu

SEQ ID NO: 1320917 - RNA, 19 nt, Artificial Sequence
  Description of Artificial Sequence: Synthetic oligonucleotide
cacgguccucgcagcgcug

SEQ ID NO: 1320918 - RNA, 19 nt, Artificial Sequence
  Description of Artificial Sequence: Synthetic oligonucleotide
gggucucgcccuuggccug

SEQ ID NO: 1320919 - RNA, 19 nt, Artificial Sequence
  Description of Artificial Sequence: Synthetic oligonucleotide
cgcgcguggauacuuucac

SEQ ID NO: 1320920 - RNA, 19 nt, Artificial Sequence
  Description of Artificial Sequence: Synthetic oligonucleotide
ccuuaaggcacgucuuugu

SEQ ID NO: 1320921 - RNA, 19 nt, Artificial Sequence
  Description of Artificial Sequence: Synthetic oligonucleotide
gcucaaucagauaguacau

SEQ ID NO: 1320922 - RNA, 19 nt, Artificial Sequence
  Description of Artificial Sequence: Synthetic oligonucleotide
cccggauuaccauggagcu

SEQ ID NO: 1320923 - RNA, 19 nt, Artificial Sequence
  Description of Artificial Sequence: Synthetic oligonucleotide
gccugcacgaagaggccac

SEQ ID NO: 1320924 - RNA, 19 nt, Artificial Sequence
  Description of Artificial Sequence: Synthetic oligonucleotide
gcgauuggggucucgcccu

SEQ ID NO: 1320925 - RNA, 19 nt, Artificial Sequence
  Description of Artificial Sequence: Synthetic oligonucleotide
cacgcggagcacacaaaau

SEQ ID NO: 1320926 - RNA, 19 nt, Artificial Sequence
  Description of Artificial Sequence: Synthetic oligonucleotide
guagcacgcggagcacaca

SEQ ID NO: 1320927 - RNA, 19 nt, Artificial Sequence
  Description of Artificial Sequence: Synthetic oligonucleotide
gccucaggucuggagcacc

SEQ ID NO: 1320928 - RNA, 19 nt, Artificial Sequence
  Description of Artificial Sequence: Synthetic oligonucleotide
caacgccguccagccaggc

SEQ ID NO: 1320929 - RNA, 19 nt, Artificial Sequence
  Description of Artificial Sequence: Synthetic oligonucleotide
agcacgcggagcacacaaa

SEQ ID NO: 1320930 - RNA, 19 nt, Artificial Sequence
  Description of Artificial Sequence: Synthetic oligonucleotide
ccugcacgaagaggccacg

SEQ ID NO: 1320931 - RNA, 19 nt, Artificial Sequence
  Description of Artificial Sequence: Synthetic oligonucleotide
ggcacgucuuuguaucaau

SEQ ID NO: 1320932 - RNA, 19 nt, Artificial Sequence
  Description of Artificial Sequence: Synthetic oligonucleotide
gacucgcugccggcggcca

SEQ ID NO: 1320933 - RNA, 19 nt, Artificial Sequence
  Description of Artificial Sequence: Synthetic oligonucleotide
ggauaaggccaugaugguu

SEQ ID NO: 1320934 - RNA, 19 nt, Artificial Sequence
  Description of Artificial Sequence: Synthetic oligonucleotide
cuaugagcuggggcaggaa

SEQ ID NO: 1320935 - RNA, 19 nt, Artificial Sequence
  Description of Artificial Sequence: Synthetic oligonucleotide
gggaugucuuaggcuuagc

SEQ ID NO: 1320936 - RNA, 19 nt, Artificial Sequence
  Description of Artificial Sequence: Synthetic oligonucleotide
gcccagcccaugauuguac

SEQ ID NO: 1320937 - RNA, 19 nt, Artificial Sequence
  Description of Artificial Sequence: Synthetic oligonucleotide
cgaagaggccacguguguc

SEQ ID NO: 1320938 - RNA, 19 nt, Artificial Sequence
  Description of Artificial Sequence: Synthetic oligonucleotide
ggcacggcacgaggagaag

SEQ ID NO: 1320939 - RNA, 19 nt, Artificial Sequence
  Description of Artificial Sequence: Synthetic oligonucleotide
ggcgcggccucaggucugg

SEQ ID NO: 1320940 - RNA, 19 nt, Artificial Sequence
  Description of Artificial Sequence: Synthetic oligonucleotide
agggacaccugggcagguu

SEQ ID NO: 1320941 - RNA, 19 nt, Artificial Sequence
  Description of Artificial Sequence: Synthetic oligonucleotide
ggucccggauuaccaugga

SEQ ID NO: 1320942 - RNA, 19 nt, Artificial Sequence
  Description of Artificial Sequence: Synthetic oligonucleotide
ggccugcacgaagaggcca

SEQ ID NO: 1320943 - RNA, 19 nt, Artificial Sequence
  Description of Artificial Sequence: Synthetic oligonucleotide
cggcacgaggagaagcauc

SEQ ID NO: 1320944 - RNA, 19 nt, Artificial Sequence
  Description of Artificial Sequence: Synthetic oligonucleotide
ccaugacugcgauuggggu

SEQ ID NO: 1320945 - RNA, 19 nt, Artificial Sequence
  Description of Artificial Sequence: Synthetic oligonucleotide
cguggauacuuucaccacu

SEQ ID NO: 1320946 - RNA, 19 nt, Artificial Sequence
  Description of Artificial Sequence: Synthetic oligonucleotide
gccagggagcagaauaagu

SEQ ID NO: 1320947 - RNA, 19 nt, Artificial Sequence
  Description of Artificial Sequence: Synthetic oligonucleotide
gggaagccggaacuacccu

SEQ ID NO: 1320948 - RNA, 19 nt, Artificial Sequence
  Description of Artificial Sequence: Synthetic oligonucleotide
gggaacggauaaggccaug

SEQ ID NO: 1320949 - RNA, 19 nt, Artificial Sequence
  Description of Artificial Sequence: Synthetic oligonucleotide
gggcacggcacgaggagaa

SEQ ID NO: 1320950 - RNA, 19 nt, Artificial Sequence
  Description of Artificial Sequence: Synthetic oligonucleotide
gcggagcacacaaaauagu

SEQ ID NO: 1320951 - RNA, 19 nt, Artificial Sequence
  Description of Artificial Sequence: Synthetic oligonucleotide
gugcaggaccauacccaaa

SEQ ID NO: 1320952 - RNA, 19 nt, Artificial Sequence
  Description of Artificial Sequence: Synthetic oligonucleotide
ggugcaacacccacagcuu

SEQ ID NO: 1320953 - RNA, 19 nt, Artificial Sequence
  Description of Artificial Sequence: Synthetic oligonucleotide
cagcuagccggaugcuccu

SEQ ID NO: 1320954 - RNA, 19 nt, Artificial Sequence
  Description of Artificial Sequence: Synthetic oligonucleotide
gcaaagccagggagcagaa

SEQ ID NO: 1320955 - RNA, 19 nt, Artificial Sequence
  Description of Artificial Sequence: Synthetic oligonucleotide
ugacugcgauuggggucuc

SEQ ID NO: 1320956 - RNA, 19 nt, Artificial Sequence
  Description of Artificial Sequence: Synthetic oligonucleotide
ccccguugaagcggcacuc

SEQ ID NO: 1320957 - RNA, 19 nt, Artificial Sequence
  Description of Artificial Sequence: Synthetic oligonucleotide
cuacccugguagggcuuga

SEQ ID NO: 1320958 - RNA, 19 nt, Artificial Sequence
  Description of Artificial Sequence: Synthetic oligonucleotide
cuagccggaugcuccucuu

SEQ ID NO: 1320959 - RNA, 19 nt, Artificial Sequence
  Description of Artificial Sequence: Synthetic oligonucleotide
gugucgcuccgugccagcu

SEQ ID NO: 1320960 - RNA, 19 nt, Artificial Sequence
  Description of Artificial Sequence: Synthetic oligonucleotide
cgccguccagccaggcugc

SEQ ID NO: 1320961 - RNA, 19 nt, Artificial Sequence
  Description of Artificial Sequence: Synthetic oligonucleotide
gccccucucugggcugugg

SEQ ID NO: 1320962 - RNA, 19 nt, Artificial Sequence
  Description of Artificial Sequence: Synthetic oligonucleotide
ugccggcggccagggagau

SEQ ID NO: 1320963 - RNA, 19 nt, Artificial Sequence
  Description of Artificial Sequence: Synthetic oligonucleotide
ccggcggccagggagaugu

SEQ ID NO: 1320964 - RNA, 19 nt, Artificial Sequence
  Description of Artificial Sequence: Synthetic oligonucleotide
cugcacgaagaggccacgu

SEQ ID NO: 1320965 - RNA, 19 nt, Artificial Sequence
  Description of Artificial Sequence: Synthetic oligonucleotide
gggauucagcgaggugguc

SEQ ID NO: 1320966 - RNA, 19 nt, Artificial Sequence
  Description of Artificial Sequence: Synthetic oligonucleotide
gcacgaggagaagcaucuc

SEQ ID NO: 1320967 - RNA, 19 nt, Artificial Sequence
  Description of Artificial Sequence: Synthetic oligonucleotide
ccaagggauucagcgaggu

SEQ ID NO: 1320968 - RNA, 19 nt, Artificial Sequence
  Description of Artificial Sequence: Synthetic oligonucleotide
ggccagggagaugucuugu

SEQ ID NO: 1320969 - RNA, 19 nt, Artificial Sequence
  Description of Artificial Sequence: Synthetic oligonucleotide
cccguugaagcggcacuca

SEQ ID NO: 1320970 - RNA, 19 nt, Artificial Sequence
  Description of Artificial Sequence: Synthetic oligonucleotide
cagguuccuuaaggcacgu

SEQ ID NO: 1320971 - RNA, 19 nt, Artificial Sequence
  Description of Artificial Sequence: Synthetic oligonucleotide
cgugugucgcuccgugcca

SEQ ID NO: 1320972 - RNA, 19 nt, Artificial Sequence
  Description of Artificial Sequence: Synthetic oligonucleotide
ggcggccagggagaugucu

SEQ ID NO: 1320973 - RNA, 19 nt, Artificial Sequence
  Description of Artificial Sequence: Synthetic oligonucleotide
cggauaaggccaugauggu

SEQ ID NO: 1320974 - RNA, 19 nt, Artificial Sequence
  Description of Artificial Sequence: Synthetic oligonucleotide
gcucgagggcagggccugc

SEQ ID NO: 1320975 - RNA, 19 nt, Artificial Sequence
  Description of Artificial Sequence: Synthetic oligonucleotide
gcccaugauuguaccggcu

SEQ ID NO: 1320976 - RNA, 19 nt, Artificial Sequence
  Description of Artificial Sequence: Synthetic oligonucleotide
cugcagcuagccggaugcu

SEQ ID NO: 1320977 - RNA, 19 nt, Artificial Sequence
  Description of Artificial Sequence: Synthetic oligonucleotide
gcggccagggagaugucuu

SEQ ID NO: 1320978 - RNA, 19 nt, Artificial Sequence
  Description of Artificial Sequence: Synthetic oligonucleotide
ggcgcagggcgcggccuca

SEQ ID NO: 1320979 - RNA, 19 nt, Artificial Sequence
  Description of Artificial Sequence: Synthetic oligonucleotide
gcccauugcuccagugaau

SEQ ID NO: 1320980 - RNA, 19 nt, Artificial Sequence
  Description of Artificial Sequence: Synthetic oligonucleotide
cccagcccagcccaugauu

SEQ ID NO: 1320981 - RNA, 19 nt, Artificial Sequence
  Description of Artificial Sequence: Synthetic oligonucleotide
gccacgugugucgcuccgu

SEQ ID NO: 1320982 - RNA, 19 nt, Artificial Sequence
  Description of Artificial Sequence: Synthetic oligonucleotide
ccacgcgcguggauacuuu

SEQ ID NO: 1320983 - RNA, 19 nt, Artificial Sequence
  Description of Artificial Sequence: Synthetic oligonucleotide
cggcagcuugggugggcga

SEQ ID NO: 1320984 - RNA, 19 nt, Artificial Sequence
  Description of Artificial Sequence: Synthetic oligonucleotide
cggcggccagggagauguc

SEQ ID NO: 1320985 - RNA, 19 nt, Artificial Sequence
  Description of Artificial Sequence: Synthetic oligonucleotide
gggccacgcggugcucaau

SEQ ID NO: 1320986 - RNA, 19 nt, Artificial Sequence
  Description of Artificial Sequence: Synthetic oligonucleotide
cgauuggggucucgcccuu

SEQ ID NO: 1320987 - RNA, 19 nt, Artificial Sequence
  Description of Artificial Sequence: Synthetic oligonucleotide
cgguccucgcagcgcugcu

SEQ ID NO: 1320988 - RNA, 19 nt, Artificial Sequence
  Description of Artificial Sequence: Synthetic oligonucleotide
cgcugccggcggccaggga

SEQ ID NO: 1320989 - RNA, 19 nt, Artificial Sequence
  Description of Artificial Sequence: Synthetic oligonucleotide
aauaaaauagcauugggca

SEQ ID NO: 1320990 - RNA, 19 nt, Artificial Sequence
  Description of Artificial Sequence: Synthetic oligonucleotide
aucaccuuuacauugaacc

SEQ ID NO: 1320991 - RNA, 19 nt, Artificial Sequence
  Description of Artificial Sequence: Synthetic oligonucleotide
aacauaauaaacgagggag

SEQ ID NO: 1320992 - RNA, 19 nt, Artificial Sequence
  Description of Artificial Sequence: Synthetic oligonucleotide
aauucagugaccgacaagg

SEQ ID NO: 1320993 - RNA, 19 nt, Artificial Sequence
  Description of Artificial Sequence: Synthetic oligonucleotide
agguauauggcucugugcc

SEQ ID NO: 1320994 - RNA, 19 nt, Artificial Sequence
  Description of Artificial Sequence: Synthetic oligonucleotide
aagguaguggaccaccugc

SEQ ID NO: 1320995 - RNA, 19 nt, Artificial Sequence
  Description of Artificial Sequence: Synthetic oligonucleotide
aaucuugucacaaugccgg

SEQ ID NO: 1320996 - RNA, 19 nt, Artificial Sequence
  Description of Artificial Sequence: Synthetic oligonucleotide
agaaaugagacccucagga

SEQ ID NO: 1320997 - RNA, 19 nt, Artificial Sequence
  Description of Artificial Sequence: Synthetic oligonucleotide
gaaauuacacuucaccagc

SEQ ID NO: 1320998 - RNA, 19 nt, Artificial Sequence
  Description of Artificial Sequence: Synthetic oligonucleotide
acaagggcgagguauaugg

SEQ ID NO: 1320999 - RNA, 19 nt, Artificial Sequence
  Description of Artificial Sequence: Synthetic oligonucleotide
auuacacuucaccagcucg

SEQ ID NO: 1321000 - RNA, 19 nt, Artificial Sequence
  Description of Artificial Sequence: Synthetic oligonucleotide
accaacauaauaaacgagg

SEQ ID NO: 1321001 - RNA, 19 nt, Artificial Sequence
  Description of Artificial Sequence: Synthetic oligonucleotide
ucagugaccgacaaggcca

SEQ ID NO: 1321002 - RNA, 19 nt, Artificial Sequence
  Description of Artificial Sequence: Synthetic oligonucleotide
gaggccaaggacaagacgg

SEQ ID NO: 1321003 - RNA, 19 nt, Artificial Sequence
  Description of Artificial Sequence: Synthetic oligonucleotide
uauaaagugcggcuuuucc

SEQ ID NO: 1321004 - RNA, 19 nt, Artificial Sequence
  Description of Artificial Sequence: Synthetic oligonucleotide
uaauaaacgagggaggcca

SEQ ID NO: 1321005 - RNA, 19 nt, Artificial Sequence
  Description of Artificial Sequence: Synthetic oligonucleotide
uacauugaaccucagccug

SEQ ID NO: 1321006 - RNA, 19 nt, Artificial Sequence
  Description of Artificial Sequence: Synthetic oligonucleotide
aaaucuugucacaaugccg

SEQ ID NO: 1321007 - RNA, 19 nt, Artificial Sequence
  Description of Artificial Sequence: Synthetic oligonucleotide
cauaaaucuugucacaaug

SEQ ID NO: 1321008 - RNA, 19 nt, Artificial Sequence
  Description of Artificial Sequence: Synthetic oligonucleotide
cuccaaagaaaugagaccc

SEQ ID NO: 1321009 - RNA, 19 nt, Artificial Sequence
  Description of Artificial Sequence: Synthetic oligonucleotide
uaaagugcggcuuuuccug

SEQ ID NO: 1321010 - RNA, 19 nt, Artificial Sequence
  Description of Artificial Sequence: Synthetic oligonucleotide
uguacaagaacuccuccac

SEQ ID NO: 1321011 - RNA, 19 nt, Artificial Sequence
  Description of Artificial Sequence: Synthetic oligonucleotide
auaauaaacgagggaggcc

SEQ ID NO: 1321012 - RNA, 19 nt, Artificial Sequence
  Description of Artificial Sequence: Synthetic oligonucleotide
aguccaaauucagugaccg

SEQ ID NO: 1321013 - RNA, 19 nt, Artificial Sequence
  Description of Artificial Sequence: Synthetic oligonucleotide
cauaauaaacgagggaggc

SEQ ID NO: 1321014 - RNA, 19 nt, Artificial Sequence
  Description of Artificial Sequence: Synthetic oligonucleotide
ucugaacgcaauguggagg

SEQ ID NO: 1321015 - RNA, 19 nt, Artificial Sequence
  Description of Artificial Sequence: Synthetic oligonucleotide
gauauugaggucagcuugg

SEQ ID NO: 1321016 - RNA, 19 nt, Artificial Sequence
  Description of Artificial Sequence: Synthetic oligonucleotide
uccacguugaaauuacacu

SEQ ID NO: 1321017 - RNA, 19 nt, Artificial Sequence
  Description of Artificial Sequence: Synthetic oligonucleotide
ucaacaggucaucacguug

SEQ ID NO: 1321018 - RNA, 19 nt, Artificial Sequence
  Description of Artificial Sequence: Synthetic oligonucleotide
ucccacgcaaagcagaggc

SEQ ID NO: 1321019 - RNA, 19 nt, Artificial Sequence
  Description of Artificial Sequence: Synthetic oligonucleotide
uccauucugagcacucacg

SEQ ID NO: 1321020 - RNA, 19 nt, Artificial Sequence
  Description of Artificial Sequence: Synthetic oligonucleotide
uccaaauucagugaccgac

SEQ ID NO: 1321021 - RNA, 19 nt, Artificial Sequence
  Description of Artificial Sequence: Synthetic oligonucleotide
uucccaugaacacggaagc

SEQ ID NO: 1321022 - RNA, 19 nt, Artificial Sequence
  Description of Artificial Sequence: Synthetic oligonucleotide
uugaaccucagccugcgca

SEQ ID NO: 1321023 - RNA, 19 nt, Artificial Sequence
  Description of Artificial Sequence: Synthetic oligonucleotide
ucggaucaccuuuacauug

SEQ ID NO: 1321024 - RNA, 19 nt, Artificial Sequence
  Description of Artificial Sequence: Synthetic oligonucleotide
aagacggacccagccaucc

SEQ ID NO: 1321025 - RNA, 19 nt, Artificial Sequence
  Description of Artificial Sequence: Synthetic oligonucleotide
cugucuuuaaccaccucgc

SEQ ID NO: 1321026 - RNA, 19 nt, Artificial Sequence
  Description of Artificial Sequence: Synthetic oligonucleotide
ugccaaugaguccaaauuc

SEQ ID NO: 1321027 - RNA, 19 nt, Artificial Sequence
  Description of Artificial Sequence: Synthetic oligonucleotide
caacaggucaucacguugc

SEQ ID NO: 1321028 - RNA, 19 nt, Artificial Sequence
  Description of Artificial Sequence: Synthetic oligonucleotide
agggacaauggcuggcucc

SEQ ID NO: 1321029 - RNA, 19 nt, Artificial Sequence
  Description of Artificial Sequence: Synthetic oligonucleotide
acauaauaaacgagggagg

SEQ ID NO: 1321030 - RNA, 19 nt, Artificial Sequence
  Description of Artificial Sequence: Synthetic oligonucleotide
cugaacgcaauguggaggc

SEQ ID NO: 1321031 - RNA, 19 nt, Artificial Sequence
  Description of Artificial Sequence: Synthetic oligonucleotide
ugucggaggaggcugacga

SEQ ID NO: 1321032 - RNA, 19 nt, Artificial Sequence
  Description of Artificial Sequence: Synthetic oligonucleotide
gagacccucaggaacaggg

SEQ ID NO: 1321033 - RNA, 19 nt, Artificial Sequence
  Description of Artificial Sequence: Synthetic oligonucleotide
aaaggcucugaacgcaaug

SEQ ID NO: 1321034 - RNA, 19 nt, Artificial Sequence
  Description of Artificial Sequence: Synthetic oligonucleotide
ugcacuuguuggcaggaag

SEQ ID NO: 1321035 - RNA, 19 nt, Artificial Sequence
  Description of Artificial Sequence: Synthetic oligonucleotide
aguucuucccaugaacacg

SEQ ID NO: 1321036 - RNA, 19 nt, Artificial Sequence
  Description of Artificial Sequence: Synthetic oligonucleotide
auaaaauagcauugggcaa

SEQ ID NO: 1321037 - RNA, 19 nt, Artificial Sequence
  Description of Artificial Sequence: Synthetic oligonucleotide
aagggcgagguauauggcu

SEQ ID NO: 1321038 - RNA, 19 nt, Artificial Sequence
  Description of Artificial Sequence: Synthetic oligonucleotide
ggauauugaggucagcuug

SEQ ID NO: 1321039 - RNA, 19 nt, Artificial Sequence
  Description of Artificial Sequence: Synthetic oligonucleotide
ucaccuuuacauugaaccu

SEQ ID NO: 1321040 - RNA, 19 nt, Artificial Sequence
  Description of Artificial Sequence: Synthetic oligonucleotide
aguugggguauaaagugcg

SEQ ID NO: 1321041 - RNA, 19 nt, Artificial Sequence
  Description of Artificial Sequence: Synthetic oligonucleotide
ucucgcaucacagugucca

SEQ ID NO: 1321042 - RNA, 19 nt, Artificial Sequence
  Description of Artificial Sequence: Synthetic oligonucleotide
ucacguugcacugugacaa

SEQ ID NO: 1321043 - RNA, 19 nt, Artificial Sequence
  Description of Artificial Sequence: Synthetic oligonucleotide
gagcuguaccccaagaugc

SEQ ID NO: 1321044 - RNA, 19 nt, Artificial Sequence
  Description of Artificial Sequence: Synthetic oligonucleotide
ugagggccgagaaagggug

SEQ ID NO: 1321045 - RNA, 19 nt, Artificial Sequence
  Description of Artificial Sequence: Synthetic oligonucleotide
uucauaaaucuugucacaa

SEQ ID NO: 1321046 - RNA, 19 nt, Artificial Sequence
  Description of Artificial Sequence: Synthetic oligonucleotide
uuacacuucaccagcucgu

SEQ ID NO: 1321047 - RNA, 19 nt, Artificial Sequence
  Description of Artificial Sequence: Synthetic oligonucleotide
ugaagccccaccucggugc

SEQ ID NO: 1321048 - RNA, 19 nt, Artificial Sequence
  Description of Artificial Sequence: Synthetic oligonucleotide
ccaacauaauaaacgaggg

SEQ ID NO: 1321049 - RNA, 19 nt, Artificial Sequence
  Description of Artificial Sequence: Synthetic oligonucleotide
uugggcaaaggcagucucg

SEQ ID NO: 1321050 - RNA, 19 nt, Artificial Sequence
  Description of Artificial Sequence: Synthetic oligonucleotide
auagcauugggcaaaggca

SEQ ID NO: 1321051 - RNA, 19 nt, Artificial Sequence
  Description of Artificial Sequence: Synthetic oligonucleotide
ucagguggaaguucuuccc

SEQ ID NO: 1321052 - RNA, 19 nt, Artificial Sequence
  Description of Artificial Sequence: Synthetic oligonucleotide
ugcgggaugaguccugccc

SEQ ID NO: 1321053 - RNA, 19 nt, Artificial Sequence
  Description of Artificial Sequence: Synthetic oligonucleotide
gaacacggaagccauguuc

SEQ ID NO: 1321054 - RNA, 19 nt, Artificial Sequence
  Description of Artificial Sequence: Synthetic oligonucleotide
gauucacauccccaaugcc

SEQ ID NO: 1321055 - RNA, 19 nt, Artificial Sequence
  Description of Artificial Sequence: Synthetic oligonucleotide
gagguauauggcucugugc

SEQ ID NO: 1321056 - RNA, 19 nt, Artificial Sequence
  Description of Artificial Sequence: Synthetic oligonucleotide
acuccgaauuguaaacacc

SEQ ID NO: 1321057 - RNA, 19 nt, Artificial Sequence
  Description of Artificial Sequence: Synthetic oligonucleotide
cuccgaauuguaaacacca

SEQ ID NO: 1321058 - RNA, 19 nt, Artificial Sequence
  Description of Artificial Sequence: Synthetic oligonucleotide
ugggguauaaagugcggcu

SEQ ID NO: 1321059 - RNA, 19 nt, Artificial Sequence
  Description of Artificial Sequence: Synthetic oligonucleotide
ugcaggauauugaggucag

SEQ ID NO: 1321060 - RNA, 19 nt, Artificial Sequence
  Description of Artificial Sequence: Synthetic oligonucleotide
uuguuagccuggaucaggu

SEQ ID NO: 1321061 - RNA, 19 nt, Artificial Sequence
  Description of Artificial Sequence: Synthetic oligonucleotide
aaacgagggaggccaagga

SEQ ID NO: 1321062 - RNA, 19 nt, Artificial Sequence
  Description of Artificial Sequence: Synthetic oligonucleotide
ggacacaagaggcagcucc

SEQ ID NO: 1321063 - RNA, 19 nt, Artificial Sequence
  Description of Artificial Sequence: Synthetic oligonucleotide
gcaguugggguauaaagug

SEQ ID NO: 1321064 - RNA, 19 nt, Artificial Sequence
  Description of Artificial Sequence: Synthetic oligonucleotide
gggucaacaggucaucacg

SEQ ID NO: 1321065 - RNA, 19 nt, Artificial Sequence
  Description of Artificial Sequence: Synthetic oligonucleotide
acguugaaauuacacuuca

SEQ ID NO: 1321066 - RNA, 19 nt, Artificial Sequence
  Description of Artificial Sequence: Synthetic oligonucleotide
cuuguuagccuggaucagg

SEQ ID NO: 1321067 - RNA, 19 nt, Artificial Sequence
  Description of Artificial Sequence: Synthetic oligonucleotide
cuccacguugaaauuacac

SEQ ID NO: 1321068 - RNA, 19 nt, Artificial Sequence
  Description of Artificial Sequence: Synthetic oligonucleotide
auucacauccccaaugcca

SEQ ID NO: 1321069 - RNA, 19 nt, Artificial Sequence
  Description of Artificial Sequence: Synthetic oligonucleotide
ucacgcccacagaugaccg

SEQ ID NO: 1321070 - RNA, 19 nt, Artificial Sequence
  Description of Artificial Sequence: Synthetic oligonucleotide
acuuguuggcaggaagcgc

SEQ ID NO: 1321071 - RNA, 19 nt, Artificial Sequence
  Description of Artificial Sequence: Synthetic oligonucleotide
uccaaagaaaugagacccu

SEQ ID NO: 1321072 - RNA, 19 nt, Artificial Sequence
  Description of Artificial Sequence: Synthetic oligonucleotide
cagccauccugcuaggagc

SEQ ID NO: 1321073 - RNA, 19 nt, Artificial Sequence
  Description of Artificial Sequence: Synthetic oligonucleotide
cauucugagcacucacgcc

SEQ ID NO: 1321074 - RNA, 19 nt, Artificial Sequence
  Description of Artificial Sequence: Synthetic oligonucleotide
cagcuccucaccuuguuag

SEQ ID NO: 1321075 - RNA, 19 nt, Artificial Sequence
  Description of Artificial Sequence: Synthetic oligonucleotide
cacguugaaauuacacuuc

SEQ ID NO: 1321076 - RNA, 19 nt, Artificial Sequence
  Description of Artificial Sequence: Synthetic oligonucleotide
uccuccacguugaaauuac

SEQ ID NO: 1321077 - RNA, 19 nt, Artificial Sequence
  Description of Artificial Sequence: Synthetic oligonucleotide
aaagugcggcuuuuccuga

SEQ ID NO: 1321078 - RNA, 19 nt, Artificial Sequence
  Description of Artificial Sequence: Synthetic oligonucleotide
ugaaguggagacggugagg

SEQ ID NO: 1321079 - RNA, 19 nt, Artificial Sequence
  Description of Artificial Sequence: Synthetic oligonucleotide
agccugggacguuaucacc

SEQ ID NO: 1321080 - RNA, 19 nt, Artificial Sequence
  Description of Artificial Sequence: Synthetic oligonucleotide
caucacguugcacugugac

SEQ ID NO: 1321081 - RNA, 19 nt, Artificial Sequence
  Description of Artificial Sequence: Synthetic oligonucleotide
ggauucacauccccaaugc

SEQ ID NO: 1321082 - RNA, 19 nt, Artificial Sequence
  Description of Artificial Sequence: Synthetic oligonucleotide
guauauggcucugugcccc

SEQ ID NO: 1321083 - RNA, 19 nt, Artificial Sequence
  Description of Artificial Sequence: Synthetic oligonucleotide
ugcugaagccccaccucgg

SEQ ID NO: 1321084 - RNA, 19 nt, Artificial Sequence
  Description of Artificial Sequence: Synthetic oligonucleotide
uucaaaguuccugcacucc

SEQ ID NO: 1321085 - RNA, 19 nt, Artificial Sequence
  Description of Artificial Sequence: Synthetic oligonucleotide
cacuccgaauuguaaacac

SEQ ID NO: 1321086 - RNA, 19 nt, Artificial Sequence
  Description of Artificial Sequence: Synthetic oligonucleotide
gaauuguaaacaccaacau

SEQ ID NO: 1321087 - RNA, 19 nt, Artificial Sequence
  Description of Artificial Sequence: Synthetic oligonucleotide
acaagacggacccagccau

SEQ ID NO: 1321088 - RNA, 19 nt, Artificial Sequence
  Description of Artificial Sequence: Synthetic oligonucleotide
caccuuguuagccuggauc

SEQ ID NO: 1321089 - RNA, 19 nt, Artificial Sequence
  Description of Artificial Sequence: Synthetic oligonucleotide
guacaagaacuccuccacc

SEQ ID NO: 1321090 - RNA, 19 nt, Artificial Sequence
  Description of Artificial Sequence: Synthetic oligonucleotide
aggguggugcuuccagagc

SEQ ID NO: 1321091 - RNA, 19 nt, Artificial Sequence
  Description of Artificial Sequence: Synthetic oligonucleotide
ugcuaggagccuccaaaga

SEQ ID NO: 1321092 - RNA, 19 nt, Artificial Sequence
  Description of Artificial Sequence: Synthetic oligonucleotide
ccauguucaaaguuccugc

SEQ ID NO: 1321093 - RNA, 19 nt, Artificial Sequence
  Description of Artificial Sequence: Synthetic oligonucleotide
ucaggaagggauucacauc

SEQ ID NO: 1321094 - RNA, 19 nt, Artificial Sequence
  Description of Artificial Sequence: Synthetic oligonucleotide
augaacacggaagccaugu

SEQ ID NO: 1321095 - RNA, 19 nt, Artificial Sequence
  Description of Artificial Sequence: Synthetic oligonucleotide
acacuucaccagcucguac

SEQ ID NO: 1321096 - RNA, 19 nt, Artificial Sequence
  Description of Artificial Sequence: Synthetic oligonucleotide
gaagguaguggaccaccug

SEQ ID NO: 1321097 - RNA, 19 nt, Artificial Sequence
  Description of Artificial Sequence: Synthetic oligonucleotide
auugaaccucagccugcgc

SEQ ID NO: 1321098 - RNA, 19 nt, Artificial Sequence
  Description of Artificial Sequence: Synthetic oligonucleotide
gacaagacggacccagcca

SEQ ID NO: 1321099 - RNA, 19 nt, Artificial Sequence
  Description of Artificial Sequence: Synthetic oligonucleotide
agaggucaggaagacugac

SEQ ID NO: 1321100 - RNA, 19 nt, Artificial Sequence
  Description of Artificial Sequence: Synthetic oligonucleotide
ccaaggacaagacggaccc

SEQ ID NO: 1321101 - RNA, 19 nt, Artificial Sequence
  Description of Artificial Sequence: Synthetic oligonucleotide
cuguaccccaagaugcccc

SEQ ID NO: 1321102 - RNA, 19 nt, Artificial Sequence
  Description of Artificial Sequence: Synthetic oligonucleotide
cugaaguggagacggugag

SEQ ID NO: 1321103 - RNA, 19 nt, Artificial Sequence
  Description of Artificial Sequence: Synthetic oligonucleotide
ugcggcuuuuccugaagug

SEQ ID NO: 1321104 - RNA, 19 nt, Artificial Sequence
  Description of Artificial Sequence: Synthetic oligonucleotide
gucaucacguugcacugug

SEQ ID NO: 1321105 - RNA, 19 nt, Artificial Sequence
  Description of Artificial Sequence: Synthetic oligonucleotide
cacgcaaagcagaggcugg

SEQ ID NO: 1321106 - RNA, 19 nt, Artificial Sequence
  Description of Artificial Sequence: Synthetic oligonucleotide
uaccccaagaugccccaag

SEQ ID NO: 1321107 - RNA, 19 nt, Artificial Sequence
  Description of Artificial Sequence: Synthetic oligonucleotide
caaggucccacgcaaagca

SEQ ID NO: 1321108 - RNA, 19 nt, Artificial Sequence
  Description of Artificial Sequence: Synthetic oligonucleotide
aaaggcagucucgcaucac

SEQ ID NO: 1321109 - RNA, 19 nt, Artificial Sequence
  Description of Artificial Sequence: Synthetic oligonucleotide
ugggcaaaggcagucucgc

SEQ ID NO: 1321110 - RNA, 19 nt, Artificial Sequence
  Description of Artificial Sequence: Synthetic oligonucleotide
gaacgcaauguggaggcug

SEQ ID NO: 1321111 - RNA, 19 nt, Artificial Sequence
  Description of Artificial Sequence: Synthetic oligonucleotide
aucacguugcacugugaca

SEQ ID NO: 1321112 - RNA, 19 nt, Artificial Sequence
  Description of Artificial Sequence: Synthetic oligonucleotide
ucuucccaugaacacggaa

SEQ ID NO: 1321113 - RNA, 19 nt, Artificial Sequence
  Description of Artificial Sequence: Synthetic oligonucleotide
caacauaauaaacgaggga

SEQ ID NO: 1321114 - RNA, 19 nt, Artificial Sequence
  Description of Artificial Sequence: Synthetic oligonucleotide
uccgaauuguaaacaccaa

SEQ ID NO: 1321115 - RNA, 19 nt, Artificial Sequence
  Description of Artificial Sequence: Synthetic oligonucleotide
gaguccugcccaaaguccc

SEQ ID NO: 1321116 - RNA, 19 nt, Artificial Sequence
  Description of Artificial Sequence: Synthetic oligonucleotide
cauugaaccucagccugcg

SEQ ID NO: 1321117 - RNA, 19 nt, Artificial Sequence
  Description of Artificial Sequence: Synthetic oligonucleotide
cugcuaggagccuccaaag

SEQ ID NO: 1321118 - RNA, 19 nt, Artificial Sequence
  Description of Artificial Sequence: Synthetic oligonucleotide
ugccgguucaagugcagga

SEQ ID NO: 1321119 - RNA, 19 nt, Artificial Sequence
  Description of Artificial Sequence: Synthetic oligonucleotide
cucugaacgcaauguggag

SEQ ID NO: 1321120 - RNA, 19 nt, Artificial Sequence
  Description of Artificial Sequence: Synthetic oligonucleotide
ugcccuguacaagaacucc

SEQ ID NO: 1321121 - RNA, 19 nt, Artificial Sequence
  Description of Artificial Sequence: Synthetic oligonucleotide
aacaagggcgagguauaug

SEQ ID NO: 1321122 - RNA, 19 nt, Artificial Sequence
  Description of Artificial Sequence: Synthetic oligonucleotide
ugugccccaaggucccacg

SEQ ID NO: 1321123 - RNA, 19 nt, Artificial Sequence
  Description of Artificial Sequence: Synthetic oligonucleotide
uccucaccuuguuagccug

SEQ ID NO: 1321124 - RNA, 19 nt, Artificial Sequence
  Description of Artificial Sequence: Synthetic oligonucleotide
caggguggugcuuccagag

SEQ ID NO: 1321125 - RNA, 19 nt, Artificial Sequence
  Description of Artificial Sequence: Synthetic oligonucleotide
ugaccgacaaggccaccug

SEQ ID NO: 1321126 - RNA, 19 nt, Artificial Sequence
  Description of Artificial Sequence: Synthetic oligonucleotide
agcuguaccccaagaugcc

SEQ ID NO: 1321127 - RNA, 19 nt, Artificial Sequence
  Description of Artificial Sequence: Synthetic oligonucleotide
cuccucacccaccaggcug

SEQ ID NO: 1321128 - RNA, 19 nt, Artificial Sequence
  Description of Artificial Sequence: Synthetic oligonucleotide
cucacgcccacagaugacc

SEQ ID NO: 1321129 - RNA, 19 nt, Artificial Sequence
  Description of Artificial Sequence: Synthetic oligonucleotide
uguaccccaagaugcccca

SEQ ID NO: 1321130 - RNA, 19 nt, Artificial Sequence
  Description of Artificial Sequence: Synthetic oligonucleotide
caccuuuacauugaaccuc

SEQ ID NO: 1321131 - RNA, 19 nt, Artificial Sequence
  Description of Artificial Sequence: Synthetic oligonucleotide
gccguguccauucugagca

SEQ ID NO: 1321132 - RNA, 19 nt, Artificial Sequence
  Description of Artificial Sequence: Synthetic oligonucleotide
uguggagggugcccgggca

SEQ ID NO: 1321133 - RNA, 19 nt, Artificial Sequence
  Description of Artificial Sequence: Synthetic oligonucleotide
aggcucugaacgcaaugug

SEQ ID NO: 1321134 - RNA, 19 nt, Artificial Sequence
  Description of Artificial Sequence: Synthetic oligonucleotide
agaugccccaaggggaugg

SEQ ID NO: 1321135 - RNA, 19 nt, Artificial Sequence
  Description of Artificial Sequence: Synthetic oligonucleotide
agggcgagguauauggcuc

SEQ ID NO: 1321136 - RNA, 19 nt, Artificial Sequence
  Description of Artificial Sequence: Synthetic oligonucleotide
cugcacuccuccucgcucc

SEQ ID NO: 1321137 - RNA, 19 nt, Artificial Sequence
  Description of Artificial Sequence: Synthetic oligonucleotide
cgaauuguaaacaccaaca

SEQ ID NO: 1321138 - RNA, 19 nt, Artificial Sequence
  Description of Artificial Sequence: Synthetic oligonucleotide
agugcggcuuuuccugaag

SEQ ID NO: 1321139 - RNA, 19 nt, Artificial Sequence
  Description of Artificial Sequence: Synthetic oligonucleotide
ggcucugaacgcaaugugg

SEQ ID NO: 1321140 - RNA, 19 nt, Artificial Sequence
  Description of Artificial Sequence: Synthetic oligonucleotide
cuaggagccuccaaagaaa

SEQ ID NO: 1321141 - RNA, 19 nt, Artificial Sequence
  Description of Artificial Sequence: Synthetic oligonucleotide
caucaugaucugaagcaga

SEQ ID NO: 1321142 - RNA, 19 nt, Artificial Sequence
  Description of Artificial Sequence: Synthetic oligonucleotide
guggaaguucuucccauga

SEQ ID NO: 1321143 - RNA, 19 nt, Artificial Sequence
  Description of Artificial Sequence: Synthetic oligonucleotide
gguauauggcucugugccc

SEQ ID NO: 1321144 - RNA, 19 nt, Artificial Sequence
  Description of Artificial Sequence: Synthetic oligonucleotide
guugggguauaaagugcgg

SEQ ID NO: 1321145 - RNA, 19 nt, Artificial Sequence
  Description of Artificial Sequence: Synthetic oligonucleotide
agggccgagaaaggguggc

SEQ ID NO: 1321146 - RNA, 19 nt, Artificial Sequence
  Description of Artificial Sequence: Synthetic oligonucleotide
ccauucugagcacucacgc

SEQ ID NO: 1321147 - RNA, 19 nt, Artificial Sequence
  Description of Artificial Sequence: Synthetic oligonucleotide
agggaggccaaggacaaga

SEQ ID NO: 1321148 - RNA, 19 nt, Artificial Sequence
  Description of Artificial Sequence: Synthetic oligonucleotide
uggccaacaagggcgaggu

SEQ ID NO: 1321149 - RNA, 19 nt, Artificial Sequence
  Description of Artificial Sequence: Synthetic oligonucleotide
gccuccaaagaaaugagac

SEQ ID NO: 1321150 - RNA, 19 nt, Artificial Sequence
  Description of Artificial Sequence: Synthetic oligonucleotide
cucgcccucuggaaucugg

SEQ ID NO: 1321151 - RNA, 19 nt, Artificial Sequence
  Description of Artificial Sequence: Synthetic oligonucleotide
agucccaucaugaucugaa

SEQ ID NO: 1321152 - RNA, 19 nt, Artificial Sequence
  Description of Artificial Sequence: Synthetic oligonucleotide
gugcaggauauugagguca

SEQ ID NO: 1321153 - RNA, 19 nt, Artificial Sequence
  Description of Artificial Sequence: Synthetic oligonucleotide
ugaggucuggggucugugu

SEQ ID NO: 1321154 - RNA, 19 nt, Artificial Sequence
  Description of Artificial Sequence: Synthetic oligonucleotide
gcuucaaaucaauuuaaua

SEQ ID NO: 1321155 - RNA, 19 nt, Artificial Sequence
  Description of Artificial Sequence: Synthetic oligonucleotide
caagggcgagguauauggc

SEQ ID NO: 1321156 - RNA, 19 nt, Artificial Sequence
  Description of Artificial Sequence: Synthetic oligonucleotide
auaaacgagggaggccaag

SEQ ID NO: 1321157 - RNA, 19 nt, Artificial Sequence
  Description of Artificial Sequence: Synthetic oligonucleotide
ccgaauuguaaacaccaac

SEQ ID NO: 1321158 - RNA, 19 nt, Artificial Sequence
  Description of Artificial Sequence: Synthetic oligonucleotide
ggacaagacggacccagcc

SEQ ID NO: 1321159 - RNA, 19 nt, Artificial Sequence
  Description of Artificial Sequence: Synthetic oligonucleotide
uguccauucugagcacuca

SEQ ID NO: 1321160 - RNA, 19 nt, Artificial Sequence
  Description of Artificial Sequence: Synthetic oligonucleotide
aaugccgguucaagugcag

SEQ ID NO: 1321161 - RNA, 19 nt, Artificial Sequence
  Description of Artificial Sequence: Synthetic oligonucleotide
uaaccaccucgcccucugg

SEQ ID NO: 1321162 - RNA, 19 nt, Artificial Sequence
  Description of Artificial Sequence: Synthetic oligonucleotide
aaggucccacgcaaagcag

SEQ ID NO: 1321163 - RNA, 19 nt, Artificial Sequence
  Description of Artificial Sequence: Synthetic oligonucleotide
uauauggcucugugcccca

SEQ ID NO: 1321164 - RNA, 19 nt, Artificial Sequence
  Description of Artificial Sequence: Synthetic oligonucleotide
gagaccccacuccgaauug

SEQ ID NO: 1321165 - RNA, 19 nt, Artificial Sequence
  Description of Artificial Sequence: Synthetic oligonucleotide
guggagacggugagggccg

SEQ ID NO: 1321166 - RNA, 19 nt, Artificial Sequence
  Description of Artificial Sequence: Synthetic oligonucleotide
ucccaugaacacggaagcc

SEQ ID NO: 1321167 - RNA, 19 nt, Artificial Sequence
  Description of Artificial Sequence: Synthetic oligonucleotide
ggaugaguccugcccaaag

SEQ ID NO: 1321168 - RNA, 19 nt, Artificial Sequence
  Description of Artificial Sequence: Synthetic oligonucleotide
gcggcuuuuccugaagugg

SEQ ID NO: 1321169 - RNA, 19 nt, Artificial Sequence
  Description of Artificial Sequence: Synthetic oligonucleotide
acggacccagccauccugc

SEQ ID NO: 1321170 - RNA, 19 nt, Artificial Sequence
  Description of Artificial Sequence: Synthetic oligonucleotide
caugggcucugcagugucc

SEQ ID NO: 1321171 - RNA, 19 nt, Artificial Sequence
  Description of Artificial Sequence: Synthetic oligonucleotide
gaguccgucucggaucacc

SEQ ID NO: 1321172 - RNA, 19 nt, Artificial Sequence
  Description of Artificial Sequence: Synthetic oligonucleotide
uccugcccaaagucccagg

SEQ ID NO: 1321173 - RNA, 19 nt, Artificial Sequence
  Description of Artificial Sequence: Synthetic oligonucleotide
acguugcacugugacaaag

SEQ ID NO: 1321174 - RNA, 19 nt, Artificial Sequence
  Description of Artificial Sequence: Synthetic oligonucleotide
cacaagcccgcugcggugg

SEQ ID NO: 1321175 - RNA, 19 nt, Artificial Sequence
  Description of Artificial Sequence: Synthetic oligonucleotide
uggcuccauguugggaugg

SEQ ID NO: 1321176 - RNA, 19 nt, Artificial Sequence
  Description of Artificial Sequence: Synthetic oligonucleotide
aucugaagcagaggaggca

SEQ ID NO: 1321177 - RNA, 19 nt, Artificial Sequence
  Description of Artificial Sequence: Synthetic oligonucleotide
agcgcguccuccucagugu

SEQ ID NO: 1321178 - RNA, 19 nt, Artificial Sequence
  Description of Artificial Sequence: Synthetic oligonucleotide
guggccaacaagggcgagg

SEQ ID NO: 1321179 - RNA, 19 nt, Artificial Sequence
  Description of Artificial Sequence: Synthetic oligonucleotide
aggaagcgcguccuccuca

SEQ ID NO: 1321180 - RNA, 19 nt, Artificial Sequence
  Description of Artificial Sequence: Synthetic oligonucleotide
cacauccccaaugccaaug

SEQ ID NO: 1321181 - RNA, 19 nt, Artificial Sequence
  Description of Artificial Sequence: Synthetic oligonucleotide
uuuaaccaccucgcccucu

SEQ ID NO: 1321182 - RNA, 19 nt, Artificial Sequence
  Description of Artificial Sequence: Synthetic oligonucleotide
cugcccuguacaagaacuc

SEQ ID NO: 1321183 - RNA, 19 nt, Artificial Sequence
  Description of Artificial Sequence: Synthetic oligonucleotide
aagugcggcuuuuccugaa

SEQ ID NO: 1321184 - RNA, 19 nt, Artificial Sequence
  Description of Artificial Sequence: Synthetic oligonucleotide
accugugccggggccaugg

SEQ ID NO: 1321185 - RNA, 19 nt, Artificial Sequence
  Description of Artificial Sequence: Synthetic oligonucleotide
cucugcaguguccucgcuc

SEQ ID NO: 1321186 - RNA, 19 nt, Artificial Sequence
  Description of Artificial Sequence: Synthetic oligonucleotide
ugaacacggaagccauguu

SEQ ID NO: 1321187 - RNA, 19 nt, Artificial Sequence
  Description of Artificial Sequence: Synthetic oligonucleotide
augccgguucaagugcagg

SEQ ID NO: 1321188 - RNA, 19 nt, Artificial Sequence
  Description of Artificial Sequence: Synthetic oligonucleotide
gguggaaguucuucccaug

SEQ ID NO: 1321189 - RNA, 19 nt, Artificial Sequence
  Description of Artificial Sequence: Synthetic oligonucleotide
ugcgugggagaggucagga

SEQ ID NO: 1321190 - RNA, 19 nt, Artificial Sequence
  Description of Artificial Sequence: Synthetic oligonucleotide
guacagcgccuguucacug

SEQ ID NO: 1321191 - RNA, 19 nt, Artificial Sequence
  Description of Artificial Sequence: Synthetic oligonucleotide
cacgcuggggcuccacagc

SEQ ID NO: 1321192 - RNA, 19 nt, Artificial Sequence
  Description of Artificial Sequence: Synthetic oligonucleotide
uggcucggcggcacagaag

SEQ ID NO: 1321193 - RNA, 19 nt, Artificial Sequence
  Description of Artificial Sequence: Synthetic oligonucleotide
guauaaagugcggcuuuuc

SEQ ID NO: 1321194 - RNA, 19 nt, Artificial Sequence
  Description of Artificial Sequence: Synthetic oligonucleotide
cccacuccgaauuguaaac

SEQ ID NO: 1321195 - RNA, 19 nt, Artificial Sequence
  Description of Artificial Sequence: Synthetic oligonucleotide
cgugggagaggucaggaag

SEQ ID NO: 1321196 - RNA, 19 nt, Artificial Sequence
  Description of Artificial Sequence: Synthetic oligonucleotide
ucuugucacaaugccgguu

SEQ ID NO: 1321197 - RNA, 19 nt, Artificial Sequence
  Description of Artificial Sequence: Synthetic oligonucleotide
cuggcuccauguugggaug

SEQ ID NO: 1321198 - RNA, 19 nt, Artificial Sequence
  Description of Artificial Sequence: Synthetic oligonucleotide
cagaguccgucucggauca

SEQ ID NO: 1321199 - RNA, 19 nt, Artificial Sequence
  Description of Artificial Sequence: Synthetic oligonucleotide
ggcuggacacaagaggcag

SEQ ID NO: 1321200 - RNA, 19 nt, Artificial Sequence
  Description of Artificial Sequence: Synthetic oligonucleotide
aggccuggcagugcugccg

SEQ ID NO: 1321201 - RNA, 19 nt, Artificial Sequence
  Description of Artificial Sequence: Synthetic oligonucleotide
caggauauugaggucagcu

SEQ ID NO: 1321202 - RNA, 19 nt, Artificial Sequence
  Description of Artificial Sequence: Synthetic oligonucleotide
gcaaaggcagucucgcauc

SEQ ID NO: 1321203 - RNA, 19 nt, Artificial Sequence
  Description of Artificial Sequence: Synthetic oligonucleotide
aagaugccccaaggggaug

SEQ ID NO: 1321204 - RNA, 19 nt, Artificial Sequence
  Description of Artificial Sequence: Synthetic oligonucleotide
agugucggaggaggcugac

SEQ ID NO: 1321205 - RNA, 19 nt, Artificial Sequence
  Description of Artificial Sequence: Synthetic oligonucleotide
gagggccgagaaagggugg

SEQ ID NO: 1321206 - RNA, 19 nt, Artificial Sequence
  Description of Artificial Sequence: Synthetic oligonucleotide
agacggugagggccgagaa

SEQ ID NO: 1321207 - RNA, 19 nt, Artificial Sequence
  Description of Artificial Sequence: Synthetic oligonucleotide
caaaggcagucucgcauca

SEQ ID NO: 1321208 - RNA, 19 nt, Artificial Sequence
  Description of Artificial Sequence: Synthetic oligonucleotide
ucugagcacucacgcccac

SEQ ID NO: 1321209 - RNA, 19 nt, Artificial Sequence
  Description of Artificial Sequence: Synthetic oligonucleotide
cugggacguuaucaccagc

SEQ ID NO: 1321210 - RNA, 19 nt, Artificial Sequence
  Description of Artificial Sequence: Synthetic oligonucleotide
accaccucgcccucuggaa

SEQ ID NO: 1321211 - RNA, 19 nt, Artificial Sequence
  Description of Artificial Sequence: Synthetic oligonucleotide
acaagcccgcugcgguggg

SEQ ID NO: 1321212 - RNA, 19 nt, Artificial Sequence
  Description of Artificial Sequence: Synthetic oligonucleotide
cagguggaaguucuuccca

SEQ ID NO: 1321213 - RNA, 19 nt, Artificial Sequence
  Description of Artificial Sequence: Synthetic oligonucleotide
acgagccugggacguuauc

SEQ ID NO: 1321214 - RNA, 19 nt, Artificial Sequence
  Description of Artificial Sequence: Synthetic oligonucleotide
agucaggaagggauucaca

SEQ ID NO: 1321215 - RNA, 19 nt, Artificial Sequence
  Description of Artificial Sequence: Synthetic oligonucleotide
ugggaugggcccucuccaa

SEQ ID NO: 1321216 - RNA, 19 nt, Artificial Sequence
  Description of Artificial Sequence: Synthetic oligonucleotide
gccaaggacaagacggacc

SEQ ID NO: 1321217 - RNA, 19 nt, Artificial Sequence
  Description of Artificial Sequence: Synthetic oligonucleotide
agcuuggaacuggggcccc

SEQ ID NO: 1321218 - RNA, 19 nt, Artificial Sequence
  Description of Artificial Sequence: Synthetic oligonucleotide
acaaaggcucugaacgcaa

SEQ ID NO: 1321219 - RNA, 19 nt, Artificial Sequence
  Description of Artificial Sequence: Synthetic oligonucleotide
cuuuaaccaccucgcccuc

SEQ ID NO: 1321220 - RNA, 19 nt, Artificial Sequence
  Description of Artificial Sequence: Synthetic oligonucleotide
ucccgcucugggagcacgc

SEQ ID NO: 1321221 - RNA, 19 nt, Artificial Sequence
  Description of Artificial Sequence: Synthetic oligonucleotide
uguccucgcucagauccac

SEQ ID NO: 1321222 - RNA, 19 nt, Artificial Sequence
  Description of Artificial Sequence: Synthetic oligonucleotide
agccuccaaagaaaugaga

SEQ ID NO: 1321223 - RNA, 19 nt, Artificial Sequence
  Description of Artificial Sequence: Synthetic oligonucleotide
aggucccacgcaaagcaga

SEQ ID NO: 1321224 - RNA, 19 nt, Artificial Sequence
  Description of Artificial Sequence: Synthetic oligonucleotide
cuugcacuuguuggcagga

SEQ ID NO: 1321225 - RNA, 19 nt, Artificial Sequence
  Description of Artificial Sequence: Synthetic oligonucleotide
caagacggacccagccauc

SEQ ID NO: 1321226 - RNA, 19 nt, Artificial Sequence
  Description of Artificial Sequence: Synthetic oligonucleotide
cugccagguuggcucggcg

SEQ ID NO: 1321227 - RNA, 19 nt, Artificial Sequence
  Description of Artificial Sequence: Synthetic oligonucleotide
aguccgucucggaucaccu

SEQ ID NO: 1321228 - RNA, 19 nt, Artificial Sequence
  Description of Artificial Sequence: Synthetic oligonucleotide
gacggugagggccgagaaa

SEQ ID NO: 1321229 - RNA, 19 nt, Artificial Sequence
  Description of Artificial Sequence: Synthetic oligonucleotide
ugaacgcaauguggaggcu

SEQ ID NO: 1321230 - RNA, 19 nt, Artificial Sequence
  Description of Artificial Sequence: Synthetic oligonucleotide
cccuguacaagaacuccuc

SEQ ID NO: 1321231 - RNA, 19 nt, Artificial Sequence
  Description of Artificial Sequence: Synthetic oligonucleotide
gugucggaggaggcugacg

SEQ ID NO: 1321232 - RNA, 19 nt, Artificial Sequence
  Description of Artificial Sequence: Synthetic oligonucleotide
gcuccucaccuuguuagcc

SEQ ID NO: 1321233 - RNA, 19 nt, Artificial Sequence
  Description of Artificial Sequence: Synthetic oligonucleotide
agacggacccagccauccu

SEQ ID NO: 1321234 - RNA, 19 nt, Artificial Sequence
  Description of Artificial Sequence: Synthetic oligonucleotide
ucacauccccaaugccaau

SEQ ID NO: 1321235 - RNA, 19 nt, Artificial Sequence
  Description of Artificial Sequence: Synthetic oligonucleotide
ggcaguugggguauaaagu

SEQ ID NO: 1321236 - RNA, 19 nt, Artificial Sequence
  Description of Artificial Sequence: Synthetic oligonucleotide
ugacgagccugggacguua

SEQ ID NO: 1321237 - RNA, 19 nt, Artificial Sequence
  Description of Artificial Sequence: Synthetic oligonucleotide
gucccacgcaaagcagagg

SEQ ID NO: 1321238 - RNA, 19 nt, Artificial Sequence
  Description of Artificial Sequence: Synthetic oligonucleotide
ugccugcccagagacccca

SEQ ID NO: 1321239 - RNA, 19 nt, Artificial Sequence
  Description of Artificial Sequence: Synthetic oligonucleotide
ccgacaaggccaccugugc

SEQ ID NO: 1321240 - RNA, 19 nt, Artificial Sequence
  Description of Artificial Sequence: Synthetic oligonucleotide
cauguugggaugggcccuc

SEQ ID NO: 1321241 - RNA, 19 nt, Artificial Sequence
  Description of Artificial Sequence: Synthetic oligonucleotide
ccugggacguuaucaccag

SEQ ID NO: 1321242 - RNA, 19 nt, Artificial Sequence
  Description of Artificial Sequence: Synthetic oligonucleotide
cguugaaauuacacuucac

SEQ ID NO: 1321243 - RNA, 19 nt, Artificial Sequence
  Description of Artificial Sequence: Synthetic oligonucleotide
ggcaaaggcagucucgcau

SEQ ID NO: 1321244 - RNA, 19 nt, Artificial Sequence
  Description of Artificial Sequence: Synthetic oligonucleotide
cugcgugggagaggucagg

SEQ ID NO: 1321245 - RNA, 19 nt, Artificial Sequence
  Description of Artificial Sequence: Synthetic oligonucleotide
gcuguaccccaagaugccc

SEQ ID NO: 1321246 - RNA, 19 nt, Artificial Sequence
  Description of Artificial Sequence: Synthetic oligonucleotide
uggcccagucaggaaggga

SEQ ID NO: 1321247 - RNA, 19 nt, Artificial Sequence
  Description of Artificial Sequence: Synthetic oligonucleotide
gcuggcuccauguugggau

SEQ ID NO: 1321248 - RNA, 19 nt, Artificial Sequence
  Description of Artificial Sequence: Synthetic oligonucleotide
gagcacucacgcccacaga

SEQ ID NO: 1321249 - RNA, 19 nt, Artificial Sequence
  Description of Artificial Sequence: Synthetic oligonucleotide
gaccgacaaggccaccugu

SEQ ID NO: 1321250 - RNA, 19 nt, Artificial Sequence
  Description of Artificial Sequence: Synthetic oligonucleotide
ccucaccuuguuagccugg

SEQ ID NO: 1321251 - RNA, 19 nt, Artificial Sequence
  Description of Artificial Sequence: Synthetic oligonucleotide
cuggggccccaccaugauc

SEQ ID NO: 1321252 - RNA, 19 nt, Artificial Sequence
  Description of Artificial Sequence: Synthetic oligonucleotide
ccucgcucagauccacagg

SEQ ID NO: 1321253 - RNA, 19 nt, Artificial Sequence
  Description of Artificial Sequence: Synthetic oligonucleotide
gccugggacguuaucacca

SEQ ID NO: 1321254 - RNA, 19 nt, Artificial Sequence
  Description of Artificial Sequence: Synthetic oligonucleotide
gcgggaugaguccugccca

SEQ ID NO: 1321255 - RNA, 19 nt, Artificial Sequence
  Description of Artificial Sequence: Synthetic oligonucleotide
caccucccgcucugggagc

SEQ ID NO: 1321256 - RNA, 19 nt, Artificial Sequence
  Description of Artificial Sequence: Synthetic oligonucleotide
cuggccuguggagggugcc

SEQ ID NO: 1321257 - RNA, 19 nt, Artificial Sequence
  Description of Artificial Sequence: Synthetic oligonucleotide
cagagcuguaccccaagau

SEQ ID NO: 1321258 - RNA, 19 nt, Artificial Sequence
  Description of Artificial Sequence: Synthetic oligonucleotide
uguguggcccuggccacuu

SEQ ID NO: 1321259 - RNA, 19 nt, Artificial Sequence
  Description of Artificial Sequence: Synthetic oligonucleotide
gugcgggaugaguccugcc

SEQ ID NO: 1321260 - RNA, 19 nt, Artificial Sequence
  Description of Artificial Sequence: Synthetic oligonucleotide
uggacacaagaggcagcuc

SEQ ID NO: 1321261 - RNA, 19 nt, Artificial Sequence
  Description of Artificial Sequence: Synthetic oligonucleotide
gggcguggcaggguggugc

SEQ ID NO: 1321262 - RNA, 19 nt, Artificial Sequence
  Description of Artificial Sequence: Synthetic oligonucleotide
cuccuccacguugaaauua

SEQ ID NO: 1321263 - RNA, 19 nt, Artificial Sequence
  Description of Artificial Sequence: Synthetic oligonucleotide
cagucucgcaucacagugu

SEQ ID NO: 1321264 - RNA, 19 nt, Artificial Sequence
  Description of Artificial Sequence: Synthetic oligonucleotide
cucggaucaccuuuacauu

SEQ ID NO: 1321265 - RNA, 19 nt, Artificial Sequence
  Description of Artificial Sequence: Synthetic oligonucleotide
gccaacaagggcgagguau

SEQ ID NO: 1321266 - RNA, 19 nt, Artificial Sequence
  Description of Artificial Sequence: Synthetic oligonucleotide
gugaccgacaaggccaccu

SEQ ID NO: 1321267 - RNA, 19 nt, Artificial Sequence
  Description of Artificial Sequence: Synthetic oligonucleotide
gucaacaggucaucacguu

SEQ ID NO: 1321268 - RNA, 19 nt, Artificial Sequence
  Description of Artificial Sequence: Synthetic oligonucleotide
caguguccucgcucagauc

SEQ ID NO: 1321269 - RNA, 19 nt, Artificial Sequence
  Description of Artificial Sequence: Synthetic oligonucleotide
cagugucggaggaggcuga

SEQ ID NO: 1321270 - RNA, 19 nt, Artificial Sequence
  Description of Artificial Sequence: Synthetic oligonucleotide
ggucaacaggucaucacgu

SEQ ID NO: 1321271 - RNA, 19 nt, Artificial Sequence
  Description of Artificial Sequence: Synthetic oligonucleotide
gugagggccgagaaagggu

SEQ ID NO: 1321272 - RNA, 19 nt, Artificial Sequence
  Description of Artificial Sequence: Synthetic oligonucleotide
gaccccacuccgaauugua

SEQ ID NO: 1321273 - RNA, 19 nt, Artificial Sequence
  Description of Artificial Sequence: Synthetic oligonucleotide
aagccccaccucggugcag

SEQ ID NO: 1321274 - RNA, 19 nt, Artificial Sequence
  Description of Artificial Sequence: Synthetic oligonucleotide
gucucgcaucacagugucc

SEQ ID NO: 1321275 - RNA, 19 nt, Artificial Sequence
  Description of Artificial Sequence: Synthetic oligonucleotide
gugcggcuuuuccugaagu

SEQ ID NO: 1321276 - RNA, 19 nt, Artificial Sequence
  Description of Artificial Sequence: Synthetic oligonucleotide
agaguccgucucggaucac

SEQ ID NO: 1321277 - RNA, 19 nt, Artificial Sequence
  Description of Artificial Sequence: Synthetic oligonucleotide
ccuuguuagccuggaucag

SEQ ID NO: 1321278 - RNA, 19 nt, Artificial Sequence
  Description of Artificial Sequence: Synthetic oligonucleotide
ccaccucggugcagggugg

SEQ ID NO: 1321279 - RNA, 19 nt, Artificial Sequence
  Description of Artificial Sequence: Synthetic oligonucleotide
accccacuccgaauuguaa

SEQ ID NO: 1321280 - RNA, 19 nt, Artificial Sequence
  Description of Artificial Sequence: Synthetic oligonucleotide
accucccgcucugggagca

SEQ ID NO: 1321281 - RNA, 19 nt, Artificial Sequence
  Description of Artificial Sequence: Synthetic oligonucleotide
gcuccauguugggaugggc

SEQ ID NO: 1321282 - RNA, 19 nt, Artificial Sequence
  Description of Artificial Sequence: Synthetic oligonucleotide
ccaacaagggcgagguaua

SEQ ID NO: 1321283 - RNA, 19 nt, Artificial Sequence
  Description of Artificial Sequence: Synthetic oligonucleotide
caagcccgcugcggugggg

SEQ ID NO: 1321284 - RNA, 19 nt, Artificial Sequence
  Description of Artificial Sequence: Synthetic oligonucleotide
auauggcucugugccccaa

SEQ ID NO: 1321285 - RNA, 19 nt, Artificial Sequence
  Description of Artificial Sequence: Synthetic oligonucleotide
ccccacuccgaauuguaaa

SEQ ID NO: 1321286 - RNA, 19 nt, Artificial Sequence
  Description of Artificial Sequence: Synthetic oligonucleotide
gccccaaggucccacgcaa

SEQ ID NO: 1321287 - RNA, 19 nt, Artificial Sequence
  Description of Artificial Sequence: Synthetic oligonucleotide
cucagugucggaggaggcu

SEQ ID NO: 1321288 - RNA, 19 nt, Artificial Sequence
  Description of Artificial Sequence: Synthetic oligonucleotide
uccucgcuccaggcgcaga

SEQ ID NO: 1321289 - RNA, 19 nt, Artificial Sequence
  Description of Artificial Sequence: Synthetic oligonucleotide
cccagucaggaagggauuc

SEQ ID NO: 1321290 - RNA, 19 nt, Artificial Sequence
  Description of Artificial Sequence: Synthetic oligonucleotide
ggcccagucaggaagggau

SEQ ID NO: 1321291 - RNA, 19 nt, Artificial Sequence
  Description of Artificial Sequence: Synthetic oligonucleotide
cugagcacucacgcccaca

SEQ ID NO: 1321292 - RNA, 19 nt, Artificial Sequence
  Description of Artificial Sequence: Synthetic oligonucleotide
ccacaagcccgcugcggug

SEQ ID NO: 1321293 - RNA, 19 nt, Artificial Sequence
  Description of Artificial Sequence: Synthetic oligonucleotide
gccacaagcccgcugcggu

SEQ ID NO: 1321294 - RNA, 19 nt, Artificial Sequence
  Description of Artificial Sequence: Synthetic oligonucleotide
ggcgagguauauggcucug

SEQ ID NO: 1321295 - RNA, 19 nt, Artificial Sequence
  Description of Artificial Sequence: Synthetic oligonucleotide
cuucacugagucccaucau

SEQ ID NO: 1321296 - RNA, 19 nt, Artificial Sequence
  Description of Artificial Sequence: Synthetic oligonucleotide
gcaggauauugaggucagc

SEQ ID NO: 1321297 - RNA, 19 nt, Artificial Sequence
  Description of Artificial Sequence: Synthetic oligonucleotide
ccacuccgaauuguaaaca

SEQ ID NO: 1321298 - RNA, 19 nt, Artificial Sequence
  Description of Artificial Sequence: Synthetic oligonucleotide
gccgagaaaggguggccaa

SEQ ID NO: 1321299 - RNA, 19 nt, Artificial Sequence
  Description of Artificial Sequence: Synthetic oligonucleotide
gggagcacgcuggggcucc

SEQ ID NO: 1321300 - RNA, 19 nt, Artificial Sequence
  Description of Artificial Sequence: Synthetic oligonucleotide
cccgcugcgguggggaaag

SEQ ID NO: 1321301 - RNA, 19 nt, Artificial Sequence
  Description of Artificial Sequence: Synthetic oligonucleotide
auccugcuaggagccucca

SEQ ID NO: 1321302 - RNA, 19 nt, Artificial Sequence
  Description of Artificial Sequence: Synthetic oligonucleotide
ggaagguaguggaccaccu

SEQ ID NO: 1321303 - RNA, 19 nt, Artificial Sequence
  Description of Artificial Sequence: Synthetic oligonucleotide
ugccggggccaugggcucu

SEQ ID NO: 1321304 - RNA, 19 nt, Artificial Sequence
  Description of Artificial Sequence: Synthetic oligonucleotide
ccauccugcuaggagccuc

SEQ ID NO: 1321305 - RNA, 19 nt, Artificial Sequence
  Description of Artificial Sequence: Synthetic oligonucleotide
gggccgagaaaggguggcc

SEQ ID NO: 1321306 - RNA, 19 nt, Artificial Sequence
  Description of Artificial Sequence: Synthetic oligonucleotide
cuccgcuucacugcccugu

SEQ ID NO: 1321307 - RNA, 19 nt, Artificial Sequence
  Description of Artificial Sequence: Synthetic oligonucleotide
gguauaaagugcggcuuuu

SEQ ID NO: 1321308 - RNA, 19 nt, Artificial Sequence
  Description of Artificial Sequence: Synthetic oligonucleotide
gguggccaacaagggcgag

SEQ ID NO: 1321309 - RNA, 19 nt, Artificial Sequence
  Description of Artificial Sequence: Synthetic oligonucleotide
gaagcgcguccuccucagu

SEQ ID NO: 1321310 - RNA, 19 nt, Artificial Sequence
  Description of Artificial Sequence: Synthetic oligonucleotide
guccucgcucagauccaca

SEQ ID NO: 1321311 - RNA, 19 nt, Artificial Sequence
  Description of Artificial Sequence: Synthetic oligonucleotide
gggccccaccaugaucucc

SEQ ID NO: 1321312 - RNA, 19 nt, Artificial Sequence
  Description of Artificial Sequence: Synthetic oligonucleotide
gggcgagguauauggcucu

SEQ ID NO: 1321313 - RNA, 19 nt, Artificial Sequence
  Description of Artificial Sequence: Synthetic oligonucleotide
ggacccagccauccugcua

SEQ ID NO: 1321314 - RNA, 19 nt, Artificial Sequence
  Description of Artificial Sequence: Synthetic oligonucleotide
ccgcucugggagcacgcug

SEQ ID NO: 1321315 - RNA, 19 nt, Artificial Sequence
  Description of Artificial Sequence: Synthetic oligonucleotide
ggagacggugagggccgag

SEQ ID NO: 1321316 - RNA, 19 nt, Artificial Sequence
  Description of Artificial Sequence: Synthetic oligonucleotide
gcccuguacaagaacuccu

SEQ ID NO: 1321317 - RNA, 19 nt, Artificial Sequence
  Description of Artificial Sequence: Synthetic oligonucleotide
gcugacgagccugggacgu

SEQ ID NO: 1321318 - RNA, 19 nt, Artificial Sequence
  Description of Artificial Sequence: Synthetic oligonucleotide
ggccccaccaugaucuccu

SEQ ID NO: 1321319 - RNA, 19 nt, Artificial Sequence
  Description of Artificial Sequence: Synthetic oligonucleotide
ccuccacguugaaauuaca

SEQ ID NO: 1321320 - RNA, 19 nt, Artificial Sequence
  Description of Artificial Sequence: Synthetic oligonucleotide
ccugugccggggccauggg

SEQ ID NO: 1321321 - RNA, 19 nt, Artificial Sequence
  Description of Artificial Sequence: Synthetic oligonucleotide
gcgugggagaggucaggaa

SEQ ID NO: 1321322 - RNA, 19 nt, Artificial Sequence
  Description of Artificial Sequence: Synthetic oligonucleotide
ggguggccaacaagggcga

SEQ ID NO: 1321323 - RNA, 19 nt, Artificial Sequence
  Description of Artificial Sequence: Synthetic oligonucleotide
ccgguucaagugcaggaua

SEQ ID NO: 1321324 - RNA, 19 nt, Artificial Sequence
  Description of Artificial Sequence: Synthetic oligonucleotide
ggaggcaguugggguauaa

SEQ ID NO: 1321325 - RNA, 19 nt, Artificial Sequence
  Description of Artificial Sequence: Synthetic oligonucleotide
caacaagggcgagguauau

SEQ ID NO: 1321326 - RNA, 19 nt, Artificial Sequence
  Description of Artificial Sequence: Synthetic oligonucleotide
guaccccaagaugccccaa

SEQ ID NO: 1321327 - RNA, 19 nt, Artificial Sequence
  Description of Artificial Sequence: Synthetic oligonucleotide
gccggccaucuccugccac

SEQ ID NO: 1321328 - RNA, 19 nt, Artificial Sequence
  Description of Artificial Sequence: Synthetic oligonucleotide
cagagaccccacuccgaau

SEQ ID NO: 1321329 - RNA, 19 nt, Artificial Sequence
  Description of Artificial Sequence: Synthetic oligonucleotide
cgucucggaucaccuuuac

SEQ ID NO: 1321330 - RNA, 19 nt, Artificial Sequence
  Description of Artificial Sequence: Synthetic oligonucleotide
gggguggcccagucaggaa

SEQ ID NO: 1321331 - RNA, 19 nt, Artificial Sequence
  Description of Artificial Sequence: Synthetic oligonucleotide
gggaugaguccugcccaaa

SEQ ID NO: 1321332 - RNA, 19 nt, Artificial Sequence
  Description of Artificial Sequence: Synthetic oligonucleotide
gacgagccugggacguuau

SEQ ID NO: 1321333 - RNA, 19 nt, Artificial Sequence
  Description of Artificial Sequence: Synthetic oligonucleotide
ggcguggcaggguggugcu

SEQ ID NO: 1321334 - RNA, 19 nt, Artificial Sequence
  Description of Artificial Sequence: Synthetic oligonucleotide
gccgguucaagugcaggau

SEQ ID NO: 1321335 - RNA, 19 nt, Artificial Sequence
  Description of Artificial Sequence: Synthetic oligonucleotide
ggugcgggcaggaggcagu

SEQ ID NO: 1321336 - RNA, 19 nt, Artificial Sequence
  Description of Artificial Sequence: Synthetic oligonucleotide
ccuccgcuucacugcccug

SEQ ID NO: 1321337 - RNA, 19 nt, Artificial Sequence
  Description of Artificial Sequence: Synthetic oligonucleotide
ccaggcgcagaguccgucu

SEQ ID NO: 1321338 - RNA, 19 nt, Artificial Sequence
  Description of Artificial Sequence: Synthetic oligonucleotide
gcgagguauauggcucugu

SEQ ID NO: 1321339 - RNA, 19 nt, Artificial Sequence
  Description of Artificial Sequence: Synthetic oligonucleotide
cccacgcaaagcagaggcu

SEQ ID NO: 1321340 - RNA, 19 nt, Artificial Sequence
  Description of Artificial Sequence: Synthetic oligonucleotide
gccggggccaugggcucug

SEQ ID NO: 1321341 - RNA, 19 nt, Artificial Sequence
  Description of Artificial Sequence: Synthetic oligonucleotide
ggccggccaucuccugcca

SEQ ID NO: 1321342 - RNA, 19 nt, Artificial Sequence
  Description of Artificial Sequence: Synthetic oligonucleotide
cugccaccuccgcuucacu

SEQ ID NO: 1321343 - RNA, 19 nt, Artificial Sequence
  Description of Artificial Sequence: Synthetic oligonucleotide
cuccaggcgcagaguccgu

SEQ ID NO: 1321344 - RNA, 19 nt, Artificial Sequence
  Description of Artificial Sequence: Synthetic oligonucleotide
gcucggcggcacagaagca

SEQ ID NO: 1321345 - RNA, 19 nt, Artificial Sequence
  Description of Artificial Sequence: Synthetic oligonucleotide
ggccaacaagggcgaggua

SEQ ID NO: 1321346 - RNA, 19 nt, Artificial Sequence
  Description of Artificial Sequence: Synthetic oligonucleotide
ccaccucgcccucuggaau

SEQ ID NO: 1321347 - RNA, 19 nt, Artificial Sequence
  Description of Artificial Sequence: Synthetic oligonucleotide
gcccagcugccagguuggc

SEQ ID NO: 1321348 - RNA, 19 nt, Artificial Sequence
  Description of Artificial Sequence: Synthetic oligonucleotide
cccagccauccugcuagga

SEQ ID NO: 1321349 - RNA, 19 nt, Artificial Sequence
  Description of Artificial Sequence: Synthetic oligonucleotide
ggagcacgcuggggcucca

SEQ ID NO: 1321350 - RNA, 19 nt, Artificial Sequence
  Description of Artificial Sequence: Synthetic oligonucleotide
cugacgagccugggacguu

SEQ ID NO: 1321351 - RNA, 19 nt, Artificial Sequence
  Description of Artificial Sequence: Synthetic oligonucleotide
ccccaccucggugcagggu

SEQ ID NO: 1321352 - RNA, 19 nt, Artificial Sequence
  Description of Artificial Sequence: Synthetic oligonucleotide
ccucacccaccaggcugcu

SEQ ID NO: 1321353 - RNA, 19 nt, Artificial Sequence
  Description of Artificial Sequence: Synthetic oligonucleotide
ccgcugcgguggggaaaga

SEQ ID NO: 1321354 - RNA, 19 nt, Artificial Sequence
  Description of Artificial Sequence: Synthetic oligonucleotide
aguaguagcacugacaugc

SEQ ID NO: 1321355 - RNA, 19 nt, Artificial Sequence
  Description of Artificial Sequence: Synthetic oligonucleotide
uuuaccagcgcugagaggg

SEQ ID NO: 1321356 - RNA, 19 nt, Artificial Sequence
  Description of Artificial Sequence: Synthetic oligonucleotide
agaguaguuauacuugggg

SEQ ID NO: 1321357 - RNA, 19 nt, Artificial Sequence
  Description of Artificial Sequence: Synthetic oligonucleotide
auucauaauccccauuggg

SEQ ID NO: 1321358 - RNA, 19 nt, Artificial Sequence
  Description of Artificial Sequence: Synthetic oligonucleotide
uguucagcguagaaguugg

SEQ ID NO: 1321359 - RNA, 19 nt, Artificial Sequence
  Description of Artificial Sequence: Synthetic oligonucleotide
aguguguggacaucaagac

SEQ ID NO: 1321360 - RNA, 19 nt, Artificial Sequence
  Description of Artificial Sequence: Synthetic oligonucleotide
uucauaauccccauugggu

SEQ ID NO: 1321361 - RNA, 19 nt, Artificial Sequence
  Description of Artificial Sequence: Synthetic oligonucleotide
ugaguaguagcacugacau

SEQ ID NO: 1321362 - RNA, 19 nt, Artificial Sequence
  Description of Artificial Sequence: Synthetic oligonucleotide
ugacguuucaacaacuccu

SEQ ID NO: 1321363 - RNA, 19 nt, Artificial Sequence
  Description of Artificial Sequence: Synthetic oligonucleotide
ucagugguggguccgaggg

SEQ ID NO: 1321364 - RNA, 19 nt, Artificial Sequence
  Description of Artificial Sequence: Synthetic oligonucleotide
aguaguuauacuuggggcu

SEQ ID NO: 1321365 - RNA, 19 nt, Artificial Sequence
  Description of Artificial Sequence: Synthetic oligonucleotide
cauauacacggccuuaucc

SEQ ID NO: 1321366 - RNA, 19 nt, Artificial Sequence
  Description of Artificial Sequence: Synthetic oligonucleotide
acaguacacugccagaggg

SEQ ID NO: 1321367 - RNA, 19 nt, Artificial Sequence
  Description of Artificial Sequence: Synthetic oligonucleotide
ucuaugaccucagugagac

SEQ ID NO: 1321368 - RNA, 19 nt, Artificial Sequence
  Description of Artificial Sequence: Synthetic oligonucleotide
gagucuaugaccucaguga

SEQ ID NO: 1321369 - RNA, 19 nt, Artificial Sequence
  Description of Artificial Sequence: Synthetic oligonucleotide
auauacacggccuuauccu

SEQ ID NO: 1321370 - RNA, 19 nt, Artificial Sequence
  Description of Artificial Sequence: Synthetic oligonucleotide
acggucugaagccuggccc

SEQ ID NO: 1321371 - RNA, 19 nt, Artificial Sequence
  Description of Artificial Sequence: Synthetic oligonucleotide
acagaggccaaauucauaa

SEQ ID NO: 1321372 - RNA, 19 nt, Artificial Sequence
  Description of Artificial Sequence: Synthetic oligonucleotide
ucaccaugcaucccauucg

SEQ ID NO: 1321373 - RNA, 19 nt, Artificial Sequence
  Description of Artificial Sequence: Synthetic oligonucleotide
guccuauguccuuagauag

SEQ ID NO: 1321374 - RNA, 19 nt, Artificial Sequence
  Description of Artificial Sequence: Synthetic oligonucleotide
acugacacuacccgcacag

SEQ ID NO: 1321375 - RNA, 19 nt, Artificial Sequence
  Description of Artificial Sequence: Synthetic oligonucleotide
guacaccucaucuagugag

SEQ ID NO: 1321376 - RNA, 19 nt, Artificial Sequence
  Description of Artificial Sequence: Synthetic oligonucleotide
aaucagaggccccucugag

SEQ ID NO: 1321377 - RNA, 19 nt, Artificial Sequence
  Description of Artificial Sequence: Synthetic oligonucleotide
ucugagugacguuucaaca

SEQ ID NO: 1321378 - RNA, 19 nt, Artificial Sequence
  Description of Artificial Sequence: Synthetic oligonucleotide
acucaacagagacaguguc

SEQ ID NO: 1321379 - RNA, 19 nt, Artificial Sequence
  Description of Artificial Sequence: Synthetic oligonucleotide
agagucuaugaccucagug

SEQ ID NO: 1321380 - RNA, 19 nt, Artificial Sequence
  Description of Artificial Sequence: Synthetic oligonucleotide
uugaagagaguaguuauac

SEQ ID NO: 1321381 - RNA, 19 nt, Artificial Sequence
  Description of Artificial Sequence: Synthetic oligonucleotide
uggucuguagcuccugccg

SEQ ID NO: 1321382 - RNA, 19 nt, Artificial Sequence
  Description of Artificial Sequence: Synthetic oligonucleotide
agucuaugaccucagugag

SEQ ID NO: 1321383 - RNA, 19 nt, Artificial Sequence
  Description of Artificial Sequence: Synthetic oligonucleotide
ugucagagcugguugagug

SEQ ID NO: 1321384 - RNA, 19 nt, Artificial Sequence
  Description of Artificial Sequence: Synthetic oligonucleotide
uucaccaugcaucccauuc

SEQ ID NO: 1321385 - RNA, 19 nt, Artificial Sequence
  Description of Artificial Sequence: Synthetic oligonucleotide
ugagugacguuucaacaac

SEQ ID NO: 1321386 - RNA, 19 nt, Artificial Sequence
  Description of Artificial Sequence: Synthetic oligonucleotide
ugaauacagcuguagcacc

SEQ ID NO: 1321387 - RNA, 19 nt, Artificial Sequence
  Description of Artificial Sequence: Synthetic oligonucleotide
ucuagugagcgaaggccgg

SEQ ID NO: 1321388 - RNA, 19 nt, Artificial Sequence
  Description of Artificial Sequence: Synthetic oligonucleotide
uggaacuggcucuagcuug

SEQ ID NO: 1321389 - RNA, 19 nt, Artificial Sequence
  Description of Artificial Sequence: Synthetic oligonucleotide
ucaucuagugagcgaaggc

SEQ ID NO: 1321390 - RNA, 19 nt, Artificial Sequence
  Description of Artificial Sequence: Synthetic oligonucleotide
ugagaugggagccccguug

SEQ ID NO: 1321391 - RNA, 19 nt, Artificial Sequence
  Description of Artificial Sequence: Synthetic oligonucleotide
ugcaugggccacaggaacg

SEQ ID NO: 1321392 - RNA, 19 nt, Artificial Sequence
  Description of Artificial Sequence: Synthetic oligonucleotide
ugcucuguggucagugggg

SEQ ID NO: 1321393 - RNA, 19 nt, Artificial Sequence
  Description of Artificial Sequence: Synthetic oligonucleotide
uuauacuuggggcugucau

SEQ ID NO: 1321394 - RNA, 19 nt, Artificial Sequence
  Description of Artificial Sequence: Synthetic oligonucleotide
cacaucaaagcgcagccgc

SEQ ID NO: 1321395 - RNA, 19 nt, Artificial Sequence
  Description of Artificial Sequence: Synthetic oligonucleotide
ucauaauccccauuggguu

SEQ ID NO: 1321396 - RNA, 19 nt, Artificial Sequence
  Description of Artificial Sequence: Synthetic oligonucleotide
caucuagugagcgaaggcc

SEQ ID NO: 1321397 - RNA, 19 nt, Artificial Sequence
  Description of Artificial Sequence: Synthetic oligonucleotide
cucaacagagacagugucc

SEQ ID NO: 1321398 - RNA, 19 nt, Artificial Sequence
  Description of Artificial Sequence: Synthetic oligonucleotide
uauacacggccuuauccug

SEQ ID NO: 1321399 - RNA, 19 nt, Artificial Sequence
  Description of Artificial Sequence: Synthetic oligonucleotide
agugcauaagcucgggcug

SEQ ID NO: 1321400 - RNA, 19 nt, Artificial Sequence
  Description of Artificial Sequence: Synthetic oligonucleotide
guagccacggucugaagcc

SEQ ID NO: 1321401 - RNA, 19 nt, Artificial Sequence
  Description of Artificial Sequence: Synthetic oligonucleotide
ucagcaguguguccagucc

SEQ ID NO: 1321402 - RNA, 19 nt, Artificial Sequence
  Description of Artificial Sequence: Synthetic oligonucleotide
uuagauagcugaugagccu

SEQ ID NO: 1321403 - RNA, 19 nt, Artificial Sequence
  Description of Artificial Sequence: Synthetic oligonucleotide
gguugagugcauaagcucg

SEQ ID NO: 1321404 - RNA, 19 nt, Artificial Sequence
  Description of Artificial Sequence: Synthetic oligonucleotide
agccuugccucccaugugg

SEQ ID NO: 1321405 - RNA, 19 nt, Artificial Sequence
  Description of Artificial Sequence: Synthetic oligonucleotide
cucugaauacagcuguagc

SEQ ID NO: 1321406 - RNA, 19 nt, Artificial Sequence
  Description of Artificial Sequence: Synthetic oligonucleotide
ucagugagacguccuaugu

SEQ ID NO: 1321407 - RNA, 19 nt, Artificial Sequence
  Description of Artificial Sequence: Synthetic oligonucleotide
auaagcucgggcugucccg

SEQ ID NO: 1321408 - RNA, 19 nt, Artificial Sequence
  Description of Artificial Sequence: Synthetic oligonucleotide
cauccugcugcccugugcg

SEQ ID NO: 1321409 - RNA, 19 nt, Artificial Sequence
  Description of Artificial Sequence: Synthetic oligonucleotide
acacuacccgcacaggguc

SEQ ID NO: 1321410 - RNA, 19 nt, Artificial Sequence
  Description of Artificial Sequence: Synthetic oligonucleotide
uauccugccucacagccuc

SEQ ID NO: 1321411 - RNA, 19 nt, Artificial Sequence
  Description of Artificial Sequence: Synthetic oligonucleotide
ugaagagaguaguuauacu

SEQ ID NO: 1321412 - RNA, 19 nt, Artificial Sequence
  Description of Artificial Sequence: Synthetic oligonucleotide
ugugcgaacaagguagcca

SEQ ID NO: 1321413 - RNA, 19 nt, Artificial Sequence
  Description of Artificial Sequence: Synthetic oligonucleotide
ucuuacgaagugcccagcu

SEQ ID NO: 1321414 - RNA, 19 nt, Artificial Sequence
  Description of Artificial Sequence: Synthetic oligonucleotide
cauaauccccauuggguug

SEQ ID NO: 1321415 - RNA, 19 nt, Artificial Sequence
  Description of Artificial Sequence: Synthetic oligonucleotide
agcuguagcaccugggccu

SEQ ID NO: 1321416 - RNA, 19 nt, Artificial Sequence
  Description of Artificial Sequence: Synthetic oligonucleotide
aucuagugagcgaaggccg

SEQ ID NO: 1321417 - RNA, 19 nt, Artificial Sequence
  Description of Artificial Sequence: Synthetic oligonucleotide
cucugagugacguuucaac

SEQ ID NO: 1321418 - RNA, 19 nt, Artificial Sequence
  Description of Artificial Sequence: Synthetic oligonucleotide
uccuccauauacacggccu

SEQ ID NO: 1321419 - RNA, 19 nt, Artificial Sequence
  Description of Artificial Sequence: Synthetic oligonucleotide
gaacaagguagccacgguc

SEQ ID NO: 1321420 - RNA, 19 nt, Artificial Sequence
  Description of Artificial Sequence: Synthetic oligonucleotide
uuggguugaagagaguagu

SEQ ID NO: 1321421 - RNA, 19 nt, Artificial Sequence
  Description of Artificial Sequence: Synthetic oligonucleotide
cacggcuucaugcaggaug

SEQ ID NO: 1321422 - RNA, 19 nt, Artificial Sequence
  Description of Artificial Sequence: Synthetic oligonucleotide
uccuauguccuuagauagc

SEQ ID NO: 1321423 - RNA, 19 nt, Artificial Sequence
  Description of Artificial Sequence: Synthetic oligonucleotide
uacaccucaucuagugagc

SEQ ID NO: 1321424 - RNA, 19 nt, Artificial Sequence
  Description of Artificial Sequence: Synthetic oligonucleotide
gacuuagucgcucccuggc

SEQ ID NO: 1321425 - RNA, 19 nt, Artificial Sequence
  Description of Artificial Sequence: Synthetic oligonucleotide
uccuuagauagcugaugag

SEQ ID NO: 1321426 - RNA, 19 nt, Artificial Sequence
  Description of Artificial Sequence: Synthetic oligonucleotide
cauguggcugcacacggcc

SEQ ID NO: 1321427 - RNA, 19 nt, Artificial Sequence
  Description of Artificial Sequence: Synthetic oligonucleotide
ugcacguagcucucuacug

SEQ ID NO: 1321428 - RNA, 19 nt, Artificial Sequence
  Description of Artificial Sequence: Synthetic oligonucleotide
cauucgccaggccucaucc

SEQ ID NO: 1321429 - RNA, 19 nt, Artificial Sequence
  Description of Artificial Sequence: Synthetic oligonucleotide
guuggcacggcgcuguagc

SEQ ID NO: 1321430 - RNA, 19 nt, Artificial Sequence
  Description of Artificial Sequence: Synthetic oligonucleotide
aaguugguucuguccaaca

SEQ ID NO: 1321431 - RNA, 19 nt, Artificial Sequence
  Description of Artificial Sequence: Synthetic oligonucleotide
cacaggaacgcccacugac

SEQ ID NO: 1321432 - RNA, 19 nt, Artificial Sequence
  Description of Artificial Sequence: Synthetic oligonucleotide
guaguuauacuuggggcug

SEQ ID NO: 1321433 - RNA, 19 nt, Artificial Sequence
  Description of Artificial Sequence: Synthetic oligonucleotide
ugagugcauaagcucgggc

SEQ ID NO: 1321434 - RNA, 19 nt, Artificial Sequence
  Description of Artificial Sequence: Synthetic oligonucleotide
uucaacaacuccugggauu

SEQ ID NO: 1321435 - RNA, 19 nt, Artificial Sequence
  Description of Artificial Sequence: Synthetic oligonucleotide
uguccuuagauagcugaug

SEQ ID NO: 1321436 - RNA, 19 nt, Artificial Sequence
  Description of Artificial Sequence: Synthetic oligonucleotide
uccaccgacgucugcagug

SEQ ID NO: 1321437 - RNA, 19 nt, Artificial Sequence
  Description of Artificial Sequence: Synthetic oligonucleotide
cugggauuucucugcagcc

SEQ ID NO: 1321438 - RNA, 19 nt, Artificial Sequence
  Description of Artificial Sequence: Synthetic oligonucleotide
agugguggguccgaggguc

SEQ ID NO: 1321439 - RNA, 19 nt, Artificial Sequence
  Description of Artificial Sequence: Synthetic oligonucleotide
gaagugcccagcucagcag

SEQ ID NO: 1321440 - RNA, 19 nt, Artificial Sequence
  Description of Artificial Sequence: Synthetic oligonucleotide
gugcgaacaagguagccac

SEQ ID NO: 1321441 - RNA, 19 nt, Artificial Sequence
  Description of Artificial Sequence: Synthetic oligonucleotide
acaggcgcacaguacacug

SEQ ID NO: 1321442 - RNA, 19 nt, Artificial Sequence
  Description of Artificial Sequence: Synthetic oligonucleotide
cucaucuagugagcgaagg

SEQ ID NO: 1321443 - RNA, 19 nt, Artificial Sequence
  Description of Artificial Sequence: Synthetic oligonucleotide
acaccugacaggcgcacag

SEQ ID NO: 1321444 - RNA, 19 nt, Artificial Sequence
  Description of Artificial Sequence: Synthetic oligonucleotide
guugagugcauaagcucgg

SEQ ID NO: 1321445 - RNA, 19 nt, Artificial Sequence
  Description of Artificial Sequence: Synthetic oligonucleotide
uucgccaggccucauccac

SEQ ID NO: 1321446 - RNA, 19 nt, Artificial Sequence
  Description of Artificial Sequence: Synthetic oligonucleotide
cccugugcgaacaagguag

SEQ ID NO: 1321447 - RNA, 19 nt, Artificial Sequence
  Description of Artificial Sequence: Synthetic oligonucleotide
gagaugggagccccguugc

SEQ ID NO: 1321448 - RNA, 19 nt, Artificial Sequence
  Description of Artificial Sequence: Synthetic oligonucleotide
acguuucaacaacuccugg

SEQ ID NO: 1321449 - RNA, 19 nt, Artificial Sequence
  Description of Artificial Sequence: Synthetic oligonucleotide
ugucccguccucugaauac

SEQ ID NO: 1321450 - RNA, 19 nt, Artificial Sequence
  Description of Artificial Sequence: Synthetic oligonucleotide
gcugguugagugcauaagc

SEQ ID NO: 1321451 - RNA, 19 nt, Artificial Sequence
  Description of Artificial Sequence: Synthetic oligonucleotide
gguagccacggucugaagc

SEQ ID NO: 1321452 - RNA, 19 nt, Artificial Sequence
  Description of Artificial Sequence: Synthetic oligonucleotide
cuuagucgcucccuggcug

SEQ ID NO: 1321453 - RNA, 19 nt, Artificial Sequence
  Description of Artificial Sequence: Synthetic oligonucleotide
ugcgaacaagguagccacg

SEQ ID NO: 1321454 - RNA, 19 nt, Artificial Sequence
  Description of Artificial Sequence: Synthetic oligonucleotide
acaaucagaggccccucug

SEQ ID NO: 1321455 - RNA, 19 nt, Artificial Sequence
  Description of Artificial Sequence: Synthetic oligonucleotide
gacaguguccacaaucaga

SEQ ID NO: 1321456 - RNA, 19 nt, Artificial Sequence
  Description of Artificial Sequence: Synthetic oligonucleotide
gagugcauaagcucgggcu

SEQ ID NO: 1321457 - RNA, 19 nt, Artificial Sequence
  Description of Artificial Sequence: Synthetic oligonucleotide
cucagugagacguccuaug

SEQ ID NO: 1321458 - RNA, 19 nt, Artificial Sequence
  Description of Artificial Sequence: Synthetic oligonucleotide
cugggcuaucacucgagag

SEQ ID NO: 1321459 - RNA, 19 nt, Artificial Sequence
  Description of Artificial Sequence: Synthetic oligonucleotide
uuauccugccucacagccu

SEQ ID NO: 1321460 - RNA, 19 nt, Artificial Sequence
  Description of Artificial Sequence: Synthetic oligonucleotide
agauagcugaugagccucc

SEQ ID NO: 1321461 - RNA, 19 nt, Artificial Sequence
  Description of Artificial Sequence: Synthetic oligonucleotide
acaccucaucuagugagcg

SEQ ID NO: 1321462 - RNA, 19 nt, Artificial Sequence
  Description of Artificial Sequence: Synthetic oligonucleotide
ucuguggucaguggggccu

SEQ ID NO: 1321463 - RNA, 19 nt, Artificial Sequence
  Description of Artificial Sequence: Synthetic oligonucleotide
guagcucucuacuguccgg

SEQ ID NO: 1321464 - RNA, 19 nt, Artificial Sequence
  Description of Artificial Sequence: Synthetic oligonucleotide
cacaguacacugccagagg

SEQ ID NO: 1321465 - RNA, 19 nt, Artificial Sequence
  Description of Artificial Sequence: Synthetic oligonucleotide
aaccuuuaccagcgcugag

SEQ ID NO: 1321466 - RNA, 19 nt, Artificial Sequence
  Description of Artificial Sequence: Synthetic oligonucleotide
cuguccaacaggaggccgc

SEQ ID NO: 1321467 - RNA, 19 nt, Artificial Sequence
  Description of Artificial Sequence: Synthetic oligonucleotide
uugagugcauaagcucggg

SEQ ID NO: 1321468 - RNA, 19 nt, Artificial Sequence
  Description of Artificial Sequence: Synthetic oligonucleotide
acguccuauguccuuagau

SEQ ID NO: 1321469 - RNA, 19 nt, Artificial Sequence
  Description of Artificial Sequence: Synthetic oligonucleotide
agcagagucuaugaccuca

SEQ ID NO: 1321470 - RNA, 19 nt, Artificial Sequence
  Description of Artificial Sequence: Synthetic oligonucleotide
cuguucagcguagaaguug

SEQ ID NO: 1321471 - RNA, 19 nt, Artificial Sequence
  Description of Artificial Sequence: Synthetic oligonucleotide
ucccauguggcugcacacg

SEQ ID NO: 1321472 - RNA, 19 nt, Artificial Sequence
  Description of Artificial Sequence: Synthetic oligonucleotide
uacacggccuuauccugcc

SEQ ID NO: 1321473 - RNA, 19 nt, Artificial Sequence
  Description of Artificial Sequence: Synthetic oligonucleotide
cuuacgaagugcccagcuc

SEQ ID NO: 1321474 - RNA, 19 nt, Artificial Sequence
  Description of Artificial Sequence: Synthetic oligonucleotide
cugacaggcgcacaguaca

SEQ ID NO: 1321475 - RNA, 19 nt, Artificial Sequence
  Description of Artificial Sequence: Synthetic oligonucleotide
agcgcagccgcucaggguu

SEQ ID NO: 1321476 - RNA, 19 nt, Artificial Sequence
  Description of Artificial Sequence: Synthetic oligonucleotide
augcaucccauucgccagg

SEQ ID NO: 1321477 - RNA, 19 nt, Artificial Sequence
  Description of Artificial Sequence: Synthetic oligonucleotide
gucagagcugguugagugc

SEQ ID NO: 1321478 - RNA, 19 nt, Artificial Sequence
  Description of Artificial Sequence: Synthetic oligonucleotide
uccgagggucuuacgaagu

SEQ ID NO: 1321479 - RNA, 19 nt, Artificial Sequence
  Description of Artificial Sequence: Synthetic oligonucleotide
acagccuccugcacguagc

SEQ ID NO: 1321480 - RNA, 19 nt, Artificial Sequence
  Description of Artificial Sequence: Synthetic oligonucleotide
cugagugacguuucaacaa

SEQ ID NO: 1321481 - RNA, 19 nt, Artificial Sequence
  Description of Artificial Sequence: Synthetic oligonucleotide
acaagguagccacggucug

SEQ ID NO: 1321482 - RNA, 19 nt, Artificial Sequence
  Description of Artificial Sequence: Synthetic oligonucleotide
guccgagggucuuacgaag

SEQ ID NO: 1321483 - RNA, 19 nt, Artificial Sequence
  Description of Artificial Sequence: Synthetic oligonucleotide
ugcccugugcgaacaaggu

SEQ ID NO: 1321484 - RNA, 19 nt, Artificial Sequence
  Description of Artificial Sequence: Synthetic oligonucleotide
caggguugagaugggagcc

SEQ ID NO: 1321485 - RNA, 19 nt, Artificial Sequence
  Description of Artificial Sequence: Synthetic oligonucleotide
ccuguaagcacucgguggc

SEQ ID NO: 1321486 - RNA, 19 nt, Artificial Sequence
  Description of Artificial Sequence: Synthetic oligonucleotide
auagcugaugagccuccug

SEQ ID NO: 1321487 - RNA, 19 nt, Artificial Sequence
  Description of Artificial Sequence: Synthetic oligonucleotide
aucaaagcgcagccgcuca

SEQ ID NO: 1321488 - RNA, 19 nt, Artificial Sequence
  Description of Artificial Sequence: Synthetic oligonucleotide
agccccguugcucaguggu

SEQ ID NO: 1321489 - RNA, 19 nt, Artificial Sequence
  Description of Artificial Sequence: Synthetic oligonucleotide
cuugccucccauguggcug

SEQ ID NO: 1321490 - RNA, 19 nt, Artificial Sequence
  Description of Artificial Sequence: Synthetic oligonucleotide
cguuucaacaacuccuggg

SEQ ID NO: 1321491 - RNA, 19 nt, Artificial Sequence
  Description of Artificial Sequence: Synthetic oligonucleotide
ugacaggcgcacaguacac

SEQ ID NO: 1321492 - RNA, 19 nt, Artificial Sequence
  Description of Artificial Sequence: Synthetic oligonucleotide
gaguaguagcacugacaug

SEQ ID NO: 1321493 - RNA, 19 nt, Artificial Sequence
  Description of Artificial Sequence: Synthetic oligonucleotide
ucccguccucugaauacag

SEQ ID NO: 1321494 - RNA, 19 nt, Artificial Sequence
  Description of Artificial Sequence: Synthetic oligonucleotide
acgcccacugacacuaccc

SEQ ID NO: 1321495 - RNA, 19 nt, Artificial Sequence
  Description of Artificial Sequence: Synthetic oligonucleotide
ggucuuacgaagugcccag

SEQ ID NO: 1321496 - RNA, 19 nt, Artificial Sequence
  Description of Artificial Sequence: Synthetic oligonucleotide
aggugcgucccacagcaga

SEQ ID NO: 1321497 - RNA, 19 nt, Artificial Sequence
  Description of Artificial Sequence: Synthetic oligonucleotide
acuuagucgcucccuggcu

SEQ ID NO: 1321498 - RNA, 19 nt, Artificial Sequence
  Description of Artificial Sequence: Synthetic oligonucleotide
gaaggccggggacaugggc

SEQ ID NO: 1321499 - RNA, 19 nt, Artificial Sequence
  Description of Artificial Sequence: Synthetic oligonucleotide
gcugccccgacuuagucgc

SEQ ID NO: 1321500 - RNA, 19 nt, Artificial Sequence
  Description of Artificial Sequence: Synthetic oligonucleotide
gaaguugguucuguccaac

SEQ ID NO: 1321501 - RNA, 19 nt, Artificial Sequence
  Description of Artificial Sequence: Synthetic oligonucleotide
auaauccccauuggguuga

SEQ ID NO: 1321502 - RNA, 19 nt, Artificial Sequence
  Description of Artificial Sequence: Synthetic oligonucleotide
gguggccacggcuucaugc

SEQ ID NO: 1321503 - RNA, 19 nt, Artificial Sequence
  Description of Artificial Sequence: Synthetic oligonucleotide
agugugagccaggggcacc

SEQ ID NO: 1321504 - RNA, 19 nt, Artificial Sequence
  Description of Artificial Sequence: Synthetic oligonucleotide
acguagcucucuacugucc

SEQ ID NO: 1321505 - RNA, 19 nt, Artificial Sequence
  Description of Artificial Sequence: Synthetic oligonucleotide
accuuuaccagcgcugaga

SEQ ID NO: 1321506 - RNA, 19 nt, Artificial Sequence
  Description of Artificial Sequence: Synthetic oligonucleotide
gugcaugggccacaggaac

SEQ ID NO: 1321507 - RNA, 19 nt, Artificial Sequence
  Description of Artificial Sequence: Synthetic oligonucleotide
caggaacgcccacugacac

SEQ ID NO: 1321508 - RNA, 19 nt, Artificial Sequence
  Description of Artificial Sequence: Synthetic oligonucleotide
agaaguugguucuguccaa

SEQ ID NO: 1321509 - RNA, 19 nt, Artificial Sequence
  Description of Artificial Sequence: Synthetic oligonucleotide
uccauauacacggccuuau

SEQ ID NO: 1321510 - RNA, 19 nt, Artificial Sequence
  Description of Artificial Sequence: Synthetic oligonucleotide
ucgagagccccaagccuug

SEQ ID NO: 1321511 - RNA, 19 nt, Artificial Sequence
  Description of Artificial Sequence: Synthetic oligonucleotide
uugccucccauguggcugc

SEQ ID NO: 1321512 - RNA, 19 nt, Artificial Sequence
  Description of Artificial Sequence: Synthetic oligonucleotide
ugucccgagggcagccucc

SEQ ID NO: 1321513 - RNA, 19 nt, Artificial Sequence
  Description of Artificial Sequence: Synthetic oligonucleotide
aguccuuccucuggaacug

SEQ ID NO: 1321514 - RNA, 19 nt, Artificial Sequence
  Description of Artificial Sequence: Synthetic oligonucleotide
cgcacaaccuuuaccagcg

SEQ ID NO: 1321515 - RNA, 19 nt, Artificial Sequence
  Description of Artificial Sequence: Synthetic oligonucleotide
ggcucuagcuugcugggcc

SEQ ID NO: 1321516 - RNA, 19 nt, Artificial Sequence
  Description of Artificial Sequence: Synthetic oligonucleotide
agacguccuauguccuuag

SEQ ID NO: 1321517 - RNA, 19 nt, Artificial Sequence
  Description of Artificial Sequence: Synthetic oligonucleotide
cagcagagcuccaccgacg

SEQ ID NO: 1321518 - RNA, 19 nt, Artificial Sequence
  Description of Artificial Sequence: Synthetic oligonucleotide
cuauguccuuagauagcug

SEQ ID NO: 1321519 - RNA, 19 nt, Artificial Sequence
  Description of Artificial Sequence: Synthetic oligonucleotide
aguuauacuuggggcuguc

SEQ ID NO: 1321520 - RNA, 19 nt, Artificial Sequence
  Description of Artificial Sequence: Synthetic oligonucleotide
agccgcucaggguugagau

SEQ ID NO: 1321521 - RNA, 19 nt, Artificial Sequence
  Description of Artificial Sequence: Synthetic oligonucleotide
aucagaggccccucugagu

SEQ ID NO: 1321522 - RNA, 19 nt, Artificial Sequence
  Description of Artificial Sequence: Synthetic oligonucleotide
uagcucucuacuguccgga

SEQ ID NO: 1321523 - RNA, 19 nt, Artificial Sequence
  Description of Artificial Sequence: Synthetic oligonucleotide
guggucuguagcuccugcc

SEQ ID NO: 1321524 - RNA, 19 nt, Artificial Sequence
  Description of Artificial Sequence: Synthetic oligonucleotide
agcugguugagugcauaag

SEQ ID NO: 1321525 - RNA, 19 nt, Artificial Sequence
  Description of Artificial Sequence: Synthetic oligonucleotide
cccaugacggugcagcucc

SEQ ID NO: 1321526 - RNA, 19 nt, Artificial Sequence
  Description of Artificial Sequence: Synthetic oligonucleotide
ucuagcuugcugggcccgg

SEQ ID NO: 1321527 - RNA, 19 nt, Artificial Sequence
  Description of Artificial Sequence: Synthetic oligonucleotide
uguccggagcugcucugug

SEQ ID NO: 1321528 - RNA, 19 nt, Artificial Sequence
  Description of Artificial Sequence: Synthetic oligonucleotide
cagugagacguccuauguc

SEQ ID NO: 1321529 - RNA, 19 nt, Artificial Sequence
  Description of Artificial Sequence: Synthetic oligonucleotide
uggggcaucagagcagagu

SEQ ID NO: 1321530 - RNA, 19 nt, Artificial Sequence
  Description of Artificial Sequence: Synthetic oligonucleotide
accaugcaucccauucgcc

SEQ ID NO: 1321531 - RNA, 19 nt, Artificial Sequence
  Description of Artificial Sequence: Synthetic oligonucleotide
cuagugagcgaaggccggg

SEQ ID NO: 1321532 - RNA, 19 nt, Artificial Sequence
  Description of Artificial Sequence: Synthetic oligonucleotide
uggccacggcuucaugcag

SEQ ID NO: 1321533 - RNA, 19 nt, Artificial Sequence
  Description of Artificial Sequence: Synthetic oligonucleotide
ggguggccacaucaaagcg

SEQ ID NO: 1321534 - RNA, 19 nt, Artificial Sequence
  Description of Artificial Sequence: Synthetic oligonucleotide
cugccgcacaaccuuuacc

SEQ ID NO: 1321535 - RNA, 19 nt, Artificial Sequence
  Description of Artificial Sequence: Synthetic oligonucleotide
caaagcgcagccgcucagg

SEQ ID NO: 1321536 - RNA, 19 nt, Artificial Sequence
  Description of Artificial Sequence: Synthetic oligonucleotide
cacggucugaagccuggcc

SEQ ID NO: 1321537 - RNA, 19 nt, Artificial Sequence
  Description of Artificial Sequence: Synthetic oligonucleotide
uaagcucgggcugucccga

SEQ ID NO: 1321538 - RNA, 19 nt, Artificial Sequence
  Description of Artificial Sequence: Synthetic oligonucleotide
acggcuucaugcaggauga

SEQ ID NO: 1321539 - RNA, 19 nt, Artificial Sequence
  Description of Artificial Sequence: Synthetic oligonucleotide
cugguugagugcauaagcu

SEQ ID NO: 1321540 - RNA, 19 nt, Artificial Sequence
  Description of Artificial Sequence: Synthetic oligonucleotide
cucuacuguccggagcugc

SEQ ID NO: 1321541 - RNA, 19 nt, Artificial Sequence
  Description of Artificial Sequence: Synthetic oligonucleotide
acgaagugcccagcucagc

SEQ ID NO: 1321542 - RNA, 19 nt, Artificial Sequence
  Description of Artificial Sequence: Synthetic oligonucleotide
cuaugaccucagugagacg

SEQ ID NO: 1321543 - RNA, 19 nt, Artificial Sequence
  Description of Artificial Sequence: Synthetic oligonucleotide
gguugaagagaguaguuau

SEQ ID NO: 1321544 - RNA, 19 nt, Artificial Sequence
  Description of Artificial Sequence: Synthetic oligonucleotide
acggccuuauccugccuca

SEQ ID NO: 1321545 - RNA, 19 nt, Artificial Sequence
  Description of Artificial Sequence: Synthetic oligonucleotide
gcuaucacucgagagcccc

SEQ ID NO: 1321546 - RNA, 19 nt, Artificial Sequence
  Description of Artificial Sequence: Synthetic oligonucleotide
ggcugccccgacuuagucg

SEQ ID NO: 1321547 - RNA, 19 nt, Artificial Sequence
  Description of Artificial Sequence: Synthetic oligonucleotide
caaucagaggccccucuga

SEQ ID NO: 1321548 - RNA, 19 nt, Artificial Sequence
  Description of Artificial Sequence: Synthetic oligonucleotide
ccaacaggaggccgcagcg

SEQ ID NO: 1321549 - RNA, 19 nt, Artificial Sequence
  Description of Artificial Sequence: Synthetic oligonucleotide
guaagcacucgguggccac

SEQ ID NO: 1321550 - RNA, 19 nt, Artificial Sequence
  Description of Artificial Sequence: Synthetic oligonucleotide
guggccacggcuucaugca

SEQ ID NO: 1321551 - RNA, 19 nt, Artificial Sequence
  Description of Artificial Sequence: Synthetic oligonucleotide
ucgccaggccucauccaca

SEQ ID NO: 1321552 - RNA, 19 nt, Artificial Sequence
  Description of Artificial Sequence: Synthetic oligonucleotide
uaguuauacuuggggcugu

SEQ ID NO: 1321553 - RNA, 19 nt, Artificial Sequence
  Description of Artificial Sequence: Synthetic oligonucleotide
gcgcacaguacacugccag

SEQ ID NO: 1321554 - RNA, 19 nt, Artificial Sequence
  Description of Artificial Sequence: Synthetic oligonucleotide
uaucacucgagagccccaa

SEQ ID NO: 1321555 - RNA, 19 nt, Artificial Sequence
  Description of Artificial Sequence: Synthetic oligonucleotide
aauccccauuggguugaag

SEQ ID NO: 1321556 - RNA, 19 nt, Artificial Sequence
  Description of Artificial Sequence: Synthetic oligonucleotide
aggaacgcccacugacacu

SEQ ID NO: 1321557 - RNA, 19 nt, Artificial Sequence
  Description of Artificial Sequence: Synthetic oligonucleotide
guugaagagaguaguuaua

SEQ ID NO: 1321558 - RNA, 19 nt, Artificial Sequence
  Description of Artificial Sequence: Synthetic oligonucleotide
uuggcacggcgcuguagca

SEQ ID NO: 1321559 - RNA, 19 nt, Artificial Sequence
  Description of Artificial Sequence: Synthetic oligonucleotide
cacggccuuauccugccuc

SEQ ID NO: 1321560 - RNA, 19 nt, Artificial Sequence
  Description of Artificial Sequence: Synthetic oligonucleotide
agguggguggccgugugcu

SEQ ID NO: 1321561 - RNA, 19 nt, Artificial Sequence
  Description of Artificial Sequence: Synthetic oligonucleotide
uagcuugcugggcccggug

SEQ ID NO: 1321562 - RNA, 19 nt, Artificial Sequence
  Description of Artificial Sequence: Synthetic oligonucleotide
augaccucagugagacguc

SEQ ID NO: 1321563 - RNA, 19 nt, Artificial Sequence
  Description of Artificial Sequence: Synthetic oligonucleotide
gguacaccucaucuaguga

SEQ ID NO: 1321564 - RNA, 19 nt, Artificial Sequence
  Description of Artificial Sequence: Synthetic oligonucleotide
acgucugcagugcggccug

SEQ ID NO: 1321565 - RNA, 19 nt, Artificial Sequence
  Description of Artificial Sequence: Synthetic oligonucleotide
gugcgcagcaggugcgucc

SEQ ID NO: 1321566 - RNA, 19 nt, Artificial Sequence
  Description of Artificial Sequence: Synthetic oligonucleotide
uccccggugauggccagca

SEQ ID NO: 1321567 - RNA, 19 nt, Artificial Sequence
  Description of Artificial Sequence: Synthetic oligonucleotide
gagcugguugagugcauaa

SEQ ID NO: 1321568 - RNA, 19 nt, Artificial Sequence
  Description of Artificial Sequence: Synthetic oligonucleotide
ucgggcugucccgagggca

SEQ ID NO: 1321569 - RNA, 19 nt, Artificial Sequence
  Description of Artificial Sequence: Synthetic oligonucleotide
ccgcacaaccuuuaccagc

SEQ ID NO: 1321570 - RNA, 19 nt, Artificial Sequence
  Description of Artificial Sequence: Synthetic oligonucleotide
ggaacuggcucuagcuugc

SEQ ID NO: 1321571 - RNA, 19 nt, Artificial Sequence
  Description of Artificial Sequence: Synthetic oligonucleotide
caucccauucgccaggccu

SEQ ID NO: 1321572 - RNA, 19 nt, Artificial Sequence
  Description of Artificial Sequence: Synthetic oligonucleotide
ggccccagugcgcagcagg

SEQ ID NO: 1321573 - RNA, 19 nt, Artificial Sequence
  Description of Artificial Sequence: Synthetic oligonucleotide
uugagaugggagccccguu

SEQ ID NO: 1321574 - RNA, 19 nt, Artificial Sequence
  Description of Artificial Sequence: Synthetic oligonucleotide
cugacacuacccgcacagg

SEQ ID NO: 1321575 - RNA, 19 nt, Artificial Sequence
  Description of Artificial Sequence: Synthetic oligonucleotide
cccagugcgcagcaggugc

SEQ ID NO: 1321576 - RNA, 19 nt, Artificial Sequence
  Description of Artificial Sequence: Synthetic oligonucleotide
accucagugagacguccua

SEQ ID NO: 1321577 - RNA, 19 nt, Artificial Sequence
  Description of Artificial Sequence: Synthetic oligonucleotide
cuguaagcacucgguggcc

SEQ ID NO: 1321578 - RNA, 19 nt, Artificial Sequence
  Description of Artificial Sequence: Synthetic oligonucleotide
uacccgcacagggucuggg

SEQ ID NO: 1321579 - RNA, 19 nt, Artificial Sequence
  Description of Artificial Sequence: Synthetic oligonucleotide
auucgccaggccucaucca

SEQ ID NO: 1321580 - RNA, 19 nt, Artificial Sequence
  Description of Artificial Sequence: Synthetic oligonucleotide
cguagcucucuacuguccg

SEQ ID NO: 1321581 - RNA, 19 nt, Artificial Sequence
  Description of Artificial Sequence: Synthetic oligonucleotide
cucuagcuugcugggcccg

SEQ ID NO: 1321582 - RNA, 19 nt, Artificial Sequence
  Description of Artificial Sequence: Synthetic oligonucleotide
uggguccgagggucuuacg

SEQ ID NO: 1321583 - RNA, 19 nt, Artificial Sequence
  Description of Artificial Sequence: Synthetic oligonucleotide
caaccuuuaccagcgcuga

SEQ ID NO: 1321584 - RNA, 19 nt, Artificial Sequence
  Description of Artificial Sequence: Synthetic oligonucleotide
gacucaacagagacagugu

SEQ ID NO: 1321585 - RNA, 19 nt, Artificial Sequence
  Description of Artificial Sequence: Synthetic oligonucleotide
cugugcgaacaagguagcc

SEQ ID NO: 1321586 - RNA, 19 nt, Artificial Sequence
  Description of Artificial Sequence: Synthetic oligonucleotide
uguagcaccugggccucac

SEQ ID NO: 1321587 - RNA, 19 nt, Artificial Sequence
  Description of Artificial Sequence: Synthetic oligonucleotide
ggcaguguuggcacggcgc

SEQ ID NO: 1321588 - RNA, 19 nt, Artificial Sequence
  Description of Artificial Sequence: Synthetic oligonucleotide
ggugcgucccacagcagag

SEQ ID NO: 1321589 - RNA, 19 nt, Artificial Sequence
  Description of Artificial Sequence: Synthetic oligonucleotide
agcguagaaguugguucug

SEQ ID NO: 1321590 - RNA, 19 nt, Artificial Sequence
  Description of Artificial Sequence: Synthetic oligonucleotide
agcgcugagagggacucaa

SEQ ID NO: 1321591 - RNA, 19 nt, Artificial Sequence
  Description of Artificial Sequence: Synthetic oligonucleotide
accgacgucugcagugcgg

SEQ ID NO: 1321592 - RNA, 19 nt, Artificial Sequence
  Description of Artificial Sequence: Synthetic oligonucleotide
gggcaccuccuccauauac

SEQ ID NO: 1321593 - RNA, 19 nt, Artificial Sequence
  Description of Artificial Sequence: Synthetic oligonucleotide
caacaggaggccgcagcgc

SEQ ID NO: 1321594 - RNA, 19 nt, Artificial Sequence
  Description of Artificial Sequence: Synthetic oligonucleotide
guuauacuuggggcuguca

SEQ ID NO: 1321595 - RNA, 19 nt, Artificial Sequence
  Description of Artificial Sequence: Synthetic oligonucleotide
ggauggcaguguuggcacg

SEQ ID NO: 1321596 - RNA, 19 nt, Artificial Sequence
  Description of Artificial Sequence: Synthetic oligonucleotide
gacacuacccgcacagggu

SEQ ID NO: 1321597 - RNA, 19 nt, Artificial Sequence
  Description of Artificial Sequence: Synthetic oligonucleotide
ccaugcaucccauucgcca

SEQ ID NO: 1321598 - RNA, 19 nt, Artificial Sequence
  Description of Artificial Sequence: Synthetic oligonucleotide
ggccgugugcuucaccaug

SEQ ID NO: 1321599 - RNA, 19 nt, Artificial Sequence
  Description of Artificial Sequence: Synthetic oligonucleotide
ggguccgagggucuuacga

SEQ ID NO: 1321600 - RNA, 19 nt, Artificial Sequence
  Description of Artificial Sequence: Synthetic oligonucleotide
gagacguccuauguccuua

SEQ ID NO: 1321601 - RNA, 19 nt, Artificial Sequence
  Description of Artificial Sequence: Synthetic oligonucleotide
gagagggacucaacagaga

SEQ ID NO: 1321602 - RNA, 19 nt, Artificial Sequence
  Description of Artificial Sequence: Synthetic oligonucleotide
cagagcuccaccgacgucu

SEQ ID NO: 1321603 - RNA, 19 nt, Artificial Sequence
  Description of Artificial Sequence: Synthetic oligonucleotide
auguccuuagauagcugau

SEQ ID NO: 1321604 - RNA, 19 nt, Artificial Sequence
  Description of Artificial Sequence: Synthetic oligonucleotide
gggucuuacgaagugccca

SEQ ID NO: 1321605 - RNA, 19 nt, Artificial Sequence
  Description of Artificial Sequence: Synthetic oligonucleotide
caguuuccggauggcagug

SEQ ID NO: 1321606 - RNA, 19 nt, Artificial Sequence
  Description of Artificial Sequence: Synthetic oligonucleotide
gucuaugaccucagugaga

SEQ ID NO: 1321607 - RNA, 19 nt, Artificial Sequence
  Description of Artificial Sequence: Synthetic oligonucleotide
ggaacgcccacugacacua

SEQ ID NO: 1321608 - RNA, 19 nt, Artificial Sequence
  Description of Artificial Sequence: Synthetic oligonucleotide
cuaucacucgagagcccca

SEQ ID NO: 1321609 - RNA, 19 nt, Artificial Sequence
  Description of Artificial Sequence: Synthetic oligonucleotide
accccaugacggugcagcu

SEQ ID NO: 1321610 - RNA, 19 nt, Artificial Sequence
  Description of Artificial Sequence: Synthetic oligonucleotide
gacguccuauguccuuaga

SEQ ID NO: 1321611 - RNA, 19 nt, Artificial Sequence
  Description of Artificial Sequence: Synthetic oligonucleotide
ccugugcgaacaagguagc

SEQ ID NO: 1321612 - RNA, 19 nt, Artificial Sequence
  Description of Artificial Sequence: Synthetic oligonucleotide
gguccgagggucuuacgaa

SEQ ID NO: 1321613 - RNA, 19 nt, Artificial Sequence
  Description of Artificial Sequence: Synthetic oligonucleotide
uggcucuagcuugcugggc

SEQ ID NO: 1321614 - RNA, 19 nt, Artificial Sequence
  Description of Artificial Sequence: Synthetic oligonucleotide
ugcauaagcucgggcuguc

SEQ ID NO: 1321615 - RNA, 19 nt, Artificial Sequence
  Description of Artificial Sequence: Synthetic oligonucleotide
caccgacgucugcagugcg

SEQ ID NO: 1321616 - RNA, 19 nt, Artificial Sequence
  Description of Artificial Sequence: Synthetic oligonucleotide
gucuuacgaagugcccagc

SEQ ID NO: 1321617 - RNA, 19 nt, Artificial Sequence
  Description of Artificial Sequence: Synthetic oligonucleotide
gcaugggccacaggaacgc

SEQ ID NO: 1321618 - RNA, 19 nt, Artificial Sequence
  Description of Artificial Sequence: Synthetic oligonucleotide
gcucuagcuugcugggccc

SEQ ID NO: 1321619 - RNA, 19 nt, Artificial Sequence
  Description of Artificial Sequence: Synthetic oligonucleotide
uaccagcgcugagagggac

SEQ ID NO: 1321620 - RNA, 19 nt, Artificial Sequence
  Description of Artificial Sequence: Synthetic oligonucleotide
cagguggguggccgugugc

SEQ ID NO: 1321621 - RNA, 19 nt, Artificial Sequence
  Description of Artificial Sequence: Synthetic oligonucleotide
uagccacggucugaagccu

SEQ ID NO: 1321622 - RNA, 19 nt, Artificial Sequence
  Description of Artificial Sequence: Synthetic oligonucleotide
ugcucagugguggguccga

SEQ ID NO: 1321623 - RNA, 19 nt, Artificial Sequence
  Description of Artificial Sequence: Synthetic oligonucleotide
gagugacguuucaacaacu

SEQ ID NO: 1321624 - RNA, 19 nt, Artificial Sequence
  Description of Artificial Sequence: Synthetic oligonucleotide
aguuuccggauggcagugu

SEQ ID NO: 1321625 - RNA, 19 nt, Artificial Sequence
  Description of Artificial Sequence: Synthetic oligonucleotide
ggcacggcgcuguagcauc

SEQ ID NO: 1321626 - RNA, 19 nt, Artificial Sequence
  Description of Artificial Sequence: Synthetic oligonucleotide
cacagaccugugcccgggc

SEQ ID NO: 1321627 - RNA, 19 nt, Artificial Sequence
  Description of Artificial Sequence: Synthetic oligonucleotide
guacacugccagagggcug

SEQ ID NO: 1321628 - RNA, 19 nt, Artificial Sequence
  Description of Artificial Sequence: Synthetic oligonucleotide
ccagugcgcagcaggugcg

SEQ ID NO: 1321629 - RNA, 19 nt, Artificial Sequence
  Description of Artificial Sequence: Synthetic oligonucleotide
ggccacggcuucaugcagg

SEQ ID NO: 1321630 - RNA, 19 nt, Artificial Sequence
  Description of Artificial Sequence: Synthetic oligonucleotide
gacgucugcagugcggccu

SEQ ID NO: 1321631 - RNA, 19 nt, Artificial Sequence
  Description of Artificial Sequence: Synthetic oligonucleotide
caccucaucuagugagcga

SEQ ID NO: 1321632 - RNA, 19 nt, Artificial Sequence
  Description of Artificial Sequence: Synthetic oligonucleotide
ggcaucagagcagagucua

SEQ ID NO: 1321633 - RNA, 19 nt, Artificial Sequence
  Description of Artificial Sequence: Synthetic oligonucleotide
gucccguccucugaauaca

SEQ ID NO: 1321634 - RNA, 19 nt, Artificial Sequence
  Description of Artificial Sequence: Synthetic oligonucleotide
guccacaaucagaggcccc

SEQ ID NO: 1321635 - RNA, 19 nt, Artificial Sequence
  Description of Artificial Sequence: Synthetic oligonucleotide
guggguggccgugugcuuc

SEQ ID NO: 1321636 - RNA, 19 nt, Artificial Sequence
  Description of Artificial Sequence: Synthetic oligonucleotide
cucgagagccccaagccuu

SEQ ID NO: 1321637 - RNA, 19 nt, Artificial Sequence
  Description of Artificial Sequence: Synthetic oligonucleotide
gguugagaugggagccccg

SEQ ID NO: 1321638 - RNA, 19 nt, Artificial Sequence
  Description of Artificial Sequence: Synthetic oligonucleotide
uggcacggcgcuguagcau

SEQ ID NO: 1321639 - RNA, 19 nt, Artificial Sequence
  Description of Artificial Sequence: Synthetic oligonucleotide
guugagaugggagccccgu

SEQ ID NO: 1321640 - RNA, 19 nt, Artificial Sequence
  Description of Artificial Sequence: Synthetic oligonucleotide
ccucaucuagugagcgaag

SEQ ID NO: 1321641 - RNA, 19 nt, Artificial Sequence
  Description of Artificial Sequence: Synthetic oligonucleotide
caggcgagugaugcccuug

SEQ ID NO: 1321642 - RNA, 19 nt, Artificial Sequence
  Description of Artificial Sequence: Synthetic oligonucleotide
gcucuggcccagcucucgg

SEQ ID NO: 1321643 - RNA, 19 nt, Artificial Sequence
  Description of Artificial Sequence: Synthetic oligonucleotide
cucgggcugucccgagggc

SEQ ID NO: 1321644 - RNA, 19 nt, Artificial Sequence
  Description of Artificial Sequence: Synthetic oligonucleotide
cuggggcaucagagcagag

SEQ ID NO: 1321645 - RNA, 19 nt, Artificial Sequence
  Description of Artificial Sequence: Synthetic oligonucleotide
guggguccgagggucuuac

SEQ ID NO: 1321646 - RNA, 19 nt, Artificial Sequence
  Description of Artificial Sequence: Synthetic oligonucleotide
ccauauacacggccuuauc

SEQ ID NO: 1321647 - RNA, 19 nt, Artificial Sequence
  Description of Artificial Sequence: Synthetic oligonucleotide
ccgacuuagucgcucccug

SEQ ID NO: 1321648 - RNA, 19 nt, Artificial Sequence
  Description of Artificial Sequence: Synthetic oligonucleotide
ugccagugcaugggccaca

SEQ ID NO: 1321649 - RNA, 19 nt, Artificial Sequence
  Description of Artificial Sequence: Synthetic oligonucleotide
cugucccgagggcagccuc

SEQ ID NO: 1321650 - RNA, 19 nt, Artificial Sequence
  Description of Artificial Sequence: Synthetic oligonucleotide
cggucugaagccuggcccc

SEQ ID NO: 1321651 - RNA, 19 nt, Artificial Sequence
  Description of Artificial Sequence: Synthetic oligonucleotide
ggaguccggugccagugca

SEQ ID NO: 1321652 - RNA, 19 nt, Artificial Sequence
  Description of Artificial Sequence: Synthetic oligonucleotide
ugccccgacuuagucgcuc

SEQ ID NO: 1321653 - RNA, 19 nt, Artificial Sequence
  Description of Artificial Sequence: Synthetic oligonucleotide
cuacccgcacagggucugg

SEQ ID NO: 1321654 - RNA, 19 nt, Artificial Sequence
  Description of Artificial Sequence: Synthetic oligonucleotide
cguccuauguccuuagaua

SEQ ID NO: 1321655 - RNA, 19 nt, Artificial Sequence
  Description of Artificial Sequence: Synthetic oligonucleotide
cacauccugcugcccugug

SEQ ID NO: 1321656 - RNA, 19 nt, Artificial Sequence
  Description of Artificial Sequence: Synthetic oligonucleotide
ccgacgucugcagugcggc

SEQ ID NO: 1321657 - RNA, 19 nt, Artificial Sequence
  Description of Artificial Sequence: Synthetic oligonucleotide
gccacggucugaagccugg

SEQ ID NO: 1321658 - RNA, 19 nt, Artificial Sequence
  Description of Artificial Sequence: Synthetic oligonucleotide
ccuauguccuuagauagcu

SEQ ID NO: 1321659 - RNA, 19 nt, Artificial Sequence
  Description of Artificial Sequence: Synthetic oligonucleotide
ccgagggucuuacgaagug

SEQ ID NO: 1321660 - RNA, 19 nt, Artificial Sequence
  Description of Artificial Sequence: Synthetic oligonucleotide
gauagcugaugagccuccu

SEQ ID NO: 1321661 - RNA, 19 nt, Artificial Sequence
  Description of Artificial Sequence: Synthetic oligonucleotide
ccacagggaacaacacauc

SEQ ID NO: 1321662 - RNA, 19 nt, Artificial Sequence
  Description of Artificial Sequence: Synthetic oligonucleotide
gcacguagcucucuacugu

SEQ ID NO: 1321663 - RNA, 19 nt, Artificial Sequence
  Description of Artificial Sequence: Synthetic oligonucleotide
cacaguccuuccucuggaa

SEQ ID NO: 1321664 - RNA, 19 nt, Artificial Sequence
  Description of Artificial Sequence: Synthetic oligonucleotide
gacaggcgcacaguacacu

SEQ ID NO: 1321665 - RNA, 19 nt, Artificial Sequence
  Description of Artificial Sequence: Synthetic oligonucleotide
agccacggucugaagccug

SEQ ID NO: 1321666 - RNA, 19 nt, Artificial Sequence
  Description of Artificial Sequence: Synthetic oligonucleotide
gcugccgcacaaccuuuac

SEQ ID NO: 1321667 - RNA, 19 nt, Artificial Sequence
  Description of Artificial Sequence: Synthetic oligonucleotide
ggccuuauccugccucaca

SEQ ID NO: 1321668 - RNA, 19 nt, Artificial Sequence
  Description of Artificial Sequence: Synthetic oligonucleotide
ugcggccugggaguccggu

SEQ ID NO: 1321669 - RNA, 19 nt, Artificial Sequence
  Description of Artificial Sequence: Synthetic oligonucleotide
cugucccguccucugaaua

SEQ ID NO: 1321670 - RNA, 19 nt, Artificial Sequence
  Description of Artificial Sequence: Synthetic oligonucleotide
cacugacacuacccgcaca

SEQ ID NO: 1321671 - RNA, 19 nt, Artificial Sequence
  Description of Artificial Sequence: Synthetic oligonucleotide
cccguugcucagugguggg

SEQ ID NO: 1321672 - RNA, 19 nt, Artificial Sequence
  Description of Artificial Sequence: Synthetic oligonucleotide
acacggccuuauccugccu

SEQ ID NO: 1321673 - RNA, 19 nt, Artificial Sequence
  Description of Artificial Sequence: Synthetic oligonucleotide
ccaagccuugccucccaug

SEQ ID NO: 1321674 - RNA, 19 nt, Artificial Sequence
  Description of Artificial Sequence: Synthetic oligonucleotide
uccuggcugccccgacuua

SEQ ID NO: 1321675 - RNA, 19 nt, Artificial Sequence
  Description of Artificial Sequence: Synthetic oligonucleotide
cuccauauacacggccuua

SEQ ID NO: 1321676 - RNA, 19 nt, Artificial Sequence
  Description of Artificial Sequence: Synthetic oligonucleotide
cccacagaccugugcccgg

SEQ ID NO: 1321677 - RNA, 19 nt, Artificial Sequence
  Description of Artificial Sequence: Synthetic oligonucleotide
caguguuggcacggcgcug

SEQ ID NO: 1321678 - RNA, 19 nt, Artificial Sequence
  Description of Artificial Sequence: Synthetic oligonucleotide
gguggccgugugcuucacc

SEQ ID NO: 1321679 - RNA, 19 nt, Artificial Sequence
  Description of Artificial Sequence: Synthetic oligonucleotide
gccacggcuucaugcagga

SEQ ID NO: 1321680 - RNA, 19 nt, Artificial Sequence
  Description of Artificial Sequence: Synthetic oligonucleotide
ggcgagugaugcccuugac

SEQ ID NO: 1321681 - RNA, 19 nt, Artificial Sequence
  Description of Artificial Sequence: Synthetic oligonucleotide
guaguagcacugacaugcu

SEQ ID NO: 1321682 - RNA, 19 nt, Artificial Sequence
  Description of Artificial Sequence: Synthetic oligonucleotide
gugcauaagcucgggcugu

SEQ ID NO: 1321683 - RNA, 19 nt, Artificial Sequence
  Description of Artificial Sequence: Synthetic oligonucleotide
gcauaagcucgggcugucc

SEQ ID NO: 1321684 - RNA, 19 nt, Artificial Sequence
  Description of Artificial Sequence: Synthetic oligonucleotide
cagaggccccucugaguga

SEQ ID NO: 1321685 - RNA, 19 nt, Artificial Sequence
  Description of Artificial Sequence: Synthetic oligonucleotide
ccaccgacgucugcagugc

SEQ ID NO: 1321686 - RNA, 19 nt, Artificial Sequence
  Description of Artificial Sequence: Synthetic oligonucleotide
uaauccccauuggguugaa

SEQ ID NO: 1321687 - RNA, 19 nt, Artificial Sequence
  Description of Artificial Sequence: Synthetic oligonucleotide
gcacaaccuuuaccagcgc

SEQ ID NO: 1321688 - RNA, 19 nt, Artificial Sequence
  Description of Artificial Sequence: Synthetic oligonucleotide
gaacgcccacugacacuac

SEQ ID NO: 1321689 - RNA, 19 nt, Artificial Sequence
  Description of Artificial Sequence: Synthetic oligonucleotide
ggcuaucacucgagagccc

SEQ ID NO: 1321690 - RNA, 19 nt, Artificial Sequence
  Description of Artificial Sequence: Synthetic oligonucleotide
cacucgguggccacggcuu

SEQ ID NO: 1321691 - RNA, 19 nt, Artificial Sequence
  Description of Artificial Sequence: Synthetic oligonucleotide
gaccucagugagacguccu

SEQ ID NO: 1321692 - RNA, 19 nt, Artificial Sequence
  Description of Artificial Sequence: Synthetic oligonucleotide
ccauucgccaggccucauc

SEQ ID NO: 1321693 - RNA, 19 nt, Artificial Sequence
  Description of Artificial Sequence: Synthetic oligonucleotide
ccggugccagugcaugggc

SEQ ID NO: 1321694 - RNA, 19 nt, Artificial Sequence
  Description of Artificial Sequence: Synthetic oligonucleotide
gcaucccauucgccaggcc

SEQ ID NO: 1321695 - RNA, 19 nt, Artificial Sequence
  Description of Artificial Sequence: Synthetic oligonucleotide
gcccugugcgaacaaggua

SEQ ID NO: 1321696 - RNA, 19 nt, Artificial Sequence
  Description of Artificial Sequence: Synthetic oligonucleotide
cacuacccgcacagggucu

SEQ ID NO: 1321697 - RNA, 19 nt, Artificial Sequence
  Description of Artificial Sequence: Synthetic oligonucleotide
gcggccugggaguccggug

SEQ ID NO: 1321698 - RNA, 19 nt, Artificial Sequence
  Description of Artificial Sequence: Synthetic oligonucleotide
cuccccggugauggccagc

SEQ ID NO: 1321699 - RNA, 19 nt, Artificial Sequence
  Description of Artificial Sequence: Synthetic oligonucleotide
cggugccagugcaugggcc

SEQ ID NO: 1321700 - RNA, 19 nt, Artificial Sequence
  Description of Artificial Sequence: Synthetic oligonucleotide
gccggggacaugggcagug

SEQ ID NO: 1321701 - RNA, 19 nt, Artificial Sequence
  Description of Artificial Sequence: Synthetic oligonucleotide
agcugccgcacaaccuuua

SEQ ID NO: 1321702 - RNA, 19 nt, Artificial Sequence
  Description of Artificial Sequence: Synthetic oligonucleotide
cccggcucugucagagcug

SEQ ID NO: 1321703 - RNA, 19 nt, Artificial Sequence
  Description of Artificial Sequence: Synthetic oligonucleotide
gcccggcucugucagagcu

SEQ ID NO: 1321704 - RNA, 19 nt, Artificial Sequence
  Description of Artificial Sequence: Synthetic oligonucleotide
ccccucugagugacguuuc

SEQ ID NO: 1321705 - RNA, 19 nt, Artificial Sequence
  Description of Artificial Sequence: Synthetic oligonucleotide
gaacuggcucuagcuugcu

SEQ ID NO: 1321706 - RNA, 19 nt, Artificial Sequence
  Description of Artificial Sequence: Synthetic oligonucleotide
cugucagagcugguugagu

SEQ ID NO: 1321707 - RNA, 19 nt, Artificial Sequence
  Description of Artificial Sequence: Synthetic oligonucleotide
ccccgacuuagucgcuccc

SEQ ID NO: 1321708 - RNA, 19 nt, Artificial Sequence
  Description of Artificial Sequence: Synthetic oligonucleotide
guucagcguagaaguuggu

SEQ ID NO: 1321709 - RNA, 19 nt, Artificial Sequence
  Description of Artificial Sequence: Synthetic oligonucleotide
gaguccggugccagugcau

SEQ ID NO: 1321710 - RNA, 19 nt, Artificial Sequence
  Description of Artificial Sequence: Synthetic oligonucleotide
ccacggucugaagccuggc

SEQ ID NO: 1321711 - RNA, 19 nt, Artificial Sequence
  Description of Artificial Sequence: Synthetic oligonucleotide
cgacgucugcagugcggcc

SEQ ID NO: 1321712 - RNA, 19 nt, Artificial Sequence
  Description of Artificial Sequence: Synthetic oligonucleotide
ggagcccggcucugucaga

SEQ ID NO: 1321713 - RNA, 19 nt, Artificial Sequence
  Description of Artificial Sequence: Synthetic oligonucleotide
cuagcuugcugggcccggu

SEQ ID NO: 1321714 - RNA, 19 nt, Artificial Sequence
  Description of Artificial Sequence: Synthetic oligonucleotide
gggcaucagagcagagucu

SEQ ID NO: 1321715 - RNA, 19 nt, Artificial Sequence
  Description of Artificial Sequence: Synthetic oligonucleotide
ccggagcugcucugugguc

SEQ ID NO: 1321716 - RNA, 19 nt, Artificial Sequence
  Description of Artificial Sequence: Synthetic oligonucleotide
cuguccggagcugcucugu

SEQ ID NO: 1321717 - RNA, 19 nt, Artificial Sequence
  Description of Artificial Sequence: Synthetic oligonucleotide
cggccagugcccaggcuuc

SEQ ID NO: 1321718 - RNA, 19 nt, Artificial Sequence
  Description of Artificial Sequence: Synthetic oligonucleotide
cggcgcuguagcaucuuca

SEQ ID NO: 1321719 - RNA, 19 nt, Artificial Sequence
  Description of Artificial Sequence: Synthetic oligonucleotide
ccucugagugacguuucaa

SEQ ID NO: 1321720 - RNA, 19 nt, Artificial Sequence
  Description of Artificial Sequence: Synthetic oligonucleotide
cggugauggccagcaggcg

SEQ ID NO: 1321721 - RNA, 19 nt, Artificial Sequence
  Description of Artificial Sequence: Synthetic oligonucleotide
cccgcacagggucugggua

SEQ ID NO: 1321722 - RNA, 19 nt, Artificial Sequence
  Description of Artificial Sequence: Synthetic oligonucleotide
guggcugcacacggccagu

SEQ ID NO: 1321723 - RNA, 19 nt, Artificial Sequence
  Description of Artificial Sequence: Synthetic oligonucleotide
ccccugggcuaucacucga

SEQ ID NO: 1321724 - RNA, 19 nt, Artificial Sequence
  Description of Artificial Sequence: Synthetic oligonucleotide
caccugacaggcgcacagu

SEQ ID NO: 1321725 - RNA, 19 nt, Artificial Sequence
  Description of Artificial Sequence: Synthetic oligonucleotide
ccgggccacagggaacaac

SEQ ID NO: 1321726 - RNA, 19 nt, Artificial Sequence
  Description of Artificial Sequence: Synthetic oligonucleotide
gcgcugagagggacucaac

SEQ ID NO: 1321727 - RNA, 19 nt, Artificial Sequence
  Description of Artificial Sequence: Synthetic oligonucleotide
gguggguccgagggucuua

SEQ ID NO: 1321728 - RNA, 19 nt, Artificial Sequence
  Description of Artificial Sequence: Synthetic oligonucleotide
cagcgcugagagggacuca

SEQ ID NO: 1321729 - RNA, 19 nt, Artificial Sequence
  Description of Artificial Sequence: Synthetic oligonucleotide
cagcugccgcacaaccuuu

SEQ ID NO: 1321730 - RNA, 19 nt, Artificial Sequence
  Description of Artificial Sequence: Synthetic oligonucleotide
gcgcagccgcucaggguug

SEQ ID NO: 1321731 - RNA, 19 nt, Artificial Sequence
  Description of Artificial Sequence: Synthetic oligonucleotide
gccgcagcgcuggccugcc

SEQ ID NO: 1321732 - RNA, 19 nt, Artificial Sequence
  Description of Artificial Sequence: Synthetic oligonucleotide
ccaggcuucugcugucaau

SEQ ID NO: 1321733 - RNA, 19 nt, Artificial Sequence
  Description of Artificial Sequence: Synthetic oligonucleotide
cgaacaagguagccacggu

SEQ ID NO: 1321734 - RNA, 19 nt, Artificial Sequence
  Description of Artificial Sequence: Synthetic oligonucleotide
ggggcaccuccuccauaua

SEQ ID NO: 1321735 - RNA, 19 nt, Artificial Sequence
  Description of Artificial Sequence: Synthetic oligonucleotide
cgagggcagccuccagguc

SEQ ID NO: 1321736 - RNA, 19 nt, Artificial Sequence
  Description of Artificial Sequence: Synthetic oligonucleotide
cugccccgacuuagucgcu

SEQ ID NO: 1321737 - RNA, 19 nt, Artificial Sequence
  Description of Artificial Sequence: Synthetic oligonucleotide
ccccaagccuugccuccca

SEQ ID NO: 1321738 - RNA, 19 nt, Artificial Sequence
  Description of Artificial Sequence: Synthetic oligonucleotide
cccgacuuagucgcucccu

SEQ ID NO: 1321739 - RNA, 19 nt, Artificial Sequence
  Description of Artificial Sequence: Synthetic oligonucleotide
cgugugcuucaccaugcau

SEQ ID NO: 1321740 - RNA, 19 nt, Artificial Sequence
  Description of Artificial Sequence: Synthetic oligonucleotide
gccucccauguggcugcac

SEQ ID NO: 1321741 - RNA, 19 nt, Artificial Sequence
  Description of Artificial Sequence: Synthetic oligonucleotide
gggcccggugcugggccuc

SEQ ID NO: 1321742 - RNA, 19 nt, Artificial Sequence
  Description of Artificial Sequence: Synthetic oligonucleotide
gccaggccucauccacaua

SEQ ID NO: 1321743 - RNA, 19 nt, Artificial Sequence
  Description of Artificial Sequence: Synthetic oligonucleotide
gcacggcgcuguagcaucu

SEQ ID NO: 1321744 - RNA, 19 nt, Artificial Sequence
  Description of Artificial Sequence: Synthetic oligonucleotide
gcgcagcaggugcguccca

SEQ ID NO: 1321745 - RNA, 19 nt, Artificial Sequence
  Description of Artificial Sequence: Synthetic oligonucleotide
cacggcgcuguagcaucuu

SEQ ID NO: 1321746 - RNA, 19 nt, Artificial Sequence
  Description of Artificial Sequence: Synthetic oligonucleotide
ccguugcucaguggugggu

SEQ ID NO: 1321747 - RNA, 19 nt, Artificial Sequence
  Description of Artificial Sequence: Synthetic oligonucleotide
cgccaggccucauccacau

SEQ ID NO: 1321748 - RNA, 19 nt, Artificial Sequence
  Description of Artificial Sequence: Synthetic oligonucleotide
cccaagccuugccucccau

SEQ ID NO: 1321749 - RNA, 19 nt, Artificial Sequence
  Description of Artificial Sequence: Synthetic oligonucleotide
ggccggggacaugggcagu

SEQ ID NO: 1321750 - RNA, 19 nt, Artificial Sequence
  Description of Artificial Sequence: Synthetic oligonucleotide
ccggggacaugggcagugu

SEQ ID NO: 1321751 - RNA, 19 nt, Artificial Sequence
  Description of Artificial Sequence: Synthetic oligonucleotide
cccgggccacagggaacaa

SEQ ID NO: 1321752 - RNA, 19 nt, Artificial Sequence
  Description of Artificial Sequence: Synthetic oligonucleotide
ccacggcuucaugcaggau

SEQ ID NO: 1321753 - RNA, 19 nt, Artificial Sequence
  Description of Artificial Sequence: Synthetic oligonucleotide
cccauucgccaggccucau

SEQ ID NO: 1321754 - RNA, 19 nt, Artificial Sequence
  Description of Artificial Sequence: Synthetic oligonucleotide
aaagcugguggguacaucc

SEQ ID NO: 1321755 - RNA, 19 nt, Artificial Sequence
  Description of Artificial Sequence: Synthetic oligonucleotide
auaguacccacacagaggc

SEQ ID NO: 1321756 - RNA, 19 nt, Artificial Sequence
  Description of Artificial Sequence: Synthetic oligonucleotide
uaagauuaaagccaggaga

SEQ ID NO: 1321757 - RNA, 19 nt, Artificial Sequence
  Description of Artificial Sequence: Synthetic oligonucleotide
aguagugucaguuugacca

SEQ ID NO: 1321758 - RNA, 19 nt, Artificial Sequence
  Description of Artificial Sequence: Synthetic oligonucleotide
aaugcagacaucaaggcac

SEQ ID NO: 1321759 - RNA, 19 nt, Artificial Sequence
  Description of Artificial Sequence: Synthetic oligonucleotide
acauuugugguguaacagc

SEQ ID NO: 1321760 - RNA, 19 nt, Artificial Sequence
  Description of Artificial Sequence: Synthetic oligonucleotide
aauuggcucucccaaaauc

SEQ ID NO: 1321761 - RNA, 19 nt, Artificial Sequence
  Description of Artificial Sequence: Synthetic oligonucleotide
aaggcucaggcauggaugc

SEQ ID NO: 1321762 - RNA, 19 nt, Artificial Sequence
  Description of Artificial Sequence: Synthetic oligonucleotide
ucccgugugaaucugaaag

SEQ ID NO: 1321763 - RNA, 19 nt, Artificial Sequence
  Description of Artificial Sequence: Synthetic oligonucleotide
aagucuuccacacccacag

SEQ ID NO: 1321764 - RNA, 19 nt, Artificial Sequence
  Description of Artificial Sequence: Synthetic oligonucleotide
acaauauacauccgacggc

SEQ ID NO: 1321765 - RNA, 19 nt, Artificial Sequence
  Description of Artificial Sequence: Synthetic oligonucleotide
guuagugaaguucucaacc

SEQ ID NO: 1321766 - RNA, 19 nt, Artificial Sequence
  Description of Artificial Sequence: Synthetic oligonucleotide
uguuggaaaaguuagugaa

SEQ ID NO: 1321767 - RNA, 19 nt, Artificial Sequence
  Description of Artificial Sequence: Synthetic oligonucleotide
cauccgacggccaagauag

SEQ ID NO: 1321768 - RNA, 19 nt, Artificial Sequence
  Description of Artificial Sequence: Synthetic oligonucleotide
uuccuaaugaguuuguuaa

SEQ ID NO: 1321769 - RNA, 19 nt, Artificial Sequence
  Description of Artificial Sequence: Synthetic oligonucleotide
acuuuucaggacugaaugc

SEQ ID NO: 1321770 - RNA, 19 nt, Artificial Sequence
  Description of Artificial Sequence: Synthetic oligonucleotide
cuuuaagugacucaggaga

SEQ ID NO: 1321771 - RNA, 19 nt, Artificial Sequence
  Description of Artificial Sequence: Synthetic oligonucleotide
uuauugggcagaauccggg

SEQ ID NO: 1321772 - RNA, 19 nt, Artificial Sequence
  Description of Artificial Sequence: Synthetic oligonucleotide
ucgaaugugucucuggaug

SEQ ID NO: 1321773 - RNA, 19 nt, Artificial Sequence
  Description of Artificial Sequence: Synthetic oligonucleotide
agauaguacccacacagag

SEQ ID NO: 1321774 - RNA, 19 nt, Artificial Sequence
  Description of Artificial Sequence: Synthetic oligonucleotide
uacgugaugaaggagagug

SEQ ID NO: 1321775 - RNA, 19 nt, Artificial Sequence
  Description of Artificial Sequence: Synthetic oligonucleotide
guuagugaugaucucuugg

SEQ ID NO: 1321776 - RNA, 19 nt, Artificial Sequence
  Description of Artificial Sequence: Synthetic oligonucleotide
gauuaaagccaggagaggc

SEQ ID NO: 1321777 - RNA, 19 nt, Artificial Sequence
  Description of Artificial Sequence: Synthetic oligonucleotide
ucaacgagacacaaucuug

SEQ ID NO: 1321778 - RNA, 19 nt, Artificial Sequence
  Description of Artificial Sequence: Synthetic oligonucleotide
ucuguuggaaaaguuagug

SEQ ID NO: 1321779 - RNA, 19 nt, Artificial Sequence
  Description of Artificial Sequence: Synthetic oligonucleotide
gauggaaaugauaagauua

SEQ ID NO: 1321780 - RNA, 19 nt, Artificial Sequence
  Description of Artificial Sequence: Synthetic oligonucleotide
ugguguaacagcaguaaca

SEQ ID NO: 1321781 - RNA, 19 nt, Artificial Sequence
  Description of Artificial Sequence: Synthetic oligonucleotide
uucaaagcggaauuugugu

SEQ ID NO: 1321782 - RNA, 19 nt, Artificial Sequence
  Description of Artificial Sequence: Synthetic oligonucleotide
agagcuuuaagugacucag

SEQ ID NO: 1321783 - RNA, 19 nt, Artificial Sequence
  Description of Artificial Sequence: Synthetic oligonucleotide
ucauccgugguuaaaggcu

SEQ ID NO: 1321784 - RNA, 19 nt, Artificial Sequence
  Description of Artificial Sequence: Synthetic oligonucleotide
ugaaugcagacaucaaggc

SEQ ID NO: 1321785 - RNA, 19 nt, Artificial Sequence
  Description of Artificial Sequence: Synthetic oligonucleotide
gauaguacccacacagagg

SEQ ID NO: 1321786 - RNA, 19 nt, Artificial Sequence
  Description of Artificial Sequence: Synthetic oligonucleotide
aaagcggaauuuguguagg

SEQ ID NO: 1321787 - RNA, 19 nt, Artificial Sequence
  Description of Artificial Sequence: Synthetic oligonucleotide
uuuucaggacugaaugcag

SEQ ID NO: 1321788 - RNA, 19 nt, Artificial Sequence
  Description of Artificial Sequence: Synthetic oligonucleotide
agauuuggauucuagcuga

SEQ ID NO: 1321789 - RNA, 19 nt, Artificial Sequence
  Description of Artificial Sequence: Synthetic oligonucleotide
ugcaagaagucucuccgcc

SEQ ID NO: 1321790 - RNA, 19 nt, Artificial Sequence
  Description of Artificial Sequence: Synthetic oligonucleotide
aaagaauugacggcagugu

SEQ ID NO: 1321791 - RNA, 19 nt, Artificial Sequence
  Description of Artificial Sequence: Synthetic oligonucleotide
cugucaacgagacacaauc

SEQ ID NO: 1321792 - RNA, 19 nt, Artificial Sequence
  Description of Artificial Sequence: Synthetic oligonucleotide
auuaaagccaggagaggcc

SEQ ID NO: 1321793 - RNA, 19 nt, Artificial Sequence
  Description of Artificial Sequence: Synthetic oligonucleotide
aaguuagugaaguucucaa

SEQ ID NO: 1321794 - RNA, 19 nt, Artificial Sequence
  Description of Artificial Sequence: Synthetic oligonucleotide
aauccgggccaaugggacc

SEQ ID NO: 1321795 - RNA, 19 nt, Artificial Sequence
  Description of Artificial Sequence: Synthetic oligonucleotide
uauggauggaaaugauaag

SEQ ID NO: 1321796 - RNA, 19 nt, Artificial Sequence
  Description of Artificial Sequence: Synthetic oligonucleotide
gaauuuguguaggaccugg

SEQ ID NO: 1321797 - RNA, 19 nt, Artificial Sequence
  Description of Artificial Sequence: Synthetic oligonucleotide
uuuaagugacucaggagau

SEQ ID NO: 1321798 - RNA, 19 nt, Artificial Sequence
  Description of Artificial Sequence: Synthetic oligonucleotide
gaauugacggcaguguugc

SEQ ID NO: 1321799 - RNA, 19 nt, Artificial Sequence
  Description of Artificial Sequence: Synthetic oligonucleotide
cuuauugggcagaauccgg

SEQ ID NO: 1321800 - RNA, 19 nt, Artificial Sequence
  Description of Artificial Sequence: Synthetic oligonucleotide
ucugcuacaggcuuggguu

SEQ ID NO: 1321801 - RNA, 19 nt, Artificial Sequence
  Description of Artificial Sequence: Synthetic oligonucleotide
acagucuugggcugccucc

SEQ ID NO: 1321802 - RNA, 19 nt, Artificial Sequence
  Description of Artificial Sequence: Synthetic oligonucleotide
auuucauccgugguuaaag

SEQ ID NO: 1321803 - RNA, 19 nt, Artificial Sequence
  Description of Artificial Sequence: Synthetic oligonucleotide
uggauggaaaugauaagau

SEQ ID NO: 1321804 - RNA, 19 nt, Artificial Sequence
  Description of Artificial Sequence: Synthetic oligonucleotide
agcuuuaagugacucagga

SEQ ID NO: 1321805 - RNA, 19 nt, Artificial Sequence
  Description of Artificial Sequence: Synthetic oligonucleotide
ucccguaaggcaaucacgu

SEQ ID NO: 1321806 - RNA, 19 nt, Artificial Sequence
  Description of Artificial Sequence: Synthetic oligonucleotide
aaggagaguguguuaguga

SEQ ID NO: 1321807 - RNA, 19 nt, Artificial Sequence
  Description of Artificial Sequence: Synthetic oligonucleotide
uucauccgugguuaaaggc

SEQ ID NO: 1321808 - RNA, 19 nt, Artificial Sequence
  Description of Artificial Sequence: Synthetic oligonucleotide
augauaagauuaaagccag

SEQ ID NO: 1321809 - RNA, 19 nt, Artificial Sequence
  Description of Artificial Sequence: Synthetic oligonucleotide
auggauggaaaugauaaga

SEQ ID NO: 1321810 - RNA, 19 nt, Artificial Sequence
  Description of Artificial Sequence: Synthetic oligonucleotide
ugauaagauuaaagccagg

SEQ ID NO: 1321811 - RNA, 19 nt, Artificial Sequence
  Description of Artificial Sequence: Synthetic oligonucleotide
ugggacuuagggcagauuu

SEQ ID NO: 1321812 - RNA, 19 nt, Artificial Sequence
  Description of Artificial Sequence: Synthetic oligonucleotide
ugucgaaugugucucugga

SEQ ID NO: 1321813 - RNA, 19 nt, Artificial Sequence
  Description of Artificial Sequence: Synthetic oligonucleotide
uaagugacucaggagaugu

SEQ ID NO: 1321814 - RNA, 19 nt, Artificial Sequence
  Description of Artificial Sequence: Synthetic oligonucleotide
auugacggcaguguugcac

SEQ ID NO: 1321815 - RNA, 19 nt, Artificial Sequence
  Description of Artificial Sequence: Synthetic oligonucleotide
uacgcaaggcaaagaauug

SEQ ID NO: 1321816 - RNA, 19 nt, Artificial Sequence
  Description of Artificial Sequence: Synthetic oligonucleotide
cuugccuucugucaacgag

SEQ ID NO: 1321817 - RNA, 19 nt, Artificial Sequence
  Description of Artificial Sequence: Synthetic oligonucleotide
gaaaaguuagugaaguucu

SEQ ID NO: 1321818 - RNA, 19 nt, Artificial Sequence
  Description of Artificial Sequence: Synthetic oligonucleotide
ucauucaacuuuucaggac

SEQ ID NO: 1321819 - RNA, 19 nt, Artificial Sequence
  Description of Artificial Sequence: Synthetic oligonucleotide
uuggccagcgaugaggaag

SEQ ID NO: 1321820 - RNA, 19 nt, Artificial Sequence
  Description of Artificial Sequence: Synthetic oligonucleotide
uugcacaaagggaucuucc

SEQ ID NO: 1321821 - RNA, 19 nt, Artificial Sequence
  Description of Artificial Sequence: Synthetic oligonucleotide
aagaauugacggcaguguu

SEQ ID NO: 1321822 - RNA, 19 nt, Artificial Sequence
  Description of Artificial Sequence: Synthetic oligonucleotide
ucucccugaguuccaauug

SEQ ID NO: 1321823 - RNA, 19 nt, Artificial Sequence
  Description of Artificial Sequence: Synthetic oligonucleotide
uguaggaccuggaguagug

SEQ ID NO: 1321824 - RNA, 19 nt, Artificial Sequence
  Description of Artificial Sequence: Synthetic oligonucleotide
ucuuccggaguguucuggg

SEQ ID NO: 1321825 - RNA, 19 nt, Artificial Sequence
  Description of Artificial Sequence: Synthetic oligonucleotide
uuccggaguguucugggag

SEQ ID NO: 1321826 - RNA, 19 nt, Artificial Sequence
  Description of Artificial Sequence: Synthetic oligonucleotide
aucacaagguguucuguug

SEQ ID NO: 1321827 - RNA, 19 nt, Artificial Sequence
  Description of Artificial Sequence: Synthetic oligonucleotide
gaugagaggcgucaucuca

SEQ ID NO: 1321828 - RNA, 19 nt, Artificial Sequence
  Description of Artificial Sequence: Synthetic oligonucleotide
guuaaaggcucaggcaugg

SEQ ID NO: 1321829 - RNA, 19 nt, Artificial Sequence
  Description of Artificial Sequence: Synthetic oligonucleotide
ucaaagcggaauuugugua

SEQ ID NO: 1321830 - RNA, 19 nt, Artificial Sequence
  Description of Artificial Sequence: Synthetic oligonucleotide
aaucacguuccuaaugagu

SEQ ID NO: 1321831 - RNA, 19 nt, Artificial Sequence
  Description of Artificial Sequence: Synthetic oligonucleotide
auagagcuuuaagugacuc

SEQ ID NO: 1321832 - RNA, 19 nt, Artificial Sequence
  Description of Artificial Sequence: Synthetic oligonucleotide
augggaccauuauggaugg

SEQ ID NO: 1321833 - RNA, 19 nt, Artificial Sequence
  Description of Artificial Sequence: Synthetic oligonucleotide
ccuucugucaacgagacac

SEQ ID NO: 1321834 - RNA, 19 nt, Artificial Sequence
  Description of Artificial Sequence: Synthetic oligonucleotide
gaugaucucuuggccagcg

SEQ ID NO: 1321835 - RNA, 19 nt, Artificial Sequence
  Description of Artificial Sequence: Synthetic oligonucleotide
uugacggcaguguugcaca

SEQ ID NO: 1321836 - RNA, 19 nt, Artificial Sequence
  Description of Artificial Sequence: Synthetic oligonucleotide
acuuagggcagauuuggau

SEQ ID NO: 1321837 - RNA, 19 nt, Artificial Sequence
  Description of Artificial Sequence: Synthetic oligonucleotide
uauugggcagaauccgggc

SEQ ID NO: 1321838 - RNA, 19 nt, Artificial Sequence
  Description of Artificial Sequence: Synthetic oligonucleotide
uauacauccgacggccaag

SEQ ID NO: 1321839 - RNA, 19 nt, Artificial Sequence
  Description of Artificial Sequence: Synthetic oligonucleotide
ugucaacgagacacaaucu

SEQ ID NO: 1321840 - RNA, 19 nt, Artificial Sequence
  Description of Artificial Sequence: Synthetic oligonucleotide
accugagucucagagcugg

SEQ ID NO: 1321841 - RNA, 19 nt, Artificial Sequence
  Description of Artificial Sequence: Synthetic oligonucleotide
uucuguuggaaaaguuagu

SEQ ID NO: 1321842 - RNA, 19 nt, Artificial Sequence
  Description of Artificial Sequence: Synthetic oligonucleotide
cuggaguagugucaguuug

SEQ ID NO: 1321843 - RNA, 19 nt, Artificial Sequence
  Description of Artificial Sequence: Synthetic oligonucleotide
agcggaauuuguguaggac

SEQ ID NO: 1321844 - RNA, 19 nt, Artificial Sequence
  Description of Artificial Sequence: Synthetic oligonucleotide
uggaguagugucaguuuga

SEQ ID NO: 1321845 - RNA, 19 nt, Artificial Sequence
  Description of Artificial Sequence: Synthetic oligonucleotide
cucccugaguuccaauugg

SEQ ID NO: 1321846 - RNA, 19 nt, Artificial Sequence
  Description of Artificial Sequence: Synthetic oligonucleotide
cagaauccgggccaauggg

SEQ ID NO: 1321847 - RNA, 19 nt, Artificial Sequence
  Description of Artificial Sequence: Synthetic oligonucleotide
cuuuucaggacugaaugca

SEQ ID NO: 1321848 - RNA, 19 nt, Artificial Sequence
  Description of Artificial Sequence: Synthetic oligonucleotide
agauuaaagccaggagagg

SEQ ID NO: 1321849 - RNA, 19 nt, Artificial Sequence
  Description of Artificial Sequence: Synthetic oligonucleotide
uagugaaguucucaaccaa

SEQ ID NO: 1321850 - RNA, 19 nt, Artificial Sequence
  Description of Artificial Sequence: Synthetic oligonucleotide
aaccaacaccugcuugauc

SEQ ID NO: 1321851 - RNA, 19 nt, Artificial Sequence
  Description of Artificial Sequence: Synthetic oligonucleotide
aacgagacacaaucuugau

SEQ ID NO: 1321852 - RNA, 19 nt, Artificial Sequence
  Description of Artificial Sequence: Synthetic oligonucleotide
uuugaauccuggguguccu

SEQ ID NO: 1321853 - RNA, 19 nt, Artificial Sequence
  Description of Artificial Sequence: Synthetic oligonucleotide
cucauucaacuuuucagga

SEQ ID NO: 1321854 - RNA, 19 nt, Artificial Sequence
  Description of Artificial Sequence: Synthetic oligonucleotide
uggaugucgaaugugucuc

SEQ ID NO: 1321855 - RNA, 19 nt, Artificial Sequence
  Description of Artificial Sequence: Synthetic oligonucleotide
gguguaacagcaguaacac

SEQ ID NO: 1321856 - RNA, 19 nt, Artificial Sequence
  Description of Artificial Sequence: Synthetic oligonucleotide
gacaucaaggcaccucuga

SEQ ID NO: 1321857 - RNA, 19 nt, Artificial Sequence
  Description of Artificial Sequence: Synthetic oligonucleotide
gcggaauuuguguaggacc

SEQ ID NO: 1321858 - RNA, 19 nt, Artificial Sequence
  Description of Artificial Sequence: Synthetic oligonucleotide
ucccugaguuccaauuggc

SEQ ID NO: 1321859 - RNA, 19 nt, Artificial Sequence
  Description of Artificial Sequence: Synthetic oligonucleotide
agaggcccguaucucuccc

SEQ ID NO: 1321860 - RNA, 19 nt, Artificial Sequence
  Description of Artificial Sequence: Synthetic oligonucleotide
ucaacuuuucaggacugaa

SEQ ID NO: 1321861 - RNA, 19 nt, Artificial Sequence
  Description of Artificial Sequence: Synthetic oligonucleotide
cuaccuccagcacugcacc

SEQ ID NO: 1321862 - RNA, 19 nt, Artificial Sequence
  Description of Artificial Sequence: Synthetic oligonucleotide
caacgagacacaaucuuga

SEQ ID NO: 1321863 - RNA, 19 nt, Artificial Sequence
  Description of Artificial Sequence: Synthetic oligonucleotide
ggacuuagggcagauuugg

SEQ ID NO: 1321864 - RNA, 19 nt, Artificial Sequence
  Description of Artificial Sequence: Synthetic oligonucleotide
gcaaucacguuccuaauga

SEQ ID NO: 1321865 - RNA, 19 nt, Artificial Sequence
  Description of Artificial Sequence: Synthetic oligonucleotide
agaauugacggcaguguug

SEQ ID NO: 1321866 - RNA, 19 nt, Artificial Sequence
  Description of Artificial Sequence: Synthetic oligonucleotide
caaucacguuccuaaugag

SEQ ID NO: 1321867 - RNA, 19 nt, Artificial Sequence
  Description of Artificial Sequence: Synthetic oligonucleotide
ugccuucugucaacgagac

SEQ ID NO: 1321868 - RNA, 19 nt, Artificial Sequence
  Description of Artificial Sequence: Synthetic oligonucleotide
caccauguccagauagggc

SEQ ID NO: 1321869 - RNA, 19 nt, Artificial Sequence
  Description of Artificial Sequence: Synthetic oligonucleotide
uaacagcaguaacaccucu

SEQ ID NO: 1321870 - RNA, 19 nt, Artificial Sequence
  Description of Artificial Sequence: Synthetic oligonucleotide
auauacauccgacggccaa

SEQ ID NO: 1321871 - RNA, 19 nt, Artificial Sequence
  Description of Artificial Sequence: Synthetic oligonucleotide
aagauaguacccacacaga

SEQ ID NO: 1321872 - RNA, 19 nt, Artificial Sequence
  Description of Artificial Sequence: Synthetic oligonucleotide
aucacguuccuaaugaguu

SEQ ID NO: 1321873 - RNA, 19 nt, Artificial Sequence
  Description of Artificial Sequence: Synthetic oligonucleotide
cuguuggaaaaguuaguga

SEQ ID NO: 1321874 - RNA, 19 nt, Artificial Sequence
  Description of Artificial Sequence: Synthetic oligonucleotide
ucugucaacgagacacaau

SEQ ID NO: 1321875 - RNA, 19 nt, Artificial Sequence
  Description of Artificial Sequence: Synthetic oligonucleotide
cauccgugguuaaaggcuc

SEQ ID NO: 1321876 - RNA, 19 nt, Artificial Sequence
  Description of Artificial Sequence: Synthetic oligonucleotide
aauuucauccgugguuaaa

SEQ ID NO: 1321877 - RNA, 19 nt, Artificial Sequence
  Description of Artificial Sequence: Synthetic oligonucleotide
guuccuaaugaguuuguua

SEQ ID NO: 1321878 - RNA, 19 nt, Artificial Sequence
  Description of Artificial Sequence: Synthetic oligonucleotide
uggacacucgcuagaggac

SEQ ID NO: 1321879 - RNA, 19 nt, Artificial Sequence
  Description of Artificial Sequence: Synthetic oligonucleotide
gaggacagggcuucuuuga

SEQ ID NO: 1321880 - RNA, 19 nt, Artificial Sequence
  Description of Artificial Sequence: Synthetic oligonucleotide
cacguuccuaaugaguuug

SEQ ID NO: 1321881 - RNA, 19 nt, Artificial Sequence
  Description of Artificial Sequence: Synthetic oligonucleotide
gagcuuguggagugccggg

SEQ ID NO: 1321882 - RNA, 19 nt, Artificial Sequence
  Description of Artificial Sequence: Synthetic oligonucleotide
cuuucagggucaaaggucu

SEQ ID NO: 1321883 - RNA, 19 nt, Artificial Sequence
  Description of Artificial Sequence: Synthetic oligonucleotide
aagcggaauuuguguagga

SEQ ID NO: 1321884 - RNA, 19 nt, Artificial Sequence
  Description of Artificial Sequence: Synthetic oligonucleotide
guaacaccucuggaugucg

SEQ ID NO: 1321885 - RNA, 19 nt, Artificial Sequence
  Description of Artificial Sequence: Synthetic oligonucleotide
uccuaaugaguuuguuaaa

SEQ ID NO: 1321886 - RNA, 19 nt, Artificial Sequence
  Description of Artificial Sequence: Synthetic oligonucleotide
aauauacauccgacggcca

SEQ ID NO: 1321887 - RNA, 19 nt, Artificial Sequence
  Description of Artificial Sequence: Synthetic oligonucleotide
agcuuguggagugccgggc

SEQ ID NO: 1321888 - RNA, 19 nt, Artificial Sequence
  Description of Artificial Sequence: Synthetic oligonucleotide
gaugucgaaugugucucug

SEQ ID NO: 1321889 - RNA, 19 nt, Artificial Sequence
  Description of Artificial Sequence: Synthetic oligonucleotide
gaauccgggccaaugggac

SEQ ID NO: 1321890 - RNA, 19 nt, Artificial Sequence
  Description of Artificial Sequence: Synthetic oligonucleotide
uggguacauccucaggguc

SEQ ID NO: 1321891 - RNA, 19 nt, Artificial Sequence
  Description of Artificial Sequence: Synthetic oligonucleotide
guuccaauuggcucuccca

SEQ ID NO: 1321892 - RNA, 19 nt, Artificial Sequence
  Description of Artificial Sequence: Synthetic oligonucleotide
gucccguaaggcaaucacg

SEQ ID NO: 1321893 - RNA, 19 nt, Artificial Sequence
  Description of Artificial Sequence: Synthetic oligonucleotide
gagcuuuaagugacucagg

SEQ ID NO: 1321894 - RNA, 19 nt, Artificial Sequence
  Description of Artificial Sequence: Synthetic oligonucleotide
aguucaucucgguucuuau

SEQ ID NO: 1321895 - RNA, 19 nt, Artificial Sequence
  Description of Artificial Sequence: Synthetic oligonucleotide
guagugucaguuugaccac

SEQ ID NO: 1321896 - RNA, 19 nt, Artificial Sequence
  Description of Artificial Sequence: Synthetic oligonucleotide
gauguucacaggcuuggcu

SEQ ID NO: 1321897 - RNA, 19 nt, Artificial Sequence
  Description of Artificial Sequence: Synthetic oligonucleotide
cugcaagaagucucuccgc

SEQ ID NO: 1321898 - RNA, 19 nt, Artificial Sequence
  Description of Artificial Sequence: Synthetic oligonucleotide
ggauacgcaaggcaaagaa

SEQ ID NO: 1321899 - RNA, 19 nt, Artificial Sequence
  Description of Artificial Sequence: Synthetic oligonucleotide
cagaccugaggccauucug

SEQ ID NO: 1321900 - RNA, 19 nt, Artificial Sequence
  Description of Artificial Sequence: Synthetic oligonucleotide
acauccgacggccaagaua

SEQ ID NO: 1321901 - RNA, 19 nt, Artificial Sequence
  Description of Artificial Sequence: Synthetic oligonucleotide
acucgcuagaggacagggc

SEQ ID NO: 1321902 - RNA, 19 nt, Artificial Sequence
  Description of Artificial Sequence: Synthetic oligonucleotide
gugguguaacagcaguaac

SEQ ID NO: 1321903 - RNA, 19 nt, Artificial Sequence
  Description of Artificial Sequence: Synthetic oligonucleotide
uucaacuuuucaggacuga

SEQ ID NO: 1321904 - RNA, 19 nt, Artificial Sequence
  Description of Artificial Sequence: Synthetic oligonucleotide
ggcaaucacguuccuaaug

SEQ ID NO: 1321905 - RNA, 19 nt, Artificial Sequence
  Description of Artificial Sequence: Synthetic oligonucleotide
cacucgcuagaggacaggg

SEQ ID NO: 1321906 - RNA, 19 nt, Artificial Sequence
  Description of Artificial Sequence: Synthetic oligonucleotide
aucuuccggaguguucugg

SEQ ID NO: 1321907 - RNA, 19 nt, Artificial Sequence
  Description of Artificial Sequence: Synthetic oligonucleotide
guuugaccaccaucagccc

SEQ ID NO: 1321908 - RNA, 19 nt, Artificial Sequence
  Description of Artificial Sequence: Synthetic oligonucleotide
gguacgugaugaaggagag

SEQ ID NO: 1321909 - RNA, 19 nt, Artificial Sequence
  Description of Artificial Sequence: Synthetic oligonucleotide
ucacuugccuucugucaac

SEQ ID NO: 1321910 - RNA, 19 nt, Artificial Sequence
  Description of Artificial Sequence: Synthetic oligonucleotide
gcauagagcuuuaagugac

SEQ ID NO: 1321911 - RNA, 19 nt, Artificial Sequence
  Description of Artificial Sequence: Synthetic oligonucleotide
gacacucgcuagaggacag

SEQ ID NO: 1321912 - RNA, 19 nt, Artificial Sequence
  Description of Artificial Sequence: Synthetic oligonucleotide
uccagauagggcaggccuu

SEQ ID NO: 1321913 - RNA, 19 nt, Artificial Sequence
  Description of Artificial Sequence: Synthetic oligonucleotide
aauugacggcaguguugca

SEQ ID NO: 1321914 - RNA, 19 nt, Artificial Sequence
  Description of Artificial Sequence: Synthetic oligonucleotide
ucuuuggggaggguucacu

SEQ ID NO: 1321915 - RNA, 19 nt, Artificial Sequence
  Description of Artificial Sequence: Synthetic oligonucleotide
uucugucaacgagacacaa

SEQ ID NO: 1321916 - RNA, 19 nt, Artificial Sequence
  Description of Artificial Sequence: Synthetic oligonucleotide
acggccaagauaguaccca

SEQ ID NO: 1321917 - RNA, 19 nt, Artificial Sequence
  Description of Artificial Sequence: Synthetic oligonucleotide
agauagggcaggccuuccu

SEQ ID NO: 1321918 - RNA, 19 nt, Artificial Sequence
  Description of Artificial Sequence: Synthetic oligonucleotide
ugcaccugcggggauguac

SEQ ID NO: 1321919 - RNA, 19 nt, Artificial Sequence
  Description of Artificial Sequence: Synthetic oligonucleotide
uuggcugaugagaggcguc

SEQ ID NO: 1321920 - RNA, 19 nt, Artificial Sequence
  Description of Artificial Sequence: Synthetic oligonucleotide
gauucuagcugaaguggaa

SEQ ID NO: 1321921 - RNA, 19 nt, Artificial Sequence
  Description of Artificial Sequence: Synthetic oligonucleotide
cucaggcauggaugcaggc

SEQ ID NO: 1321922 - RNA, 19 nt, Artificial Sequence
  Description of Artificial Sequence: Synthetic oligonucleotide
cucgcuagaggacagggcu

SEQ ID NO: 1321923 - RNA, 19 nt, Artificial Sequence
  Description of Artificial Sequence: Synthetic oligonucleotide
ucacguuccuaaugaguuu

SEQ ID NO: 1321924 - RNA, 19 nt, Artificial Sequence
  Description of Artificial Sequence: Synthetic oligonucleotide
agaauccgggccaauggga

SEQ ID NO: 1321925 - RNA, 19 nt, Artificial Sequence
  Description of Artificial Sequence: Synthetic oligonucleotide
uaguacccacacagaggcc

SEQ ID NO: 1321926 - RNA, 19 nt, Artificial Sequence
  Description of Artificial Sequence: Synthetic oligonucleotide
cacuugccuucugucaacg

SEQ ID NO: 1321927 - RNA, 19 nt, Artificial Sequence
  Description of Artificial Sequence: Synthetic oligonucleotide
guaacagcaguaacaccuc

SEQ ID NO: 1321928 - RNA, 19 nt, Artificial Sequence
  Description of Artificial Sequence: Synthetic oligonucleotide
uccgugguuaaaggcucag

SEQ ID NO: 1321929 - RNA, 19 nt, Artificial Sequence
  Description of Artificial Sequence: Synthetic oligonucleotide
guugcacaaagggaucuuc

SEQ ID NO: 1321930 - RNA, 19 nt, Artificial Sequence
  Description of Artificial Sequence: Synthetic oligonucleotide
uuuugggacuuagggcaga

SEQ ID NO: 1321931 - RNA, 19 nt, Artificial Sequence
  Description of Artificial Sequence: Synthetic oligonucleotide
ggcgucaucucauucaacu

SEQ ID NO: 1321932 - RNA, 19 nt, Artificial Sequence
  Description of Artificial Sequence: Synthetic oligonucleotide
gacggccaagauaguaccc

SEQ ID NO: 1321933 - RNA, 19 nt, Artificial Sequence
  Description of Artificial Sequence: Synthetic oligonucleotide
auacauccgacggccaaga

SEQ ID NO: 1321934 - RNA, 19 nt, Artificial Sequence
  Description of Artificial Sequence: Synthetic oligonucleotide
ggucccguaaggcaaucac

SEQ ID NO: 1321935 - RNA, 19 nt, Artificial Sequence
  Description of Artificial Sequence: Synthetic oligonucleotide
cccgugugaaucugaaagc

SEQ ID NO: 1321936 - RNA, 19 nt, Artificial Sequence
  Description of Artificial Sequence: Synthetic oligonucleotide
gucucugcaaucaccaugu

SEQ ID NO: 1321937 - RNA, 19 nt, Artificial Sequence
  Description of Artificial Sequence: Synthetic oligonucleotide
aggcccguaucucucccug

SEQ ID NO: 1321938 - RNA, 19 nt, Artificial Sequence
  Description of Artificial Sequence: Synthetic oligonucleotide
cagacaucaaggcaccucu

SEQ ID NO: 1321939 - RNA, 19 nt, Artificial Sequence
  Description of Artificial Sequence: Synthetic oligonucleotide
gugacucaggagauguuca

SEQ ID NO: 1321940 - RNA, 19 nt, Artificial Sequence
  Description of Artificial Sequence: Synthetic oligonucleotide
ugaccaugucaaagucuuc

SEQ ID NO: 1321941 - RNA, 19 nt, Artificial Sequence
  Description of Artificial Sequence: Synthetic oligonucleotide
cuucugucaacgagacaca

SEQ ID NO: 1321942 - RNA, 19 nt, Artificial Sequence
  Description of Artificial Sequence: Synthetic oligonucleotide
caggguguggccagugcuc

SEQ ID NO: 1321943 - RNA, 19 nt, Artificial Sequence
  Description of Artificial Sequence: Synthetic oligonucleotide
cagaggcccguaucucucc

SEQ ID NO: 1321944 - RNA, 19 nt, Artificial Sequence
  Description of Artificial Sequence: Synthetic oligonucleotide
gguuaaaggcucaggcaug

SEQ ID NO: 1321945 - RNA, 19 nt, Artificial Sequence
  Description of Artificial Sequence: Synthetic oligonucleotide
ccaaacaucuguagauguc

SEQ ID NO: 1321946 - RNA, 19 nt, Artificial Sequence
  Description of Artificial Sequence: Synthetic oligonucleotide
guacccacacagaggcccg

SEQ ID NO: 1321947 - RNA, 19 nt, Artificial Sequence
  Description of Artificial Sequence: Synthetic oligonucleotide
uuaaaggcucaggcaugga

SEQ ID NO: 1321948 - RNA, 19 nt, Artificial Sequence
  Description of Artificial Sequence: Synthetic oligonucleotide
cacccacagagcuugugga

SEQ ID NO: 1321949 - RNA, 19 nt, Artificial Sequence
  Description of Artificial Sequence: Synthetic oligonucleotide
uccgacggccaagauagua

SEQ ID NO: 1321950 - RNA, 19 nt, Artificial Sequence
  Description of Artificial Sequence: Synthetic oligonucleotide
caccucacagucuugggcu

SEQ ID NO: 1321951 - RNA, 19 nt, Artificial Sequence
  Description of Artificial Sequence: Synthetic oligonucleotide
caucaaggcaccucugacu

SEQ ID NO: 1321952 - RNA, 19 nt, Artificial Sequence
  Description of Artificial Sequence: Synthetic oligonucleotide
ggaguagugucaguuugac

SEQ ID NO: 1321953 - RNA, 19 nt, Artificial Sequence
  Description of Artificial Sequence: Synthetic oligonucleotide
ucgcuagaggacagggcuu

SEQ ID NO: 1321954 - RNA, 19 nt, Artificial Sequence
  Description of Artificial Sequence: Synthetic oligonucleotide
ccgacggccaagauaguac

SEQ ID NO: 1321955 - RNA, 19 nt, Artificial Sequence
  Description of Artificial Sequence: Synthetic oligonucleotide
ggggauacgcaaggcaaag

SEQ ID NO: 1321956 - RNA, 19 nt, Artificial Sequence
  Description of Artificial Sequence: Synthetic oligonucleotide
acaagguguucuguuguuu

SEQ ID NO: 1321957 - RNA, 19 nt, Artificial Sequence
  Description of Artificial Sequence: Synthetic oligonucleotide
aagccgggccucugcugug

SEQ ID NO: 1321958 - RNA, 19 nt, Artificial Sequence
  Description of Artificial Sequence: Synthetic oligonucleotide
cacacagaggcccguaucu

SEQ ID NO: 1321959 - RNA, 19 nt, Artificial Sequence
  Description of Artificial Sequence: Synthetic oligonucleotide
gggauguacugucccagca

SEQ ID NO: 1321960 - RNA, 19 nt, Artificial Sequence
  Description of Artificial Sequence: Synthetic oligonucleotide
ggauucuagcugaagugga

SEQ ID NO: 1321961 - RNA, 19 nt, Artificial Sequence
  Description of Artificial Sequence: Synthetic oligonucleotide
aaccugagucucagagcug

SEQ ID NO: 1321962 - RNA, 19 nt, Artificial Sequence
  Description of Artificial Sequence: Synthetic oligonucleotide
aggcaaucacguuccuaau

SEQ ID NO: 1321963 - RNA, 19 nt, Artificial Sequence
  Description of Artificial Sequence: Synthetic oligonucleotide
gcuaccuccagcacugcac

SEQ ID NO: 1321964 - RNA, 19 nt, Artificial Sequence
  Description of Artificial Sequence: Synthetic oligonucleotide
ccuaaugaguuuguuaaaa

SEQ ID NO: 1321965 - RNA, 19 nt, Artificial Sequence
  Description of Artificial Sequence: Synthetic oligonucleotide
cugcggggauguacugucc

SEQ ID NO: 1321966 - RNA, 19 nt, Artificial Sequence
  Description of Artificial Sequence: Synthetic oligonucleotide
cagguaugugaagggcccc

SEQ ID NO: 1321967 - RNA, 19 nt, Artificial Sequence
  Description of Artificial Sequence: Synthetic oligonucleotide
caaugggaccauuauggau

SEQ ID NO: 1321968 - RNA, 19 nt, Artificial Sequence
  Description of Artificial Sequence: Synthetic oligonucleotide
gggacuuagggcagauuug

SEQ ID NO: 1321969 - RNA, 19 nt, Artificial Sequence
  Description of Artificial Sequence: Synthetic oligonucleotide
gauuuggauucuagcugaa

SEQ ID NO: 1321970 - RNA, 19 nt, Artificial Sequence
  Description of Artificial Sequence: Synthetic oligonucleotide
gaaugugucucuggaugcu

SEQ ID NO: 1321971 - RNA, 19 nt, Artificial Sequence
  Description of Artificial Sequence: Synthetic oligonucleotide
ugucugcuacaggcuuggg

SEQ ID NO: 1321972 - RNA, 19 nt, Artificial Sequence
  Description of Artificial Sequence: Synthetic oligonucleotide
aggccuggggauacgcaag

SEQ ID NO: 1321973 - RNA, 19 nt, Artificial Sequence
  Description of Artificial Sequence: Synthetic oligonucleotide
ugaaccuuucagggucaaa

SEQ ID NO: 1321974 - RNA, 19 nt, Artificial Sequence
  Description of Artificial Sequence: Synthetic oligonucleotide
uacauccgacggccaagau

SEQ ID NO: 1321975 - RNA, 19 nt, Artificial Sequence
  Description of Artificial Sequence: Synthetic oligonucleotide
ugacggcaguguugcacaa

SEQ ID NO: 1321976 - RNA, 19 nt, Artificial Sequence
  Description of Artificial Sequence: Synthetic oligonucleotide
agaguguguuagugaugau

SEQ ID NO: 1321977 - RNA, 19 nt, Artificial Sequence
  Description of Artificial Sequence: Synthetic oligonucleotide
guacccaggggcugggugu

SEQ ID NO: 1321978 - RNA, 19 nt, Artificial Sequence
  Description of Artificial Sequence: Synthetic oligonucleotide
ccugcggggauguacuguc

SEQ ID NO: 1321979 - RNA, 19 nt, Artificial Sequence
  Description of Artificial Sequence: Synthetic oligonucleotide
cauagagcuuuaagugacu

SEQ ID NO: 1321980 - RNA, 19 nt, Artificial Sequence
  Description of Artificial Sequence: Synthetic oligonucleotide
aggcgucaucucauucaac

SEQ ID NO: 1321981 - RNA, 19 nt, Artificial Sequence
  Description of Artificial Sequence: Synthetic oligonucleotide
ggacacucgcuagaggaca

SEQ ID NO: 1321982 - RNA, 19 nt, Artificial Sequence
  Description of Artificial Sequence: Synthetic oligonucleotide
ggauggaaaugauaagauu

SEQ ID NO: 1321983 - RNA, 19 nt, Artificial Sequence
  Description of Artificial Sequence: Synthetic oligonucleotide
cauucaguucaucucgguu

SEQ ID NO: 1321984 - RNA, 19 nt, Artificial Sequence
  Description of Artificial Sequence: Synthetic oligonucleotide
caauuucauccgugguuaa

SEQ ID NO: 1321985 - RNA, 19 nt, Artificial Sequence
  Description of Artificial Sequence: Synthetic oligonucleotide
aggguucacuggacacucg

SEQ ID NO: 1321986 - RNA, 19 nt, Artificial Sequence
  Description of Artificial Sequence: Synthetic oligonucleotide
ggaccauuauggauggaaa

SEQ ID NO: 1321987 - RNA, 19 nt, Artificial Sequence
  Description of Artificial Sequence: Synthetic oligonucleotide
gguacauccucagggucuc

SEQ ID NO: 1321988 - RNA, 19 nt, Artificial Sequence
  Description of Artificial Sequence: Synthetic oligonucleotide
cagauagggcaggccuucc

SEQ ID NO: 1321989 - RNA, 19 nt, Artificial Sequence
  Description of Artificial Sequence: Synthetic oligonucleotide
ccacauuugugguguaaca

SEQ ID NO: 1321990 - RNA, 19 nt, Artificial Sequence
  Description of Artificial Sequence: Synthetic oligonucleotide
gucgaaugugucucuggau

SEQ ID NO: 1321991 - RNA, 19 nt, Artificial Sequence
  Description of Artificial Sequence: Synthetic oligonucleotide
ggucaugguguagggcacc

SEQ ID NO: 1321992 - RNA, 19 nt, Artificial Sequence
  Description of Artificial Sequence: Synthetic oligonucleotide
cugcuugaucauggcuggc

SEQ ID NO: 1321993 - RNA, 19 nt, Artificial Sequence
  Description of Artificial Sequence: Synthetic oligonucleotide
acguuccuaaugaguuugu

SEQ ID NO: 1321994 - RNA, 19 nt, Artificial Sequence
  Description of Artificial Sequence: Synthetic oligonucleotide
guguuagugaugaucucuu

SEQ ID NO: 1321995 - RNA, 19 nt, Artificial Sequence
  Description of Artificial Sequence: Synthetic oligonucleotide
cuuggcugaugagaggcgu

SEQ ID NO: 1321996 - RNA, 19 nt, Artificial Sequence
  Description of Artificial Sequence: Synthetic oligonucleotide
caccugcggggauguacug

SEQ ID NO: 1321997 - RNA, 19 nt, Artificial Sequence
  Description of Artificial Sequence: Synthetic oligonucleotide
ugccucccgugugaaucug

SEQ ID NO: 1321998 - RNA, 19 nt, Artificial Sequence
  Description of Artificial Sequence: Synthetic oligonucleotide
cugcaguacccaggggcug

SEQ ID NO: 1321999 - RNA, 19 nt, Artificial Sequence
  Description of Artificial Sequence: Synthetic oligonucleotide
cucucccugaguuccaauu

SEQ ID NO: 1322000 - RNA, 19 nt, Artificial Sequence
  Description of Artificial Sequence: Synthetic oligonucleotide
auccgugguuaaaggcuca

SEQ ID NO: 1322001 - RNA, 19 nt, Artificial Sequence
  Description of Artificial Sequence: Synthetic oligonucleotide
cguaucucucccugaguuc

SEQ ID NO: 1322002 - RNA, 19 nt, Artificial Sequence
  Description of Artificial Sequence: Synthetic oligonucleotide
gcaaagaauugacggcagu

SEQ ID NO: 1322003 - RNA, 19 nt, Artificial Sequence
  Description of Artificial Sequence: Synthetic oligonucleotide
uacccacacagaggcccgu

SEQ ID NO: 1322004 - RNA, 19 nt, Artificial Sequence
  Description of Artificial Sequence: Synthetic oligonucleotide
ccugagucucagagcuggc

SEQ ID NO: 1322005 - RNA, 19 nt, Artificial Sequence
  Description of Artificial Sequence: Synthetic oligonucleotide
ggguacauccucagggucu

SEQ ID NO: 1322006 - RNA, 19 nt, Artificial Sequence
  Description of Artificial Sequence: Synthetic oligonucleotide
cucccgugugaaucugaaa

SEQ ID NO: 1322007 - RNA, 19 nt, Artificial Sequence
  Description of Artificial Sequence: Synthetic oligonucleotide
ccagauagggcaggccuuc

SEQ ID NO: 1322008 - RNA, 19 nt, Artificial Sequence
  Description of Artificial Sequence: Synthetic oligonucleotide
caauuggcucucccaaaau

SEQ ID NO: 1322009 - RNA, 19 nt, Artificial Sequence
  Description of Artificial Sequence: Synthetic oligonucleotide
ugggaccauuauggaugga

SEQ ID NO: 1322010 - RNA, 19 nt, Artificial Sequence
  Description of Artificial Sequence: Synthetic oligonucleotide
guaaggcaaucacguuccu

SEQ ID NO: 1322011 - RNA, 19 nt, Artificial Sequence
  Description of Artificial Sequence: Synthetic oligonucleotide
guaggaccuggaguagugu

SEQ ID NO: 1322012 - RNA, 19 nt, Artificial Sequence
  Description of Artificial Sequence: Synthetic oligonucleotide
ggaugucgaaugugucucu

SEQ ID NO: 1322013 - RNA, 19 nt, Artificial Sequence
  Description of Artificial Sequence: Synthetic oligonucleotide
cacaagguguucuguuguu

SEQ ID NO: 1322014 - RNA, 19 nt, Artificial Sequence
  Description of Artificial Sequence: Synthetic oligonucleotide
cggccaagauaguacccac

SEQ ID NO: 1322015 - RNA, 19 nt, Artificial Sequence
  Description of Artificial Sequence: Synthetic oligonucleotide
ucccaccuuuugucucgua

SEQ ID NO: 1322016 - RNA, 19 nt, Artificial Sequence
  Description of Artificial Sequence: Synthetic oligonucleotide
augcugcauagagcuuuaa

SEQ ID NO: 1322017 - RNA, 19 nt, Artificial Sequence
  Description of Artificial Sequence: Synthetic oligonucleotide
cacccacggcuaccuccag

SEQ ID NO: 1322018 - RNA, 19 nt, Artificial Sequence
  Description of Artificial Sequence: Synthetic oligonucleotide
gugaaccuuucagggucaa

SEQ ID NO: 1322019 - RNA, 19 nt, Artificial Sequence
  Description of Artificial Sequence: Synthetic oligonucleotide
guacgugaugaaggagagu

SEQ ID NO: 1322020 - RNA, 19 nt, Artificial Sequence
  Description of Artificial Sequence: Synthetic oligonucleotide
ccgugugaaucugaaagcu

SEQ ID NO: 1322021 - RNA, 19 nt, Artificial Sequence
  Description of Artificial Sequence: Synthetic oligonucleotide
gcugcuugcuggucccgua

SEQ ID NO: 1322022 - RNA, 19 nt, Artificial Sequence
  Description of Artificial Sequence: Synthetic oligonucleotide
ccggaguguucugggaguc

SEQ ID NO: 1322023 - RNA, 19 nt, Artificial Sequence
  Description of Artificial Sequence: Synthetic oligonucleotide
gcaccugcggggauguacu

SEQ ID NO: 1322024 - RNA, 19 nt, Artificial Sequence
  Description of Artificial Sequence: Synthetic oligonucleotide
cagugcucugggucauggu

SEQ ID NO: 1322025 - RNA, 19 nt, Artificial Sequence
  Description of Artificial Sequence: Synthetic oligonucleotide
guuccagaccugaggccau

SEQ ID NO: 1322026 - RNA, 19 nt, Artificial Sequence
  Description of Artificial Sequence: Synthetic oligonucleotide
ccauucaguucaucucggu

SEQ ID NO: 1322027 - RNA, 19 nt, Artificial Sequence
  Description of Artificial Sequence: Synthetic oligonucleotide
auccgacggccaagauagu

SEQ ID NO: 1322028 - RNA, 19 nt, Artificial Sequence
  Description of Artificial Sequence: Synthetic oligonucleotide
gguucuuauugggcagaau

SEQ ID NO: 1322029 - RNA, 19 nt, Artificial Sequence
  Description of Artificial Sequence: Synthetic oligonucleotide
gccucccgugugaaucuga

SEQ ID NO: 1322030 - RNA, 19 nt, Artificial Sequence
  Description of Artificial Sequence: Synthetic oligonucleotide
gggcacccacggcuaccuc

SEQ ID NO: 1322031 - RNA, 19 nt, Artificial Sequence
  Description of Artificial Sequence: Synthetic oligonucleotide
cccguaucucucccugagu

SEQ ID NO: 1322032 - RNA, 19 nt, Artificial Sequence
  Description of Artificial Sequence: Synthetic oligonucleotide
cccguaaggcaaucacguu

SEQ ID NO: 1322033 - RNA, 19 nt, Artificial Sequence
  Description of Artificial Sequence: Synthetic oligonucleotide
cgguucuuauugggcagaa

SEQ ID NO: 1322034 - RNA, 19 nt, Artificial Sequence
  Description of Artificial Sequence: Synthetic oligonucleotide
cccacacagaggcccguau

SEQ ID NO: 1322035 - RNA, 19 nt, Artificial Sequence
  Description of Artificial Sequence: Synthetic oligonucleotide
cagcuccgaagggcaggua

SEQ ID NO: 1322036 - RNA, 19 nt, Artificial Sequence
  Description of Artificial Sequence: Synthetic oligonucleotide
cguuccuaaugaguuuguu

SEQ ID NO: 1322037 - RNA, 19 nt, Artificial Sequence
  Description of Artificial Sequence: Synthetic oligonucleotide
gccgcaccccgaggcagcu

SEQ ID NO: 1322038 - RNA, 19 nt, Artificial Sequence
  Description of Artificial Sequence: Synthetic oligonucleotide
ccgcaccccgaggcagcuc

SEQ ID NO: 1322039 - RNA, 19 nt, Artificial Sequence
  Description of Artificial Sequence: Synthetic oligonucleotide
gggcagaauccgggccaau

SEQ ID NO: 1322040 - RNA, 19 nt, Artificial Sequence
  Description of Artificial Sequence: Synthetic oligonucleotide
auagguauaacucaguggg

SEQ ID NO: 1322041 - RNA, 19 nt, Artificial Sequence
  Description of Artificial Sequence: Synthetic oligonucleotide
uugaugauuauaauggcgg

SEQ ID NO: 1322042 - RNA, 19 nt, Artificial Sequence
  Description of Artificial Sequence: Synthetic oligonucleotide
uuugaugauuauaauggcg

SEQ ID NO: 1322043 - RNA, 19 nt, Artificial Sequence
  Description of Artificial Sequence: Synthetic oligonucleotide
acagcuauaaucuuguccu

SEQ ID NO: 1322044 - RNA, 19 nt, Artificial Sequence
  Description of Artificial Sequence: Synthetic oligonucleotide
gauagguauaacucagugg

SEQ ID NO: 1322045 - RNA, 19 nt, Artificial Sequence
  Description of Artificial Sequence: Synthetic oligonucleotide
guauuugaugauuauaaug

SEQ ID NO: 1322046 - RNA, 19 nt, Artificial Sequence
  Description of Artificial Sequence: Synthetic oligonucleotide
uugaacacagccauccagg

SEQ ID NO: 1322047 - RNA, 19 nt, Artificial Sequence
  Description of Artificial Sequence: Synthetic oligonucleotide
ugagauagguauaacucag

SEQ ID NO: 1322048 - RNA, 19 nt, Artificial Sequence
  Description of Artificial Sequence: Synthetic oligonucleotide
ugcuauugaagacagguac

SEQ ID NO: 1322049 - RNA, 19 nt, Artificial Sequence
  Description of Artificial Sequence: Synthetic oligonucleotide
agagcuaugaccauggcag

SEQ ID NO: 1322050 - RNA, 19 nt, Artificial Sequence
  Description of Artificial Sequence: Synthetic oligonucleotide
agauguaugaagcugggca

SEQ ID NO: 1322051 - RNA, 19 nt, Artificial Sequence
  Description of Artificial Sequence: Synthetic oligonucleotide
uauaauggcggugacauac

SEQ ID NO: 1322052 - RNA, 19 nt, Artificial Sequence
  Description of Artificial Sequence: Synthetic oligonucleotide
uugaaugaggcauagcccu

SEQ ID NO: 1322053 - RNA, 19 nt, Artificial Sequence
  Description of Artificial Sequence: Synthetic oligonucleotide
acuaaugaugaaaaccagc

SEQ ID NO: 1322054 - RNA, 19 nt, Artificial Sequence
  Description of Artificial Sequence: Synthetic oligonucleotide
gaugaaaaccagcaugccc

SEQ ID NO: 1322055 - RNA, 19 nt, Artificial Sequence
  Description of Artificial Sequence: Synthetic oligonucleotide
aauguguccugaugucacc

SEQ ID NO: 1322056 - RNA, 19 nt, Artificial Sequence
  Description of Artificial Sequence: Synthetic oligonucleotide
acaaaacccacccaugaag

SEQ ID NO: 1322057 - RNA, 19 nt, Artificial Sequence
  Description of Artificial Sequence: Synthetic oligonucleotide
gaugucaccagcuggaaca

SEQ ID NO: 1322058 - RNA, 19 nt, Artificial Sequence
  Description of Artificial Sequence: Synthetic oligonucleotide
aaauguguccugaugucac

SEQ ID NO: 1322059 - RNA, 19 nt, Artificial Sequence
  Description of Artificial Sequence: Synthetic oligonucleotide
auaccaggugcccacaacg

SEQ ID NO: 1322060 - RNA, 19 nt, Artificial Sequence
  Description of Artificial Sequence: Synthetic oligonucleotide
agguacacugcucacgugg

SEQ ID NO: 1322061 - RNA, 19 nt, Artificial Sequence
  Description of Artificial Sequence: Synthetic oligonucleotide
auggcggugacauaccagg

SEQ ID NO: 1322062 - RNA, 19 nt, Artificial Sequence
  Description of Artificial Sequence: Synthetic oligonucleotide
gaugugacaggguuuggag

SEQ ID NO: 1322063 - RNA, 19 nt, Artificial Sequence
  Description of Artificial Sequence: Synthetic oligonucleotide
ucaacaaagauggcauugg

SEQ ID NO: 1322064 - RNA, 19 nt, Artificial Sequence
  Description of Artificial Sequence: Synthetic oligonucleotide
uguacuugggacuugcaaa

SEQ ID NO: 1322065 - RNA, 19 nt, Artificial Sequence
  Description of Artificial Sequence: Synthetic oligonucleotide
agauagguauaacucagug

SEQ ID NO: 1322066 - RNA, 19 nt, Artificial Sequence
  Description of Artificial Sequence: Synthetic oligonucleotide
ugggacuugcaaaagugag

SEQ ID NO: 1322067 - RNA, 19 nt, Artificial Sequence
  Description of Artificial Sequence: Synthetic oligonucleotide
gaugaaggcucccagggug

SEQ ID NO: 1322068 - RNA, 19 nt, Artificial Sequence
  Description of Artificial Sequence: Synthetic oligonucleotide
ucacguggcacugaaaucc

SEQ ID NO: 1322069 - RNA, 19 nt, Artificial Sequence
  Description of Artificial Sequence: Synthetic oligonucleotide
gacaguuuggcuugaauga

SEQ ID NO: 1322070 - RNA, 19 nt, Artificial Sequence
  Description of Artificial Sequence: Synthetic oligonucleotide
aaugacaaguccacuaaug

SEQ ID NO: 1322071 - RNA, 19 nt, Artificial Sequence
  Description of Artificial Sequence: Synthetic oligonucleotide
agcuccgaaagucaggaag

SEQ ID NO: 1322072 - RNA, 19 nt, Artificial Sequence
  Description of Artificial Sequence: Synthetic oligonucleotide
accgagaugaccuugccga

SEQ ID NO: 1322073 - RNA, 19 nt, Artificial Sequence
  Description of Artificial Sequence: Synthetic oligonucleotide
ucgggcaacggccacagcc

SEQ ID NO: 1322074 - RNA, 19 nt, Artificial Sequence
  Description of Artificial Sequence: Synthetic oligonucleotide
augacaaguccacuaauga

SEQ ID NO: 1322075 - RNA, 19 nt, Artificial Sequence
  Description of Artificial Sequence: Synthetic oligonucleotide
acuugggguagcuucacag

SEQ ID NO: 1322076 - RNA, 19 nt, Artificial Sequence
  Description of Artificial Sequence: Synthetic oligonucleotide
agaggauaaggggugaggg

SEQ ID NO: 1322077 - RNA, 19 nt, Artificial Sequence
  Description of Artificial Sequence: Synthetic oligonucleotide
agcuauaaucuuguccugc

SEQ ID NO: 1322078 - RNA, 19 nt, Artificial Sequence
  Description of Artificial Sequence: Synthetic oligonucleotide
uguaucgcagccacaggcc

SEQ ID NO: 1322079 - RNA, 19 nt, Artificial Sequence
  Description of Artificial Sequence: Synthetic oligonucleotide
uccucugacggguaggacc

SEQ ID NO: 1322080 - RNA, 19 nt, Artificial Sequence
  Description of Artificial Sequence: Synthetic oligonucleotide
aggccagaaugacaagucc

SEQ ID NO: 1322081 - RNA, 19 nt, Artificial Sequence
  Description of Artificial Sequence: Synthetic oligonucleotide
agaaggacuccauaacuga

SEQ ID NO: 1322082 - RNA, 19 nt, Artificial Sequence
  Description of Artificial Sequence: Synthetic oligonucleotide
gaagguguagacugcgaug

SEQ ID NO: 1322083 - RNA, 19 nt, Artificial Sequence
  Description of Artificial Sequence: Synthetic oligonucleotide
gaugauuauaauggcggug

SEQ ID NO: 1322084 - RNA, 19 nt, Artificial Sequence
  Description of Artificial Sequence: Synthetic oligonucleotide
guacaaaguguccagccug

SEQ ID NO: 1322085 - RNA, 19 nt, Artificial Sequence
  Description of Artificial Sequence: Synthetic oligonucleotide
gauaaggggugagggaugg

SEQ ID NO: 1322086 - RNA, 19 nt, Artificial Sequence
  Description of Artificial Sequence: Synthetic oligonucleotide
aaugaggcauagcccuggg

SEQ ID NO: 1322087 - RNA, 19 nt, Artificial Sequence
  Description of Artificial Sequence: Synthetic oligonucleotide
auacccaccuccucgguag

SEQ ID NO: 1322088 - RNA, 19 nt, Artificial Sequence
  Description of Artificial Sequence: Synthetic oligonucleotide
caucacagcuauaaucuug

SEQ ID NO: 1322089 - RNA, 19 nt, Artificial Sequence
  Description of Artificial Sequence: Synthetic oligonucleotide
agaaugacaaguccacuaa

SEQ ID NO: 1322090 - RNA, 19 nt, Artificial Sequence
  Description of Artificial Sequence: Synthetic oligonucleotide
caguacaaaguguccagcc

SEQ ID NO: 1322091 - RNA, 19 nt, Artificial Sequence
  Description of Artificial Sequence: Synthetic oligonucleotide
ugacagauguaugaagcug

SEQ ID NO: 1322092 - RNA, 19 nt, Artificial Sequence
  Description of Artificial Sequence: Synthetic oligonucleotide
aaguccacuaaugaugaaa

SEQ ID NO: 1322093 - RNA, 19 nt, Artificial Sequence
  Description of Artificial Sequence: Synthetic oligonucleotide
aggaccggagcacaucugg

SEQ ID NO: 1322094 - RNA, 19 nt, Artificial Sequence
  Description of Artificial Sequence: Synthetic oligonucleotide
uugggacuugcaaaaguga

SEQ ID NO: 1322095 - RNA, 19 nt, Artificial Sequence
  Description of Artificial Sequence: Synthetic oligonucleotide
auaacugaccagugcccac

SEQ ID NO: 1322096 - RNA, 19 nt, Artificial Sequence
  Description of Artificial Sequence: Synthetic oligonucleotide
uaaugaugaaaaccagcau

SEQ ID NO: 1322097 - RNA, 19 nt, Artificial Sequence
  Description of Artificial Sequence: Synthetic oligonucleotide
uacaaaguguccagccuga

SEQ ID NO: 1322098 - RNA, 19 nt, Artificial Sequence
  Description of Artificial Sequence: Synthetic oligonucleotide
auuggcugugguuuggcca

SEQ ID NO: 1322099 - RNA, 19 nt, Artificial Sequence
  Description of Artificial Sequence: Synthetic oligonucleotide
uaagguaggcacaguacaa

SEQ ID NO: 1322100 - RNA, 19 nt, Artificial Sequence
  Description of Artificial Sequence: Synthetic oligonucleotide
aaaagugagcagggguagg

SEQ ID NO: 1322101 - RNA, 19 nt, Artificial Sequence
  Description of Artificial Sequence: Synthetic oligonucleotide
gauguaugaagcugggcaa

SEQ ID NO: 1322102 - RNA, 19 nt, Artificial Sequence
  Description of Artificial Sequence: Synthetic oligonucleotide
ggauaaagagugcaagcag

SEQ ID NO: 1322103 - RNA, 19 nt, Artificial Sequence
  Description of Artificial Sequence: Synthetic oligonucleotide
gugccgaagguguagacug

SEQ ID NO: 1322104 - RNA, 19 nt, Artificial Sequence
  Description of Artificial Sequence: Synthetic oligonucleotide
cuauugaagacagguacac

SEQ ID NO: 1322105 - RNA, 19 nt, Artificial Sequence
  Description of Artificial Sequence: Synthetic oligonucleotide
aguguucaugccaagaggu

SEQ ID NO: 1322106 - RNA, 19 nt, Artificial Sequence
  Description of Artificial Sequence: Synthetic oligonucleotide
acagguacacugcucacgu

SEQ ID NO: 1322107 - RNA, 19 nt, Artificial Sequence
  Description of Artificial Sequence: Synthetic oligonucleotide
cuaagguaggcacaguaca

SEQ ID NO: 1322108 - RNA, 19 nt, Artificial Sequence
  Description of Artificial Sequence: Synthetic oligonucleotide
uagacagccagagcuauga

SEQ ID NO: 1322109 - RNA, 19 nt, Artificial Sequence
  Description of Artificial Sequence: Synthetic oligonucleotide
auaacucagugggauuccc

SEQ ID NO: 1322110 - RNA, 19 nt, Artificial Sequence
  Description of Artificial Sequence: Synthetic oligonucleotide
cacuaaugaugaaaaccag

SEQ ID NO: 1322111 - RNA, 19 nt, Artificial Sequence
  Description of Artificial Sequence: Synthetic oligonucleotide
ucagggauaaagagugcaa

SEQ ID NO: 1322112 - RNA, 19 nt, Artificial Sequence
  Description of Artificial Sequence: Synthetic oligonucleotide
gaggucaacaaagauggca

SEQ ID NO: 1322113 - RNA, 19 nt, Artificial Sequence
  Description of Artificial Sequence: Synthetic oligonucleotide
ugcggucuguguaccaggg

SEQ ID NO: 1322114 - RNA, 19 nt, Artificial Sequence
  Description of Artificial Sequence: Synthetic oligonucleotide
aacuugcggucuguguacc

SEQ ID NO: 1322115 - RNA, 19 nt, Artificial Sequence
  Description of Artificial Sequence: Synthetic oligonucleotide
acgcucaggaugaugaagg

SEQ ID NO: 1322116 - RNA, 19 nt, Artificial Sequence
  Description of Artificial Sequence: Synthetic oligonucleotide
aaagugagcagggguaggu

SEQ ID NO: 1322117 - RNA, 19 nt, Artificial Sequence
  Description of Artificial Sequence: Synthetic oligonucleotide
agcaggaaccauacuagcg

SEQ ID NO: 1322118 - RNA, 19 nt, Artificial Sequence
  Description of Artificial Sequence: Synthetic oligonucleotide
gaccgagaugaccuugccg

SEQ ID NO: 1322119 - RNA, 19 nt, Artificial Sequence
  Description of Artificial Sequence: Synthetic oligonucleotide
ggcuaccucacacagcacg

SEQ ID NO: 1322120 - RNA, 19 nt, Artificial Sequence
  Description of Artificial Sequence: Synthetic oligonucleotide
gaggcauagcccugggaag

SEQ ID NO: 1322121 - RNA, 19 nt, Artificial Sequence
  Description of Artificial Sequence: Synthetic oligonucleotide
gaaggcucgggcaacggcc

SEQ ID NO: 1322122 - RNA, 19 nt, Artificial Sequence
  Description of Artificial Sequence: Synthetic oligonucleotide
uuuaucuggccagauguau

SEQ ID NO: 1322123 - RNA, 19 nt, Artificial Sequence
  Description of Artificial Sequence: Synthetic oligonucleotide
acuugggacuugcaaaagu

SEQ ID NO: 1322124 - RNA, 19 nt, Artificial Sequence
  Description of Artificial Sequence: Synthetic oligonucleotide
caggaaacuggcauauuuc

SEQ ID NO: 1322125 - RNA, 19 nt, Artificial Sequence
  Description of Artificial Sequence: Synthetic oligonucleotide
agggugaccagaaggacuc

SEQ ID NO: 1322126 - RNA, 19 nt, Artificial Sequence
  Description of Artificial Sequence: Synthetic oligonucleotide
acugcgauggcuaccucac

SEQ ID NO: 1322127 - RNA, 19 nt, Artificial Sequence
  Description of Artificial Sequence: Synthetic oligonucleotide
uaauggcggugacauacca

SEQ ID NO: 1322128 - RNA, 19 nt, Artificial Sequence
  Description of Artificial Sequence: Synthetic oligonucleotide
guauaacucagugggauuc

SEQ ID NO: 1322129 - RNA, 19 nt, Artificial Sequence
  Description of Artificial Sequence: Synthetic oligonucleotide
auaaagagugcaagcagca

SEQ ID NO: 1322130 - RNA, 19 nt, Artificial Sequence
  Description of Artificial Sequence: Synthetic oligonucleotide
gaggcuaagguaggcacag

SEQ ID NO: 1322131 - RNA, 19 nt, Artificial Sequence
  Description of Artificial Sequence: Synthetic oligonucleotide
uauaacucagugggauucc

SEQ ID NO: 1322132 - RNA, 19 nt, Artificial Sequence
  Description of Artificial Sequence: Synthetic oligonucleotide
cacagaagugcaagauggg

SEQ ID NO: 1322133 - RNA, 19 nt, Artificial Sequence
  Description of Artificial Sequence: Synthetic oligonucleotide
ugacauaccaggugcccac

SEQ ID NO: 1322134 - RNA, 19 nt, Artificial Sequence
  Description of Artificial Sequence: Synthetic oligonucleotide
caacgcucaggaaacuggc

SEQ ID NO: 1322135 - RNA, 19 nt, Artificial Sequence
  Description of Artificial Sequence: Synthetic oligonucleotide
auaacaaaacccacccaug

SEQ ID NO: 1322136 - RNA, 19 nt, Artificial Sequence
  Description of Artificial Sequence: Synthetic oligonucleotide
uaggugagaggcuaaggua

SEQ ID NO: 1322137 - RNA, 19 nt, Artificial Sequence
  Description of Artificial Sequence: Synthetic oligonucleotide
uguaugaagcugggcaagc

SEQ ID NO: 1322138 - RNA, 19 nt, Artificial Sequence
  Description of Artificial Sequence: Synthetic oligonucleotide
uaccaggugcccacaacgc

SEQ ID NO: 1322139 - RNA, 19 nt, Artificial Sequence
  Description of Artificial Sequence: Synthetic oligonucleotide
accacuccaccccaggucu

SEQ ID NO: 1322140 - RNA, 19 nt, Artificial Sequence
  Description of Artificial Sequence: Synthetic oligonucleotide
uagguauaacucaguggga

SEQ ID NO: 1322141 - RNA, 19 nt, Artificial Sequence
  Description of Artificial Sequence: Synthetic oligonucleotide
gagcaggaaccauacuagc

SEQ ID NO: 1322142 - RNA, 19 nt, Artificial Sequence
  Description of Artificial Sequence: Synthetic oligonucleotide
aauggcggugacauaccag

SEQ ID NO: 1322143 - RNA, 19 nt, Artificial Sequence
  Description of Artificial Sequence: Synthetic oligonucleotide
augaccgagaugaccuugc

SEQ ID NO: 1322144 - RNA, 19 nt, Artificial Sequence
  Description of Artificial Sequence: Synthetic oligonucleotide
aaacccacccaugaaggaa

SEQ ID NO: 1322145 - RNA, 19 nt, Artificial Sequence
  Description of Artificial Sequence: Synthetic oligonucleotide
caucccuuccccuugacaa

SEQ ID NO: 1322146 - RNA, 19 nt, Artificial Sequence
  Description of Artificial Sequence: Synthetic oligonucleotide
ugacggguaggaccggagc

SEQ ID NO: 1322147 - RNA, 19 nt, Artificial Sequence
  Description of Artificial Sequence: Synthetic oligonucleotide
uaacugaccagugcccacc

SEQ ID NO: 1322148 - RNA, 19 nt, Artificial Sequence
  Description of Artificial Sequence: Synthetic oligonucleotide
gaagccgaucucccugggg

SEQ ID NO: 1322149 - RNA, 19 nt, Artificial Sequence
  Description of Artificial Sequence: Synthetic oligonucleotide
aggauaaggggugagggau

SEQ ID NO: 1322150 - RNA, 19 nt, Artificial Sequence
  Description of Artificial Sequence: Synthetic oligonucleotide
uagacugcgauggcuaccu

SEQ ID NO: 1322151 - RNA, 19 nt, Artificial Sequence
  Description of Artificial Sequence: Synthetic oligonucleotide
uguagacugcgauggcuac

SEQ ID NO: 1322152 - RNA, 19 nt, Artificial Sequence
  Description of Artificial Sequence: Synthetic oligonucleotide
ucaccugagauagguauaa

SEQ ID NO: 1322153 - RNA, 19 nt, Artificial Sequence
  Description of Artificial Sequence: Synthetic oligonucleotide
aguccacuaaugaugaaaa

SEQ ID NO: 1322154 - RNA, 19 nt, Artificial Sequence
  Description of Artificial Sequence: Synthetic oligonucleotide
agcacgcucaggaugauga

SEQ ID NO: 1322155 - RNA, 19 nt, Artificial Sequence
  Description of Artificial Sequence: Synthetic oligonucleotide
cuuguaucgcagccacagg

SEQ ID NO: 1322156 - RNA, 19 nt, Artificial Sequence
  Description of Artificial Sequence: Synthetic oligonucleotide
aggucaacaaagauggcau

SEQ ID NO: 1322157 - RNA, 19 nt, Artificial Sequence
  Description of Artificial Sequence: Synthetic oligonucleotide
ugguuugaccucuuccauc

SEQ ID NO: 1322158 - RNA, 19 nt, Artificial Sequence
  Description of Artificial Sequence: Synthetic oligonucleotide
ggacuugcaaaagugagca

SEQ ID NO: 1322159 - RNA, 19 nt, Artificial Sequence
  Description of Artificial Sequence: Synthetic oligonucleotide
gacuccauaacugaccagu

SEQ ID NO: 1322160 - RNA, 19 nt, Artificial Sequence
  Description of Artificial Sequence: Synthetic oligonucleotide
uacacugcucacguggcac

SEQ ID NO: 1322161 - RNA, 19 nt, Artificial Sequence
  Description of Artificial Sequence: Synthetic oligonucleotide
guaggugagaggcuaaggu

SEQ ID NO: 1322162 - RNA, 19 nt, Artificial Sequence
  Description of Artificial Sequence: Synthetic oligonucleotide
gacugcgauggcuaccuca

SEQ ID NO: 1322163 - RNA, 19 nt, Artificial Sequence
  Description of Artificial Sequence: Synthetic oligonucleotide
gaagugcaagaugggguag

SEQ ID NO: 1322164 - RNA, 19 nt, Artificial Sequence
  Description of Artificial Sequence: Synthetic oligonucleotide
gacggguaggaccggagca

SEQ ID NO: 1322165 - RNA, 19 nt, Artificial Sequence
  Description of Artificial Sequence: Synthetic oligonucleotide
gaaccauacuagcgucugc

SEQ ID NO: 1322166 - RNA, 19 nt, Artificial Sequence
  Description of Artificial Sequence: Synthetic oligonucleotide
acgcucaggaaacuggcau

SEQ ID NO: 1322167 - RNA, 19 nt, Artificial Sequence
  Description of Artificial Sequence: Synthetic oligonucleotide
uccacagauuugaggcuga

SEQ ID NO: 1322168 - RNA, 19 nt, Artificial Sequence
  Description of Artificial Sequence: Synthetic oligonucleotide
auacuagcgucugcaggac

SEQ ID NO: 1322169 - RNA, 19 nt, Artificial Sequence
  Description of Artificial Sequence: Synthetic oligonucleotide
cagaaugacaaguccacua

SEQ ID NO: 1322170 - RNA, 19 nt, Artificial Sequence
  Description of Artificial Sequence: Synthetic oligonucleotide
uguagacagccagagcuau

SEQ ID NO: 1322171 - RNA, 19 nt, Artificial Sequence
  Description of Artificial Sequence: Synthetic oligonucleotide
aguaggccagaaugacaag

SEQ ID NO: 1322172 - RNA, 19 nt, Artificial Sequence
  Description of Artificial Sequence: Synthetic oligonucleotide
caggaaccauacuagcguc

SEQ ID NO: 1322173 - RNA, 19 nt, Artificial Sequence
  Description of Artificial Sequence: Synthetic oligonucleotide
ugaccgagaugaccuugcc

SEQ ID NO: 1322174 - RNA, 19 nt, Artificial Sequence
  Description of Artificial Sequence: Synthetic oligonucleotide
gcggugacauaccaggugc

SEQ ID NO: 1322175 - RNA, 19 nt, Artificial Sequence
  Description of Artificial Sequence: Synthetic oligonucleotide
ccucugacggguaggaccg

SEQ ID NO: 1322176 - RNA, 19 nt, Artificial Sequence
  Description of Artificial Sequence: Synthetic oligonucleotide
cagauguauuugaugauua

SEQ ID NO: 1322177 - RNA, 19 nt, Artificial Sequence
  Description of Artificial Sequence: Synthetic oligonucleotide
gucagggauaaagagugca

SEQ ID NO: 1322178 - RNA, 19 nt, Artificial Sequence
  Description of Artificial Sequence: Synthetic oligonucleotide
acggguaggaccggagcac

SEQ ID NO: 1322179 - RNA, 19 nt, Artificial Sequence
  Description of Artificial Sequence: Synthetic oligonucleotide
gggauaaagagugcaagca

SEQ ID NO: 1322180 - RNA, 19 nt, Artificial Sequence
  Description of Artificial Sequence: Synthetic oligonucleotide
cuugcggucuguguaccag

SEQ ID NO: 1322181 - RNA, 19 nt, Artificial Sequence
  Description of Artificial Sequence: Synthetic oligonucleotide
ccuccgaugaccgagauga

SEQ ID NO: 1322182 - RNA, 19 nt, Artificial Sequence
  Description of Artificial Sequence: Synthetic oligonucleotide
gcugaugugacaggguuug

SEQ ID NO: 1322183 - RNA, 19 nt, Artificial Sequence
  Description of Artificial Sequence: Synthetic oligonucleotide
ccauacuagcgucugcagg

SEQ ID NO: 1322184 - RNA, 19 nt, Artificial Sequence
  Description of Artificial Sequence: Synthetic oligonucleotide
cucacguggcacugaaauc

SEQ ID NO: 1322185 - RNA, 19 nt, Artificial Sequence
  Description of Artificial Sequence: Synthetic oligonucleotide
uccgaaagucaggaagcca

SEQ ID NO: 1322186 - RNA, 19 nt, Artificial Sequence
  Description of Artificial Sequence: Synthetic oligonucleotide
gcccauacccaccuccucg

SEQ ID NO: 1322187 - RNA, 19 nt, Artificial Sequence
  Description of Artificial Sequence: Synthetic oligonucleotide
agagaggauaaggggugag

SEQ ID NO: 1322188 - RNA, 19 nt, Artificial Sequence
  Description of Artificial Sequence: Synthetic oligonucleotide
uggcuugaaugaggcauag

SEQ ID NO: 1322189 - RNA, 19 nt, Artificial Sequence
  Description of Artificial Sequence: Synthetic oligonucleotide
ugcuggccccuucagguuc

SEQ ID NO: 1322190 - RNA, 19 nt, Artificial Sequence
  Description of Artificial Sequence: Synthetic oligonucleotide
agaggucaacaaagauggc

SEQ ID NO: 1322191 - RNA, 19 nt, Artificial Sequence
  Description of Artificial Sequence: Synthetic oligonucleotide
ggucuuuauuucuggccgc

SEQ ID NO: 1322192 - RNA, 19 nt, Artificial Sequence
  Description of Artificial Sequence: Synthetic oligonucleotide
cauaacugaccagugccca

SEQ ID NO: 1322193 - RNA, 19 nt, Artificial Sequence
  Description of Artificial Sequence: Synthetic oligonucleotide
agccacguccucugacggg

SEQ ID NO: 1322194 - RNA, 19 nt, Artificial Sequence
  Description of Artificial Sequence: Synthetic oligonucleotide
cuccgaaagucaggaagcc

SEQ ID NO: 1322195 - RNA, 19 nt, Artificial Sequence
  Description of Artificial Sequence: Synthetic oligonucleotide
ggugacauguuuucuggaa

SEQ ID NO: 1322196 - RNA, 19 nt, Artificial Sequence
  Description of Artificial Sequence: Synthetic oligonucleotide
cagcacgccugucagcuug

SEQ ID NO: 1322197 - RNA, 19 nt, Artificial Sequence
  Description of Artificial Sequence: Synthetic oligonucleotide
uuauuucuggccgccgcau

SEQ ID NO: 1322198 - RNA, 19 nt, Artificial Sequence
  Description of Artificial Sequence: Synthetic oligonucleotide
aacgcucaggaaacuggca

SEQ ID NO: 1322199 - RNA, 19 nt, Artificial Sequence
  Description of Artificial Sequence: Synthetic oligonucleotide
uaggaccggagcacaucug

SEQ ID NO: 1322200 - RNA, 19 nt, Artificial Sequence
  Description of Artificial Sequence: Synthetic oligonucleotide
gugagcacgcucaggauga

SEQ ID NO: 1322201 - RNA, 19 nt, Artificial Sequence
  Description of Artificial Sequence: Synthetic oligonucleotide
cacaggccuuccaccacgg

SEQ ID NO: 1322202 - RNA, 19 nt, Artificial Sequence
  Description of Artificial Sequence: Synthetic oligonucleotide
uacccaccuccucgguagg

SEQ ID NO: 1322203 - RNA, 19 nt, Artificial Sequence
  Description of Artificial Sequence: Synthetic oligonucleotide
cagauguaugaagcugggc

SEQ ID NO: 1322204 - RNA, 19 nt, Artificial Sequence
  Description of Artificial Sequence: Synthetic oligonucleotide
gaagcuggucuggucagga

SEQ ID NO: 1322205 - RNA, 19 nt, Artificial Sequence
  Description of Artificial Sequence: Synthetic oligonucleotide
gggguaggaggugagcacg

SEQ ID NO: 1322206 - RNA, 19 nt, Artificial Sequence
  Description of Artificial Sequence: Synthetic oligonucleotide
gccugacagauguaugaag

SEQ ID NO: 1322207 - RNA, 19 nt, Artificial Sequence
  Description of Artificial Sequence: Synthetic oligonucleotide
gagccaucccuuccccuug

SEQ ID NO: 1322208 - RNA, 19 nt, Artificial Sequence
  Description of Artificial Sequence: Synthetic oligonucleotide
ugaugaaggcucgggcaac

SEQ ID NO: 1322209 - RNA, 19 nt, Artificial Sequence
  Description of Artificial Sequence: Synthetic oligonucleotide
guaggaggugagcacgcuc

SEQ ID NO: 1322210 - RNA, 19 nt, Artificial Sequence
  Description of Artificial Sequence: Synthetic oligonucleotide
acuccauaacugaccagug

SEQ ID NO: 1322211 - RNA, 19 nt, Artificial Sequence
  Description of Artificial Sequence: Synthetic oligonucleotide
gggacuugcaaaagugagc

SEQ ID NO: 1322212 - RNA, 19 nt, Artificial Sequence
  Description of Artificial Sequence: Synthetic oligonucleotide
caggccuccgaugaccgag

SEQ ID NO: 1322213 - RNA, 19 nt, Artificial Sequence
  Description of Artificial Sequence: Synthetic oligonucleotide
cugacggguaggaccggag

SEQ ID NO: 1322214 - RNA, 19 nt, Artificial Sequence
  Description of Artificial Sequence: Synthetic oligonucleotide
cuaccucacacagcacgcc

SEQ ID NO: 1322215 - RNA, 19 nt, Artificial Sequence
  Description of Artificial Sequence: Synthetic oligonucleotide
ggcaagcugaugugacagg

SEQ ID NO: 1322216 - RNA, 19 nt, Artificial Sequence
  Description of Artificial Sequence: Synthetic oligonucleotide
acggcccgcccacagaagu

SEQ ID NO: 1322217 - RNA, 19 nt, Artificial Sequence
  Description of Artificial Sequence: Synthetic oligonucleotide
uggcggugacauaccaggu

SEQ ID NO: 1322218 - RNA, 19 nt, Artificial Sequence
  Description of Artificial Sequence: Synthetic oligonucleotide
guaggaccggagcacaucu

SEQ ID NO: 1322219 - RNA, 19 nt, Artificial Sequence
  Description of Artificial Sequence: Synthetic oligonucleotide
guagacugcgauggcuacc

SEQ ID NO: 1322220 - RNA, 19 nt, Artificial Sequence
  Description of Artificial Sequence: Synthetic oligonucleotide
ggcugauucugucccauga

SEQ ID NO: 1322221 - RNA, 19 nt, Artificial Sequence
  Description of Artificial Sequence: Synthetic oligonucleotide
ucugacggguaggaccgga

SEQ ID NO: 1322222 - RNA, 19 nt, Artificial Sequence
  Description of Artificial Sequence: Synthetic oligonucleotide
augaaggcucgggcaacgg

SEQ ID NO: 1322223 - RNA, 19 nt, Artificial Sequence
  Description of Artificial Sequence: Synthetic oligonucleotide
agaggcuaagguaggcaca

SEQ ID NO: 1322224 - RNA, 19 nt, Artificial Sequence
  Description of Artificial Sequence: Synthetic oligonucleotide
cuagcgucugcaggacccg

SEQ ID NO: 1322225 - RNA, 19 nt, Artificial Sequence
  Description of Artificial Sequence: Synthetic oligonucleotide
caccacuccaccccagguc

SEQ ID NO: 1322226 - RNA, 19 nt, Artificial Sequence
  Description of Artificial Sequence: Synthetic oligonucleotide
cuuuaucuggccagaugua

SEQ ID NO: 1322227 - RNA, 19 nt, Artificial Sequence
  Description of Artificial Sequence: Synthetic oligonucleotide
gcuauugaagacagguaca

SEQ ID NO: 1322228 - RNA, 19 nt, Artificial Sequence
  Description of Artificial Sequence: Synthetic oligonucleotide
ucucuuuaucuggccagau

SEQ ID NO: 1322229 - RNA, 19 nt, Artificial Sequence
  Description of Artificial Sequence: Synthetic oligonucleotide
guaggccagaaugacaagu

SEQ ID NO: 1322230 - RNA, 19 nt, Artificial Sequence
  Description of Artificial Sequence: Synthetic oligonucleotide
uaucgcagccacaggccuu

SEQ ID NO: 1322231 - RNA, 19 nt, Artificial Sequence
  Description of Artificial Sequence: Synthetic oligonucleotide
gugagaggcuaagguaggc

SEQ ID NO: 1322232 - RNA, 19 nt, Artificial Sequence
  Description of Artificial Sequence: Synthetic oligonucleotide
caggaugaugaaggcucgg

SEQ ID NO: 1322233 - RNA, 19 nt, Artificial Sequence
  Description of Artificial Sequence: Synthetic oligonucleotide
agccugaccucaccugaga

SEQ ID NO: 1322234 - RNA, 19 nt, Artificial Sequence
  Description of Artificial Sequence: Synthetic oligonucleotide
uuucuggccgccgcaugcu

SEQ ID NO: 1322235 - RNA, 19 nt, Artificial Sequence
  Description of Artificial Sequence: Synthetic oligonucleotide
ugugggacuugggguagcu

SEQ ID NO: 1322236 - RNA, 19 nt, Artificial Sequence
  Description of Artificial Sequence: Synthetic oligonucleotide
gugacauaccaggugccca

SEQ ID NO: 1322237 - RNA, 19 nt, Artificial Sequence
  Description of Artificial Sequence: Synthetic oligonucleotide
gccagaaugacaaguccac

SEQ ID NO: 1322238 - RNA, 19 nt, Artificial Sequence
  Description of Artificial Sequence: Synthetic oligonucleotide
aggaaccauacuagcgucu

SEQ ID NO: 1322239 - RNA, 19 nt, Artificial Sequence
  Description of Artificial Sequence: Synthetic oligonucleotide
gguacacugcucacguggc

SEQ ID NO: 1322240 - RNA, 19 nt, Artificial Sequence
  Description of Artificial Sequence: Synthetic oligonucleotide
cccauguagacagccagag

SEQ ID NO: 1322241 - RNA, 19 nt, Artificial Sequence
  Description of Artificial Sequence: Synthetic oligonucleotide
acguccucugacggguagg

SEQ ID NO: 1322242 - RNA, 19 nt, Artificial Sequence
  Description of Artificial Sequence: Synthetic oligonucleotide
gcccacaacgcucaggaaa

SEQ ID NO: 1322243 - RNA, 19 nt, Artificial Sequence
  Description of Artificial Sequence: Synthetic oligonucleotide
gcuaccucacacagcacgc

SEQ ID NO: 1322244 - RNA, 19 nt, Artificial Sequence
  Description of Artificial Sequence: Synthetic oligonucleotide
aggcugauucugucccaug

SEQ ID NO: 1322245 - RNA, 19 nt, Artificial Sequence
  Description of Artificial Sequence: Synthetic oligonucleotide
agcacgccugucagcuugc

SEQ ID NO: 1322246 - RNA, 19 nt, Artificial Sequence
  Description of Artificial Sequence: Synthetic oligonucleotide
uucaugccaagaggucaac

SEQ ID NO: 1322247 - RNA, 19 nt, Artificial Sequence
  Description of Artificial Sequence: Synthetic oligonucleotide
gcgaugcaggugccgaagg

SEQ ID NO: 1322248 - RNA, 19 nt, Artificial Sequence
  Description of Artificial Sequence: Synthetic oligonucleotide
cugugguuuggccaaagau

SEQ ID NO: 1322249 - RNA, 19 nt, Artificial Sequence
  Description of Artificial Sequence: Synthetic oligonucleotide
ggcuaagguaggcacagua

SEQ ID NO: 1322250 - RNA, 19 nt, Artificial Sequence
  Description of Artificial Sequence: Synthetic oligonucleotide
ggccagaaugacaagucca

SEQ ID NO: 1322251 - RNA, 19 nt, Artificial Sequence
  Description of Artificial Sequence: Synthetic oligonucleotide
ugcaggugccgaaggugua

SEQ ID NO: 1322252 - RNA, 19 nt, Artificial Sequence
  Description of Artificial Sequence: Synthetic oligonucleotide
gagauagguauaacucagu

SEQ ID NO: 1322253 - RNA, 19 nt, Artificial Sequence
  Description of Artificial Sequence: Synthetic oligonucleotide
cuugccgaugucagggaua

SEQ ID NO: 1322254 - RNA, 19 nt, Artificial Sequence
  Description of Artificial Sequence: Synthetic oligonucleotide
guaucgcagccacaggccu

SEQ ID NO: 1322255 - RNA, 19 nt, Artificial Sequence
  Description of Artificial Sequence: Synthetic oligonucleotide
cugaugugacaggguuugg

SEQ ID NO: 1322256 - RNA, 19 nt, Artificial Sequence
  Description of Artificial Sequence: Synthetic oligonucleotide
gccgcaugcuauugaagac

SEQ ID NO: 1322257 - RNA, 19 nt, Artificial Sequence
  Description of Artificial Sequence: Synthetic oligonucleotide
uguguaccaggggcugcug

SEQ ID NO: 1322258 - RNA, 19 nt, Artificial Sequence
  Description of Artificial Sequence: Synthetic oligonucleotide
accucacacagcacgccug

SEQ ID NO: 1322259 - RNA, 19 nt, Artificial Sequence
  Description of Artificial Sequence: Synthetic oligonucleotide
agacugcgauggcuaccuc

SEQ ID NO: 1322260 - RNA, 19 nt, Artificial Sequence
  Description of Artificial Sequence: Synthetic oligonucleotide
guacacugcucacguggca

SEQ ID NO: 1322261 - RNA, 19 nt, Artificial Sequence
  Description of Artificial Sequence: Synthetic oligonucleotide
uggcauccccuuguaucgc

SEQ ID NO: 1322262 - RNA, 19 nt, Artificial Sequence
  Description of Artificial Sequence: Synthetic oligonucleotide
gccgaagguguagacugcg

SEQ ID NO: 1322263 - RNA, 19 nt, Artificial Sequence
  Description of Artificial Sequence: Synthetic oligonucleotide
gcgucugcaggacccggcg

SEQ ID NO: 1322264 - RNA, 19 nt, Artificial Sequence
  Description of Artificial Sequence: Synthetic oligonucleotide
cuguucccauguagacagc

SEQ ID NO: 1322265 - RNA, 19 nt, Artificial Sequence
  Description of Artificial Sequence: Synthetic oligonucleotide
cacguggcacugaaaucca

SEQ ID NO: 1322266 - RNA, 19 nt, Artificial Sequence
  Description of Artificial Sequence: Synthetic oligonucleotide
ggauaaggggugagggaug

SEQ ID NO: 1322267 - RNA, 19 nt, Artificial Sequence
  Description of Artificial Sequence: Synthetic oligonucleotide
gaacaggaugugggacuug

SEQ ID NO: 1322268 - RNA, 19 nt, Artificial Sequence
  Description of Artificial Sequence: Synthetic oligonucleotide
gcucacguggcacugaaau

SEQ ID NO: 1322269 - RNA, 19 nt, Artificial Sequence
  Description of Artificial Sequence: Synthetic oligonucleotide
ugcucacguggcacugaaa

SEQ ID NO: 1322270 - RNA, 19 nt, Artificial Sequence
  Description of Artificial Sequence: Synthetic oligonucleotide
gggcauggcauugaacaca

SEQ ID NO: 1322271 - RNA, 19 nt, Artificial Sequence
  Description of Artificial Sequence: Synthetic oligonucleotide
accuccucgguagguccuc

SEQ ID NO: 1322272 - RNA, 19 nt, Artificial Sequence
  Description of Artificial Sequence: Synthetic oligonucleotide
agccaucccuuccccuuga

SEQ ID NO: 1322273 - RNA, 19 nt, Artificial Sequence
  Description of Artificial Sequence: Synthetic oligonucleotide
cacagcacgccugucagcu

SEQ ID NO: 1322274 - RNA, 19 nt, Artificial Sequence
  Description of Artificial Sequence: Synthetic oligonucleotide
agagugcaagcagcagggu

SEQ ID NO: 1322275 - RNA, 19 nt, Artificial Sequence
  Description of Artificial Sequence: Synthetic oligonucleotide
ccccuugacaaauaacaaa

SEQ ID NO: 1322276 - RNA, 19 nt, Artificial Sequence
  Description of Artificial Sequence: Synthetic oligonucleotide
ccgaugaccgagaugaccu

SEQ ID NO: 1322277 - RNA, 19 nt, Artificial Sequence
  Description of Artificial Sequence: Synthetic oligonucleotide
ggcgaugcaggugccgaag

SEQ ID NO: 1322278 - RNA, 19 nt, Artificial Sequence
  Description of Artificial Sequence: Synthetic oligonucleotide
uggcuaccucacacagcac

SEQ ID NO: 1322279 - RNA, 19 nt, Artificial Sequence
  Description of Artificial Sequence: Synthetic oligonucleotide
caccugagauagguauaac

SEQ ID NO: 1322280 - RNA, 19 nt, Artificial Sequence
  Description of Artificial Sequence: Synthetic oligonucleotide
accacggcccgcccacaga

SEQ ID NO: 1322281 - RNA, 19 nt, Artificial Sequence
  Description of Artificial Sequence: Synthetic oligonucleotide
ggcaguguucaugccaaga

SEQ ID NO: 1322282 - RNA, 19 nt, Artificial Sequence
  Description of Artificial Sequence: Synthetic oligonucleotide
cuccgaugaccgagaugac

SEQ ID NO: 1322283 - RNA, 19 nt, Artificial Sequence
  Description of Artificial Sequence: Synthetic oligonucleotide
guaugaagcugggcaagcu

SEQ ID NO: 1322284 - RNA, 19 nt, Artificial Sequence
  Description of Artificial Sequence: Synthetic oligonucleotide
caccacggcccgcccacag

SEQ ID NO: 1322285 - RNA, 19 nt, Artificial Sequence
  Description of Artificial Sequence: Synthetic oligonucleotide
cacggcccgcccacagaag

SEQ ID NO: 1322286 - RNA, 19 nt, Artificial Sequence
  Description of Artificial Sequence: Synthetic oligonucleotide
gguaggaccggagcacauc

SEQ ID NO: 1322287 - RNA, 19 nt, Artificial Sequence
  Description of Artificial Sequence: Synthetic oligonucleotide
gggagcuguccacagauuu

SEQ ID NO: 1322288 - RNA, 19 nt, Artificial Sequence
  Description of Artificial Sequence: Synthetic oligonucleotide
gcgcaucucuuuaucuggc

SEQ ID NO: 1322289 - RNA, 19 nt, Artificial Sequence
  Description of Artificial Sequence: Synthetic oligonucleotide
cugguuugaccucuuccau

SEQ ID NO: 1322290 - RNA, 19 nt, Artificial Sequence
  Description of Artificial Sequence: Synthetic oligonucleotide
auagcccugggaagaugaa

SEQ ID NO: 1322291 - RNA, 19 nt, Artificial Sequence
  Description of Artificial Sequence: Synthetic oligonucleotide
ccucaccugagauagguau

SEQ ID NO: 1322292 - RNA, 19 nt, Artificial Sequence
  Description of Artificial Sequence: Synthetic oligonucleotide
ggugggcauggcauugaac

SEQ ID NO: 1322293 - RNA, 19 nt, Artificial Sequence
  Description of Artificial Sequence: Synthetic oligonucleotide
ggcuugaaugaggcauagc

SEQ ID NO: 1322294 - RNA, 19 nt, Artificial Sequence
  Description of Artificial Sequence: Synthetic oligonucleotide
ggcauugaacacagccauc

SEQ ID NO: 1322295 - RNA, 19 nt, Artificial Sequence
  Description of Artificial Sequence: Synthetic oligonucleotide
cucugacggguaggaccgg

SEQ ID NO: 1322296 - RNA, 19 nt, Artificial Sequence
  Description of Artificial Sequence: Synthetic oligonucleotide
ccgcccacagaagugcaag

SEQ ID NO: 1322297 - RNA, 19 nt, Artificial Sequence
  Description of Artificial Sequence: Synthetic oligonucleotide
gaggcugauucugucccau

SEQ ID NO: 1322298 - RNA, 19 nt, Artificial Sequence
  Description of Artificial Sequence: Synthetic oligonucleotide
acagcacgccugucagcuu

SEQ ID NO: 1322299 - RNA, 19 nt, Artificial Sequence
  Description of Artificial Sequence: Synthetic oligonucleotide
ccgcaugcuauugaagaca

SEQ ID NO: 1322300 - RNA, 19 nt, Artificial Sequence
  Description of Artificial Sequence: Synthetic oligonucleotide
ugagcacgcucaggaugau

SEQ ID NO: 1322301 - RNA, 19 nt, Artificial Sequence
  Description of Artificial Sequence: Synthetic oligonucleotide
gauguccccugggcgcauc

SEQ ID NO: 1322302 - RNA, 19 nt, Artificial Sequence
  Description of Artificial Sequence: Synthetic oligonucleotide
ggugccgaagguguagacu

SEQ ID NO: 1322303 - RNA, 19 nt, Artificial Sequence
  Description of Artificial Sequence: Synthetic oligonucleotide
ggcugugguuuggccaaag

SEQ ID NO: 1322304 - RNA, 19 nt, Artificial Sequence
  Description of Artificial Sequence: Synthetic oligonucleotide
ggccugacagauguaugaa

SEQ ID NO: 1322305 - RNA, 19 nt, Artificial Sequence
  Description of Artificial Sequence: Synthetic oligonucleotide
guccucugacggguaggac

SEQ ID NO: 1322306 - RNA, 19 nt, Artificial Sequence
  Description of Artificial Sequence: Synthetic oligonucleotide
gccgccgcaugcuauugaa

SEQ ID NO: 1322307 - RNA, 19 nt, Artificial Sequence
  Description of Artificial Sequence: Synthetic oligonucleotide
ccgccgcaugcuauugaag

SEQ ID NO: 1322308 - RNA, 19 nt, Artificial Sequence
  Description of Artificial Sequence: Synthetic oligonucleotide
aggccuccgaugaccgaga

SEQ ID NO: 1322309 - RNA, 19 nt, Artificial Sequence
  Description of Artificial Sequence: Synthetic oligonucleotide
gcauagcccugggaagaug

SEQ ID NO: 1322310 - RNA, 19 nt, Artificial Sequence
  Description of Artificial Sequence: Synthetic oligonucleotide
cucgguagguccucucauu

SEQ ID NO: 1322311 - RNA, 19 nt, Artificial Sequence
  Description of Artificial Sequence: Synthetic oligonucleotide
accucaccugagauaggua

SEQ ID NO: 1322312 - RNA, 19 nt, Artificial Sequence
  Description of Artificial Sequence: Synthetic oligonucleotide
cucgggcaacggccacagc

SEQ ID NO: 1322313 - RNA, 19 nt, Artificial Sequence
  Description of Artificial Sequence: Synthetic oligonucleotide
acguggcacugaaauccaa

SEQ ID NO: 1322314 - RNA, 19 nt, Artificial Sequence
  Description of Artificial Sequence: Synthetic oligonucleotide
ccaucccuuccccuugaca

SEQ ID NO: 1322315 - RNA, 19 nt, Artificial Sequence
  Description of Artificial Sequence: Synthetic oligonucleotide
cagcuccgaaagucaggaa

SEQ ID NO: 1322316 - RNA, 19 nt, Artificial Sequence
  Description of Artificial Sequence: Synthetic oligonucleotide
ccgaagguguagacugcga

SEQ ID NO: 1322317 - RNA, 19 nt, Artificial Sequence
  Description of Artificial Sequence: Synthetic oligonucleotide
cgggcaacggccacagcca

SEQ ID NO: 1322318 - RNA, 19 nt, Artificial Sequence
  Description of Artificial Sequence: Synthetic oligonucleotide
caccuccucgguagguccu

SEQ ID NO: 1322319 - RNA, 19 nt, Artificial Sequence
  Description of Artificial Sequence: Synthetic oligonucleotide
ggccgccgcaugcuauuga

SEQ ID NO: 1322320 - RNA, 19 nt, Artificial Sequence
  Description of Artificial Sequence: Synthetic oligonucleotide
gccaucccuuccccuugac

SEQ ID NO: 1322321 - RNA, 19 nt, Artificial Sequence
  Description of Artificial Sequence: Synthetic oligonucleotide
caacggccacagccacguc

SEQ ID NO: 1322322 - RNA, 19 nt, Artificial Sequence
  Description of Artificial Sequence: Synthetic oligonucleotide
gccugaccucaccugagau

SEQ ID NO: 1322323 - RNA, 19 nt, Artificial Sequence
  Description of Artificial Sequence: Synthetic oligonucleotide
gccgcucccgucccacauc

SEQ ID NO: 1322324 - RNA, 19 nt, Artificial Sequence
  Description of Artificial Sequence: Synthetic oligonucleotide
cacuggcauccccuuguau

SEQ ID NO: 1322325 - RNA, 19 nt, Artificial Sequence
  Description of Artificial Sequence: Synthetic oligonucleotide
ggguuuggagccaucccuu

SEQ ID NO: 1322326 - RNA, 19 nt, Artificial Sequence
  Description of Artificial Sequence: Synthetic oligonucleotide
ccaccccaggucuuuauuu

SEQ ID NO: 1322327 - RNA, 19 nt, Artificial Sequence
  Description of Artificial Sequence: Synthetic oligonucleotide
cuggccgccgcaugcuauu

SEQ ID NO: 1322328 - RNA, 19 nt, Artificial Sequence
  Description of Artificial Sequence: Synthetic oligonucleotide
uggccccuucagguuccuu

SEQ ID NO: 1322329 - RNA, 19 nt, Artificial Sequence
  Description of Artificial Sequence: Synthetic oligonucleotide
cguccucugacggguagga

SEQ ID NO: 1322330 - RNA, 19 nt, Artificial Sequence
  Description of Artificial Sequence: Synthetic oligonucleotide
ccuugccgaugucagggau

SEQ ID NO: 1322331 - RNA, 19 nt, Artificial Sequence
  Description of Artificial Sequence: Synthetic oligonucleotide
ccugggcgcaucucuuuau

SEQ ID NO: 1322332 - RNA, 19 nt, Artificial Sequence
  Description of Artificial Sequence: Synthetic oligonucleotide
ggguaggaccggagcacau

SEQ ID NO: 1322333 - RNA, 19 nt, Artificial Sequence
  Description of Artificial Sequence: Synthetic oligonucleotide
ccauacccaccuccucggu

SEQ ID NO: 1322334 - RNA, 19 nt, Artificial Sequence
  Description of Artificial Sequence: Synthetic oligonucleotide
ccacaacgcucaggaaacu

SEQ ID NO: 1322335 - RNA, 19 nt, Artificial Sequence
  Description of Artificial Sequence: Synthetic oligonucleotide
ccacagauuugaggcugau

SEQ ID NO: 1322336 - RNA, 19 nt, Artificial Sequence
  Description of Artificial Sequence: Synthetic oligonucleotide
ggauguccccugggcgcau

SEQ ID NO: 1322337 - RNA, 19 nt, Artificial Sequence
  Description of Artificial Sequence: Synthetic oligonucleotide
ccuccucgguagguccucu

SEQ ID NO: 1322338 - RNA, 19 nt, Artificial Sequence
  Description of Artificial Sequence: Synthetic oligonucleotide
aaaauuagugucuacgucc

SEQ ID NO: 1322339 - RNA, 19 nt, Artificial Sequence
  Description of Artificial Sequence: Synthetic oligonucleotide
uguuucggcacaaacauca

SEQ ID NO: 1322340 - RNA, 19 nt, Artificial Sequence
  Description of Artificial Sequence: Synthetic oligonucleotide
cuugcggacauccagacgg

SEQ ID NO: 1322341 - RNA, 19 nt, Artificial Sequence
  Description of Artificial Sequence: Synthetic oligonucleotide
uucggcacaaacaucacca

SEQ ID NO: 1322342 - RNA, 19 nt, Artificial Sequence
  Description of Artificial Sequence: Synthetic oligonucleotide
gaaaaggccacagacgucc

SEQ ID NO: 1322343 - RNA, 19 nt, Artificial Sequence
  Description of Artificial Sequence: Synthetic oligonucleotide
aacaucauuagcaggcagg

SEQ ID NO: 1322344 - RNA, 19 nt, Artificial Sequence
  Description of Artificial Sequence: Synthetic oligonucleotide
uggcccaacacauagaguc

SEQ ID NO: 1322345 - RNA, 19 nt, Artificial Sequence
  Description of Artificial Sequence: Synthetic oligonucleotide
aguguuucggcacaaacau

SEQ ID NO: 1322346 - RNA, 19 nt, Artificial Sequence
  Description of Artificial Sequence: Synthetic oligonucleotide
ugaacaagaaggguggggc

SEQ ID NO: 1322347 - RNA, 19 nt, Artificial Sequence
  Description of Artificial Sequence: Synthetic oligonucleotide
uaguguuucggcacaaaca

SEQ ID NO: 1322348 - RNA, 19 nt, Artificial Sequence
  Description of Artificial Sequence: Synthetic oligonucleotide
cacgugauguagcugagcg

SEQ ID NO: 1322349 - RNA, 19 nt, Artificial Sequence
  Description of Artificial Sequence: Synthetic oligonucleotide
cuagagucgcagaagagac

SEQ ID NO: 1322350 - RNA, 19 nt, Artificial Sequence
  Description of Artificial Sequence: Synthetic oligonucleotide
caucuugagagcaucugcc

SEQ ID NO: 1322351 - RNA, 19 nt, Artificial Sequence
  Description of Artificial Sequence: Synthetic oligonucleotide
caaacaucaccacccaagg

SEQ ID NO: 1322352 - RNA, 19 nt, Artificial Sequence
  Description of Artificial Sequence: Synthetic oligonucleotide
gaugguagccaucugcaac

SEQ ID NO: 1322353 - RNA, 19 nt, Artificial Sequence
  Description of Artificial Sequence: Synthetic oligonucleotide
auccagacggagcaaguac

SEQ ID NO: 1322354 - RNA, 19 nt, Artificial Sequence
  Description of Artificial Sequence: Synthetic oligonucleotide
cugacauagccccagcugc

SEQ ID NO: 1322355 - RNA, 19 nt, Artificial Sequence
  Description of Artificial Sequence: Synthetic oligonucleotide
uguccucccaggacuaugg

SEQ ID NO: 1322356 - RNA, 19 nt, Artificial Sequence
  Description of Artificial Sequence: Synthetic oligonucleotide
ucauccgaagggcagaguc

SEQ ID NO: 1322357 - RNA, 19 nt, Artificial Sequence
  Description of Artificial Sequence: Synthetic oligonucleotide
ugcaccucugcccggaucc

SEQ ID NO: 1322358 - RNA, 19 nt, Artificial Sequence
  Description of Artificial Sequence: Synthetic oligonucleotide
agcagcgccagguaucugg

SEQ ID NO: 1322359 - RNA, 19 nt, Artificial Sequence
  Description of Artificial Sequence: Synthetic oligonucleotide
agaagaagggacccuccgg

SEQ ID NO: 1322360 - RNA, 19 nt, Artificial Sequence
  Description of Artificial Sequence: Synthetic oligonucleotide
cauggcccaacacauagag

SEQ ID NO: 1322361 - RNA, 19 nt, Artificial Sequence
  Description of Artificial Sequence: Synthetic oligonucleotide
acaagcccgggcgagaacc

SEQ ID NO: 1322362 - RNA, 19 nt, Artificial Sequence
  Description of Artificial Sequence: Synthetic oligonucleotide
uccugaguugacucaacag

SEQ ID NO: 1322363 - RNA, 19 nt, Artificial Sequence
  Description of Artificial Sequence: Synthetic oligonucleotide
uuucggcacaaacaucacc

SEQ ID NO: 1322364 - RNA, 19 nt, Artificial Sequence
  Description of Artificial Sequence: Synthetic oligonucleotide
ugucucaacaggcuucaga

SEQ ID NO: 1322365 - RNA, 19 nt, Artificial Sequence
  Description of Artificial Sequence: Synthetic oligonucleotide
agguucaagggccacacgu

SEQ ID NO: 1322366 - RNA, 19 nt, Artificial Sequence
  Description of Artificial Sequence: Synthetic oligonucleotide
aacaucauccgaagggcag

SEQ ID NO: 1322367 - RNA, 19 nt, Artificial Sequence
  Description of Artificial Sequence: Synthetic oligonucleotide
ccaccauucacaaaguccc

SEQ ID NO: 1322368 - RNA, 19 nt, Artificial Sequence
  Description of Artificial Sequence: Synthetic oligonucleotide
aagauccggagccgggcac

SEQ ID NO: 1322369 - RNA, 19 nt, Artificial Sequence
  Description of Artificial Sequence: Synthetic oligonucleotide
ucuuuagcugguuggccag

SEQ ID NO: 1322370 - RNA, 19 nt, Artificial Sequence
  Description of Artificial Sequence: Synthetic oligonucleotide
aaaggagaccauggucccc

SEQ ID NO: 1322371 - RNA, 19 nt, Artificial Sequence
  Description of Artificial Sequence: Synthetic oligonucleotide
cucaacagagcccgcagcc

SEQ ID NO: 1322372 - RNA, 19 nt, Artificial Sequence
  Description of Artificial Sequence: Synthetic oligonucleotide
ugagguagccuagagucgc

SEQ ID NO: 1322373 - RNA, 19 nt, Artificial Sequence
  Description of Artificial Sequence: Synthetic oligonucleotide
gagaaccacauucuuguuc

SEQ ID NO: 1322374 - RNA, 19 nt, Artificial Sequence
  Description of Artificial Sequence: Synthetic oligonucleotide
aucggcaggcggucgaggc

SEQ ID NO: 1322375 - RNA, 19 nt, Artificial Sequence
  Description of Artificial Sequence: Synthetic oligonucleotide
agggcguuggcacugcaag

SEQ ID NO: 1322376 - RNA, 19 nt, Artificial Sequence
  Description of Artificial Sequence: Synthetic oligonucleotide
agagucgcagaagagacca

SEQ ID NO: 1322377 - RNA, 19 nt, Artificial Sequence
  Description of Artificial Sequence: Synthetic oligonucleotide
acgugauguagcugagcgc

SEQ ID NO: 1322378 - RNA, 19 nt, Artificial Sequence
  Description of Artificial Sequence: Synthetic oligonucleotide
gaacaagaaggguggggcc

SEQ ID NO: 1322379 - RNA, 19 nt, Artificial Sequence
  Description of Artificial Sequence: Synthetic oligonucleotide
cugggcacgcaccagggcg

SEQ ID NO: 1322380 - RNA, 19 nt, Artificial Sequence
  Description of Artificial Sequence: Synthetic oligonucleotide
ucgugcggugagaagagca

SEQ ID NO: 1322381 - RNA, 19 nt, Artificial Sequence
  Description of Artificial Sequence: Synthetic oligonucleotide
augaacaagaagggugggg

SEQ ID NO: 1322382 - RNA, 19 nt, Artificial Sequence
  Description of Artificial Sequence: Synthetic oligonucleotide
agaucagugcaggugacug

SEQ ID NO: 1322383 - RNA, 19 nt, Artificial Sequence
  Description of Artificial Sequence: Synthetic oligonucleotide
cuucagagaucagugcagg

SEQ ID NO: 1322384 - RNA, 19 nt, Artificial Sequence
  Description of Artificial Sequence: Synthetic oligonucleotide
uccucgugcggugagaaga

SEQ ID NO: 1322385 - RNA, 19 nt, Artificial Sequence
  Description of Artificial Sequence: Synthetic oligonucleotide
cauucuuguucaucuugag

SEQ ID NO: 1322386 - RNA, 19 nt, Artificial Sequence
  Description of Artificial Sequence: Synthetic oligonucleotide
agaagggacccuccggcag

SEQ ID NO: 1322387 - RNA, 19 nt, Artificial Sequence
  Description of Artificial Sequence: Synthetic oligonucleotide
caggguuuccagcagcgcc

SEQ ID NO: 1322388 - RNA, 19 nt, Artificial Sequence
  Description of Artificial Sequence: Synthetic oligonucleotide
cugagguagccuagagucg

SEQ ID NO: 1322389 - RNA, 19 nt, Artificial Sequence
  Description of Artificial Sequence: Synthetic oligonucleotide
gacggagcaaguacuuccg

SEQ ID NO: 1322390 - RNA, 19 nt, Artificial Sequence
  Description of Artificial Sequence: Synthetic oligonucleotide
ugcaacccugucucaacag

SEQ ID NO: 1322391 - RNA, 19 nt, Artificial Sequence
  Description of Artificial Sequence: Synthetic oligonucleotide
aaggagaccaugguccccu

SEQ ID NO: 1322392 - RNA, 19 nt, Artificial Sequence
  Description of Artificial Sequence: Synthetic oligonucleotide
agccuagagucgcagaaga

SEQ ID NO: 1322393 - RNA, 19 nt, Artificial Sequence
  Description of Artificial Sequence: Synthetic oligonucleotide
cauccgaagggcagagucc

SEQ ID NO: 1322394 - RNA, 19 nt, Artificial Sequence
  Description of Artificial Sequence: Synthetic oligonucleotide
gaaguggggagagggaggc

SEQ ID NO: 1322395 - RNA, 19 nt, Artificial Sequence
  Description of Artificial Sequence: Synthetic oligonucleotide
uggucaaggcaccaaugaa

SEQ ID NO: 1322396 - RNA, 19 nt, Artificial Sequence
  Description of Artificial Sequence: Synthetic oligonucleotide
guccacgugauguagcuga

SEQ ID NO: 1322397 - RNA, 19 nt, Artificial Sequence
  Description of Artificial Sequence: Synthetic oligonucleotide
uagagucgcagaagagacc

SEQ ID NO: 1322398 - RNA, 19 nt, Artificial Sequence
  Description of Artificial Sequence: Synthetic oligonucleotide
accccaagcaggcagcugu

SEQ ID NO: 1322399 - RNA, 19 nt, Artificial Sequence
  Description of Artificial Sequence: Synthetic oligonucleotide
acggagcaaguacuuccgc

SEQ ID NO: 1322400 - RNA, 19 nt, Artificial Sequence
  Description of Artificial Sequence: Synthetic oligonucleotide
cagccacccaaaauuagug

SEQ ID NO: 1322401 - RNA, 19 nt, Artificial Sequence
  Description of Artificial Sequence: Synthetic oligonucleotide
aaacaucauccgaagggca

SEQ ID NO: 1322402 - RNA, 19 nt, Artificial Sequence
  Description of Artificial Sequence: Synthetic oligonucleotide
ucaagggccacacguccac

SEQ ID NO: 1322403 - RNA, 19 nt, Artificial Sequence
  Description of Artificial Sequence: Synthetic oligonucleotide
cuucaugcuccccagucuc

SEQ ID NO: 1322404 - RNA, 19 nt, Artificial Sequence
  Description of Artificial Sequence: Synthetic oligonucleotide
uucaagggccacacgucca

SEQ ID NO: 1322405 - RNA, 19 nt, Artificial Sequence
  Description of Artificial Sequence: Synthetic oligonucleotide
acccaaaauuagugucuac

SEQ ID NO: 1322406 - RNA, 19 nt, Artificial Sequence
  Description of Artificial Sequence: Synthetic oligonucleotide
acaggcuucagagaucagu

SEQ ID NO: 1322407 - RNA, 19 nt, Artificial Sequence
  Description of Artificial Sequence: Synthetic oligonucleotide
agagugacauggcccaaca

SEQ ID NO: 1322408 - RNA, 19 nt, Artificial Sequence
  Description of Artificial Sequence: Synthetic oligonucleotide
aagggccacacguccacgu

SEQ ID NO: 1322409 - RNA, 19 nt, Artificial Sequence
  Description of Artificial Sequence: Synthetic oligonucleotide
aacagcgugcucagggcag

SEQ ID NO: 1322410 - RNA, 19 nt, Artificial Sequence
  Description of Artificial Sequence: Synthetic oligonucleotide
acguccacguagccaggcc

SEQ ID NO: 1322411 - RNA, 19 nt, Artificial Sequence
  Description of Artificial Sequence: Synthetic oligonucleotide
gccacagacguccacguag

SEQ ID NO: 1322412 - RNA, 19 nt, Artificial Sequence
  Description of Artificial Sequence: Synthetic oligonucleotide
ucaacaggcuucagagauc

SEQ ID NO: 1322413 - RNA, 19 nt, Artificial Sequence
  Description of Artificial Sequence: Synthetic oligonucleotide
agcgccagguaucuggggu

SEQ ID NO: 1322414 - RNA, 19 nt, Artificial Sequence
  Description of Artificial Sequence: Synthetic oligonucleotide
auccaaaggagaccauggu

SEQ ID NO: 1322415 - RNA, 19 nt, Artificial Sequence
  Description of Artificial Sequence: Synthetic oligonucleotide
acacugagguagccuagag

SEQ ID NO: 1322416 - RNA, 19 nt, Artificial Sequence
  Description of Artificial Sequence: Synthetic oligonucleotide
auccugaguugacucaaca

SEQ ID NO: 1322417 - RNA, 19 nt, Artificial Sequence
  Description of Artificial Sequence: Synthetic oligonucleotide
gaaggugagggcaguagca

SEQ ID NO: 1322418 - RNA, 19 nt, Artificial Sequence
  Description of Artificial Sequence: Synthetic oligonucleotide
gggacugagagcccugggg

SEQ ID NO: 1322419 - RNA, 19 nt, Artificial Sequence
  Description of Artificial Sequence: Synthetic oligonucleotide
uucagagaucagugcaggu

SEQ ID NO: 1322420 - RNA, 19 nt, Artificial Sequence
  Description of Artificial Sequence: Synthetic oligonucleotide
agccacccaaaauuagugu

SEQ ID NO: 1322421 - RNA, 19 nt, Artificial Sequence
  Description of Artificial Sequence: Synthetic oligonucleotide
ucuaugcaacccugucuca

SEQ ID NO: 1322422 - RNA, 19 nt, Artificial Sequence
  Description of Artificial Sequence: Synthetic oligonucleotide
cuuaagaugguagccaucu

SEQ ID NO: 1322423 - RNA, 19 nt, Artificial Sequence
  Description of Artificial Sequence: Synthetic oligonucleotide
gagaccaugguccccuuaa

SEQ ID NO: 1322424 - RNA, 19 nt, Artificial Sequence
  Description of Artificial Sequence: Synthetic oligonucleotide
uccacgugauguagcugag

SEQ ID NO: 1322425 - RNA, 19 nt, Artificial Sequence
  Description of Artificial Sequence: Synthetic oligonucleotide
ggcaaagccccacaagccc

SEQ ID NO: 1322426 - RNA, 19 nt, Artificial Sequence
  Description of Artificial Sequence: Synthetic oligonucleotide
ggacugagagcccuggggc

SEQ ID NO: 1322427 - RNA, 19 nt, Artificial Sequence
  Description of Artificial Sequence: Synthetic oligonucleotide
aggacuaugggaacagcca

SEQ ID NO: 1322428 - RNA, 19 nt, Artificial Sequence
  Description of Artificial Sequence: Synthetic oligonucleotide
agccguagcagaggcaggg

SEQ ID NO: 1322429 - RNA, 19 nt, Artificial Sequence
  Description of Artificial Sequence: Synthetic oligonucleotide
aucagugcaggugacugga

SEQ ID NO: 1322430 - RNA, 19 nt, Artificial Sequence
  Description of Artificial Sequence: Synthetic oligonucleotide
gaacagcgugcucagggca

SEQ ID NO: 1322431 - RNA, 19 nt, Artificial Sequence
  Description of Artificial Sequence: Synthetic oligonucleotide
cuggucaaggcaccaauga

SEQ ID NO: 1322432 - RNA, 19 nt, Artificial Sequence
  Description of Artificial Sequence: Synthetic oligonucleotide
cauucacaaaguccccuuc

SEQ ID NO: 1322433 - RNA, 19 nt, Artificial Sequence
  Description of Artificial Sequence: Synthetic oligonucleotide
uccuugcggacauccagac

SEQ ID NO: 1322434 - RNA, 19 nt, Artificial Sequence
  Description of Artificial Sequence: Synthetic oligonucleotide
gcaacccugucucaacagg

SEQ ID NO: 1322435 - RNA, 19 nt, Artificial Sequence
  Description of Artificial Sequence: Synthetic oligonucleotide
aucccuuccuucaggcccc

SEQ ID NO: 1322436 - RNA, 19 nt, Artificial Sequence
  Description of Artificial Sequence: Synthetic oligonucleotide
caaggcaccaaugaaggaa

SEQ ID NO: 1322437 - RNA, 19 nt, Artificial Sequence
  Description of Artificial Sequence: Synthetic oligonucleotide
ugacucaacagagcccgca

SEQ ID NO: 1322438 - RNA, 19 nt, Artificial Sequence
  Description of Artificial Sequence: Synthetic oligonucleotide
uccggagccgggcacugug

SEQ ID NO: 1322439 - RNA, 19 nt, Artificial Sequence
  Description of Artificial Sequence: Synthetic oligonucleotide
acguccacgugauguagcu

SEQ ID NO: 1322440 - RNA, 19 nt, Artificial Sequence
  Description of Artificial Sequence: Synthetic oligonucleotide
gagugacuccaugaacaag

SEQ ID NO: 1322441 - RNA, 19 nt, Artificial Sequence
  Description of Artificial Sequence: Synthetic oligonucleotide
acaggaagauccggagccg

SEQ ID NO: 1322442 - RNA, 19 nt, Artificial Sequence
  Description of Artificial Sequence: Synthetic oligonucleotide
aggcggugcgucuguggcc

SEQ ID NO: 1322443 - RNA, 19 nt, Artificial Sequence
  Description of Artificial Sequence: Synthetic oligonucleotide
ggacuaugggaacagccac

SEQ ID NO: 1322444 - RNA, 19 nt, Artificial Sequence
  Description of Artificial Sequence: Synthetic oligonucleotide
uacuuccgcaccuggugga

SEQ ID NO: 1322445 - RNA, 19 nt, Artificial Sequence
  Description of Artificial Sequence: Synthetic oligonucleotide
agagaucagugcaggugac

SEQ ID NO: 1322446 - RNA, 19 nt, Artificial Sequence
  Description of Artificial Sequence: Synthetic oligonucleotide
caggugacuggagugacuc

SEQ ID NO: 1322447 - RNA, 19 nt, Artificial Sequence
  Description of Artificial Sequence: Synthetic oligonucleotide
cacguccacgugauguagc

SEQ ID NO: 1322448 - RNA, 19 nt, Artificial Sequence
  Description of Artificial Sequence: Synthetic oligonucleotide
ucggcacaaacaucaccac

SEQ ID NO: 1322449 - RNA, 19 nt, Artificial Sequence
  Description of Artificial Sequence: Synthetic oligonucleotide
uagcaggucccuccucccc

SEQ ID NO: 1322450 - RNA, 19 nt, Artificial Sequence
  Description of Artificial Sequence: Synthetic oligonucleotide
ggucgaggcagguacagga

SEQ ID NO: 1322451 - RNA, 19 nt, Artificial Sequence
  Description of Artificial Sequence: Synthetic oligonucleotide
uagcgggcaggaucggcag

SEQ ID NO: 1322452 - RNA, 19 nt, Artificial Sequence
  Description of Artificial Sequence: Synthetic oligonucleotide
gagggcaguagcagguccc

SEQ ID NO: 1322453 - RNA, 19 nt, Artificial Sequence
  Description of Artificial Sequence: Synthetic oligonucleotide
gcugaagcccacucuagac

SEQ ID NO: 1322454 - RNA, 19 nt, Artificial Sequence
  Description of Artificial Sequence: Synthetic oligonucleotide
gccacccaaaauuaguguc

SEQ ID NO: 1322455 - RNA, 19 nt, Artificial Sequence
  Description of Artificial Sequence: Synthetic oligonucleotide
gggguagcgggcaggaucg

SEQ ID NO: 1322456 - RNA, 19 nt, Artificial Sequence
  Description of Artificial Sequence: Synthetic oligonucleotide
ggaacagcgugcucagggc

SEQ ID NO: 1322457 - RNA, 19 nt, Artificial Sequence
  Description of Artificial Sequence: Synthetic oligonucleotide
agaugguagccaucugcaa

SEQ ID NO: 1322458 - RNA, 19 nt, Artificial Sequence
  Description of Artificial Sequence: Synthetic oligonucleotide
guagcagaggcagggcacc

SEQ ID NO: 1322459 - RNA, 19 nt, Artificial Sequence
  Description of Artificial Sequence: Synthetic oligonucleotide
cgagguggagggaacagcg

SEQ ID NO: 1322460 - RNA, 19 nt, Artificial Sequence
  Description of Artificial Sequence: Synthetic oligonucleotide
uggggacugagagcccugg

SEQ ID NO: 1322461 - RNA, 19 nt, Artificial Sequence
  Description of Artificial Sequence: Synthetic oligonucleotide
ggugggcggaaguugggag

SEQ ID NO: 1322462 - RNA, 19 nt, Artificial Sequence
  Description of Artificial Sequence: Synthetic oligonucleotide
gagcugaagcccacucuag

SEQ ID NO: 1322463 - RNA, 19 nt, Artificial Sequence
  Description of Artificial Sequence: Synthetic oligonucleotide
guagcaggucccuccuccc

SEQ ID NO: 1322464 - RNA, 19 nt, Artificial Sequence
  Description of Artificial Sequence: Synthetic oligonucleotide
ugggcacgcaccagggcgu

SEQ ID NO: 1322465 - RNA, 19 nt, Artificial Sequence
  Description of Artificial Sequence: Synthetic oligonucleotide
acguagccaggcccacccc

SEQ ID NO: 1322466 - RNA, 19 nt, Artificial Sequence
  Description of Artificial Sequence: Synthetic oligonucleotide
caucauccgaagggcagag

SEQ ID NO: 1322467 - RNA, 19 nt, Artificial Sequence
  Description of Artificial Sequence: Synthetic oligonucleotide
cuaggccccaggcacagga

SEQ ID NO: 1322468 - RNA, 19 nt, Artificial Sequence
  Description of Artificial Sequence: Synthetic oligonucleotide
gacccgcccucucugcaag

SEQ ID NO: 1322469 - RNA, 19 nt, Artificial Sequence
  Description of Artificial Sequence: Synthetic oligonucleotide
aagaaggguggggcccagg

SEQ ID NO: 1322470 - RNA, 19 nt, Artificial Sequence
  Description of Artificial Sequence: Synthetic oligonucleotide
ccaugguccccuuaaaaca

SEQ ID NO: 1322471 - RNA, 19 nt, Artificial Sequence
  Description of Artificial Sequence: Synthetic oligonucleotide
ucccaggacuaugggaaca

SEQ ID NO: 1322472 - RNA, 19 nt, Artificial Sequence
  Description of Artificial Sequence: Synthetic oligonucleotide
ucacgugcuccuugcggac

SEQ ID NO: 1322473 - RNA, 19 nt, Artificial Sequence
  Description of Artificial Sequence: Synthetic oligonucleotide
gcgagaaccacauucuugu

SEQ ID NO: 1322474 - RNA, 19 nt, Artificial Sequence
  Description of Artificial Sequence: Synthetic oligonucleotide
guagccaggcccaccccgg

SEQ ID NO: 1322475 - RNA, 19 nt, Artificial Sequence
  Description of Artificial Sequence: Synthetic oligonucleotide
gcagaggcagggcaccccg

SEQ ID NO: 1322476 - RNA, 19 nt, Artificial Sequence
  Description of Artificial Sequence: Synthetic oligonucleotide
cuuuagcugguuggccagc

SEQ ID NO: 1322477 - RNA, 19 nt, Artificial Sequence
  Description of Artificial Sequence: Synthetic oligonucleotide
ugcccggauccugaguuga

SEQ ID NO: 1322478 - RNA, 19 nt, Artificial Sequence
  Description of Artificial Sequence: Synthetic oligonucleotide
caugcuccccagucucggc

SEQ ID NO: 1322479 - RNA, 19 nt, Artificial Sequence
  Description of Artificial Sequence: Synthetic oligonucleotide
gacacugagguagccuaga

SEQ ID NO: 1322480 - RNA, 19 nt, Artificial Sequence
  Description of Artificial Sequence: Synthetic oligonucleotide
augguccccuuaaaacauc

SEQ ID NO: 1322481 - RNA, 19 nt, Artificial Sequence
  Description of Artificial Sequence: Synthetic oligonucleotide
acucuagacucaggcaaga

SEQ ID NO: 1322482 - RNA, 19 nt, Artificial Sequence
  Description of Artificial Sequence: Synthetic oligonucleotide
ugcggacauccagacggag

SEQ ID NO: 1322483 - RNA, 19 nt, Artificial Sequence
  Description of Artificial Sequence: Synthetic oligonucleotide
gaucggcaggcggucgagg

SEQ ID NO: 1322484 - RNA, 19 nt, Artificial Sequence
  Description of Artificial Sequence: Synthetic oligonucleotide
agcgggcaggaucggcagg

SEQ ID NO: 1322485 - RNA, 19 nt, Artificial Sequence
  Description of Artificial Sequence: Synthetic oligonucleotide
ggugacuggagugacucca

SEQ ID NO: 1322486 - RNA, 19 nt, Artificial Sequence
  Description of Artificial Sequence: Synthetic oligonucleotide
ucccuaggccccaggcaca

SEQ ID NO: 1322487 - RNA, 19 nt, Artificial Sequence
  Description of Artificial Sequence: Synthetic oligonucleotide
agggccacacguccacgug

SEQ ID NO: 1322488 - RNA, 19 nt, Artificial Sequence
  Description of Artificial Sequence: Synthetic oligonucleotide
caccccgaggguuucccac

SEQ ID NO: 1322489 - RNA, 19 nt, Artificial Sequence
  Description of Artificial Sequence: Synthetic oligonucleotide
aggaucggcaggcggucga

SEQ ID NO: 1322490 - RNA, 19 nt, Artificial Sequence
  Description of Artificial Sequence: Synthetic oligonucleotide
caugguccccuuaaaacau

SEQ ID NO: 1322491 - RNA, 19 nt, Artificial Sequence
  Description of Artificial Sequence: Synthetic oligonucleotide
ccgggcgagaaccacauuc

SEQ ID NO: 1322492 - RNA, 19 nt, Artificial Sequence
  Description of Artificial Sequence: Synthetic oligonucleotide
cucccaggacuaugggaac

SEQ ID NO: 1322493 - RNA, 19 nt, Artificial Sequence
  Description of Artificial Sequence: Synthetic oligonucleotide
gucucggccccuucacccc

SEQ ID NO: 1322494 - RNA, 19 nt, Artificial Sequence
  Description of Artificial Sequence: Synthetic oligonucleotide
gugcuccuugcggacaucc

SEQ ID NO: 1322495 - RNA, 19 nt, Artificial Sequence
  Description of Artificial Sequence: Synthetic oligonucleotide
agguagccuagagucgcag

SEQ ID NO: 1322496 - RNA, 19 nt, Artificial Sequence
  Description of Artificial Sequence: Synthetic oligonucleotide
guagcgggcaggaucggca

SEQ ID NO: 1322497 - RNA, 19 nt, Artificial Sequence
  Description of Artificial Sequence: Synthetic oligonucleotide
agggcaggcgacccgcccu

SEQ ID NO: 1322498 - RNA, 19 nt, Artificial Sequence
  Description of Artificial Sequence: Synthetic oligonucleotide
aauguccucccaggacuau

SEQ ID NO: 1322499 - RNA, 19 nt, Artificial Sequence
  Description of Artificial Sequence: Synthetic oligonucleotide
uccgcaccugguggaaaag

SEQ ID NO: 1322500 - RNA, 19 nt, Artificial Sequence
  Description of Artificial Sequence: Synthetic oligonucleotide
cagagugacauggcccaac

SEQ ID NO: 1322501 - RNA, 19 nt, Artificial Sequence
  Description of Artificial Sequence: Synthetic oligonucleotide
ggcaccaaugaaggaagug

SEQ ID NO: 1322502 - RNA, 19 nt, Artificial Sequence
  Description of Artificial Sequence: Synthetic oligonucleotide
agaccaugguccccuuaaa

SEQ ID NO: 1322503 - RNA, 19 nt, Artificial Sequence
  Description of Artificial Sequence: Synthetic oligonucleotide
ccaaaauuagugucuacgu

SEQ ID NO: 1322504 - RNA, 19 nt, Artificial Sequence
  Description of Artificial Sequence: Synthetic oligonucleotide
auguccucccaggacuaug

SEQ ID NO: 1322505 - RNA, 19 nt, Artificial Sequence
  Description of Artificial Sequence: Synthetic oligonucleotide
ccacucuagacucaggcaa

SEQ ID NO: 1322506 - RNA, 19 nt, Artificial Sequence
  Description of Artificial Sequence: Synthetic oligonucleotide
ggaggcggugcgucugugg

SEQ ID NO: 1322507 - RNA, 19 nt, Artificial Sequence
  Description of Artificial Sequence: Synthetic oligonucleotide
ggaagauccggagccgggc

SEQ ID NO: 1322508 - RNA, 19 nt, Artificial Sequence
  Description of Artificial Sequence: Synthetic oligonucleotide
cuaugcaacccugucucaa

SEQ ID NO: 1322509 - RNA, 19 nt, Artificial Sequence
  Description of Artificial Sequence: Synthetic oligonucleotide
guuucggcacaaacaucac

SEQ ID NO: 1322510 - RNA, 19 nt, Artificial Sequence
  Description of Artificial Sequence: Synthetic oligonucleotide
agcgugcucagggcaggcg

SEQ ID NO: 1322511 - RNA, 19 nt, Artificial Sequence
  Description of Artificial Sequence: Synthetic oligonucleotide
cagccguagcagaggcagg

SEQ ID NO: 1322512 - RNA, 19 nt, Artificial Sequence
  Description of Artificial Sequence: Synthetic oligonucleotide
gccccuucaccccacacca

SEQ ID NO: 1322513 - RNA, 19 nt, Artificial Sequence
  Description of Artificial Sequence: Synthetic oligonucleotide
ccuagagucgcagaagaga

SEQ ID NO: 1322514 - RNA, 19 nt, Artificial Sequence
  Description of Artificial Sequence: Synthetic oligonucleotide
guuucccaccaggagcaac

SEQ ID NO: 1322515 - RNA, 19 nt, Artificial Sequence
  Description of Artificial Sequence: Synthetic oligonucleotide
uagcagaggcagggcaccc

SEQ ID NO: 1322516 - RNA, 19 nt, Artificial Sequence
  Description of Artificial Sequence: Synthetic oligonucleotide
cagacggagcaaguacuuc

SEQ ID NO: 1322517 - RNA, 19 nt, Artificial Sequence
  Description of Artificial Sequence: Synthetic oligonucleotide
gcccaacacauagaguccc

SEQ ID NO: 1322518 - RNA, 19 nt, Artificial Sequence
  Description of Artificial Sequence: Synthetic oligonucleotide
ggcuuggcugacauagccc

SEQ ID NO: 1322519 - RNA, 19 nt, Artificial Sequence
  Description of Artificial Sequence: Synthetic oligonucleotide
gagucgcagaagagaccag

SEQ ID NO: 1322520 - RNA, 19 nt, Artificial Sequence
  Description of Artificial Sequence: Synthetic oligonucleotide
ccagaacuucacgugcucc

SEQ ID NO: 1322521 - RNA, 19 nt, Artificial Sequence
  Description of Artificial Sequence: Synthetic oligonucleotide
aggcgacccgcccucucug

SEQ ID NO: 1322522 - RNA, 19 nt, Artificial Sequence
  Description of Artificial Sequence: Synthetic oligonucleotide
cuccucgugcggugagaag

SEQ ID NO: 1322523 - RNA, 19 nt, Artificial Sequence
  Description of Artificial Sequence: Synthetic oligonucleotide
cagccccucuggucaaggc

SEQ ID NO: 1322524 - RNA, 19 nt, Artificial Sequence
  Description of Artificial Sequence: Synthetic oligonucleotide
gguagccuagagucgcaga

SEQ ID NO: 1322525 - RNA, 19 nt, Artificial Sequence
  Description of Artificial Sequence: Synthetic oligonucleotide
gggcaggaucggcaggcgg

SEQ ID NO: 1322526 - RNA, 19 nt, Artificial Sequence
  Description of Artificial Sequence: Synthetic oligonucleotide
ccacaccaccucuugcacc

SEQ ID NO: 1322527 - RNA, 19 nt, Artificial Sequence
  Description of Artificial Sequence: Synthetic oligonucleotide
cccagagugacauggccca

SEQ ID NO: 1322528 - RNA, 19 nt, Artificial Sequence
  Description of Artificial Sequence: Synthetic oligonucleotide
aggugggcggaaguuggga

SEQ ID NO: 1322529 - RNA, 19 nt, Artificial Sequence
  Description of Artificial Sequence: Synthetic oligonucleotide
ccggauccugaguugacuc

SEQ ID NO: 1322530 - RNA, 19 nt, Artificial Sequence
  Description of Artificial Sequence: Synthetic oligonucleotide
caauguccucccaggacua

SEQ ID NO: 1322531 - RNA, 19 nt, Artificial Sequence
  Description of Artificial Sequence: Synthetic oligonucleotide
ccucgugcggugagaagag

SEQ ID NO: 1322532 - RNA, 19 nt, Artificial Sequence
  Description of Artificial Sequence: Synthetic oligonucleotide
ggcccaacacauagagucc

SEQ ID NO: 1322533 - RNA, 19 nt, Artificial Sequence
  Description of Artificial Sequence: Synthetic oligonucleotide
gcacgcaccagggcguugg

SEQ ID NO: 1322534 - RNA, 19 nt, Artificial Sequence
  Description of Artificial Sequence: Synthetic oligonucleotide
cuggguccuccucgugcgg

SEQ ID NO: 1322535 - RNA, 19 nt, Artificial Sequence
  Description of Artificial Sequence: Synthetic oligonucleotide
acccgcccucucugcaagg

SEQ ID NO: 1322536 - RNA, 19 nt, Artificial Sequence
  Description of Artificial Sequence: Synthetic oligonucleotide
guguuucggcacaaacauc

SEQ ID NO: 1322537 - RNA, 19 nt, Artificial Sequence
  Description of Artificial Sequence: Synthetic oligonucleotide
cuccagaacuucacgugcu

SEQ ID NO: 1322538 - RNA, 19 nt, Artificial Sequence
  Description of Artificial Sequence: Synthetic oligonucleotide
ggggacugagagcccuggg

SEQ ID NO: 1322539 - RNA, 19 nt, Artificial Sequence
  Description of Artificial Sequence: Synthetic oligonucleotide
cucgugcggugagaagagc

SEQ ID NO: 1322540 - RNA, 19 nt, Artificial Sequence
  Description of Artificial Sequence: Synthetic oligonucleotide
caggaucggcaggcggucg

SEQ ID NO: 1322541 - RNA, 19 nt, Artificial Sequence
  Description of Artificial Sequence: Synthetic oligonucleotide
guagcugagcgcugcugcu

SEQ ID NO: 1322542 - RNA, 19 nt, Artificial Sequence
  Description of Artificial Sequence: Synthetic oligonucleotide
gguuggccagccguagcag

SEQ ID NO: 1322543 - RNA, 19 nt, Artificial Sequence
  Description of Artificial Sequence: Synthetic oligonucleotide
auggcccaacacauagagu

SEQ ID NO: 1322544 - RNA, 19 nt, Artificial Sequence
  Description of Artificial Sequence: Synthetic oligonucleotide
cguagccaggcccaccccg

SEQ ID NO: 1322545 - RNA, 19 nt, Artificial Sequence
  Description of Artificial Sequence: Synthetic oligonucleotide
guccacguagccaggccca

SEQ ID NO: 1322546 - RNA, 19 nt, Artificial Sequence
  Description of Artificial Sequence: Synthetic oligonucleotide
agcccgagguggagggaac

SEQ ID NO: 1322547 - RNA, 19 nt, Artificial Sequence
  Description of Artificial Sequence: Synthetic oligonucleotide
ccuugcggacauccagacg

SEQ ID NO: 1322548 - RNA, 19 nt, Artificial Sequence
  Description of Artificial Sequence: Synthetic oligonucleotide
cacugagguagccuagagu

SEQ ID NO: 1322549 - RNA, 19 nt, Artificial Sequence
  Description of Artificial Sequence: Synthetic oligonucleotide
gcggacauccagacggagc

SEQ ID NO: 1322550 - RNA, 19 nt, Artificial Sequence
  Description of Artificial Sequence: Synthetic oligonucleotide
gagcccgagguggagggaa

SEQ ID NO: 1322551 - RNA, 19 nt, Artificial Sequence
  Description of Artificial Sequence: Synthetic oligonucleotide
uccuccucgugcggugaga

SEQ ID NO: 1322552 - RNA, 19 nt, Artificial Sequence
  Description of Artificial Sequence: Synthetic oligonucleotide
ggauccugaguugacucaa

SEQ ID NO: 1322553 - RNA, 19 nt, Artificial Sequence
  Description of Artificial Sequence: Synthetic oligonucleotide
gagaucagugcaggugacu

SEQ ID NO: 1322554 - RNA, 19 nt, Artificial Sequence
  Description of Artificial Sequence: Synthetic oligonucleotide
ugugccacgcaggcaccau

SEQ ID NO: 1322555 - RNA, 19 nt, Artificial Sequence
  Description of Artificial Sequence: Synthetic oligonucleotide
gagguagccuagagucgca

SEQ ID NO: 1322556 - RNA, 19 nt, Artificial Sequence
  Description of Artificial Sequence: Synthetic oligonucleotide
gccuagagucgcagaagag

SEQ ID NO: 1322557 - RNA, 19 nt, Artificial Sequence
  Description of Artificial Sequence: Synthetic oligonucleotide
aucauccgaagggcagagu

SEQ ID NO: 1322558 - RNA, 19 nt, Artificial Sequence
  Description of Artificial Sequence: Synthetic oligonucleotide
gccccucuggucaaggcac

SEQ ID NO: 1322559 - RNA, 19 nt, Artificial Sequence
  Description of Artificial Sequence: Synthetic oligonucleotide
caucaccacccaaggaagu

SEQ ID NO: 1322560 - RNA, 19 nt, Artificial Sequence
  Description of Artificial Sequence: Synthetic oligonucleotide
caagcccgggcgagaacca

SEQ ID NO: 1322561 - RNA, 19 nt, Artificial Sequence
  Description of Artificial Sequence: Synthetic oligonucleotide
gguagcgggcaggaucggc

SEQ ID NO: 1322562 - RNA, 19 nt, Artificial Sequence
  Description of Artificial Sequence: Synthetic oligonucleotide
cacaagcccgggcgagaac

SEQ ID NO: 1322563 - RNA, 19 nt, Artificial Sequence
  Description of Artificial Sequence: Synthetic oligonucleotide
acgcaggcaccaugcuuaa

SEQ ID NO: 1322564 - RNA, 19 nt, Artificial Sequence
  Description of Artificial Sequence: Synthetic oligonucleotide
cucgccccugcugggcacg

SEQ ID NO: 1322565 - RNA, 19 nt, Artificial Sequence
  Description of Artificial Sequence: Synthetic oligonucleotide
gccucccuaggccccaggc

SEQ ID NO: 1322566 - RNA, 19 nt, Artificial Sequence
  Description of Artificial Sequence: Synthetic oligonucleotide
gggccacacguccacguga

SEQ ID NO: 1322567 - RNA, 19 nt, Artificial Sequence
  Description of Artificial Sequence: Synthetic oligonucleotide
agggcaccccgaggguuuc

SEQ ID NO: 1322568 - RNA, 19 nt, Artificial Sequence
  Description of Artificial Sequence: Synthetic oligonucleotide
ucggccccuucaccccaca

SEQ ID NO: 1322569 - RNA, 19 nt, Artificial Sequence
  Description of Artificial Sequence: Synthetic oligonucleotide
ggcccaugagaagaaggga

SEQ ID NO: 1322570 - RNA, 19 nt, Artificial Sequence
  Description of Artificial Sequence: Synthetic oligonucleotide
cccacucuagacucaggca

SEQ ID NO: 1322571 - RNA, 19 nt, Artificial Sequence
  Description of Artificial Sequence: Synthetic oligonucleotide
cacgcaccagggcguuggc

SEQ ID NO: 1322572 - RNA, 19 nt, Artificial Sequence
  Description of Artificial Sequence: Synthetic oligonucleotide
gacccuccggcagccccag

SEQ ID NO: 1322573 - RNA, 19 nt, Artificial Sequence
  Description of Artificial Sequence: Synthetic oligonucleotide
gcuuaagaugguagccauc

SEQ ID NO: 1322574 - RNA, 19 nt, Artificial Sequence
  Description of Artificial Sequence: Synthetic oligonucleotide
ggcggugcgucuguggcca

SEQ ID NO: 1322575 - RNA, 19 nt, Artificial Sequence
  Description of Artificial Sequence: Synthetic oligonucleotide
aggcaccaaugaaggaagu

SEQ ID NO: 1322576 - RNA, 19 nt, Artificial Sequence
  Description of Artificial Sequence: Synthetic oligonucleotide
ccacccaaaauuagugucu

SEQ ID NO: 1322577 - RNA, 19 nt, Artificial Sequence
  Description of Artificial Sequence: Synthetic oligonucleotide
gcgggcaggaucggcaggc

SEQ ID NO: 1322578 - RNA, 19 nt, Artificial Sequence
  Description of Artificial Sequence: Synthetic oligonucleotide
ggcccucuaugcaacccug

SEQ ID NO: 1322579 - RNA, 19 nt, Artificial Sequence
  Description of Artificial Sequence: Synthetic oligonucleotide
cgugauguagcugagcgcu

SEQ ID NO: 1322580 - RNA, 19 nt, Artificial Sequence
  Description of Artificial Sequence: Synthetic oligonucleotide
ccgagguggagggaacagc

SEQ ID NO: 1322581 - RNA, 19 nt, Artificial Sequence
  Description of Artificial Sequence: Synthetic oligonucleotide
caccaugcuuaagauggua

SEQ ID NO: 1322582 - RNA, 19 nt, Artificial Sequence
  Description of Artificial Sequence: Synthetic oligonucleotide
cagggcguuggcacugcaa

SEQ ID NO: 1322583 - RNA, 19 nt, Artificial Sequence
  Description of Artificial Sequence: Synthetic oligonucleotide
cucggccccuucaccccac

SEQ ID NO: 1322584 - RNA, 19 nt, Artificial Sequence
  Description of Artificial Sequence: Synthetic oligonucleotide
agcccgggcgagaaccaca

SEQ ID NO: 1322585 - RNA, 19 nt, Artificial Sequence
  Description of Artificial Sequence: Synthetic oligonucleotide
gcggucgaggcagguacag

SEQ ID NO: 1322586 - RNA, 19 nt, Artificial Sequence
  Description of Artificial Sequence: Synthetic oligonucleotide
ggaucggcaggcggucgag

SEQ ID NO: 1322587 - RNA, 19 nt, Artificial Sequence
  Description of Artificial Sequence: Synthetic oligonucleotide
cuguggccacguaguccug

SEQ ID NO: 1322588 - RNA, 19 nt, Artificial Sequence
  Description of Artificial Sequence: Synthetic oligonucleotide
ggcggaaguugggagcuga

SEQ ID NO: 1322589 - RNA, 19 nt, Artificial Sequence
  Description of Artificial Sequence: Synthetic oligonucleotide
cugcuggguccuccucgug

SEQ ID NO: 1322590 - RNA, 19 nt, Artificial Sequence
  Description of Artificial Sequence: Synthetic oligonucleotide
cagcgugcucagggcaggc

SEQ ID NO: 1322591 - RNA, 19 nt, Artificial Sequence
  Description of Artificial Sequence: Synthetic oligonucleotide
accagccccucuggucaag

SEQ ID NO: 1322592 - RNA, 19 nt, Artificial Sequence
  Description of Artificial Sequence: Synthetic oligonucleotide
ggcaccccgaggguuuccc

SEQ ID NO: 1322593 - RNA, 19 nt, Artificial Sequence
  Description of Artificial Sequence: Synthetic oligonucleotide
ggcgacccgcccucucugc

SEQ ID NO: 1322594 - RNA, 19 nt, Artificial Sequence
  Description of Artificial Sequence: Synthetic oligonucleotide
cggagcaaguacuuccgca

SEQ ID NO: 1322595 - RNA, 19 nt, Artificial Sequence
  Description of Artificial Sequence: Synthetic oligonucleotide
ccgcaccugguggaaaagc

SEQ ID NO: 1322596 - RNA, 19 nt, Artificial Sequence
  Description of Artificial Sequence: Synthetic oligonucleotide
ccacgugauguagcugagc

SEQ ID NO: 1322597 - RNA, 19 nt, Artificial Sequence
  Description of Artificial Sequence: Synthetic oligonucleotide
acguaguccuggggacuga

SEQ ID NO: 1322598 - RNA, 19 nt, Artificial Sequence
  Description of Artificial Sequence: Synthetic oligonucleotide
caccccaagcaggcagcug

SEQ ID NO: 1322599 - RNA, 19 nt, Artificial Sequence
  Description of Artificial Sequence: Synthetic oligonucleotide
aggagaccaugguccccuu

SEQ ID NO: 1322600 - RNA, 19 nt, Artificial Sequence
  Description of Artificial Sequence: Synthetic oligonucleotide
cccgagguggagggaacag

SEQ ID NO: 1322601 - RNA, 19 nt, Artificial Sequence
  Description of Artificial Sequence: Synthetic oligonucleotide
ccacacguccacgugaugu

SEQ ID NO: 1322602 - RNA, 19 nt, Artificial Sequence
  Description of Artificial Sequence: Synthetic oligonucleotide
ccagccccucuggucaagg

SEQ ID NO: 1322603 - RNA, 19 nt, Artificial Sequence
  Description of Artificial Sequence: Synthetic oligonucleotide
ccccaagcaggcagcugug

SEQ ID NO: 1322604 - RNA, 19 nt, Artificial Sequence
  Description of Artificial Sequence: Synthetic oligonucleotide
acccuccggcagccccagg

SEQ ID NO: 1322605 - RNA, 19 nt, Artificial Sequence
  Description of Artificial Sequence: Synthetic oligonucleotide
gccguagcagaggcagggc

SEQ ID NO: 1322606 - RNA, 19 nt, Artificial Sequence
  Description of Artificial Sequence: Synthetic oligonucleotide
gcaggaucggcaggcgguc

SEQ ID NO: 1322607 - RNA, 19 nt, Artificial Sequence
  Description of Artificial Sequence: Synthetic oligonucleotide
ucgccccugcugggcacgc

SEQ ID NO: 1322608 - RNA, 19 nt, Artificial Sequence
  Description of Artificial Sequence: Synthetic oligonucleotide
gggcccucuaugcaacccu

SEQ ID NO: 1322609 - RNA, 19 nt, Artificial Sequence
  Description of Artificial Sequence: Synthetic oligonucleotide
cuuccgcaccugguggaaa

SEQ ID NO: 1322610 - RNA, 19 nt, Artificial Sequence
  Description of Artificial Sequence: Synthetic oligonucleotide
cagaaugggccugggcccu

SEQ ID NO: 1322611 - RNA, 19 nt, Artificial Sequence
  Description of Artificial Sequence: Synthetic oligonucleotide
cggauccugaguugacuca

SEQ ID NO: 1322612 - RNA, 19 nt, Artificial Sequence
  Description of Artificial Sequence: Synthetic oligonucleotide
gaaugggccugggcccucu

SEQ ID NO: 1322613 - RNA, 19 nt, Artificial Sequence
  Description of Artificial Sequence: Synthetic oligonucleotide
caggcgacccgcccucucu

SEQ ID NO: 1322614 - RNA, 19 nt, Artificial Sequence
  Description of Artificial Sequence: Synthetic oligonucleotide
ggagaccaugguccccuua

SEQ ID NO: 1322615 - RNA, 19 nt, Artificial Sequence
  Description of Artificial Sequence: Synthetic oligonucleotide
gccacacguccacgugaug

SEQ ID NO: 1322616 - RNA, 19 nt, Artificial Sequence
  Description of Artificial Sequence: Synthetic oligonucleotide
gggcaggcgacccgcccuc

SEQ ID NO: 1322617 - RNA, 19 nt, Artificial Sequence
  Description of Artificial Sequence: Synthetic oligonucleotide
auccggagccgggcacugu

SEQ ID NO: 1322618 - RNA, 19 nt, Artificial Sequence
  Description of Artificial Sequence: Synthetic oligonucleotide
cuccggcagccccagggcu

SEQ ID NO: 1322619 - RNA, 19 nt, Artificial Sequence
  Description of Artificial Sequence: Synthetic oligonucleotide
ggccuccugccgcgccucg

SEQ ID NO: 1322620 - RNA, 19 nt, Artificial Sequence
  Description of Artificial Sequence: Synthetic oligonucleotide
aggccaccccaagcaggca

SEQ ID NO: 1322621 - RNA, 19 nt, Artificial Sequence
  Description of Artificial Sequence: Synthetic oligonucleotide
ggguagcgggcaggaucgg

SEQ ID NO: 1322622 - RNA, 19 nt, Artificial Sequence
  Description of Artificial Sequence: Synthetic oligonucleotide
gcgacccgcccucucugca

SEQ ID NO: 1322623 - RNA, 19 nt, Artificial Sequence
  Description of Artificial Sequence: Synthetic oligonucleotide
gcaaggcuuggcugacaua

SEQ ID NO: 1322624 - RNA, 19 nt, Artificial Sequence
  Description of Artificial Sequence: Synthetic oligonucleotide
cccucucugcaaggucucc

SEQ ID NO: 1322625 - RNA, 19 nt, Artificial Sequence
  Description of Artificial Sequence: Synthetic oligonucleotide
gcaacagcuggggccucca

SEQ ID NO: 1322626 - RNA, 19 nt, Artificial Sequence
  Description of Artificial Sequence: Synthetic oligonucleotide
ccacguagccaggcccacc

SEQ ID NO: 1322627 - RNA, 19 nt, Artificial Sequence
  Description of Artificial Sequence: Synthetic oligonucleotide
cagggcaccccgaggguuu

SEQ ID NO: 1322628 - RNA, 19 nt, Artificial Sequence
  Description of Artificial Sequence: Synthetic oligonucleotide
ccccacaagcccgggcgag

SEQ ID NO: 1322629 - RNA, 19 nt, Artificial Sequence
  Description of Artificial Sequence: Synthetic oligonucleotide
ccuucaccccacaccaccu

SEQ ID NO: 1322630 - RNA, 19 nt, Artificial Sequence
  Description of Artificial Sequence: Synthetic oligonucleotide
ggacauccagacggagcaa

SEQ ID NO: 1322631 - RNA, 19 nt, Artificial Sequence
  Description of Artificial Sequence: Synthetic oligonucleotide
gcaccccgaggguuuccca

SEQ ID NO: 1322632 - RNA, 19 nt, Artificial Sequence
  Description of Artificial Sequence: Synthetic oligonucleotide
gccccacaagcccgggcga

SEQ ID NO: 1322633 - RNA, 19 nt, Artificial Sequence
  Description of Artificial Sequence: Synthetic oligonucleotide
ggcggucgaggcagguaca

SEQ ID NO: 1322634 - RNA, 19 nt, Artificial Sequence
  Description of Artificial Sequence: Synthetic oligonucleotide
ccgcccucucugcaagguc

SEQ ID NO: 1322635 - RNA, 19 nt, Artificial Sequence
  Description of Artificial Sequence: Synthetic oligonucleotide
ggccacagacguccacgua

SEQ ID NO: 1322636 - RNA, 19 nt, Artificial Sequence
  Description of Artificial Sequence: Synthetic oligonucleotide
caggcggucgaggcaggua

SEQ ID NO: 1322637 - RNA, 19 nt, Artificial Sequence
  Description of Artificial Sequence: Synthetic oligonucleotide
gcaggcgacccgcccucuc

SEQ ID NO: 1322638 - RNA, 19 nt, Artificial Sequence
  Description of Artificial Sequence: Synthetic oligonucleotide
gggcgagaaccacauucuu

SEQ ID NO: 1322639 - RNA, 19 nt, Artificial Sequence
  Description of Artificial Sequence: Synthetic oligonucleotide
ccggggccgcagcagguuc

SEQ ID NO: 1322640 - RNA, 19 nt, Artificial Sequence
  Description of Artificial Sequence: Synthetic oligonucleotide
ccuaggccccaggcacagg

SEQ ID NO: 1322641 - RNA, 19 nt, Artificial Sequence
  Description of Artificial Sequence: Synthetic oligonucleotide
ccuccucgugcggugagaa

SEQ ID NO: 1322642 - RNA, 19 nt, Artificial Sequence
  Description of Artificial Sequence: Synthetic oligonucleotide
cguccacgugauguagcug

SEQ ID NO: 1322643 - RNA, 19 nt, Artificial Sequence
  Description of Artificial Sequence: Synthetic oligonucleotide
gccgggcacugugccacgc

SEQ ID NO: 1322644 - RNA, 19 nt, Artificial Sequence
  Description of Artificial Sequence: Synthetic oligonucleotide
gcccggauccugaguugac

SEQ ID NO: 1322645 - RNA, 19 nt, Artificial Sequence
  Description of Artificial Sequence: Synthetic oligonucleotide
gggcggaaguugggagcug

SEQ ID NO: 1322646 - RNA, 19 nt, Artificial Sequence
  Description of Artificial Sequence: Synthetic oligonucleotide
ggcacgcaccagggcguug

SEQ ID NO: 1322647 - RNA, 19 nt, Artificial Sequence
  Description of Artificial Sequence: Synthetic oligonucleotide
cuugcaccucugcccggau

SEQ ID NO: 1322648 - RNA, 19 nt, Artificial Sequence
  Description of Artificial Sequence: Synthetic oligonucleotide
ggccacacguccacgugau

SEQ ID NO: 1322649 - RNA, 19 nt, Artificial Sequence
  Description of Artificial Sequence: Synthetic oligonucleotide
gguccccuuaaaacaucau

SEQ ID NO: 1322650 - RNA, 19 nt, Artificial Sequence
  Description of Artificial Sequence: Synthetic oligonucleotide
gcggaaguugggagcugaa

SEQ ID NO: 1322651 - RNA, 19 nt, Artificial Sequence
  Description of Artificial Sequence: Synthetic oligonucleotide
ccacaagcccgggcgagaa

SEQ ID NO: 1322652 - RNA, 19 nt, Artificial Sequence
  Description of Artificial Sequence: Synthetic oligonucleotide
gccacgcaggcaccaugcu

SEQ ID NO: 1322653 - RNA, 19 nt, Artificial Sequence
  Description of Artificial Sequence: Synthetic oligonucleotide
gggcaccccgaggguuucc

SEQ ID NO: 1322654 - RNA, 19 nt, Artificial Sequence
  Description of Artificial Sequence: Synthetic oligonucleotide
gugcgucuguggccaggau

SEQ ID NO: 1322655 - RNA, 19 nt, Artificial Sequence
  Description of Artificial Sequence: Synthetic oligonucleotide
cggugcgucuguggccagg

SEQ ID NO: 1322656 - RNA, 19 nt, Artificial Sequence
  Description of Artificial Sequence: Synthetic oligonucleotide
ccgcgccucgccccugcug

SEQ ID NO: 1322657 - RNA, 19 nt, Artificial Sequence
  Description of Artificial Sequence: Synthetic oligonucleotide
cccacaagcccgggcgaga

SEQ ID NO: 1322658 - RNA, 19 nt, Artificial Sequence
  Description of Artificial Sequence: Synthetic oligonucleotide
ggggccgcagcagguucaa

SEQ ID NO: 1322659 - RNA, 19 nt, Artificial Sequence
  Description of Artificial Sequence: Synthetic oligonucleotide
cccggauccugaguugacu

SEQ ID NO: 1322660 - RNA, 19 nt, Artificial Sequence
  Description of Artificial Sequence: Synthetic oligonucleotide
ccacgcaggcaccaugcuu

SEQ ID NO: 1322661 - RNA, 19 nt, Artificial Sequence
  Description of Artificial Sequence: Synthetic oligonucleotide
cugccgcgccucgccccug

SEQ ID NO: 1322662 - RNA, 19 nt, Artificial Sequence
  Description of Artificial Sequence: Synthetic oligonucleotide
ccagggcguuggcacugca

SEQ ID NO: 1322663 - RNA, 19 nt, Artificial Sequence
  Description of Artificial Sequence: Synthetic oligonucleotide
gcacugcaagccagagccu

SEQ ID NO: 1322664 - RNA, 19 nt, Artificial Sequence
  Description of Artificial Sequence: Synthetic oligonucleotide
gcagggcaccccgaggguu

SEQ ID NO: 1322665 - RNA, 19 nt, Artificial Sequence
  Description of Artificial Sequence: Synthetic oligonucleotide
cggggccgcagcagguuca

SEQ ID NO: 1322666 - RNA, 19 nt, Artificial Sequence
  Description of Artificial Sequence: Synthetic oligonucleotide
ccccagucucggccccuuc

SEQ ID NO: 1322667 - RNA, 19 nt, Artificial Sequence
  Description of Artificial Sequence: Synthetic oligonucleotide
gcccgggcgagaaccacau

SEQ ID NO: 1322668 - RNA, 19 nt, Artificial Sequence
  Description of Artificial Sequence: Synthetic oligonucleotide
cgacccgcccucucugcaa

SEQ ID NO: 1322669 - RNA, 19 nt, Artificial Sequence
  Description of Artificial Sequence: Synthetic oligonucleotide
cgccucgccccugcugggc

SEQ ID NO: 1322670 - RNA, 19 nt, Artificial Sequence
  Description of Artificial Sequence: Synthetic oligonucleotide
cgagaaccacauucuuguu

SEQ ID NO: 1322671 - RNA, 19 nt, Artificial Sequence
  Description of Artificial Sequence: Synthetic oligonucleotide
cccgcccucucugcaaggu

SEQ ID NO: 1322672 - RNA, 19 nt, Artificial Sequence
  Description of Artificial Sequence: Synthetic oligonucleotide
gggcacgcaccagggcguu

SEQ ID NO: 1322673 - RNA, 19 nt, Artificial Sequence
  Description of Artificial Sequence: Synthetic oligonucleotide
cccggggccgcagcagguu

SEQ ID NO: 1322674 - RNA, 19 nt, Artificial Sequence
  Description of Artificial Sequence: Synthetic oligonucleotide
cccgggcgagaaccacauu

SEQ ID NO: 1322675 - RNA, 19 nt, Artificial Sequence
  Description of Artificial Sequence: Synthetic oligonucleotide
uugauaaaaccccagaucc

SEQ ID NO: 1322676 - RNA, 19 nt, Artificial Sequence
  Description of Artificial Sequence: Synthetic oligonucleotide
aaauuguaaaagcuguugg

SEQ ID NO: 1322677 - RNA, 19 nt, Artificial Sequence
  Description of Artificial Sequence: Synthetic oligonucleotide
aaaguaauggcugacgugg

SEQ ID NO: 1322678 - RNA, 19 nt, Artificial Sequence
  Description of Artificial Sequence: Synthetic oligonucleotide
aaaaccccgauauaggagg

SEQ ID NO: 1322679 - RNA, 19 nt, Artificial Sequence
  Description of Artificial Sequence: Synthetic oligonucleotide
uguaccaacagaaaacccc

SEQ ID NO: 1322680 - RNA, 19 nt, Artificial Sequence
  Description of Artificial Sequence: Synthetic oligonucleotide
ucuccucuaacacagagcc

SEQ ID NO: 1322681 - RNA, 19 nt, Artificial Sequence
  Description of Artificial Sequence: Synthetic oligonucleotide
agauuugauguauggagcc

SEQ ID NO: 1322682 - RNA, 19 nt, Artificial Sequence
  Description of Artificial Sequence: Synthetic oligonucleotide
aaugcuuggucuuaucaag

SEQ ID NO: 1322683 - RNA, 19 nt, Artificial Sequence
  Description of Artificial Sequence: Synthetic oligonucleotide
ucuuaucaagcacagaucu

SEQ ID NO: 1322684 - RNA, 19 nt, Artificial Sequence
  Description of Artificial Sequence: Synthetic oligonucleotide
aaguuuucuacugacacag

SEQ ID NO: 1322685 - RNA, 19 nt, Artificial Sequence
  Description of Artificial Sequence: Synthetic oligonucleotide
auugaagugccacucaggg

SEQ ID NO: 1322686 - RNA, 19 nt, Artificial Sequence
  Description of Artificial Sequence: Synthetic oligonucleotide
ucuaacacagagccaaagg

SEQ ID NO: 1322687 - RNA, 19 nt, Artificial Sequence
  Description of Artificial Sequence: Synthetic oligonucleotide
ucuaguaauucuaggaucu

SEQ ID NO: 1322688 - RNA, 19 nt, Artificial Sequence
  Description of Artificial Sequence: Synthetic oligonucleotide
gauaucauaagcuguacca

SEQ ID NO: 1322689 - RNA, 19 nt, Artificial Sequence
  Description of Artificial Sequence: Synthetic oligonucleotide
aaaauuguaaaagcuguug

SEQ ID NO: 1322690 - RNA, 19 nt, Artificial Sequence
  Description of Artificial Sequence: Synthetic oligonucleotide
uagaauacgcauguggugg

SEQ ID NO: 1322691 - RNA, 19 nt, Artificial Sequence
  Description of Artificial Sequence: Synthetic oligonucleotide
aguaauucuaggaucuucc

SEQ ID NO: 1322692 - RNA, 19 nt, Artificial Sequence
  Description of Artificial Sequence: Synthetic oligonucleotide
uguagaauacgcauguggu

SEQ ID NO: 1322693 - RNA, 19 nt, Artificial Sequence
  Description of Artificial Sequence: Synthetic oligonucleotide
aaauaccugugacuggagg

SEQ ID NO: 1322694 - RNA, 19 nt, Artificial Sequence
  Description of Artificial Sequence: Synthetic oligonucleotide
ucaccaaaaggccugacca

SEQ ID NO: 1322695 - RNA, 19 nt, Artificial Sequence
  Description of Artificial Sequence: Synthetic oligonucleotide
aaagcaaggugccaaucag

SEQ ID NO: 1322696 - RNA, 19 nt, Artificial Sequence
  Description of Artificial Sequence: Synthetic oligonucleotide
ugucaaaccauuugucagg

SEQ ID NO: 1322697 - RNA, 19 nt, Artificial Sequence
  Description of Artificial Sequence: Synthetic oligonucleotide
uucacuucuuuauuugagg

SEQ ID NO: 1322698 - RNA, 19 nt, Artificial Sequence
  Description of Artificial Sequence: Synthetic oligonucleotide
caaggugccaaucaguccg

SEQ ID NO: 1322699 - RNA, 19 nt, Artificial Sequence
  Description of Artificial Sequence: Synthetic oligonucleotide
ucuacugaaugcuuggucu

SEQ ID NO: 1322700 - RNA, 19 nt, Artificial Sequence
  Description of Artificial Sequence: Synthetic oligonucleotide
gagacaucgacauuggcac

SEQ ID NO: 1322701 - RNA, 19 nt, Artificial Sequence
  Description of Artificial Sequence: Synthetic oligonucleotide
aauaccugugacuggaggu

SEQ ID NO: 1322702 - RNA, 19 nt, Artificial Sequence
  Description of Artificial Sequence: Synthetic oligonucleotide
guaggaaaauuguaaaagc

SEQ ID NO: 1322703 - RNA, 19 nt, Artificial Sequence
  Description of Artificial Sequence: Synthetic oligonucleotide
agcaguuuguuucucgugg

SEQ ID NO: 1322704 - RNA, 19 nt, Artificial Sequence
  Description of Artificial Sequence: Synthetic oligonucleotide
uuaucaagcacagaucuca

SEQ ID NO: 1322705 - RNA, 19 nt, Artificial Sequence
  Description of Artificial Sequence: Synthetic oligonucleotide
uuugagguuacaacaauau

SEQ ID NO: 1322706 - RNA, 19 nt, Artificial Sequence
  Description of Artificial Sequence: Synthetic oligonucleotide
auauaggaggaccugcagg

SEQ ID NO: 1322707 - RNA, 19 nt, Artificial Sequence
  Description of Artificial Sequence: Synthetic oligonucleotide
ugcacaaauuccaaaggca

SEQ ID NO: 1322708 - RNA, 19 nt, Artificial Sequence
  Description of Artificial Sequence: Synthetic oligonucleotide
aauauuggacuguccagcu

SEQ ID NO: 1322709 - RNA, 19 nt, Artificial Sequence
  Description of Artificial Sequence: Synthetic oligonucleotide
guguagaauacgcaugugg

SEQ ID NO: 1322710 - RNA, 19 nt, Artificial Sequence
  Description of Artificial Sequence: Synthetic oligonucleotide
aaccgagggagcuggagac

SEQ ID NO: 1322711 - RNA, 19 nt, Artificial Sequence
  Description of Artificial Sequence: Synthetic oligonucleotide
ugaaugcuuggucuuauca

SEQ ID NO: 1322712 - RNA, 19 nt, Artificial Sequence
  Description of Artificial Sequence: Synthetic oligonucleotide
uuucuacugacacagcagu

SEQ ID NO: 1322713 - RNA, 19 nt, Artificial Sequence
  Description of Artificial Sequence: Synthetic oligonucleotide
uauaggaggaccugcaggu

SEQ ID NO: 1322714 - RNA, 19 nt, Artificial Sequence
  Description of Artificial Sequence: Synthetic oligonucleotide
uuauuugagguuacaacaa

SEQ ID NO: 1322715 - RNA, 19 nt, Artificial Sequence
  Description of Artificial Sequence: Synthetic oligonucleotide
ugauaucauaagcuguacc

SEQ ID NO: 1322716 - RNA, 19 nt, Artificial Sequence
  Description of Artificial Sequence: Synthetic oligonucleotide
uguagaucaucugucggcg

SEQ ID NO: 1322717 - RNA, 19 nt, Artificial Sequence
  Description of Artificial Sequence: Synthetic oligonucleotide
guaaucaugcucucuacug

SEQ ID NO: 1322718 - RNA, 19 nt, Artificial Sequence
  Description of Artificial Sequence: Synthetic oligonucleotide
agcuaagccaaagaccucc

SEQ ID NO: 1322719 - RNA, 19 nt, Artificial Sequence
  Description of Artificial Sequence: Synthetic oligonucleotide
aaaccauuugucaggcagc

SEQ ID NO: 1322720 - RNA, 19 nt, Artificial Sequence
  Description of Artificial Sequence: Synthetic oligonucleotide
cuaucuauccguuccuggg

SEQ ID NO: 1322721 - RNA, 19 nt, Artificial Sequence
  Description of Artificial Sequence: Synthetic oligonucleotide
gaugucaaaccauuuguca

SEQ ID NO: 1322722 - RNA, 19 nt, Artificial Sequence
  Description of Artificial Sequence: Synthetic oligonucleotide
cuugauaaaaccccagauc

SEQ ID NO: 1322723 - RNA, 19 nt, Artificial Sequence
  Description of Artificial Sequence: Synthetic oligonucleotide
uauuggacuguccagcuuc

SEQ ID NO: 1322724 - RNA, 19 nt, Artificial Sequence
  Description of Artificial Sequence: Synthetic oligonucleotide
cauacuggcuuguugagug

SEQ ID NO: 1322725 - RNA, 19 nt, Artificial Sequence
  Description of Artificial Sequence: Synthetic oligonucleotide
gauguauggagccaugcca

SEQ ID NO: 1322726 - RNA, 19 nt, Artificial Sequence
  Description of Artificial Sequence: Synthetic oligonucleotide
agcuaagugaacuuccgug

SEQ ID NO: 1322727 - RNA, 19 nt, Artificial Sequence
  Description of Artificial Sequence: Synthetic oligonucleotide
aagugaacuuccguggagg

SEQ ID NO: 1322728 - RNA, 19 nt, Artificial Sequence
  Description of Artificial Sequence: Synthetic oligonucleotide
cagauuugauguauggagc

SEQ ID NO: 1322729 - RNA, 19 nt, Artificial Sequence
  Description of Artificial Sequence: Synthetic oligonucleotide
uaaucaugcucucuacuga

SEQ ID NO: 1322730 - RNA, 19 nt, Artificial Sequence
  Description of Artificial Sequence: Synthetic oligonucleotide
acuguagaucaucugucgg

SEQ ID NO: 1322731 - RNA, 19 nt, Artificial Sequence
  Description of Artificial Sequence: Synthetic oligonucleotide
ugauaaaaccccagauccc

SEQ ID NO: 1322732 - RNA, 19 nt, Artificial Sequence
  Description of Artificial Sequence: Synthetic oligonucleotide
uucuaguaauucuaggauc

SEQ ID NO: 1322733 - RNA, 19 nt, Artificial Sequence
  Description of Artificial Sequence: Synthetic oligonucleotide
agggucuucaaccaccaag

SEQ ID NO: 1322734 - RNA, 19 nt, Artificial Sequence
  Description of Artificial Sequence: Synthetic oligonucleotide
acagcuaagccaaagaccu

SEQ ID NO: 1322735 - RNA, 19 nt, Artificial Sequence
  Description of Artificial Sequence: Synthetic oligonucleotide
cacagcuaagccaaagacc

SEQ ID NO: 1322736 - RNA, 19 nt, Artificial Sequence
  Description of Artificial Sequence: Synthetic oligonucleotide
uaagcucuuuuccaggacu

SEQ ID NO: 1322737 - RNA, 19 nt, Artificial Sequence
  Description of Artificial Sequence: Synthetic oligonucleotide
uuaaucccgcugcauagcc

SEQ ID NO: 1322738 - RNA, 19 nt, Artificial Sequence
  Description of Artificial Sequence: Synthetic oligonucleotide
ucacuucuuuauuugaggu

SEQ ID NO: 1322739 - RNA, 19 nt, Artificial Sequence
  Description of Artificial Sequence: Synthetic oligonucleotide
ugagguguagaauacgcau

SEQ ID NO: 1322740 - RNA, 19 nt, Artificial Sequence
  Description of Artificial Sequence: Synthetic oligonucleotide
uagaucaucugucggcgag

SEQ ID NO: 1322741 - RNA, 19 nt, Artificial Sequence
  Description of Artificial Sequence: Synthetic oligonucleotide
ugcagcuaagugaacuucc

SEQ ID NO: 1322742 - RNA, 19 nt, Artificial Sequence
  Description of Artificial Sequence: Synthetic oligonucleotide
caauauccaguucaccucc

SEQ ID NO: 1322743 - RNA, 19 nt, Artificial Sequence
  Description of Artificial Sequence: Synthetic oligonucleotide
cucgugauaucauaagcug

SEQ ID NO: 1322744 - RNA, 19 nt, Artificial Sequence
  Description of Artificial Sequence: Synthetic oligonucleotide
aguaggugcaucauccugg

SEQ ID NO: 1322745 - RNA, 19 nt, Artificial Sequence
  Description of Artificial Sequence: Synthetic oligonucleotide
cuguagaucaucugucggc

SEQ ID NO: 1322746 - RNA, 19 nt, Artificial Sequence
  Description of Artificial Sequence: Synthetic oligonucleotide
guaccaacagaaaaccccg

SEQ ID NO: 1322747 - RNA, 19 nt, Artificial Sequence
  Description of Artificial Sequence: Synthetic oligonucleotide
caauauuggacuguccagc

SEQ ID NO: 1322748 - RNA, 19 nt, Artificial Sequence
  Description of Artificial Sequence: Synthetic oligonucleotide
agugccaggugaugaagac

SEQ ID NO: 1322749 - RNA, 19 nt, Artificial Sequence
  Description of Artificial Sequence: Synthetic oligonucleotide
gauauaggaggaccugcag

SEQ ID NO: 1322750 - RNA, 19 nt, Artificial Sequence
  Description of Artificial Sequence: Synthetic oligonucleotide
caccauaggauucccagcc

SEQ ID NO: 1322751 - RNA, 19 nt, Artificial Sequence
  Description of Artificial Sequence: Synthetic oligonucleotide
gcuaagugaacuuccgugg

SEQ ID NO: 1322752 - RNA, 19 nt, Artificial Sequence
  Description of Artificial Sequence: Synthetic oligonucleotide
uccucuaacacagagccaa

SEQ ID NO: 1322753 - RNA, 19 nt, Artificial Sequence
  Description of Artificial Sequence: Synthetic oligonucleotide
gauaaaaccccagauccca

SEQ ID NO: 1322754 - RNA, 19 nt, Artificial Sequence
  Description of Artificial Sequence: Synthetic oligonucleotide
auagccuacuggcuguggg

SEQ ID NO: 1322755 - RNA, 19 nt, Artificial Sequence
  Description of Artificial Sequence: Synthetic oligonucleotide
ucgugauaucauaagcugu

SEQ ID NO: 1322756 - RNA, 19 nt, Artificial Sequence
  Description of Artificial Sequence: Synthetic oligonucleotide
aaaaggccugaccaccuca

SEQ ID NO: 1322757 - RNA, 19 nt, Artificial Sequence
  Description of Artificial Sequence: Synthetic oligonucleotide
cuugaguaaaggcuuccag

SEQ ID NO: 1322758 - RNA, 19 nt, Artificial Sequence
  Description of Artificial Sequence: Synthetic oligonucleotide
acaacaauauccaguucac

SEQ ID NO: 1322759 - RNA, 19 nt, Artificial Sequence
  Description of Artificial Sequence: Synthetic oligonucleotide
aauuccaaaggcacuggug

SEQ ID NO: 1322760 - RNA, 19 nt, Artificial Sequence
  Description of Artificial Sequence: Synthetic oligonucleotide
caugcucucuacugaaugc

SEQ ID NO: 1322761 - RNA, 19 nt, Artificial Sequence
  Description of Artificial Sequence: Synthetic oligonucleotide
gagguuacaacaauaucca

SEQ ID NO: 1322762 - RNA, 19 nt, Artificial Sequence
  Description of Artificial Sequence: Synthetic oligonucleotide
gaaaaccccgauauaggag

SEQ ID NO: 1322763 - RNA, 19 nt, Artificial Sequence
  Description of Artificial Sequence: Synthetic oligonucleotide
ucagcgaugaaguuuucua

SEQ ID NO: 1322764 - RNA, 19 nt, Artificial Sequence
  Description of Artificial Sequence: Synthetic oligonucleotide
ggcaaaauaccugugacug

SEQ ID NO: 1322765 - RNA, 19 nt, Artificial Sequence
  Description of Artificial Sequence: Synthetic oligonucleotide
guagaauacgcauguggug

SEQ ID NO: 1322766 - RNA, 19 nt, Artificial Sequence
  Description of Artificial Sequence: Synthetic oligonucleotide
cacuguagaucaucugucg

SEQ ID NO: 1322767 - RNA, 19 nt, Artificial Sequence
  Description of Artificial Sequence: Synthetic oligonucleotide
agguguagaauacgcaugu

SEQ ID NO: 1322768 - RNA, 19 nt, Artificial Sequence
  Description of Artificial Sequence: Synthetic oligonucleotide
ugugccagcgaagucauac

SEQ ID NO: 1322769 - RNA, 19 nt, Artificial Sequence
  Description of Artificial Sequence: Synthetic oligonucleotide
auaagcuguaccaacagaa

SEQ ID NO: 1322770 - RNA, 19 nt, Artificial Sequence
  Description of Artificial Sequence: Synthetic oligonucleotide
cugacgugguuccaggucc

SEQ ID NO: 1322771 - RNA, 19 nt, Artificial Sequence
  Description of Artificial Sequence: Synthetic oligonucleotide
uuggcacaaaaggaggcgg

SEQ ID NO: 1322772 - RNA, 19 nt, Artificial Sequence
  Description of Artificial Sequence: Synthetic oligonucleotide
uugagguuacaacaauauc

SEQ ID NO: 1322773 - RNA, 19 nt, Artificial Sequence
  Description of Artificial Sequence: Synthetic oligonucleotide
cacccuuuaaucccgcugc

SEQ ID NO: 1322774 - RNA, 19 nt, Artificial Sequence
  Description of Artificial Sequence: Synthetic oligonucleotide
aggugcagaaaacgauggc

SEQ ID NO: 1322775 - RNA, 19 nt, Artificial Sequence
  Description of Artificial Sequence: Synthetic oligonucleotide
agcgaagucauacuggcuu

SEQ ID NO: 1322776 - RNA, 19 nt, Artificial Sequence
  Description of Artificial Sequence: Synthetic oligonucleotide
uguauggagccaugccagg

SEQ ID NO: 1322777 - RNA, 19 nt, Artificial Sequence
  Description of Artificial Sequence: Synthetic oligonucleotide
uccgcaggcuaucuauccg

SEQ ID NO: 1322778 - RNA, 19 nt, Artificial Sequence
  Description of Artificial Sequence: Synthetic oligonucleotide
uaauggcugacgugguucc

SEQ ID NO: 1322779 - RNA, 19 nt, Artificial Sequence
  Description of Artificial Sequence: Synthetic oligonucleotide
uuucucguggauagugcca

SEQ ID NO: 1322780 - RNA, 19 nt, Artificial Sequence
  Description of Artificial Sequence: Synthetic oligonucleotide
ugccagugaaagcaaggug

SEQ ID NO: 1322781 - RNA, 19 nt, Artificial Sequence
  Description of Artificial Sequence: Synthetic oligonucleotide
aaucccgcugcauagccua

SEQ ID NO: 1322782 - RNA, 19 nt, Artificial Sequence
  Description of Artificial Sequence: Synthetic oligonucleotide
agcugguuucacaugggcc

SEQ ID NO: 1322783 - RNA, 19 nt, Artificial Sequence
  Description of Artificial Sequence: Synthetic oligonucleotide
gaaugcuuggucuuaucaa

SEQ ID NO: 1322784 - RNA, 19 nt, Artificial Sequence
  Description of Artificial Sequence: Synthetic oligonucleotide
uggauagugccagaccucc

SEQ ID NO: 1322785 - RNA, 19 nt, Artificial Sequence
  Description of Artificial Sequence: Synthetic oligonucleotide
ugaacuuccguggagggua

SEQ ID NO: 1322786 - RNA, 19 nt, Artificial Sequence
  Description of Artificial Sequence: Synthetic oligonucleotide
uggcaaaauaccugugacu

SEQ ID NO: 1322787 - RNA, 19 nt, Artificial Sequence
  Description of Artificial Sequence: Synthetic oligonucleotide
uucucguggauagugccag

SEQ ID NO: 1322788 - RNA, 19 nt, Artificial Sequence
  Description of Artificial Sequence: Synthetic oligonucleotide
aaaggacugcagccuguag

SEQ ID NO: 1322789 - RNA, 19 nt, Artificial Sequence
  Description of Artificial Sequence: Synthetic oligonucleotide
ugccagcgaagucauacug

SEQ ID NO: 1322790 - RNA, 19 nt, Artificial Sequence
  Description of Artificial Sequence: Synthetic oligonucleotide
ucaccauaggauucccagc

SEQ ID NO: 1322791 - RNA, 19 nt, Artificial Sequence
  Description of Artificial Sequence: Synthetic oligonucleotide
accccgauauaggaggacc

SEQ ID NO: 1322792 - RNA, 19 nt, Artificial Sequence
  Description of Artificial Sequence: Synthetic oligonucleotide
gcggaugccaugcacaggg

SEQ ID NO: 1322793 - RNA, 19 nt, Artificial Sequence
  Description of Artificial Sequence: Synthetic oligonucleotide
uagccuacuggcugugggg

SEQ ID NO: 1322794 - RNA, 19 nt, Artificial Sequence
  Description of Artificial Sequence: Synthetic oligonucleotide
gacacauugggagaugaga

SEQ ID NO: 1322795 - RNA, 19 nt, Artificial Sequence
  Description of Artificial Sequence: Synthetic oligonucleotide
uuuaaucccgcugcauagc

SEQ ID NO: 1322796 - RNA, 19 nt, Artificial Sequence
  Description of Artificial Sequence: Synthetic oligonucleotide
gagacaugccagugaaagc

SEQ ID NO: 1322797 - RNA, 19 nt, Artificial Sequence
  Description of Artificial Sequence: Synthetic oligonucleotide
uugauguauggagccaugc

SEQ ID NO: 1322798 - RNA, 19 nt, Artificial Sequence
  Description of Artificial Sequence: Synthetic oligonucleotide
cugacguuuaguaagcucu

SEQ ID NO: 1322799 - RNA, 19 nt, Artificial Sequence
  Description of Artificial Sequence: Synthetic oligonucleotide
agaucucaccauaggauuc

SEQ ID NO: 1322800 - RNA, 19 nt, Artificial Sequence
  Description of Artificial Sequence: Synthetic oligonucleotide
gucaccaaaaggccugacc

SEQ ID NO: 1322801 - RNA, 19 nt, Artificial Sequence
  Description of Artificial Sequence: Synthetic oligonucleotide
ggcaauauuggacugucca

SEQ ID NO: 1322802 - RNA, 19 nt, Artificial Sequence
  Description of Artificial Sequence: Synthetic oligonucleotide
gagguguagaauacgcaug

SEQ ID NO: 1322803 - RNA, 19 nt, Artificial Sequence
  Description of Artificial Sequence: Synthetic oligonucleotide
ccauuugucaggcagcagc

SEQ ID NO: 1322804 - RNA, 19 nt, Artificial Sequence
  Description of Artificial Sequence: Synthetic oligonucleotide
ugcacuggguccgagcgag

SEQ ID NO: 1322805 - RNA, 19 nt, Artificial Sequence
  Description of Artificial Sequence: Synthetic oligonucleotide
cuaugcggaagcugcacac

SEQ ID NO: 1322806 - RNA, 19 nt, Artificial Sequence
  Description of Artificial Sequence: Synthetic oligonucleotide
ucuacugacacagcaguuu

SEQ ID NO: 1322807 - RNA, 19 nt, Artificial Sequence
  Description of Artificial Sequence: Synthetic oligonucleotide
agcgucguaaucaugcucu

SEQ ID NO: 1322808 - RNA, 19 nt, Artificial Sequence
  Description of Artificial Sequence: Synthetic oligonucleotide
guaugguaguggcagccag

SEQ ID NO: 1322809 - RNA, 19 nt, Artificial Sequence
  Description of Artificial Sequence: Synthetic oligonucleotide
agugaaagcaaggugccaa

SEQ ID NO: 1322810 - RNA, 19 nt, Artificial Sequence
  Description of Artificial Sequence: Synthetic oligonucleotide
cuguggggcaauauuggac

SEQ ID NO: 1322811 - RNA, 19 nt, Artificial Sequence
  Description of Artificial Sequence: Synthetic oligonucleotide
agguuacaacaauauccag

SEQ ID NO: 1322812 - RNA, 19 nt, Artificial Sequence
  Description of Artificial Sequence: Synthetic oligonucleotide
aacagaaaaccccgauaua

SEQ ID NO: 1322813 - RNA, 19 nt, Artificial Sequence
  Description of Artificial Sequence: Synthetic oligonucleotide
aucugucggcgagacaugc

SEQ ID NO: 1322814 - RNA, 19 nt, Artificial Sequence
  Description of Artificial Sequence: Synthetic oligonucleotide
aaaauaccugugacuggag

SEQ ID NO: 1322815 - RNA, 19 nt, Artificial Sequence
  Description of Artificial Sequence: Synthetic oligonucleotide
agccuacuggcuguggggc

SEQ ID NO: 1322816 - RNA, 19 nt, Artificial Sequence
  Description of Artificial Sequence: Synthetic oligonucleotide
ugcauagccuacuggcugu

SEQ ID NO: 1322817 - RNA, 19 nt, Artificial Sequence
  Description of Artificial Sequence: Synthetic oligonucleotide
gucauacuggcuuguugag

SEQ ID NO: 1322818 - RNA, 19 nt, Artificial Sequence
  Description of Artificial Sequence: Synthetic oligonucleotide
uaguaauucuaggaucuuc

SEQ ID NO: 1322819 - RNA, 19 nt, Artificial Sequence
  Description of Artificial Sequence: Synthetic oligonucleotide
ccagucuccucuaacacag

SEQ ID NO: 1322820 - RNA, 19 nt, Artificial Sequence
  Description of Artificial Sequence: Synthetic oligonucleotide
aguugcaggugggaagugg

SEQ ID NO: 1322821 - RNA, 19 nt, Artificial Sequence
  Description of Artificial Sequence: Synthetic oligonucleotide
cuaacacagagccaaaggu

SEQ ID NO: 1322822 - RNA, 19 nt, Artificial Sequence
  Description of Artificial Sequence: Synthetic oligonucleotide
cugguugcagcuaagugaa

SEQ ID NO: 1322823 - RNA, 19 nt, Artificial Sequence
  Description of Artificial Sequence: Synthetic oligonucleotide
auauccaguucaccuccag

SEQ ID NO: 1322824 - RNA, 19 nt, Artificial Sequence
  Description of Artificial Sequence: Synthetic oligonucleotide
cugcauagccuacuggcug

SEQ ID NO: 1322825 - RNA, 19 nt, Artificial Sequence
  Description of Artificial Sequence: Synthetic oligonucleotide
acuggguccgagcgagcgc

SEQ ID NO: 1322826 - RNA, 19 nt, Artificial Sequence
  Description of Artificial Sequence: Synthetic oligonucleotide
auaccugugacuggaggug

SEQ ID NO: 1322827 - RNA, 19 nt, Artificial Sequence
  Description of Artificial Sequence: Synthetic oligonucleotide
auaaaaccccagaucccac

SEQ ID NO: 1322828 - RNA, 19 nt, Artificial Sequence
  Description of Artificial Sequence: Synthetic oligonucleotide
ucguaaucaugcucucuac

SEQ ID NO: 1322829 - RNA, 19 nt, Artificial Sequence
  Description of Artificial Sequence: Synthetic oligonucleotide
auacgcaugugguggcaag

SEQ ID NO: 1322830 - RNA, 19 nt, Artificial Sequence
  Description of Artificial Sequence: Synthetic oligonucleotide
guauggagccaugccaggg

SEQ ID NO: 1322831 - RNA, 19 nt, Artificial Sequence
  Description of Artificial Sequence: Synthetic oligonucleotide
ggugcugacggcugcacag

SEQ ID NO: 1322832 - RNA, 19 nt, Artificial Sequence
  Description of Artificial Sequence: Synthetic oligonucleotide
ugucggcgagacaugccag

SEQ ID NO: 1322833 - RNA, 19 nt, Artificial Sequence
  Description of Artificial Sequence: Synthetic oligonucleotide
uccugggcacccuuuaauc

SEQ ID NO: 1322834 - RNA, 19 nt, Artificial Sequence
  Description of Artificial Sequence: Synthetic oligonucleotide
gguuccaggucccugugcc

SEQ ID NO: 1322835 - RNA, 19 nt, Artificial Sequence
  Description of Artificial Sequence: Synthetic oligonucleotide
gaucccaccaguaggugca

SEQ ID NO: 1322836 - RNA, 19 nt, Artificial Sequence
  Description of Artificial Sequence: Synthetic oligonucleotide
guaauggcugacgugguuc

SEQ ID NO: 1322837 - RNA, 19 nt, Artificial Sequence
  Description of Artificial Sequence: Synthetic oligonucleotide
aaccccgauauaggaggac

SEQ ID NO: 1322838 - RNA, 19 nt, Artificial Sequence
  Description of Artificial Sequence: Synthetic oligonucleotide
gauuugauguauggagcca

SEQ ID NO: 1322839 - RNA, 19 nt, Artificial Sequence
  Description of Artificial Sequence: Synthetic oligonucleotide
acguuuaguaagcucuuuu

SEQ ID NO: 1322840 - RNA, 19 nt, Artificial Sequence
  Description of Artificial Sequence: Synthetic oligonucleotide
cuccgcaggcuaucuaucc

SEQ ID NO: 1322841 - RNA, 19 nt, Artificial Sequence
  Description of Artificial Sequence: Synthetic oligonucleotide
ucugucggcgagacaugcc

SEQ ID NO: 1322842 - RNA, 19 nt, Artificial Sequence
  Description of Artificial Sequence: Synthetic oligonucleotide
gucguaaucaugcucucua

SEQ ID NO: 1322843 - RNA, 19 nt, Artificial Sequence
  Description of Artificial Sequence: Synthetic oligonucleotide
aaucaguccggcugacguu

SEQ ID NO: 1322844 - RNA, 19 nt, Artificial Sequence
  Description of Artificial Sequence: Synthetic oligonucleotide
cuccauuucacagcagcug

SEQ ID NO: 1322845 - RNA, 19 nt, Artificial Sequence
  Description of Artificial Sequence: Synthetic oligonucleotide
uagugccagaccuccgcag

SEQ ID NO: 1322846 - RNA, 19 nt, Artificial Sequence
  Description of Artificial Sequence: Synthetic oligonucleotide
aggaacugguugcagcuaa

SEQ ID NO: 1322847 - RNA, 19 nt, Artificial Sequence
  Description of Artificial Sequence: Synthetic oligonucleotide
cugaagcuauccagucucc

SEQ ID NO: 1322848 - RNA, 19 nt, Artificial Sequence
  Description of Artificial Sequence: Synthetic oligonucleotide
cuaagugaacuuccgugga

SEQ ID NO: 1322849 - RNA, 19 nt, Artificial Sequence
  Description of Artificial Sequence: Synthetic oligonucleotide
cucuaacacagagccaaag

SEQ ID NO: 1322850 - RNA, 19 nt, Artificial Sequence
  Description of Artificial Sequence: Synthetic oligonucleotide
aagcaaggugccaaucagu

SEQ ID NO: 1322851 - RNA, 19 nt, Artificial Sequence
  Description of Artificial Sequence: Synthetic oligonucleotide
uaaucccgcugcauagccu

SEQ ID NO: 1322852 - RNA, 19 nt, Artificial Sequence
  Description of Artificial Sequence: Synthetic oligonucleotide
ccggcugacguuuaguaag

SEQ ID NO: 1322853 - RNA, 19 nt, Artificial Sequence
  Description of Artificial Sequence: Synthetic oligonucleotide
aauacgcaugugguggcaa

SEQ ID NO: 1322854 - RNA, 19 nt, Artificial Sequence
  Description of Artificial Sequence: Synthetic oligonucleotide
ccagcgaagucauacuggc

SEQ ID NO: 1322855 - RNA, 19 nt, Artificial Sequence
  Description of Artificial Sequence: Synthetic oligonucleotide
cauaagcuguaccaacaga

SEQ ID NO: 1322856 - RNA, 19 nt, Artificial Sequence
  Description of Artificial Sequence: Synthetic oligonucleotide
gcgaugaaguuuucuacug

SEQ ID NO: 1322857 - RNA, 19 nt, Artificial Sequence
  Description of Artificial Sequence: Synthetic oligonucleotide
ugacgugguuccagguccc

SEQ ID NO: 1322858 - RNA, 19 nt, Artificial Sequence
  Description of Artificial Sequence: Synthetic oligonucleotide
ggugcagaaaacgauggca

SEQ ID NO: 1322859 - RNA, 19 nt, Artificial Sequence
  Description of Artificial Sequence: Synthetic oligonucleotide
ugacguuuaguaagcucuu

SEQ ID NO: 1322860 - RNA, 19 nt, Artificial Sequence
  Description of Artificial Sequence: Synthetic oligonucleotide
auuugagguuacaacaaua

SEQ ID NO: 1322861 - RNA, 19 nt, Artificial Sequence
  Description of Artificial Sequence: Synthetic oligonucleotide
agcagccgaugucaaacca

SEQ ID NO: 1322862 - RNA, 19 nt, Artificial Sequence
  Description of Artificial Sequence: Synthetic oligonucleotide
cuucuaguaauucuaggau

SEQ ID NO: 1322863 - RNA, 19 nt, Artificial Sequence
  Description of Artificial Sequence: Synthetic oligonucleotide
ggaggugcagaaaacgaug

SEQ ID NO: 1322864 - RNA, 19 nt, Artificial Sequence
  Description of Artificial Sequence: Synthetic oligonucleotide
gaucaucugucggcgagac

SEQ ID NO: 1322865 - RNA, 19 nt, Artificial Sequence
  Description of Artificial Sequence: Synthetic oligonucleotide
aaggugccaaucaguccgg

SEQ ID NO: 1322866 - RNA, 19 nt, Artificial Sequence
  Description of Artificial Sequence: Synthetic oligonucleotide
gguaguggcagccaggccu

SEQ ID NO: 1322867 - RNA, 19 nt, Artificial Sequence
  Description of Artificial Sequence: Synthetic oligonucleotide
gcugagguguagaauacgc

SEQ ID NO: 1322868 - RNA, 19 nt, Artificial Sequence
  Description of Artificial Sequence: Synthetic oligonucleotide
gccgaugucaaaccauuug

SEQ ID NO: 1322869 - RNA, 19 nt, Artificial Sequence
  Description of Artificial Sequence: Synthetic oligonucleotide
accuccgcaggcuaucuau

SEQ ID NO: 1322870 - RNA, 19 nt, Artificial Sequence
  Description of Artificial Sequence: Synthetic oligonucleotide
cugagguguagaauacgca

SEQ ID NO: 1322871 - RNA, 19 nt, Artificial Sequence
  Description of Artificial Sequence: Synthetic oligonucleotide
uccggcugacguuuaguaa

SEQ ID NO: 1322872 - RNA, 19 nt, Artificial Sequence
  Description of Artificial Sequence: Synthetic oligonucleotide
gucuuaucaagcacagauc

SEQ ID NO: 1322873 - RNA, 19 nt, Artificial Sequence
  Description of Artificial Sequence: Synthetic oligonucleotide
uugcagcuaagugaacuuc

SEQ ID NO: 1322874 - RNA, 19 nt, Artificial Sequence
  Description of Artificial Sequence: Synthetic oligonucleotide
uucaaccaccaagcagccg

SEQ ID NO: 1322875 - RNA, 19 nt, Artificial Sequence
  Description of Artificial Sequence: Synthetic oligonucleotide
gcagccuguaggaaaauug

SEQ ID NO: 1322876 - RNA, 19 nt, Artificial Sequence
  Description of Artificial Sequence: Synthetic oligonucleotide
aguuuguuucucguggaua

SEQ ID NO: 1322877 - RNA, 19 nt, Artificial Sequence
  Description of Artificial Sequence: Synthetic oligonucleotide
gucuccucuaacacagagc

SEQ ID NO: 1322878 - RNA, 19 nt, Artificial Sequence
  Description of Artificial Sequence: Synthetic oligonucleotide
caccggaggcggaaguugc

SEQ ID NO: 1322879 - RNA, 19 nt, Artificial Sequence
  Description of Artificial Sequence: Synthetic oligonucleotide
uccgagcgagcgccuaugc

SEQ ID NO: 1322880 - RNA, 19 nt, Artificial Sequence
  Description of Artificial Sequence: Synthetic oligonucleotide
ggauucucugaagcuaucc

SEQ ID NO: 1322881 - RNA, 19 nt, Artificial Sequence
  Description of Artificial Sequence: Synthetic oligonucleotide
agccacacccuugauaaaa

SEQ ID NO: 1322882 - RNA, 19 nt, Artificial Sequence
  Description of Artificial Sequence: Synthetic oligonucleotide
aaguaauggcugacguggu

SEQ ID NO: 1322883 - RNA, 19 nt, Artificial Sequence
  Description of Artificial Sequence: Synthetic oligonucleotide
ugcucucuacugaaugcuu

SEQ ID NO: 1322884 - RNA, 19 nt, Artificial Sequence
  Description of Artificial Sequence: Synthetic oligonucleotide
cgagcgagcgccuaugcgg

SEQ ID NO: 1322885 - RNA, 19 nt, Artificial Sequence
  Description of Artificial Sequence: Synthetic oligonucleotide
agcucagcgaugaaguuuu

SEQ ID NO: 1322886 - RNA, 19 nt, Artificial Sequence
  Description of Artificial Sequence: Synthetic oligonucleotide
gccugaccaccucagauug

SEQ ID NO: 1322887 - RNA, 19 nt, Artificial Sequence
  Description of Artificial Sequence: Synthetic oligonucleotide
caaaaggaggcggugcuga

SEQ ID NO: 1322888 - RNA, 19 nt, Artificial Sequence
  Description of Artificial Sequence: Synthetic oligonucleotide
gcagaaaacgauggcauca

SEQ ID NO: 1322889 - RNA, 19 nt, Artificial Sequence
  Description of Artificial Sequence: Synthetic oligonucleotide
auggcugacgugguuccag

SEQ ID NO: 1322890 - RNA, 19 nt, Artificial Sequence
  Description of Artificial Sequence: Synthetic oligonucleotide
acaaaaggaggcggugcug

SEQ ID NO: 1322891 - RNA, 19 nt, Artificial Sequence
  Description of Artificial Sequence: Synthetic oligonucleotide
auacuggcuuguugaguga

SEQ ID NO: 1322892 - RNA, 19 nt, Artificial Sequence
  Description of Artificial Sequence: Synthetic oligonucleotide
cucguggauagugccagac

SEQ ID NO: 1322893 - RNA, 19 nt, Artificial Sequence
  Description of Artificial Sequence: Synthetic oligonucleotide
aaaccccgauauaggagga

SEQ ID NO: 1322894 - RNA, 19 nt, Artificial Sequence
  Description of Artificial Sequence: Synthetic oligonucleotide
cccucgugauaucauaagc

SEQ ID NO: 1322895 - RNA, 19 nt, Artificial Sequence
  Description of Artificial Sequence: Synthetic oligonucleotide
cuuugugccugcugcacaa

SEQ ID NO: 1322896 - RNA, 19 nt, Artificial Sequence
  Description of Artificial Sequence: Synthetic oligonucleotide
aggcuaucuauccguuccu

SEQ ID NO: 1322897 - RNA, 19 nt, Artificial Sequence
  Description of Artificial Sequence: Synthetic oligonucleotide
gcaucauccuggcuucuag

SEQ ID NO: 1322898 - RNA, 19 nt, Artificial Sequence
  Description of Artificial Sequence: Synthetic oligonucleotide
gcagcuaagugaacuuccg

SEQ ID NO: 1322899 - RNA, 19 nt, Artificial Sequence
  Description of Artificial Sequence: Synthetic oligonucleotide
cuauccguuccugggcacc

SEQ ID NO: 1322900 - RNA, 19 nt, Artificial Sequence
  Description of Artificial Sequence: Synthetic oligonucleotide
acaugccagugaaagcaag

SEQ ID NO: 1322901 - RNA, 19 nt, Artificial Sequence
  Description of Artificial Sequence: Synthetic oligonucleotide
caaucaguccggcugacgu

SEQ ID NO: 1322902 - RNA, 19 nt, Artificial Sequence
  Description of Artificial Sequence: Synthetic oligonucleotide
ucggcgagacaugccagug

SEQ ID NO: 1322903 - RNA, 19 nt, Artificial Sequence
  Description of Artificial Sequence: Synthetic oligonucleotide
gcugguuucacaugggccu

SEQ ID NO: 1322904 - RNA, 19 nt, Artificial Sequence
  Description of Artificial Sequence: Synthetic oligonucleotide
auauuggacuguccagcuu

SEQ ID NO: 1322905 - RNA, 19 nt, Artificial Sequence
  Description of Artificial Sequence: Synthetic oligonucleotide
uggggcaauauuggacugu

SEQ ID NO: 1322906 - RNA, 19 nt, Artificial Sequence
  Description of Artificial Sequence: Synthetic oligonucleotide
cugaaugcuuggucuuauc

SEQ ID NO: 1322907 - RNA, 19 nt, Artificial Sequence
  Description of Artificial Sequence: Synthetic oligonucleotide
ccucagauuguaguccugg

SEQ ID NO: 1322908 - RNA, 19 nt, Artificial Sequence
  Description of Artificial Sequence: Synthetic oligonucleotide
cacccacugucaccaaaag

SEQ ID NO: 1322909 - RNA, 19 nt, Artificial Sequence
  Description of Artificial Sequence: Synthetic oligonucleotide
gccagcgaagucauacugg

SEQ ID NO: 1322910 - RNA, 19 nt, Artificial Sequence
  Description of Artificial Sequence: Synthetic oligonucleotide
aggguccagcgucguaauc

SEQ ID NO: 1322911 - RNA, 19 nt, Artificial Sequence
  Description of Artificial Sequence: Synthetic oligonucleotide
uacugaaugcuuggucuua

SEQ ID NO: 1322912 - RNA, 19 nt, Artificial Sequence
  Description of Artificial Sequence: Synthetic oligonucleotide
uaugaugcacuggguccga

SEQ ID NO: 1322913 - RNA, 19 nt, Artificial Sequence
  Description of Artificial Sequence: Synthetic oligonucleotide
acugaaugcuuggucuuau

SEQ ID NO: 1322914 - RNA, 19 nt, Artificial Sequence
  Description of Artificial Sequence: Synthetic oligonucleotide
caggcggaugccaugcaca

SEQ ID NO: 1322915 - RNA, 19 nt, Artificial Sequence
  Description of Artificial Sequence: Synthetic oligonucleotide
acccuuuaaucccgcugca

SEQ ID NO: 1322916 - RNA, 19 nt, Artificial Sequence
  Description of Artificial Sequence: Synthetic oligonucleotide
aaguugcaggugggaagug

SEQ ID NO: 1322917 - RNA, 19 nt, Artificial Sequence
  Description of Artificial Sequence: Synthetic oligonucleotide
acccuugauaaaaccccag

SEQ ID NO: 1322918 - RNA, 19 nt, Artificial Sequence
  Description of Artificial Sequence: Synthetic oligonucleotide
aucaguccggcugacguuu

SEQ ID NO: 1322919 - RNA, 19 nt, Artificial Sequence
  Description of Artificial Sequence: Synthetic oligonucleotide
auaggaggaccugcaggug

SEQ ID NO: 1322920 - RNA, 19 nt, Artificial Sequence
  Description of Artificial Sequence: Synthetic oligonucleotide
guagaucaucugucggcga

SEQ ID NO: 1322921 - RNA, 19 nt, Artificial Sequence
  Description of Artificial Sequence: Synthetic oligonucleotide
gcugacguuuaguaagcuc

SEQ ID NO: 1322922 - RNA, 19 nt, Artificial Sequence
  Description of Artificial Sequence: Synthetic oligonucleotide
cauagccuacuggcugugg

SEQ ID NO: 1322923 - RNA, 19 nt, Artificial Sequence
  Description of Artificial Sequence: Synthetic oligonucleotide
agaucaucugucggcgaga

SEQ ID NO: 1322924 - RNA, 19 nt, Artificial Sequence
  Description of Artificial Sequence: Synthetic oligonucleotide
caucugucggcgagacaug

SEQ ID NO: 1322925 - RNA, 19 nt, Artificial Sequence
  Description of Artificial Sequence: Synthetic oligonucleotide
gcacccuuuaaucccgcug

SEQ ID NO: 1322926 - RNA, 19 nt, Artificial Sequence
  Description of Artificial Sequence: Synthetic oligonucleotide
ggggaaccgagggagcugg

SEQ ID NO: 1322927 - RNA, 19 nt, Artificial Sequence
  Description of Artificial Sequence: Synthetic oligonucleotide
cagcgucguaaucaugcuc

SEQ ID NO: 1322928 - RNA, 19 nt, Artificial Sequence
  Description of Artificial Sequence: Synthetic oligonucleotide
agcgccuaugcggaagcug

SEQ ID NO: 1322929 - RNA, 19 nt, Artificial Sequence
  Description of Artificial Sequence: Synthetic oligonucleotide
aggugccaaucaguccggc

SEQ ID NO: 1322930 - RNA, 19 nt, Artificial Sequence
  Description of Artificial Sequence: Synthetic oligonucleotide
ugcacacgcgggucggggu

SEQ ID NO: 1322931 - RNA, 19 nt, Artificial Sequence
  Description of Artificial Sequence: Synthetic oligonucleotide
aaggaacugguugcagcua

SEQ ID NO: 1322932 - RNA, 19 nt, Artificial Sequence
  Description of Artificial Sequence: Synthetic oligonucleotide
gugcugacggcugcacagg

SEQ ID NO: 1322933 - RNA, 19 nt, Artificial Sequence
  Description of Artificial Sequence: Synthetic oligonucleotide
ggcugagguguagaauacg

SEQ ID NO: 1322934 - RNA, 19 nt, Artificial Sequence
  Description of Artificial Sequence: Synthetic oligonucleotide
uggucuuaucaagcacaga

SEQ ID NO: 1322935 - RNA, 19 nt, Artificial Sequence
  Description of Artificial Sequence: Synthetic oligonucleotide
gcacaaaaggaggcggugc

SEQ ID NO: 1322936 - RNA, 19 nt, Artificial Sequence
  Description of Artificial Sequence: Synthetic oligonucleotide
gugccacucaggggaaccg

SEQ ID NO: 1322937 - RNA, 19 nt, Artificial Sequence
  Description of Artificial Sequence: Synthetic oligonucleotide
gccuguaggaaaauuguaa

SEQ ID NO: 1322938 - RNA, 19 nt, Artificial Sequence
  Description of Artificial Sequence: Synthetic oligonucleotide
aaccaccaagcagccgaug

SEQ ID NO: 1322939 - RNA, 19 nt, Artificial Sequence
  Description of Artificial Sequence: Synthetic oligonucleotide
ggguccagcgucguaauca

SEQ ID NO: 1322940 - RNA, 19 nt, Artificial Sequence
  Description of Artificial Sequence: Synthetic oligonucleotide
ccgauauaggaggaccugc

SEQ ID NO: 1322941 - RNA, 19 nt, Artificial Sequence
  Description of Artificial Sequence: Synthetic oligonucleotide
ugccacucaggggaaccga

SEQ ID NO: 1322942 - RNA, 19 nt, Artificial Sequence
  Description of Artificial Sequence: Synthetic oligonucleotide
caugggccuggguggcagg

SEQ ID NO: 1322943 - RNA, 19 nt, Artificial Sequence
  Description of Artificial Sequence: Synthetic oligonucleotide
cacaaaaggaggcggugcu

SEQ ID NO: 1322944 - RNA, 19 nt, Artificial Sequence
  Description of Artificial Sequence: Synthetic oligonucleotide
gagcgagcgccuaugcgga

SEQ ID NO: 1322945 - RNA, 19 nt, Artificial Sequence
  Description of Artificial Sequence: Synthetic oligonucleotide
agcuauccagucuccucua

SEQ ID NO: 1322946 - RNA, 19 nt, Artificial Sequence
  Description of Artificial Sequence: Synthetic oligonucleotide
gcgccuaugcggaagcugc

SEQ ID NO: 1322947 - RNA, 19 nt, Artificial Sequence
  Description of Artificial Sequence: Synthetic oligonucleotide
guccggcugacguuuagua

SEQ ID NO: 1322948 - RNA, 19 nt, Artificial Sequence
  Description of Artificial Sequence: Synthetic oligonucleotide
cgaugucaaaccauuuguc

SEQ ID NO: 1322949 - RNA, 19 nt, Artificial Sequence
  Description of Artificial Sequence: Synthetic oligonucleotide
gcugacgugguuccagguc

SEQ ID NO: 1322950 - RNA, 19 nt, Artificial Sequence
  Description of Artificial Sequence: Synthetic oligonucleotide
ugguugcagcuaagugaac

SEQ ID NO: 1322951 - RNA, 19 nt, Artificial Sequence
  Description of Artificial Sequence: Synthetic oligonucleotide
augcacuggguccgagcga

SEQ ID NO: 1322952 - RNA, 19 nt, Artificial Sequence
  Description of Artificial Sequence: Synthetic oligonucleotide
guggauagugccagaccuc

SEQ ID NO: 1322953 - RNA, 19 nt, Artificial Sequence
  Description of Artificial Sequence: Synthetic oligonucleotide
ggcacaaaaggaggcggug

SEQ ID NO: 1322954 - RNA, 19 nt, Artificial Sequence
  Description of Artificial Sequence: Synthetic oligonucleotide
aguccggcugacguuuagu

SEQ ID NO: 1322955 - RNA, 19 nt, Artificial Sequence
  Description of Artificial Sequence: Synthetic oligonucleotide
ccucgugauaucauaagcu

SEQ ID NO: 1322956 - RNA, 19 nt, Artificial Sequence
  Description of Artificial Sequence: Synthetic oligonucleotide
gggagaugagaaggaacug

SEQ ID NO: 1322957 - RNA, 19 nt, Artificial Sequence
  Description of Artificial Sequence: Synthetic oligonucleotide
agguggaguugucucuauu

SEQ ID NO: 1322958 - RNA, 19 nt, Artificial Sequence
  Description of Artificial Sequence: Synthetic oligonucleotide
ugucaccaaaaggccugac

SEQ ID NO: 1322959 - RNA, 19 nt, Artificial Sequence
  Description of Artificial Sequence: Synthetic oligonucleotide
ccacucaggggaaccgagg

SEQ ID NO: 1322960 - RNA, 19 nt, Artificial Sequence
  Description of Artificial Sequence: Synthetic oligonucleotide
cagcuaagccaaagaccuc

SEQ ID NO: 1322961 - RNA, 19 nt, Artificial Sequence
  Description of Artificial Sequence: Synthetic oligonucleotide
gguguagaauacgcaugug

SEQ ID NO: 1322962 - RNA, 19 nt, Artificial Sequence
  Description of Artificial Sequence: Synthetic oligonucleotide
ggucuucaaccaccaagca

SEQ ID NO: 1322963 - RNA, 19 nt, Artificial Sequence
  Description of Artificial Sequence: Synthetic oligonucleotide
agccuguaggaaaauugua

SEQ ID NO: 1322964 - RNA, 19 nt, Artificial Sequence
  Description of Artificial Sequence: Synthetic oligonucleotide
uuugugccugcugcacaaa

SEQ ID NO: 1322965 - RNA, 19 nt, Artificial Sequence
  Description of Artificial Sequence: Synthetic oligonucleotide
cacacgcgggucggggucg

SEQ ID NO: 1322966 - RNA, 19 nt, Artificial Sequence
  Description of Artificial Sequence: Synthetic oligonucleotide
aacuuccguggaggguaug

SEQ ID NO: 1322967 - RNA, 19 nt, Artificial Sequence
  Description of Artificial Sequence: Synthetic oligonucleotide
cgugauaucauaagcugua

SEQ ID NO: 1322968 - RNA, 19 nt, Artificial Sequence
  Description of Artificial Sequence: Synthetic oligonucleotide
ggauagugccagaccuccg

SEQ ID NO: 1322969 - RNA, 19 nt, Artificial Sequence
  Description of Artificial Sequence: Synthetic oligonucleotide
aucaugcucucuacugaau

SEQ ID NO: 1322970 - RNA, 19 nt, Artificial Sequence
  Description of Artificial Sequence: Synthetic oligonucleotide
ccccucgugauaucauaag

SEQ ID NO: 1322971 - RNA, 19 nt, Artificial Sequence
  Description of Artificial Sequence: Synthetic oligonucleotide
ucccugugccagcgaaguc

SEQ ID NO: 1322972 - RNA, 19 nt, Artificial Sequence
  Description of Artificial Sequence: Synthetic oligonucleotide
uccguuccugggcacccuu

SEQ ID NO: 1322973 - RNA, 19 nt, Artificial Sequence
  Description of Artificial Sequence: Synthetic oligonucleotide
cucccagcguggccccucg

SEQ ID NO: 1322974 - RNA, 19 nt, Artificial Sequence
  Description of Artificial Sequence: Synthetic oligonucleotide
ucaguccggcugacguuua

SEQ ID NO: 1322975 - RNA, 19 nt, Artificial Sequence
  Description of Artificial Sequence: Synthetic oligonucleotide
ggggcaauauuggacuguc

SEQ ID NO: 1322976 - RNA, 19 nt, Artificial Sequence
  Description of Artificial Sequence: Synthetic oligonucleotide
ggcuaucuauccguuccug

SEQ ID NO: 1322977 - RNA, 19 nt, Artificial Sequence
  Description of Artificial Sequence: Synthetic oligonucleotide
caccucagauuguaguccu

SEQ ID NO: 1322978 - RNA, 19 nt, Artificial Sequence
  Description of Artificial Sequence: Synthetic oligonucleotide
ggcggaaguugcagguggg

SEQ ID NO: 1322979 - RNA, 19 nt, Artificial Sequence
  Description of Artificial Sequence: Synthetic oligonucleotide
caguccggcugacguuuag

SEQ ID NO: 1322980 - RNA, 19 nt, Artificial Sequence
  Description of Artificial Sequence: Synthetic oligonucleotide
acgugguuccaggucccug

SEQ ID NO: 1322981 - RNA, 19 nt, Artificial Sequence
  Description of Artificial Sequence: Synthetic oligonucleotide
ggugcucucccagcguggc

SEQ ID NO: 1322982 - RNA, 19 nt, Artificial Sequence
  Description of Artificial Sequence: Synthetic oligonucleotide
cccuugauaaaaccccaga

SEQ ID NO: 1322983 - RNA, 19 nt, Artificial Sequence
  Description of Artificial Sequence: Synthetic oligonucleotide
ggaggcggaaguugcaggu

SEQ ID NO: 1322984 - RNA, 19 nt, Artificial Sequence
  Description of Artificial Sequence: Synthetic oligonucleotide
gaagugccacucaggggaa

SEQ ID NO: 1322985 - RNA, 19 nt, Artificial Sequence
  Description of Artificial Sequence: Synthetic oligonucleotide
agaccuccgcaggcuaucu

SEQ ID NO: 1322986 - RNA, 19 nt, Artificial Sequence
  Description of Artificial Sequence: Synthetic oligonucleotide
ccuugauaaaaccccagau

SEQ ID NO: 1322987 - RNA, 19 nt, Artificial Sequence
  Description of Artificial Sequence: Synthetic oligonucleotide
ccgagcgagcgccuaugcg

SEQ ID NO: 1322988 - RNA, 19 nt, Artificial Sequence
  Description of Artificial Sequence: Synthetic oligonucleotide
guccgagcgagcgccuaug

SEQ ID NO: 1322989 - RNA, 19 nt, Artificial Sequence
  Description of Artificial Sequence: Synthetic oligonucleotide
ggcuuugugccugcugcac

SEQ ID NO: 1322990 - RNA, 19 nt, Artificial Sequence
  Description of Artificial Sequence: Synthetic oligonucleotide
ggucaggcuuugugccugc

SEQ ID NO: 1322991 - RNA, 19 nt, Artificial Sequence
  Description of Artificial Sequence: Synthetic oligonucleotide
agcguggccccucgugaua

SEQ ID NO: 1322992 - RNA, 19 nt, Artificial Sequence
  Description of Artificial Sequence: Synthetic oligonucleotide
ccaccaagcagccgauguc

SEQ ID NO: 1322993 - RNA, 19 nt, Artificial Sequence
  Description of Artificial Sequence: Synthetic oligonucleotide
cagcuaagugaacuuccgu

SEQ ID NO: 1322994 - RNA, 19 nt, Artificial Sequence
  Description of Artificial Sequence: Synthetic oligonucleotide
gucggcgagacaugccagu

SEQ ID NO: 1322995 - RNA, 19 nt, Artificial Sequence
  Description of Artificial Sequence: Synthetic oligonucleotide
caggcgcugcuuguacaug

SEQ ID NO: 1322996 - RNA, 19 nt, Artificial Sequence
  Description of Artificial Sequence: Synthetic oligonucleotide
ccuaugcggaagcugcaca

SEQ ID NO: 1322997 - RNA, 19 nt, Artificial Sequence
  Description of Artificial Sequence: Synthetic oligonucleotide
gugccagcgaagucauacu

SEQ ID NO: 1322998 - RNA, 19 nt, Artificial Sequence
  Description of Artificial Sequence: Synthetic oligonucleotide
cguggauagugccagaccu

SEQ ID NO: 1322999 - RNA, 19 nt, Artificial Sequence
  Description of Artificial Sequence: Synthetic oligonucleotide
gcaccggaggcggaaguug

SEQ ID NO: 1323000 - RNA, 19 nt, Artificial Sequence
  Description of Artificial Sequence: Synthetic oligonucleotide
gggcaauauuggacugucc

SEQ ID NO: 1323001 - RNA, 19 nt, Artificial Sequence
  Description of Artificial Sequence: Synthetic oligonucleotide
cccgauauaggaggaccug

SEQ ID NO: 1323002 - RNA, 19 nt, Artificial Sequence
  Description of Artificial Sequence: Synthetic oligonucleotide
ugccugccacagccuuggc

SEQ ID NO: 1323003 - RNA, 19 nt, Artificial Sequence
  Description of Artificial Sequence: Synthetic oligonucleotide
ggggcauugaagugccacu

SEQ ID NO: 1323004 - RNA, 19 nt, Artificial Sequence
  Description of Artificial Sequence: Synthetic oligonucleotide
gggugcucucccagcgugg

SEQ ID NO: 1323005 - RNA, 19 nt, Artificial Sequence
  Description of Artificial Sequence: Synthetic oligonucleotide
ccgcugcauagccuacugg

SEQ ID NO: 1323006 - RNA, 19 nt, Artificial Sequence
  Description of Artificial Sequence: Synthetic oligonucleotide
cugucaccaaaaggccuga

SEQ ID NO: 1323007 - RNA, 19 nt, Artificial Sequence
  Description of Artificial Sequence: Synthetic oligonucleotide
gacguuuaguaagcucuuu

SEQ ID NO: 1323008 - RNA, 19 nt, Artificial Sequence
  Description of Artificial Sequence: Synthetic oligonucleotide
cagucuccucuaacacaga

SEQ ID NO: 1323009 - RNA, 19 nt, Artificial Sequence
  Description of Artificial Sequence: Synthetic oligonucleotide
ccuccgcaggcuaucuauc

SEQ ID NO: 1323010 - RNA, 19 nt, Artificial Sequence
  Description of Artificial Sequence: Synthetic oligonucleotide
gcgagcgccuaugcggaag

SEQ ID NO: 1323011 - RNA, 19 nt, Artificial Sequence
  Description of Artificial Sequence: Synthetic oligonucleotide
caguuuguuucucguggau

SEQ ID NO: 1323012 - RNA, 19 nt, Artificial Sequence
  Description of Artificial Sequence: Synthetic oligonucleotide
acacgcgggucggggucgg

SEQ ID NO: 1323013 - RNA, 19 nt, Artificial Sequence
  Description of Artificial Sequence: Synthetic oligonucleotide
accggaggcggaaguugca

SEQ ID NO: 1323014 - RNA, 19 nt, Artificial Sequence
  Description of Artificial Sequence: Synthetic oligonucleotide
gaccuccgcaggcuaucua

SEQ ID NO: 1323015 - RNA, 19 nt, Artificial Sequence
  Description of Artificial Sequence: Synthetic oligonucleotide
gccuaugcggaagcugcac

SEQ ID NO: 1323016 - RNA, 19 nt, Artificial Sequence
  Description of Artificial Sequence: Synthetic oligonucleotide
ggugccaaucaguccggcu

SEQ ID NO: 1323017 - RNA, 19 nt, Artificial Sequence
  Description of Artificial Sequence: Synthetic oligonucleotide
agcgagcgccuaugcggaa

SEQ ID NO: 1323018 - RNA, 19 nt, Artificial Sequence
  Description of Artificial Sequence: Synthetic oligonucleotide
cgagcgccuaugcggaagc

SEQ ID NO: 1323019 - RNA, 19 nt, Artificial Sequence
  Description of Artificial Sequence: Synthetic oligonucleotide
gcacacgcgggucgggguc

SEQ ID NO: 1323020 - RNA, 19 nt, Artificial Sequence
  Description of Artificial Sequence: Synthetic oligonucleotide
gcauagccuacuggcugug

SEQ ID NO: 1323021 - RNA, 19 nt, Artificial Sequence
  Description of Artificial Sequence: Synthetic oligonucleotide
gguccagcgucguaaucau

SEQ ID NO: 1323022 - RNA, 19 nt, Artificial Sequence
  Description of Artificial Sequence: Synthetic oligonucleotide
cagcgaagucauacuggcu

SEQ ID NO: 1323023 - RNA, 19 nt, Artificial Sequence
  Description of Artificial Sequence: Synthetic oligonucleotide
cccagcguggccccucgug

SEQ ID NO: 1323024 - RNA, 19 nt, Artificial Sequence
  Description of Artificial Sequence: Synthetic oligonucleotide
gcgucguaaucaugcucuc

SEQ ID NO: 1323025 - RNA, 19 nt, Artificial Sequence
  Description of Artificial Sequence: Synthetic oligonucleotide
auccguuccugggcacccu

SEQ ID NO: 1323026 - RNA, 19 nt, Artificial Sequence
  Description of Artificial Sequence: Synthetic oligonucleotide
caccuccagauuugaugua

SEQ ID NO: 1323027 - RNA, 19 nt, Artificial Sequence
  Description of Artificial Sequence: Synthetic oligonucleotide
ccagcguggccccucguga

SEQ ID NO: 1323028 - RNA, 19 nt, Artificial Sequence
  Description of Artificial Sequence: Synthetic oligonucleotide
cuaguaauucuaggaucuu

SEQ ID NO: 1323029 - RNA, 19 nt, Artificial Sequence
  Description of Artificial Sequence: Synthetic oligonucleotide
ggccccucgugauaucaua

SEQ ID NO: 1323030 - RNA, 19 nt, Artificial Sequence
  Description of Artificial Sequence: Synthetic oligonucleotide
ggccugaccaccucagauu

SEQ ID NO: 1323031 - RNA, 19 nt, Artificial Sequence
  Description of Artificial Sequence: Synthetic oligonucleotide
gccuacuggcuguggggca

SEQ ID NO: 1323032 - RNA, 19 nt, Artificial Sequence
  Description of Artificial Sequence: Synthetic oligonucleotide
cagcucagcgaugaaguuu

SEQ ID NO: 1323033 - RNA, 19 nt, Artificial Sequence
  Description of Artificial Sequence: Synthetic oligonucleotide
cguaaucaugcucucuacu

SEQ ID NO: 1323034 - RNA, 19 nt, Artificial Sequence
  Description of Artificial Sequence: Synthetic oligonucleotide
gaacuuccguggaggguau

SEQ ID NO: 1323035 - RNA, 19 nt, Artificial Sequence
  Description of Artificial Sequence: Synthetic oligonucleotide
cagggauggcugaggugua

SEQ ID NO: 1323036 - RNA, 19 nt, Artificial Sequence
  Description of Artificial Sequence: Synthetic oligonucleotide
gccccucgugauaucauaa

SEQ ID NO: 1323037 - RNA, 19 nt, Artificial Sequence
  Description of Artificial Sequence: Synthetic oligonucleotide
caaccaccaagcagccgau

SEQ ID NO: 1323038 - RNA, 19 nt, Artificial Sequence
  Description of Artificial Sequence: Synthetic oligonucleotide
guggcaggcgcugcuugua

SEQ ID NO: 1323039 - RNA, 19 nt, Artificial Sequence
  Description of Artificial Sequence: Synthetic oligonucleotide
ggcugacgugguuccaggu

SEQ ID NO: 1323040 - RNA, 19 nt, Artificial Sequence
  Description of Artificial Sequence: Synthetic oligonucleotide
ccccgauauaggaggaccu

SEQ ID NO: 1323041 - RNA, 19 nt, Artificial Sequence
  Description of Artificial Sequence: Synthetic oligonucleotide
caggguccagcgucguaau

SEQ ID NO: 1323042 - RNA, 19 nt, Artificial Sequence
  Description of Artificial Sequence: Synthetic oligonucleotide
gggcacccuuuaaucccgc

SEQ ID NO: 1323043 - RNA, 19 nt, Artificial Sequence
  Description of Artificial Sequence: Synthetic oligonucleotide
ccgcaggcuaucuauccgu

SEQ ID NO: 1323044 - RNA, 19 nt, Artificial Sequence
  Description of Artificial Sequence: Synthetic oligonucleotide
ccaguaggugcaucauccu

SEQ ID NO: 1323045 - RNA, 19 nt, Artificial Sequence
  Description of Artificial Sequence: Synthetic oligonucleotide
ggacugcagccuguaggaa

SEQ ID NO: 1323046 - RNA, 19 nt, Artificial Sequence
  Description of Artificial Sequence: Synthetic oligonucleotide
ggcacccuuuaaucccgcu

SEQ ID NO: 1323047 - RNA, 19 nt, Artificial Sequence
  Description of Artificial Sequence: Synthetic oligonucleotide
gagcgccuaugcggaagcu

SEQ ID NO: 1323048 - RNA, 19 nt, Artificial Sequence
  Description of Artificial Sequence: Synthetic oligonucleotide
cagcguggccccucgugau

SEQ ID NO: 1323049 - RNA, 19 nt, Artificial Sequence
  Description of Artificial Sequence: Synthetic oligonucleotide
ccagcgucguaaucaugcu

SEQ ID NO: 1323050 - RNA, 19 nt, Artificial Sequence
  Description of Artificial Sequence: Synthetic oligonucleotide
ccagguggaguugucucua

SEQ ID NO: 1323051 - RNA, 19 nt, Artificial Sequence
  Description of Artificial Sequence: Synthetic oligonucleotide
ggcugacguuuaguaagcu

SEQ ID NO: 1323052 - RNA, 19 nt, Artificial Sequence
  Description of Artificial Sequence: Synthetic oligonucleotide
gcgagacaugccagugaaa

SEQ ID NO: 1323053 - RNA, 19 nt, Artificial Sequence
  Description of Artificial Sequence: Synthetic oligonucleotide
gguccgagcgagcgccuau

SEQ ID NO: 1323054 - RNA, 19 nt, Artificial Sequence
  Description of Artificial Sequence: Synthetic oligonucleotide
ccguggaggguaugguagu

SEQ ID NO: 1323055 - RNA, 19 nt, Artificial Sequence
  Description of Artificial Sequence: Synthetic oligonucleotide
gcucagcgaugaaguuuuc

SEQ ID NO: 1323056 - RNA, 19 nt, Artificial Sequence
  Description of Artificial Sequence: Synthetic oligonucleotide
cgccuaugcggaagcugca

SEQ ID NO: 1323057 - RNA, 19 nt, Artificial Sequence
  Description of Artificial Sequence: Synthetic oligonucleotide
gccaggguccagcgucgua

SEQ ID NO: 1323058 - RNA, 19 nt, Artificial Sequence
  Description of Artificial Sequence: Synthetic oligonucleotide
gggaaccgagggagcugga

SEQ ID NO: 1323059 - RNA, 19 nt, Artificial Sequence
  Description of Artificial Sequence: Synthetic oligonucleotide
cgcaggcuaucuauccguu

SEQ ID NO: 1323060 - RNA, 19 nt, Artificial Sequence
  Description of Artificial Sequence: Synthetic oligonucleotide
ugugauuucaaauuuauug

SEQ ID NO: 1323061 - RNA, 19 nt, Artificial Sequence
  Description of Artificial Sequence: Synthetic oligonucleotide
ugaauuaccauguugcgcg

SEQ ID NO: 1323062 - RNA, 19 nt, Artificial Sequence
  Description of Artificial Sequence: Synthetic oligonucleotide
ucuguuauagccaaaagcu

SEQ ID NO: 1323063 - RNA, 19 nt, Artificial Sequence
  Description of Artificial Sequence: Synthetic oligonucleotide
uaaagcauagacuacauga

SEQ ID NO: 1323064 - RNA, 19 nt, Artificial Sequence
  Description of Artificial Sequence: Synthetic oligonucleotide
aaauaagauaucuggaucu

SEQ ID NO: 1323065 - RNA, 19 nt, Artificial Sequence
  Description of Artificial Sequence: Synthetic oligonucleotide
auuuauugauaucaggagg

SEQ ID NO: 1323066 - RNA, 19 nt, Artificial Sequence
  Description of Artificial Sequence: Synthetic oligonucleotide
gaaaugauauuaaacaucc

SEQ ID NO: 1323067 - RNA, 19 nt, Artificial Sequence
  Description of Artificial Sequence: Synthetic oligonucleotide
ugugauaaagcauagacua

SEQ ID NO: 1323068 - RNA, 19 nt, Artificial Sequence
  Description of Artificial Sequence: Synthetic oligonucleotide
ugagcuacaacaaaucuca

SEQ ID NO: 1323069 - RNA, 19 nt, Artificial Sequence
  Description of Artificial Sequence: Synthetic oligonucleotide
aguaaaguguuuuacuggg

SEQ ID NO: 1323070 - RNA, 19 nt, Artificial Sequence
  Description of Artificial Sequence: Synthetic oligonucleotide
uguaaaacaaggcugcuga

SEQ ID NO: 1323071 - RNA, 19 nt, Artificial Sequence
  Description of Artificial Sequence: Synthetic oligonucleotide
uucguaaacugcaaaaugc

SEQ ID NO: 1323072 - RNA, 19 nt, Artificial Sequence
  Description of Artificial Sequence: Synthetic oligonucleotide
aaagugcugaacuacuauc

SEQ ID NO: 1323073 - RNA, 19 nt, Artificial Sequence
  Description of Artificial Sequence: Synthetic oligonucleotide
aauauggauuaguaaagug

SEQ ID NO: 1323074 - RNA, 19 nt, Artificial Sequence
  Description of Artificial Sequence: Synthetic oligonucleotide
agugaugugaauuaccaug

SEQ ID NO: 1323075 - RNA, 19 nt, Artificial Sequence
  Description of Artificial Sequence: Synthetic oligonucleotide
aacaacaacgauucaagcu

SEQ ID NO: 1323076 - RNA, 19 nt, Artificial Sequence
  Description of Artificial Sequence: Synthetic oligonucleotide
auagacuacaugaaguucc

SEQ ID NO: 1323077 - RNA, 19 nt, Artificial Sequence
  Description of Artificial Sequence: Synthetic oligonucleotide
ugcauaacaacaacgauuc

SEQ ID NO: 1323078 - RNA, 19 nt, Artificial Sequence
  Description of Artificial Sequence: Synthetic oligonucleotide
uaaaguguuuuacugggag

SEQ ID NO: 1323079 - RNA, 19 nt, Artificial Sequence
  Description of Artificial Sequence: Synthetic oligonucleotide
ucaauauguaaaacaaggc

SEQ ID NO: 1323080 - RNA, 19 nt, Artificial Sequence
  Description of Artificial Sequence: Synthetic oligonucleotide
gaucaugcgauguuuauug

SEQ ID NO: 1323081 - RNA, 19 nt, Artificial Sequence
  Description of Artificial Sequence: Synthetic oligonucleotide
acaacucuuguucucaugg

SEQ ID NO: 1323082 - RNA, 19 nt, Artificial Sequence
  Description of Artificial Sequence: Synthetic oligonucleotide
auauguaaaacaaggcugc

SEQ ID NO: 1323083 - RNA, 19 nt, Artificial Sequence
  Description of Artificial Sequence: Synthetic oligonucleotide
aauuaguguucacaucuuc

SEQ ID NO: 1323084 - RNA, 19 nt, Artificial Sequence
  Description of Artificial Sequence: Synthetic oligonucleotide
aacugaauauuuucuccac

SEQ ID NO: 1323085 - RNA, 19 nt, Artificial Sequence
  Description of Artificial Sequence: Synthetic oligonucleotide
ucuaaaacaugaucaugcg

SEQ ID NO: 1323086 - RNA, 19 nt, Artificial Sequence
  Description of Artificial Sequence: Synthetic oligonucleotide
uuauuuguaggccacuuac

SEQ ID NO: 1323087 - RNA, 19 nt, Artificial Sequence
  Description of Artificial Sequence: Synthetic oligonucleotide
acauacaugugauaaagca

SEQ ID NO: 1323088 - RNA, 19 nt, Artificial Sequence
  Description of Artificial Sequence: Synthetic oligonucleotide
uguaguauaagcucuuuaa

SEQ ID NO: 1323089 - RNA, 19 nt, Artificial Sequence
  Description of Artificial Sequence: Synthetic oligonucleotide
gauguuacaauauggauua

SEQ ID NO: 1323090 - RNA, 19 nt, Artificial Sequence
  Description of Artificial Sequence: Synthetic oligonucleotide
uuucguaaacugcaaaaug

SEQ ID NO: 1323091 - RNA, 19 nt, Artificial Sequence
  Description of Artificial Sequence: Synthetic oligonucleotide
cucucugucauuuagugug

SEQ ID NO: 1323092 - RNA, 19 nt, Artificial Sequence
  Description of Artificial Sequence: Synthetic oligonucleotide
uguuguagcucgaaauagg

SEQ ID NO: 1323093 - RNA, 19 nt, Artificial Sequence
  Description of Artificial Sequence: Synthetic oligonucleotide
aaauggauugacaccuucc

SEQ ID NO: 1323094 - RNA, 19 nt, Artificial Sequence
  Description of Artificial Sequence: Synthetic oligonucleotide
uuuuguaaccugcucaacu

SEQ ID NO: 1323095 - RNA, 19 nt, Artificial Sequence
  Description of Artificial Sequence: Synthetic oligonucleotide
acgcuauucaaguagaugu

SEQ ID NO: 1323096 - RNA, 19 nt, Artificial Sequence
  Description of Artificial Sequence: Synthetic oligonucleotide
uaaacugcaaaaugcuugc

SEQ ID NO: 1323097 - RNA, 19 nt, Artificial Sequence
  Description of Artificial Sequence: Synthetic oligonucleotide
aaguaaaagauguaauguu

SEQ ID NO: 1323098 - RNA, 19 nt, Artificial Sequence
  Description of Artificial Sequence: Synthetic oligonucleotide
ucuccugcaaaguaaaaga

SEQ ID NO: 1323099 - RNA, 19 nt, Artificial Sequence
  Description of Artificial Sequence: Synthetic oligonucleotide
uauaagcucuuuaaauuca

SEQ ID NO: 1323100 - RNA, 19 nt, Artificial Sequence
  Description of Artificial Sequence: Synthetic oligonucleotide
cucgaaauaggguaguggc

SEQ ID NO: 1323101 - RNA, 19 nt, Artificial Sequence
  Description of Artificial Sequence: Synthetic oligonucleotide
uuccuauagaguaucgugc

SEQ ID NO: 1323102 - RNA, 19 nt, Artificial Sequence
  Description of Artificial Sequence: Synthetic oligonucleotide
uuggacgcuauucaaguag

SEQ ID NO: 1323103 - RNA, 19 nt, Artificial Sequence
  Description of Artificial Sequence: Synthetic oligonucleotide
uccuuuuguaguauaagcu

SEQ ID NO: 1323104 - RNA, 19 nt, Artificial Sequence
  Description of Artificial Sequence: Synthetic oligonucleotide
caugguguuauuuguaggc

SEQ ID NO: 1323105 - RNA, 19 nt, Artificial Sequence
  Description of Artificial Sequence: Synthetic oligonucleotide
uuuguaaccugcucaacug

SEQ ID NO: 1323106 - RNA, 19 nt, Artificial Sequence
  Description of Artificial Sequence: Synthetic oligonucleotide
uauaugggagcugagaaga

SEQ ID NO: 1323107 - RNA, 19 nt, Artificial Sequence
  Description of Artificial Sequence: Synthetic oligonucleotide
uguagcucgaaauagggua

SEQ ID NO: 1323108 - RNA, 19 nt, Artificial Sequence
  Description of Artificial Sequence: Synthetic oligonucleotide
ugugaauuaccauguugcg

SEQ ID NO: 1323109 - RNA, 19 nt, Artificial Sequence
  Description of Artificial Sequence: Synthetic oligonucleotide
auugacaccuuccauauaa

SEQ ID NO: 1323110 - RNA, 19 nt, Artificial Sequence
  Description of Artificial Sequence: Synthetic oligonucleotide
auuaccauguugcgcgugc

SEQ ID NO: 1323111 - RNA, 19 nt, Artificial Sequence
  Description of Artificial Sequence: Synthetic oligonucleotide
aguauaagcucuuuaaauu

SEQ ID NO: 1323112 - RNA, 19 nt, Artificial Sequence
  Description of Artificial Sequence: Synthetic oligonucleotide
uucaaugcccuuuaguggu

SEQ ID NO: 1323113 - RNA, 19 nt, Artificial Sequence
  Description of Artificial Sequence: Synthetic oligonucleotide
uguaauguucuucacuaaa

SEQ ID NO: 1323114 - RNA, 19 nt, Artificial Sequence
  Description of Artificial Sequence: Synthetic oligonucleotide
uauuagauguccccggacu

SEQ ID NO: 1323115 - RNA, 19 nt, Artificial Sequence
  Description of Artificial Sequence: Synthetic oligonucleotide
gauguaauguucuucacua

SEQ ID NO: 1323116 - RNA, 19 nt, Artificial Sequence
  Description of Artificial Sequence: Synthetic oligonucleotide
uacauucccaaguucaucu

SEQ ID NO: 1323117 - RNA, 19 nt, Artificial Sequence
  Description of Artificial Sequence: Synthetic oligonucleotide
acuaaugucaguguucuug

SEQ ID NO: 1323118 - RNA, 19 nt, Artificial Sequence
  Description of Artificial Sequence: Synthetic oligonucleotide
uagcaaguguuguagcucg

SEQ ID NO: 1323119 - RNA, 19 nt, Artificial Sequence
  Description of Artificial Sequence: Synthetic oligonucleotide
uugcuuuugauaaauggau

SEQ ID NO: 1323120 - RNA, 19 nt, Artificial Sequence
  Description of Artificial Sequence: Synthetic oligonucleotide
gaagaaaccauucaucugu

SEQ ID NO: 1323121 - RNA, 19 nt, Artificial Sequence
  Description of Artificial Sequence: Synthetic oligonucleotide
uuccuuagcuccaaauucc

SEQ ID NO: 1323122 - RNA, 19 nt, Artificial Sequence
  Description of Artificial Sequence: Synthetic oligonucleotide
uuguaggccacuuacgcug

SEQ ID NO: 1323123 - RNA, 19 nt, Artificial Sequence
  Description of Artificial Sequence: Synthetic oligonucleotide
uucauauacugcuccauca

SEQ ID NO: 1323124 - RNA, 19 nt, Artificial Sequence
  Description of Artificial Sequence: Synthetic oligonucleotide
gucaguucuagaauguucg

SEQ ID NO: 1323125 - RNA, 19 nt, Artificial Sequence
  Description of Artificial Sequence: Synthetic oligonucleotide
cuauagaguaucgugcucg

SEQ ID NO: 1323126 - RNA, 19 nt, Artificial Sequence
  Description of Artificial Sequence: Synthetic oligonucleotide
agcaaagacauagugaugu

SEQ ID NO: 1323127 - RNA, 19 nt, Artificial Sequence
  Description of Artificial Sequence: Synthetic oligonucleotide
acuguacucuucuucuggc

SEQ ID NO: 1323128 - RNA, 19 nt, Artificial Sequence
  Description of Artificial Sequence: Synthetic oligonucleotide
cuuuagugguauaugggag

SEQ ID NO: 1323129 - RNA, 19 nt, Artificial Sequence
  Description of Artificial Sequence: Synthetic oligonucleotide
uuugauggacuuaacucac

SEQ ID NO: 1323130 - RNA, 19 nt, Artificial Sequence
  Description of Artificial Sequence: Synthetic oligonucleotide
gaauguucgguaguguccg

SEQ ID NO: 1323131 - RNA, 19 nt, Artificial Sequence
  Description of Artificial Sequence: Synthetic oligonucleotide
uagaguaucgugcucgaac

SEQ ID NO: 1323132 - RNA, 19 nt, Artificial Sequence
  Description of Artificial Sequence: Synthetic oligonucleotide
aaguguuguagcucgaaau

SEQ ID NO: 1323133 - RNA, 19 nt, Artificial Sequence
  Description of Artificial Sequence: Synthetic oligonucleotide
guauaagcucuuuaaauuc

SEQ ID NO: 1323134 - RNA, 19 nt, Artificial Sequence
  Description of Artificial Sequence: Synthetic oligonucleotide
ucuugcagcaauaggagau

SEQ ID NO: 1323135 - RNA, 19 nt, Artificial Sequence
  Description of Artificial Sequence: Synthetic oligonucleotide
gaaaguauguucaauaggu

SEQ ID NO: 1323136 - RNA, 19 nt, Artificial Sequence
  Description of Artificial Sequence: Synthetic oligonucleotide
ugcaaaguaaaagauguaa

SEQ ID NO: 1323137 - RNA, 19 nt, Artificial Sequence
  Description of Artificial Sequence: Synthetic oligonucleotide
gguucaaugcccuuuagug

SEQ ID NO: 1323138 - RNA, 19 nt, Artificial Sequence
  Description of Artificial Sequence: Synthetic oligonucleotide
uuuauuagauguccccgga

SEQ ID NO: 1323139 - RNA, 19 nt, Artificial Sequence
  Description of Artificial Sequence: Synthetic oligonucleotide
caaauuguguggcaguggc

SEQ ID NO: 1323140 - RNA, 19 nt, Artificial Sequence
  Description of Artificial Sequence: Synthetic oligonucleotide
ucaugguguuauuuguagg

SEQ ID NO: 1323141 - RNA, 19 nt, Artificial Sequence
  Description of Artificial Sequence: Synthetic oligonucleotide
ucguaaacugcaaaaugcu

SEQ ID NO: 1323142 - RNA, 19 nt, Artificial Sequence
  Description of Artificial Sequence: Synthetic oligonucleotide
agaauguucgguagugucc

SEQ ID NO: 1323143 - RNA, 19 nt, Artificial Sequence
  Description of Artificial Sequence: Synthetic oligonucleotide
guaguguucggucuugucc

SEQ ID NO: 1323144 - RNA, 19 nt, Artificial Sequence
  Description of Artificial Sequence: Synthetic oligonucleotide
uguucaauaggugugcuaa

SEQ ID NO: 1323145 - RNA, 19 nt, Artificial Sequence
  Description of Artificial Sequence: Synthetic oligonucleotide
uaacucacaugacuguuug

SEQ ID NO: 1323146 - RNA, 19 nt, Artificial Sequence
  Description of Artificial Sequence: Synthetic oligonucleotide
auauggauuaguaaagugu

SEQ ID NO: 1323147 - RNA, 19 nt, Artificial Sequence
  Description of Artificial Sequence: Synthetic oligonucleotide
cauuaucuuuaaaauggag

SEQ ID NO: 1323148 - RNA, 19 nt, Artificial Sequence
  Description of Artificial Sequence: Synthetic oligonucleotide
uccauauaagguuccuuag

SEQ ID NO: 1323149 - RNA, 19 nt, Artificial Sequence
  Description of Artificial Sequence: Synthetic oligonucleotide
uguccggaaguucagguac

SEQ ID NO: 1323150 - RNA, 19 nt, Artificial Sequence
  Description of Artificial Sequence: Synthetic oligonucleotide
aacacaccaggcugcuacc

SEQ ID NO: 1323151 - RNA, 19 nt, Artificial Sequence
  Description of Artificial Sequence: Synthetic oligonucleotide
acaauauggauuaguaaag

SEQ ID NO: 1323152 - RNA, 19 nt, Artificial Sequence
  Description of Artificial Sequence: Synthetic oligonucleotide
aggaggaagaucaucaaag

SEQ ID NO: 1323153 - RNA, 19 nt, Artificial Sequence
  Description of Artificial Sequence: Synthetic oligonucleotide
agugugcauaacaacaacg

SEQ ID NO: 1323154 - RNA, 19 nt, Artificial Sequence
  Description of Artificial Sequence: Synthetic oligonucleotide
ugcuaagucacgagacagg

SEQ ID NO: 1323155 - RNA, 19 nt, Artificial Sequence
  Description of Artificial Sequence: Synthetic oligonucleotide
gaacugaauauuuucucca

SEQ ID NO: 1323156 - RNA, 19 nt, Artificial Sequence
  Description of Artificial Sequence: Synthetic oligonucleotide
aaagacauagugaugugaa

SEQ ID NO: 1323157 - RNA, 19 nt, Artificial Sequence
  Description of Artificial Sequence: Synthetic oligonucleotide
agauguaauguucuucacu

SEQ ID NO: 1323158 - RNA, 19 nt, Artificial Sequence
  Description of Artificial Sequence: Synthetic oligonucleotide
uauacugcuccaucaaggu

SEQ ID NO: 1323159 - RNA, 19 nt, Artificial Sequence
  Description of Artificial Sequence: Synthetic oligonucleotide
uucuccugcaaaguaaaag

SEQ ID NO: 1323160 - RNA, 19 nt, Artificial Sequence
  Description of Artificial Sequence: Synthetic oligonucleotide
uagcagggcagauaagccg

SEQ ID NO: 1323161 - RNA, 19 nt, Artificial Sequence
  Description of Artificial Sequence: Synthetic oligonucleotide
aguacaugcuguugugcac

SEQ ID NO: 1323162 - RNA, 19 nt, Artificial Sequence
  Description of Artificial Sequence: Synthetic oligonucleotide
uacuuggacgcuauucaag

SEQ ID NO: 1323163 - RNA, 19 nt, Artificial Sequence
  Description of Artificial Sequence: Synthetic oligonucleotide
aaaaccacuaacaacucuu

SEQ ID NO: 1323164 - RNA, 19 nt, Artificial Sequence
  Description of Artificial Sequence: Synthetic oligonucleotide
guuguagcucgaaauaggg

SEQ ID NO: 1323165 - RNA, 19 nt, Artificial Sequence
  Description of Artificial Sequence: Synthetic oligonucleotide
ugcuaaauuaguguucaca

SEQ ID NO: 1323166 - RNA, 19 nt, Artificial Sequence
  Description of Artificial Sequence: Synthetic oligonucleotide
uaguguucggucuugucca

SEQ ID NO: 1323167 - RNA, 19 nt, Artificial Sequence
  Description of Artificial Sequence: Synthetic oligonucleotide
ucuuccauacuuaucucuc

SEQ ID NO: 1323168 - RNA, 19 nt, Artificial Sequence
  Description of Artificial Sequence: Synthetic oligonucleotide
ugucauuuagugugcauaa

SEQ ID NO: 1323169 - RNA, 19 nt, Artificial Sequence
  Description of Artificial Sequence: Synthetic oligonucleotide
ugagugugauuucaaauuu

SEQ ID NO: 1323170 - RNA, 19 nt, Artificial Sequence
  Description of Artificial Sequence: Synthetic oligonucleotide
uaggugugcuaaauuagug

SEQ ID NO: 1323171 - RNA, 19 nt, Artificial Sequence
  Description of Artificial Sequence: Synthetic oligonucleotide
agaguaucgugcucgaaca

SEQ ID NO: 1323172 - RNA, 19 nt, Artificial Sequence
  Description of Artificial Sequence: Synthetic oligonucleotide
gaaggcguuuauuagaugu

SEQ ID NO: 1323173 - RNA, 19 nt, Artificial Sequence
  Description of Artificial Sequence: Synthetic oligonucleotide
uaacaacaacgauucaagc

SEQ ID NO: 1323174 - RNA, 19 nt, Artificial Sequence
  Description of Artificial Sequence: Synthetic oligonucleotide
ucaagguacuagcaagugu

SEQ ID NO: 1323175 - RNA, 19 nt, Artificial Sequence
  Description of Artificial Sequence: Synthetic oligonucleotide
uugugcaccacgcucauua

SEQ ID NO: 1323176 - RNA, 19 nt, Artificial Sequence
  Description of Artificial Sequence: Synthetic oligonucleotide
caugcuguugugcaccacg

SEQ ID NO: 1323177 - RNA, 19 nt, Artificial Sequence
  Description of Artificial Sequence: Synthetic oligonucleotide
uauugauaucaggaggaag

SEQ ID NO: 1323178 - RNA, 19 nt, Artificial Sequence
  Description of Artificial Sequence: Synthetic oligonucleotide
caacgcauaaauaagauau

SEQ ID NO: 1323179 - RNA, 19 nt, Artificial Sequence
  Description of Artificial Sequence: Synthetic oligonucleotide
agauaagccgaagaaaaca

SEQ ID NO: 1323180 - RNA, 19 nt, Artificial Sequence
  Description of Artificial Sequence: Synthetic oligonucleotide
acuuggacgcuauucaagu

SEQ ID NO: 1323181 - RNA, 19 nt, Artificial Sequence
  Description of Artificial Sequence: Synthetic oligonucleotide
augagcuacaacaaaucuc

SEQ ID NO: 1323182 - RNA, 19 nt, Artificial Sequence
  Description of Artificial Sequence: Synthetic oligonucleotide
aucaugcgauguuuauugc

SEQ ID NO: 1323183 - RNA, 19 nt, Artificial Sequence
  Description of Artificial Sequence: Synthetic oligonucleotide
aaaguauguucaauaggug

SEQ ID NO: 1323184 - RNA, 19 nt, Artificial Sequence
  Description of Artificial Sequence: Synthetic oligonucleotide
agcuccaaauuccacaaga

SEQ ID NO: 1323185 - RNA, 19 nt, Artificial Sequence
  Description of Artificial Sequence: Synthetic oligonucleotide
guauaugggagcugagaag

SEQ ID NO: 1323186 - RNA, 19 nt, Artificial Sequence
  Description of Artificial Sequence: Synthetic oligonucleotide
ugacgaaggcguuuauuag

SEQ ID NO: 1323187 - RNA, 19 nt, Artificial Sequence
  Description of Artificial Sequence: Synthetic oligonucleotide
aggcguuuauuagaugucc

SEQ ID NO: 1323188 - RNA, 19 nt, Artificial Sequence
  Description of Artificial Sequence: Synthetic oligonucleotide
aggauagcagggcagauaa

SEQ ID NO: 1323189 - RNA, 19 nt, Artificial Sequence
  Description of Artificial Sequence: Synthetic oligonucleotide
ucgugcucgaacacgcagg

SEQ ID NO: 1323190 - RNA, 19 nt, Artificial Sequence
  Description of Artificial Sequence: Synthetic oligonucleotide
uggcaacgcauaaauaaga

SEQ ID NO: 1323191 - RNA, 19 nt, Artificial Sequence
  Description of Artificial Sequence: Synthetic oligonucleotide
cuggcaacgcauaaauaag

SEQ ID NO: 1323192 - RNA, 19 nt, Artificial Sequence
  Description of Artificial Sequence: Synthetic oligonucleotide
gacuuuagccacuaauguc

SEQ ID NO: 1323193 - RNA, 19 nt, Artificial Sequence
  Description of Artificial Sequence: Synthetic oligonucleotide
uccuauagaguaucgugcu

SEQ ID NO: 1323194 - RNA, 19 nt, Artificial Sequence
  Description of Artificial Sequence: Synthetic oligonucleotide
acuagcaaguguuguagcu

SEQ ID NO: 1323195 - RNA, 19 nt, Artificial Sequence
  Description of Artificial Sequence: Synthetic oligonucleotide
ucauauacugcuccaucaa

SEQ ID NO: 1323196 - RNA, 19 nt, Artificial Sequence
  Description of Artificial Sequence: Synthetic oligonucleotide
aguggcuuucauauacugc

SEQ ID NO: 1323197 - RNA, 19 nt, Artificial Sequence
  Description of Artificial Sequence: Synthetic oligonucleotide
auagugaugugaauuacca

SEQ ID NO: 1323198 - RNA, 19 nt, Artificial Sequence
  Description of Artificial Sequence: Synthetic oligonucleotide
aauuguguggcaguggcuu

SEQ ID NO: 1323199 - RNA, 19 nt, Artificial Sequence
  Description of Artificial Sequence: Synthetic oligonucleotide
uuuucguaaacugcaaaau

SEQ ID NO: 1323200 - RNA, 19 nt, Artificial Sequence
  Description of Artificial Sequence: Synthetic oligonucleotide
aguaucgugcucgaacacg

SEQ ID NO: 1323201 - RNA, 19 nt, Artificial Sequence
  Description of Artificial Sequence: Synthetic oligonucleotide
uaucuuuaaaauggagucu

SEQ ID NO: 1323202 - RNA, 19 nt, Artificial Sequence
  Description of Artificial Sequence: Synthetic oligonucleotide
uagaauguucgguaguguc

SEQ ID NO: 1323203 - RNA, 19 nt, Artificial Sequence
  Description of Artificial Sequence: Synthetic oligonucleotide
cuuagcuccaaauuccaca

SEQ ID NO: 1323204 - RNA, 19 nt, Artificial Sequence
  Description of Artificial Sequence: Synthetic oligonucleotide
ugugcauaacaacaacgau

SEQ ID NO: 1323205 - RNA, 19 nt, Artificial Sequence
  Description of Artificial Sequence: Synthetic oligonucleotide
aguguucucaguucaucug

SEQ ID NO: 1323206 - RNA, 19 nt, Artificial Sequence
  Description of Artificial Sequence: Synthetic oligonucleotide
aacaacucuuguucucaug

SEQ ID NO: 1323207 - RNA, 19 nt, Artificial Sequence
  Description of Artificial Sequence: Synthetic oligonucleotide
aagugcugaacuacuaucu

SEQ ID NO: 1323208 - RNA, 19 nt, Artificial Sequence
  Description of Artificial Sequence: Synthetic oligonucleotide
cugaacugaauauuuucuc

SEQ ID NO: 1323209 - RNA, 19 nt, Artificial Sequence
  Description of Artificial Sequence: Synthetic oligonucleotide
auaagcucuuuaaauucac

SEQ ID NO: 1323210 - RNA, 19 nt, Artificial Sequence
  Description of Artificial Sequence: Synthetic oligonucleotide
uucgguaguguccggaagu

SEQ ID NO: 1323211 - RNA, 19 nt, Artificial Sequence
  Description of Artificial Sequence: Synthetic oligonucleotide
aaagcauagacuacaugaa

SEQ ID NO: 1323212 - RNA, 19 nt, Artificial Sequence
  Description of Artificial Sequence: Synthetic oligonucleotide
aggugugcuaaauuagugu

SEQ ID NO: 1323213 - RNA, 19 nt, Artificial Sequence
  Description of Artificial Sequence: Synthetic oligonucleotide
uuuguaggccacuuacgcu

SEQ ID NO: 1323214 - RNA, 19 nt, Artificial Sequence
  Description of Artificial Sequence: Synthetic oligonucleotide
ugcagcaauaggagauggg

SEQ ID NO: 1323215 - RNA, 19 nt, Artificial Sequence
  Description of Artificial Sequence: Synthetic oligonucleotide
uuauuagauguccccggac

SEQ ID NO: 1323216 - RNA, 19 nt, Artificial Sequence
  Description of Artificial Sequence: Synthetic oligonucleotide
aacauccgaggacucagga

SEQ ID NO: 1323217 - RNA, 19 nt, Artificial Sequence
  Description of Artificial Sequence: Synthetic oligonucleotide
agaaaccauucaucugugg

SEQ ID NO: 1323218 - RNA, 19 nt, Artificial Sequence
  Description of Artificial Sequence: Synthetic oligonucleotide
gacauagugaugugaauua

SEQ ID NO: 1323219 - RNA, 19 nt, Artificial Sequence
  Description of Artificial Sequence: Synthetic oligonucleotide
ucauuacugaguguucuca

SEQ ID NO: 1323220 - RNA, 19 nt, Artificial Sequence
  Description of Artificial Sequence: Synthetic oligonucleotide
acuuaacucacaugacugu

SEQ ID NO: 1323221 - RNA, 19 nt, Artificial Sequence
  Description of Artificial Sequence: Synthetic oligonucleotide
ucgaaauaggguaguggcu

SEQ ID NO: 1323222 - RNA, 19 nt, Artificial Sequence
  Description of Artificial Sequence: Synthetic oligonucleotide
cauuacugaguguucucag

SEQ ID NO: 1323223 - RNA, 19 nt, Artificial Sequence
  Description of Artificial Sequence: Synthetic oligonucleotide
acucacaugacuguuugcu

SEQ ID NO: 1323224 - RNA, 19 nt, Artificial Sequence
  Description of Artificial Sequence: Synthetic oligonucleotide
guacuagcaaguguuguag

SEQ ID NO: 1323225 - RNA, 19 nt, Artificial Sequence
  Description of Artificial Sequence: Synthetic oligonucleotide
acgcauaaauaagauaucu

SEQ ID NO: 1323226 - RNA, 19 nt, Artificial Sequence
  Description of Artificial Sequence: Synthetic oligonucleotide
agugcugaacuacuaucug

SEQ ID NO: 1323227 - RNA, 19 nt, Artificial Sequence
  Description of Artificial Sequence: Synthetic oligonucleotide
gacgaaggcguuuauuaga

SEQ ID NO: 1323228 - RNA, 19 nt, Artificial Sequence
  Description of Artificial Sequence: Synthetic oligonucleotide
uggggaaucugaaaugaua

SEQ ID NO: 1323229 - RNA, 19 nt, Artificial Sequence
  Description of Artificial Sequence: Synthetic oligonucleotide
acuuacgcugaacugaaua

SEQ ID NO: 1323230 - RNA, 19 nt, Artificial Sequence
  Description of Artificial Sequence: Synthetic oligonucleotide
acgauucaagcuuuucaug

SEQ ID NO: 1323231 - RNA, 19 nt, Artificial Sequence
  Description of Artificial Sequence: Synthetic oligonucleotide
uggacgcuauucaaguaga

SEQ ID NO: 1323232 - RNA, 19 nt, Artificial Sequence
  Description of Artificial Sequence: Synthetic oligonucleotide
agcauggugaacaaauugu

SEQ ID NO: 1323233 - RNA, 19 nt, Artificial Sequence
  Description of Artificial Sequence: Synthetic oligonucleotide
uuaacucacaugacuguuu

SEQ ID NO: 1323234 - RNA, 19 nt, Artificial Sequence
  Description of Artificial Sequence: Synthetic oligonucleotide
gaaugagcuacaacaaauc

SEQ ID NO: 1323235 - RNA, 19 nt, Artificial Sequence
  Description of Artificial Sequence: Synthetic oligonucleotide
ugcucaacuggcaacgcau

SEQ ID NO: 1323236 - RNA, 19 nt, Artificial Sequence
  Description of Artificial Sequence: Synthetic oligonucleotide
ugcuuuugauaaauggauu

SEQ ID NO: 1323237 - RNA, 19 nt, Artificial Sequence
  Description of Artificial Sequence: Synthetic oligonucleotide
aauguucgguaguguccgg

SEQ ID NO: 1323238 - RNA, 19 nt, Artificial Sequence
  Description of Artificial Sequence: Synthetic oligonucleotide
uguugcgcgugcugaaucc

SEQ ID NO: 1323239 - RNA, 19 nt, Artificial Sequence
  Description of Artificial Sequence: Synthetic oligonucleotide
uuguagcucgaaauagggu

SEQ ID NO: 1323240 - RNA, 19 nt, Artificial Sequence
  Description of Artificial Sequence: Synthetic oligonucleotide
uagacuacaugaaguuccu

SEQ ID NO: 1323241 - RNA, 19 nt, Artificial Sequence
  Description of Artificial Sequence: Synthetic oligonucleotide
aauaagauaucuggaucuu

SEQ ID NO: 1323242 - RNA, 19 nt, Artificial Sequence
  Description of Artificial Sequence: Synthetic oligonucleotide
aaaccacuaacaacucuug

SEQ ID NO: 1323243 - RNA, 19 nt, Artificial Sequence
  Description of Artificial Sequence: Synthetic oligonucleotide
ucucugucauuuagugugc

SEQ ID NO: 1323244 - RNA, 19 nt, Artificial Sequence
  Description of Artificial Sequence: Synthetic oligonucleotide
uuugcuacuuggacgcuau

SEQ ID NO: 1323245 - RNA, 19 nt, Artificial Sequence
  Description of Artificial Sequence: Synthetic oligonucleotide
uauagaguaucgugcucga

SEQ ID NO: 1323246 - RNA, 19 nt, Artificial Sequence
  Description of Artificial Sequence: Synthetic oligonucleotide
uccuuagcuccaaauucca

SEQ ID NO: 1323247 - RNA, 19 nt, Artificial Sequence
  Description of Artificial Sequence: Synthetic oligonucleotide
guauguucaauaggugugc

SEQ ID NO: 1323248 - RNA, 19 nt, Artificial Sequence
  Description of Artificial Sequence: Synthetic oligonucleotide
gugaauuaccauguugcgc

SEQ ID NO: 1323249 - RNA, 19 nt, Artificial Sequence
  Description of Artificial Sequence: Synthetic oligonucleotide
uacuagcaaguguuguagc

SEQ ID NO: 1323250 - RNA, 19 nt, Artificial Sequence
  Description of Artificial Sequence: Synthetic oligonucleotide
acaaauuguguggcagugg

SEQ ID NO: 1323251 - RNA, 19 nt, Artificial Sequence
  Description of Artificial Sequence: Synthetic oligonucleotide
aaaugcuugcagaccuuuc

SEQ ID NO: 1323252 - RNA, 19 nt, Artificial Sequence
  Description of Artificial Sequence: Synthetic oligonucleotide
cauacuuaucucucuguca

SEQ ID NO: 1323253 - RNA, 19 nt, Artificial Sequence
  Description of Artificial Sequence: Synthetic oligonucleotide
cagauaagccgaagaaaac

SEQ ID NO: 1323254 - RNA, 19 nt, Artificial Sequence
  Description of Artificial Sequence: Synthetic oligonucleotide
augugauaaagcauagacu

SEQ ID NO: 1323255 - RNA, 19 nt, Artificial Sequence
  Description of Artificial Sequence: Synthetic oligonucleotide
aucgugcucgaacacgcag

SEQ ID NO: 1323256 - RNA, 19 nt, Artificial Sequence
  Description of Artificial Sequence: Synthetic oligonucleotide
cuaaaacaugaucaugcga

SEQ ID NO: 1323257 - RNA, 19 nt, Artificial Sequence
  Description of Artificial Sequence: Synthetic oligonucleotide
agacauagugaugugaauu

SEQ ID NO: 1323258 - RNA, 19 nt, Artificial Sequence
  Description of Artificial Sequence: Synthetic oligonucleotide
agguacauucccaaguuca

SEQ ID NO: 1323259 - RNA, 19 nt, Artificial Sequence
  Description of Artificial Sequence: Synthetic oligonucleotide
auguugcgcgugcugaauc

SEQ ID NO: 1323260 - RNA, 19 nt, Artificial Sequence
  Description of Artificial Sequence: Synthetic oligonucleotide
gauucaagcuuuucaugaa

SEQ ID NO: 1323261 - RNA, 19 nt, Artificial Sequence
  Description of Artificial Sequence: Synthetic oligonucleotide
ccgaagaaaacaaaaccac

SEQ ID NO: 1323262 - RNA, 19 nt, Artificial Sequence
  Description of Artificial Sequence: Synthetic oligonucleotide
guagcucgaaauaggguag

SEQ ID NO: 1323263 - RNA, 19 nt, Artificial Sequence
  Description of Artificial Sequence: Synthetic oligonucleotide
auaggguaguggcuucauc

SEQ ID NO: 1323264 - RNA, 19 nt, Artificial Sequence
  Description of Artificial Sequence: Synthetic oligonucleotide
uaccugacaucauugguuu

SEQ ID NO: 1323265 - RNA, 19 nt, Artificial Sequence
  Description of Artificial Sequence: Synthetic oligonucleotide
ucucucugucauuuagugu

SEQ ID NO: 1323266 - RNA, 19 nt, Artificial Sequence
  Description of Artificial Sequence: Synthetic oligonucleotide
uguucucaguucaucugaa

SEQ ID NO: 1323267 - RNA, 19 nt, Artificial Sequence
  Description of Artificial Sequence: Synthetic oligonucleotide
gcccuuuagugguauaugg

SEQ ID NO: 1323268 - RNA, 19 nt, Artificial Sequence
  Description of Artificial Sequence: Synthetic oligonucleotide
aagaaaccauucaucugug

SEQ ID NO: 1323269 - RNA, 19 nt, Artificial Sequence
  Description of Artificial Sequence: Synthetic oligonucleotide
cuuguccacauacauguga

SEQ ID NO: 1323270 - RNA, 19 nt, Artificial Sequence
  Description of Artificial Sequence: Synthetic oligonucleotide
ugcuggcuaguaguguucg

SEQ ID NO: 1323271 - RNA, 19 nt, Artificial Sequence
  Description of Artificial Sequence: Synthetic oligonucleotide
ccaucaagguacuagcaag

SEQ ID NO: 1323272 - RNA, 19 nt, Artificial Sequence
  Description of Artificial Sequence: Synthetic oligonucleotide
agggcagauaagccgaaga

SEQ ID NO: 1323273 - RNA, 19 nt, Artificial Sequence
  Description of Artificial Sequence: Synthetic oligonucleotide
ucacuaaagugcugaacua

SEQ ID NO: 1323274 - RNA, 19 nt, Artificial Sequence
  Description of Artificial Sequence: Synthetic oligonucleotide
guaucgugcucgaacacgc

SEQ ID NO: 1323275 - RNA, 19 nt, Artificial Sequence
  Description of Artificial Sequence: Synthetic oligonucleotide
auaggugugcuaaauuagu

SEQ ID NO: 1323276 - RNA, 19 nt, Artificial Sequence
  Description of Artificial Sequence: Synthetic oligonucleotide
ggcaguggcuuucauauac

SEQ ID NO: 1323277 - RNA, 19 nt, Artificial Sequence
  Description of Artificial Sequence: Synthetic oligonucleotide
auuagauguccccggacua

SEQ ID NO: 1323278 - RNA, 19 nt, Artificial Sequence
  Description of Artificial Sequence: Synthetic oligonucleotide
auguaaaacaaggcugcug

SEQ ID NO: 1323279 - RNA, 19 nt, Artificial Sequence
  Description of Artificial Sequence: Synthetic oligonucleotide
gaacacgcagggauccugg

SEQ ID NO: 1323280 - RNA, 19 nt, Artificial Sequence
  Description of Artificial Sequence: Synthetic oligonucleotide
cuccucugaccauacuggg

SEQ ID NO: 1323281 - RNA, 19 nt, Artificial Sequence
  Description of Artificial Sequence: Synthetic oligonucleotide
uacugagugugauuucaaa

SEQ ID NO: 1323282 - RNA, 19 nt, Artificial Sequence
  Description of Artificial Sequence: Synthetic oligonucleotide
cugacgaaggcguuuauua

SEQ ID NO: 1323283 - RNA, 19 nt, Artificial Sequence
  Description of Artificial Sequence: Synthetic oligonucleotide
gugugcauaacaacaacga

SEQ ID NO: 1323284 - RNA, 19 nt, Artificial Sequence
  Description of Artificial Sequence: Synthetic oligonucleotide
aaauaggguaguggcuuca

SEQ ID NO: 1323285 - RNA, 19 nt, Artificial Sequence
  Description of Artificial Sequence: Synthetic oligonucleotide
aauuaccauguugcgcgug

SEQ ID NO: 1323286 - RNA, 19 nt, Artificial Sequence
  Description of Artificial Sequence: Synthetic oligonucleotide
uauguaaaacaaggcugcu

SEQ ID NO: 1323287 - RNA, 19 nt, Artificial Sequence
  Description of Artificial Sequence: Synthetic oligonucleotide
uuagauguccccggacuac

SEQ ID NO: 1323288 - RNA, 19 nt, Artificial Sequence
  Description of Artificial Sequence: Synthetic oligonucleotide
ccacuaacaacucuuguuc

SEQ ID NO: 1323289 - RNA, 19 nt, Artificial Sequence
  Description of Artificial Sequence: Synthetic oligonucleotide
aucaagguacuagcaagug

SEQ ID NO: 1323290 - RNA, 19 nt, Artificial Sequence
  Description of Artificial Sequence: Synthetic oligonucleotide
ucggucuuguccacauaca

SEQ ID NO: 1323291 - RNA, 19 nt, Artificial Sequence
  Description of Artificial Sequence: Synthetic oligonucleotide
uguucggucuuguccacau

SEQ ID NO: 1323292 - RNA, 19 nt, Artificial Sequence
  Description of Artificial Sequence: Synthetic oligonucleotide
ucaacuggcaacgcauaaa

SEQ ID NO: 1323293 - RNA, 19 nt, Artificial Sequence
  Description of Artificial Sequence: Synthetic oligonucleotide
ugcacagacuuuagccacu

SEQ ID NO: 1323294 - RNA, 19 nt, Artificial Sequence
  Description of Artificial Sequence: Synthetic oligonucleotide
uauguucaauaggugugcu

SEQ ID NO: 1323295 - RNA, 19 nt, Artificial Sequence
  Description of Artificial Sequence: Synthetic oligonucleotide
augaucaugcgauguuuau

SEQ ID NO: 1323296 - RNA, 19 nt, Artificial Sequence
  Description of Artificial Sequence: Synthetic oligonucleotide
uguucgguaguguccggaa

SEQ ID NO: 1323297 - RNA, 19 nt, Artificial Sequence
  Description of Artificial Sequence: Synthetic oligonucleotide
uguuauuuguaggccacuu

SEQ ID NO: 1323298 - RNA, 19 nt, Artificial Sequence
  Description of Artificial Sequence: Synthetic oligonucleotide
ccauauaagguuccuuagc

SEQ ID NO: 1323299 - RNA, 19 nt, Artificial Sequence
  Description of Artificial Sequence: Synthetic oligonucleotide
caaacuccucugaccauac

SEQ ID NO: 1323300 - RNA, 19 nt, Artificial Sequence
  Description of Artificial Sequence: Synthetic oligonucleotide
agggcugcuaagucacgag

SEQ ID NO: 1323301 - RNA, 19 nt, Artificial Sequence
  Description of Artificial Sequence: Synthetic oligonucleotide
ugcuugcagaccuuucauc

SEQ ID NO: 1323302 - RNA, 19 nt, Artificial Sequence
  Description of Artificial Sequence: Synthetic oligonucleotide
accuuccauauaagguucc

SEQ ID NO: 1323303 - RNA, 19 nt, Artificial Sequence
  Description of Artificial Sequence: Synthetic oligonucleotide
caagguacuagcaaguguu

SEQ ID NO: 1323304 - RNA, 19 nt, Artificial Sequence
  Description of Artificial Sequence: Synthetic oligonucleotide
ucacgagacaggucaguuc

SEQ ID NO: 1323305 - RNA, 19 nt, Artificial Sequence
  Description of Artificial Sequence: Synthetic oligonucleotide
uggcuaguaguguucgguc

SEQ ID NO: 1323306 - RNA, 19 nt, Artificial Sequence
  Description of Artificial Sequence: Synthetic oligonucleotide
aaauuaguguucacaucuu

SEQ ID NO: 1323307 - RNA, 19 nt, Artificial Sequence
  Description of Artificial Sequence: Synthetic oligonucleotide
gaguguucucaguucaucu

SEQ ID NO: 1323308 - RNA, 19 nt, Artificial Sequence
  Description of Artificial Sequence: Synthetic oligonucleotide
uuucuccugcaaaguaaaa

SEQ ID NO: 1323309 - RNA, 19 nt, Artificial Sequence
  Description of Artificial Sequence: Synthetic oligonucleotide
gcguuuauuagaugucccc

SEQ ID NO: 1323310 - RNA, 19 nt, Artificial Sequence
  Description of Artificial Sequence: Synthetic oligonucleotide
gcuaaauuaguguucacau

SEQ ID NO: 1323311 - RNA, 19 nt, Artificial Sequence
  Description of Artificial Sequence: Synthetic oligonucleotide
guucgguaguguccggaag

SEQ ID NO: 1323312 - RNA, 19 nt, Artificial Sequence
  Description of Artificial Sequence: Synthetic oligonucleotide
uaguguccggaaguucagg

SEQ ID NO: 1323313 - RNA, 19 nt, Artificial Sequence
  Description of Artificial Sequence: Synthetic oligonucleotide
aaauuguguggcaguggcu

SEQ ID NO: 1323314 - RNA, 19 nt, Artificial Sequence
  Description of Artificial Sequence: Synthetic oligonucleotide
cauacaugugauaaagcau

SEQ ID NO: 1323315 - RNA, 19 nt, Artificial Sequence
  Description of Artificial Sequence: Synthetic oligonucleotide
uacaugcuguugugcacca

SEQ ID NO: 1323316 - RNA, 19 nt, Artificial Sequence
  Description of Artificial Sequence: Synthetic oligonucleotide
uuacgcugaacugaauauu

SEQ ID NO: 1323317 - RNA, 19 nt, Artificial Sequence
  Description of Artificial Sequence: Synthetic oligonucleotide
caugcagggcugcuaaguc

SEQ ID NO: 1323318 - RNA, 19 nt, Artificial Sequence
  Description of Artificial Sequence: Synthetic oligonucleotide
cuguugugcaccacgcuca

SEQ ID NO: 1323319 - RNA, 19 nt, Artificial Sequence
  Description of Artificial Sequence: Synthetic oligonucleotide
uugugggcuucuucaauau

SEQ ID NO: 1323320 - RNA, 19 nt, Artificial Sequence
  Description of Artificial Sequence: Synthetic oligonucleotide
aguucaucugaaugagcua

SEQ ID NO: 1323321 - RNA, 19 nt, Artificial Sequence
  Description of Artificial Sequence: Synthetic oligonucleotide
uagccacuaaugucagugu

SEQ ID NO: 1323322 - RNA, 19 nt, Artificial Sequence
  Description of Artificial Sequence: Synthetic oligonucleotide
ugcgcgugcugaauccaug

SEQ ID NO: 1323323 - RNA, 19 nt, Artificial Sequence
  Description of Artificial Sequence: Synthetic oligonucleotide
ccuuuagugguauauggga

SEQ ID NO: 1323324 - RNA, 19 nt, Artificial Sequence
  Description of Artificial Sequence: Synthetic oligonucleotide
uaacaacucuuguucucau

SEQ ID NO: 1323325 - RNA, 19 nt, Artificial Sequence
  Description of Artificial Sequence: Synthetic oligonucleotide
ugaugugaauuaccauguu

SEQ ID NO: 1323326 - RNA, 19 nt, Artificial Sequence
  Description of Artificial Sequence: Synthetic oligonucleotide
caccacgcucauuacugag

SEQ ID NO: 1323327 - RNA, 19 nt, Artificial Sequence
  Description of Artificial Sequence: Synthetic oligonucleotide
uuuagccacuaaugucagu

SEQ ID NO: 1323328 - RNA, 19 nt, Artificial Sequence
  Description of Artificial Sequence: Synthetic oligonucleotide
uuuguaguauaagcucuuu

SEQ ID NO: 1323329 - RNA, 19 nt, Artificial Sequence
  Description of Artificial Sequence: Synthetic oligonucleotide
uaucgugcucgaacacgca

SEQ ID NO: 1323330 - RNA, 19 nt, Artificial Sequence
  Description of Artificial Sequence: Synthetic oligonucleotide
gcucgaaauaggguagugg

SEQ ID NO: 1323331 - RNA, 19 nt, Artificial Sequence
  Description of Artificial Sequence: Synthetic oligonucleotide
acgcucauuacugaguguu

SEQ ID NO: 1323332 - RNA, 19 nt, Artificial Sequence
  Description of Artificial Sequence: Synthetic oligonucleotide
guuauuuguaggccacuua

SEQ ID NO: 1323333 - RNA, 19 nt, Artificial Sequence
  Description of Artificial Sequence: Synthetic oligonucleotide
ugcuguugugcaccacgcu

SEQ ID NO: 1323334 - RNA, 19 nt, Artificial Sequence
  Description of Artificial Sequence: Synthetic oligonucleotide
gcaaaaugcuugcagaccu

SEQ ID NO: 1323335 - RNA, 19 nt, Artificial Sequence
  Description of Artificial Sequence: Synthetic oligonucleotide
accauguugcgcgugcuga

SEQ ID NO: 1323336 - RNA, 19 nt, Artificial Sequence
  Description of Artificial Sequence: Synthetic oligonucleotide
cuuacgcugaacugaauau

SEQ ID NO: 1323337 - RNA, 19 nt, Artificial Sequence
  Description of Artificial Sequence: Synthetic oligonucleotide
agccacuaaugucaguguu

SEQ ID NO: 1323338 - RNA, 19 nt, Artificial Sequence
  Description of Artificial Sequence: Synthetic oligonucleotide
cuaaagugcugaacuacua

SEQ ID NO: 1323339 - RNA, 19 nt, Artificial Sequence
  Description of Artificial Sequence: Synthetic oligonucleotide
uuuugcuacuuggacgcua

SEQ ID NO: 1323340 - RNA, 19 nt, Artificial Sequence
  Description of Artificial Sequence: Synthetic oligonucleotide
cacgagacaggucaguucu

SEQ ID NO: 1323341 - RNA, 19 nt, Artificial Sequence
  Description of Artificial Sequence: Synthetic oligonucleotide
agguacuagcaaguguugu

SEQ ID NO: 1323342 - RNA, 19 nt, Artificial Sequence
  Description of Artificial Sequence: Synthetic oligonucleotide
gagcaaagacauagugaug

SEQ ID NO: 1323343 - RNA, 19 nt, Artificial Sequence
  Description of Artificial Sequence: Synthetic oligonucleotide
acaugugauaaagcauaga

SEQ ID NO: 1323344 - RNA, 19 nt, Artificial Sequence
  Description of Artificial Sequence: Synthetic oligonucleotide
ugugcaccacgcucauuac

SEQ ID NO: 1323345 - RNA, 19 nt, Artificial Sequence
  Description of Artificial Sequence: Synthetic oligonucleotide
cguuuauuagauguccccg

SEQ ID NO: 1323346 - RNA, 19 nt, Artificial Sequence
  Description of Artificial Sequence: Synthetic oligonucleotide
cugcugaccugacgaaggc

SEQ ID NO: 1323347 - RNA, 19 nt, Artificial Sequence
  Description of Artificial Sequence: Synthetic oligonucleotide
auaagauaucuggaucuuu

SEQ ID NO: 1323348 - RNA, 19 nt, Artificial Sequence
  Description of Artificial Sequence: Synthetic oligonucleotide
gcugcugaccugacgaagg

SEQ ID NO: 1323349 - RNA, 19 nt, Artificial Sequence
  Description of Artificial Sequence: Synthetic oligonucleotide
cuuuuguaaccugcucaac

SEQ ID NO: 1323350 - RNA, 19 nt, Artificial Sequence
  Description of Artificial Sequence: Synthetic oligonucleotide
gaugcuggcuaguaguguu

SEQ ID NO: 1323351 - RNA, 19 nt, Artificial Sequence
  Description of Artificial Sequence: Synthetic oligonucleotide
gcuguugugcaccacgcuc

SEQ ID NO: 1323352 - RNA, 19 nt, Artificial Sequence
  Description of Artificial Sequence: Synthetic oligonucleotide
gguguuauuuguaggccac

SEQ ID NO: 1323353 - RNA, 19 nt, Artificial Sequence
  Description of Artificial Sequence: Synthetic oligonucleotide
guaguguccggaaguucag

SEQ ID NO: 1323354 - RNA, 19 nt, Artificial Sequence
  Description of Artificial Sequence: Synthetic oligonucleotide
ggacuuaacucacaugacu

SEQ ID NO: 1323355 - RNA, 19 nt, Artificial Sequence
  Description of Artificial Sequence: Synthetic oligonucleotide
ggauccugguucaaugccc

SEQ ID NO: 1323356 - RNA, 19 nt, Artificial Sequence
  Description of Artificial Sequence: Synthetic oligonucleotide
cuccaucaagguacuagca

SEQ ID NO: 1323357 - RNA, 19 nt, Artificial Sequence
  Description of Artificial Sequence: Synthetic oligonucleotide
guaaaguguuuuacuggga

SEQ ID NO: 1323358 - RNA, 19 nt, Artificial Sequence
  Description of Artificial Sequence: Synthetic oligonucleotide
ucaaugcccuuuaguggua

SEQ ID NO: 1323359 - RNA, 19 nt, Artificial Sequence
  Description of Artificial Sequence: Synthetic oligonucleotide
aagguuccuuagcuccaaa

SEQ ID NO: 1323360 - RNA, 19 nt, Artificial Sequence
  Description of Artificial Sequence: Synthetic oligonucleotide
gguacuagcaaguguugua

SEQ ID NO: 1323361 - RNA, 19 nt, Artificial Sequence
  Description of Artificial Sequence: Synthetic oligonucleotide
caucaagguacuagcaagu

SEQ ID NO: 1323362 - RNA, 19 nt, Artificial Sequence
  Description of Artificial Sequence: Synthetic oligonucleotide
cuacuuggacgcuauucaa

SEQ ID NO: 1323363 - RNA, 19 nt, Artificial Sequence
  Description of Artificial Sequence: Synthetic oligonucleotide
cugucauuuagugugcaua

SEQ ID NO: 1323364 - RNA, 19 nt, Artificial Sequence
  Description of Artificial Sequence: Synthetic oligonucleotide
gcaaagacauagugaugug

SEQ ID NO: 1323365 - RNA, 19 nt, Artificial Sequence
  Description of Artificial Sequence: Synthetic oligonucleotide
cuaccugacaucauugguu

SEQ ID NO: 1323366 - RNA, 19 nt, Artificial Sequence
  Description of Artificial Sequence: Synthetic oligonucleotide
auguccccggacuacuuuu

SEQ ID NO: 1323367 - RNA, 19 nt, Artificial Sequence
  Description of Artificial Sequence: Synthetic oligonucleotide
ggcguuuauuagauguccc

SEQ ID NO: 1323368 - RNA, 19 nt, Artificial Sequence
  Description of Artificial Sequence: Synthetic oligonucleotide
caugcgauguuuauugcuu

SEQ ID NO: 1323369 - RNA, 19 nt, Artificial Sequence
  Description of Artificial Sequence: Synthetic oligonucleotide
aggcugcuaccugacauca

SEQ ID NO: 1323370 - RNA, 19 nt, Artificial Sequence
  Description of Artificial Sequence: Synthetic oligonucleotide
agcucgaaauaggguagug

SEQ ID NO: 1323371 - RNA, 19 nt, Artificial Sequence
  Description of Artificial Sequence: Synthetic oligonucleotide
gcuuucauauacugcucca

SEQ ID NO: 1323372 - RNA, 19 nt, Artificial Sequence
  Description of Artificial Sequence: Synthetic oligonucleotide
uuaccauguugcgcgugcu

SEQ ID NO: 1323373 - RNA, 19 nt, Artificial Sequence
  Description of Artificial Sequence: Synthetic oligonucleotide
uccugguucaaugcccuuu

SEQ ID NO: 1323374 - RNA, 19 nt, Artificial Sequence
  Description of Artificial Sequence: Synthetic oligonucleotide
auggagucuuucaaagcau

SEQ ID NO: 1323375 - RNA, 19 nt, Artificial Sequence
  Description of Artificial Sequence: Synthetic oligonucleotide
ccacgcucauuacugagug

SEQ ID NO: 1323376 - RNA, 19 nt, Artificial Sequence
  Description of Artificial Sequence: Synthetic oligonucleotide
accacgcucauuacugagu

SEQ ID NO: 1323377 - RNA, 19 nt, Artificial Sequence
  Description of Artificial Sequence: Synthetic oligonucleotide
caacuggcaacgcauaaau

SEQ ID NO: 1323378 - RNA, 19 nt, Artificial Sequence
  Description of Artificial Sequence: Synthetic oligonucleotide
aacuggcaacgcauaaaua

SEQ ID NO: 1323379 - RNA, 19 nt, Artificial Sequence
  Description of Artificial Sequence: Synthetic oligonucleotide
uugcgcgugcugaauccau

SEQ ID NO: 1323380 - RNA, 19 nt, Artificial Sequence
  Description of Artificial Sequence: Synthetic oligonucleotide
auguucgguaguguccgga

SEQ ID NO: 1323381 - RNA, 19 nt, Artificial Sequence
  Description of Artificial Sequence: Synthetic oligonucleotide
auguuacaauauggauuag

SEQ ID NO: 1323382 - RNA, 19 nt, Artificial Sequence
  Description of Artificial Sequence: Synthetic oligonucleotide
cucaacuggcaacgcauaa

SEQ ID NO: 1323383 - RNA, 19 nt, Artificial Sequence
  Description of Artificial Sequence: Synthetic oligonucleotide
gcaacgcauaaauaagaua

SEQ ID NO: 1323384 - RNA, 19 nt, Artificial Sequence
  Description of Artificial Sequence: Synthetic oligonucleotide
ggccacuuacgcugaacug

SEQ ID NO: 1323385 - RNA, 19 nt, Artificial Sequence
  Description of Artificial Sequence: Synthetic oligonucleotide
gcgauguuuauugcuuuug

SEQ ID NO: 1323386 - RNA, 19 nt, Artificial Sequence
  Description of Artificial Sequence: Synthetic oligonucleotide
uaggccacuuacgcugaac

SEQ ID NO: 1323387 - RNA, 19 nt, Artificial Sequence
  Description of Artificial Sequence: Synthetic oligonucleotide
cuuaucucucugucauuua

SEQ ID NO: 1323388 - RNA, 19 nt, Artificial Sequence
  Description of Artificial Sequence: Synthetic oligonucleotide
ucgguaguguccggaaguu

SEQ ID NO: 1323389 - RNA, 19 nt, Artificial Sequence
  Description of Artificial Sequence: Synthetic oligonucleotide
acgcagggauccugguuca

SEQ ID NO: 1323390 - RNA, 19 nt, Artificial Sequence
  Description of Artificial Sequence: Synthetic oligonucleotide
gaauuaccauguugcgcgu

SEQ ID NO: 1323391 - RNA, 19 nt, Artificial Sequence
  Description of Artificial Sequence: Synthetic oligonucleotide
cuuggacgcuauucaagua

SEQ ID NO: 1323392 - RNA, 19 nt, Artificial Sequence
  Description of Artificial Sequence: Synthetic oligonucleotide
ggggaaucugaaaugauau

SEQ ID NO: 1323393 - RNA, 19 nt, Artificial Sequence
  Description of Artificial Sequence: Synthetic oligonucleotide
gcaaaguaaaagauguaau

SEQ ID NO: 1323394 - RNA, 19 nt, Artificial Sequence
  Description of Artificial Sequence: Synthetic oligonucleotide
ugaccugacgaaggcguuu

SEQ ID NO: 1323395 - RNA, 19 nt, Artificial Sequence
  Description of Artificial Sequence: Synthetic oligonucleotide
gcuggcuaguaguguucgg

SEQ ID NO: 1323396 - RNA, 19 nt, Artificial Sequence
  Description of Artificial Sequence: Synthetic oligonucleotide
gcgcgugcugaauccaugc

SEQ ID NO: 1323397 - RNA, 19 nt, Artificial Sequence
  Description of Artificial Sequence: Synthetic oligonucleotide
ccuuagcuccaaauuccac

SEQ ID NO: 1323398 - RNA, 19 nt, Artificial Sequence
  Description of Artificial Sequence: Synthetic oligonucleotide
cugcucaacuggcaacgca

SEQ ID NO: 1323399 - RNA, 19 nt, Artificial Sequence
  Description of Artificial Sequence: Synthetic oligonucleotide
gccacuaaugucaguguuc

SEQ ID NO: 1323400 - RNA, 19 nt, Artificial Sequence
  Description of Artificial Sequence: Synthetic oligonucleotide
guguccggaaguucaggua

SEQ ID NO: 1323401 - RNA, 19 nt, Artificial Sequence
  Description of Artificial Sequence: Synthetic oligonucleotide
ccuauagaguaucgugcuc

SEQ ID NO: 1323402 - RNA, 19 nt, Artificial Sequence
  Description of Artificial Sequence: Synthetic oligonucleotide
auagaguaucgugcucgaa

SEQ ID NO: 1323403 - RNA, 19 nt, Artificial Sequence
  Description of Artificial Sequence: Synthetic oligonucleotide
auggggaaucugaaaugau

SEQ ID NO: 1323404 - RNA, 19 nt, Artificial Sequence
  Description of Artificial Sequence: Synthetic oligonucleotide
cuuaacucacaugacuguu

SEQ ID NO: 1323405 - RNA, 19 nt, Artificial Sequence
  Description of Artificial Sequence: Synthetic oligonucleotide
gggcugcuaagucacgaga

SEQ ID NO: 1323406 - RNA, 19 nt, Artificial Sequence
  Description of Artificial Sequence: Synthetic oligonucleotide
cuccacaagcucugaaagu

SEQ ID NO: 1323407 - RNA, 19 nt, Artificial Sequence
  Description of Artificial Sequence: Synthetic oligonucleotide
gaccugacgaaggcguuua

SEQ ID NO: 1323408 - RNA, 19 nt, Artificial Sequence
  Description of Artificial Sequence: Synthetic oligonucleotide
ggcugcugaccugacgaag

SEQ ID NO: 1323409 - RNA, 19 nt, Artificial Sequence
  Description of Artificial Sequence: Synthetic oligonucleotide
cagggcagauaagccgaag

SEQ ID NO: 1323410 - RNA, 19 nt, Artificial Sequence
  Description of Artificial Sequence: Synthetic oligonucleotide
cuggcuaguaguguucggu

SEQ ID NO: 1323411 - RNA, 19 nt, Artificial Sequence
  Description of Artificial Sequence: Synthetic oligonucleotide
guugcgcgugcugaaucca

SEQ ID NO: 1323412 - RNA, 19 nt, Artificial Sequence
  Description of Artificial Sequence: Synthetic oligonucleotide
gcaugccuuuuguaaccug

SEQ ID NO: 1323413 - RNA, 19 nt, Artificial Sequence
  Description of Artificial Sequence: Synthetic oligonucleotide
caacucuuguucucauggu

SEQ ID NO: 1323414 - RNA, 19 nt, Artificial Sequence
  Description of Artificial Sequence: Synthetic oligonucleotide
ggcuaguaguguucggucu

SEQ ID NO: 1323415 - RNA, 19 nt, Artificial Sequence
  Description of Artificial Sequence: Synthetic oligonucleotide
agcaaguguuguagcucga

SEQ ID NO: 1323416 - RNA, 19 nt, Artificial Sequence
  Description of Artificial Sequence: Synthetic oligonucleotide
cucacaugacuguuugcuu

SEQ ID NO: 1323417 - RNA, 19 nt, Artificial Sequence
  Description of Artificial Sequence: Synthetic oligonucleotide
gcucauuacugaguguucu

SEQ ID NO: 1323418 - RNA, 19 nt, Artificial Sequence
  Description of Artificial Sequence: Synthetic oligonucleotide
ggauagcagggcagauaag

SEQ ID NO: 1323419 - RNA, 19 nt, Artificial Sequence
  Description of Artificial Sequence: Synthetic oligonucleotide
gcugaccugacgaaggcgu

SEQ ID NO: 1323420 - RNA, 19 nt, Artificial Sequence
  Description of Artificial Sequence: Synthetic oligonucleotide
gcugcuaccugacaucauu

SEQ ID NO: 1323421 - RNA, 19 nt, Artificial Sequence
  Description of Artificial Sequence: Synthetic oligonucleotide
gcauaacaacaacgauuca

SEQ ID NO: 1323422 - RNA, 19 nt, Artificial Sequence
  Description of Artificial Sequence: Synthetic oligonucleotide
ggcaacgcauaaauaagau

SEQ ID NO: 1323423 - RNA, 19 nt, Artificial Sequence
  Description of Artificial Sequence: Synthetic oligonucleotide
cuucaguaggaugcuggcu

SEQ ID NO: 1323424 - RNA, 19 nt, Artificial Sequence
  Description of Artificial Sequence: Synthetic oligonucleotide
caggauagcagggcagaua

SEQ ID NO: 1323425 - RNA, 19 nt, Artificial Sequence
  Description of Artificial Sequence: Synthetic oligonucleotide
gcaccacgcucauuacuga

SEQ ID NO: 1323426 - RNA, 19 nt, Artificial Sequence
  Description of Artificial Sequence: Synthetic oligonucleotide
gcuaguaguguucggucuu

SEQ ID NO: 1323427 - RNA, 19 nt, Artificial Sequence
  Description of Artificial Sequence: Synthetic oligonucleotide
gucacgagacaggucaguu

SEQ ID NO: 1323428 - RNA, 19 nt, Artificial Sequence
  Description of Artificial Sequence: Synthetic oligonucleotide
cgaaggcguuuauuagaug

SEQ ID NO: 1323429 - RNA, 19 nt, Artificial Sequence
  Description of Artificial Sequence: Synthetic oligonucleotide
ccugcucaacuggcaacgc

SEQ ID NO: 1323430 - RNA, 19 nt, Artificial Sequence
  Description of Artificial Sequence: Synthetic oligonucleotide
cgcucauuacugaguguuc

SEQ ID NO: 1323431 - RNA, 19 nt, Artificial Sequence
  Description of Artificial Sequence: Synthetic oligonucleotide
cacgcucauuacugagugu

SEQ ID NO: 1323432 - RNA, 19 nt, Artificial Sequence
  Description of Artificial Sequence: Synthetic oligonucleotide
ccgaggacucaggauagca

SEQ ID NO: 1323433 - RNA, 19 nt, Artificial Sequence
  Description of Artificial Sequence: Synthetic oligonucleotide
cgaacacgcagggauccug

SEQ ID NO: 1323434 - RNA, 19 nt, Artificial Sequence
  Description of Artificial Sequence: Synthetic oligonucleotide
gagcuacaacaaaucucau

SEQ ID NO: 1323435 - RNA, 19 nt, Artificial Sequence
  Description of Artificial Sequence: Synthetic oligonucleotide
cagaacacaccaggcugcu

SEQ ID NO: 1323436 - RNA, 19 nt, Artificial Sequence
  Description of Artificial Sequence: Synthetic oligonucleotide
acgagacaggucaguucua

SEQ ID NO: 1323437 - RNA, 19 nt, Artificial Sequence
  Description of Artificial Sequence: Synthetic oligonucleotide
cauguugcgcgugcugaau

SEQ ID NO: 1323438 - RNA, 19 nt, Artificial Sequence
  Description of Artificial Sequence: Synthetic oligonucleotide
gcucaacuggcaacgcaua

SEQ ID NO: 1323439 - RNA, 19 nt, Artificial Sequence
  Description of Artificial Sequence: Synthetic oligonucleotide
ccauguugcgcgugcugaa

SEQ ID NO: 1323440 - RNA, 19 nt, Artificial Sequence
  Description of Artificial Sequence: Synthetic oligonucleotide
cugaccugacgaaggcguu

SEQ ID NO: 1323441 - RNA, 19 nt, Artificial Sequence
  Description of Artificial Sequence: Synthetic oligonucleotide
caaugcccuuuagugguau

SEQ ID NO: 1323442 - RNA, 19 nt, Artificial Sequence
  Description of Artificial Sequence: Synthetic oligonucleotide
gcagggcagauaagccgaa

SEQ ID NO: 1323443 - RNA, 19 nt, Artificial Sequence
  Description of Artificial Sequence: Synthetic oligonucleotide
ccucccuugcaugaguuuu

SEQ ID NO: 1323444 - RNA, 19 nt, Artificial Sequence
  Description of Artificial Sequence: Synthetic oligonucleotide
cgguaguguccggaaguuc

SEQ ID NO: 1323445 - RNA, 19 nt, Artificial Sequence
  Description of Artificial Sequence: Synthetic oligonucleotide
caucuguggcaugccuuuu

SEQ ID NO: 1323446 - RNA, 19 nt, Artificial Sequence
  Description of Artificial Sequence: Synthetic oligonucleotide
gccccucccuugcaugagu

SEQ ID NO: 1323447 - RNA, 19 nt, Artificial Sequence
  Description of Artificial Sequence: Synthetic oligonucleotide
guugugcaccacgcucauu

SEQ ID NO: 1323448 - RNA, 19 nt, Artificial Sequence
  Description of Artificial Sequence: Synthetic oligonucleotide
cugcuccaucaagguacua

SEQ ID NO: 1323449 - RNA, 19 nt, Artificial Sequence
  Description of Artificial Sequence: Synthetic oligonucleotide
ccccucccuugcaugaguu

SEQ ID NO: 1323450 - RNA, 19 nt, Artificial Sequence
  Description of Artificial Sequence: Synthetic oligonucleotide
aguauaauuagacaccagc

SEQ ID NO: 1323451 - RNA, 19 nt, Artificial Sequence
  Description of Artificial Sequence: Synthetic oligonucleotide
auauaacucaguuugaagg

SEQ ID NO: 1323452 - RNA, 19 nt, Artificial Sequence
  Description of Artificial Sequence: Synthetic oligonucleotide
ugagauuaaguccacagcc

SEQ ID NO: 1323453 - RNA, 19 nt, Artificial Sequence
  Description of Artificial Sequence: Synthetic oligonucleotide
cagaauguaaucaaggacc

SEQ ID NO: 1323454 - RNA, 19 nt, Artificial Sequence
  Description of Artificial Sequence: Synthetic oligonucleotide
ucuguuuacacaacggcgg

SEQ ID NO: 1323455 - RNA, 19 nt, Artificial Sequence
  Description of Artificial Sequence: Synthetic oligonucleotide
auagauuagggcuggaugg

SEQ ID NO: 1323456 - RNA, 19 nt, Artificial Sequence
  Description of Artificial Sequence: Synthetic oligonucleotide
ucaggaucaaacaugacca

SEQ ID NO: 1323457 - RNA, 19 nt, Artificial Sequence
  Description of Artificial Sequence: Synthetic oligonucleotide
uauaacucaguuugaaggg

SEQ ID NO: 1323458 - RNA, 19 nt, Artificial Sequence
  Description of Artificial Sequence: Synthetic oligonucleotide
cugaaguacagucagaacc

SEQ ID NO: 1323459 - RNA, 19 nt, Artificial Sequence
  Description of Artificial Sequence: Synthetic oligonucleotide
uucacuauacugaugagcu

SEQ ID NO: 1323460 - RNA, 19 nt, Artificial Sequence
  Description of Artificial Sequence: Synthetic oligonucleotide
aaaucucuuauauaacuca

SEQ ID NO: 1323461 - RNA, 19 nt, Artificial Sequence
  Description of Artificial Sequence: Synthetic oligonucleotide
aacguuugaguauaauuag

SEQ ID NO: 1323462 - RNA, 19 nt, Artificial Sequence
  Description of Artificial Sequence: Synthetic oligonucleotide
auucaagcuguccagggcc

SEQ ID NO: 1323463 - RNA, 19 nt, Artificial Sequence
  Description of Artificial Sequence: Synthetic oligonucleotide
cauacaaguaccuucgagc

SEQ ID NO: 1323464 - RNA, 19 nt, Artificial Sequence
  Description of Artificial Sequence: Synthetic oligonucleotide
uauaauuagacaccagcac

SEQ ID NO: 1323465 - RNA, 19 nt, Artificial Sequence
  Description of Artificial Sequence: Synthetic oligonucleotide
uuuagaaguauaaccaggu

SEQ ID NO: 1323466 - RNA, 19 nt, Artificial Sequence
  Description of Artificial Sequence: Synthetic oligonucleotide
uuagagaggugauagaaga

SEQ ID NO: 1323467 - RNA, 19 nt, Artificial Sequence
  Description of Artificial Sequence: Synthetic oligonucleotide
uaaauuuugggcaaacauc

SEQ ID NO: 1323468 - RNA, 19 nt, Artificial Sequence
  Description of Artificial Sequence: Synthetic oligonucleotide
agauuaaguccacagcccc

SEQ ID NO: 1323469 - RNA, 19 nt, Artificial Sequence
  Description of Artificial Sequence: Synthetic oligonucleotide
uugaguauaauuagacacc

SEQ ID NO: 1323470 - RNA, 19 nt, Artificial Sequence
  Description of Artificial Sequence: Synthetic oligonucleotide
cuuuagaaguauaaccagg

SEQ ID NO: 1323471 - RNA, 19 nt, Artificial Sequence
  Description of Artificial Sequence: Synthetic oligonucleotide
agucgguaaauauagcagg

SEQ ID NO: 1323472 - RNA, 19 nt, Artificial Sequence
  Description of Artificial Sequence: Synthetic oligonucleotide
agaaaucucuuauauaacu

SEQ ID NO: 1323473 - RNA, 19 nt, Artificial Sequence
  Description of Artificial Sequence: Synthetic oligonucleotide
ugaauuaacgaagugcacc

SEQ ID NO: 1323474 - RNA, 19 nt, Artificial Sequence
  Description of Artificial Sequence: Synthetic oligonucleotide
ucuucuaugguuccagcag

SEQ ID NO: 1323475 - RNA, 19 nt, Artificial Sequence
  Description of Artificial Sequence: Synthetic oligonucleotide
aaauauucaagcaagucau

SEQ ID NO: 1323476 - RNA, 19 nt, Artificial Sequence
  Description of Artificial Sequence: Synthetic oligonucleotide
augagauuaaguccacagc

SEQ ID NO: 1323477 - RNA, 19 nt, Artificial Sequence
  Description of Artificial Sequence: Synthetic oligonucleotide
auaauuagacaccagcaca

SEQ ID NO: 1323478 - RNA, 19 nt, Artificial Sequence
  Description of Artificial Sequence: Synthetic oligonucleotide
agaaguauaaccagguggg

SEQ ID NO: 1323479 - RNA, 19 nt, Artificial Sequence
  Description of Artificial Sequence: Synthetic oligonucleotide
aguauaaccaggugggaag

SEQ ID NO: 1323480 - RNA, 19 nt, Artificial Sequence
  Description of Artificial Sequence: Synthetic oligonucleotide
uuuaucugugcuaugguuc

SEQ ID NO: 1323481 - RNA, 19 nt, Artificial Sequence
  Description of Artificial Sequence: Synthetic oligonucleotide
auucacuauacugaugagc

SEQ ID NO: 1323482 - RNA, 19 nt, Artificial Sequence
  Description of Artificial Sequence: Synthetic oligonucleotide
agaacgaugauggaagacg

SEQ ID NO: 1323483 - RNA, 19 nt, Artificial Sequence
  Description of Artificial Sequence: Synthetic oligonucleotide
gaacauacaaguaccuucg

SEQ ID NO: 1323484 - RNA, 19 nt, Artificial Sequence
  Description of Artificial Sequence: Synthetic oligonucleotide
uagcagucgguaaauauag

SEQ ID NO: 1323485 - RNA, 19 nt, Artificial Sequence
  Description of Artificial Sequence: Synthetic oligonucleotide
uuaacgaagugcaccaagc

SEQ ID NO: 1323486 - RNA, 19 nt, Artificial Sequence
  Description of Artificial Sequence: Synthetic oligonucleotide
gaggugauagaagacaggg

SEQ ID NO: 1323487 - RNA, 19 nt, Artificial Sequence
  Description of Artificial Sequence: Synthetic oligonucleotide
caaaaucgggacucgaugg

SEQ ID NO: 1323488 - RNA, 19 nt, Artificial Sequence
  Description of Artificial Sequence: Synthetic oligonucleotide
acaaguaccuucgagcucg

SEQ ID NO: 1323489 - RNA, 19 nt, Artificial Sequence
  Description of Artificial Sequence: Synthetic oligonucleotide
cuugccuucacgcaaauuc

SEQ ID NO: 1323490 - RNA, 19 nt, Artificial Sequence
  Description of Artificial Sequence: Synthetic oligonucleotide
aguaccucauccuggaguc

SEQ ID NO: 1323491 - RNA, 19 nt, Artificial Sequence
  Description of Artificial Sequence: Synthetic oligonucleotide
acuuuaucacugcugcggc

SEQ ID NO: 1323492 - RNA, 19 nt, Artificial Sequence
  Description of Artificial Sequence: Synthetic oligonucleotide
aacgaagugcaccaagcug

SEQ ID NO: 1323493 - RNA, 19 nt, Artificial Sequence
  Description of Artificial Sequence: Synthetic oligonucleotide
cuaugguuccagcagauag

SEQ ID NO: 1323494 - RNA, 19 nt, Artificial Sequence
  Description of Artificial Sequence: Synthetic oligonucleotide
uucaagcaagucauuuugg

SEQ ID NO: 1323495 - RNA, 19 nt, Artificial Sequence
  Description of Artificial Sequence: Synthetic oligonucleotide
aagacguuccuccccuagc

SEQ ID NO: 1323496 - RNA, 19 nt, Artificial Sequence
  Description of Artificial Sequence: Synthetic oligonucleotide
uggacauuguaccauccag

SEQ ID NO: 1323497 - RNA, 19 nt, Artificial Sequence
  Description of Artificial Sequence: Synthetic oligonucleotide
uagagaggauaucugaugu

SEQ ID NO: 1323498 - RNA, 19 nt, Artificial Sequence
  Description of Artificial Sequence: Synthetic oligonucleotide
ucagccuacaacaaaccac

SEQ ID NO: 1323499 - RNA, 19 nt, Artificial Sequence
  Description of Artificial Sequence: Synthetic oligonucleotide
aagucugauucucagaguu

SEQ ID NO: 1323500 - RNA, 19 nt, Artificial Sequence
  Description of Artificial Sequence: Synthetic oligonucleotide
aagagauccaacguuugag

SEQ ID NO: 1323501 - RNA, 19 nt, Artificial Sequence
  Description of Artificial Sequence: Synthetic oligonucleotide
aaaugccugaauuaacgaa

SEQ ID NO: 1323502 - RNA, 19 nt, Artificial Sequence
  Description of Artificial Sequence: Synthetic oligonucleotide
ugagcagagccucaugaag

SEQ ID NO: 1323503 - RNA, 19 nt, Artificial Sequence
  Description of Artificial Sequence: Synthetic oligonucleotide
cuuuugaccaucacgccag

SEQ ID NO: 1323504 - RNA, 19 nt, Artificial Sequence
  Description of Artificial Sequence: Synthetic oligonucleotide
gaauuaacgaagugcacca

SEQ ID NO: 1323505 - RNA, 19 nt, Artificial Sequence
  Description of Artificial Sequence: Synthetic oligonucleotide
auuaacgaagugcaccaag

SEQ ID NO: 1323506 - RNA, 19 nt, Artificial Sequence
  Description of Artificial Sequence: Synthetic oligonucleotide
uuaucugugcuaugguucc

SEQ ID NO: 1323507 - RNA, 19 nt, Artificial Sequence
  Description of Artificial Sequence: Synthetic oligonucleotide
auacaaguaccuucgagcu

SEQ ID NO: 1323508 - RNA, 19 nt, Artificial Sequence
  Description of Artificial Sequence: Synthetic oligonucleotide
cucgauggacuauugaagc

SEQ ID NO: 1323509 - RNA, 19 nt, Artificial Sequence
  Description of Artificial Sequence: Synthetic oligonucleotide
agcaggucuucuuuugacc

SEQ ID NO: 1323510 - RNA, 19 nt, Artificial Sequence
  Description of Artificial Sequence: Synthetic oligonucleotide
cauuguaccauccaggcga

SEQ ID NO: 1323511 - RNA, 19 nt, Artificial Sequence
  Description of Artificial Sequence: Synthetic oligonucleotide
uuuagagaggauaucugau

SEQ ID NO: 1323512 - RNA, 19 nt, Artificial Sequence
  Description of Artificial Sequence: Synthetic oligonucleotide
ucugauguucuccguauca

SEQ ID NO: 1323513 - RNA, 19 nt, Artificial Sequence
  Description of Artificial Sequence: Synthetic oligonucleotide
acaaaaucgggacucgaug

SEQ ID NO: 1323514 - RNA, 19 nt, Artificial Sequence
  Description of Artificial Sequence: Synthetic oligonucleotide
ugaguauaauuagacacca

SEQ ID NO: 1323515 - RNA, 19 nt, Artificial Sequence
  Description of Artificial Sequence: Synthetic oligonucleotide
uuagacaccagcacaacuu

SEQ ID NO: 1323516 - RNA, 19 nt, Artificial Sequence
  Description of Artificial Sequence: Synthetic oligonucleotide
aaagagauccaacguuuga

SEQ ID NO: 1323517 - RNA, 19 nt, Artificial Sequence
  Description of Artificial Sequence: Synthetic oligonucleotide
aauggacauuguaccaucc

SEQ ID NO: 1323518 - RNA, 19 nt, Artificial Sequence
  Description of Artificial Sequence: Synthetic oligonucleotide
ugggaagauauccaaagua

SEQ ID NO: 1323519 - RNA, 19 nt, Artificial Sequence
  Description of Artificial Sequence: Synthetic oligonucleotide
guuagcaccaaugagauua

SEQ ID NO: 1323520 - RNA, 19 nt, Artificial Sequence
  Description of Artificial Sequence: Synthetic oligonucleotide
cagcauuuuaccugaaagc

SEQ ID NO: 1323521 - RNA, 19 nt, Artificial Sequence
  Description of Artificial Sequence: Synthetic oligonucleotide
ugguucuacagcuuuagaa

SEQ ID NO: 1323522 - RNA, 19 nt, Artificial Sequence
  Description of Artificial Sequence: Synthetic oligonucleotide
ucucgacuccucaaaauug

SEQ ID NO: 1323523 - RNA, 19 nt, Artificial Sequence
  Description of Artificial Sequence: Synthetic oligonucleotide
acacacuugucauagauua

SEQ ID NO: 1323524 - RNA, 19 nt, Artificial Sequence
  Description of Artificial Sequence: Synthetic oligonucleotide
agcauuuuaccugaaagcu

SEQ ID NO: 1323525 - RNA, 19 nt, Artificial Sequence
  Description of Artificial Sequence: Synthetic oligonucleotide
acagcuuuagaaguauaac

SEQ ID NO: 1323526 - RNA, 19 nt, Artificial Sequence
  Description of Artificial Sequence: Synthetic oligonucleotide
ucgauggacuauugaagcg

SEQ ID NO: 1323527 - RNA, 19 nt, Artificial Sequence
  Description of Artificial Sequence: Synthetic oligonucleotide
ucgagucauggccagaaug

SEQ ID NO: 1323528 - RNA, 19 nt, Artificial Sequence
  Description of Artificial Sequence: Synthetic oligonucleotide
guaaacagcucuuugagcu

SEQ ID NO: 1323529 - RNA, 19 nt, Artificial Sequence
  Description of Artificial Sequence: Synthetic oligonucleotide
ugaccagccgguuagcacc

SEQ ID NO: 1323530 - RNA, 19 nt, Artificial Sequence
  Description of Artificial Sequence: Synthetic oligonucleotide
acauacaaguaccuucgag

SEQ ID NO: 1323531 - RNA, 19 nt, Artificial Sequence
  Description of Artificial Sequence: Synthetic oligonucleotide
augagaacgaugauggaag

SEQ ID NO: 1323532 - RNA, 19 nt, Artificial Sequence
  Description of Artificial Sequence: Synthetic oligonucleotide
guaucaggcaccuauucac

SEQ ID NO: 1323533 - RNA, 19 nt, Artificial Sequence
  Description of Artificial Sequence: Synthetic oligonucleotide
uuuuaccugaaagcugugg

SEQ ID NO: 1323534 - RNA, 19 nt, Artificial Sequence
  Description of Artificial Sequence: Synthetic oligonucleotide
ugaacuccugggcaguucc

SEQ ID NO: 1323535 - RNA, 19 nt, Artificial Sequence
  Description of Artificial Sequence: Synthetic oligonucleotide
agcuuuagaaguauaacca

SEQ ID NO: 1323536 - RNA, 19 nt, Artificial Sequence
  Description of Artificial Sequence: Synthetic oligonucleotide
auuagggcuggaugguuac

SEQ ID NO: 1323537 - RNA, 19 nt, Artificial Sequence
  Description of Artificial Sequence: Synthetic oligonucleotide
gguuacauagcuucuuuag

SEQ ID NO: 1323538 - RNA, 19 nt, Artificial Sequence
  Description of Artificial Sequence: Synthetic oligonucleotide
caggcgaacauacaaguac

SEQ ID NO: 1323539 - RNA, 19 nt, Artificial Sequence
  Description of Artificial Sequence: Synthetic oligonucleotide
auaacucaguuugaagggg

SEQ ID NO: 1323540 - RNA, 19 nt, Artificial Sequence
  Description of Artificial Sequence: Synthetic oligonucleotide
acgacugguauucaagcug

SEQ ID NO: 1323541 - RNA, 19 nt, Artificial Sequence
  Description of Artificial Sequence: Synthetic oligonucleotide
ugaggcuagcuucauccag

SEQ ID NO: 1323542 - RNA, 19 nt, Artificial Sequence
  Description of Artificial Sequence: Synthetic oligonucleotide
uuuaaccacuacauccaga

SEQ ID NO: 1323543 - RNA, 19 nt, Artificial Sequence
  Description of Artificial Sequence: Synthetic oligonucleotide
aaggaccagcauuuuaccu

SEQ ID NO: 1323544 - RNA, 19 nt, Artificial Sequence
  Description of Artificial Sequence: Synthetic oligonucleotide
acaacggcggcaaugcagc

SEQ ID NO: 1323545 - RNA, 19 nt, Artificial Sequence
  Description of Artificial Sequence: Synthetic oligonucleotide
caacguuugaguauaauua

SEQ ID NO: 1323546 - RNA, 19 nt, Artificial Sequence
  Description of Artificial Sequence: Synthetic oligonucleotide
uaaccaggugggaagauau

SEQ ID NO: 1323547 - RNA, 19 nt, Artificial Sequence
  Description of Artificial Sequence: Synthetic oligonucleotide
ggauaucugauguucuccg

SEQ ID NO: 1323548 - RNA, 19 nt, Artificial Sequence
  Description of Artificial Sequence: Synthetic oligonucleotide
cuggguuccagucaggauc

SEQ ID NO: 1323549 - RNA, 19 nt, Artificial Sequence
  Description of Artificial Sequence: Synthetic oligonucleotide
uccccugacacacacuugu

SEQ ID NO: 1323550 - RNA, 19 nt, Artificial Sequence
  Description of Artificial Sequence: Synthetic oligonucleotide
gaagacacgcucaucuugc

SEQ ID NO: 1323551 - RNA, 19 nt, Artificial Sequence
  Description of Artificial Sequence: Synthetic oligonucleotide
uguaccauccaggcgaaca

SEQ ID NO: 1323552 - RNA, 19 nt, Artificial Sequence
  Description of Artificial Sequence: Synthetic oligonucleotide
aggcgaacauacaaguacc

SEQ ID NO: 1323553 - RNA, 19 nt, Artificial Sequence
  Description of Artificial Sequence: Synthetic oligonucleotide
agagauccaacguuugagu

SEQ ID NO: 1323554 - RNA, 19 nt, Artificial Sequence
  Description of Artificial Sequence: Synthetic oligonucleotide
uaacgaagugcaccaagcu

SEQ ID NO: 1323555 - RNA, 19 nt, Artificial Sequence
  Description of Artificial Sequence: Synthetic oligonucleotide
gagauuaaguccacagccc

SEQ ID NO: 1323556 - RNA, 19 nt, Artificial Sequence
  Description of Artificial Sequence: Synthetic oligonucleotide
uccaggcgaacauacaagu

SEQ ID NO: 1323557 - RNA, 19 nt, Artificial Sequence
  Description of Artificial Sequence: Synthetic oligonucleotide
acgaugauggaagacgaag

SEQ ID NO: 1323558 - RNA, 19 nt, Artificial Sequence
  Description of Artificial Sequence: Synthetic oligonucleotide
gacucgauggacuauugaa

SEQ ID NO: 1323559 - RNA, 19 nt, Artificial Sequence
  Description of Artificial Sequence: Synthetic oligonucleotide
ugucagccuacaacaaacc

SEQ ID NO: 1323560 - RNA, 19 nt, Artificial Sequence
  Description of Artificial Sequence: Synthetic oligonucleotide
uaacucaguuugaaggggu

SEQ ID NO: 1323561 - RNA, 19 nt, Artificial Sequence
  Description of Artificial Sequence: Synthetic oligonucleotide
ugucauagauuagggcugg

SEQ ID NO: 1323562 - RNA, 19 nt, Artificial Sequence
  Description of Artificial Sequence: Synthetic oligonucleotide
acaaaccaccugcucaauc

SEQ ID NO: 1323563 - RNA, 19 nt, Artificial Sequence
  Description of Artificial Sequence: Synthetic oligonucleotide
augaccagccgguuagcac

SEQ ID NO: 1323564 - RNA, 19 nt, Artificial Sequence
  Description of Artificial Sequence: Synthetic oligonucleotide
uauucacuauacugaugag

SEQ ID NO: 1323565 - RNA, 19 nt, Artificial Sequence
  Description of Artificial Sequence: Synthetic oligonucleotide
uuaauggacauuguaccau

SEQ ID NO: 1323566 - RNA, 19 nt, Artificial Sequence
  Description of Artificial Sequence: Synthetic oligonucleotide
agauauuuagagaggauau

SEQ ID NO: 1323567 - RNA, 19 nt, Artificial Sequence
  Description of Artificial Sequence: Synthetic oligonucleotide
cuuaauggacauuguacca

SEQ ID NO: 1323568 - RNA, 19 nt, Artificial Sequence
  Description of Artificial Sequence: Synthetic oligonucleotide
gcugaggcuagcuucaucc

SEQ ID NO: 1323569 - RNA, 19 nt, Artificial Sequence
  Description of Artificial Sequence: Synthetic oligonucleotide
ggugaagcaucccaggcag

SEQ ID NO: 1323570 - RNA, 19 nt, Artificial Sequence
  Description of Artificial Sequence: Synthetic oligonucleotide
cuuggcucgcuucuuaaug

SEQ ID NO: 1323571 - RNA, 19 nt, Artificial Sequence
  Description of Artificial Sequence: Synthetic oligonucleotide
cagcacaacuuuaucacug

SEQ ID NO: 1323572 - RNA, 19 nt, Artificial Sequence
  Description of Artificial Sequence: Synthetic oligonucleotide
uugccuucacgcaaauucu

SEQ ID NO: 1323573 - RNA, 19 nt, Artificial Sequence
  Description of Artificial Sequence: Synthetic oligonucleotide
aaguauaaccaggugggaa

SEQ ID NO: 1323574 - RNA, 19 nt, Artificial Sequence
  Description of Artificial Sequence: Synthetic oligonucleotide
gcuaugguuccacugagcc

SEQ ID NO: 1323575 - RNA, 19 nt, Artificial Sequence
  Description of Artificial Sequence: Synthetic oligonucleotide
uagccugucucagaaaucu

SEQ ID NO: 1323576 - RNA, 19 nt, Artificial Sequence
  Description of Artificial Sequence: Synthetic oligonucleotide
uaaauauagcaggucuucu

SEQ ID NO: 1323577 - RNA, 19 nt, Artificial Sequence
  Description of Artificial Sequence: Synthetic oligonucleotide
caagucauuuuggaugggg

SEQ ID NO: 1323578 - RNA, 19 nt, Artificial Sequence
  Description of Artificial Sequence: Synthetic oligonucleotide
ugucaugugugucgcugag

SEQ ID NO: 1323579 - RNA, 19 nt, Artificial Sequence
  Description of Artificial Sequence: Synthetic oligonucleotide
uucccuauauccuuccuuu

SEQ ID NO: 1323580 - RNA, 19 nt, Artificial Sequence
  Description of Artificial Sequence: Synthetic oligonucleotide
ucaggcuuagccugucuca

SEQ ID NO: 1323581 - RNA, 19 nt, Artificial Sequence
  Description of Artificial Sequence: Synthetic oligonucleotide
guaccuucgagcucggcac

SEQ ID NO: 1323582 - RNA, 19 nt, Artificial Sequence
  Description of Artificial Sequence: Synthetic oligonucleotide
cauuuuaccugaaagcugu

SEQ ID NO: 1323583 - RNA, 19 nt, Artificial Sequence
  Description of Artificial Sequence: Synthetic oligonucleotide
acgaagugcaccaagcuga

SEQ ID NO: 1323584 - RNA, 19 nt, Artificial Sequence
  Description of Artificial Sequence: Synthetic oligonucleotide
acucgauggacuauugaag

SEQ ID NO: 1323585 - RNA, 19 nt, Artificial Sequence
  Description of Artificial Sequence: Synthetic oligonucleotide
ggguaaacagcucuuugag

SEQ ID NO: 1323586 - RNA, 19 nt, Artificial Sequence
  Description of Artificial Sequence: Synthetic oligonucleotide
cacaacggcggcaaugcag

SEQ ID NO: 1323587 - RNA, 19 nt, Artificial Sequence
  Description of Artificial Sequence: Synthetic oligonucleotide
agaccuggcgucuguuuac

SEQ ID NO: 1323588 - RNA, 19 nt, Artificial Sequence
  Description of Artificial Sequence: Synthetic oligonucleotide
agauccaacguuugaguau

SEQ ID NO: 1323589 - RNA, 19 nt, Artificial Sequence
  Description of Artificial Sequence: Synthetic oligonucleotide
aguauccucaaagccaucu

SEQ ID NO: 1323590 - RNA, 19 nt, Artificial Sequence
  Description of Artificial Sequence: Synthetic oligonucleotide
caaagagauccaacguuug

SEQ ID NO: 1323591 - RNA, 19 nt, Artificial Sequence
  Description of Artificial Sequence: Synthetic oligonucleotide
ggcacagcuuuucaaagag

SEQ ID NO: 1323592 - RNA, 19 nt, Artificial Sequence
  Description of Artificial Sequence: Synthetic oligonucleotide
caucacgccagacucgggc

SEQ ID NO: 1323593 - RNA, 19 nt, Artificial Sequence
  Description of Artificial Sequence: Synthetic oligonucleotide
cuuuaaccacuacauccag

SEQ ID NO: 1323594 - RNA, 19 nt, Artificial Sequence
  Description of Artificial Sequence: Synthetic oligonucleotide
cagccugucaugugugucg

SEQ ID NO: 1323595 - RNA, 19 nt, Artificial Sequence
  Description of Artificial Sequence: Synthetic oligonucleotide
aacauacaaguaccuucga

SEQ ID NO: 1323596 - RNA, 19 nt, Artificial Sequence
  Description of Artificial Sequence: Synthetic oligonucleotide
agaauguaaucaaggacca

SEQ ID NO: 1323597 - RNA, 19 nt, Artificial Sequence
  Description of Artificial Sequence: Synthetic oligonucleotide
ccugaauuaacgaagugca

SEQ ID NO: 1323598 - RNA, 19 nt, Artificial Sequence
  Description of Artificial Sequence: Synthetic oligonucleotide
ccagcauuuuaccugaaag

SEQ ID NO: 1323599 - RNA, 19 nt, Artificial Sequence
  Description of Artificial Sequence: Synthetic oligonucleotide
agcuuguucaucauuggcu

SEQ ID NO: 1323600 - RNA, 19 nt, Artificial Sequence
  Description of Artificial Sequence: Synthetic oligonucleotide
uggaguaccucauccugga

SEQ ID NO: 1323601 - RNA, 19 nt, Artificial Sequence
  Description of Artificial Sequence: Synthetic oligonucleotide
ugcaucucgacuccucaaa

SEQ ID NO: 1323602 - RNA, 19 nt, Artificial Sequence
  Description of Artificial Sequence: Synthetic oligonucleotide
ugugugucgcugaggcuag

SEQ ID NO: 1323603 - RNA, 19 nt, Artificial Sequence
  Description of Artificial Sequence: Synthetic oligonucleotide
aaguacagucagaaccguc

SEQ ID NO: 1323604 - RNA, 19 nt, Artificial Sequence
  Description of Artificial Sequence: Synthetic oligonucleotide
aucucgacuccucaaaauu

SEQ ID NO: 1323605 - RNA, 19 nt, Artificial Sequence
  Description of Artificial Sequence: Synthetic oligonucleotide
uuacacaacggcggcaaug

SEQ ID NO: 1323606 - RNA, 19 nt, Artificial Sequence
  Description of Artificial Sequence: Synthetic oligonucleotide
ugagaacgaugauggaaga

SEQ ID NO: 1323607 - RNA, 19 nt, Artificial Sequence
  Description of Artificial Sequence: Synthetic oligonucleotide
gcuuguucaucauuggcug

SEQ ID NO: 1323608 - RNA, 19 nt, Artificial Sequence
  Description of Artificial Sequence: Synthetic oligonucleotide
uucaggcuuagccugucuc

SEQ ID NO: 1323609 - RNA, 19 nt, Artificial Sequence
  Description of Artificial Sequence: Synthetic oligonucleotide
agacucgggccauagcuug

SEQ ID NO: 1323610 - RNA, 19 nt, Artificial Sequence
  Description of Artificial Sequence: Synthetic oligonucleotide
uguaaucaaggaccagcau

SEQ ID NO: 1323611 - RNA, 19 nt, Artificial Sequence
  Description of Artificial Sequence: Synthetic oligonucleotide
gaggauaucugauguucuc

SEQ ID NO: 1323612 - RNA, 19 nt, Artificial Sequence
  Description of Artificial Sequence: Synthetic oligonucleotide
cgcaaauucuucuucaggc

SEQ ID NO: 1323613 - RNA, 19 nt, Artificial Sequence
  Description of Artificial Sequence: Synthetic oligonucleotide
cuaucaguggagaccccgc

SEQ ID NO: 1323614 - RNA, 19 nt, Artificial Sequence
  Description of Artificial Sequence: Synthetic oligonucleotide
auaucugauguucuccgua

SEQ ID NO: 1323615 - RNA, 19 nt, Artificial Sequence
  Description of Artificial Sequence: Synthetic oligonucleotide
cugaauuaacgaagugcac

SEQ ID NO: 1323616 - RNA, 19 nt, Artificial Sequence
  Description of Artificial Sequence: Synthetic oligonucleotide
ucuacagcuuuagaaguau

SEQ ID NO: 1323617 - RNA, 19 nt, Artificial Sequence
  Description of Artificial Sequence: Synthetic oligonucleotide
cuaucuggcuaucagugga

SEQ ID NO: 1323618 - RNA, 19 nt, Artificial Sequence
  Description of Artificial Sequence: Synthetic oligonucleotide
ucgagcucggcacagcuuu

SEQ ID NO: 1323619 - RNA, 19 nt, Artificial Sequence
  Description of Artificial Sequence: Synthetic oligonucleotide
augauggaagacgaaggug

SEQ ID NO: 1323620 - RNA, 19 nt, Artificial Sequence
  Description of Artificial Sequence: Synthetic oligonucleotide
cuguuuacacaacggcggc

SEQ ID NO: 1323621 - RNA, 19 nt, Artificial Sequence
  Description of Artificial Sequence: Synthetic oligonucleotide
gugauagaagacagggaag

SEQ ID NO: 1323622 - RNA, 19 nt, Artificial Sequence
  Description of Artificial Sequence: Synthetic oligonucleotide
gauagcagucgguaaauau

SEQ ID NO: 1323623 - RNA, 19 nt, Artificial Sequence
  Description of Artificial Sequence: Synthetic oligonucleotide
uaucaguggagaccccgcu

SEQ ID NO: 1323624 - RNA, 19 nt, Artificial Sequence
  Description of Artificial Sequence: Synthetic oligonucleotide
cugggcaguucccaaaaug

SEQ ID NO: 1323625 - RNA, 19 nt, Artificial Sequence
  Description of Artificial Sequence: Synthetic oligonucleotide
gaacgaugauggaagacga

SEQ ID NO: 1323626 - RNA, 19 nt, Artificial Sequence
  Description of Artificial Sequence: Synthetic oligonucleotide
accaucacgccagacucgg

SEQ ID NO: 1323627 - RNA, 19 nt, Artificial Sequence
  Description of Artificial Sequence: Synthetic oligonucleotide
auguaaucaaggaccagca

SEQ ID NO: 1323628 - RNA, 19 nt, Artificial Sequence
  Description of Artificial Sequence: Synthetic oligonucleotide
gccugaauuaacgaagugc

SEQ ID NO: 1323629 - RNA, 19 nt, Artificial Sequence
  Description of Artificial Sequence: Synthetic oligonucleotide
auggacauuguaccaucca

SEQ ID NO: 1323630 - RNA, 19 nt, Artificial Sequence
  Description of Artificial Sequence: Synthetic oligonucleotide
cuagcugccugucugccuc

SEQ ID NO: 1323631 - RNA, 19 nt, Artificial Sequence
  Description of Artificial Sequence: Synthetic oligonucleotide
ggaagacacgcucaucuug

SEQ ID NO: 1323632 - RNA, 19 nt, Artificial Sequence
  Description of Artificial Sequence: Synthetic oligonucleotide
uuagccugucucagaaauc

SEQ ID NO: 1323633 - RNA, 19 nt, Artificial Sequence
  Description of Artificial Sequence: Synthetic oligonucleotide
augagcacccgacgacugg

SEQ ID NO: 1323634 - RNA, 19 nt, Artificial Sequence
  Description of Artificial Sequence: Synthetic oligonucleotide
gugucagccuacaacaaac

SEQ ID NO: 1323635 - RNA, 19 nt, Artificial Sequence
  Description of Artificial Sequence: Synthetic oligonucleotide
guaaucaaggaccagcauu

SEQ ID NO: 1323636 - RNA, 19 nt, Artificial Sequence
  Description of Artificial Sequence: Synthetic oligonucleotide
ucgggccauagcuuguuca

SEQ ID NO: 1323637 - RNA, 19 nt, Artificial Sequence
  Description of Artificial Sequence: Synthetic oligonucleotide
uacaaguaccuucgagcuc

SEQ ID NO: 1323638 - RNA, 19 nt, Artificial Sequence
  Description of Artificial Sequence: Synthetic oligonucleotide
aacucaguuugaaggggug

SEQ ID NO: 1323639 - RNA, 19 nt, Artificial Sequence
  Description of Artificial Sequence: Synthetic oligonucleotide
caccagcacaacuuuauca

SEQ ID NO: 1323640 - RNA, 19 nt, Artificial Sequence
  Description of Artificial Sequence: Synthetic oligonucleotide
auccagaccagcuggcuau

SEQ ID NO: 1323641 - RNA, 19 nt, Artificial Sequence
  Description of Artificial Sequence: Synthetic oligonucleotide
gaauguaaucaaggaccag

SEQ ID NO: 1323642 - RNA, 19 nt, Artificial Sequence
  Description of Artificial Sequence: Synthetic oligonucleotide
gagauccaacguuugagua

SEQ ID NO: 1323643 - RNA, 19 nt, Artificial Sequence
  Description of Artificial Sequence: Synthetic oligonucleotide
ggccagaauguaaucaagg

SEQ ID NO: 1323644 - RNA, 19 nt, Artificial Sequence
  Description of Artificial Sequence: Synthetic oligonucleotide
cucgaagacguuccucccc

SEQ ID NO: 1323645 - RNA, 19 nt, Artificial Sequence
  Description of Artificial Sequence: Synthetic oligonucleotide
ucgccaagagagaaauguc

SEQ ID NO: 1323646 - RNA, 19 nt, Artificial Sequence
  Description of Artificial Sequence: Synthetic oligonucleotide
ugagcucgccaagagagaa

SEQ ID NO: 1323647 - RNA, 19 nt, Artificial Sequence
  Description of Artificial Sequence: Synthetic oligonucleotide
auagcagucgguaaauaua

SEQ ID NO: 1323648 - RNA, 19 nt, Artificial Sequence
  Description of Artificial Sequence: Synthetic oligonucleotide
cugcucaaucuucacuggc

SEQ ID NO: 1323649 - RNA, 19 nt, Artificial Sequence
  Description of Artificial Sequence: Synthetic oligonucleotide
ccagucaggaucaaacaug

SEQ ID NO: 1323650 - RNA, 19 nt, Artificial Sequence
  Description of Artificial Sequence: Synthetic oligonucleotide
aaucgggacucgauggacu

SEQ ID NO: 1323651 - RNA, 19 nt, Artificial Sequence
  Description of Artificial Sequence: Synthetic oligonucleotide
cagauauuuagagaggaua

SEQ ID NO: 1323652 - RNA, 19 nt, Artificial Sequence
  Description of Artificial Sequence: Synthetic oligonucleotide
uagauuagggcuggauggu

SEQ ID NO: 1323653 - RNA, 19 nt, Artificial Sequence
  Description of Artificial Sequence: Synthetic oligonucleotide
acuauacugaugagcucuc

SEQ ID NO: 1323654 - RNA, 19 nt, Artificial Sequence
  Description of Artificial Sequence: Synthetic oligonucleotide
gcuaucuggcuaucagugg

SEQ ID NO: 1323655 - RNA, 19 nt, Artificial Sequence
  Description of Artificial Sequence: Synthetic oligonucleotide
agccugucaugugugucgc

SEQ ID NO: 1323656 - RNA, 19 nt, Artificial Sequence
  Description of Artificial Sequence: Synthetic oligonucleotide
gauccaacguuugaguaua

SEQ ID NO: 1323657 - RNA, 19 nt, Artificial Sequence
  Description of Artificial Sequence: Synthetic oligonucleotide
ugguuacauagcuucuuua

SEQ ID NO: 1323658 - RNA, 19 nt, Artificial Sequence
  Description of Artificial Sequence: Synthetic oligonucleotide
uguuuacacaacggcggca

SEQ ID NO: 1323659 - RNA, 19 nt, Artificial Sequence
  Description of Artificial Sequence: Synthetic oligonucleotide
ucuuauggcucugccgcug

SEQ ID NO: 1323660 - RNA, 19 nt, Artificial Sequence
  Description of Artificial Sequence: Synthetic oligonucleotide
gucagccuacaacaaacca

SEQ ID NO: 1323661 - RNA, 19 nt, Artificial Sequence
  Description of Artificial Sequence: Synthetic oligonucleotide
ucauagauuagggcuggau

SEQ ID NO: 1323662 - RNA, 19 nt, Artificial Sequence
  Description of Artificial Sequence: Synthetic oligonucleotide
cgaacauacaaguaccuuc

SEQ ID NO: 1323663 - RNA, 19 nt, Artificial Sequence
  Description of Artificial Sequence: Synthetic oligonucleotide
gugcuaugguuccacugag

SEQ ID NO: 1323664 - RNA, 19 nt, Artificial Sequence
  Description of Artificial Sequence: Synthetic oligonucleotide
gaguaccucauccuggagu

SEQ ID NO: 1323665 - RNA, 19 nt, Artificial Sequence
  Description of Artificial Sequence: Synthetic oligonucleotide
uugagcucgccaagagaga

SEQ ID NO: 1323666 - RNA, 19 nt, Artificial Sequence
  Description of Artificial Sequence: Synthetic oligonucleotide
gagaacgaugauggaagac

SEQ ID NO: 1323667 - RNA, 19 nt, Artificial Sequence
  Description of Artificial Sequence: Synthetic oligonucleotide
agcagucgguaaauauagc

SEQ ID NO: 1323668 - RNA, 19 nt, Artificial Sequence
  Description of Artificial Sequence: Synthetic oligonucleotide
ucgguaaauauagcagguc

SEQ ID NO: 1323669 - RNA, 19 nt, Artificial Sequence
  Description of Artificial Sequence: Synthetic oligonucleotide
cucuucuaugguuccagca

SEQ ID NO: 1323670 - RNA, 19 nt, Artificial Sequence
  Description of Artificial Sequence: Synthetic oligonucleotide
cuauacugaugagcucucg

SEQ ID NO: 1323671 - RNA, 19 nt, Artificial Sequence
  Description of Artificial Sequence: Synthetic oligonucleotide
ccuucuuauggcucugccg

SEQ ID NO: 1323672 - RNA, 19 nt, Artificial Sequence
  Description of Artificial Sequence: Synthetic oligonucleotide
auccaggcgaacauacaag

SEQ ID NO: 1323673 - RNA, 19 nt, Artificial Sequence
  Description of Artificial Sequence: Synthetic oligonucleotide
gaaggugauggcuguaggu

SEQ ID NO: 1323674 - RNA, 19 nt, Artificial Sequence
  Description of Artificial Sequence: Synthetic oligonucleotide
gaugagcucucgaagacgu

SEQ ID NO: 1323675 - RNA, 19 nt, Artificial Sequence
  Description of Artificial Sequence: Synthetic oligonucleotide
aucucuuauauaacucagu

SEQ ID NO: 1323676 - RNA, 19 nt, Artificial Sequence
  Description of Artificial Sequence: Synthetic oligonucleotide
agaggauaucugauguucu

SEQ ID NO: 1323677 - RNA, 19 nt, Artificial Sequence
  Description of Artificial Sequence: Synthetic oligonucleotide
gaugagcacccgacgacug

SEQ ID NO: 1323678 - RNA, 19 nt, Artificial Sequence
  Description of Artificial Sequence: Synthetic oligonucleotide
acguuugaguauaauuaga

SEQ ID NO: 1323679 - RNA, 19 nt, Artificial Sequence
  Description of Artificial Sequence: Synthetic oligonucleotide
uuaucacugcugcggcuuc

SEQ ID NO: 1323680 - RNA, 19 nt, Artificial Sequence
  Description of Artificial Sequence: Synthetic oligonucleotide
ccuauauccuuccuuuaac

SEQ ID NO: 1323681 - RNA, 19 nt, Artificial Sequence
  Description of Artificial Sequence: Synthetic oligonucleotide
aaguaccuucgagcucggc

SEQ ID NO: 1323682 - RNA, 19 nt, Artificial Sequence
  Description of Artificial Sequence: Synthetic oligonucleotide
gcuaucaguggagaccccg

SEQ ID NO: 1323683 - RNA, 19 nt, Artificial Sequence
  Description of Artificial Sequence: Synthetic oligonucleotide
acgcucaucuugccuucac

SEQ ID NO: 1323684 - RNA, 19 nt, Artificial Sequence
  Description of Artificial Sequence: Synthetic oligonucleotide
gaccaucacgccagacucg

SEQ ID NO: 1323685 - RNA, 19 nt, Artificial Sequence
  Description of Artificial Sequence: Synthetic oligonucleotide
cucaucuugccuucacgca

SEQ ID NO: 1323686 - RNA, 19 nt, Artificial Sequence
  Description of Artificial Sequence: Synthetic oligonucleotide
guuuacacaacggcggcaa

SEQ ID NO: 1323687 - RNA, 19 nt, Artificial Sequence
  Description of Artificial Sequence: Synthetic oligonucleotide
agccagaucugaaguacag

SEQ ID NO: 1323688 - RNA, 19 nt, Artificial Sequence
  Description of Artificial Sequence: Synthetic oligonucleotide
gcaggucuucuuuugacca

SEQ ID NO: 1323689 - RNA, 19 nt, Artificial Sequence
  Description of Artificial Sequence: Synthetic oligonucleotide
ccuuuaaccacuacaucca

SEQ ID NO: 1323690 - RNA, 19 nt, Artificial Sequence
  Description of Artificial Sequence: Synthetic oligonucleotide
ggcagauauuuagagagga

SEQ ID NO: 1323691 - RNA, 19 nt, Artificial Sequence
  Description of Artificial Sequence: Synthetic oligonucleotide
cuuugagcucgccaagaga

SEQ ID NO: 1323692 - RNA, 19 nt, Artificial Sequence
  Description of Artificial Sequence: Synthetic oligonucleotide
cucgccaagagagaaaugu

SEQ ID NO: 1323693 - RNA, 19 nt, Artificial Sequence
  Description of Artificial Sequence: Synthetic oligonucleotide
cacuauacugaugagcucu

SEQ ID NO: 1323694 - RNA, 19 nt, Artificial Sequence
  Description of Artificial Sequence: Synthetic oligonucleotide
gauaucugauguucuccgu

SEQ ID NO: 1323695 - RNA, 19 nt, Artificial Sequence
  Description of Artificial Sequence: Synthetic oligonucleotide
gaaguauaaccagguggga

SEQ ID NO: 1323696 - RNA, 19 nt, Artificial Sequence
  Description of Artificial Sequence: Synthetic oligonucleotide
gacgacugguauucaagcu

SEQ ID NO: 1323697 - RNA, 19 nt, Artificial Sequence
  Description of Artificial Sequence: Synthetic oligonucleotide
uuuacacaacggcggcaau

SEQ ID NO: 1323698 - RNA, 19 nt, Artificial Sequence
  Description of Artificial Sequence: Synthetic oligonucleotide
ugagcacccgacgacuggu

SEQ ID NO: 1323699 - RNA, 19 nt, Artificial Sequence
  Description of Artificial Sequence: Synthetic oligonucleotide
uuccccugacacacacuug

SEQ ID NO: 1323700 - RNA, 19 nt, Artificial Sequence
  Description of Artificial Sequence: Synthetic oligonucleotide
cuaugguuccacugagcca

SEQ ID NO: 1323701 - RNA, 19 nt, Artificial Sequence
  Description of Artificial Sequence: Synthetic oligonucleotide
aucaggcaccuauucacua

SEQ ID NO: 1323702 - RNA, 19 nt, Artificial Sequence
  Description of Artificial Sequence: Synthetic oligonucleotide
uucuccguaucaggcaccu

SEQ ID NO: 1323703 - RNA, 19 nt, Artificial Sequence
  Description of Artificial Sequence: Synthetic oligonucleotide
ccgguuagcaccaaugaga

SEQ ID NO: 1323704 - RNA, 19 nt, Artificial Sequence
  Description of Artificial Sequence: Synthetic oligonucleotide
gcauuuuaccugaaagcug

SEQ ID NO: 1323705 - RNA, 19 nt, Artificial Sequence
  Description of Artificial Sequence: Synthetic oligonucleotide
ugccuucacgcaaauucuu

SEQ ID NO: 1323706 - RNA, 19 nt, Artificial Sequence
  Description of Artificial Sequence: Synthetic oligonucleotide
acucaguuugaaggggugu

SEQ ID NO: 1323707 - RNA, 19 nt, Artificial Sequence
  Description of Artificial Sequence: Synthetic oligonucleotide
aggcaccuauucacuauac

SEQ ID NO: 1323708 - RNA, 19 nt, Artificial Sequence
  Description of Artificial Sequence: Synthetic oligonucleotide
caggcuuagccugucucag

SEQ ID NO: 1323709 - RNA, 19 nt, Artificial Sequence
  Description of Artificial Sequence: Synthetic oligonucleotide
uaccuucgagcucggcaca

SEQ ID NO: 1323710 - RNA, 19 nt, Artificial Sequence
  Description of Artificial Sequence: Synthetic oligonucleotide
guuuaucugugcuaugguu

SEQ ID NO: 1323711 - RNA, 19 nt, Artificial Sequence
  Description of Artificial Sequence: Synthetic oligonucleotide
aucauuggcuggguuccag

SEQ ID NO: 1323712 - RNA, 19 nt, Artificial Sequence
  Description of Artificial Sequence: Synthetic oligonucleotide
uccguaucaggcaccuauu

SEQ ID NO: 1323713 - RNA, 19 nt, Artificial Sequence
  Description of Artificial Sequence: Synthetic oligonucleotide
gccgguuagcaccaaugag

SEQ ID NO: 1323714 - RNA, 19 nt, Artificial Sequence
  Description of Artificial Sequence: Synthetic oligonucleotide
gcaccaagcugaaauauuc

SEQ ID NO: 1323715 - RNA, 19 nt, Artificial Sequence
  Description of Artificial Sequence: Synthetic oligonucleotide
aacgaugauggaagacgaa

SEQ ID NO: 1323716 - RNA, 19 nt, Artificial Sequence
  Description of Artificial Sequence: Synthetic oligonucleotide
aucgggacucgauggacua

SEQ ID NO: 1323717 - RNA, 19 nt, Artificial Sequence
  Description of Artificial Sequence: Synthetic oligonucleotide
gauggacuauugaagcgcu

SEQ ID NO: 1323718 - RNA, 19 nt, Artificial Sequence
  Description of Artificial Sequence: Synthetic oligonucleotide
gcgucuguuuacacaacgg

SEQ ID NO: 1323719 - RNA, 19 nt, Artificial Sequence
  Description of Artificial Sequence: Synthetic oligonucleotide
uccaacguuugaguauaau

SEQ ID NO: 1323720 - RNA, 19 nt, Artificial Sequence
  Description of Artificial Sequence: Synthetic oligonucleotide
ccgacgacugguauucaag

SEQ ID NO: 1323721 - RNA, 19 nt, Artificial Sequence
  Description of Artificial Sequence: Synthetic oligonucleotide
ucccuauauccuuccuuua

SEQ ID NO: 1323722 - RNA, 19 nt, Artificial Sequence
  Description of Artificial Sequence: Synthetic oligonucleotide
cagugccuucuuauggcuc

SEQ ID NO: 1323723 - RNA, 19 nt, Artificial Sequence
  Description of Artificial Sequence: Synthetic oligonucleotide
caagcaagucauuuuggau

SEQ ID NO: 1323724 - RNA, 19 nt, Artificial Sequence
  Description of Artificial Sequence: Synthetic oligonucleotide
caaguaccuucgagcucgg

SEQ ID NO: 1323725 - RNA, 19 nt, Artificial Sequence
  Description of Artificial Sequence: Synthetic oligonucleotide
uuagggcuggaugguuaca

SEQ ID NO: 1323726 - RNA, 19 nt, Artificial Sequence
  Description of Artificial Sequence: Synthetic oligonucleotide
gacaccagcacaacuuuau

SEQ ID NO: 1323727 - RNA, 19 nt, Artificial Sequence
  Description of Artificial Sequence: Synthetic oligonucleotide
uuauggcucugccgcugaa

SEQ ID NO: 1323728 - RNA, 19 nt, Artificial Sequence
  Description of Artificial Sequence: Synthetic oligonucleotide
gugggaagauauccaaagu

SEQ ID NO: 1323729 - RNA, 19 nt, Artificial Sequence
  Description of Artificial Sequence: Synthetic oligonucleotide
gacaaaaucgggacucgau

SEQ ID NO: 1323730 - RNA, 19 nt, Artificial Sequence
  Description of Artificial Sequence: Synthetic oligonucleotide
uucgagcucggcacagcuu

SEQ ID NO: 1323731 - RNA, 19 nt, Artificial Sequence
  Description of Artificial Sequence: Synthetic oligonucleotide
cgacgacugguauucaagc

SEQ ID NO: 1323732 - RNA, 19 nt, Artificial Sequence
  Description of Artificial Sequence: Synthetic oligonucleotide
auggacuauugaagcgcuc

SEQ ID NO: 1323733 - RNA, 19 nt, Artificial Sequence
  Description of Artificial Sequence: Synthetic oligonucleotide
agcacccgacgacugguau

SEQ ID NO: 1323734 - RNA, 19 nt, Artificial Sequence
  Description of Artificial Sequence: Synthetic oligonucleotide
ggugucagccuacaacaaa

SEQ ID NO: 1323735 - RNA, 19 nt, Artificial Sequence
  Description of Artificial Sequence: Synthetic oligonucleotide
gugucccucaucacauaug

SEQ ID NO: 1323736 - RNA, 19 nt, Artificial Sequence
  Description of Artificial Sequence: Synthetic oligonucleotide
ggcuuagccugucucagaa

SEQ ID NO: 1323737 - RNA, 19 nt, Artificial Sequence
  Description of Artificial Sequence: Synthetic oligonucleotide
aggcuuagccugucucaga

SEQ ID NO: 1323738 - RNA, 19 nt, Artificial Sequence
  Description of Artificial Sequence: Synthetic oligonucleotide
cugaggcuagcuucaucca

SEQ ID NO: 1323739 - RNA, 19 nt, Artificial Sequence
  Description of Artificial Sequence: Synthetic oligonucleotide
gaugguuacauagcuucuu

SEQ ID NO: 1323740 - RNA, 19 nt, Artificial Sequence
  Description of Artificial Sequence: Synthetic oligonucleotide
cugccucgcuggcagcugc

SEQ ID NO: 1323741 - RNA, 19 nt, Artificial Sequence
  Description of Artificial Sequence: Synthetic oligonucleotide
gaccccgcugcuccucaug

SEQ ID NO: 1323742 - RNA, 19 nt, Artificial Sequence
  Description of Artificial Sequence: Synthetic oligonucleotide
cugagccagaucugaagua

SEQ ID NO: 1323743 - RNA, 19 nt, Artificial Sequence
  Description of Artificial Sequence: Synthetic oligonucleotide
caacggcggcaaugcagcc

SEQ ID NO: 1323744 - RNA, 19 nt, Artificial Sequence
  Description of Artificial Sequence: Synthetic oligonucleotide
guucuccguaucaggcacc

SEQ ID NO: 1323745 - RNA, 19 nt, Artificial Sequence
  Description of Artificial Sequence: Synthetic oligonucleotide
ccaaugagauuaaguccac

SEQ ID NO: 1323746 - RNA, 19 nt, Artificial Sequence
  Description of Artificial Sequence: Synthetic oligonucleotide
gccuucuuauggcucugcc

SEQ ID NO: 1323747 - RNA, 19 nt, Artificial Sequence
  Description of Artificial Sequence: Synthetic oligonucleotide
accuucgagcucggcacag

SEQ ID NO: 1323748 - RNA, 19 nt, Artificial Sequence
  Description of Artificial Sequence: Synthetic oligonucleotide
gaaggggugucagccuaca

SEQ ID NO: 1323749 - RNA, 19 nt, Artificial Sequence
  Description of Artificial Sequence: Synthetic oligonucleotide
ugucugccucgcuggcagc

SEQ ID NO: 1323750 - RNA, 19 nt, Artificial Sequence
  Description of Artificial Sequence: Synthetic oligonucleotide
agauuagggcuggaugguu

SEQ ID NO: 1323751 - RNA, 19 nt, Artificial Sequence
  Description of Artificial Sequence: Synthetic oligonucleotide
ccugucaugugugucgcug

SEQ ID NO: 1323752 - RNA, 19 nt, Artificial Sequence
  Description of Artificial Sequence: Synthetic oligonucleotide
cucugccgcugaaagaucu

SEQ ID NO: 1323753 - RNA, 19 nt, Artificial Sequence
  Description of Artificial Sequence: Synthetic oligonucleotide
agauagcagucgguaaaua

SEQ ID NO: 1323754 - RNA, 19 nt, Artificial Sequence
  Description of Artificial Sequence: Synthetic oligonucleotide
gaaguacagucagaaccgu

SEQ ID NO: 1323755 - RNA, 19 nt, Artificial Sequence
  Description of Artificial Sequence: Synthetic oligonucleotide
cuucacuggcagauauuua

SEQ ID NO: 1323756 - RNA, 19 nt, Artificial Sequence
  Description of Artificial Sequence: Synthetic oligonucleotide
auuguaccauccaggcgaa

SEQ ID NO: 1323757 - RNA, 19 nt, Artificial Sequence
  Description of Artificial Sequence: Synthetic oligonucleotide
ggacucgauggacuauuga

SEQ ID NO: 1323758 - RNA, 19 nt, Artificial Sequence
  Description of Artificial Sequence: Synthetic oligonucleotide
cagaccuggcgucuguuua

SEQ ID NO: 1323759 - RNA, 19 nt, Artificial Sequence
  Description of Artificial Sequence: Synthetic oligonucleotide
caugaccagccgguuagca

SEQ ID NO: 1323760 - RNA, 19 nt, Artificial Sequence
  Description of Artificial Sequence: Synthetic oligonucleotide
gaccuggcgucuguuuaca

SEQ ID NO: 1323761 - RNA, 19 nt, Artificial Sequence
  Description of Artificial Sequence: Synthetic oligonucleotide
guaccucauccuggagucc

SEQ ID NO: 1323762 - RNA, 19 nt, Artificial Sequence
  Description of Artificial Sequence: Synthetic oligonucleotide
caggcaccuauucacuaua

SEQ ID NO: 1323763 - RNA, 19 nt, Artificial Sequence
  Description of Artificial Sequence: Synthetic oligonucleotide
gagcucggcacagcuuuuc

SEQ ID NO: 1323764 - RNA, 19 nt, Artificial Sequence
  Description of Artificial Sequence: Synthetic oligonucleotide
ucuugccuucacgcaaauu

SEQ ID NO: 1323765 - RNA, 19 nt, Artificial Sequence
  Description of Artificial Sequence: Synthetic oligonucleotide
caucucgacuccucaaaau

SEQ ID NO: 1323766 - RNA, 19 nt, Artificial Sequence
  Description of Artificial Sequence: Synthetic oligonucleotide
ccaacguuugaguauaauu

SEQ ID NO: 1323767 - RNA, 19 nt, Artificial Sequence
  Description of Artificial Sequence: Synthetic oligonucleotide
gcaucucgacuccucaaaa

SEQ ID NO: 1323768 - RNA, 19 nt, Artificial Sequence
  Description of Artificial Sequence: Synthetic oligonucleotide
cuucgagcucggcacagcu

SEQ ID NO: 1323769 - RNA, 19 nt, Artificial Sequence
  Description of Artificial Sequence: Synthetic oligonucleotide
ccguaucaggcaccuauuc

SEQ ID NO: 1323770 - RNA, 19 nt, Artificial Sequence
  Description of Artificial Sequence: Synthetic oligonucleotide
cucgggccauagcuuguuc

SEQ ID NO: 1323771 - RNA, 19 nt, Artificial Sequence
  Description of Artificial Sequence: Synthetic oligonucleotide
guauccucaaagccaucuu

SEQ ID NO: 1323772 - RNA, 19 nt, Artificial Sequence
  Description of Artificial Sequence: Synthetic oligonucleotide
agcuggcuaucuggcuauc

SEQ ID NO: 1323773 - RNA, 19 nt, Artificial Sequence
  Description of Artificial Sequence: Synthetic oligonucleotide
uccagaccagcuggcuauc

SEQ ID NO: 1323774 - RNA, 19 nt, Artificial Sequence
  Description of Artificial Sequence: Synthetic oligonucleotide
cccuauauccuuccuuuaa

SEQ ID NO: 1323775 - RNA, 19 nt, Artificial Sequence
  Description of Artificial Sequence: Synthetic oligonucleotide
gccuucacgcaaauucuuc

SEQ ID NO: 1323776 - RNA, 19 nt, Artificial Sequence
  Description of Artificial Sequence: Synthetic oligonucleotide
gcggcaaugcagccuguca

SEQ ID NO: 1323777 - RNA, 19 nt, Artificial Sequence
  Description of Artificial Sequence: Synthetic oligonucleotide
cgguaaauauagcaggucu

SEQ ID NO: 1323778 - RNA, 19 nt, Artificial Sequence
  Description of Artificial Sequence: Synthetic oligonucleotide
ggcaccuauucacuauacu

SEQ ID NO: 1323779 - RNA, 19 nt, Artificial Sequence
  Description of Artificial Sequence: Synthetic oligonucleotide
gugcaccaagcugaaauau

SEQ ID NO: 1323780 - RNA, 19 nt, Artificial Sequence
  Description of Artificial Sequence: Synthetic oligonucleotide
cguuccuccccuagcugcc

SEQ ID NO: 1323781 - RNA, 19 nt, Artificial Sequence
  Description of Artificial Sequence: Synthetic oligonucleotide
gcuguaggugaagcauccc

SEQ ID NO: 1323782 - RNA, 19 nt, Artificial Sequence
  Description of Artificial Sequence: Synthetic oligonucleotide
gggacucgauggacuauug

SEQ ID NO: 1323783 - RNA, 19 nt, Artificial Sequence
  Description of Artificial Sequence: Synthetic oligonucleotide
ucgcuucuuaauggacauu

SEQ ID NO: 1323784 - RNA, 19 nt, Artificial Sequence
  Description of Artificial Sequence: Synthetic oligonucleotide
gagcucgccaagagagaaa

SEQ ID NO: 1323785 - RNA, 19 nt, Artificial Sequence
  Description of Artificial Sequence: Synthetic oligonucleotide
ccuucacgcaaauucuucu

SEQ ID NO: 1323786 - RNA, 19 nt, Artificial Sequence
  Description of Artificial Sequence: Synthetic oligonucleotide
agggccugguaagucugau

SEQ ID NO: 1323787 - RNA, 19 nt, Artificial Sequence
  Description of Artificial Sequence: Synthetic oligonucleotide
acucgggccauagcuuguu

SEQ ID NO: 1323788 - RNA, 19 nt, Artificial Sequence
  Description of Artificial Sequence: Synthetic oligonucleotide
caugugugucgcugaggcu

SEQ ID NO: 1323789 - RNA, 19 nt, Artificial Sequence
  Description of Artificial Sequence: Synthetic oligonucleotide
caaucuucacuggcagaua

SEQ ID NO: 1323790 - RNA, 19 nt, Artificial Sequence
  Description of Artificial Sequence: Synthetic oligonucleotide
gacgaaggugauggcugua

SEQ ID NO: 1323791 - RNA, 19 nt, Artificial Sequence
  Description of Artificial Sequence: Synthetic oligonucleotide
gcucggcacagcuuuucaa

SEQ ID NO: 1323792 - RNA, 19 nt, Artificial Sequence
  Description of Artificial Sequence: Synthetic oligonucleotide
gccagacucgggccauagc

SEQ ID NO: 1323793 - RNA, 19 nt, Artificial Sequence
  Description of Artificial Sequence: Synthetic oligonucleotide
ggaugguuacauagcuucu

SEQ ID NO: 1323794 - RNA, 19 nt, Artificial Sequence
  Description of Artificial Sequence: Synthetic oligonucleotide
cccguuuaucugugcuaug

SEQ ID NO: 1323795 - RNA, 19 nt, Artificial Sequence
  Description of Artificial Sequence: Synthetic oligonucleotide
ggcgaacauacaaguaccu

SEQ ID NO: 1323796 - RNA, 19 nt, Artificial Sequence
  Description of Artificial Sequence: Synthetic oligonucleotide
ccaucacgccagacucggg

SEQ ID NO: 1323797 - RNA, 19 nt, Artificial Sequence
  Description of Artificial Sequence: Synthetic oligonucleotide
auccaacguuugaguauaa

SEQ ID NO: 1323798 - RNA, 19 nt, Artificial Sequence
  Description of Artificial Sequence: Synthetic oligonucleotide
caucaaccacacagcugcu

SEQ ID NO: 1323799 - RNA, 19 nt, Artificial Sequence
  Description of Artificial Sequence: Synthetic oligonucleotide
ucuccguaucaggcaccua

SEQ ID NO: 1323800 - RNA, 19 nt, Artificial Sequence
  Description of Artificial Sequence: Synthetic oligonucleotide
ccagcacaacuuuaucacu

SEQ ID NO: 1323801 - RNA, 19 nt, Artificial Sequence
  Description of Artificial Sequence: Synthetic oligonucleotide
gcagauauuuagagaggau

SEQ ID NO: 1323802 - RNA, 19 nt, Artificial Sequence
  Description of Artificial Sequence: Synthetic oligonucleotide
gacucgggccauagcuugu

SEQ ID NO: 1323803 - RNA, 19 nt, Artificial Sequence
  Description of Artificial Sequence: Synthetic oligonucleotide
gcucgccaagagagaaaug

SEQ ID NO: 1323804 - RNA, 19 nt, Artificial Sequence
  Description of Artificial Sequence: Synthetic oligonucleotide
gagcacccgacgacuggua

SEQ ID NO: 1323805 - RNA, 19 nt, Artificial Sequence
  Description of Artificial Sequence: Synthetic oligonucleotide
cacgcucaucuugccuuca

SEQ ID NO: 1323806 - RNA, 19 nt, Artificial Sequence
  Description of Artificial Sequence: Synthetic oligonucleotide
gugugucgcugaggcuagc

SEQ ID NO: 1323807 - RNA, 19 nt, Artificial Sequence
  Description of Artificial Sequence: Synthetic oligonucleotide
cgguuagcaccaaugagau

SEQ ID NO: 1323808 - RNA, 19 nt, Artificial Sequence
  Description of Artificial Sequence: Synthetic oligonucleotide
ccgcugaaagaucuucucu

SEQ ID NO: 1323809 - RNA, 19 nt, Artificial Sequence
  Description of Artificial Sequence: Synthetic oligonucleotide
acccgacgacugguauuca

SEQ ID NO: 1323810 - RNA, 19 nt, Artificial Sequence
  Description of Artificial Sequence: Synthetic oligonucleotide
guggccagaccuggcgucu

SEQ ID NO: 1323811 - RNA, 19 nt, Artificial Sequence
  Description of Artificial Sequence: Synthetic oligonucleotide
ggcggcaaugcagccuguc

SEQ ID NO: 1323812 - RNA, 19 nt, Artificial Sequence
  Description of Artificial Sequence: Synthetic oligonucleotide
cccgacgacugguauucaa

SEQ ID NO: 1323813 - RNA, 19 nt, Artificial Sequence
  Description of Artificial Sequence: Synthetic oligonucleotide
cguuuaucugugcuauggu

SEQ ID NO: 1323814 - RNA, 19 nt, Artificial Sequence
  Description of Artificial Sequence: Synthetic oligonucleotide
cacagcugcucagugccuu

SEQ ID NO: 1323815 - RNA, 19 nt, Artificial Sequence
  Description of Artificial Sequence: Synthetic oligonucleotide
gcacccgacgacugguauu

SEQ ID NO: 1323816 - RNA, 19 nt, Artificial Sequence
  Description of Artificial Sequence: Synthetic oligonucleotide
ccccguuuaucugugcuau

SEQ ID NO: 1323817 - RNA, 19 nt, Artificial Sequence
  Description of Artificial Sequence: Synthetic oligonucleotide
cgccagacucgggccauag

SEQ ID NO: 1323818 - RNA, 19 nt, Artificial Sequence
  Description of Artificial Sequence: Synthetic oligonucleotide
acgccagacucgggccaua

SEQ ID NO: 1323819 - RNA, 19 nt, Artificial Sequence
  Description of Artificial Sequence: Synthetic oligonucleotide
cacgccagacucgggccau

SEQ ID NO: 1323820 - RNA, 19 nt, Artificial Sequence
  Description of Artificial Sequence: Synthetic oligonucleotide
ccagaccuggcgucuguuu

SEQ ID NO: 1323821 - RNA, 19 nt, Artificial Sequence
  Description of Artificial Sequence: Synthetic oligonucleotide
cagcugcaucucgacuccu

SEQ ID NO: 1323822 - RNA, 19 nt, Artificial Sequence
  Description of Artificial Sequence: Synthetic oligonucleotide
cgaagacguuccuccccua

SEQ ID NO: 1323823 - RNA, 19 nt, Artificial Sequence
  Description of Artificial Sequence: Synthetic oligonucleotide
ccagccgguuagcaccaau

SEQ ID NO: 1323824 - RNA, 19 nt, Artificial Sequence
  Description of Artificial Sequence: Synthetic oligonucleotide
cgagcucggcacagcuuuu

SEQ ID NO: 1323825 - RNA, 19 nt, Artificial Sequence
  Description of Artificial Sequence: Synthetic oligonucleotide
cggcggcaaugcagccugu

SEQ ID NO: 1323826 - RNA, 19 nt, Artificial Sequence
  Description of Artificial Sequence: Synthetic oligonucleotide
aaauaaauaauggaguugg

SEQ ID NO: 1323827 - RNA, 19 nt, Artificial Sequence
  Description of Artificial Sequence: Synthetic oligonucleotide
uuaucuguaaggaugaacc

SEQ ID NO: 1323828 - RNA, 19 nt, Artificial Sequence
  Description of Artificial Sequence: Synthetic oligonucleotide
aaauaauggaguuggggac

SEQ ID NO: 1323829 - RNA, 19 nt, Artificial Sequence
  Description of Artificial Sequence: Synthetic oligonucleotide
aaggacaacacguagcagg

SEQ ID NO: 1323830 - RNA, 19 nt, Artificial Sequence
  Description of Artificial Sequence: Synthetic oligonucleotide
aaagacucucccuucaccg

SEQ ID NO: 1323831 - RNA, 19 nt, Artificial Sequence
  Description of Artificial Sequence: Synthetic oligonucleotide
aagcauggagcacagauag

SEQ ID NO: 1323832 - RNA, 19 nt, Artificial Sequence
  Description of Artificial Sequence: Synthetic oligonucleotide
aaaagacucucccuucacc

SEQ ID NO: 1323833 - RNA, 19 nt, Artificial Sequence
  Description of Artificial Sequence: Synthetic oligonucleotide
gaauguaaagcucaaagca

SEQ ID NO: 1323834 - RNA, 19 nt, Artificial Sequence
  Description of Artificial Sequence: Synthetic oligonucleotide
caaauaaggagacaggagc

SEQ ID NO: 1323835 - RNA, 19 nt, Artificial Sequence
  Description of Artificial Sequence: Synthetic oligonucleotide
aaauccgcuucuuucuugc

SEQ ID NO: 1323836 - RNA, 19 nt, Artificial Sequence
  Description of Artificial Sequence: Synthetic oligonucleotide
aaggucggugaacucaugc

SEQ ID NO: 1323837 - RNA, 19 nt, Artificial Sequence
  Description of Artificial Sequence: Synthetic oligonucleotide
aagauuaccaacauguuaa

SEQ ID NO: 1323838 - RNA, 19 nt, Artificial Sequence
  Description of Artificial Sequence: Synthetic oligonucleotide
auaaauaauggaguugggg

SEQ ID NO: 1323839 - RNA, 19 nt, Artificial Sequence
  Description of Artificial Sequence: Synthetic oligonucleotide
ucuguaaggaugaaccagc

SEQ ID NO: 1323840 - RNA, 19 nt, Artificial Sequence
  Description of Artificial Sequence: Synthetic oligonucleotide
auaauuaauaagauuacca

SEQ ID NO: 1323841 - RNA, 19 nt, Artificial Sequence
  Description of Artificial Sequence: Synthetic oligonucleotide
agugagcccgcucaaacgc

SEQ ID NO: 1323842 - RNA, 19 nt, Artificial Sequence
  Description of Artificial Sequence: Synthetic oligonucleotide
uaaggaugaaccagcgccg

SEQ ID NO: 1323843 - RNA, 19 nt, Artificial Sequence
  Description of Artificial Sequence: Synthetic oligonucleotide
uauuguugggaauguaaag

SEQ ID NO: 1323844 - RNA, 19 nt, Artificial Sequence
  Description of Artificial Sequence: Synthetic oligonucleotide
aaguucguguucuaccaag

SEQ ID NO: 1323845 - RNA, 19 nt, Artificial Sequence
  Description of Artificial Sequence: Synthetic oligonucleotide
gauagguuuagcucuuccc

SEQ ID NO: 1323846 - RNA, 19 nt, Artificial Sequence
  Description of Artificial Sequence: Synthetic oligonucleotide
uaggaauugccgcagggcc

SEQ ID NO: 1323847 - RNA, 19 nt, Artificial Sequence
  Description of Artificial Sequence: Synthetic oligonucleotide
ugacguugggauuaugaag

SEQ ID NO: 1323848 - RNA, 19 nt, Artificial Sequence
  Description of Artificial Sequence: Synthetic oligonucleotide
auagguuuagcucuucccu

SEQ ID NO: 1323849 - RNA, 19 nt, Artificial Sequence
  Description of Artificial Sequence: Synthetic oligonucleotide
ucuuacugcccucauuggc

SEQ ID NO: 1323850 - RNA, 19 nt, Artificial Sequence
  Description of Artificial Sequence: Synthetic oligonucleotide
aauaauggaguuggggaca

SEQ ID NO: 1323851 - RNA, 19 nt, Artificial Sequence
  Description of Artificial Sequence: Synthetic oligonucleotide
aagacucucccuucaccgg

SEQ ID NO: 1323852 - RNA, 19 nt, Artificial Sequence
  Description of Artificial Sequence: Synthetic oligonucleotide
agcacagauagguuuagcu

SEQ ID NO: 1323853 - RNA, 19 nt, Artificial Sequence
  Description of Artificial Sequence: Synthetic oligonucleotide
auaggaauugccgcagggc

SEQ ID NO: 1323854 - RNA, 19 nt, Artificial Sequence
  Description of Artificial Sequence: Synthetic oligonucleotide
ggaauguaaagcucaaagc

SEQ ID NO: 1323855 - RNA, 19 nt, Artificial Sequence
  Description of Artificial Sequence: Synthetic oligonucleotide
guugggauuaugaaggcug

SEQ ID NO: 1323856 - RNA, 19 nt, Artificial Sequence
  Description of Artificial Sequence: Synthetic oligonucleotide
cuagagguggugauuuucc

SEQ ID NO: 1323857 - RNA, 19 nt, Artificial Sequence
  Description of Artificial Sequence: Synthetic oligonucleotide
aacauguuaauuacaaaua

SEQ ID NO: 1323858 - RNA, 19 nt, Artificial Sequence
  Description of Artificial Sequence: Synthetic oligonucleotide
gguucauggccacaaagcg

SEQ ID NO: 1323859 - RNA, 19 nt, Artificial Sequence
  Description of Artificial Sequence: Synthetic oligonucleotide
agaaguucguguucuacca

SEQ ID NO: 1323860 - RNA, 19 nt, Artificial Sequence
  Description of Artificial Sequence: Synthetic oligonucleotide
ucauugaugccccgguuca

SEQ ID NO: 1323861 - RNA, 19 nt, Artificial Sequence
  Description of Artificial Sequence: Synthetic oligonucleotide
aaccaaccaggauccauag

SEQ ID NO: 1323862 - RNA, 19 nt, Artificial Sequence
  Description of Artificial Sequence: Synthetic oligonucleotide
auuaaggucggugaacuca

SEQ ID NO: 1323863 - RNA, 19 nt, Artificial Sequence
  Description of Artificial Sequence: Synthetic oligonucleotide
ccaaccaggauccauagcc

SEQ ID NO: 1323864 - RNA, 19 nt, Artificial Sequence
  Description of Artificial Sequence: Synthetic oligonucleotide
cagaaguucguguucuacc

SEQ ID NO: 1323865 - RNA, 19 nt, Artificial Sequence
  Description of Artificial Sequence: Synthetic oligonucleotide
uagacaccguccuccaugg

SEQ ID NO: 1323866 - RNA, 19 nt, Artificial Sequence
  Description of Artificial Sequence: Synthetic oligonucleotide
cucagcgccgaaaagacuc

SEQ ID NO: 1323867 - RNA, 19 nt, Artificial Sequence
  Description of Artificial Sequence: Synthetic oligonucleotide
ggugauuuuccaaaugggg

SEQ ID NO: 1323868 - RNA, 19 nt, Artificial Sequence
  Description of Artificial Sequence: Synthetic oligonucleotide
uccggagucaagucugggg

SEQ ID NO: 1323869 - RNA, 19 nt, Artificial Sequence
  Description of Artificial Sequence: Synthetic oligonucleotide
gaagcgggcaauuuccuca

SEQ ID NO: 1323870 - RNA, 19 nt, Artificial Sequence
  Description of Artificial Sequence: Synthetic oligonucleotide
uaucuguaaggaugaacca

SEQ ID NO: 1323871 - RNA, 19 nt, Artificial Sequence
  Description of Artificial Sequence: Synthetic oligonucleotide
ucauagaagggguccacac

SEQ ID NO: 1323872 - RNA, 19 nt, Artificial Sequence
  Description of Artificial Sequence: Synthetic oligonucleotide
augcaaauccacaaaagca

SEQ ID NO: 1323873 - RNA, 19 nt, Artificial Sequence
  Description of Artificial Sequence: Synthetic oligonucleotide
accccaggguuacacaggc

SEQ ID NO: 1323874 - RNA, 19 nt, Artificial Sequence
  Description of Artificial Sequence: Synthetic oligonucleotide
auagaagggguccacacuu

SEQ ID NO: 1323875 - RNA, 19 nt, Artificial Sequence
  Description of Artificial Sequence: Synthetic oligonucleotide
ugcaaggucuuacugcccu

SEQ ID NO: 1323876 - RNA, 19 nt, Artificial Sequence
  Description of Artificial Sequence: Synthetic oligonucleotide
ggucuuacugcccucauug

SEQ ID NO: 1323877 - RNA, 19 nt, Artificial Sequence
  Description of Artificial Sequence: Synthetic oligonucleotide
caggucuccgccuucauug

SEQ ID NO: 1323878 - RNA, 19 nt, Artificial Sequence
  Description of Artificial Sequence: Synthetic oligonucleotide
uagaaaagcccgcggggag

SEQ ID NO: 1323879 - RNA, 19 nt, Artificial Sequence
  Description of Artificial Sequence: Synthetic oligonucleotide
caggaagcgggcaauuucc

SEQ ID NO: 1323880 - RNA, 19 nt, Artificial Sequence
  Description of Artificial Sequence: Synthetic oligonucleotide
aucuguaaggaugaaccag

SEQ ID NO: 1323881 - RNA, 19 nt, Artificial Sequence
  Description of Artificial Sequence: Synthetic oligonucleotide
agcuuuagaagccagccuu

SEQ ID NO: 1323882 - RNA, 19 nt, Artificial Sequence
  Description of Artificial Sequence: Synthetic oligonucleotide
uugaugccccgguucaugg

SEQ ID NO: 1323883 - RNA, 19 nt, Artificial Sequence
  Description of Artificial Sequence: Synthetic oligonucleotide
cauaggaauugccgcaggg

SEQ ID NO: 1323884 - RNA, 19 nt, Artificial Sequence
  Description of Artificial Sequence: Synthetic oligonucleotide
uucguguucuaccaagaau

SEQ ID NO: 1323885 - RNA, 19 nt, Artificial Sequence
  Description of Artificial Sequence: Synthetic oligonucleotide
uacccgaccauccgccucg

SEQ ID NO: 1323886 - RNA, 19 nt, Artificial Sequence
  Description of Artificial Sequence: Synthetic oligonucleotide
uuaaggucggugaacucau

SEQ ID NO: 1323887 - RNA, 19 nt, Artificial Sequence
  Description of Artificial Sequence: Synthetic oligonucleotide
cauggcggcuagaaaagcc

SEQ ID NO: 1323888 - RNA, 19 nt, Artificial Sequence
  Description of Artificial Sequence: Synthetic oligonucleotide
agcuccauaggaauugccg

SEQ ID NO: 1323889 - RNA, 19 nt, Artificial Sequence
  Description of Artificial Sequence: Synthetic oligonucleotide
agauuaaggucggugaacu

SEQ ID NO: 1323890 - RNA, 19 nt, Artificial Sequence
  Description of Artificial Sequence: Synthetic oligonucleotide
cuuccaagucuucacccgg

SEQ ID NO: 1323891 - RNA, 19 nt, Artificial Sequence
  Description of Artificial Sequence: Synthetic oligonucleotide
caaaggacaacacguagca

SEQ ID NO: 1323892 - RNA, 19 nt, Artificial Sequence
  Description of Artificial Sequence: Synthetic oligonucleotide
ucuccgccuucauugaugc

SEQ ID NO: 1323893 - RNA, 19 nt, Artificial Sequence
  Description of Artificial Sequence: Synthetic oligonucleotide
gcaguuaucuguaaggaug

SEQ ID NO: 1323894 - RNA, 19 nt, Artificial Sequence
  Description of Artificial Sequence: Synthetic oligonucleotide
auggcggcuagaaaagccc

SEQ ID NO: 1323895 - RNA, 19 nt, Artificial Sequence
  Description of Artificial Sequence: Synthetic oligonucleotide
gguuacacaggcaguaucg

SEQ ID NO: 1323896 - RNA, 19 nt, Artificial Sequence
  Description of Artificial Sequence: Synthetic oligonucleotide
acguugggauuaugaaggc

SEQ ID NO: 1323897 - RNA, 19 nt, Artificial Sequence
  Description of Artificial Sequence: Synthetic oligonucleotide
aagcgggcaauuuccucag

SEQ ID NO: 1323898 - RNA, 19 nt, Artificial Sequence
  Description of Artificial Sequence: Synthetic oligonucleotide
caagaauuggauccccuuc

SEQ ID NO: 1323899 - RNA, 19 nt, Artificial Sequence
  Description of Artificial Sequence: Synthetic oligonucleotide
cuuuccccgagguaauccc

SEQ ID NO: 1323900 - RNA, 19 nt, Artificial Sequence
  Description of Artificial Sequence: Synthetic oligonucleotide
uuuagaagccagccuucac

SEQ ID NO: 1323901 - RNA, 19 nt, Artificial Sequence
  Description of Artificial Sequence: Synthetic oligonucleotide
aggcgaaagcuccauagga

SEQ ID NO: 1323902 - RNA, 19 nt, Artificial Sequence
  Description of Artificial Sequence: Synthetic oligonucleotide
uucuaccaagaauuggauc

SEQ ID NO: 1323903 - RNA, 19 nt, Artificial Sequence
  Description of Artificial Sequence: Synthetic oligonucleotide
gaaaagacucucccuucac

SEQ ID NO: 1323904 - RNA, 19 nt, Artificial Sequence
  Description of Artificial Sequence: Synthetic oligonucleotide
cucguagacaccguccucc

SEQ ID NO: 1323905 - RNA, 19 nt, Artificial Sequence
  Description of Artificial Sequence: Synthetic oligonucleotide
aggguuuaaauaauuaaua

SEQ ID NO: 1323906 - RNA, 19 nt, Artificial Sequence
  Description of Artificial Sequence: Synthetic oligonucleotide
acggcaaaggacaacacgu

SEQ ID NO: 1323907 - RNA, 19 nt, Artificial Sequence
  Description of Artificial Sequence: Synthetic oligonucleotide
caaccaggauccauagccc

SEQ ID NO: 1323908 - RNA, 19 nt, Artificial Sequence
  Description of Artificial Sequence: Synthetic oligonucleotide
accaaccaggauccauagc

SEQ ID NO: 1323909 - RNA, 19 nt, Artificial Sequence
  Description of Artificial Sequence: Synthetic oligonucleotide
acaggcaguaucgcugggc

SEQ ID NO: 1323910 - RNA, 19 nt, Artificial Sequence
  Description of Artificial Sequence: Synthetic oligonucleotide
aauaaggagacaggagcua

SEQ ID NO: 1323911 - RNA, 19 nt, Artificial Sequence
  Description of Artificial Sequence: Synthetic oligonucleotide
cucaaacgccccaggagcc

SEQ ID NO: 1323912 - RNA, 19 nt, Artificial Sequence
  Description of Artificial Sequence: Synthetic oligonucleotide
ggcuagaaaagcccgcggg

SEQ ID NO: 1323913 - RNA, 19 nt, Artificial Sequence
  Description of Artificial Sequence: Synthetic oligonucleotide
caucauccggucaauuuuc

SEQ ID NO: 1323914 - RNA, 19 nt, Artificial Sequence
  Description of Artificial Sequence: Synthetic oligonucleotide
uuuccccgagguaaucccc

SEQ ID NO: 1323915 - RNA, 19 nt, Artificial Sequence
  Description of Artificial Sequence: Synthetic oligonucleotide
aguucggcuuccgaggauc

SEQ ID NO: 1323916 - RNA, 19 nt, Artificial Sequence
  Description of Artificial Sequence: Synthetic oligonucleotide
uccggaugcugucguagag

SEQ ID NO: 1323917 - RNA, 19 nt, Artificial Sequence
  Description of Artificial Sequence: Synthetic oligonucleotide
uaguagaggcaguuaucug

SEQ ID NO: 1323918 - RNA, 19 nt, Artificial Sequence
  Description of Artificial Sequence: Synthetic oligonucleotide
auaccaugugguuccccuc

SEQ ID NO: 1323919 - RNA, 19 nt, Artificial Sequence
  Description of Artificial Sequence: Synthetic oligonucleotide
gcucaaacgccccaggagc

SEQ ID NO: 1323920 - RNA, 19 nt, Artificial Sequence
  Description of Artificial Sequence: Synthetic oligonucleotide
uuguccguaguguacucaa

SEQ ID NO: 1323921 - RNA, 19 nt, Artificial Sequence
  Description of Artificial Sequence: Synthetic oligonucleotide
uugucccugacguugggau

SEQ ID NO: 1323922 - RNA, 19 nt, Artificial Sequence
  Description of Artificial Sequence: Synthetic oligonucleotide
auaauggaguuggggacag

SEQ ID NO: 1323923 - RNA, 19 nt, Artificial Sequence
  Description of Artificial Sequence: Synthetic oligonucleotide
caguuaucuguaaggauga

SEQ ID NO: 1323924 - RNA, 19 nt, Artificial Sequence
  Description of Artificial Sequence: Synthetic oligonucleotide
ugggccugaguccgcgucg

SEQ ID NO: 1323925 - RNA, 19 nt, Artificial Sequence
  Description of Artificial Sequence: Synthetic oligonucleotide
uuuuccaaauggggaacca

SEQ ID NO: 1323926 - RNA, 19 nt, Artificial Sequence
  Description of Artificial Sequence: Synthetic oligonucleotide
cuccauggcggcuagaaaa

SEQ ID NO: 1323927 - RNA, 19 nt, Artificial Sequence
  Description of Artificial Sequence: Synthetic oligonucleotide
ugagcccgcucaaacgccc

SEQ ID NO: 1323928 - RNA, 19 nt, Artificial Sequence
  Description of Artificial Sequence: Synthetic oligonucleotide
cacuacccgaccauccgcc

SEQ ID NO: 1323929 - RNA, 19 nt, Artificial Sequence
  Description of Artificial Sequence: Synthetic oligonucleotide
cuaccaagaauuggauccc

SEQ ID NO: 1323930 - RNA, 19 nt, Artificial Sequence
  Description of Artificial Sequence: Synthetic oligonucleotide
aaagcauggagcacagaua

SEQ ID NO: 1323931 - RNA, 19 nt, Artificial Sequence
  Description of Artificial Sequence: Synthetic oligonucleotide
agagguggugauuuuccaa

SEQ ID NO: 1323932 - RNA, 19 nt, Artificial Sequence
  Description of Artificial Sequence: Synthetic oligonucleotide
ggauccauagccccagggc

SEQ ID NO: 1323933 - RNA, 19 nt, Artificial Sequence
  Description of Artificial Sequence: Synthetic oligonucleotide
guaucgcugggcaaaggcc

SEQ ID NO: 1323934 - RNA, 19 nt, Artificial Sequence
  Description of Artificial Sequence: Synthetic oligonucleotide
uuugaugagcugucccuua

SEQ ID NO: 1323935 - RNA, 19 nt, Artificial Sequence
  Description of Artificial Sequence: Synthetic oligonucleotide
ucggugaacucaugcaaau

SEQ ID NO: 1323936 - RNA, 19 nt, Artificial Sequence
  Description of Artificial Sequence: Synthetic oligonucleotide
gaagaccccaggguuacac

SEQ ID NO: 1323937 - RNA, 19 nt, Artificial Sequence
  Description of Artificial Sequence: Synthetic oligonucleotide
guuacacaggcaguaucgc

SEQ ID NO: 1323938 - RNA, 19 nt, Artificial Sequence
  Description of Artificial Sequence: Synthetic oligonucleotide
uagguuuagcucuucccuu

SEQ ID NO: 1323939 - RNA, 19 nt, Artificial Sequence
  Description of Artificial Sequence: Synthetic oligonucleotide
ugguguucagcaugaucac

SEQ ID NO: 1323940 - RNA, 19 nt, Artificial Sequence
  Description of Artificial Sequence: Synthetic oligonucleotide
aauccgcuucuuucuugcu

SEQ ID NO: 1323941 - RNA, 19 nt, Artificial Sequence
  Description of Artificial Sequence: Synthetic oligonucleotide
agcgccgaaaagacucucc

SEQ ID NO: 1323942 - RNA, 19 nt, Artificial Sequence
  Description of Artificial Sequence: Synthetic oligonucleotide
uuccccgagguaaucccca

SEQ ID NO: 1323943 - RNA, 19 nt, Artificial Sequence
  Description of Artificial Sequence: Synthetic oligonucleotide
gaucccucggggcuccuug

SEQ ID NO: 1323944 - RNA, 19 nt, Artificial Sequence
  Description of Artificial Sequence: Synthetic oligonucleotide
agauuaccaacauguuaau

SEQ ID NO: 1323945 - RNA, 19 nt, Artificial Sequence
  Description of Artificial Sequence: Synthetic oligonucleotide
uccuuguccguaguguacu

SEQ ID NO: 1323946 - RNA, 19 nt, Artificial Sequence
  Description of Artificial Sequence: Synthetic oligonucleotide
guaguagaggcaguuaucu

SEQ ID NO: 1323947 - RNA, 19 nt, Artificial Sequence
  Description of Artificial Sequence: Synthetic oligonucleotide
cagauuaaggucggugaac

SEQ ID NO: 1323948 - RNA, 19 nt, Artificial Sequence
  Description of Artificial Sequence: Synthetic oligonucleotide
aggcaguuaucuguaagga

SEQ ID NO: 1323949 - RNA, 19 nt, Artificial Sequence
  Description of Artificial Sequence: Synthetic oligonucleotide
ggcgcgaggguuuaaauaa

SEQ ID NO: 1323950 - RNA, 19 nt, Artificial Sequence
  Description of Artificial Sequence: Synthetic oligonucleotide
ucagcgccgaaaagacucu

SEQ ID NO: 1323951 - RNA, 19 nt, Artificial Sequence
  Description of Artificial Sequence: Synthetic oligonucleotide
aguccggggcgguuccgcc

SEQ ID NO: 1323952 - RNA, 19 nt, Artificial Sequence
  Description of Artificial Sequence: Synthetic oligonucleotide
aaaagcccgcggggagucc

SEQ ID NO: 1323953 - RNA, 19 nt, Artificial Sequence
  Description of Artificial Sequence: Synthetic oligonucleotide
ugcugagauucuguauacc

SEQ ID NO: 1323954 - RNA, 19 nt, Artificial Sequence
  Description of Artificial Sequence: Synthetic oligonucleotide
gguggugauuuuccaaaug

SEQ ID NO: 1323955 - RNA, 19 nt, Artificial Sequence
  Description of Artificial Sequence: Synthetic oligonucleotide
uaccaagaauuggaucccc

SEQ ID NO: 1323956 - RNA, 19 nt, Artificial Sequence
  Description of Artificial Sequence: Synthetic oligonucleotide
acggucuggguugaagaag

SEQ ID NO: 1323957 - RNA, 19 nt, Artificial Sequence
  Description of Artificial Sequence: Synthetic oligonucleotide
aacgccccaggagccaccg

SEQ ID NO: 1323958 - RNA, 19 nt, Artificial Sequence
  Description of Artificial Sequence: Synthetic oligonucleotide
ugggugagaucauucccau

SEQ ID NO: 1323959 - RNA, 19 nt, Artificial Sequence
  Description of Artificial Sequence: Synthetic oligonucleotide
cuuccgguuccgcugcaag

SEQ ID NO: 1323960 - RNA, 19 nt, Artificial Sequence
  Description of Artificial Sequence: Synthetic oligonucleotide
gggauuaugaaggcuggug

SEQ ID NO: 1323961 - RNA, 19 nt, Artificial Sequence
  Description of Artificial Sequence: Synthetic oligonucleotide
cugcuuacgccgucggaug

SEQ ID NO: 1323962 - RNA, 19 nt, Artificial Sequence
  Description of Artificial Sequence: Synthetic oligonucleotide
cugucguagagguuccuga

SEQ ID NO: 1323963 - RNA, 19 nt, Artificial Sequence
  Description of Artificial Sequence: Synthetic oligonucleotide
aggacaacacguagcaggu

SEQ ID NO: 1323964 - RNA, 19 nt, Artificial Sequence
  Description of Artificial Sequence: Synthetic oligonucleotide
caccagauuaaggucggug

SEQ ID NO: 1323965 - RNA, 19 nt, Artificial Sequence
  Description of Artificial Sequence: Synthetic oligonucleotide
agaauuggauccccuucuu

SEQ ID NO: 1323966 - RNA, 19 nt, Artificial Sequence
  Description of Artificial Sequence: Synthetic oligonucleotide
gaaccaaccaggauccaua

SEQ ID NO: 1323967 - RNA, 19 nt, Artificial Sequence
  Description of Artificial Sequence: Synthetic oligonucleotide
uaaggucggugaacucaug

SEQ ID NO: 1323968 - RNA, 19 nt, Artificial Sequence
  Description of Artificial Sequence: Synthetic oligonucleotide
gaaguucguguucuaccaa

SEQ ID NO: 1323969 - RNA, 19 nt, Artificial Sequence
  Description of Artificial Sequence: Synthetic oligonucleotide
ggggaaccaaccaggaucc

SEQ ID NO: 1323970 - RNA, 19 nt, Artificial Sequence
  Description of Artificial Sequence: Synthetic oligonucleotide
ucguagacaccguccucca

SEQ ID NO: 1323971 - RNA, 19 nt, Artificial Sequence
  Description of Artificial Sequence: Synthetic oligonucleotide
ugaugccccgguucauggc

SEQ ID NO: 1323972 - RNA, 19 nt, Artificial Sequence
  Description of Artificial Sequence: Synthetic oligonucleotide
aaggucuuacugcccucau

SEQ ID NO: 1323973 - RNA, 19 nt, Artificial Sequence
  Description of Artificial Sequence: Synthetic oligonucleotide
ggauuaugaaggcuggugu

SEQ ID NO: 1323974 - RNA, 19 nt, Artificial Sequence
  Description of Artificial Sequence: Synthetic oligonucleotide
aaacgccccaggagccacc

SEQ ID NO: 1323975 - RNA, 19 nt, Artificial Sequence
  Description of Artificial Sequence: Synthetic oligonucleotide
ccagggaggcgaaagcucc

SEQ ID NO: 1323976 - RNA, 19 nt, Artificial Sequence
  Description of Artificial Sequence: Synthetic oligonucleotide
uagaagggguccacacuua

SEQ ID NO: 1323977 - RNA, 19 nt, Artificial Sequence
  Description of Artificial Sequence: Synthetic oligonucleotide
guucguguucuaccaagaa

SEQ ID NO: 1323978 - RNA, 19 nt, Artificial Sequence
  Description of Artificial Sequence: Synthetic oligonucleotide
aggcgcgaggguuuaaaua

SEQ ID NO: 1323979 - RNA, 19 nt, Artificial Sequence
  Description of Artificial Sequence: Synthetic oligonucleotide
cugcaaggucuuacugccc

SEQ ID NO: 1323980 - RNA, 19 nt, Artificial Sequence
  Description of Artificial Sequence: Synthetic oligonucleotide
ucggcuuccgaggaucauc

SEQ ID NO: 1323981 - RNA, 19 nt, Artificial Sequence
  Description of Artificial Sequence: Synthetic oligonucleotide
ccgagguaauccccaaugg

SEQ ID NO: 1323982 - RNA, 19 nt, Artificial Sequence
  Description of Artificial Sequence: Synthetic oligonucleotide
gccuucacggucuggguug

SEQ ID NO: 1323983 - RNA, 19 nt, Artificial Sequence
  Description of Artificial Sequence: Synthetic oligonucleotide
cuuuagaagccagccuuca

SEQ ID NO: 1323984 - RNA, 19 nt, Artificial Sequence
  Description of Artificial Sequence: Synthetic oligonucleotide
ugggaauguaaagcucaaa

SEQ ID NO: 1323985 - RNA, 19 nt, Artificial Sequence
  Description of Artificial Sequence: Synthetic oligonucleotide
gucuccgccuucauugaug

SEQ ID NO: 1323986 - RNA, 19 nt, Artificial Sequence
  Description of Artificial Sequence: Synthetic oligonucleotide
ggucggugaacucaugcaa

SEQ ID NO: 1323987 - RNA, 19 nt, Artificial Sequence
  Description of Artificial Sequence: Synthetic oligonucleotide
gaguuggggacagggguca

SEQ ID NO: 1323988 - RNA, 19 nt, Artificial Sequence
  Description of Artificial Sequence: Synthetic oligonucleotide
uuccgcugcaaggucuuac

SEQ ID NO: 1323989 - RNA, 19 nt, Artificial Sequence
  Description of Artificial Sequence: Synthetic oligonucleotide
uaggcgcgaggguuuaaau

SEQ ID NO: 1323990 - RNA, 19 nt, Artificial Sequence
  Description of Artificial Sequence: Synthetic oligonucleotide
gaagggguccacacuuaca

SEQ ID NO: 1323991 - RNA, 19 nt, Artificial Sequence
  Description of Artificial Sequence: Synthetic oligonucleotide
ggcagcuccaaaauaaaua

SEQ ID NO: 1323992 - RNA, 19 nt, Artificial Sequence
  Description of Artificial Sequence: Synthetic oligonucleotide
cucgguuuugcaggcuuug

SEQ ID NO: 1323993 - RNA, 19 nt, Artificial Sequence
  Description of Artificial Sequence: Synthetic oligonucleotide
gcccauugccaucuuccgg

SEQ ID NO: 1323994 - RNA, 19 nt, Artificial Sequence
  Description of Artificial Sequence: Synthetic oligonucleotide
acuacccgaccauccgccu

SEQ ID NO: 1323995 - RNA, 19 nt, Artificial Sequence
  Description of Artificial Sequence: Synthetic oligonucleotide
guccgcgucggcccgcggg

SEQ ID NO: 1323996 - RNA, 19 nt, Artificial Sequence
  Description of Artificial Sequence: Synthetic oligonucleotide
gacucucccuucaccggcc

SEQ ID NO: 1323997 - RNA, 19 nt, Artificial Sequence
  Description of Artificial Sequence: Synthetic oligonucleotide
gcgccgaaaagacucuccc

SEQ ID NO: 1323998 - RNA, 19 nt, Artificial Sequence
  Description of Artificial Sequence: Synthetic oligonucleotide
cugaguccgcgucggcccg

SEQ ID NO: 1323999 - RNA, 19 nt, Artificial Sequence
  Description of Artificial Sequence: Synthetic oligonucleotide
accaagaauuggauccccu

SEQ ID NO: 1324000 - RNA, 19 nt, Artificial Sequence
  Description of Artificial Sequence: Synthetic oligonucleotide
cuuacgccgucggauguuc

SEQ ID NO: 1324001 - RNA, 19 nt, Artificial Sequence
  Description of Artificial Sequence: Synthetic oligonucleotide
gcgggcucgagugagcccg

SEQ ID NO: 1324002 - RNA, 19 nt, Artificial Sequence
  Description of Artificial Sequence: Synthetic oligonucleotide
uuacgccgucggauguucu

SEQ ID NO: 1324003 - RNA, 19 nt, Artificial Sequence
  Description of Artificial Sequence: Synthetic oligonucleotide
agcgggcaauuuccucagg

SEQ ID NO: 1324004 - RNA, 19 nt, Artificial Sequence
  Description of Artificial Sequence: Synthetic oligonucleotide
ggguuacacaggcaguauc

SEQ ID NO: 1324005 - RNA, 19 nt, Artificial Sequence
  Description of Artificial Sequence: Synthetic oligonucleotide
ugucccugacguugggauu

SEQ ID NO: 1324006 - RNA, 19 nt, Artificial Sequence
  Description of Artificial Sequence: Synthetic oligonucleotide
cauagaagggguccacacu

SEQ ID NO: 1324007 - RNA, 19 nt, Artificial Sequence
  Description of Artificial Sequence: Synthetic oligonucleotide
ugcagaaguucguguucua

SEQ ID NO: 1324008 - RNA, 19 nt, Artificial Sequence
  Description of Artificial Sequence: Synthetic oligonucleotide
gcggcuagaaaagcccgcg

SEQ ID NO: 1324009 - RNA, 19 nt, Artificial Sequence
  Description of Artificial Sequence: Synthetic oligonucleotide
gucggugaacucaugcaaa

SEQ ID NO: 1324010 - RNA, 19 nt, Artificial Sequence
  Description of Artificial Sequence: Synthetic oligonucleotide
ccgguucauggccacaaag

SEQ ID NO: 1324011 - RNA, 19 nt, Artificial Sequence
  Description of Artificial Sequence: Synthetic oligonucleotide
aggcggggcagcuccaaaa

SEQ ID NO: 1324012 - RNA, 19 nt, Artificial Sequence
  Description of Artificial Sequence: Synthetic oligonucleotide
gcucgagugagcccgcuca

SEQ ID NO: 1324013 - RNA, 19 nt, Artificial Sequence
  Description of Artificial Sequence: Synthetic oligonucleotide
caaagcgcuccaggccugg

SEQ ID NO: 1324014 - RNA, 19 nt, Artificial Sequence
  Description of Artificial Sequence: Synthetic oligonucleotide
caaggucuuacugcccuca

SEQ ID NO: 1324015 - RNA, 19 nt, Artificial Sequence
  Description of Artificial Sequence: Synthetic oligonucleotide
aggucuuacugcccucauu

SEQ ID NO: 1324016 - RNA, 19 nt, Artificial Sequence
  Description of Artificial Sequence: Synthetic oligonucleotide
cuacccgaccauccgccuc

SEQ ID NO: 1324017 - RNA, 19 nt, Artificial Sequence
  Description of Artificial Sequence: Synthetic oligonucleotide
caaacgccccaggagccac

SEQ ID NO: 1324018 - RNA, 19 nt, Artificial Sequence
  Description of Artificial Sequence: Synthetic oligonucleotide
gauuaccaacauguuaauu

SEQ ID NO: 1324019 - RNA, 19 nt, Artificial Sequence
  Description of Artificial Sequence: Synthetic oligonucleotide
cauagccccagggcccagg

SEQ ID NO: 1324020 - RNA, 19 nt, Artificial Sequence
  Description of Artificial Sequence: Synthetic oligonucleotide
gugagcccgcucaaacgcc

SEQ ID NO: 1324021 - RNA, 19 nt, Artificial Sequence
  Description of Artificial Sequence: Synthetic oligonucleotide
aguuaucuguaaggaugaa

SEQ ID NO: 1324022 - RNA, 19 nt, Artificial Sequence
  Description of Artificial Sequence: Synthetic oligonucleotide
ccaagucuucacccggccc

SEQ ID NO: 1324023 - RNA, 19 nt, Artificial Sequence
  Description of Artificial Sequence: Synthetic oligonucleotide
cugggccugaguccgcguc

SEQ ID NO: 1324024 - RNA, 19 nt, Artificial Sequence
  Description of Artificial Sequence: Synthetic oligonucleotide
cuccggagucaagucuggg

SEQ ID NO: 1324025 - RNA, 19 nt, Artificial Sequence
  Description of Artificial Sequence: Synthetic oligonucleotide
ccgaaaagacucucccuuc

SEQ ID NO: 1324026 - RNA, 19 nt, Artificial Sequence
  Description of Artificial Sequence: Synthetic oligonucleotide
ucauggccacaaagcgcuc

SEQ ID NO: 1324027 - RNA, 19 nt, Artificial Sequence
  Description of Artificial Sequence: Synthetic oligonucleotide
ggcaguaucgcugggcaaa

SEQ ID NO: 1324028 - RNA, 19 nt, Artificial Sequence
  Description of Artificial Sequence: Synthetic oligonucleotide
ccuuuccccgagguaaucc

SEQ ID NO: 1324029 - RNA, 19 nt, Artificial Sequence
  Description of Artificial Sequence: Synthetic oligonucleotide
ccgccuucauugaugcccc

SEQ ID NO: 1324030 - RNA, 19 nt, Artificial Sequence
  Description of Artificial Sequence: Synthetic oligonucleotide
gaguccggggcgguuccgc

SEQ ID NO: 1324031 - RNA, 19 nt, Artificial Sequence
  Description of Artificial Sequence: Synthetic oligonucleotide
ggcgaaagcuccauaggaa

SEQ ID NO: 1324032 - RNA, 19 nt, Artificial Sequence
  Description of Artificial Sequence: Synthetic oligonucleotide
agcuagagguggugauuuu

SEQ ID NO: 1324033 - RNA, 19 nt, Artificial Sequence
  Description of Artificial Sequence: Synthetic oligonucleotide
guucuaccaagaauuggau

SEQ ID NO: 1324034 - RNA, 19 nt, Artificial Sequence
  Description of Artificial Sequence: Synthetic oligonucleotide
gguaauccccaauggcugu

SEQ ID NO: 1324035 - RNA, 19 nt, Artificial Sequence
  Description of Artificial Sequence: Synthetic oligonucleotide
ccaacauguuaauuacaaa

SEQ ID NO: 1324036 - RNA, 19 nt, Artificial Sequence
  Description of Artificial Sequence: Synthetic oligonucleotide
gcuuuagaagccagccuuc

SEQ ID NO: 1324037 - RNA, 19 nt, Artificial Sequence
  Description of Artificial Sequence: Synthetic oligonucleotide
gcaguucggcuuccgagga

SEQ ID NO: 1324038 - RNA, 19 nt, Artificial Sequence
  Description of Artificial Sequence: Synthetic oligonucleotide
ucuuccgguuccgcugcaa

SEQ ID NO: 1324039 - RNA, 19 nt, Artificial Sequence
  Description of Artificial Sequence: Synthetic oligonucleotide
gcgaaagcuccauaggaau

SEQ ID NO: 1324040 - RNA, 19 nt, Artificial Sequence
  Description of Artificial Sequence: Synthetic oligonucleotide
cgagugagcccgcucaaac

SEQ ID NO: 1324041 - RNA, 19 nt, Artificial Sequence
  Description of Artificial Sequence: Synthetic oligonucleotide
gaguccgcgucggcccgcg

SEQ ID NO: 1324042 - RNA, 19 nt, Artificial Sequence
  Description of Artificial Sequence: Synthetic oligonucleotide
cgcucaaacgccccaggag

SEQ ID NO: 1324043 - RNA, 19 nt, Artificial Sequence
  Description of Artificial Sequence: Synthetic oligonucleotide
gccgaaaagacucucccuu

SEQ ID NO: 1324044 - RNA, 19 nt, Artificial Sequence
  Description of Artificial Sequence: Synthetic oligonucleotide
acgccccaggagccaccgc

SEQ ID NO: 1324045 - RNA, 19 nt, Artificial Sequence
  Description of Artificial Sequence: Synthetic oligonucleotide
gggccugcaccagauuaag

SEQ ID NO: 1324046 - RNA, 19 nt, Artificial Sequence
  Description of Artificial Sequence: Synthetic oligonucleotide
gagcccgcucaaacgcccc

SEQ ID NO: 1324047 - RNA, 19 nt, Artificial Sequence
  Description of Artificial Sequence: Synthetic oligonucleotide
gcuccugcuuacgccgucg

SEQ ID NO: 1324048 - RNA, 19 nt, Artificial Sequence
  Description of Artificial Sequence: Synthetic oligonucleotide
ccgucggauguucucuagc

SEQ ID NO: 1324049 - RNA, 19 nt, Artificial Sequence
  Description of Artificial Sequence: Synthetic oligonucleotide
ggcaguuaucuguaaggau

SEQ ID NO: 1324050 - RNA, 19 nt, Artificial Sequence
  Description of Artificial Sequence: Synthetic oligonucleotide
cccauugccaucuuccggu

SEQ ID NO: 1324051 - RNA, 19 nt, Artificial Sequence
  Description of Artificial Sequence: Synthetic oligonucleotide
cugcagaaguucguguucu

SEQ ID NO: 1324052 - RNA, 19 nt, Artificial Sequence
  Description of Artificial Sequence: Synthetic oligonucleotide
guucggcuuccgaggauca

SEQ ID NO: 1324053 - RNA, 19 nt, Artificial Sequence
  Description of Artificial Sequence: Synthetic oligonucleotide
cuaggcgcgaggguuuaaa

SEQ ID NO: 1324054 - RNA, 19 nt, Artificial Sequence
  Description of Artificial Sequence: Synthetic oligonucleotide
ggcggcuagaaaagcccgc

SEQ ID NO: 1324055 - RNA, 19 nt, Artificial Sequence
  Description of Artificial Sequence: Synthetic oligonucleotide
ggcgguuccgccggcuggg

SEQ ID NO: 1324056 - RNA, 19 nt, Artificial Sequence
  Description of Artificial Sequence: Synthetic oligonucleotide
gggguccugccacccaggc

SEQ ID NO: 1324057 - RNA, 19 nt, Artificial Sequence
  Description of Artificial Sequence: Synthetic oligonucleotide
cagggaggcgaaagcucca

SEQ ID NO: 1324058 - RNA, 19 nt, Artificial Sequence
  Description of Artificial Sequence: Synthetic oligonucleotide
uucggcuuccgaggaucau

SEQ ID NO: 1324059 - RNA, 19 nt, Artificial Sequence
  Description of Artificial Sequence: Synthetic oligonucleotide
gcgaggguuuaaauaauua

SEQ ID NO: 1324060 - RNA, 19 nt, Artificial Sequence
  Description of Artificial Sequence: Synthetic oligonucleotide
gggaguccggggcgguucc

SEQ ID NO: 1324061 - RNA, 19 nt, Artificial Sequence
  Description of Artificial Sequence: Synthetic oligonucleotide
ugcuaggcgcgaggguuua

SEQ ID NO: 1324062 - RNA, 19 nt, Artificial Sequence
  Description of Artificial Sequence: Synthetic oligonucleotide
aggguuguuccugcuucuu

SEQ ID NO: 1324063 - RNA, 19 nt, Artificial Sequence
  Description of Artificial Sequence: Synthetic oligonucleotide
ggacaacacguagcaggug

SEQ ID NO: 1324064 - RNA, 19 nt, Artificial Sequence
  Description of Artificial Sequence: Synthetic oligonucleotide
ccacaaaagcauggagcac

SEQ ID NO: 1324065 - RNA, 19 nt, Artificial Sequence
  Description of Artificial Sequence: Synthetic oligonucleotide
cucgagugagcccgcucaa

SEQ ID NO: 1324066 - RNA, 19 nt, Artificial Sequence
  Description of Artificial Sequence: Synthetic oligonucleotide
gggcuccuuguccguagug

SEQ ID NO: 1324067 - RNA, 19 nt, Artificial Sequence
  Description of Artificial Sequence: Synthetic oligonucleotide
ccuuguccguaguguacuc

SEQ ID NO: 1324068 - RNA, 19 nt, Artificial Sequence
  Description of Artificial Sequence: Synthetic oligonucleotide
ccauccgccucgguuuugc

SEQ ID NO: 1324069 - RNA, 19 nt, Artificial Sequence
  Description of Artificial Sequence: Synthetic oligonucleotide
caggcaggucuccgccuuc

SEQ ID NO: 1324070 - RNA, 19 nt, Artificial Sequence
  Description of Artificial Sequence: Synthetic oligonucleotide
caacacguagcaggugucu

SEQ ID NO: 1324071 - RNA, 19 nt, Artificial Sequence
  Description of Artificial Sequence: Synthetic oligonucleotide
gguuccgccggcugggccu

SEQ ID NO: 1324072 - RNA, 19 nt, Artificial Sequence
  Description of Artificial Sequence: Synthetic oligonucleotide
aguccgcgucggcccgcgg

SEQ ID NO: 1324073 - RNA, 19 nt, Artificial Sequence
  Description of Artificial Sequence: Synthetic oligonucleotide
ccgcugcaaggucuuacug

SEQ ID NO: 1324074 - RNA, 19 nt, Artificial Sequence
  Description of Artificial Sequence: Synthetic oligonucleotide
cagcgccgaaaagacucuc

SEQ ID NO: 1324075 - RNA, 19 nt, Artificial Sequence
  Description of Artificial Sequence: Synthetic oligonucleotide
guuccgccggcugggccug

SEQ ID NO: 1324076 - RNA, 19 nt, Artificial Sequence
  Description of Artificial Sequence: Synthetic oligonucleotide
guguucugcagaaguucgu

SEQ ID NO: 1324077 - RNA, 19 nt, Artificial Sequence
  Description of Artificial Sequence: Synthetic oligonucleotide
cauccgccucgguuuugca

SEQ ID NO: 1324078 - RNA, 19 nt, Artificial Sequence
  Description of Artificial Sequence: Synthetic oligonucleotide
gcucguagacaccguccuc

SEQ ID NO: 1324079 - RNA, 19 nt, Artificial Sequence
  Description of Artificial Sequence: Synthetic oligonucleotide
caggguuguuccugcuucu

SEQ ID NO: 1324080 - RNA, 19 nt, Artificial Sequence
  Description of Artificial Sequence: Synthetic oligonucleotide
cggcuagaaaagcccgcgg

SEQ ID NO: 1324081 - RNA, 19 nt, Artificial Sequence
  Description of Artificial Sequence: Synthetic oligonucleotide
ucccugacguugggauuau

SEQ ID NO: 1324082 - RNA, 19 nt, Artificial Sequence
  Description of Artificial Sequence: Synthetic oligonucleotide
gcgccaguccucagcgccg

SEQ ID NO: 1324083 - RNA, 19 nt, Artificial Sequence
  Description of Artificial Sequence: Synthetic oligonucleotide
agcccgcggggaguccggg

SEQ ID NO: 1324084 - RNA, 19 nt, Artificial Sequence
  Description of Artificial Sequence: Synthetic oligonucleotide
ccgcuucuuucuugcugcc

SEQ ID NO: 1324085 - RNA, 19 nt, Artificial Sequence
  Description of Artificial Sequence: Synthetic oligonucleotide
accauccgccucgguuuug

SEQ ID NO: 1324086 - RNA, 19 nt, Artificial Sequence
  Description of Artificial Sequence: Synthetic oligonucleotide
acccgaccauccgccucgg

SEQ ID NO: 1324087 - RNA, 19 nt, Artificial Sequence
  Description of Artificial Sequence: Synthetic oligonucleotide
ccgccucgguuuugcaggc

SEQ ID NO: 1324088 - RNA, 19 nt, Artificial Sequence
  Description of Artificial Sequence: Synthetic oligonucleotide
gaccauccgccucgguuuu

SEQ ID NO: 1324089 - RNA, 19 nt, Artificial Sequence
  Description of Artificial Sequence: Synthetic oligonucleotide
ggcucgagugagcccgcuc

SEQ ID NO: 1324090 - RNA, 19 nt, Artificial Sequence
  Description of Artificial Sequence: Synthetic oligonucleotide
ccaagaauuggauccccuu

SEQ ID NO: 1324091 - RNA, 19 nt, Artificial Sequence
  Description of Artificial Sequence: Synthetic oligonucleotide
ggggaguccggggcgguuc

SEQ ID NO: 1324092 - RNA, 19 nt, Artificial Sequence
  Description of Artificial Sequence: Synthetic oligonucleotide
ccgcgggcucgagugagcc

SEQ ID NO: 1324093 - RNA, 19 nt, Artificial Sequence
  Description of Artificial Sequence: Synthetic oligonucleotide
cggcccgcgggcucgagug

SEQ ID NO: 1324094 - RNA, 19 nt, Artificial Sequence
  Description of Artificial Sequence: Synthetic oligonucleotide
gcggggcagcuccaaaaua

SEQ ID NO: 1324095 - RNA, 19 nt, Artificial Sequence
  Description of Artificial Sequence: Synthetic oligonucleotide
gcccgcgggcucgagugag

SEQ ID NO: 1324096 - RNA, 19 nt, Artificial Sequence
  Description of Artificial Sequence: Synthetic oligonucleotide
ccugcuuacgccgucggau

SEQ ID NO: 1324097 - RNA, 19 nt, Artificial Sequence
  Description of Artificial Sequence: Synthetic oligonucleotide
ccgcucaaacgccccagga

SEQ ID NO: 1324098 - RNA, 19 nt, Artificial Sequence
  Description of Artificial Sequence: Synthetic oligonucleotide
ggagcuagagguggugauu

SEQ ID NO: 1324099 - RNA, 19 nt, Artificial Sequence
  Description of Artificial Sequence: Synthetic oligonucleotide
cggggcuccuuguccguag

SEQ ID NO: 1324100 - RNA, 19 nt, Artificial Sequence
  Description of Artificial Sequence: Synthetic oligonucleotide
ccuuauuguugggaaugua

SEQ ID NO: 1324101 - RNA, 19 nt, Artificial Sequence
  Description of Artificial Sequence: Synthetic oligonucleotide
ggccugaguccgcgucggc

SEQ ID NO: 1324102 - RNA, 19 nt, Artificial Sequence
  Description of Artificial Sequence: Synthetic oligonucleotide
cccgcgggcucgagugagc

SEQ ID NO: 1324103 - RNA, 19 nt, Artificial Sequence
  Description of Artificial Sequence: Synthetic oligonucleotide
cauugaugccccgguucau

SEQ ID NO: 1324104 - RNA, 19 nt, Artificial Sequence
  Description of Artificial Sequence: Synthetic oligonucleotide
ggucuccgccuucauugau

SEQ ID NO: 1324105 - RNA, 19 nt, Artificial Sequence
  Description of Artificial Sequence: Synthetic oligonucleotide
gggaucuugaagggcucau

SEQ ID NO: 1324106 - RNA, 19 nt, Artificial Sequence
  Description of Artificial Sequence: Synthetic oligonucleotide
gggaaccaaccaggaucca

SEQ ID NO: 1324107 - RNA, 19 nt, Artificial Sequence
  Description of Artificial Sequence: Synthetic oligonucleotide
cggaugcucagguucucua

SEQ ID NO: 1324108 - RNA, 19 nt, Artificial Sequence
  Description of Artificial Sequence: Synthetic oligonucleotide
caguucggcuuccgaggau

SEQ ID NO: 1324109 - RNA, 19 nt, Artificial Sequence
  Description of Artificial Sequence: Synthetic oligonucleotide
cccuuauuguugggaaugu

SEQ ID NO: 1324110 - RNA, 19 nt, Artificial Sequence
  Description of Artificial Sequence: Synthetic oligonucleotide
cccuuuccccgagguaauc

SEQ ID NO: 1324111 - RNA, 19 nt, Artificial Sequence
  Description of Artificial Sequence: Synthetic oligonucleotide
cgcgggcucgagugagccc

SEQ ID NO: 1324112 - RNA, 19 nt, Artificial Sequence
  Description of Artificial Sequence: Synthetic oligonucleotide
cacuuacagcagccuggau

SEQ ID NO: 1324113 - RNA, 19 nt, Artificial Sequence
  Description of Artificial Sequence: Synthetic oligonucleotide
ccuucacggucuggguuga

SEQ ID NO: 1324114 - RNA, 19 nt, Artificial Sequence
  Description of Artificial Sequence: Synthetic oligonucleotide
cgaccauccgccucgguuu

SEQ ID NO: 1324115 - RNA, 19 nt, Artificial Sequence
  Description of Artificial Sequence: Synthetic oligonucleotide
cuucacggucuggguugaa

SEQ ID NO: 1324116 - RNA, 19 nt, Artificial Sequence
  Description of Artificial Sequence: Synthetic oligonucleotide
ccucagcgccgaaaagacu

SEQ ID NO: 1324117 - RNA, 19 nt, Artificial Sequence
  Description of Artificial Sequence: Synthetic oligonucleotide
ggcccgcgggcucgaguga

SEQ ID NO: 1324118 - RNA, 19 nt, Artificial Sequence
  Description of Artificial Sequence: Synthetic oligonucleotide
gucggcccgcgggcucgag

SEQ ID NO: 1324119 - RNA, 19 nt, Artificial Sequence
  Description of Artificial Sequence: Synthetic oligonucleotide
ccccgguucauggccacaa

SEQ ID NO: 1324120 - RNA, 19 nt, Artificial Sequence
  Description of Artificial Sequence: Synthetic oligonucleotide
cguugggauuaugaaggcu

SEQ ID NO: 1324121 - RNA, 19 nt, Artificial Sequence
  Description of Artificial Sequence: Synthetic oligonucleotide
cgccgaaaagacucucccu

SEQ ID NO: 1324122 - RNA, 19 nt, Artificial Sequence
  Description of Artificial Sequence: Synthetic oligonucleotide
cgcgaggguuuaaauaauu

SEQ ID NO: 1324123 - RNA, 19 nt, Artificial Sequence
  Description of Artificial Sequence: Synthetic oligonucleotide
gcgguuccgccggcugggc

SEQ ID NO: 1324124 - RNA, 19 nt, Artificial Sequence
  Description of Artificial Sequence: Synthetic oligonucleotide
cgggcucgagugagcccgc

SEQ ID NO: 1324125 - RNA, 19 nt, Artificial Sequence
  Description of Artificial Sequence: Synthetic oligonucleotide
gcgcgaggguuuaaauaau

SEQ ID NO: 1324126 - RNA, 19 nt, Artificial Sequence
  Description of Artificial Sequence: Synthetic oligonucleotide
cccgguucauggccacaaa

SEQ ID NO: 1324127 - RNA, 19 nt, Artificial Sequence
  Description of Artificial Sequence: Synthetic oligonucleotide
ccauagccccagggcccag

SEQ ID NO: 1324128 - RNA, 19 nt, Artificial Sequence
  Description of Artificial Sequence: Synthetic oligonucleotide
gcuaggcgcgaggguuuaa

SEQ ID NO: 1324129 - RNA, 19 nt, Artificial Sequence
  Description of Artificial Sequence: Synthetic oligonucleotide
ccucgguuuugcaggcuuu

SEQ ID NO: 1324130 - RNA, 19 nt, Artificial Sequence
  Description of Artificial Sequence: Synthetic oligonucleotide
gcgccgcuuccaagucuuc

SEQ ID NO: 1324131 - RNA, 19 nt, Artificial Sequence
  Description of Artificial Sequence: Synthetic oligonucleotide
ccccgagguaauccccaau

SEQ ID NO: 1324132 - RNA, 19 nt, Artificial Sequence
  Description of Artificial Sequence: Synthetic oligonucleotide
cgccaguccucagcgccga

SEQ ID NO: 1324133 - RNA, 19 nt, Artificial Sequence
  Description of Artificial Sequence: Synthetic oligonucleotide
cguagacaccguccuccau

SEQ ID NO: 1324134 - RNA, 19 nt, Artificial Sequence
  Description of Artificial Sequence: Synthetic oligonucleotide
gggcucgagugagcccgcu

SEQ ID NO: 1324135 - RNA, 19 nt, Artificial Sequence
  Description of Artificial Sequence: Synthetic oligonucleotide
gcggggaguccggggcggu

SEQ ID NO: 1324136 - RNA, 19 nt, Artificial Sequence
  Description of Artificial Sequence: Synthetic oligonucleotide
cccgaccauccgccucggu

SEQ ID NO: 1324137 - RNA, 19 nt, Artificial Sequence
  Description of Artificial Sequence: Synthetic oligonucleotide
cggggcgguuccgccggcu

SEQ ID NO: 1324138 - RNA, 19 nt, Artificial Sequence
  Description of Artificial Sequence: Synthetic oligonucleotide
cggggaguccggggcgguu

SEQ ID NO: 1324139 - RNA, 19 nt, Artificial Sequence
  Description of Artificial Sequence: Synthetic oligonucleotide
ucaccuguaaaccauaucc

SEQ ID NO: 1324140 - RNA, 19 nt, Artificial Sequence
  Description of Artificial Sequence: Synthetic oligonucleotide
uuccugauaaugaagagag

SEQ ID NO: 1324141 - RNA, 19 nt, Artificial Sequence
  Description of Artificial Sequence: Synthetic oligonucleotide
auaaagagaauucuaagga

SEQ ID NO: 1324142 - RNA, 19 nt, Artificial Sequence
  Description of Artificial Sequence: Synthetic oligonucleotide
uuauaaagagaauucuaag

SEQ ID NO: 1324143 - RNA, 19 nt, Artificial Sequence
  Description of Artificial Sequence: Synthetic oligonucleotide
uguaccauguuucaggagu

SEQ ID NO: 1324144 - RNA, 19 nt, Artificial Sequence
  Description of Artificial Sequence: Synthetic oligonucleotide
cauucgaacucuuauaaag

SEQ ID NO: 1324145 - RNA, 19 nt, Artificial Sequence
  Description of Artificial Sequence: Synthetic oligonucleotide
auagcuuucugguguaucc

SEQ ID NO: 1324146 - RNA, 19 nt, Artificial Sequence
  Description of Artificial Sequence: Synthetic oligonucleotide
aauucuaaggagucagcag

SEQ ID NO: 1324147 - RNA, 19 nt, Artificial Sequence
  Description of Artificial Sequence: Synthetic oligonucleotide
auucauucaggugagaggg

SEQ ID NO: 1324148 - RNA, 19 nt, Artificial Sequence
  Description of Artificial Sequence: Synthetic oligonucleotide
cuguaaaccauauccaggg

SEQ ID NO: 1324149 - RNA, 19 nt, Artificial Sequence
  Description of Artificial Sequence: Synthetic oligonucleotide
uuugcaacaacucuuugau

SEQ ID NO: 1324150 - RNA, 19 nt, Artificial Sequence
  Description of Artificial Sequence: Synthetic oligonucleotide
uguauccagacgaaugccg

SEQ ID NO: 1324151 - RNA, 19 nt, Artificial Sequence
  Description of Artificial Sequence: Synthetic oligonucleotide
cuuuguucggccaucagag

SEQ ID NO: 1324152 - RNA, 19 nt, Artificial Sequence
  Description of Artificial Sequence: Synthetic oligonucleotide
auauccagggacuuuggac

SEQ ID NO: 1324153 - RNA, 19 nt, Artificial Sequence
  Description of Artificial Sequence: Synthetic oligonucleotide
aaugccgccucugauagac

SEQ ID NO: 1324154 - RNA, 19 nt, Artificial Sequence
  Description of Artificial Sequence: Synthetic oligonucleotide
caaagauagagccugggag

SEQ ID NO: 1324155 - RNA, 19 nt, Artificial Sequence
  Description of Artificial Sequence: Synthetic oligonucleotide
aaucuugacucuuccugac

SEQ ID NO: 1324156 - RNA, 19 nt, Artificial Sequence
  Description of Artificial Sequence: Synthetic oligonucleotide
auuaaaacacagucagauc

SEQ ID NO: 1324157 - RNA, 19 nt, Artificial Sequence
  Description of Artificial Sequence: Synthetic oligonucleotide
guucauuugucccaguaag

SEQ ID NO: 1324158 - RNA, 19 nt, Artificial Sequence
  Description of Artificial Sequence: Synthetic oligonucleotide
ugcaacaacucuuugauuu

SEQ ID NO: 1324159 - RNA, 19 nt, Artificial Sequence
  Description of Artificial Sequence: Synthetic oligonucleotide
ugcccauccauuaaaacac

SEQ ID NO: 1324160 - RNA, 19 nt, Artificial Sequence
  Description of Artificial Sequence: Synthetic oligonucleotide
gaagagagggucuucccgg

SEQ ID NO: 1324161 - RNA, 19 nt, Artificial Sequence
  Description of Artificial Sequence: Synthetic oligonucleotide
uaaaccauauccagggacu

SEQ ID NO: 1324162 - RNA, 19 nt, Artificial Sequence
  Description of Artificial Sequence: Synthetic oligonucleotide
acaguggugauauuucauc

SEQ ID NO: 1324163 - RNA, 19 nt, Artificial Sequence
  Description of Artificial Sequence: Synthetic oligonucleotide
uggcuauucugucacaaag

SEQ ID NO: 1324164 - RNA, 19 nt, Artificial Sequence
  Description of Artificial Sequence: Synthetic oligonucleotide
agguaugauccauucauuc

SEQ ID NO: 1324165 - RNA, 19 nt, Artificial Sequence
  Description of Artificial Sequence: Synthetic oligonucleotide
ucuucccggauuuugcugg

SEQ ID NO: 1324166 - RNA, 19 nt, Artificial Sequence
  Description of Artificial Sequence: Synthetic oligonucleotide
ucuuauaaagagaauucua

SEQ ID NO: 1324167 - RNA, 19 nt, Artificial Sequence
  Description of Artificial Sequence: Synthetic oligonucleotide
uuagguucaggucuccgcc

SEQ ID NO: 1324168 - RNA, 19 nt, Artificial Sequence
  Description of Artificial Sequence: Synthetic oligonucleotide
gaggcaugcgguuugcugg

SEQ ID NO: 1324169 - RNA, 19 nt, Artificial Sequence
  Description of Artificial Sequence: Synthetic oligonucleotide
uuggcgugccucuugaggg

SEQ ID NO: 1324170 - RNA, 19 nt, Artificial Sequence
  Description of Artificial Sequence: Synthetic oligonucleotide
aucagagaacccugcaggc

SEQ ID NO: 1324171 - RNA, 19 nt, Artificial Sequence
  Description of Artificial Sequence: Synthetic oligonucleotide
aagaauguaccauguuuca

SEQ ID NO: 1324172 - RNA, 19 nt, Artificial Sequence
  Description of Artificial Sequence: Synthetic oligonucleotide
aaagguguggcaagcuacc

SEQ ID NO: 1324173 - RNA, 19 nt, Artificial Sequence
  Description of Artificial Sequence: Synthetic oligonucleotide
gagaauucuaaggagucag

SEQ ID NO: 1324174 - RNA, 19 nt, Artificial Sequence
  Description of Artificial Sequence: Synthetic oligonucleotide
auuugcaacaacucuuuga

SEQ ID NO: 1324175 - RNA, 19 nt, Artificial Sequence
  Description of Artificial Sequence: Synthetic oligonucleotide
cucuugaggguguugagcc

SEQ ID NO: 1324176 - RNA, 19 nt, Artificial Sequence
  Description of Artificial Sequence: Synthetic oligonucleotide
ucuuagacucauuugcaac

SEQ ID NO: 1324177 - RNA, 19 nt, Artificial Sequence
  Description of Artificial Sequence: Synthetic oligonucleotide
uagacguuuccucagucca

SEQ ID NO: 1324178 - RNA, 19 nt, Artificial Sequence
  Description of Artificial Sequence: Synthetic oligonucleotide
uacauccucagcauagcgc

SEQ ID NO: 1324179 - RNA, 19 nt, Artificial Sequence
  Description of Artificial Sequence: Synthetic oligonucleotide
uauaaagucaauguucauu

SEQ ID NO: 1324180 - RNA, 19 nt, Artificial Sequence
  Description of Artificial Sequence: Synthetic oligonucleotide
gggaauuggcaccugaugg

SEQ ID NO: 1324181 - RNA, 19 nt, Artificial Sequence
  Description of Artificial Sequence: Synthetic oligonucleotide
ugaacaguggugauauuuc

SEQ ID NO: 1324182 - RNA, 19 nt, Artificial Sequence
  Description of Artificial Sequence: Synthetic oligonucleotide
ucauuugucccaguaagca

SEQ ID NO: 1324183 - RNA, 19 nt, Artificial Sequence
  Description of Artificial Sequence: Synthetic oligonucleotide
uuuccgcucagccucaugu

SEQ ID NO: 1324184 - RNA, 19 nt, Artificial Sequence
  Description of Artificial Sequence: Synthetic oligonucleotide
uucauuugucccaguaagc

SEQ ID NO: 1324185 - RNA, 19 nt, Artificial Sequence
  Description of Artificial Sequence: Synthetic oligonucleotide
accuguaaaccauauccag

SEQ ID NO: 1324186 - RNA, 19 nt, Artificial Sequence
  Description of Artificial Sequence: Synthetic oligonucleotide
ugaaagacucagcgaagag

SEQ ID NO: 1324187 - RNA, 19 nt, Artificial Sequence
  Description of Artificial Sequence: Synthetic oligonucleotide
ugucaagaagggaauuggc

SEQ ID NO: 1324188 - RNA, 19 nt, Artificial Sequence
  Description of Artificial Sequence: Synthetic oligonucleotide
ucaucuguagaagaagcca

SEQ ID NO: 1324189 - RNA, 19 nt, Artificial Sequence
  Description of Artificial Sequence: Synthetic oligonucleotide
cagaagaacagccugcuuc

SEQ ID NO: 1324190 - RNA, 19 nt, Artificial Sequence
  Description of Artificial Sequence: Synthetic oligonucleotide
ucuuuugagaccugcccug

SEQ ID NO: 1324191 - RNA, 19 nt, Artificial Sequence
  Description of Artificial Sequence: Synthetic oligonucleotide
ccugauaaugaagagaggg

SEQ ID NO: 1324192 - RNA, 19 nt, Artificial Sequence
  Description of Artificial Sequence: Synthetic oligonucleotide
ucgaacucuuauaaagaga

SEQ ID NO: 1324193 - RNA, 19 nt, Artificial Sequence
  Description of Artificial Sequence: Synthetic oligonucleotide
caaaacauacauccucagc

SEQ ID NO: 1324194 - RNA, 19 nt, Artificial Sequence
  Description of Artificial Sequence: Synthetic oligonucleotide
ucuugagcgggaaugguuc

SEQ ID NO: 1324195 - RNA, 19 nt, Artificial Sequence
  Description of Artificial Sequence: Synthetic oligonucleotide
ccugauggggcaaagauag

SEQ ID NO: 1324196 - RNA, 19 nt, Artificial Sequence
  Description of Artificial Sequence: Synthetic oligonucleotide
accgugaccgucuuccugg

SEQ ID NO: 1324197 - RNA, 19 nt, Artificial Sequence
  Description of Artificial Sequence: Synthetic oligonucleotide
auacauccucagcauagcg

SEQ ID NO: 1324198 - RNA, 19 nt, Artificial Sequence
  Description of Artificial Sequence: Synthetic oligonucleotide
caguccaagggccugaaag

SEQ ID NO: 1324199 - RNA, 19 nt, Artificial Sequence
  Description of Artificial Sequence: Synthetic oligonucleotide
ugggcuaucucucucuuuc

SEQ ID NO: 1324200 - RNA, 19 nt, Artificial Sequence
  Description of Artificial Sequence: Synthetic oligonucleotide
agggacuuuggacaaaaca

SEQ ID NO: 1324201 - RNA, 19 nt, Artificial Sequence
  Description of Artificial Sequence: Synthetic oligonucleotide
agucccucaccuguaaacc

SEQ ID NO: 1324202 - RNA, 19 nt, Artificial Sequence
  Description of Artificial Sequence: Synthetic oligonucleotide
gaagguaugauccauucau

SEQ ID NO: 1324203 - RNA, 19 nt, Artificial Sequence
  Description of Artificial Sequence: Synthetic oligonucleotide
uccugagggucccaaauca

SEQ ID NO: 1324204 - RNA, 19 nt, Artificial Sequence
  Description of Artificial Sequence: Synthetic oligonucleotide
uguucauuugucccaguaa

SEQ ID NO: 1324205 - RNA, 19 nt, Artificial Sequence
  Description of Artificial Sequence: Synthetic oligonucleotide
augucaagaagggaauugg

SEQ ID NO: 1324206 - RNA, 19 nt, Artificial Sequence
  Description of Artificial Sequence: Synthetic oligonucleotide
aggaaaggaauuugccauc

SEQ ID NO: 1324207 - RNA, 19 nt, Artificial Sequence
  Description of Artificial Sequence: Synthetic oligonucleotide
gaauuggcaccugaugggg

SEQ ID NO: 1324208 - RNA, 19 nt, Artificial Sequence
  Description of Artificial Sequence: Synthetic oligonucleotide
acuacuggagcuucugugu

SEQ ID NO: 1324209 - RNA, 19 nt, Artificial Sequence
  Description of Artificial Sequence: Synthetic oligonucleotide
cuuagacucauuugcaaca

SEQ ID NO: 1324210 - RNA, 19 nt, Artificial Sequence
  Description of Artificial Sequence: Synthetic oligonucleotide
ugcauccagccaaaguucc

SEQ ID NO: 1324211 - RNA, 19 nt, Artificial Sequence
  Description of Artificial Sequence: Synthetic oligonucleotide
cccaaaucaagucacauug

SEQ ID NO: 1324212 - RNA, 19 nt, Artificial Sequence
  Description of Artificial Sequence: Synthetic oligonucleotide
gaucccacagugcauccag

SEQ ID NO: 1324213 - RNA, 19 nt, Artificial Sequence
  Description of Artificial Sequence: Synthetic oligonucleotide
cauguuucaggagucaaug

SEQ ID NO: 1324214 - RNA, 19 nt, Artificial Sequence
  Description of Artificial Sequence: Synthetic oligonucleotide
ggaaugguucuucacaccc

SEQ ID NO: 1324215 - RNA, 19 nt, Artificial Sequence
  Description of Artificial Sequence: Synthetic oligonucleotide
ucugucacaaagucuacuu

SEQ ID NO: 1324216 - RNA, 19 nt, Artificial Sequence
  Description of Artificial Sequence: Synthetic oligonucleotide
cugguuacggucagagucc

SEQ ID NO: 1324217 - RNA, 19 nt, Artificial Sequence
  Description of Artificial Sequence: Synthetic oligonucleotide
caggagucaauggacaagg

SEQ ID NO: 1324218 - RNA, 19 nt, Artificial Sequence
  Description of Artificial Sequence: Synthetic oligonucleotide
uuugcuggccaugucaaga

SEQ ID NO: 1324219 - RNA, 19 nt, Artificial Sequence
  Description of Artificial Sequence: Synthetic oligonucleotide
uuugagaccugcccugacu

SEQ ID NO: 1324220 - RNA, 19 nt, Artificial Sequence
  Description of Artificial Sequence: Synthetic oligonucleotide
uguucaguaccucucuuuu

SEQ ID NO: 1324221 - RNA, 19 nt, Artificial Sequence
  Description of Artificial Sequence: Synthetic oligonucleotide
cuuggcgugccucuugagg

SEQ ID NO: 1324222 - RNA, 19 nt, Artificial Sequence
  Description of Artificial Sequence: Synthetic oligonucleotide
gguguauccagacgaaugc

SEQ ID NO: 1324223 - RNA, 19 nt, Artificial Sequence
  Description of Artificial Sequence: Synthetic oligonucleotide
ucagcauagcgcugcaucu

SEQ ID NO: 1324224 - RNA, 19 nt, Artificial Sequence
  Description of Artificial Sequence: Synthetic oligonucleotide
gaauucuaaggagucagca

SEQ ID NO: 1324225 - RNA, 19 nt, Artificial Sequence
  Description of Artificial Sequence: Synthetic oligonucleotide
acgguguagacguuuccuc

SEQ ID NO: 1324226 - RNA, 19 nt, Artificial Sequence
  Description of Artificial Sequence: Synthetic oligonucleotide
agaauucuaaggagucagc

SEQ ID NO: 1324227 - RNA, 19 nt, Artificial Sequence
  Description of Artificial Sequence: Synthetic oligonucleotide
uccugauaaugaagagagg

SEQ ID NO: 1324228 - RNA, 19 nt, Artificial Sequence
  Description of Artificial Sequence: Synthetic oligonucleotide
uguaaaccauauccaggga

SEQ ID NO: 1324229 - RNA, 19 nt, Artificial Sequence
  Description of Artificial Sequence: Synthetic oligonucleotide
gugcccauccauuaaaaca

SEQ ID NO: 1324230 - RNA, 19 nt, Artificial Sequence
  Description of Artificial Sequence: Synthetic oligonucleotide
aggauuguucaguaccucu

SEQ ID NO: 1324231 - RNA, 19 nt, Artificial Sequence
  Description of Artificial Sequence: Synthetic oligonucleotide
gaccucucuuccuugggag

SEQ ID NO: 1324232 - RNA, 19 nt, Artificial Sequence
  Description of Artificial Sequence: Synthetic oligonucleotide
uguucggccaucagagaac

SEQ ID NO: 1324233 - RNA, 19 nt, Artificial Sequence
  Description of Artificial Sequence: Synthetic oligonucleotide
guagacguuuccucagucc

SEQ ID NO: 1324234 - RNA, 19 nt, Artificial Sequence
  Description of Artificial Sequence: Synthetic oligonucleotide
auuugucccaguaagcaga

SEQ ID NO: 1324235 - RNA, 19 nt, Artificial Sequence
  Description of Artificial Sequence: Synthetic oligonucleotide
gggccugaaagacucagcg

SEQ ID NO: 1324236 - RNA, 19 nt, Artificial Sequence
  Description of Artificial Sequence: Synthetic oligonucleotide
gguguggcaagcuaccaag

SEQ ID NO: 1324237 - RNA, 19 nt, Artificial Sequence
  Description of Artificial Sequence: Synthetic oligonucleotide
cugagggucccaaaucaag

SEQ ID NO: 1324238 - RNA, 19 nt, Artificial Sequence
  Description of Artificial Sequence: Synthetic oligonucleotide
ucaggagucaauggacaag

SEQ ID NO: 1324239 - RNA, 19 nt, Artificial Sequence
  Description of Artificial Sequence: Synthetic oligonucleotide
agaauguaccauguuucag

SEQ ID NO: 1324240 - RNA, 19 nt, Artificial Sequence
  Description of Artificial Sequence: Synthetic oligonucleotide
cuugggaggagcuucuuga

SEQ ID NO: 1324241 - RNA, 19 nt, Artificial Sequence
  Description of Artificial Sequence: Synthetic oligonucleotide
aaacacagucagaucccac

SEQ ID NO: 1324242 - RNA, 19 nt, Artificial Sequence
  Description of Artificial Sequence: Synthetic oligonucleotide
agcuaccaagccuuccagg

SEQ ID NO: 1324243 - RNA, 19 nt, Artificial Sequence
  Description of Artificial Sequence: Synthetic oligonucleotide
acggucagagucccucacc

SEQ ID NO: 1324244 - RNA, 19 nt, Artificial Sequence
  Description of Artificial Sequence: Synthetic oligonucleotide
ccuguaaaccauauccagg

SEQ ID NO: 1324245 - RNA, 19 nt, Artificial Sequence
  Description of Artificial Sequence: Synthetic oligonucleotide
auucgaacucuuauaaaga

SEQ ID NO: 1324246 - RNA, 19 nt, Artificial Sequence
  Description of Artificial Sequence: Synthetic oligonucleotide
uauccagacgaaugccgcc

SEQ ID NO: 1324247 - RNA, 19 nt, Artificial Sequence
  Description of Artificial Sequence: Synthetic oligonucleotide
uguagacguuuccucaguc

SEQ ID NO: 1324248 - RNA, 19 nt, Artificial Sequence
  Description of Artificial Sequence: Synthetic oligonucleotide
gagucccucaccuguaaac

SEQ ID NO: 1324249 - RNA, 19 nt, Artificial Sequence
  Description of Artificial Sequence: Synthetic oligonucleotide
gacaaggggcacuuugaac

SEQ ID NO: 1324250 - RNA, 19 nt, Artificial Sequence
  Description of Artificial Sequence: Synthetic oligonucleotide
auuggcaccugauggggca

SEQ ID NO: 1324251 - RNA, 19 nt, Artificial Sequence
  Description of Artificial Sequence: Synthetic oligonucleotide
agggucccaaaucaaguca

SEQ ID NO: 1324252 - RNA, 19 nt, Artificial Sequence
  Description of Artificial Sequence: Synthetic oligonucleotide
cauuucgaagggucugcgg

SEQ ID NO: 1324253 - RNA, 19 nt, Artificial Sequence
  Description of Artificial Sequence: Synthetic oligonucleotide
aagggccugaaagacucag

SEQ ID NO: 1324254 - RNA, 19 nt, Artificial Sequence
  Description of Artificial Sequence: Synthetic oligonucleotide
aaaucaagucacauugguu

SEQ ID NO: 1324255 - RNA, 19 nt, Artificial Sequence
  Description of Artificial Sequence: Synthetic oligonucleotide
agacucagcgaagagcgag

SEQ ID NO: 1324256 - RNA, 19 nt, Artificial Sequence
  Description of Artificial Sequence: Synthetic oligonucleotide
agcgggaaugguucuucac

SEQ ID NO: 1324257 - RNA, 19 nt, Artificial Sequence
  Description of Artificial Sequence: Synthetic oligonucleotide
uucaggagucaauggacaa

SEQ ID NO: 1324258 - RNA, 19 nt, Artificial Sequence
  Description of Artificial Sequence: Synthetic oligonucleotide
ccugguuacggucagaguc

SEQ ID NO: 1324259 - RNA, 19 nt, Artificial Sequence
  Description of Artificial Sequence: Synthetic oligonucleotide
uuucgaagggucugcgggu

SEQ ID NO: 1324260 - RNA, 19 nt, Artificial Sequence
  Description of Artificial Sequence: Synthetic oligonucleotide
aagagagggucuucccgga

SEQ ID NO: 1324261 - RNA, 19 nt, Artificial Sequence
  Description of Artificial Sequence: Synthetic oligonucleotide
uucacaccccuuuguucgg

SEQ ID NO: 1324262 - RNA, 19 nt, Artificial Sequence
  Description of Artificial Sequence: Synthetic oligonucleotide
gacguuuccucaguccaag

SEQ ID NO: 1324263 - RNA, 19 nt, Artificial Sequence
  Description of Artificial Sequence: Synthetic oligonucleotide
cucauguuucugcucugcc

SEQ ID NO: 1324264 - RNA, 19 nt, Artificial Sequence
  Description of Artificial Sequence: Synthetic oligonucleotide
ucucucuuuccuguuuacc

SEQ ID NO: 1324265 - RNA, 19 nt, Artificial Sequence
  Description of Artificial Sequence: Synthetic oligonucleotide
uucuugagcgggaaugguu

SEQ ID NO: 1324266 - RNA, 19 nt, Artificial Sequence
  Description of Artificial Sequence: Synthetic oligonucleotide
ugccguuuccgcucuagcu

SEQ ID NO: 1324267 - RNA, 19 nt, Artificial Sequence
  Description of Artificial Sequence: Synthetic oligonucleotide
gaaaagguguggcaagcua

SEQ ID NO: 1324268 - RNA, 19 nt, Artificial Sequence
  Description of Artificial Sequence: Synthetic oligonucleotide
guauccagacgaaugccgc

SEQ ID NO: 1324269 - RNA, 19 nt, Artificial Sequence
  Description of Artificial Sequence: Synthetic oligonucleotide
uuccugagggucccaaauc

SEQ ID NO: 1324270 - RNA, 19 nt, Artificial Sequence
  Description of Artificial Sequence: Synthetic oligonucleotide
gaagggaauuggcaccuga

SEQ ID NO: 1324271 - RNA, 19 nt, Artificial Sequence
  Description of Artificial Sequence: Synthetic oligonucleotide
cauacauccucagcauagc

SEQ ID NO: 1324272 - RNA, 19 nt, Artificial Sequence
  Description of Artificial Sequence: Synthetic oligonucleotide
aggcaugcgguuugcuggg

SEQ ID NO: 1324273 - RNA, 19 nt, Artificial Sequence
  Description of Artificial Sequence: Synthetic oligonucleotide
uuuguucggccaucagaga

SEQ ID NO: 1324274 - RNA, 19 nt, Artificial Sequence
  Description of Artificial Sequence: Synthetic oligonucleotide
gguguagacguuuccucag

SEQ ID NO: 1324275 - RNA, 19 nt, Artificial Sequence
  Description of Artificial Sequence: Synthetic oligonucleotide
acauuucgaagggucugcg

SEQ ID NO: 1324276 - RNA, 19 nt, Artificial Sequence
  Description of Artificial Sequence: Synthetic oligonucleotide
agucaauggacaaggggca

SEQ ID NO: 1324277 - RNA, 19 nt, Artificial Sequence
  Description of Artificial Sequence: Synthetic oligonucleotide
ucccaaaucaagucacauu

SEQ ID NO: 1324278 - RNA, 19 nt, Artificial Sequence
  Description of Artificial Sequence: Synthetic oligonucleotide
ucccggauuuugcuggcca

SEQ ID NO: 1324279 - RNA, 19 nt, Artificial Sequence
  Description of Artificial Sequence: Synthetic oligonucleotide
cuaaggagucagcagccuc

SEQ ID NO: 1324280 - RNA, 19 nt, Artificial Sequence
  Description of Artificial Sequence: Synthetic oligonucleotide
aucaagucacauugguuuu

SEQ ID NO: 1324281 - RNA, 19 nt, Artificial Sequence
  Description of Artificial Sequence: Synthetic oligonucleotide
cuuggaggcaugcgguuug

SEQ ID NO: 1324282 - RNA, 19 nt, Artificial Sequence
  Description of Artificial Sequence: Synthetic oligonucleotide
ucccaucacgguguagacg

SEQ ID NO: 1324283 - RNA, 19 nt, Artificial Sequence
  Description of Artificial Sequence: Synthetic oligonucleotide
gaggagcuucuugagcggg

SEQ ID NO: 1324284 - RNA, 19 nt, Artificial Sequence
  Description of Artificial Sequence: Synthetic oligonucleotide
gauagcuuucugguguauc

SEQ ID NO: 1324285 - RNA, 19 nt, Artificial Sequence
  Description of Artificial Sequence: Synthetic oligonucleotide
ucacgguguagacguuucc

SEQ ID NO: 1324286 - RNA, 19 nt, Artificial Sequence
  Description of Artificial Sequence: Synthetic oligonucleotide
cuuuagguucaggucuccg

SEQ ID NO: 1324287 - RNA, 19 nt, Artificial Sequence
  Description of Artificial Sequence: Synthetic oligonucleotide
uuuugagaccugcccugac

SEQ ID NO: 1324288 - RNA, 19 nt, Artificial Sequence
  Description of Artificial Sequence: Synthetic oligonucleotide
guuacggucagagucccuc

SEQ ID NO: 1324289 - RNA, 19 nt, Artificial Sequence
  Description of Artificial Sequence: Synthetic oligonucleotide
ugccucuugaggguguuga

SEQ ID NO: 1324290 - RNA, 19 nt, Artificial Sequence
  Description of Artificial Sequence: Synthetic oligonucleotide
ugccuuccacacuuucucc

SEQ ID NO: 1324291 - RNA, 19 nt, Artificial Sequence
  Description of Artificial Sequence: Synthetic oligonucleotide
ccaaaucaagucacauugg

SEQ ID NO: 1324292 - RNA, 19 nt, Artificial Sequence
  Description of Artificial Sequence: Synthetic oligonucleotide
uuggggaccgugaccgucu

SEQ ID NO: 1324293 - RNA, 19 nt, Artificial Sequence
  Description of Artificial Sequence: Synthetic oligonucleotide
cuuccuggggaucgagacc

SEQ ID NO: 1324294 - RNA, 19 nt, Artificial Sequence
  Description of Artificial Sequence: Synthetic oligonucleotide
gaggguguugagccucucc

SEQ ID NO: 1324295 - RNA, 19 nt, Artificial Sequence
  Description of Artificial Sequence: Synthetic oligonucleotide
gguuugcugggccuugggg

SEQ ID NO: 1324296 - RNA, 19 nt, Artificial Sequence
  Description of Artificial Sequence: Synthetic oligonucleotide
caagcuaccaagccuucca

SEQ ID NO: 1324297 - RNA, 19 nt, Artificial Sequence
  Description of Artificial Sequence: Synthetic oligonucleotide
agucuacuuuauaaaguca

SEQ ID NO: 1324298 - RNA, 19 nt, Artificial Sequence
  Description of Artificial Sequence: Synthetic oligonucleotide
uuacggucagagucccuca

SEQ ID NO: 1324299 - RNA, 19 nt, Artificial Sequence
  Description of Artificial Sequence: Synthetic oligonucleotide
caccuguaaaccauaucca

SEQ ID NO: 1324300 - RNA, 19 nt, Artificial Sequence
  Description of Artificial Sequence: Synthetic oligonucleotide
acaggauuguucaguaccu

SEQ ID NO: 1324301 - RNA, 19 nt, Artificial Sequence
  Description of Artificial Sequence: Synthetic oligonucleotide
ggugccagcucuucuuuag

SEQ ID NO: 1324302 - RNA, 19 nt, Artificial Sequence
  Description of Artificial Sequence: Synthetic oligonucleotide
gagaucuccggaagguaug

SEQ ID NO: 1324303 - RNA, 19 nt, Artificial Sequence
  Description of Artificial Sequence: Synthetic oligonucleotide
cauagcgcugcaucucuuc

SEQ ID NO: 1324304 - RNA, 19 nt, Artificial Sequence
  Description of Artificial Sequence: Synthetic oligonucleotide
guagaagaagccauucgaa

SEQ ID NO: 1324305 - RNA, 19 nt, Artificial Sequence
  Description of Artificial Sequence: Synthetic oligonucleotide
uccuuggcgugccucuuga

SEQ ID NO: 1324306 - RNA, 19 nt, Artificial Sequence
  Description of Artificial Sequence: Synthetic oligonucleotide
caaaucaagucacauuggu

SEQ ID NO: 1324307 - RNA, 19 nt, Artificial Sequence
  Description of Artificial Sequence: Synthetic oligonucleotide
ucccucaccuguaaaccau

SEQ ID NO: 1324308 - RNA, 19 nt, Artificial Sequence
  Description of Artificial Sequence: Synthetic oligonucleotide
gccugaaagacucagcgaa

SEQ ID NO: 1324309 - RNA, 19 nt, Artificial Sequence
  Description of Artificial Sequence: Synthetic oligonucleotide
aaaccauauccagggacuu

SEQ ID NO: 1324310 - RNA, 19 nt, Artificial Sequence
  Description of Artificial Sequence: Synthetic oligonucleotide
uccucccuccacuuggcgu

SEQ ID NO: 1324311 - RNA, 19 nt, Artificial Sequence
  Description of Artificial Sequence: Synthetic oligonucleotide
uuuuaggugaugggcuauc

SEQ ID NO: 1324312 - RNA, 19 nt, Artificial Sequence
  Description of Artificial Sequence: Synthetic oligonucleotide
ucuugaggguguugagccu

SEQ ID NO: 1324313 - RNA, 19 nt, Artificial Sequence
  Description of Artificial Sequence: Synthetic oligonucleotide
acgaaugccgccucugaua

SEQ ID NO: 1324314 - RNA, 19 nt, Artificial Sequence
  Description of Artificial Sequence: Synthetic oligonucleotide
aucacgguguagacguuuc

SEQ ID NO: 1324315 - RNA, 19 nt, Artificial Sequence
  Description of Artificial Sequence: Synthetic oligonucleotide
cugauaaugaagagagggu

SEQ ID NO: 1324316 - RNA, 19 nt, Artificial Sequence
  Description of Artificial Sequence: Synthetic oligonucleotide
agccauucgaacucuuaua

SEQ ID NO: 1324317 - RNA, 19 nt, Artificial Sequence
  Description of Artificial Sequence: Synthetic oligonucleotide
cuguggggagagaucuccg

SEQ ID NO: 1324318 - RNA, 19 nt, Artificial Sequence
  Description of Artificial Sequence: Synthetic oligonucleotide
gagaccugcccugacugug

SEQ ID NO: 1324319 - RNA, 19 nt, Artificial Sequence
  Description of Artificial Sequence: Synthetic oligonucleotide
guucggccaucagagaacc

SEQ ID NO: 1324320 - RNA, 19 nt, Artificial Sequence
  Description of Artificial Sequence: Synthetic oligonucleotide
uucgaagggucugcgggug

SEQ ID NO: 1324321 - RNA, 19 nt, Artificial Sequence
  Description of Artificial Sequence: Synthetic oligonucleotide
ugacugugcuccuccucgc

SEQ ID NO: 1324322 - RNA, 19 nt, Artificial Sequence
  Description of Artificial Sequence: Synthetic oligonucleotide
agagaucuccggaagguau

SEQ ID NO: 1324323 - RNA, 19 nt, Artificial Sequence
  Description of Artificial Sequence: Synthetic oligonucleotide
ugucccgggaccucucuuc

SEQ ID NO: 1324324 - RNA, 19 nt, Artificial Sequence
  Description of Artificial Sequence: Synthetic oligonucleotide
agaccugcccugacugugc

SEQ ID NO: 1324325 - RNA, 19 nt, Artificial Sequence
  Description of Artificial Sequence: Synthetic oligonucleotide
aagggaauuggcaccugau

SEQ ID NO: 1324326 - RNA, 19 nt, Artificial Sequence
  Description of Artificial Sequence: Synthetic oligonucleotide
aagguaugauccauucauu

SEQ ID NO: 1324327 - RNA, 19 nt, Artificial Sequence
  Description of Artificial Sequence: Synthetic oligonucleotide
agacgaaugccgccucuga

SEQ ID NO: 1324328 - RNA, 19 nt, Artificial Sequence
  Description of Artificial Sequence: Synthetic oligonucleotide
auccauucauucaggugag

SEQ ID NO: 1324329 - RNA, 19 nt, Artificial Sequence
  Description of Artificial Sequence: Synthetic oligonucleotide
gaccgugaccgucuuccug

SEQ ID NO: 1324330 - RNA, 19 nt, Artificial Sequence
  Description of Artificial Sequence: Synthetic oligonucleotide
agagggucuucccggauuu

SEQ ID NO: 1324331 - RNA, 19 nt, Artificial Sequence
  Description of Artificial Sequence: Synthetic oligonucleotide
acucagcgaagagcgagag

SEQ ID NO: 1324332 - RNA, 19 nt, Artificial Sequence
  Description of Artificial Sequence: Synthetic oligonucleotide
gccauucgaacucuuauaa

SEQ ID NO: 1324333 - RNA, 19 nt, Artificial Sequence
  Description of Artificial Sequence: Synthetic oligonucleotide
ggaucgagaccuccugucc

SEQ ID NO: 1324334 - RNA, 19 nt, Artificial Sequence
  Description of Artificial Sequence: Synthetic oligonucleotide
gcugauagcuuucuggugu

SEQ ID NO: 1324335 - RNA, 19 nt, Artificial Sequence
  Description of Artificial Sequence: Synthetic oligonucleotide
ucagagucccucaccugua

SEQ ID NO: 1324336 - RNA, 19 nt, Artificial Sequence
  Description of Artificial Sequence: Synthetic oligonucleotide
ucuuuagguucaggucucc

SEQ ID NO: 1324337 - RNA, 19 nt, Artificial Sequence
  Description of Artificial Sequence: Synthetic oligonucleotide
uguuuaccuuggaggcaug

SEQ ID NO: 1324338 - RNA, 19 nt, Artificial Sequence
  Description of Artificial Sequence: Synthetic oligonucleotide
cucagcgaagagcgagagg

SEQ ID NO: 1324339 - RNA, 19 nt, Artificial Sequence
  Description of Artificial Sequence: Synthetic oligonucleotide
cucaccuguaaaccauauc

SEQ ID NO: 1324340 - RNA, 19 nt, Artificial Sequence
  Description of Artificial Sequence: Synthetic oligonucleotide
ggacaaaacaggaaaggaa

SEQ ID NO: 1324341 - RNA, 19 nt, Artificial Sequence
  Description of Artificial Sequence: Synthetic oligonucleotide
cuauucugucacaaagucu

SEQ ID NO: 1324342 - RNA, 19 nt, Artificial Sequence
  Description of Artificial Sequence: Synthetic oligonucleotide
ugggaggaguccugucuca

SEQ ID NO: 1324343 - RNA, 19 nt, Artificial Sequence
  Description of Artificial Sequence: Synthetic oligonucleotide
gucagagucccucaccugu

SEQ ID NO: 1324344 - RNA, 19 nt, Artificial Sequence
  Description of Artificial Sequence: Synthetic oligonucleotide
ugguuacggucagaguccc

SEQ ID NO: 1324345 - RNA, 19 nt, Artificial Sequence
  Description of Artificial Sequence: Synthetic oligonucleotide
aggggcacuuugaacagug

SEQ ID NO: 1324346 - RNA, 19 nt, Artificial Sequence
  Description of Artificial Sequence: Synthetic oligonucleotide
gggaccgugaccgucuucc

SEQ ID NO: 1324347 - RNA, 19 nt, Artificial Sequence
  Description of Artificial Sequence: Synthetic oligonucleotide
ucgaagggucugcgggugc

SEQ ID NO: 1324348 - RNA, 19 nt, Artificial Sequence
  Description of Artificial Sequence: Synthetic oligonucleotide
ugagcgggaaugguucuuc

SEQ ID NO: 1324349 - RNA, 19 nt, Artificial Sequence
  Description of Artificial Sequence: Synthetic oligonucleotide
aagggucugcgggugccag

SEQ ID NO: 1324350 - RNA, 19 nt, Artificial Sequence
  Description of Artificial Sequence: Synthetic oligonucleotide
agguguggcaagcuaccaa

SEQ ID NO: 1324351 - RNA, 19 nt, Artificial Sequence
  Description of Artificial Sequence: Synthetic oligonucleotide
gcaaagauagagccuggga

SEQ ID NO: 1324352 - RNA, 19 nt, Artificial Sequence
  Description of Artificial Sequence: Synthetic oligonucleotide
agggucuucccggauuuug

SEQ ID NO: 1324353 - RNA, 19 nt, Artificial Sequence
  Description of Artificial Sequence: Synthetic oligonucleotide
agaucuccggaagguauga

SEQ ID NO: 1324354 - RNA, 19 nt, Artificial Sequence
  Description of Artificial Sequence: Synthetic oligonucleotide
cuucccggauuuugcuggc

SEQ ID NO: 1324355 - RNA, 19 nt, Artificial Sequence
  Description of Artificial Sequence: Synthetic oligonucleotide
auccagacgaaugccgccu

SEQ ID NO: 1324356 - RNA, 19 nt, Artificial Sequence
  Description of Artificial Sequence: Synthetic oligonucleotide
uccucucggagcucucgcu

SEQ ID NO: 1324357 - RNA, 19 nt, Artificial Sequence
  Description of Artificial Sequence: Synthetic oligonucleotide
ggugagagggaaaaggugu

SEQ ID NO: 1324358 - RNA, 19 nt, Artificial Sequence
  Description of Artificial Sequence: Synthetic oligonucleotide
gggaaugguucuucacacc

SEQ ID NO: 1324359 - RNA, 19 nt, Artificial Sequence
  Description of Artificial Sequence: Synthetic oligonucleotide
caucuguagaagaagccau

SEQ ID NO: 1324360 - RNA, 19 nt, Artificial Sequence
  Description of Artificial Sequence: Synthetic oligonucleotide
acagccuagugcccaucca

SEQ ID NO: 1324361 - RNA, 19 nt, Artificial Sequence
  Description of Artificial Sequence: Synthetic oligonucleotide
uugcaacaacucuuugauu

SEQ ID NO: 1324362 - RNA, 19 nt, Artificial Sequence
  Description of Artificial Sequence: Synthetic oligonucleotide
gucccucaccuguaaacca

SEQ ID NO: 1324363 - RNA, 19 nt, Artificial Sequence
  Description of Artificial Sequence: Synthetic oligonucleotide
cguuuccucaguccaaggg

SEQ ID NO: 1324364 - RNA, 19 nt, Artificial Sequence
  Description of Artificial Sequence: Synthetic oligonucleotide
cacaccccuuuguucggcc

SEQ ID NO: 1324365 - RNA, 19 nt, Artificial Sequence
  Description of Artificial Sequence: Synthetic oligonucleotide
ccugaaagacucagcgaag

SEQ ID NO: 1324366 - RNA, 19 nt, Artificial Sequence
  Description of Artificial Sequence: Synthetic oligonucleotide
ugaccgucuuccuggggau

SEQ ID NO: 1324367 - RNA, 19 nt, Artificial Sequence
  Description of Artificial Sequence: Synthetic oligonucleotide
caguggugauauuucaucu

SEQ ID NO: 1324368 - RNA, 19 nt, Artificial Sequence
  Description of Artificial Sequence: Synthetic oligonucleotide
ggaagguaugauccauuca

SEQ ID NO: 1324369 - RNA, 19 nt, Artificial Sequence
  Description of Artificial Sequence: Synthetic oligonucleotide
guaccauguuucaggaguc

SEQ ID NO: 1324370 - RNA, 19 nt, Artificial Sequence
  Description of Artificial Sequence: Synthetic oligonucleotide
ucgagaccuccugucccgg

SEQ ID NO: 1324371 - RNA, 19 nt, Artificial Sequence
  Description of Artificial Sequence: Synthetic oligonucleotide
cuccucucggagcucucgc

SEQ ID NO: 1324372 - RNA, 19 nt, Artificial Sequence
  Description of Artificial Sequence: Synthetic oligonucleotide
uccagacgaaugccgccuc

SEQ ID NO: 1324373 - RNA, 19 nt, Artificial Sequence
  Description of Artificial Sequence: Synthetic oligonucleotide
ugcgggugccagcucuucu

SEQ ID NO: 1324374 - RNA, 19 nt, Artificial Sequence
  Description of Artificial Sequence: Synthetic oligonucleotide
ggccaugucaagaagggaa

SEQ ID NO: 1324375 - RNA, 19 nt, Artificial Sequence
  Description of Artificial Sequence: Synthetic oligonucleotide
gugcauccagccaaaguuc

SEQ ID NO: 1324376 - RNA, 19 nt, Artificial Sequence
  Description of Artificial Sequence: Synthetic oligonucleotide
ggauuguucaguaccucuc

SEQ ID NO: 1324377 - RNA, 19 nt, Artificial Sequence
  Description of Artificial Sequence: Synthetic oligonucleotide
cgaaugccgccucugauag

SEQ ID NO: 1324378 - RNA, 19 nt, Artificial Sequence
  Description of Artificial Sequence: Synthetic oligonucleotide
gcgggaaugguucuucaca

SEQ ID NO: 1324379 - RNA, 19 nt, Artificial Sequence
  Description of Artificial Sequence: Synthetic oligonucleotide
aaggggcacuuugaacagu

SEQ ID NO: 1324380 - RNA, 19 nt, Artificial Sequence
  Description of Artificial Sequence: Synthetic oligonucleotide
uccucagcauagcgcugca

SEQ ID NO: 1324381 - RNA, 19 nt, Artificial Sequence
  Description of Artificial Sequence: Synthetic oligonucleotide
uggcguuuuccaucaucuc

SEQ ID NO: 1324382 - RNA, 19 nt, Artificial Sequence
  Description of Artificial Sequence: Synthetic oligonucleotide
agagucccucaccuguaaa

SEQ ID NO: 1324383 - RNA, 19 nt, Artificial Sequence
  Description of Artificial Sequence: Synthetic oligonucleotide
ucccuggauccuuggcgug

SEQ ID NO: 1324384 - RNA, 19 nt, Artificial Sequence
  Description of Artificial Sequence: Synthetic oligonucleotide
gucccgggaccucucuucc

SEQ ID NO: 1324385 - RNA, 19 nt, Artificial Sequence
  Description of Artificial Sequence: Synthetic oligonucleotide
gcugcuggaaccaucacua

SEQ ID NO: 1324386 - RNA, 19 nt, Artificial Sequence
  Description of Artificial Sequence: Synthetic oligonucleotide
cugcaggcccugguuacgg

SEQ ID NO: 1324387 - RNA, 19 nt, Artificial Sequence
  Description of Artificial Sequence: Synthetic oligonucleotide
ucacaccccuuuguucggc

SEQ ID NO: 1324388 - RNA, 19 nt, Artificial Sequence
  Description of Artificial Sequence: Synthetic oligonucleotide
gacucagcgaagagcgaga

SEQ ID NO: 1324389 - RNA, 19 nt, Artificial Sequence
  Description of Artificial Sequence: Synthetic oligonucleotide
cugccguuuccgcucuagc

SEQ ID NO: 1324390 - RNA, 19 nt, Artificial Sequence
  Description of Artificial Sequence: Synthetic oligonucleotide
uggcgugccucuugagggu

SEQ ID NO: 1324391 - RNA, 19 nt, Artificial Sequence
  Description of Artificial Sequence: Synthetic oligonucleotide
acaccccuuuguucggcca

SEQ ID NO: 1324392 - RNA, 19 nt, Artificial Sequence
  Description of Artificial Sequence: Synthetic oligonucleotide
ucaguccaagggccugaaa

SEQ ID NO: 1324393 - RNA, 19 nt, Artificial Sequence
  Description of Artificial Sequence: Synthetic oligonucleotide
gagcgggaaugguucuuca

SEQ ID NO: 1324394 - RNA, 19 nt, Artificial Sequence
  Description of Artificial Sequence: Synthetic oligonucleotide
ccuuuguucggccaucaga

SEQ ID NO: 1324395 - RNA, 19 nt, Artificial Sequence
  Description of Artificial Sequence: Synthetic oligonucleotide
caggauuguucaguaccuc

SEQ ID NO: 1324396 - RNA, 19 nt, Artificial Sequence
  Description of Artificial Sequence: Synthetic oligonucleotide
cuuuugagaccugcccuga

SEQ ID NO: 1324397 - RNA, 19 nt, Artificial Sequence
  Description of Artificial Sequence: Synthetic oligonucleotide
ccaguaagcagagucuguc

SEQ ID NO: 1324398 - RNA, 19 nt, Artificial Sequence
  Description of Artificial Sequence: Synthetic oligonucleotide
cgggaaugguucuucacac

SEQ ID NO: 1324399 - RNA, 19 nt, Artificial Sequence
  Description of Artificial Sequence: Synthetic oligonucleotide
ugauagcuuucugguguau

SEQ ID NO: 1324400 - RNA, 19 nt, Artificial Sequence
  Description of Artificial Sequence: Synthetic oligonucleotide
agaucccacagugcaucca

SEQ ID NO: 1324401 - RNA, 19 nt, Artificial Sequence
  Description of Artificial Sequence: Synthetic oligonucleotide
ccucuugaggguguugagc

SEQ ID NO: 1324402 - RNA, 19 nt, Artificial Sequence
  Description of Artificial Sequence: Synthetic oligonucleotide
ugcgguuugcugggccuug

SEQ ID NO: 1324403 - RNA, 19 nt, Artificial Sequence
  Description of Artificial Sequence: Synthetic oligonucleotide
accccuuuguucggccauc

SEQ ID NO: 1324404 - RNA, 19 nt, Artificial Sequence
  Description of Artificial Sequence: Synthetic oligonucleotide
accugauggggcaaagaua

SEQ ID NO: 1324405 - RNA, 19 nt, Artificial Sequence
  Description of Artificial Sequence: Synthetic oligonucleotide
cccaucacgguguagacgu

SEQ ID NO: 1324406 - RNA, 19 nt, Artificial Sequence
  Description of Artificial Sequence: Synthetic oligonucleotide
uucccggauuuugcuggcc

SEQ ID NO: 1324407 - RNA, 19 nt, Artificial Sequence
  Description of Artificial Sequence: Synthetic oligonucleotide
cuuuccuguuuaccuugga

SEQ ID NO: 1324408 - RNA, 19 nt, Artificial Sequence
  Description of Artificial Sequence: Synthetic oligonucleotide
gagagaucuccggaaggua

SEQ ID NO: 1324409 - RNA, 19 nt, Artificial Sequence
  Description of Artificial Sequence: Synthetic oligonucleotide
cugauagcuuucuggugua

SEQ ID NO: 1324410 - RNA, 19 nt, Artificial Sequence
  Description of Artificial Sequence: Synthetic oligonucleotide
gggcuaucucucucuuucc

SEQ ID NO: 1324411 - RNA, 19 nt, Artificial Sequence
  Description of Artificial Sequence: Synthetic oligonucleotide
aauggacaaggggcacuuu

SEQ ID NO: 1324412 - RNA, 19 nt, Artificial Sequence
  Description of Artificial Sequence: Synthetic oligonucleotide
ggaccucucuuccuuggga

SEQ ID NO: 1324413 - RNA, 19 nt, Artificial Sequence
  Description of Artificial Sequence: Synthetic oligonucleotide
gacgaaugccgccucugau

SEQ ID NO: 1324414 - RNA, 19 nt, Artificial Sequence
  Description of Artificial Sequence: Synthetic oligonucleotide
augggcuaucucucucuuu

SEQ ID NO: 1324415 - RNA, 19 nt, Artificial Sequence
  Description of Artificial Sequence: Synthetic oligonucleotide
ucugcgggugccagcucuu

SEQ ID NO: 1324416 - RNA, 19 nt, Artificial Sequence
  Description of Artificial Sequence: Synthetic oligonucleotide
cuccggaagguaugaucca

SEQ ID NO: 1324417 - RNA, 19 nt, Artificial Sequence
  Description of Artificial Sequence: Synthetic oligonucleotide
ggacaaggggcacuuugaa

SEQ ID NO: 1324418 - RNA, 19 nt, Artificial Sequence
  Description of Artificial Sequence: Synthetic oligonucleotide
ggccugaaagacucagcga

SEQ ID NO: 1324419 - RNA, 19 nt, Artificial Sequence
  Description of Artificial Sequence: Synthetic oligonucleotide
gcaugcgguuugcugggcc

SEQ ID NO: 1324420 - RNA, 19 nt, Artificial Sequence
  Description of Artificial Sequence: Synthetic oligonucleotide
cuugacucuuccugacacu

SEQ ID NO: 1324421 - RNA, 19 nt, Artificial Sequence
  Description of Artificial Sequence: Synthetic oligonucleotide
ccauuaaaacacagucaga

SEQ ID NO: 1324422 - RNA, 19 nt, Artificial Sequence
  Description of Artificial Sequence: Synthetic oligonucleotide
gaaugccgccucugauaga

SEQ ID NO: 1324423 - RNA, 19 nt, Artificial Sequence
  Description of Artificial Sequence: Synthetic oligonucleotide
cggaagguaugauccauuc

SEQ ID NO: 1324424 - RNA, 19 nt, Artificial Sequence
  Description of Artificial Sequence: Synthetic oligonucleotide
uugagcgggaaugguucuu

SEQ ID NO: 1324425 - RNA, 19 nt, Artificial Sequence
  Description of Artificial Sequence: Synthetic oligonucleotide
agagaacccugcaggcccu

SEQ ID NO: 1324426 - RNA, 19 nt, Artificial Sequence
  Description of Artificial Sequence: Synthetic oligonucleotide
ucccgggaccucucuuccu

SEQ ID NO: 1324427 - RNA, 19 nt, Artificial Sequence
  Description of Artificial Sequence: Synthetic oligonucleotide
gaugggcuaucucucucuu

SEQ ID NO: 1324428 - RNA, 19 nt, Artificial Sequence
  Description of Artificial Sequence: Synthetic oligonucleotide
cuguuuaccuuggaggcau

SEQ ID NO: 1324429 - RNA, 19 nt, Artificial Sequence
  Description of Artificial Sequence: Synthetic oligonucleotide
uccugacacuuggcuauuc

SEQ ID NO: 1324430 - RNA, 19 nt, Artificial Sequence
  Description of Artificial Sequence: Synthetic oligonucleotide
gaguccugucucagaagaa

SEQ ID NO: 1324431 - RNA, 19 nt, Artificial Sequence
  Description of Artificial Sequence: Synthetic oligonucleotide
ggguguugagccucuccuc

SEQ ID NO: 1324432 - RNA, 19 nt, Artificial Sequence
  Description of Artificial Sequence: Synthetic oligonucleotide
gcaagcuaccaagccuucc

SEQ ID NO: 1324433 - RNA, 19 nt, Artificial Sequence
  Description of Artificial Sequence: Synthetic oligonucleotide
ccucauguuucugcucugc

SEQ ID NO: 1324434 - RNA, 19 nt, Artificial Sequence
  Description of Artificial Sequence: Synthetic oligonucleotide
cuugagcgggaaugguucu

SEQ ID NO: 1324435 - RNA, 19 nt, Artificial Sequence
  Description of Artificial Sequence: Synthetic oligonucleotide
cugauggggcaaagauaga

SEQ ID NO: 1324436 - RNA, 19 nt, Artificial Sequence
  Description of Artificial Sequence: Synthetic oligonucleotide
gucugcgggugccagcucu

SEQ ID NO: 1324437 - RNA, 19 nt, Artificial Sequence
  Description of Artificial Sequence: Synthetic oligonucleotide
ggcuauucugucacaaagu

SEQ ID NO: 1324438 - RNA, 19 nt, Artificial Sequence
  Description of Artificial Sequence: Synthetic oligonucleotide
gacugugcuccuccucgcu

SEQ ID NO: 1324439 - RNA, 19 nt, Artificial Sequence
  Description of Artificial Sequence: Synthetic oligonucleotide
ggggcacuuugaacagugg

SEQ ID NO: 1324440 - RNA, 19 nt, Artificial Sequence
  Description of Artificial Sequence: Synthetic oligonucleotide
agccuagugcccauccauu

SEQ ID NO: 1324441 - RNA, 19 nt, Artificial Sequence
  Description of Artificial Sequence: Synthetic oligonucleotide
ccauccauuaaaacacagu

SEQ ID NO: 1324442 - RNA, 19 nt, Artificial Sequence
  Description of Artificial Sequence: Synthetic oligonucleotide
caagggccugaaagacuca

SEQ ID NO: 1324443 - RNA, 19 nt, Artificial Sequence
  Description of Artificial Sequence: Synthetic oligonucleotide
cacgguguagacguuuccu

SEQ ID NO: 1324444 - RNA, 19 nt, Artificial Sequence
  Description of Artificial Sequence: Synthetic oligonucleotide
ccauucgaacucuuauaaa

SEQ ID NO: 1324445 - RNA, 19 nt, Artificial Sequence
  Description of Artificial Sequence: Synthetic oligonucleotide
cagagucccucaccuguaa

SEQ ID NO: 1324446 - RNA, 19 nt, Artificial Sequence
  Description of Artificial Sequence: Synthetic oligonucleotide
uuccugacacuuggcuauu

SEQ ID NO: 1324447 - RNA, 19 nt, Artificial Sequence
  Description of Artificial Sequence: Synthetic oligonucleotide
cgcucuagcuccucugcug

SEQ ID NO: 1324448 - RNA, 19 nt, Artificial Sequence
  Description of Artificial Sequence: Synthetic oligonucleotide
ggucccaaaucaagucaca

SEQ ID NO: 1324449 - RNA, 19 nt, Artificial Sequence
  Description of Artificial Sequence: Synthetic oligonucleotide
gccuagugcccauccauua

SEQ ID NO: 1324450 - RNA, 19 nt, Artificial Sequence
  Description of Artificial Sequence: Synthetic oligonucleotide
cagccuagugcccauccau

SEQ ID NO: 1324451 - RNA, 19 nt, Artificial Sequence
  Description of Artificial Sequence: Synthetic oligonucleotide
uggggaccgugaccgucuu

SEQ ID NO: 1324452 - RNA, 19 nt, Artificial Sequence
  Description of Artificial Sequence: Synthetic oligonucleotide
ggaaaagguguggcaagcu

SEQ ID NO: 1324453 - RNA, 19 nt, Artificial Sequence
  Description of Artificial Sequence: Synthetic oligonucleotide
gaacagccugcuuccuuuu

SEQ ID NO: 1324454 - RNA, 19 nt, Artificial Sequence
  Description of Artificial Sequence: Synthetic oligonucleotide
caucacuacuggagcuucu

SEQ ID NO: 1324455 - RNA, 19 nt, Artificial Sequence
  Description of Artificial Sequence: Synthetic oligonucleotide
ggagcuucuugagcgggaa

SEQ ID NO: 1324456 - RNA, 19 nt, Artificial Sequence
  Description of Artificial Sequence: Synthetic oligonucleotide
ccuagugcccauccauuaa

SEQ ID NO: 1324457 - RNA, 19 nt, Artificial Sequence
  Description of Artificial Sequence: Synthetic oligonucleotide
ggcgugccucuugagggug

SEQ ID NO: 1324458 - RNA, 19 nt, Artificial Sequence
  Description of Artificial Sequence: Synthetic oligonucleotide
ccggauuuugcuggccaug

SEQ ID NO: 1324459 - RNA, 19 nt, Artificial Sequence
  Description of Artificial Sequence: Synthetic oligonucleotide
ccgugaccgucuuccuggg

SEQ ID NO: 1324460 - RNA, 19 nt, Artificial Sequence
  Description of Artificial Sequence: Synthetic oligonucleotide
augcgguuugcugggccuu

SEQ ID NO: 1324461 - RNA, 19 nt, Artificial Sequence
  Description of Artificial Sequence: Synthetic oligonucleotide
ccugccguuuccgcucuag

SEQ ID NO: 1324462 - RNA, 19 nt, Artificial Sequence
  Description of Artificial Sequence: Synthetic oligonucleotide
gcgguuugcugggccuugg

SEQ ID NO: 1324463 - RNA, 19 nt, Artificial Sequence
  Description of Artificial Sequence: Synthetic oligonucleotide
gcccauccauuaaaacaca

SEQ ID NO: 1324464 - RNA, 19 nt, Artificial Sequence
  Description of Artificial Sequence: Synthetic oligonucleotide
cugguguauccagacgaau

SEQ ID NO: 1324465 - RNA, 19 nt, Artificial Sequence
  Description of Artificial Sequence: Synthetic oligonucleotide
ggcaagcuaccaagccuuc

SEQ ID NO: 1324466 - RNA, 19 nt, Artificial Sequence
  Description of Artificial Sequence: Synthetic oligonucleotide
cucaguccaagggccugaa

SEQ ID NO: 1324467 - RNA, 19 nt, Artificial Sequence
  Description of Artificial Sequence: Synthetic oligonucleotide
gccaugucaagaagggaau

SEQ ID NO: 1324468 - RNA, 19 nt, Artificial Sequence
  Description of Artificial Sequence: Synthetic oligonucleotide
cugcgggugccagcucuuc

SEQ ID NO: 1324469 - RNA, 19 nt, Artificial Sequence
  Description of Artificial Sequence: Synthetic oligonucleotide
ccagggacuuuggacaaaa

SEQ ID NO: 1324470 - RNA, 19 nt, Artificial Sequence
  Description of Artificial Sequence: Synthetic oligonucleotide
ccgggaccucucuuccuug

SEQ ID NO: 1324471 - RNA, 19 nt, Artificial Sequence
  Description of Artificial Sequence: Synthetic oligonucleotide
caucacgguguagacguuu

SEQ ID NO: 1324472 - RNA, 19 nt, Artificial Sequence
  Description of Artificial Sequence: Synthetic oligonucleotide
ccauguuucaggagucaau

SEQ ID NO: 1324473 - RNA, 19 nt, Artificial Sequence
  Description of Artificial Sequence: Synthetic oligonucleotide
ggcaugcgguuugcugggc

SEQ ID NO: 1324474 - RNA, 19 nt, Artificial Sequence
  Description of Artificial Sequence: Synthetic oligonucleotide
gggucugcgggugccagcu

SEQ ID NO: 1324475 - RNA, 19 nt, Artificial Sequence
  Description of Artificial Sequence: Synthetic oligonucleotide
cgugaccgucuuccugggg

SEQ ID NO: 1324476 - RNA, 19 nt, Artificial Sequence
  Description of Artificial Sequence: Synthetic oligonucleotide
caccccuuuguucggccau

SEQ ID NO: 1324477 - RNA, 19 nt, Artificial Sequence
  Description of Artificial Sequence: Synthetic oligonucleotide
ggucuccgccucccaucac

SEQ ID NO: 1324478 - RNA, 19 nt, Artificial Sequence
  Description of Artificial Sequence: Synthetic oligonucleotide
cccucaccuguaaaccaua

SEQ ID NO: 1324479 - RNA, 19 nt, Artificial Sequence
  Description of Artificial Sequence: Synthetic oligonucleotide
ggggaccgugaccgucuuc

SEQ ID NO: 1324480 - RNA, 19 nt, Artificial Sequence
  Description of Artificial Sequence: Synthetic oligonucleotide
ccucaguccaagggccuga

SEQ ID NO: 1324481 - RNA, 19 nt, Artificial Sequence
  Description of Artificial Sequence: Synthetic oligonucleotide
ggucugcgggugccagcuc

SEQ ID NO: 1324482 - RNA, 19 nt, Artificial Sequence
  Description of Artificial Sequence: Synthetic oligonucleotide
gcauccagccaaaguuccu

SEQ ID NO: 1324483 - RNA, 19 nt, Artificial Sequence
  Description of Artificial Sequence: Synthetic oligonucleotide
ggaccgugaccgucuuccu

SEQ ID NO: 1324484 - RNA, 19 nt, Artificial Sequence
  Description of Artificial Sequence: Synthetic oligonucleotide
gcgggugccagcucuucuu

SEQ ID NO: 1324485 - RNA, 19 nt, Artificial Sequence
  Description of Artificial Sequence: Synthetic oligonucleotide
ccgccucccaucacggugu

SEQ ID NO: 1324486 - RNA, 19 nt, Artificial Sequence
  Description of Artificial Sequence: Synthetic oligonucleotide
ccccuuuguucggccauca

SEQ ID NO: 1324487 - RNA, 19 nt, Artificial Sequence
  Description of Artificial Sequence: Synthetic oligonucleotide
cugcccugacugugcuccu

SEQ ID NO: 1324488 - RNA, 19 nt, Artificial Sequence
  Description of Artificial Sequence: Synthetic oligonucleotide
cggauuuugcuggccaugu

SEQ ID NO: 1324489 - RNA, 19 nt, Artificial Sequence
  Description of Artificial Sequence: Synthetic oligonucleotide
cugucccgggaccucucuu

SEQ ID NO: 1324490 - RNA, 19 nt, Artificial Sequence
  Description of Artificial Sequence: Synthetic oligonucleotide
ccggaagguaugauccauu

SEQ ID NO: 1324491 - RNA, 19 nt, Artificial Sequence
  Description of Artificial Sequence: Synthetic oligonucleotide
ccagacgaaugccgccucu

SEQ ID NO: 1324492 - RNA, 19 nt, Artificial Sequence
  Description of Artificial Sequence: Synthetic oligonucleotide
gguuacggucagagucccu

SEQ ID NO: 1324493 - RNA, 19 nt, Artificial Sequence
  Description of Artificial Sequence: Synthetic oligonucleotide
cccggauuuugcuggccau

SEQ ID NO: 1324494 - RNA, 19 nt, Artificial Sequence
  Description of Artificial Sequence: Synthetic oligonucleotide
cccugguuacggucagagu

SEQ ID NO: 1324495 - RNA, 19 nt, Artificial Sequence
  Description of Artificial Sequence: Synthetic oligonucleotide
cccgggaccucucuuccuu

SEQ ID NO: 1324496 - RNA, 19 nt, Artificial Sequence
  Description of Artificial Sequence: Synthetic oligonucleotide
ccuuggaggcaugcgguuu

SEQ ID NO: 1324497 - RNA, 19 nt, Artificial Sequence
  Description of Artificial Sequence: Synthetic oligonucleotide
cccugacugugcuccuccu

SEQ ID NO: 1324498 - RNA, 19 nt, Artificial Sequence
  Description of Artificial Sequence: Synthetic oligonucleotide
cucccuccacuuggcguuu

SEQ ID NO: 1324499 - RNA, 19 nt, Artificial Sequence
  Description of Artificial Sequence: Synthetic oligonucleotide
ccaucacgguguagacguu

SEQ ID NO: 1324500 - RNA, 19 nt, Artificial Sequence
  Description of Artificial Sequence: Synthetic oligonucleotide
aaaggauccacuaugauac

SEQ ID NO: 1324501 - RNA, 19 nt, Artificial Sequence
  Description of Artificial Sequence: Synthetic oligonucleotide
aguuauuuaauacaaauca

SEQ ID NO: 1324502 - RNA, 19 nt, Artificial Sequence
  Description of Artificial Sequence: Synthetic oligonucleotide
aaugcgaaguauauguucc

SEQ ID NO: 1324503 - RNA, 19 nt, Artificial Sequence
  Description of Artificial Sequence: Synthetic oligonucleotide
aaauacuaguaacagauau

SEQ ID NO: 1324504 - RNA, 19 nt, Artificial Sequence
  Description of Artificial Sequence: Synthetic oligonucleotide
uuaaaggacugucaugugg

SEQ ID NO: 1324505 - RNA, 19 nt, Artificial Sequence
  Description of Artificial Sequence: Synthetic oligonucleotide
ucaaugacagaauaaaggu

SEQ ID NO: 1324506 - RNA, 19 nt, Artificial Sequence
  Description of Artificial Sequence: Synthetic oligonucleotide
augauacugcaccagaccc

SEQ ID NO: 1324507 - RNA, 19 nt, Artificial Sequence
  Description of Artificial Sequence: Synthetic oligonucleotide
agaauuuaaguucuggucu

SEQ ID NO: 1324508 - RNA, 19 nt, Artificial Sequence
  Description of Artificial Sequence: Synthetic oligonucleotide
gaacucaacagacacaacc

SEQ ID NO: 1324509 - RNA, 19 nt, Artificial Sequence
  Description of Artificial Sequence: Synthetic oligonucleotide
uaaaggucaucucugagca

SEQ ID NO: 1324510 - RNA, 19 nt, Artificial Sequence
  Description of Artificial Sequence: Synthetic oligonucleotide
cuuugaauguuaucgaggc

SEQ ID NO: 1324511 - RNA, 19 nt, Artificial Sequence
  Description of Artificial Sequence: Synthetic oligonucleotide
ugacaauucagugaccucg

SEQ ID NO: 1324512 - RNA, 19 nt, Artificial Sequence
  Description of Artificial Sequence: Synthetic oligonucleotide
auaugguggaaucaggaag

SEQ ID NO: 1324513 - RNA, 19 nt, Artificial Sequence
  Description of Artificial Sequence: Synthetic oligonucleotide
aauaaaggucaucucugag

SEQ ID NO: 1324514 - RNA, 19 nt, Artificial Sequence
  Description of Artificial Sequence: Synthetic oligonucleotide
aaagcacucaggcaggaug

SEQ ID NO: 1324515 - RNA, 19 nt, Artificial Sequence
  Description of Artificial Sequence: Synthetic oligonucleotide
acaagcaagggcuuccacc

SEQ ID NO: 1324516 - RNA, 19 nt, Artificial Sequence
  Description of Artificial Sequence: Synthetic oligonucleotide
caugcagggagucauaucc

SEQ ID NO: 1324517 - RNA, 19 nt, Artificial Sequence
  Description of Artificial Sequence: Synthetic oligonucleotide
ucuauuaaaggacugucau

SEQ ID NO: 1324518 - RNA, 19 nt, Artificial Sequence
  Description of Artificial Sequence: Synthetic oligonucleotide
ucgauauagauucaucaga

SEQ ID NO: 1324519 - RNA, 19 nt, Artificial Sequence
  Description of Artificial Sequence: Synthetic oligonucleotide
gaaacaaugggcugugcag

SEQ ID NO: 1324520 - RNA, 19 nt, Artificial Sequence
  Description of Artificial Sequence: Synthetic oligonucleotide
auacuaguaacagauauug

SEQ ID NO: 1324521 - RNA, 19 nt, Artificial Sequence
  Description of Artificial Sequence: Synthetic oligonucleotide
uaugauacugcaccagacc

SEQ ID NO: 1324522 - RNA, 19 nt, Artificial Sequence
  Description of Artificial Sequence: Synthetic oligonucleotide
gugaccucgauauagauuc

SEQ ID NO: 1324523 - RNA, 19 nt, Artificial Sequence
  Description of Artificial Sequence: Synthetic oligonucleotide
uauguuccuucuaagguug

SEQ ID NO: 1324524 - RNA, 19 nt, Artificial Sequence
  Description of Artificial Sequence: Synthetic oligonucleotide
acaauguuuauauccagca

SEQ ID NO: 1324525 - RNA, 19 nt, Artificial Sequence
  Description of Artificial Sequence: Synthetic oligonucleotide
aaguauauguuccuucuaa

SEQ ID NO: 1324526 - RNA, 19 nt, Artificial Sequence
  Description of Artificial Sequence: Synthetic oligonucleotide
gagaauuuaaguucugguc

SEQ ID NO: 1324527 - RNA, 19 nt, Artificial Sequence
  Description of Artificial Sequence: Synthetic oligonucleotide
uaugguggaaucaggaagu

SEQ ID NO: 1324528 - RNA, 19 nt, Artificial Sequence
  Description of Artificial Sequence: Synthetic oligonucleotide
aaaguagucuccgggaguc

SEQ ID NO: 1324529 - RNA, 19 nt, Artificial Sequence
  Description of Artificial Sequence: Synthetic oligonucleotide
ugaugauauaaucuucaga

SEQ ID NO: 1324530 - RNA, 19 nt, Artificial Sequence
  Description of Artificial Sequence: Synthetic oligonucleotide
aaaucaguccucaguagcg

SEQ ID NO: 1324531 - RNA, 19 nt, Artificial Sequence
  Description of Artificial Sequence: Synthetic oligonucleotide
uccuucuaagguuggagcg

SEQ ID NO: 1324532 - RNA, 19 nt, Artificial Sequence
  Description of Artificial Sequence: Synthetic oligonucleotide
aacagauauuguuuugaca

SEQ ID NO: 1324533 - RNA, 19 nt, Artificial Sequence
  Description of Artificial Sequence: Synthetic oligonucleotide
ugagaauuuaaguucuggu

SEQ ID NO: 1324534 - RNA, 19 nt, Artificial Sequence
  Description of Artificial Sequence: Synthetic oligonucleotide
ugauaugguggaaucagga

SEQ ID NO: 1324535 - RNA, 19 nt, Artificial Sequence
  Description of Artificial Sequence: Synthetic oligonucleotide
uacaaaucaguccucagua

SEQ ID NO: 1324536 - RNA, 19 nt, Artificial Sequence
  Description of Artificial Sequence: Synthetic oligonucleotide
acuucuacagacugcagug

SEQ ID NO: 1324537 - RNA, 19 nt, Artificial Sequence
  Description of Artificial Sequence: Synthetic oligonucleotide
aagacugacucugaacuuc

SEQ ID NO: 1324538 - RNA, 19 nt, Artificial Sequence
  Description of Artificial Sequence: Synthetic oligonucleotide
uucagugaccucgauauag

SEQ ID NO: 1324539 - RNA, 19 nt, Artificial Sequence
  Description of Artificial Sequence: Synthetic oligonucleotide
acuggcgacacucuguguc

SEQ ID NO: 1324540 - RNA, 19 nt, Artificial Sequence
  Description of Artificial Sequence: Synthetic oligonucleotide
aguauauguuccuucuaag

SEQ ID NO: 1324541 - RNA, 19 nt, Artificial Sequence
  Description of Artificial Sequence: Synthetic oligonucleotide
ugauacugcaccagacccg

SEQ ID NO: 1324542 - RNA, 19 nt, Artificial Sequence
  Description of Artificial Sequence: Synthetic oligonucleotide
ugggaaagacgccaaugcg

SEQ ID NO: 1324543 - RNA, 19 nt, Artificial Sequence
  Description of Artificial Sequence: Synthetic oligonucleotide
ugacugguggcccagaaaa

SEQ ID NO: 1324544 - RNA, 19 nt, Artificial Sequence
  Description of Artificial Sequence: Synthetic oligonucleotide
agaaucccauuucaaagag

SEQ ID NO: 1324545 - RNA, 19 nt, Artificial Sequence
  Description of Artificial Sequence: Synthetic oligonucleotide
acauggccagccuucaagc

SEQ ID NO: 1324546 - RNA, 19 nt, Artificial Sequence
  Description of Artificial Sequence: Synthetic oligonucleotide
aaaucccgccccuucacuc

SEQ ID NO: 1324547 - RNA, 19 nt, Artificial Sequence
  Description of Artificial Sequence: Synthetic oligonucleotide
cucgauauagauucaucag

SEQ ID NO: 1324548 - RNA, 19 nt, Artificial Sequence
  Description of Artificial Sequence: Synthetic oligonucleotide
ugcuuugucacuucacuca

SEQ ID NO: 1324549 - RNA, 19 nt, Artificial Sequence
  Description of Artificial Sequence: Synthetic oligonucleotide
auuguuuugacaauucagu

SEQ ID NO: 1324550 - RNA, 19 nt, Artificial Sequence
  Description of Artificial Sequence: Synthetic oligonucleotide
agauggaauguacaguucu

SEQ ID NO: 1324551 - RNA, 19 nt, Artificial Sequence
  Description of Artificial Sequence: Synthetic oligonucleotide
caaaucaguccucaguagc

SEQ ID NO: 1324552 - RNA, 19 nt, Artificial Sequence
  Description of Artificial Sequence: Synthetic oligonucleotide
uuuauauccagcagcucaa

SEQ ID NO: 1324553 - RNA, 19 nt, Artificial Sequence
  Description of Artificial Sequence: Synthetic oligonucleotide
cuggcuucucuauuaaagg

SEQ ID NO: 1324554 - RNA, 19 nt, Artificial Sequence
  Description of Artificial Sequence: Synthetic oligonucleotide
gaugaugauauaaucuuca

SEQ ID NO: 1324555 - RNA, 19 nt, Artificial Sequence
  Description of Artificial Sequence: Synthetic oligonucleotide
gaaaauaggcuggugaauc

SEQ ID NO: 1324556 - RNA, 19 nt, Artificial Sequence
  Description of Artificial Sequence: Synthetic oligonucleotide
ggagcgaugaacucaacag

SEQ ID NO: 1324557 - RNA, 19 nt, Artificial Sequence
  Description of Artificial Sequence: Synthetic oligonucleotide
uacuacucaucccauuuca

SEQ ID NO: 1324558 - RNA, 19 nt, Artificial Sequence
  Description of Artificial Sequence: Synthetic oligonucleotide
agcugaaaacuguuucuac

SEQ ID NO: 1324559 - RNA, 19 nt, Artificial Sequence
  Description of Artificial Sequence: Synthetic oligonucleotide
ugucugaucuucagaaaca

SEQ ID NO: 1324560 - RNA, 19 nt, Artificial Sequence
  Description of Artificial Sequence: Synthetic oligonucleotide
ucuacuacucaucccauuu

SEQ ID NO: 1324561 - RNA, 19 nt, Artificial Sequence
  Description of Artificial Sequence: Synthetic oligonucleotide
aauguuaucgaggcucuca

SEQ ID NO: 1324562 - RNA, 19 nt, Artificial Sequence
  Description of Artificial Sequence: Synthetic oligonucleotide
agcgaugaacucaacagac

SEQ ID NO: 1324563 - RNA, 19 nt, Artificial Sequence
  Description of Artificial Sequence: Synthetic oligonucleotide
uccuguaucugccccaagc

SEQ ID NO: 1324564 - RNA, 19 nt, Artificial Sequence
  Description of Artificial Sequence: Synthetic oligonucleotide
aaucaguccucaguagcgg

SEQ ID NO: 1324565 - RNA, 19 nt, Artificial Sequence
  Description of Artificial Sequence: Synthetic oligonucleotide
uucgcuuucagccccucgc

SEQ ID NO: 1324566 - RNA, 19 nt, Artificial Sequence
  Description of Artificial Sequence: Synthetic oligonucleotide
augaugauauaaucuucag

SEQ ID NO: 1324567 - RNA, 19 nt, Artificial Sequence
  Description of Artificial Sequence: Synthetic oligonucleotide
gaaaggauccacuaugaua

SEQ ID NO: 1324568 - RNA, 19 nt, Artificial Sequence
  Description of Artificial Sequence: Synthetic oligonucleotide
uacucaucccauuucaaaa

SEQ ID NO: 1324569 - RNA, 19 nt, Artificial Sequence
  Description of Artificial Sequence: Synthetic oligonucleotide
ucuacagacugcaguggag

SEQ ID NO: 1324570 - RNA, 19 nt, Artificial Sequence
  Description of Artificial Sequence: Synthetic oligonucleotide
ucuaagguuggagcgauga

SEQ ID NO: 1324571 - RNA, 19 nt, Artificial Sequence
  Description of Artificial Sequence: Synthetic oligonucleotide
ggugaauccacuccugggg

SEQ ID NO: 1324572 - RNA, 19 nt, Artificial Sequence
  Description of Artificial Sequence: Synthetic oligonucleotide
cucugaacuucucacacac

SEQ ID NO: 1324573 - RNA, 19 nt, Artificial Sequence
  Description of Artificial Sequence: Synthetic oligonucleotide
ugaauguuaucgaggcucu

SEQ ID NO: 1324574 - RNA, 19 nt, Artificial Sequence
  Description of Artificial Sequence: Synthetic oligonucleotide
cuauuaaaggacugucaug

SEQ ID NO: 1324575 - RNA, 19 nt, Artificial Sequence
  Description of Artificial Sequence: Synthetic oligonucleotide
uggaggauauuguaauugu

SEQ ID NO: 1324576 - RNA, 19 nt, Artificial Sequence
  Description of Artificial Sequence: Synthetic oligonucleotide
aagguuggagcgaugaacu

SEQ ID NO: 1324577 - RNA, 19 nt, Artificial Sequence
  Description of Artificial Sequence: Synthetic oligonucleotide
uggugaauccacuccuggg

SEQ ID NO: 1324578 - RNA, 19 nt, Artificial Sequence
  Description of Artificial Sequence: Synthetic oligonucleotide
uucuacagacugcagugga

SEQ ID NO: 1324579 - RNA, 19 nt, Artificial Sequence
  Description of Artificial Sequence: Synthetic oligonucleotide
aagaggggaaaggauccac

SEQ ID NO: 1324580 - RNA, 19 nt, Artificial Sequence
  Description of Artificial Sequence: Synthetic oligonucleotide
uuaucgaggcucucagaag

SEQ ID NO: 1324581 - RNA, 19 nt, Artificial Sequence
  Description of Artificial Sequence: Synthetic oligonucleotide
uacagacugcaguggaggg

SEQ ID NO: 1324582 - RNA, 19 nt, Artificial Sequence
  Description of Artificial Sequence: Synthetic oligonucleotide
uggagcgaugaacucaaca

SEQ ID NO: 1324583 - RNA, 19 nt, Artificial Sequence
  Description of Artificial Sequence: Synthetic oligonucleotide
auguuaucgaggcucucag

SEQ ID NO: 1324584 - RNA, 19 nt, Artificial Sequence
  Description of Artificial Sequence: Synthetic oligonucleotide
uuaauacaaaucaguccuc

SEQ ID NO: 1324585 - RNA, 19 nt, Artificial Sequence
  Description of Artificial Sequence: Synthetic oligonucleotide
gaauaaaggucaucucuga

SEQ ID NO: 1324586 - RNA, 19 nt, Artificial Sequence
  Description of Artificial Sequence: Synthetic oligonucleotide
caauguuuauauccagcag

SEQ ID NO: 1324587 - RNA, 19 nt, Artificial Sequence
  Description of Artificial Sequence: Synthetic oligonucleotide
uguuucuacuacucauccc

SEQ ID NO: 1324588 - RNA, 19 nt, Artificial Sequence
  Description of Artificial Sequence: Synthetic oligonucleotide
guuaucgaggcucucagaa

SEQ ID NO: 1324589 - RNA, 19 nt, Artificial Sequence
  Description of Artificial Sequence: Synthetic oligonucleotide
agacccgaggcccaaacug

SEQ ID NO: 1324590 - RNA, 19 nt, Artificial Sequence
  Description of Artificial Sequence: Synthetic oligonucleotide
ugugagagugcagagcugu

SEQ ID NO: 1324591 - RNA, 19 nt, Artificial Sequence
  Description of Artificial Sequence: Synthetic oligonucleotide
ucagugaccucgauauaga

SEQ ID NO: 1324592 - RNA, 19 nt, Artificial Sequence
  Description of Artificial Sequence: Synthetic oligonucleotide
aauacuaguaacagauauu

SEQ ID NO: 1324593 - RNA, 19 nt, Artificial Sequence
  Description of Artificial Sequence: Synthetic oligonucleotide
uuugaauguuaucgaggcu

SEQ ID NO: 1324594 - RNA, 19 nt, Artificial Sequence
  Description of Artificial Sequence: Synthetic oligonucleotide
guccacaucagcugaaaac

SEQ ID NO: 1324595 - RNA, 19 nt, Artificial Sequence
  Description of Artificial Sequence: Synthetic oligonucleotide
uaguaacagauauuguuuu

SEQ ID NO: 1324596 - RNA, 19 nt, Artificial Sequence
  Description of Artificial Sequence: Synthetic oligonucleotide
ucacuggcgacacucugug

SEQ ID NO: 1324597 - RNA, 19 nt, Artificial Sequence
  Description of Artificial Sequence: Synthetic oligonucleotide
uuaaaucccgccccuucac

SEQ ID NO: 1324598 - RNA, 19 nt, Artificial Sequence
  Description of Artificial Sequence: Synthetic oligonucleotide
cuagaagaaaagcuuccuc

SEQ ID NO: 1324599 - RNA, 19 nt, Artificial Sequence
  Description of Artificial Sequence: Synthetic oligonucleotide
acuaggggagcuccuggac

SEQ ID NO: 1324600 - RNA, 19 nt, Artificial Sequence
  Description of Artificial Sequence: Synthetic oligonucleotide
uccuucauuucuguagaag

SEQ ID NO: 1324601 - RNA, 19 nt, Artificial Sequence
  Description of Artificial Sequence: Synthetic oligonucleotide
uuguugauaugguggaauc

SEQ ID NO: 1324602 - RNA, 19 nt, Artificial Sequence
  Description of Artificial Sequence: Synthetic oligonucleotide
ucucuauuaaaggacuguc

SEQ ID NO: 1324603 - RNA, 19 nt, Artificial Sequence
  Description of Artificial Sequence: Synthetic oligonucleotide
gggaauucuguccacauca

SEQ ID NO: 1324604 - RNA, 19 nt, Artificial Sequence
  Description of Artificial Sequence: Synthetic oligonucleotide
gaugugaaggagcucuguc

SEQ ID NO: 1324605 - RNA, 19 nt, Artificial Sequence
  Description of Artificial Sequence: Synthetic oligonucleotide
uucucuauuaaaggacugu

SEQ ID NO: 1324606 - RNA, 19 nt, Artificial Sequence
  Description of Artificial Sequence: Synthetic oligonucleotide
gagguugugaggaugucac

SEQ ID NO: 1324607 - RNA, 19 nt, Artificial Sequence
  Description of Artificial Sequence: Synthetic oligonucleotide
cuggaggauauuguaauug

SEQ ID NO: 1324608 - RNA, 19 nt, Artificial Sequence
  Description of Artificial Sequence: Synthetic oligonucleotide
ccuuugaauguuaucgagg

SEQ ID NO: 1324609 - RNA, 19 nt, Artificial Sequence
  Description of Artificial Sequence: Synthetic oligonucleotide
auuaaaggacugucaugug

SEQ ID NO: 1324610 - RNA, 19 nt, Artificial Sequence
  Description of Artificial Sequence: Synthetic oligonucleotide
acaggugaagucaucagcu

SEQ ID NO: 1324611 - RNA, 19 nt, Artificial Sequence
  Description of Artificial Sequence: Synthetic oligonucleotide
guugcccacuucuacagac

SEQ ID NO: 1324612 - RNA, 19 nt, Artificial Sequence
  Description of Artificial Sequence: Synthetic oligonucleotide
uucacucaauggaaccucu

SEQ ID NO: 1324613 - RNA, 19 nt, Artificial Sequence
  Description of Artificial Sequence: Synthetic oligonucleotide
ucaguccucaguagcggug

SEQ ID NO: 1324614 - RNA, 19 nt, Artificial Sequence
  Description of Artificial Sequence: Synthetic oligonucleotide
aguuggcuccugcccagcc

SEQ ID NO: 1324615 - RNA, 19 nt, Artificial Sequence
  Description of Artificial Sequence: Synthetic oligonucleotide
cucuauuaaaggacuguca

SEQ ID NO: 1324616 - RNA, 19 nt, Artificial Sequence
  Description of Artificial Sequence: Synthetic oligonucleotide
gagagugcagagcuguaca

SEQ ID NO: 1324617 - RNA, 19 nt, Artificial Sequence
  Description of Artificial Sequence: Synthetic oligonucleotide
aaucccgccccuucacucu

SEQ ID NO: 1324618 - RNA, 19 nt, Artificial Sequence
  Description of Artificial Sequence: Synthetic oligonucleotide
cagaauaaaggucaucucu

SEQ ID NO: 1324619 - RNA, 19 nt, Artificial Sequence
  Description of Artificial Sequence: Synthetic oligonucleotide
guaccagucguuguuguug

SEQ ID NO: 1324620 - RNA, 19 nt, Artificial Sequence
  Description of Artificial Sequence: Synthetic oligonucleotide
ucguuguuguugaugugaa

SEQ ID NO: 1324621 - RNA, 19 nt, Artificial Sequence
  Description of Artificial Sequence: Synthetic oligonucleotide
ugucgcagaaucccauuuc

SEQ ID NO: 1324622 - RNA, 19 nt, Artificial Sequence
  Description of Artificial Sequence: Synthetic oligonucleotide
gauccacuaugauacugca

SEQ ID NO: 1324623 - RNA, 19 nt, Artificial Sequence
  Description of Artificial Sequence: Synthetic oligonucleotide
acaaacugggucccacuca

SEQ ID NO: 1324624 - RNA, 19 nt, Artificial Sequence
  Description of Artificial Sequence: Synthetic oligonucleotide
gccuuugugggaaagacgc

SEQ ID NO: 1324625 - RNA, 19 nt, Artificial Sequence
  Description of Artificial Sequence: Synthetic oligonucleotide
agauauuguuuugacaauu

SEQ ID NO: 1324626 - RNA, 19 nt, Artificial Sequence
  Description of Artificial Sequence: Synthetic oligonucleotide
uaaaucccgccccuucacu

SEQ ID NO: 1324627 - RNA, 19 nt, Artificial Sequence
  Description of Artificial Sequence: Synthetic oligonucleotide
uaccagucguuguuguuga

SEQ ID NO: 1324628 - RNA, 19 nt, Artificial Sequence
  Description of Artificial Sequence: Synthetic oligonucleotide
ugcagggagucauauccac

SEQ ID NO: 1324629 - RNA, 19 nt, Artificial Sequence
  Description of Artificial Sequence: Synthetic oligonucleotide
aaaauacuaguaacagaua

SEQ ID NO: 1324630 - RNA, 19 nt, Artificial Sequence
  Description of Artificial Sequence: Synthetic oligonucleotide
cuccgggaguccaaguugc

SEQ ID NO: 1324631 - RNA, 19 nt, Artificial Sequence
  Description of Artificial Sequence: Synthetic oligonucleotide
agccuucaagcagggaacc

SEQ ID NO: 1324632 - RNA, 19 nt, Artificial Sequence
  Description of Artificial Sequence: Synthetic oligonucleotide
aguccaaguugcccacuuc

SEQ ID NO: 1324633 - RNA, 19 nt, Artificial Sequence
  Description of Artificial Sequence: Synthetic oligonucleotide
cacucaauggaaccucuuc

SEQ ID NO: 1324634 - RNA, 19 nt, Artificial Sequence
  Description of Artificial Sequence: Synthetic oligonucleotide
gaaagacgccaaugcgaag

SEQ ID NO: 1324635 - RNA, 19 nt, Artificial Sequence
  Description of Artificial Sequence: Synthetic oligonucleotide
uguuaucgaggcucucaga

SEQ ID NO: 1324636 - RNA, 19 nt, Artificial Sequence
  Description of Artificial Sequence: Synthetic oligonucleotide
caaguugcccacuucuaca

SEQ ID NO: 1324637 - RNA, 19 nt, Artificial Sequence
  Description of Artificial Sequence: Synthetic oligonucleotide
cacaaccuggaggauauug

SEQ ID NO: 1324638 - RNA, 19 nt, Artificial Sequence
  Description of Artificial Sequence: Synthetic oligonucleotide
ggacaauguuuauauccag

SEQ ID NO: 1324639 - RNA, 19 nt, Artificial Sequence
  Description of Artificial Sequence: Synthetic oligonucleotide
cugcuuugucacuucacuc

SEQ ID NO: 1324640 - RNA, 19 nt, Artificial Sequence
  Description of Artificial Sequence: Synthetic oligonucleotide
gcaggcaguuauuuaauac

SEQ ID NO: 1324641 - RNA, 19 nt, Artificial Sequence
  Description of Artificial Sequence: Synthetic oligonucleotide
gucgcagaaucccauuuca

SEQ ID NO: 1324642 - RNA, 19 nt, Artificial Sequence
  Description of Artificial Sequence: Synthetic oligonucleotide
cuuugugggaaagacgcca

SEQ ID NO: 1324643 - RNA, 19 nt, Artificial Sequence
  Description of Artificial Sequence: Synthetic oligonucleotide
gccaaugcgaaguauaugu

SEQ ID NO: 1324644 - RNA, 19 nt, Artificial Sequence
  Description of Artificial Sequence: Synthetic oligonucleotide
aguccucaguagcgguggc

SEQ ID NO: 1324645 - RNA, 19 nt, Artificial Sequence
  Description of Artificial Sequence: Synthetic oligonucleotide
acaaccuggaggauauugu

SEQ ID NO: 1324646 - RNA, 19 nt, Artificial Sequence
  Description of Artificial Sequence: Synthetic oligonucleotide
ugaacucaacagacacaac

SEQ ID NO: 1324647 - RNA, 19 nt, Artificial Sequence
  Description of Artificial Sequence: Synthetic oligonucleotide
ggauccacuaugauacugc

SEQ ID NO: 1324648 - RNA, 19 nt, Artificial Sequence
  Description of Artificial Sequence: Synthetic oligonucleotide
accucgauauagauucauc

SEQ ID NO: 1324649 - RNA, 19 nt, Artificial Sequence
  Description of Artificial Sequence: Synthetic oligonucleotide
cagguucgcuuucagcccc

SEQ ID NO: 1324650 - RNA, 19 nt, Artificial Sequence
  Description of Artificial Sequence: Synthetic oligonucleotide
gacuaggggcacugugucc

SEQ ID NO: 1324651 - RNA, 19 nt, Artificial Sequence
  Description of Artificial Sequence: Synthetic oligonucleotide
aucaguccucaguagcggu

SEQ ID NO: 1324652 - RNA, 19 nt, Artificial Sequence
  Description of Artificial Sequence: Synthetic oligonucleotide
gaaguauauguuccuucua

SEQ ID NO: 1324653 - RNA, 19 nt, Artificial Sequence
  Description of Artificial Sequence: Synthetic oligonucleotide
cacuaugauacugcaccag

SEQ ID NO: 1324654 - RNA, 19 nt, Artificial Sequence
  Description of Artificial Sequence: Synthetic oligonucleotide
aggcaguuauuuaauacaa

SEQ ID NO: 1324655 - RNA, 19 nt, Artificial Sequence
  Description of Artificial Sequence: Synthetic oligonucleotide
ugucacaaccuggaggaua

SEQ ID NO: 1324656 - RNA, 19 nt, Artificial Sequence
  Description of Artificial Sequence: Synthetic oligonucleotide
cuucacucaauggaaccuc

SEQ ID NO: 1324657 - RNA, 19 nt, Artificial Sequence
  Description of Artificial Sequence: Synthetic oligonucleotide
gugaauccacuccugggga

SEQ ID NO: 1324658 - RNA, 19 nt, Artificial Sequence
  Description of Artificial Sequence: Synthetic oligonucleotide
acccgugcugugcacuagg

SEQ ID NO: 1324659 - RNA, 19 nt, Artificial Sequence
  Description of Artificial Sequence: Synthetic oligonucleotide
ucgcagaaucccauuucaa

SEQ ID NO: 1324660 - RNA, 19 nt, Artificial Sequence
  Description of Artificial Sequence: Synthetic oligonucleotide
agccuuagauucagcugcc

SEQ ID NO: 1324661 - RNA, 19 nt, Artificial Sequence
  Description of Artificial Sequence: Synthetic oligonucleotide
auccacuaugauacugcac

SEQ ID NO: 1324662 - RNA, 19 nt, Artificial Sequence
  Description of Artificial Sequence: Synthetic oligonucleotide
ccucgauauagauucauca

SEQ ID NO: 1324663 - RNA, 19 nt, Artificial Sequence
  Description of Artificial Sequence: Synthetic oligonucleotide
ucgcuuucagccccucgcu

SEQ ID NO: 1324664 - RNA, 19 nt, Artificial Sequence
  Description of Artificial Sequence: Synthetic oligonucleotide
ugaugugaaggagcucugu

SEQ ID NO: 1324665 - RNA, 19 nt, Artificial Sequence
  Description of Artificial Sequence: Synthetic oligonucleotide
uguuccuucuaagguugga

SEQ ID NO: 1324666 - RNA, 19 nt, Artificial Sequence
  Description of Artificial Sequence: Synthetic oligonucleotide
ugcacuaggggagcuccug

SEQ ID NO: 1324667 - RNA, 19 nt, Artificial Sequence
  Description of Artificial Sequence: Synthetic oligonucleotide
ugaccucgauauagauuca

SEQ ID NO: 1324668 - RNA, 19 nt, Artificial Sequence
  Description of Artificial Sequence: Synthetic oligonucleotide
cagucguuguuguugaugu

SEQ ID NO: 1324669 - RNA, 19 nt, Artificial Sequence
  Description of Artificial Sequence: Synthetic oligonucleotide
ugccugucgcagaauccca

SEQ ID NO: 1324670 - RNA, 19 nt, Artificial Sequence
  Description of Artificial Sequence: Synthetic oligonucleotide
aagcaagggcuuccaccca

SEQ ID NO: 1324671 - RNA, 19 nt, Artificial Sequence
  Description of Artificial Sequence: Synthetic oligonucleotide
guucgcuuucagccccucg

SEQ ID NO: 1324672 - RNA, 19 nt, Artificial Sequence
  Description of Artificial Sequence: Synthetic oligonucleotide
uucuaagguuggagcgaug

SEQ ID NO: 1324673 - RNA, 19 nt, Artificial Sequence
  Description of Artificial Sequence: Synthetic oligonucleotide
ugacagaauaaaggucauc

SEQ ID NO: 1324674 - RNA, 19 nt, Artificial Sequence
  Description of Artificial Sequence: Synthetic oligonucleotide
cucaguuggcuccugccca

SEQ ID NO: 1324675 - RNA, 19 nt, Artificial Sequence
  Description of Artificial Sequence: Synthetic oligonucleotide
agccccucgcuccaggccu

SEQ ID NO: 1324676 - RNA, 19 nt, Artificial Sequence
  Description of Artificial Sequence: Synthetic oligonucleotide
agcaggcaguuauuuaaua

SEQ ID NO: 1324677 - RNA, 19 nt, Artificial Sequence
  Description of Artificial Sequence: Synthetic oligonucleotide
aggcccaaacugcuggccu

SEQ ID NO: 1324678 - RNA, 19 nt, Artificial Sequence
  Description of Artificial Sequence: Synthetic oligonucleotide
guuggagcgaugaacucaa

SEQ ID NO: 1324679 - RNA, 19 nt, Artificial Sequence
  Description of Artificial Sequence: Synthetic oligonucleotide
ggcccagaaaauaggcugg

SEQ ID NO: 1324680 - RNA, 19 nt, Artificial Sequence
  Description of Artificial Sequence: Synthetic oligonucleotide
guccuaccaccucagggac

SEQ ID NO: 1324681 - RNA, 19 nt, Artificial Sequence
  Description of Artificial Sequence: Synthetic oligonucleotide
uguaccagucguuguuguu

SEQ ID NO: 1324682 - RNA, 19 nt, Artificial Sequence
  Description of Artificial Sequence: Synthetic oligonucleotide
aggcaggaugaugauauaa

SEQ ID NO: 1324683 - RNA, 19 nt, Artificial Sequence
  Description of Artificial Sequence: Synthetic oligonucleotide
cuaggggagcuccuggaca

SEQ ID NO: 1324684 - RNA, 19 nt, Artificial Sequence
  Description of Artificial Sequence: Synthetic oligonucleotide
gggaaagacgccaaugcga

SEQ ID NO: 1324685 - RNA, 19 nt, Artificial Sequence
  Description of Artificial Sequence: Synthetic oligonucleotide
gacgccaaugcgaaguaua

SEQ ID NO: 1324686 - RNA, 19 nt, Artificial Sequence
  Description of Artificial Sequence: Synthetic oligonucleotide
ugcgaaguauauguuccuu

SEQ ID NO: 1324687 - RNA, 19 nt, Artificial Sequence
  Description of Artificial Sequence: Synthetic oligonucleotide
ucacucaauggaaccucuu

SEQ ID NO: 1324688 - RNA, 19 nt, Artificial Sequence
  Description of Artificial Sequence: Synthetic oligonucleotide
agaggggaaaggauccacu

SEQ ID NO: 1324689 - RNA, 19 nt, Artificial Sequence
  Description of Artificial Sequence: Synthetic oligonucleotide
agugaccucgauauagauu

SEQ ID NO: 1324690 - RNA, 19 nt, Artificial Sequence
  Description of Artificial Sequence: Synthetic oligonucleotide
ggaaagacgccaaugcgaa

SEQ ID NO: 1324691 - RNA, 19 nt, Artificial Sequence
  Description of Artificial Sequence: Synthetic oligonucleotide
cugugagguugugaggaug

SEQ ID NO: 1324692 - RNA, 19 nt, Artificial Sequence
  Description of Artificial Sequence: Synthetic oligonucleotide
ccuuagauucagcugccug

SEQ ID NO: 1324693 - RNA, 19 nt, Artificial Sequence
  Description of Artificial Sequence: Synthetic oligonucleotide
ccucuuuguugauauggug

SEQ ID NO: 1324694 - RNA, 19 nt, Artificial Sequence
  Description of Artificial Sequence: Synthetic oligonucleotide
uuccuguaucugccccaag

SEQ ID NO: 1324695 - RNA, 19 nt, Artificial Sequence
  Description of Artificial Sequence: Synthetic oligonucleotide
gaggcccaaacugcuggcc

SEQ ID NO: 1324696 - RNA, 19 nt, Artificial Sequence
  Description of Artificial Sequence: Synthetic oligonucleotide
aucccgccccuucacucuc

SEQ ID NO: 1324697 - RNA, 19 nt, Artificial Sequence
  Description of Artificial Sequence: Synthetic oligonucleotide
caccucaaugacagaauaa

SEQ ID NO: 1324698 - RNA, 19 nt, Artificial Sequence
  Description of Artificial Sequence: Synthetic oligonucleotide
gguuggagcgaugaacuca

SEQ ID NO: 1324699 - RNA, 19 nt, Artificial Sequence
  Description of Artificial Sequence: Synthetic oligonucleotide
uguggggcacucucuccaa

SEQ ID NO: 1324700 - RNA, 19 nt, Artificial Sequence
  Description of Artificial Sequence: Synthetic oligonucleotide
cugugagagugcagagcug

SEQ ID NO: 1324701 - RNA, 19 nt, Artificial Sequence
  Description of Artificial Sequence: Synthetic oligonucleotide
ccagguucgcuuucagccc

SEQ ID NO: 1324702 - RNA, 19 nt, Artificial Sequence
  Description of Artificial Sequence: Synthetic oligonucleotide
gucauguggcagaggagac

SEQ ID NO: 1324703 - RNA, 19 nt, Artificial Sequence
  Description of Artificial Sequence: Synthetic oligonucleotide
cagccucgaucccagguuc

SEQ ID NO: 1324704 - RNA, 19 nt, Artificial Sequence
  Description of Artificial Sequence: Synthetic oligonucleotide
ucgaucccagguucgcuuu

SEQ ID NO: 1324705 - RNA, 19 nt, Artificial Sequence
  Description of Artificial Sequence: Synthetic oligonucleotide
ggacuaggggcacuguguc

SEQ ID NO: 1324706 - RNA, 19 nt, Artificial Sequence
  Description of Artificial Sequence: Synthetic oligonucleotide
acuacucaucccauuucaa

SEQ ID NO: 1324707 - RNA, 19 nt, Artificial Sequence
  Description of Artificial Sequence: Synthetic oligonucleotide
ccgaggcccaaacugcugg

SEQ ID NO: 1324708 - RNA, 19 nt, Artificial Sequence
  Description of Artificial Sequence: Synthetic oligonucleotide
cugcaccagacccgaggcc

SEQ ID NO: 1324709 - RNA, 19 nt, Artificial Sequence
  Description of Artificial Sequence: Synthetic oligonucleotide
auucagugaccucgauaua

SEQ ID NO: 1324710 - RNA, 19 nt, Artificial Sequence
  Description of Artificial Sequence: Synthetic oligonucleotide
ggauauuguaauuguguuu

SEQ ID NO: 1324711 - RNA, 19 nt, Artificial Sequence
  Description of Artificial Sequence: Synthetic oligonucleotide
gaauguuaucgaggcucuc

SEQ ID NO: 1324712 - RNA, 19 nt, Artificial Sequence
  Description of Artificial Sequence: Synthetic oligonucleotide
cucaauggaaccucuucuu

SEQ ID NO: 1324713 - RNA, 19 nt, Artificial Sequence
  Description of Artificial Sequence: Synthetic oligonucleotide
acgccaaugcgaaguauau

SEQ ID NO: 1324714 - RNA, 19 nt, Artificial Sequence
  Description of Artificial Sequence: Synthetic oligonucleotide
ccuuugugggaaagacgcc

SEQ ID NO: 1324715 - RNA, 19 nt, Artificial Sequence
  Description of Artificial Sequence: Synthetic oligonucleotide
caguagcgguggcuguacc

SEQ ID NO: 1324716 - RNA, 19 nt, Artificial Sequence
  Description of Artificial Sequence: Synthetic oligonucleotide
agccucgaucccagguucg

SEQ ID NO: 1324717 - RNA, 19 nt, Artificial Sequence
  Description of Artificial Sequence: Synthetic oligonucleotide
cacagauggaauguacagu

SEQ ID NO: 1324718 - RNA, 19 nt, Artificial Sequence
  Description of Artificial Sequence: Synthetic oligonucleotide
cagauauuguuuugacaau

SEQ ID NO: 1324719 - RNA, 19 nt, Artificial Sequence
  Description of Artificial Sequence: Synthetic oligonucleotide
ccaaaacauccuucauuuc

SEQ ID NO: 1324720 - RNA, 19 nt, Artificial Sequence
  Description of Artificial Sequence: Synthetic oligonucleotide
gugacugguggcccagaaa

SEQ ID NO: 1324721 - RNA, 19 nt, Artificial Sequence
  Description of Artificial Sequence: Synthetic oligonucleotide
ccagucguuguuguugaug

SEQ ID NO: 1324722 - RNA, 19 nt, Artificial Sequence
  Description of Artificial Sequence: Synthetic oligonucleotide
gacccgugcugugcacuag

SEQ ID NO: 1324723 - RNA, 19 nt, Artificial Sequence
  Description of Artificial Sequence: Synthetic oligonucleotide
cugaagcaguggccucggc

SEQ ID NO: 1324724 - RNA, 19 nt, Artificial Sequence
  Description of Artificial Sequence: Synthetic oligonucleotide
ccgugcugugcacuagggg

SEQ ID NO: 1324725 - RNA, 19 nt, Artificial Sequence
  Description of Artificial Sequence: Synthetic oligonucleotide
ggcaguuauuuaauacaaa

SEQ ID NO: 1324726 - RNA, 19 nt, Artificial Sequence
  Description of Artificial Sequence: Synthetic oligonucleotide
cgauauagauucaucagau

SEQ ID NO: 1324727 - RNA, 19 nt, Artificial Sequence
  Description of Artificial Sequence: Synthetic oligonucleotide
gaccucgauauagauucau

SEQ ID NO: 1324728 - RNA, 19 nt, Artificial Sequence
  Description of Artificial Sequence: Synthetic oligonucleotide
caucagcugaaaacuguuu

SEQ ID NO: 1324729 - RNA, 19 nt, Artificial Sequence
  Description of Artificial Sequence: Synthetic oligonucleotide
ccacuaugauacugcacca

SEQ ID NO: 1324730 - RNA, 19 nt, Artificial Sequence
  Description of Artificial Sequence: Synthetic oligonucleotide
ggagacaugcagggaguca

SEQ ID NO: 1324731 - RNA, 19 nt, Artificial Sequence
  Description of Artificial Sequence: Synthetic oligonucleotide
guggcagaggagacaugca

SEQ ID NO: 1324732 - RNA, 19 nt, Artificial Sequence
  Description of Artificial Sequence: Synthetic oligonucleotide
ccccuuugaauguuaucga

SEQ ID NO: 1324733 - RNA, 19 nt, Artificial Sequence
  Description of Artificial Sequence: Synthetic oligonucleotide
cgaaguauauguuccuucu

SEQ ID NO: 1324734 - RNA, 19 nt, Artificial Sequence
  Description of Artificial Sequence: Synthetic oligonucleotide
cuucuaagguuggagcgau

SEQ ID NO: 1324735 - RNA, 19 nt, Artificial Sequence
  Description of Artificial Sequence: Synthetic oligonucleotide
gcacucaggcaggaugaug

SEQ ID NO: 1324736 - RNA, 19 nt, Artificial Sequence
  Description of Artificial Sequence: Synthetic oligonucleotide
ccuucuaagguuggagcga

SEQ ID NO: 1324737 - RNA, 19 nt, Artificial Sequence
  Description of Artificial Sequence: Synthetic oligonucleotide
cagugaccucgauauagau

SEQ ID NO: 1324738 - RNA, 19 nt, Artificial Sequence
  Description of Artificial Sequence: Synthetic oligonucleotide
cucaggcaggaugaugaua

SEQ ID NO: 1324739 - RNA, 19 nt, Artificial Sequence
  Description of Artificial Sequence: Synthetic oligonucleotide
cucgaucccagguucgcuu

SEQ ID NO: 1324740 - RNA, 19 nt, Artificial Sequence
  Description of Artificial Sequence: Synthetic oligonucleotide
ccgggaguccaaguugccc

SEQ ID NO: 1324741 - RNA, 19 nt, Artificial Sequence
  Description of Artificial Sequence: Synthetic oligonucleotide
uggcgacacucugugucuu

SEQ ID NO: 1324742 - RNA, 19 nt, Artificial Sequence
  Description of Artificial Sequence: Synthetic oligonucleotide
cugucgcagaaucccauuu

SEQ ID NO: 1324743 - RNA, 19 nt, Artificial Sequence
  Description of Artificial Sequence: Synthetic oligonucleotide
gggagucucucuucagccu

SEQ ID NO: 1324744 - RNA, 19 nt, Artificial Sequence
  Description of Artificial Sequence: Synthetic oligonucleotide
cacuguguccagagucugu

SEQ ID NO: 1324745 - RNA, 19 nt, Artificial Sequence
  Description of Artificial Sequence: Synthetic oligonucleotide
gacugcaguggagggaauu

SEQ ID NO: 1324746 - RNA, 19 nt, Artificial Sequence
  Description of Artificial Sequence: Synthetic oligonucleotide
aggccccuuugaauguuau

SEQ ID NO: 1324747 - RNA, 19 nt, Artificial Sequence
  Description of Artificial Sequence: Synthetic oligonucleotide
caggugaagucaucagcuu

SEQ ID NO: 1324748 - RNA, 19 nt, Artificial Sequence
  Description of Artificial Sequence: Synthetic oligonucleotide
gccucgaucccagguucgc

SEQ ID NO: 1324749 - RNA, 19 nt, Artificial Sequence
  Description of Artificial Sequence: Synthetic oligonucleotide
agguucgcuuucagccccu

SEQ ID NO: 1324750 - RNA, 19 nt, Artificial Sequence
  Description of Artificial Sequence: Synthetic oligonucleotide
caggccccuuugaauguua

SEQ ID NO: 1324751 - RNA, 19 nt, Artificial Sequence
  Description of Artificial Sequence: Synthetic oligonucleotide
cuaccaccucagggacuag

SEQ ID NO: 1324752 - RNA, 19 nt, Artificial Sequence
  Description of Artificial Sequence: Synthetic oligonucleotide
ucacaaccuggaggauauu

SEQ ID NO: 1324753 - RNA, 19 nt, Artificial Sequence
  Description of Artificial Sequence: Synthetic oligonucleotide
caggcaggaugaugauaua

SEQ ID NO: 1324754 - RNA, 19 nt, Artificial Sequence
  Description of Artificial Sequence: Synthetic oligonucleotide
gugagagugcagagcugua

SEQ ID NO: 1324755 - RNA, 19 nt, Artificial Sequence
  Description of Artificial Sequence: Synthetic oligonucleotide
gcucaccaggccccuuuga

SEQ ID NO: 1324756 - RNA, 19 nt, Artificial Sequence
  Description of Artificial Sequence: Synthetic oligonucleotide
ggacccgugcugugcacua

SEQ ID NO: 1324757 - RNA, 19 nt, Artificial Sequence
  Description of Artificial Sequence: Synthetic oligonucleotide
guacugguuccuguuccuu

SEQ ID NO: 1324758 - RNA, 19 nt, Artificial Sequence
  Description of Artificial Sequence: Synthetic oligonucleotide
cgccaaugcgaaguauaug

SEQ ID NO: 1324759 - RNA, 19 nt, Artificial Sequence
  Description of Artificial Sequence: Synthetic oligonucleotide
cgcuuucagccccucgcuc

SEQ ID NO: 1324760 - RNA, 19 nt, Artificial Sequence
  Description of Artificial Sequence: Synthetic oligonucleotide
cacuggcgacacucugugu

SEQ ID NO: 1324761 - RNA, 19 nt, Artificial Sequence
  Description of Artificial Sequence: Synthetic oligonucleotide
gguucgcuuucagccccuc

SEQ ID NO: 1324762 - RNA, 19 nt, Artificial Sequence
  Description of Artificial Sequence: Synthetic oligonucleotide
cgaucccagguucgcuuuc

SEQ ID NO: 1324763 - RNA, 19 nt, Artificial Sequence
  Description of Artificial Sequence: Synthetic oligonucleotide
cggcugguaucaaagcacu

SEQ ID NO: 1324764 - RNA, 19 nt, Artificial Sequence
  Description of Artificial Sequence: Synthetic oligonucleotide
cucggccuuccucuuuguu

SEQ ID NO: 1324765 - RNA, 19 nt, Artificial Sequence
  Description of Artificial Sequence: Synthetic oligonucleotide
ggaguccaaguugcccacu

SEQ ID NO: 1324766 - RNA, 19 nt, Artificial Sequence
  Description of Artificial Sequence: Synthetic oligonucleotide
ccagccucgaucccagguu

SEQ ID NO: 1324767 - RNA, 19 nt, Artificial Sequence
  Description of Artificial Sequence: Synthetic oligonucleotide
gggacccgugcugugcacu

SEQ ID NO: 1324768 - RNA, 19 nt, Artificial Sequence
  Description of Artificial Sequence: Synthetic oligonucleotide
gccuuagauucagcugccu

SEQ ID NO: 1324769 - RNA, 19 nt, Artificial Sequence
  Description of Artificial Sequence: Synthetic oligonucleotide
ccugucgcagaaucccauu

SEQ ID NO: 1324770 - RNA, 19 nt, Artificial Sequence
  Description of Artificial Sequence: Synthetic oligonucleotide
gccccucgcuccaggccug

SEQ ID NO: 1324771 - RNA, 19 nt, Artificial Sequence
  Description of Artificial Sequence: Synthetic oligonucleotide
gccugucgcagaaucccau

SEQ ID NO: 1324772 - RNA, 19 nt, Artificial Sequence
  Description of Artificial Sequence: Synthetic oligonucleotide
ggguguuguggggcacucu

SEQ ID NO: 1324773 - RNA, 19 nt, Artificial Sequence
  Description of Artificial Sequence: Synthetic oligonucleotide
ccucgaucccagguucgcu

SEQ ID NO: 1324774 - RNA, 19 nt, Artificial Sequence
  Description of Artificial Sequence: Synthetic oligonucleotide
auaaccauaacccugaugg

SEQ ID NO: 1324775 - RNA, 19 nt, Artificial Sequence
  Description of Artificial Sequence: Synthetic oligonucleotide
uuuuauagagcuuuggagg

SEQ ID NO: 1324776 - RNA, 19 nt, Artificial Sequence
  Description of Artificial Sequence: Synthetic oligonucleotide
aaaaggaccuuuuauagag

SEQ ID NO: 1324777 - RNA, 19 nt, Artificial Sequence
  Description of Artificial Sequence: Synthetic oligonucleotide
uccagaaauaacuuaaugg

SEQ ID NO: 1324778 - RNA, 19 nt, Artificial Sequence
  Description of Artificial Sequence: Synthetic oligonucleotide
uuuacugaacuuaauaaug

SEQ ID NO: 1324779 - RNA, 19 nt, Artificial Sequence
  Description of Artificial Sequence: Synthetic oligonucleotide
cauccuauaaccauaaccc

SEQ ID NO: 1324780 - RNA, 19 nt, Artificial Sequence
  Description of Artificial Sequence: Synthetic oligonucleotide
aauagcaugggcuugcuca

SEQ ID NO: 1324781 - RNA, 19 nt, Artificial Sequence
  Description of Artificial Sequence: Synthetic oligonucleotide
uuggaaaugauaauucugc

SEQ ID NO: 1324782 - RNA, 19 nt, Artificial Sequence
  Description of Artificial Sequence: Synthetic oligonucleotide
ugugacacuaaauuugcgg

SEQ ID NO: 1324783 - RNA, 19 nt, Artificial Sequence
  Description of Artificial Sequence: Synthetic oligonucleotide
gauaauucugccaacagug

SEQ ID NO: 1324784 - RNA, 19 nt, Artificial Sequence
  Description of Artificial Sequence: Synthetic oligonucleotide
aaggcgauagaguugcccg

SEQ ID NO: 1324785 - RNA, 19 nt, Artificial Sequence
  Description of Artificial Sequence: Synthetic oligonucleotide
cuuuuauagagcuuuggag

SEQ ID NO: 1324786 - RNA, 19 nt, Artificial Sequence
  Description of Artificial Sequence: Synthetic oligonucleotide
agagcuuuuauuuccuugg

SEQ ID NO: 1324787 - RNA, 19 nt, Artificial Sequence
  Description of Artificial Sequence: Synthetic oligonucleotide
ucuagcuaugcaucaaugg

SEQ ID NO: 1324788 - RNA, 19 nt, Artificial Sequence
  Description of Artificial Sequence: Synthetic oligonucleotide
agaagaguuuaauucuagc

SEQ ID NO: 1324789 - RNA, 19 nt, Artificial Sequence
  Description of Artificial Sequence: Synthetic oligonucleotide
agaaauuccucacuacuuc

SEQ ID NO: 1324790 - RNA, 19 nt, Artificial Sequence
  Description of Artificial Sequence: Synthetic oligonucleotide
aaauugucaaucuuaugaa

SEQ ID NO: 1324791 - RNA, 19 nt, Artificial Sequence
  Description of Artificial Sequence: Synthetic oligonucleotide
ugcacguuaaugaagaaua

SEQ ID NO: 1324792 - RNA, 19 nt, Artificial Sequence
  Description of Artificial Sequence: Synthetic oligonucleotide
uuuauagagcuuuggagga

SEQ ID NO: 1324793 - RNA, 19 nt, Artificial Sequence
  Description of Artificial Sequence: Synthetic oligonucleotide
uggaaaucgaacugaagcc

SEQ ID NO: 1324794 - RNA, 19 nt, Artificial Sequence
  Description of Artificial Sequence: Synthetic oligonucleotide
ucuauugaaccucuagaug

SEQ ID NO: 1324795 - RNA, 19 nt, Artificial Sequence
  Description of Artificial Sequence: Synthetic oligonucleotide
cuaagaaaccuuaaugaug

SEQ ID NO: 1324796 - RNA, 19 nt, Artificial Sequence
  Description of Artificial Sequence: Synthetic oligonucleotide
aaguucacgaggccguccc

SEQ ID NO: 1324797 - RNA, 19 nt, Artificial Sequence
  Description of Artificial Sequence: Synthetic oligonucleotide
uuacugaacuuaauaaugu

SEQ ID NO: 1324798 - RNA, 19 nt, Artificial Sequence
  Description of Artificial Sequence: Synthetic oligonucleotide
uuuuacugaacuuaauaau

SEQ ID NO: 1324799 - RNA, 19 nt, Artificial Sequence
  Description of Artificial Sequence: Synthetic oligonucleotide
ucacaagaaaugcauaggu

SEQ ID NO: 1324800 - RNA, 19 nt, Artificial Sequence
  Description of Artificial Sequence: Synthetic oligonucleotide
ucaucuauugaaccucuag

SEQ ID NO: 1324801 - RNA, 19 nt, Artificial Sequence
  Description of Artificial Sequence: Synthetic oligonucleotide
aaucagaguagcuggucag

SEQ ID NO: 1324802 - RNA, 19 nt, Artificial Sequence
  Description of Artificial Sequence: Synthetic oligonucleotide
uuuuacaguggaauugcug

SEQ ID NO: 1324803 - RNA, 19 nt, Artificial Sequence
  Description of Artificial Sequence: Synthetic oligonucleotide
aauuugcggucagagaaac

SEQ ID NO: 1324804 - RNA, 19 nt, Artificial Sequence
  Description of Artificial Sequence: Synthetic oligonucleotide
caaucagauaaauuggcug

SEQ ID NO: 1324805 - RNA, 19 nt, Artificial Sequence
  Description of Artificial Sequence: Synthetic oligonucleotide
aaugauaauucugccaaca

SEQ ID NO: 1324806 - RNA, 19 nt, Artificial Sequence
  Description of Artificial Sequence: Synthetic oligonucleotide
uccucuuaccccuucaacc

SEQ ID NO: 1324807 - RNA, 19 nt, Artificial Sequence
  Description of Artificial Sequence: Synthetic oligonucleotide
agcuagacuguucagacca

SEQ ID NO: 1324808 - RNA, 19 nt, Artificial Sequence
  Description of Artificial Sequence: Synthetic oligonucleotide
uaaauuggcuggaugacuc

SEQ ID NO: 1324809 - RNA, 19 nt, Artificial Sequence
  Description of Artificial Sequence: Synthetic oligonucleotide
acuaaauuugcggucagag

SEQ ID NO: 1324810 - RNA, 19 nt, Artificial Sequence
  Description of Artificial Sequence: Synthetic oligonucleotide
aagugggaggauuaagucu

SEQ ID NO: 1324811 - RNA, 19 nt, Artificial Sequence
  Description of Artificial Sequence: Synthetic oligonucleotide
ucgaacugaagccuguagc

SEQ ID NO: 1324812 - RNA, 19 nt, Artificial Sequence
  Description of Artificial Sequence: Synthetic oligonucleotide
uccccgaagacguugaagc

SEQ ID NO: 1324813 - RNA, 19 nt, Artificial Sequence
  Description of Artificial Sequence: Synthetic oligonucleotide
ggaaaaggaccuuuuauag

SEQ ID NO: 1324814 - RNA, 19 nt, Artificial Sequence
  Description of Artificial Sequence: Synthetic oligonucleotide
ugugccauagggacaaagc

SEQ ID NO: 1324815 - RNA, 19 nt, Artificial Sequence
  Description of Artificial Sequence: Synthetic oligonucleotide
gaaauuccucacuacuucc

SEQ ID NO: 1324816 - RNA, 19 nt, Artificial Sequence
  Description of Artificial Sequence: Synthetic oligonucleotide
guaggcgaaacucaaauuc

SEQ ID NO: 1324817 - RNA, 19 nt, Artificial Sequence
  Description of Artificial Sequence: Synthetic oligonucleotide
uaugaauagagcuuuuauu

SEQ ID NO: 1324818 - RNA, 19 nt, Artificial Sequence
  Description of Artificial Sequence: Synthetic oligonucleotide
acuaagaaaccuuaaugau

SEQ ID NO: 1324819 - RNA, 19 nt, Artificial Sequence
  Description of Artificial Sequence: Synthetic oligonucleotide
gcaucaaugguuuauuucc

SEQ ID NO: 1324820 - RNA, 19 nt, Artificial Sequence
  Description of Artificial Sequence: Synthetic oligonucleotide
uucacaagaaaugcauagg

SEQ ID NO: 1324821 - RNA, 19 nt, Artificial Sequence
  Description of Artificial Sequence: Synthetic oligonucleotide
ugcaguuaaagacaucauc

SEQ ID NO: 1324822 - RNA, 19 nt, Artificial Sequence
  Description of Artificial Sequence: Synthetic oligonucleotide
ucuccgaucacagaggaga

SEQ ID NO: 1324823 - RNA, 19 nt, Artificial Sequence
  Description of Artificial Sequence: Synthetic oligonucleotide
ugccauagggacaaagccc

SEQ ID NO: 1324824 - RNA, 19 nt, Artificial Sequence
  Description of Artificial Sequence: Synthetic oligonucleotide
cugagggucgccaaguggg

SEQ ID NO: 1324825 - RNA, 19 nt, Artificial Sequence
  Description of Artificial Sequence: Synthetic oligonucleotide
gacuguucagaccaaucag

SEQ ID NO: 1324826 - RNA, 19 nt, Artificial Sequence
  Description of Artificial Sequence: Synthetic oligonucleotide
cugacuauuuucucaauuc

SEQ ID NO: 1324827 - RNA, 19 nt, Artificial Sequence
  Description of Artificial Sequence: Synthetic oligonucleotide
acguuaaugaagaauagca

SEQ ID NO: 1324828 - RNA, 19 nt, Artificial Sequence
  Description of Artificial Sequence: Synthetic oligonucleotide
gauguaguugcuaaggcga

SEQ ID NO: 1324829 - RNA, 19 nt, Artificial Sequence
  Description of Artificial Sequence: Synthetic oligonucleotide
agaugugacacuaaauuug

SEQ ID NO: 1324830 - RNA, 19 nt, Artificial Sequence
  Description of Artificial Sequence: Synthetic oligonucleotide
aucuauugaaccucuagau

SEQ ID NO: 1324831 - RNA, 19 nt, Artificial Sequence
  Description of Artificial Sequence: Synthetic oligonucleotide
cauccuauacacaaacuuc

SEQ ID NO: 1324832 - RNA, 19 nt, Artificial Sequence
  Description of Artificial Sequence: Synthetic oligonucleotide
aagaucguuucccuguagu

SEQ ID NO: 1324833 - RNA, 19 nt, Artificial Sequence
  Description of Artificial Sequence: Synthetic oligonucleotide
ugguuuauuuccacuguug

SEQ ID NO: 1324834 - RNA, 19 nt, Artificial Sequence
  Description of Artificial Sequence: Synthetic oligonucleotide
aguucgcagucgcaggucc

SEQ ID NO: 1324835 - RNA, 19 nt, Artificial Sequence
  Description of Artificial Sequence: Synthetic oligonucleotide
aguuaaagacaucaucuau

SEQ ID NO: 1324836 - RNA, 19 nt, Artificial Sequence
  Description of Artificial Sequence: Synthetic oligonucleotide
uauugaaccucuagaugug

SEQ ID NO: 1324837 - RNA, 19 nt, Artificial Sequence
  Description of Artificial Sequence: Synthetic oligonucleotide
augauaauucugccaacag

SEQ ID NO: 1324838 - RNA, 19 nt, Artificial Sequence
  Description of Artificial Sequence: Synthetic oligonucleotide
uuccauccuauacacaaac

SEQ ID NO: 1324839 - RNA, 19 nt, Artificial Sequence
  Description of Artificial Sequence: Synthetic oligonucleotide
aaccuuaaugaugaaauua

SEQ ID NO: 1324840 - RNA, 19 nt, Artificial Sequence
  Description of Artificial Sequence: Synthetic oligonucleotide
aaguugagaaccuuuccuu

SEQ ID NO: 1324841 - RNA, 19 nt, Artificial Sequence
  Description of Artificial Sequence: Synthetic oligonucleotide
aaaggaccuuuuauagagc

SEQ ID NO: 1324842 - RNA, 19 nt, Artificial Sequence
  Description of Artificial Sequence: Synthetic oligonucleotide
uguagucuuuguaaucaga

SEQ ID NO: 1324843 - RNA, 19 nt, Artificial Sequence
  Description of Artificial Sequence: Synthetic oligonucleotide
uauuuauccuccugugaug

SEQ ID NO: 1324844 - RNA, 19 nt, Artificial Sequence
  Description of Artificial Sequence: Synthetic oligonucleotide
agaucguuucccuguaguc

SEQ ID NO: 1324845 - RNA, 19 nt, Artificial Sequence
  Description of Artificial Sequence: Synthetic oligonucleotide
uuaguucccggaaggaaga

SEQ ID NO: 1324846 - RNA, 19 nt, Artificial Sequence
  Description of Artificial Sequence: Synthetic oligonucleotide
ugcacuuuuacaguggaau

SEQ ID NO: 1324847 - RNA, 19 nt, Artificial Sequence
  Description of Artificial Sequence: Synthetic oligonucleotide
uaggcgaaacucaaauucu

SEQ ID NO: 1324848 - RNA, 19 nt, Artificial Sequence
  Description of Artificial Sequence: Synthetic oligonucleotide
cuuucuccgaucacagagg

SEQ ID NO: 1324849 - RNA, 19 nt, Artificial Sequence
  Description of Artificial Sequence: Synthetic oligonucleotide
uucuagcuaugcaucaaug

SEQ ID NO: 1324850 - RNA, 19 nt, Artificial Sequence
  Description of Artificial Sequence: Synthetic oligonucleotide
aauucguaggcgaaacuca

SEQ ID NO: 1324851 - RNA, 19 nt, Artificial Sequence
  Description of Artificial Sequence: Synthetic oligonucleotide
agguccuuucuuuugaggu

SEQ ID NO: 1324852 - RNA, 19 nt, Artificial Sequence
  Description of Artificial Sequence: Synthetic oligonucleotide
auuaauggcucgcucauuu

SEQ ID NO: 1324853 - RNA, 19 nt, Artificial Sequence
  Description of Artificial Sequence: Synthetic oligonucleotide
ucuagaugugacacuaaau

SEQ ID NO: 1324854 - RNA, 19 nt, Artificial Sequence
  Description of Artificial Sequence: Synthetic oligonucleotide
uagaugugacacuaaauuu

SEQ ID NO: 1324855 - RNA, 19 nt, Artificial Sequence
  Description of Artificial Sequence: Synthetic oligonucleotide
gaaaccuuaaugaugaaau

SEQ ID NO: 1324856 - RNA, 19 nt, Artificial Sequence
  Description of Artificial Sequence: Synthetic oligonucleotide
uaaccauaacccugauggg

SEQ ID NO: 1324857 - RNA, 19 nt, Artificial Sequence
  Description of Artificial Sequence: Synthetic oligonucleotide
cacuuuaguucccggaagg

SEQ ID NO: 1324858 - RNA, 19 nt, Artificial Sequence
  Description of Artificial Sequence: Synthetic oligonucleotide
ugaaccucuagaugugaca

SEQ ID NO: 1324859 - RNA, 19 nt, Artificial Sequence
  Description of Artificial Sequence: Synthetic oligonucleotide
gaauucguaggcgaaacuc

SEQ ID NO: 1324860 - RNA, 19 nt, Artificial Sequence
  Description of Artificial Sequence: Synthetic oligonucleotide
cagauuccagaacacuugg

SEQ ID NO: 1324861 - RNA, 19 nt, Artificial Sequence
  Description of Artificial Sequence: Synthetic oligonucleotide
ucguaggcgaaacucaaau

SEQ ID NO: 1324862 - RNA, 19 nt, Artificial Sequence
  Description of Artificial Sequence: Synthetic oligonucleotide
uaauggcucgcucauuuuc

SEQ ID NO: 1324863 - RNA, 19 nt, Artificial Sequence
  Description of Artificial Sequence: Synthetic oligonucleotide
gaaccucuagaugugacac

SEQ ID NO: 1324864 - RNA, 19 nt, Artificial Sequence
  Description of Artificial Sequence: Synthetic oligonucleotide
augucaauggcaccuugug

SEQ ID NO: 1324865 - RNA, 19 nt, Artificial Sequence
  Description of Artificial Sequence: Synthetic oligonucleotide
gagaagaguuuaauucuag

SEQ ID NO: 1324866 - RNA, 19 nt, Artificial Sequence
  Description of Artificial Sequence: Synthetic oligonucleotide
guuuaauucuagcuaugca

SEQ ID NO: 1324867 - RNA, 19 nt, Artificial Sequence
  Description of Artificial Sequence: Synthetic oligonucleotide
aaauuggcuggaugacucu

SEQ ID NO: 1324868 - RNA, 19 nt, Artificial Sequence
  Description of Artificial Sequence: Synthetic oligonucleotide
uagcuaugcaucaaugguu

SEQ ID NO: 1324869 - RNA, 19 nt, Artificial Sequence
  Description of Artificial Sequence: Synthetic oligonucleotide
cacguuaaugaagaauagc

SEQ ID NO: 1324870 - RNA, 19 nt, Artificial Sequence
  Description of Artificial Sequence: Synthetic oligonucleotide
gacacuaaauuugcgguca

SEQ ID NO: 1324871 - RNA, 19 nt, Artificial Sequence
  Description of Artificial Sequence: Synthetic oligonucleotide
uuauuuccuuggagaagag

SEQ ID NO: 1324872 - RNA, 19 nt, Artificial Sequence
  Description of Artificial Sequence: Synthetic oligonucleotide
uagaguugcccgucgaagu

SEQ ID NO: 1324873 - RNA, 19 nt, Artificial Sequence
  Description of Artificial Sequence: Synthetic oligonucleotide
caucuauugaaccucuaga

SEQ ID NO: 1324874 - RNA, 19 nt, Artificial Sequence
  Description of Artificial Sequence: Synthetic oligonucleotide
uaccccuucaacccgcugu

SEQ ID NO: 1324875 - RNA, 19 nt, Artificial Sequence
  Description of Artificial Sequence: Synthetic oligonucleotide
auagaguugcccgucgaag

SEQ ID NO: 1324876 - RNA, 19 nt, Artificial Sequence
  Description of Artificial Sequence: Synthetic oligonucleotide
aucagaguagcuggucagc

SEQ ID NO: 1324877 - RNA, 19 nt, Artificial Sequence
  Description of Artificial Sequence: Synthetic oligonucleotide
gcuacagaccuccagcuag

SEQ ID NO: 1324878 - RNA, 19 nt, Artificial Sequence
  Description of Artificial Sequence: Synthetic oligonucleotide
ucuuaccccuucaacccgc

SEQ ID NO: 1324879 - RNA, 19 nt, Artificial Sequence
  Description of Artificial Sequence: Synthetic oligonucleotide
ugcuaaggcgauagaguug

SEQ ID NO: 1324880 - RNA, 19 nt, Artificial Sequence
  Description of Artificial Sequence: Synthetic oligonucleotide
cugccuugaauucguaggc

SEQ ID NO: 1324881 - RNA, 19 nt, Artificial Sequence
  Description of Artificial Sequence: Synthetic oligonucleotide
uugaauucguaggcgaaac

SEQ ID NO: 1324882 - RNA, 19 nt, Artificial Sequence
  Description of Artificial Sequence: Synthetic oligonucleotide
auccuauaaccauaacccu

SEQ ID NO: 1324883 - RNA, 19 nt, Artificial Sequence
  Description of Artificial Sequence: Synthetic oligonucleotide
uugcucaagaucguuuccc

SEQ ID NO: 1324884 - RNA, 19 nt, Artificial Sequence
  Description of Artificial Sequence: Synthetic oligonucleotide
ggaaaugauaauucugcca

SEQ ID NO: 1324885 - RNA, 19 nt, Artificial Sequence
  Description of Artificial Sequence: Synthetic oligonucleotide
ugaugaaauuaauguccca

SEQ ID NO: 1324886 - RNA, 19 nt, Artificial Sequence
  Description of Artificial Sequence: Synthetic oligonucleotide
ugaauucguaggcgaaacu

SEQ ID NO: 1324887 - RNA, 19 nt, Artificial Sequence
  Description of Artificial Sequence: Synthetic oligonucleotide
uugaaccucuagaugugac

SEQ ID NO: 1324888 - RNA, 19 nt, Artificial Sequence
  Description of Artificial Sequence: Synthetic oligonucleotide
auaaauuggcuggaugacu

SEQ ID NO: 1324889 - RNA, 19 nt, Artificial Sequence
  Description of Artificial Sequence: Synthetic oligonucleotide
aaugucaauggcaccuugu

SEQ ID NO: 1324890 - RNA, 19 nt, Artificial Sequence
  Description of Artificial Sequence: Synthetic oligonucleotide
ugucaaguugagaaccuuu

SEQ ID NO: 1324891 - RNA, 19 nt, Artificial Sequence
  Description of Artificial Sequence: Synthetic oligonucleotide
accuuaaugaugaaauuaa

SEQ ID NO: 1324892 - RNA, 19 nt, Artificial Sequence
  Description of Artificial Sequence: Synthetic oligonucleotide
uacugaacuuaauaaugua

SEQ ID NO: 1324893 - RNA, 19 nt, Artificial Sequence
  Description of Artificial Sequence: Synthetic oligonucleotide
ugcccgucgaaguucacga

SEQ ID NO: 1324894 - RNA, 19 nt, Artificial Sequence
  Description of Artificial Sequence: Synthetic oligonucleotide
agcacuuuaguucccggaa

SEQ ID NO: 1324895 - RNA, 19 nt, Artificial Sequence
  Description of Artificial Sequence: Synthetic oligonucleotide
accauaacccugaugggag

SEQ ID NO: 1324896 - RNA, 19 nt, Artificial Sequence
  Description of Artificial Sequence: Synthetic oligonucleotide
uugcggucagagaaacugc

SEQ ID NO: 1324897 - RNA, 19 nt, Artificial Sequence
  Description of Artificial Sequence: Synthetic oligonucleotide
uccauccuauacacaaacu

SEQ ID NO: 1324898 - RNA, 19 nt, Artificial Sequence
  Description of Artificial Sequence: Synthetic oligonucleotide
accuuuuauagagcuuugg

SEQ ID NO: 1324899 - RNA, 19 nt, Artificial Sequence
  Description of Artificial Sequence: Synthetic oligonucleotide
uuggcuggaugacucuuca

SEQ ID NO: 1324900 - RNA, 19 nt, Artificial Sequence
  Description of Artificial Sequence: Synthetic oligonucleotide
uccagcuagacuguucaga

SEQ ID NO: 1324901 - RNA, 19 nt, Artificial Sequence
  Description of Artificial Sequence: Synthetic oligonucleotide
cuagaugugacacuaaauu

SEQ ID NO: 1324902 - RNA, 19 nt, Artificial Sequence
  Description of Artificial Sequence: Synthetic oligonucleotide
cucaccacgcagcuggaag

SEQ ID NO: 1324903 - RNA, 19 nt, Artificial Sequence
  Description of Artificial Sequence: Synthetic oligonucleotide
gcuaaggcgauagaguugc

SEQ ID NO: 1324904 - RNA, 19 nt, Artificial Sequence
  Description of Artificial Sequence: Synthetic oligonucleotide
auucugccaacaguggcuc

SEQ ID NO: 1324905 - RNA, 19 nt, Artificial Sequence
  Description of Artificial Sequence: Synthetic oligonucleotide
agggucgccaagugggagg

SEQ ID NO: 1324906 - RNA, 19 nt, Artificial Sequence
  Description of Artificial Sequence: Synthetic oligonucleotide
guauuuauccuccugugau

SEQ ID NO: 1324907 - RNA, 19 nt, Artificial Sequence
  Description of Artificial Sequence: Synthetic oligonucleotide
cuaaauuugcggucagaga

SEQ ID NO: 1324908 - RNA, 19 nt, Artificial Sequence
  Description of Artificial Sequence: Synthetic oligonucleotide
ugacucggauucuuuauua

SEQ ID NO: 1324909 - RNA, 19 nt, Artificial Sequence
  Description of Artificial Sequence: Synthetic oligonucleotide
aauucuagcuaugcaucaa

SEQ ID NO: 1324910 - RNA, 19 nt, Artificial Sequence
  Description of Artificial Sequence: Synthetic oligonucleotide
ucaccacgcagcuggaaga

SEQ ID NO: 1324911 - RNA, 19 nt, Artificial Sequence
  Description of Artificial Sequence: Synthetic oligonucleotide
gaggccguccccgaagacg

SEQ ID NO: 1324912 - RNA, 19 nt, Artificial Sequence
  Description of Artificial Sequence: Synthetic oligonucleotide
ucaacccgcugucugcuac

SEQ ID NO: 1324913 - RNA, 19 nt, Artificial Sequence
  Description of Artificial Sequence: Synthetic oligonucleotide
aaauuugcggucagagaaa

SEQ ID NO: 1324914 - RNA, 19 nt, Artificial Sequence
  Description of Artificial Sequence: Synthetic oligonucleotide
uuccccggacgaaauggag

SEQ ID NO: 1324915 - RNA, 19 nt, Artificial Sequence
  Description of Artificial Sequence: Synthetic oligonucleotide
ucagaguagcuggucagcu

SEQ ID NO: 1324916 - RNA, 19 nt, Artificial Sequence
  Description of Artificial Sequence: Synthetic oligonucleotide
ugcggaguuccccggacga

SEQ ID NO: 1324917 - RNA, 19 nt, Artificial Sequence
  Description of Artificial Sequence: Synthetic oligonucleotide
cucuuaccccuucaacccg

SEQ ID NO: 1324918 - RNA, 19 nt, Artificial Sequence
  Description of Artificial Sequence: Synthetic oligonucleotide
aucguuucccuguagucuu

SEQ ID NO: 1324919 - RNA, 19 nt, Artificial Sequence
  Description of Artificial Sequence: Synthetic oligonucleotide
cuagcuaugcaucaauggu

SEQ ID NO: 1324920 - RNA, 19 nt, Artificial Sequence
  Description of Artificial Sequence: Synthetic oligonucleotide
uugcccgucgaaguucacg

SEQ ID NO: 1324921 - RNA, 19 nt, Artificial Sequence
  Description of Artificial Sequence: Synthetic oligonucleotide
accccuucaacccgcuguc

SEQ ID NO: 1324922 - RNA, 19 nt, Artificial Sequence
  Description of Artificial Sequence: Synthetic oligonucleotide
aguucacgaggccgucccc

SEQ ID NO: 1324923 - RNA, 19 nt, Artificial Sequence
  Description of Artificial Sequence: Synthetic oligonucleotide
cgaaacucaaauucucucc

SEQ ID NO: 1324924 - RNA, 19 nt, Artificial Sequence
  Description of Artificial Sequence: Synthetic oligonucleotide
ucaagaucguuucccugua

SEQ ID NO: 1324925 - RNA, 19 nt, Artificial Sequence
  Description of Artificial Sequence: Synthetic oligonucleotide
caggcugcggaguuccccg

SEQ ID NO: 1324926 - RNA, 19 nt, Artificial Sequence
  Description of Artificial Sequence: Synthetic oligonucleotide
ucccggaaggaagaaauuc

SEQ ID NO: 1324927 - RNA, 19 nt, Artificial Sequence
  Description of Artificial Sequence: Synthetic oligonucleotide
uauuuccuuggagaagagu

SEQ ID NO: 1324928 - RNA, 19 nt, Artificial Sequence
  Description of Artificial Sequence: Synthetic oligonucleotide
cauagguccuuucuuuuga

SEQ ID NO: 1324929 - RNA, 19 nt, Artificial Sequence
  Description of Artificial Sequence: Synthetic oligonucleotide
acacuaaauuugcggucag

SEQ ID NO: 1324930 - RNA, 19 nt, Artificial Sequence
  Description of Artificial Sequence: Synthetic oligonucleotide
cauaacccugaugggaggc

SEQ ID NO: 1324931 - RNA, 19 nt, Artificial Sequence
  Description of Artificial Sequence: Synthetic oligonucleotide
ccucuuaccccuucaaccc

SEQ ID NO: 1324932 - RNA, 19 nt, Artificial Sequence
  Description of Artificial Sequence: Synthetic oligonucleotide
agggacaaagcccuuccau

SEQ ID NO: 1324933 - RNA, 19 nt, Artificial Sequence
  Description of Artificial Sequence: Synthetic oligonucleotide
acucggauucuuuauuauu

SEQ ID NO: 1324934 - RNA, 19 nt, Artificial Sequence
  Description of Artificial Sequence: Synthetic oligonucleotide
uaucuuggggugccuugug

SEQ ID NO: 1324935 - RNA, 19 nt, Artificial Sequence
  Description of Artificial Sequence: Synthetic oligonucleotide
uuaucuuggggugccuugu

SEQ ID NO: 1324936 - RNA, 19 nt, Artificial Sequence
  Description of Artificial Sequence: Synthetic oligonucleotide
augcauagguccuuucuuu

SEQ ID NO: 1324937 - RNA, 19 nt, Artificial Sequence
  Description of Artificial Sequence: Synthetic oligonucleotide
gucugcacguuaaugaaga

SEQ ID NO: 1324938 - RNA, 19 nt, Artificial Sequence
  Description of Artificial Sequence: Synthetic oligonucleotide
uuauagagcuuuggaggac

SEQ ID NO: 1324939 - RNA, 19 nt, Artificial Sequence
  Description of Artificial Sequence: Synthetic oligonucleotide
cugaacuuaauaauguauu

SEQ ID NO: 1324940 - RNA, 19 nt, Artificial Sequence
  Description of Artificial Sequence: Synthetic oligonucleotide
gauagaguugcccgucgaa

SEQ ID NO: 1324941 - RNA, 19 nt, Artificial Sequence
  Description of Artificial Sequence: Synthetic oligonucleotide
gagguguccuucuuggucu

SEQ ID NO: 1324942 - RNA, 19 nt, Artificial Sequence
  Description of Artificial Sequence: Synthetic oligonucleotide
ucuuaugaauagagcuuuu

SEQ ID NO: 1324943 - RNA, 19 nt, Artificial Sequence
  Description of Artificial Sequence: Synthetic oligonucleotide
gaaaugcauagguccuuuc

SEQ ID NO: 1324944 - RNA, 19 nt, Artificial Sequence
  Description of Artificial Sequence: Synthetic oligonucleotide
gucaaguugagaaccuuuc

SEQ ID NO: 1324945 - RNA, 19 nt, Artificial Sequence
  Description of Artificial Sequence: Synthetic oligonucleotide
ugggucuagccgcaggcuc

SEQ ID NO: 1324946 - RNA, 19 nt, Artificial Sequence
  Description of Artificial Sequence: Synthetic oligonucleotide
gggaaaaggaccuuuuaua

SEQ ID NO: 1324947 - RNA, 19 nt, Artificial Sequence
  Description of Artificial Sequence: Synthetic oligonucleotide
cuugcacuuuuacagugga

SEQ ID NO: 1324948 - RNA, 19 nt, Artificial Sequence
  Description of Artificial Sequence: Synthetic oligonucleotide
cccggaaggaagaaauucc

SEQ ID NO: 1324949 - RNA, 19 nt, Artificial Sequence
  Description of Artificial Sequence: Synthetic oligonucleotide
guggcuccguaacugauga

SEQ ID NO: 1324950 - RNA, 19 nt, Artificial Sequence
  Description of Artificial Sequence: Synthetic oligonucleotide
guucacgaggccguccccg

SEQ ID NO: 1324951 - RNA, 19 nt, Artificial Sequence
  Description of Artificial Sequence: Synthetic oligonucleotide
gucugcuacagaccuccag

SEQ ID NO: 1324952 - RNA, 19 nt, Artificial Sequence
  Description of Artificial Sequence: Synthetic oligonucleotide
uucguaggcgaaacucaaa

SEQ ID NO: 1324953 - RNA, 19 nt, Artificial Sequence
  Description of Artificial Sequence: Synthetic oligonucleotide
uggguucaugcuugucaag

SEQ ID NO: 1324954 - RNA, 19 nt, Artificial Sequence
  Description of Artificial Sequence: Synthetic oligonucleotide
aauuggcuggaugacucuu

SEQ ID NO: 1324955 - RNA, 19 nt, Artificial Sequence
  Description of Artificial Sequence: Synthetic oligonucleotide
auguccgcggguuccccgg

SEQ ID NO: 1324956 - RNA, 19 nt, Artificial Sequence
  Description of Artificial Sequence: Synthetic oligonucleotide
ccagcuagacuguucagac

SEQ ID NO: 1324957 - RNA, 19 nt, Artificial Sequence
  Description of Artificial Sequence: Synthetic oligonucleotide
ugagggucgccaaguggga

SEQ ID NO: 1324958 - RNA, 19 nt, Artificial Sequence
  Description of Artificial Sequence: Synthetic oligonucleotide
ucccagaucuccagucccu

SEQ ID NO: 1324959 - RNA, 19 nt, Artificial Sequence
  Description of Artificial Sequence: Synthetic oligonucleotide
gguggccauacccaggcug

SEQ ID NO: 1324960 - RNA, 19 nt, Artificial Sequence
  Description of Artificial Sequence: Synthetic oligonucleotide
aggaccagagacuggcaaa

SEQ ID NO: 1324961 - RNA, 19 nt, Artificial Sequence
  Description of Artificial Sequence: Synthetic oligonucleotide
gaucguuucccuguagucu

SEQ ID NO: 1324962 - RNA, 19 nt, Artificial Sequence
  Description of Artificial Sequence: Synthetic oligonucleotide
cucaagaucguuucccugu

SEQ ID NO: 1324963 - RNA, 19 nt, Artificial Sequence
  Description of Artificial Sequence: Synthetic oligonucleotide
cuauuuucucaauucaguu

SEQ ID NO: 1324964 - RNA, 19 nt, Artificial Sequence
  Description of Artificial Sequence: Synthetic oligonucleotide
cccgcugucugcuacagac

SEQ ID NO: 1324965 - RNA, 19 nt, Artificial Sequence
  Description of Artificial Sequence: Synthetic oligonucleotide
uuggggugccuuguguuca

SEQ ID NO: 1324966 - RNA, 19 nt, Artificial Sequence
  Description of Artificial Sequence: Synthetic oligonucleotide
agaguugcccgucgaaguu

SEQ ID NO: 1324967 - RNA, 19 nt, Artificial Sequence
  Description of Artificial Sequence: Synthetic oligonucleotide
agcuaugcaucaaugguuu

SEQ ID NO: 1324968 - RNA, 19 nt, Artificial Sequence
  Description of Artificial Sequence: Synthetic oligonucleotide
cucuagaugugacacuaaa

SEQ ID NO: 1324969 - RNA, 19 nt, Artificial Sequence
  Description of Artificial Sequence: Synthetic oligonucleotide
gaaguucacgaggccgucc

SEQ ID NO: 1324970 - RNA, 19 nt, Artificial Sequence
  Description of Artificial Sequence: Synthetic oligonucleotide
accucuagaugugacacua

SEQ ID NO: 1324971 - RNA, 19 nt, Artificial Sequence
  Description of Artificial Sequence: Synthetic oligonucleotide
guugcuaaggcgauagagu

SEQ ID NO: 1324972 - RNA, 19 nt, Artificial Sequence
  Description of Artificial Sequence: Synthetic oligonucleotide
uugcacuuuuacaguggaa

SEQ ID NO: 1324973 - RNA, 19 nt, Artificial Sequence
  Description of Artificial Sequence: Synthetic oligonucleotide
uggagagcugacucggauu

SEQ ID NO: 1324974 - RNA, 19 nt, Artificial Sequence
  Description of Artificial Sequence: Synthetic oligonucleotide
ccgaagacguugaagcccc

SEQ ID NO: 1324975 - RNA, 19 nt, Artificial Sequence
  Description of Artificial Sequence: Synthetic oligonucleotide
guaaucagaguagcugguc

SEQ ID NO: 1324976 - RNA, 19 nt, Artificial Sequence
  Description of Artificial Sequence: Synthetic oligonucleotide
uccauccuauaaccauaac

SEQ ID NO: 1324977 - RNA, 19 nt, Artificial Sequence
  Description of Artificial Sequence: Synthetic oligonucleotide
caagaucguuucccuguag

SEQ ID NO: 1324978 - RNA, 19 nt, Artificial Sequence
  Description of Artificial Sequence: Synthetic oligonucleotide
cauguccgcggguuccccg

SEQ ID NO: 1324979 - RNA, 19 nt, Artificial Sequence
  Description of Artificial Sequence: Synthetic oligonucleotide
cauagggacaaagcccuuc

SEQ ID NO: 1324980 - RNA, 19 nt, Artificial Sequence
  Description of Artificial Sequence: Synthetic oligonucleotide
auucagcacuuuaguuccc

SEQ ID NO: 1324981 - RNA, 19 nt, Artificial Sequence
  Description of Artificial Sequence: Synthetic oligonucleotide
cacgagcugcucaccacgc

SEQ ID NO: 1324982 - RNA, 19 nt, Artificial Sequence
  Description of Artificial Sequence: Synthetic oligonucleotide
gagaaccuuuccuugcacu

SEQ ID NO: 1324983 - RNA, 19 nt, Artificial Sequence
  Description of Artificial Sequence: Synthetic oligonucleotide
ucugcacguuaaugaagaa

SEQ ID NO: 1324984 - RNA, 19 nt, Artificial Sequence
  Description of Artificial Sequence: Synthetic oligonucleotide
uugagguguccuucuuggu

SEQ ID NO: 1324985 - RNA, 19 nt, Artificial Sequence
  Description of Artificial Sequence: Synthetic oligonucleotide
gcgaaacucaaauucucuc

SEQ ID NO: 1324986 - RNA, 19 nt, Artificial Sequence
  Description of Artificial Sequence: Synthetic oligonucleotide
uccggauuaauggcucgcu

SEQ ID NO: 1324987 - RNA, 19 nt, Artificial Sequence
  Description of Artificial Sequence: Synthetic oligonucleotide
ugcuacagaccuccagcua

SEQ ID NO: 1324988 - RNA, 19 nt, Artificial Sequence
  Description of Artificial Sequence: Synthetic oligonucleotide
ucgccaagugggaggauua

SEQ ID NO: 1324989 - RNA, 19 nt, Artificial Sequence
  Description of Artificial Sequence: Synthetic oligonucleotide
gagaaguguucaaugucaa

SEQ ID NO: 1324990 - RNA, 19 nt, Artificial Sequence
  Description of Artificial Sequence: Synthetic oligonucleotide
ggaccagagacuggcaaag

SEQ ID NO: 1324991 - RNA, 19 nt, Artificial Sequence
  Description of Artificial Sequence: Synthetic oligonucleotide
ccuuuuauagagcuuugga

SEQ ID NO: 1324992 - RNA, 19 nt, Artificial Sequence
  Description of Artificial Sequence: Synthetic oligonucleotide
gcauagguccuuucuuuug

SEQ ID NO: 1324993 - RNA, 19 nt, Artificial Sequence
  Description of Artificial Sequence: Synthetic oligonucleotide
gcccuuccauccuauaacc

SEQ ID NO: 1324994 - RNA, 19 nt, Artificial Sequence
  Description of Artificial Sequence: Synthetic oligonucleotide
ucccuugcucuaucugucu

SEQ ID NO: 1324995 - RNA, 19 nt, Artificial Sequence
  Description of Artificial Sequence: Synthetic oligonucleotide
cuggguucaugcuugucaa

SEQ ID NO: 1324996 - RNA, 19 nt, Artificial Sequence
  Description of Artificial Sequence: Synthetic oligonucleotide
uucacgaggccguccccga

SEQ ID NO: 1324997 - RNA, 19 nt, Artificial Sequence
  Description of Artificial Sequence: Synthetic oligonucleotide
ccgucgaaguucacgaggc

SEQ ID NO: 1324998 - RNA, 19 nt, Artificial Sequence
  Description of Artificial Sequence: Synthetic oligonucleotide
cuccguaacugaugaucug

SEQ ID NO: 1324999 - RNA, 19 nt, Artificial Sequence
  Description of Artificial Sequence: Synthetic oligonucleotide
cuguagcuuucuccgauca

SEQ ID NO: 1325000 - RNA, 19 nt, Artificial Sequence
  Description of Artificial Sequence: Synthetic oligonucleotide
gcuccuccggauuaauggc

SEQ ID NO: 1325001 - RNA, 19 nt, Artificial Sequence
  Description of Artificial Sequence: Synthetic oligonucleotide
aggcgauagaguugcccgu

SEQ ID NO: 1325002 - RNA, 19 nt, Artificial Sequence
  Description of Artificial Sequence: Synthetic oligonucleotide
agcugacucggauucuuua

SEQ ID NO: 1325003 - RNA, 19 nt, Artificial Sequence
  Description of Artificial Sequence: Synthetic oligonucleotide
auucguaggcgaaacucaa

SEQ ID NO: 1325004 - RNA, 19 nt, Artificial Sequence
  Description of Artificial Sequence: Synthetic oligonucleotide
uguccgcggguuccccggg

SEQ ID NO: 1325005 - RNA, 19 nt, Artificial Sequence
  Description of Artificial Sequence: Synthetic oligonucleotide
cacgcagcuggaagacacc

SEQ ID NO: 1325006 - RNA, 19 nt, Artificial Sequence
  Description of Artificial Sequence: Synthetic oligonucleotide
uucccggaaggaagaaauu

SEQ ID NO: 1325007 - RNA, 19 nt, Artificial Sequence
  Description of Artificial Sequence: Synthetic oligonucleotide
cccgucgaaguucacgagg

SEQ ID NO: 1325008 - RNA, 19 nt, Artificial Sequence
  Description of Artificial Sequence: Synthetic oligonucleotide
uuaccccuucaacccgcug

SEQ ID NO: 1325009 - RNA, 19 nt, Artificial Sequence
  Description of Artificial Sequence: Synthetic oligonucleotide
uagccgcaggcucgcacgc

SEQ ID NO: 1325010 - RNA, 19 nt, Artificial Sequence
  Description of Artificial Sequence: Synthetic oligonucleotide
ucgcauguccgcggguucc

SEQ ID NO: 1325011 - RNA, 19 nt, Artificial Sequence
  Description of Artificial Sequence: Synthetic oligonucleotide
cuugaauucguaggcgaaa

SEQ ID NO: 1325012 - RNA, 19 nt, Artificial Sequence
  Description of Artificial Sequence: Synthetic oligonucleotide
auaacccugaugggaggca

SEQ ID NO: 1325013 - RNA, 19 nt, Artificial Sequence
  Description of Artificial Sequence: Synthetic oligonucleotide
ggcuccguaacugaugauc

SEQ ID NO: 1325014 - RNA, 19 nt, Artificial Sequence
  Description of Artificial Sequence: Synthetic oligonucleotide
uccgcggguuccccgggcc

SEQ ID NO: 1325015 - RNA, 19 nt, Artificial Sequence
  Description of Artificial Sequence: Synthetic oligonucleotide
gagggucgccaagugggag

SEQ ID NO: 1325016 - RNA, 19 nt, Artificial Sequence
  Description of Artificial Sequence: Synthetic oligonucleotide
cuccggauuaauggcucgc

SEQ ID NO: 1325017 - RNA, 19 nt, Artificial Sequence
  Description of Artificial Sequence: Synthetic oligonucleotide
uucgcagucgcagguccac

SEQ ID NO: 1325018 - RNA, 19 nt, Artificial Sequence
  Description of Artificial Sequence: Synthetic oligonucleotide
cacgaggccguccccgaag

SEQ ID NO: 1325019 - RNA, 19 nt, Artificial Sequence
  Description of Artificial Sequence: Synthetic oligonucleotide
gcugggucuagccgcaggc

SEQ ID NO: 1325020 - RNA, 19 nt, Artificial Sequence
  Description of Artificial Sequence: Synthetic oligonucleotide
agguugcaguuaaagacau

SEQ ID NO: 1325021 - RNA, 19 nt, Artificial Sequence
  Description of Artificial Sequence: Synthetic oligonucleotide
cuacagaccuccagcuaga

SEQ ID NO: 1325022 - RNA, 19 nt, Artificial Sequence
  Description of Artificial Sequence: Synthetic oligonucleotide
cagcacuuuaguucccgga

SEQ ID NO: 1325023 - RNA, 19 nt, Artificial Sequence
  Description of Artificial Sequence: Synthetic oligonucleotide
uggccauguccaucccuug

SEQ ID NO: 1325024 - RNA, 19 nt, Artificial Sequence
  Description of Artificial Sequence: Synthetic oligonucleotide
guccccgaagacguugaag

SEQ ID NO: 1325025 - RNA, 19 nt, Artificial Sequence
  Description of Artificial Sequence: Synthetic oligonucleotide
agauuccagaacacuugga

SEQ ID NO: 1325026 - RNA, 19 nt, Artificial Sequence
  Description of Artificial Sequence: Synthetic oligonucleotide
cuaaggcgauagaguugcc

SEQ ID NO: 1325027 - RNA, 19 nt, Artificial Sequence
  Description of Artificial Sequence: Synthetic oligonucleotide
gaguugcccgucgaaguuc

SEQ ID NO: 1325028 - RNA, 19 nt, Artificial Sequence
  Description of Artificial Sequence: Synthetic oligonucleotide
gcgauagaguugcccgucg

SEQ ID NO: 1325029 - RNA, 19 nt, Artificial Sequence
  Description of Artificial Sequence: Synthetic oligonucleotide
ccacgcagcuggaagacac

SEQ ID NO: 1325030 - RNA, 19 nt, Artificial Sequence
  Description of Artificial Sequence: Synthetic oligonucleotide
aguugcccgucgaaguuca

SEQ ID NO: 1325031 - RNA, 19 nt, Artificial Sequence
  Description of Artificial Sequence: Synthetic oligonucleotide
gacucggauucuuuauuau

SEQ ID NO: 1325032 - RNA, 19 nt, Artificial Sequence
  Description of Artificial Sequence: Synthetic oligonucleotide
caugcuugucaaguugaga

SEQ ID NO: 1325033 - RNA, 19 nt, Artificial Sequence
  Description of Artificial Sequence: Synthetic oligonucleotide
gcucaagaucguuucccug

SEQ ID NO: 1325034 - RNA, 19 nt, Artificial Sequence
  Description of Artificial Sequence: Synthetic oligonucleotide
acgaggccguccccgaaga

SEQ ID NO: 1325035 - RNA, 19 nt, Artificial Sequence
  Description of Artificial Sequence: Synthetic oligonucleotide
ggaaaucgaacugaagccu

SEQ ID NO: 1325036 - RNA, 19 nt, Artificial Sequence
  Description of Artificial Sequence: Synthetic oligonucleotide
uacagaccuccagcuagac

SEQ ID NO: 1325037 - RNA, 19 nt, Artificial Sequence
  Description of Artificial Sequence: Synthetic oligonucleotide
guucccggaaggaagaaau

SEQ ID NO: 1325038 - RNA, 19 nt, Artificial Sequence
  Description of Artificial Sequence: Synthetic oligonucleotide
gggucuagccgcaggcucg

SEQ ID NO: 1325039 - RNA, 19 nt, Artificial Sequence
  Description of Artificial Sequence: Synthetic oligonucleotide
accuccagcuagacuguuc

SEQ ID NO: 1325040 - RNA, 19 nt, Artificial Sequence
  Description of Artificial Sequence: Synthetic oligonucleotide
ccauaacccugaugggagg

SEQ ID NO: 1325041 - RNA, 19 nt, Artificial Sequence
  Description of Artificial Sequence: Synthetic oligonucleotide
ggcggagcagcugcgacag

SEQ ID NO: 1325042 - RNA, 19 nt, Artificial Sequence
  Description of Artificial Sequence: Synthetic oligonucleotide
aggccguccccgaagacgu

SEQ ID NO: 1325043 - RNA, 19 nt, Artificial Sequence
  Description of Artificial Sequence: Synthetic oligonucleotide
agagcugacucggauucuu

SEQ ID NO: 1325044 - RNA, 19 nt, Artificial Sequence
  Description of Artificial Sequence: Synthetic oligonucleotide
ccuccggauuaauggcucg

SEQ ID NO: 1325045 - RNA, 19 nt, Artificial Sequence
  Description of Artificial Sequence: Synthetic oligonucleotide
cuugcucuaucugucuucu

SEQ ID NO: 1325046 - RNA, 19 nt, Artificial Sequence
  Description of Artificial Sequence: Synthetic oligonucleotide
auuugcggucagagaaacu

SEQ ID NO: 1325047 - RNA, 19 nt, Artificial Sequence
  Description of Artificial Sequence: Synthetic oligonucleotide
ggacgaaauggaggucagg

SEQ ID NO: 1325048 - RNA, 19 nt, Artificial Sequence
  Description of Artificial Sequence: Synthetic oligonucleotide
ucguuucccuguagucuuu

SEQ ID NO: 1325049 - RNA, 19 nt, Artificial Sequence
  Description of Artificial Sequence: Synthetic oligonucleotide
ucacgaggccguccccgaa

SEQ ID NO: 1325050 - RNA, 19 nt, Artificial Sequence
  Description of Artificial Sequence: Synthetic oligonucleotide
cucgcauguccgcggguuc

SEQ ID NO: 1325051 - RNA, 19 nt, Artificial Sequence
  Description of Artificial Sequence: Synthetic oligonucleotide
accuugugccauagggaca

SEQ ID NO: 1325052 - RNA, 19 nt, Artificial Sequence
  Description of Artificial Sequence: Synthetic oligonucleotide
acccugagggucgccaagu

SEQ ID NO: 1325053 - RNA, 19 nt, Artificial Sequence
  Description of Artificial Sequence: Synthetic oligonucleotide
gccauacccaggcuguguc

SEQ ID NO: 1325054 - RNA, 19 nt, Artificial Sequence
  Description of Artificial Sequence: Synthetic oligonucleotide
ccccgaagacguugaagcc

SEQ ID NO: 1325055 - RNA, 19 nt, Artificial Sequence
  Description of Artificial Sequence: Synthetic oligonucleotide
uucaacccgcugucugcua

SEQ ID NO: 1325056 - RNA, 19 nt, Artificial Sequence
  Description of Artificial Sequence: Synthetic oligonucleotide
gcuggaugacucuucagau

SEQ ID NO: 1325057 - RNA, 19 nt, Artificial Sequence
  Description of Artificial Sequence: Synthetic oligonucleotide
guuccccggacgaaaugga

SEQ ID NO: 1325058 - RNA, 19 nt, Artificial Sequence
  Description of Artificial Sequence: Synthetic oligonucleotide
ccaaucagauaaauuggcu

SEQ ID NO: 1325059 - RNA, 19 nt, Artificial Sequence
  Description of Artificial Sequence: Synthetic oligonucleotide
ggucagagaaacugcuccu

SEQ ID NO: 1325060 - RNA, 19 nt, Artificial Sequence
  Description of Artificial Sequence: Synthetic oligonucleotide
cacuaaauuugcggucaga

SEQ ID NO: 1325061 - RNA, 19 nt, Artificial Sequence
  Description of Artificial Sequence: Synthetic oligonucleotide
cccuucaacccgcugucug

SEQ ID NO: 1325062 - RNA, 19 nt, Artificial Sequence
  Description of Artificial Sequence: Synthetic oligonucleotide
ccuuucuuuugaggugucc

SEQ ID NO: 1325063 - RNA, 19 nt, Artificial Sequence
  Description of Artificial Sequence: Synthetic oligonucleotide
ggguucaugcuugucaagu

SEQ ID NO: 1325064 - RNA, 19 nt, Artificial Sequence
  Description of Artificial Sequence: Synthetic oligonucleotide
ccuguagcuuucuccgauc

SEQ ID NO: 1325065 - RNA, 19 nt, Artificial Sequence
  Description of Artificial Sequence: Synthetic oligonucleotide
caacccgcugucugcuaca

SEQ ID NO: 1325066 - RNA, 19 nt, Artificial Sequence
  Description of Artificial Sequence: Synthetic oligonucleotide
ccauccuauacacaaacuu

SEQ ID NO: 1325067 - RNA, 19 nt, Artificial Sequence
  Description of Artificial Sequence: Synthetic oligonucleotide
ugccaacaguggcuccgua

SEQ ID NO: 1325068 - RNA, 19 nt, Artificial Sequence
  Description of Artificial Sequence: Synthetic oligonucleotide
gcucuaucugucuucuuau

SEQ ID NO: 1325069 - RNA, 19 nt, Artificial Sequence
  Description of Artificial Sequence: Synthetic oligonucleotide
caguucgcagucgcagguc

SEQ ID NO: 1325070 - RNA, 19 nt, Artificial Sequence
  Description of Artificial Sequence: Synthetic oligonucleotide
ccuugaauucguaggcgaa

SEQ ID NO: 1325071 - RNA, 19 nt, Artificial Sequence
  Description of Artificial Sequence: Synthetic oligonucleotide
cugcacguuaaugaagaau

SEQ ID NO: 1325072 - RNA, 19 nt, Artificial Sequence
  Description of Artificial Sequence: Synthetic oligonucleotide
cuggaugacucuucagauu

SEQ ID NO: 1325073 - RNA, 19 nt, Artificial Sequence
  Description of Artificial Sequence: Synthetic oligonucleotide
ccacauaucucuugaugua

SEQ ID NO: 1325074 - RNA, 19 nt, Artificial Sequence
  Description of Artificial Sequence: Synthetic oligonucleotide
aucaucuauugaaccucua

SEQ ID NO: 1325075 - RNA, 19 nt, Artificial Sequence
  Description of Artificial Sequence: Synthetic oligonucleotide
ggcaccaugcccagggaaa

SEQ ID NO: 1325076 - RNA, 19 nt, Artificial Sequence
  Description of Artificial Sequence: Synthetic oligonucleotide
ggcgauagaguugcccguc

SEQ ID NO: 1325077 - RNA, 19 nt, Artificial Sequence
  Description of Artificial Sequence: Synthetic oligonucleotide
augaucugggugacagguu

SEQ ID NO: 1325078 - RNA, 19 nt, Artificial Sequence
  Description of Artificial Sequence: Synthetic oligonucleotide
ccucacuacuuccuggaaa

SEQ ID NO: 1325079 - RNA, 19 nt, Artificial Sequence
  Description of Artificial Sequence: Synthetic oligonucleotide
gcuccguaacugaugaucu

SEQ ID NO: 1325080 - RNA, 19 nt, Artificial Sequence
  Description of Artificial Sequence: Synthetic oligonucleotide
ccggacgaaauggagguca

SEQ ID NO: 1325081 - RNA, 19 nt, Artificial Sequence
  Description of Artificial Sequence: Synthetic oligonucleotide
ccggauuaauggcucgcuc

SEQ ID NO: 1325082 - RNA, 19 nt, Artificial Sequence
  Description of Artificial Sequence: Synthetic oligonucleotide
gcgacaggggcaacagggc

SEQ ID NO: 1325083 - RNA, 19 nt, Artificial Sequence
  Description of Artificial Sequence: Synthetic oligonucleotide
gcugacucggauucuuuau

SEQ ID NO: 1325084 - RNA, 19 nt, Artificial Sequence
  Description of Artificial Sequence: Synthetic oligonucleotide
uggcuccguaacugaugau

SEQ ID NO: 1325085 - RNA, 19 nt, Artificial Sequence
  Description of Artificial Sequence: Synthetic oligonucleotide
gauuaauggcucgcucauu

SEQ ID NO: 1325086 - RNA, 19 nt, Artificial Sequence
  Description of Artificial Sequence: Synthetic oligonucleotide
gcccgucgaaguucacgag

SEQ ID NO: 1325087 - RNA, 19 nt, Artificial Sequence
  Description of Artificial Sequence: Synthetic oligonucleotide
guucgcagucgcaggucca

SEQ ID NO: 1325088 - RNA, 19 nt, Artificial Sequence
  Description of Artificial Sequence: Synthetic oligonucleotide
ggucuagccgcaggcucgc

SEQ ID NO: 1325089 - RNA, 19 nt, Artificial Sequence
  Description of Artificial Sequence: Synthetic oligonucleotide
ccggaaggaagaaauuccu

SEQ ID NO: 1325090 - RNA, 19 nt, Artificial Sequence
  Description of Artificial Sequence: Synthetic oligonucleotide
guggaauugcugagcccaa

SEQ ID NO: 1325091 - RNA, 19 nt, Artificial Sequence
  Description of Artificial Sequence: Synthetic oligonucleotide
guccgcggguuccccgggc

SEQ ID NO: 1325092 - RNA, 19 nt, Artificial Sequence
  Description of Artificial Sequence: Synthetic oligonucleotide
cggacgaaauggaggucag

SEQ ID NO: 1325093 - RNA, 19 nt, Artificial Sequence
  Description of Artificial Sequence: Synthetic oligonucleotide
cucgcacgcggcgguggcc

SEQ ID NO: 1325094 - RNA, 19 nt, Artificial Sequence
  Description of Artificial Sequence: Synthetic oligonucleotide
cacuguuggagagcugacu

SEQ ID NO: 1325095 - RNA, 19 nt, Artificial Sequence
  Description of Artificial Sequence: Synthetic oligonucleotide
cuauaaccauaacccugau

SEQ ID NO: 1325096 - RNA, 19 nt, Artificial Sequence
  Description of Artificial Sequence: Synthetic oligonucleotide
gccguccccgaagacguug

SEQ ID NO: 1325097 - RNA, 19 nt, Artificial Sequence
  Description of Artificial Sequence: Synthetic oligonucleotide
gggucgccaagugggagga

SEQ ID NO: 1325098 - RNA, 19 nt, Artificial Sequence
  Description of Artificial Sequence: Synthetic oligonucleotide
ccccggacgaaauggaggu

SEQ ID NO: 1325099 - RNA, 19 nt, Artificial Sequence
  Description of Artificial Sequence: Synthetic oligonucleotide
ccccucgcauguccgcggg

SEQ ID NO: 1325100 - RNA, 19 nt, Artificial Sequence
  Description of Artificial Sequence: Synthetic oligonucleotide
caguggcuccguaacugau

SEQ ID NO: 1325101 - RNA, 19 nt, Artificial Sequence
  Description of Artificial Sequence: Synthetic oligonucleotide
guugcccgucgaaguucac

SEQ ID NO: 1325102 - RNA, 19 nt, Artificial Sequence
  Description of Artificial Sequence: Synthetic oligonucleotide
ccucuagaugugacacuaa

SEQ ID NO: 1325103 - RNA, 19 nt, Artificial Sequence
  Description of Artificial Sequence: Synthetic oligonucleotide
cgcaggcucgcacgcggcg

SEQ ID NO: 1325104 - RNA, 19 nt, Artificial Sequence
  Description of Artificial Sequence: Synthetic oligonucleotide
gcuagacuguucagaccaa

SEQ ID NO: 1325105 - RNA, 19 nt, Artificial Sequence
  Description of Artificial Sequence: Synthetic oligonucleotide
gcauguccgcggguucccc

SEQ ID NO: 1325106 - RNA, 19 nt, Artificial Sequence
  Description of Artificial Sequence: Synthetic oligonucleotide
gugggaggauuaagucugu

SEQ ID NO: 1325107 - RNA, 19 nt, Artificial Sequence
  Description of Artificial Sequence: Synthetic oligonucleotide
ccaguucgcagucgcaggu

SEQ ID NO: 1325108 - RNA, 19 nt, Artificial Sequence
  Description of Artificial Sequence: Synthetic oligonucleotide
gggugcuacugacuauuuu

SEQ ID NO: 1325109 - RNA, 19 nt, Artificial Sequence
  Description of Artificial Sequence: Synthetic oligonucleotide
cgauagaguugcccgucga

SEQ ID NO: 1325110 - RNA, 19 nt, Artificial Sequence
  Description of Artificial Sequence: Synthetic oligonucleotide
cguaacugaugaucugggu

SEQ ID NO: 1325111 - RNA, 19 nt, Artificial Sequence
  Description of Artificial Sequence: Synthetic oligonucleotide
ccguccccgaagacguuga

SEQ ID NO: 1325112 - RNA, 19 nt, Artificial Sequence
  Description of Artificial Sequence: Synthetic oligonucleotide
ggaguuccccggacgaaau

SEQ ID NO: 1325113 - RNA, 19 nt, Artificial Sequence
  Description of Artificial Sequence: Synthetic oligonucleotide
cgcauguccgcggguuccc

SEQ ID NO: 1325114 - RNA, 19 nt, Artificial Sequence
  Description of Artificial Sequence: Synthetic oligonucleotide
gucuagccgcaggcucgca

SEQ ID NO: 1325115 - RNA, 19 nt, Artificial Sequence
  Description of Artificial Sequence: Synthetic oligonucleotide
cgcggguuccccgggcccg

SEQ ID NO: 1325116 - RNA, 19 nt, Artificial Sequence
  Description of Artificial Sequence: Synthetic oligonucleotide
cguaggcgaaacucaaauu

SEQ ID NO: 1325117 - RNA, 19 nt, Artificial Sequence
  Description of Artificial Sequence: Synthetic oligonucleotide
cccggacgaaauggagguc

SEQ ID NO: 1325118 - RNA, 19 nt, Artificial Sequence
  Description of Artificial Sequence: Synthetic oligonucleotide
gcggaguuccccggacgaa

SEQ ID NO: 1325119 - RNA, 19 nt, Artificial Sequence
  Description of Artificial Sequence: Synthetic oligonucleotide
cggaguuccccggacgaaa

SEQ ID NO: 1325120 - RNA, 19 nt, Artificial Sequence
  Description of Artificial Sequence: Synthetic oligonucleotide
cgaggccguccccgaagac

SEQ ID NO: 1325121 - RNA, 19 nt, Artificial Sequence
  Description of Artificial Sequence: Synthetic oligonucleotide
ggggugcuacugacuauuu

SEQ ID NO: 1325122 - RNA, 19 nt, Artificial Sequence
  Description of Artificial Sequence: Synthetic oligonucleotide
cgggcccgggcaccacgag

SEQ ID NO: 1325123 - RNA, 19 nt, Artificial Sequence
  Description of Artificial Sequence: Synthetic oligonucleotide
ccucgcauguccgcggguu

SEQ ID NO: 1325124 - RNA, 19 nt, Artificial Sequence
  Description of Artificial Sequence: Synthetic oligonucleotide
ccauagggacaaagcccuu

SEQ ID NO: 1325125 - RNA, 19 nt, Artificial Sequence
  Description of Artificial Sequence: Synthetic oligonucleotide
cccucgcauguccgcgggu

SEQ ID NO: 1325126 - RNA, 19 nt, Artificial Sequence
  Description of Artificial Sequence: Synthetic oligonucleotide
ggccguccccgaagacguu

SEQ ID NO: 1325127 - RNA, 19 nt, Artificial Sequence
  Description of Artificial Sequence: Synthetic oligonucleotide
uuuagcaucaaacugggcc

SEQ ID NO: 1325128 - RNA, 19 nt, Artificial Sequence
  Description of Artificial Sequence: Synthetic oligonucleotide
ugugauaucagccaggguc

SEQ ID NO: 1325129 - RNA, 19 nt, Artificial Sequence
  Description of Artificial Sequence: Synthetic oligonucleotide
aguacuuccacgaaggucc

SEQ ID NO: 1325130 - RNA, 19 nt, Artificial Sequence
  Description of Artificial Sequence: Synthetic oligonucleotide
auugcucucaaacacacag

SEQ ID NO: 1325131 - RNA, 19 nt, Artificial Sequence
  Description of Artificial Sequence: Synthetic oligonucleotide
aacacgaagguacucuugg

SEQ ID NO: 1325132 - RNA, 19 nt, Artificial Sequence
  Description of Artificial Sequence: Synthetic oligonucleotide
uauuguugguuccaaagag

SEQ ID NO: 1325133 - RNA, 19 nt, Artificial Sequence
  Description of Artificial Sequence: Synthetic oligonucleotide
ucauccaacacgaagguac

SEQ ID NO: 1325134 - RNA, 19 nt, Artificial Sequence
  Description of Artificial Sequence: Synthetic oligonucleotide
auguauacgacucguaguc

SEQ ID NO: 1325135 - RNA, 19 nt, Artificial Sequence
  Description of Artificial Sequence: Synthetic oligonucleotide
auaaaaggcauaccgcacg

SEQ ID NO: 1325136 - RNA, 19 nt, Artificial Sequence
  Description of Artificial Sequence: Synthetic oligonucleotide
cuagcaaaggcauucuucc

SEQ ID NO: 1325137 - RNA, 19 nt, Artificial Sequence
  Description of Artificial Sequence: Synthetic oligonucleotide
uacguaaugggcaauggca

SEQ ID NO: 1325138 - RNA, 19 nt, Artificial Sequence
  Description of Artificial Sequence: Synthetic oligonucleotide
aagaggaugacacuagcaa

SEQ ID NO: 1325139 - RNA, 19 nt, Artificial Sequence
  Description of Artificial Sequence: Synthetic oligonucleotide
uuguugguuccaaagagga

SEQ ID NO: 1325140 - RNA, 19 nt, Artificial Sequence
  Description of Artificial Sequence: Synthetic oligonucleotide
aagacauguucacuugaag

SEQ ID NO: 1325141 - RNA, 19 nt, Artificial Sequence
  Description of Artificial Sequence: Synthetic oligonucleotide
aggauauguguacaggguc

SEQ ID NO: 1325142 - RNA, 19 nt, Artificial Sequence
  Description of Artificial Sequence: Synthetic oligonucleotide
aaaggcauaccgcacgaca

SEQ ID NO: 1325143 - RNA, 19 nt, Artificial Sequence
  Description of Artificial Sequence: Synthetic oligonucleotide
ucauugcuuacguaauggg

SEQ ID NO: 1325144 - RNA, 19 nt, Artificial Sequence
  Description of Artificial Sequence: Synthetic oligonucleotide
uacucucgaaccaaggucu

SEQ ID NO: 1325145 - RNA, 19 nt, Artificial Sequence
  Description of Artificial Sequence: Synthetic oligonucleotide
ugccaaucuggacucagcg

SEQ ID NO: 1325146 - RNA, 19 nt, Artificial Sequence
  Description of Artificial Sequence: Synthetic oligonucleotide
uaaggggacagccguacgg

SEQ ID NO: 1325147 - RNA, 19 nt, Artificial Sequence
  Description of Artificial Sequence: Synthetic oligonucleotide
acaacugugauaucagcca

SEQ ID NO: 1325148 - RNA, 19 nt, Artificial Sequence
  Description of Artificial Sequence: Synthetic oligonucleotide
uguacagggucccagccgc

SEQ ID NO: 1325149 - RNA, 19 nt, Artificial Sequence
  Description of Artificial Sequence: Synthetic oligonucleotide
cauugcuuacguaaugggc

SEQ ID NO: 1325150 - RNA, 19 nt, Artificial Sequence
  Description of Artificial Sequence: Synthetic oligonucleotide
uccgcuuaaacucauccaa

SEQ ID NO: 1325151 - RNA, 19 nt, Artificial Sequence
  Description of Artificial Sequence: Synthetic oligonucleotide
uuacguaaugggcaauggc

SEQ ID NO: 1325152 - RNA, 19 nt, Artificial Sequence
  Description of Artificial Sequence: Synthetic oligonucleotide
acgaaaagaaggcucuaag

SEQ ID NO: 1325153 - RNA, 19 nt, Artificial Sequence
  Description of Artificial Sequence: Synthetic oligonucleotide
auugcuuacguaaugggca

SEQ ID NO: 1325154 - RNA, 19 nt, Artificial Sequence
  Description of Artificial Sequence: Synthetic oligonucleotide
auuggggaaggccugacga

SEQ ID NO: 1325155 - RNA, 19 nt, Artificial Sequence
  Description of Artificial Sequence: Synthetic oligonucleotide
cuuccgcuuaaacucaucc

SEQ ID NO: 1325156 - RNA, 19 nt, Artificial Sequence
  Description of Artificial Sequence: Synthetic oligonucleotide
aaacgccagaaauggagcu

SEQ ID NO: 1325157 - RNA, 19 nt, Artificial Sequence
  Description of Artificial Sequence: Synthetic oligonucleotide
cauaccgcacgacaguucc

SEQ ID NO: 1325158 - RNA, 19 nt, Artificial Sequence
  Description of Artificial Sequence: Synthetic oligonucleotide
uuuaggcuggcucucugca

SEQ ID NO: 1325159 - RNA, 19 nt, Artificial Sequence
  Description of Artificial Sequence: Synthetic oligonucleotide
auaucagccagggucacuc

SEQ ID NO: 1325160 - RNA, 19 nt, Artificial Sequence
  Description of Artificial Sequence: Synthetic oligonucleotide
guuuccgccauguauacga

SEQ ID NO: 1325161 - RNA, 19 nt, Artificial Sequence
  Description of Artificial Sequence: Synthetic oligonucleotide
uaaaaggcauaccgcacga

SEQ ID NO: 1325162 - RNA, 19 nt, Artificial Sequence
  Description of Artificial Sequence: Synthetic oligonucleotide
aggccugacgaaaagaagg

SEQ ID NO: 1325163 - RNA, 19 nt, Artificial Sequence
  Description of Artificial Sequence: Synthetic oligonucleotide
augagguugcaacucauga

SEQ ID NO: 1325164 - RNA, 19 nt, Artificial Sequence
  Description of Artificial Sequence: Synthetic oligonucleotide
cauaaaaggcauaccgcac

SEQ ID NO: 1325165 - RNA, 19 nt, Artificial Sequence
  Description of Artificial Sequence: Synthetic oligonucleotide
aguacucucgaaccaaggu

SEQ ID NO: 1325166 - RNA, 19 nt, Artificial Sequence
  Description of Artificial Sequence: Synthetic oligonucleotide
caaacgccagaaauggagc

SEQ ID NO: 1325167 - RNA, 19 nt, Artificial Sequence
  Description of Artificial Sequence: Synthetic oligonucleotide
acccaaacgccagaaaugg

SEQ ID NO: 1325168 - RNA, 19 nt, Artificial Sequence
  Description of Artificial Sequence: Synthetic oligonucleotide
cagccguacggaaacagcg

SEQ ID NO: 1325169 - RNA, 19 nt, Artificial Sequence
  Description of Artificial Sequence: Synthetic oligonucleotide
gcgaggacggcauaaaagg

SEQ ID NO: 1325170 - RNA, 19 nt, Artificial Sequence
  Description of Artificial Sequence: Synthetic oligonucleotide
uauuggggaaggccugacg

SEQ ID NO: 1325171 - RNA, 19 nt, Artificial Sequence
  Description of Artificial Sequence: Synthetic oligonucleotide
gagguugcaacucaugaaa

SEQ ID NO: 1325172 - RNA, 19 nt, Artificial Sequence
  Description of Artificial Sequence: Synthetic oligonucleotide
aaaaguacucucgaaccaa

SEQ ID NO: 1325173 - RNA, 19 nt, Artificial Sequence
  Description of Artificial Sequence: Synthetic oligonucleotide
gcuauuguugguuccaaag

SEQ ID NO: 1325174 - RNA, 19 nt, Artificial Sequence
  Description of Artificial Sequence: Synthetic oligonucleotide
ggaacgaugucacugucag

SEQ ID NO: 1325175 - RNA, 19 nt, Artificial Sequence
  Description of Artificial Sequence: Synthetic oligonucleotide
ugauggcaagacauguuca

SEQ ID NO: 1325176 - RNA, 19 nt, Artificial Sequence
  Description of Artificial Sequence: Synthetic oligonucleotide
uggaggaacgaugucacug

SEQ ID NO: 1325177 - RNA, 19 nt, Artificial Sequence
  Description of Artificial Sequence: Synthetic oligonucleotide
agacacuguguccucauug

SEQ ID NO: 1325178 - RNA, 19 nt, Artificial Sequence
  Description of Artificial Sequence: Synthetic oligonucleotide
ucagcggaaaggcaaguuc

SEQ ID NO: 1325179 - RNA, 19 nt, Artificial Sequence
  Description of Artificial Sequence: Synthetic oligonucleotide
acgaagguacucuugggca

SEQ ID NO: 1325180 - RNA, 19 nt, Artificial Sequence
  Description of Artificial Sequence: Synthetic oligonucleotide
uccgccauguauacgacuc

SEQ ID NO: 1325181 - RNA, 19 nt, Artificial Sequence
  Description of Artificial Sequence: Synthetic oligonucleotide
uguuuguuguggugcauga

SEQ ID NO: 1325182 - RNA, 19 nt, Artificial Sequence
  Description of Artificial Sequence: Synthetic oligonucleotide
guacugagcagcgaugagg

SEQ ID NO: 1325183 - RNA, 19 nt, Artificial Sequence
  Description of Artificial Sequence: Synthetic oligonucleotide
aaggcauaccgcacgacag

SEQ ID NO: 1325184 - RNA, 19 nt, Artificial Sequence
  Description of Artificial Sequence: Synthetic oligonucleotide
agcgaugagggccuugaag

SEQ ID NO: 1325185 - RNA, 19 nt, Artificial Sequence
  Description of Artificial Sequence: Synthetic oligonucleotide
aaaguacucucgaaccaag

SEQ ID NO: 1325186 - RNA, 19 nt, Artificial Sequence
  Description of Artificial Sequence: Synthetic oligonucleotide
ugagaaauucaggggugcg

SEQ ID NO: 1325187 - RNA, 19 nt, Artificial Sequence
  Description of Artificial Sequence: Synthetic oligonucleotide
agcaaagcucacccacugc

SEQ ID NO: 1325188 - RNA, 19 nt, Artificial Sequence
  Description of Artificial Sequence: Synthetic oligonucleotide
ucggaagacccaaacgcca

SEQ ID NO: 1325189 - RNA, 19 nt, Artificial Sequence
  Description of Artificial Sequence: Synthetic oligonucleotide
aaucgcuggaacaucccag

SEQ ID NO: 1325190 - RNA, 19 nt, Artificial Sequence
  Description of Artificial Sequence: Synthetic oligonucleotide
cucggaagacccaaacgcc

SEQ ID NO: 1325191 - RNA, 19 nt, Artificial Sequence
  Description of Artificial Sequence: Synthetic oligonucleotide
cuaagaccugcuuguagag

SEQ ID NO: 1325192 - RNA, 19 nt, Artificial Sequence
  Description of Artificial Sequence: Synthetic oligonucleotide
uaguccaccugccaaucug

SEQ ID NO: 1325193 - RNA, 19 nt, Artificial Sequence
  Description of Artificial Sequence: Synthetic oligonucleotide
aaaaggcauaccgcacgac

SEQ ID NO: 1325194 - RNA, 19 nt, Artificial Sequence
  Description of Artificial Sequence: Synthetic oligonucleotide
acgccagaaauggagcugc

SEQ ID NO: 1325195 - RNA, 19 nt, Artificial Sequence
  Description of Artificial Sequence: Synthetic oligonucleotide
cacugcaccaccugagccg

SEQ ID NO: 1325196 - RNA, 19 nt, Artificial Sequence
  Description of Artificial Sequence: Synthetic oligonucleotide
agggaagcgguacucagca

SEQ ID NO: 1325197 - RNA, 19 nt, Artificial Sequence
  Description of Artificial Sequence: Synthetic oligonucleotide
ugguuaaugcagguaagga

SEQ ID NO: 1325198 - RNA, 19 nt, Artificial Sequence
  Description of Artificial Sequence: Synthetic oligonucleotide
uuaucaaagugcucccaaa

SEQ ID NO: 1325199 - RNA, 19 nt, Artificial Sequence
  Description of Artificial Sequence: Synthetic oligonucleotide
guugcaacucaugaaaguc

SEQ ID NO: 1325200 - RNA, 19 nt, Artificial Sequence
  Description of Artificial Sequence: Synthetic oligonucleotide
gugauggcaagacauguuc

SEQ ID NO: 1325201 - RNA, 19 nt, Artificial Sequence
  Description of Artificial Sequence: Synthetic oligonucleotide
uguacugagcagcgaugag

SEQ ID NO: 1325202 - RNA, 19 nt, Artificial Sequence
  Description of Artificial Sequence: Synthetic oligonucleotide
aaguacucucgaaccaagg

SEQ ID NO: 1325203 - RNA, 19 nt, Artificial Sequence
  Description of Artificial Sequence: Synthetic oligonucleotide
cugguuaaugcagguaagg

SEQ ID NO: 1325204 - RNA, 19 nt, Artificial Sequence
  Description of Artificial Sequence: Synthetic oligonucleotide
cuuacguaaugggcaaugg

SEQ ID NO: 1325205 - RNA, 19 nt, Artificial Sequence
  Description of Artificial Sequence: Synthetic oligonucleotide
guacucucgaaccaagguc

SEQ ID NO: 1325206 - RNA, 19 nt, Artificial Sequence
  Description of Artificial Sequence: Synthetic oligonucleotide
ccaaacgccagaaauggag

SEQ ID NO: 1325207 - RNA, 19 nt, Artificial Sequence
  Description of Artificial Sequence: Synthetic oligonucleotide
agcgguacucagcauacca

SEQ ID NO: 1325208 - RNA, 19 nt, Artificial Sequence
  Description of Artificial Sequence: Synthetic oligonucleotide
ucuuggccucggaagaccc

SEQ ID NO: 1325209 - RNA, 19 nt, Artificial Sequence
  Description of Artificial Sequence: Synthetic oligonucleotide
guaaugggcaauggcauug

SEQ ID NO: 1325210 - RNA, 19 nt, Artificial Sequence
  Description of Artificial Sequence: Synthetic oligonucleotide
gaagguacucuugggcagg

SEQ ID NO: 1325211 - RNA, 19 nt, Artificial Sequence
  Description of Artificial Sequence: Synthetic oligonucleotide
gcauaaaaggcauaccgca

SEQ ID NO: 1325212 - RNA, 19 nt, Artificial Sequence
  Description of Artificial Sequence: Synthetic oligonucleotide
uuccgcuuaaacucaucca

SEQ ID NO: 1325213 - RNA, 19 nt, Artificial Sequence
  Description of Artificial Sequence: Synthetic oligonucleotide
agcuaggugauggcaagac

SEQ ID NO: 1325214 - RNA, 19 nt, Artificial Sequence
  Description of Artificial Sequence: Synthetic oligonucleotide
ucgugaacccuuuucuuuc

SEQ ID NO: 1325215 - RNA, 19 nt, Artificial Sequence
  Description of Artificial Sequence: Synthetic oligonucleotide
caacugugauaucagccag

SEQ ID NO: 1325216 - RNA, 19 nt, Artificial Sequence
  Description of Artificial Sequence: Synthetic oligonucleotide
guauacgacucguagucca

SEQ ID NO: 1325217 - RNA, 19 nt, Artificial Sequence
  Description of Artificial Sequence: Synthetic oligonucleotide
uauacgacucguaguccac

SEQ ID NO: 1325218 - RNA, 19 nt, Artificial Sequence
  Description of Artificial Sequence: Synthetic oligonucleotide
gaaccaucgguugguauug

SEQ ID NO: 1325219 - RNA, 19 nt, Artificial Sequence
  Description of Artificial Sequence: Synthetic oligonucleotide
aagaccgcccugaacuggg

SEQ ID NO: 1325220 - RNA, 19 nt, Artificial Sequence
  Description of Artificial Sequence: Synthetic oligonucleotide
gacccaaacgccagaaaug

SEQ ID NO: 1325221 - RNA, 19 nt, Artificial Sequence
  Description of Artificial Sequence: Synthetic oligonucleotide
ugguauuggggaaggccug

SEQ ID NO: 1325222 - RNA, 19 nt, Artificial Sequence
  Description of Artificial Sequence: Synthetic oligonucleotide
uaaggaaccaucgguuggu

SEQ ID NO: 1325223 - RNA, 19 nt, Artificial Sequence
  Description of Artificial Sequence: Synthetic oligonucleotide
aacgccagaaauggagcug

SEQ ID NO: 1325224 - RNA, 19 nt, Artificial Sequence
  Description of Artificial Sequence: Synthetic oligonucleotide
aaggccugacgaaaagaag

SEQ ID NO: 1325225 - RNA, 19 nt, Artificial Sequence
  Description of Artificial Sequence: Synthetic oligonucleotide
agcacgcggaccugagccc

SEQ ID NO: 1325226 - RNA, 19 nt, Artificial Sequence
  Description of Artificial Sequence: Synthetic oligonucleotide
ucgaaccaaggucuggguc

SEQ ID NO: 1325227 - RNA, 19 nt, Artificial Sequence
  Description of Artificial Sequence: Synthetic oligonucleotide
caucccagugaugagguug

SEQ ID NO: 1325228 - RNA, 19 nt, Artificial Sequence
  Description of Artificial Sequence: Synthetic oligonucleotide
agcgaggacggcauaaaag

SEQ ID NO: 1325229 - RNA, 19 nt, Artificial Sequence
  Description of Artificial Sequence: Synthetic oligonucleotide
aggaaacuuucugagaaau

SEQ ID NO: 1325230 - RNA, 19 nt, Artificial Sequence
  Description of Artificial Sequence: Synthetic oligonucleotide
acagccguacggaaacagc

SEQ ID NO: 1325231 - RNA, 19 nt, Artificial Sequence
  Description of Artificial Sequence: Synthetic oligonucleotide
cacagaagggugcagacaa

SEQ ID NO: 1325232 - RNA, 19 nt, Artificial Sequence
  Description of Artificial Sequence: Synthetic oligonucleotide
gaagcgguacucagcauac

SEQ ID NO: 1325233 - RNA, 19 nt, Artificial Sequence
  Description of Artificial Sequence: Synthetic oligonucleotide
aaguaagccgccagggaga

SEQ ID NO: 1325234 - RNA, 19 nt, Artificial Sequence
  Description of Artificial Sequence: Synthetic oligonucleotide
accaucgguugguauuggg

SEQ ID NO: 1325235 - RNA, 19 nt, Artificial Sequence
  Description of Artificial Sequence: Synthetic oligonucleotide
gaggacggcauaaaaggca

SEQ ID NO: 1325236 - RNA, 19 nt, Artificial Sequence
  Description of Artificial Sequence: Synthetic oligonucleotide
uaagaccugcuuguagagc

SEQ ID NO: 1325237 - RNA, 19 nt, Artificial Sequence
  Description of Artificial Sequence: Synthetic oligonucleotide
uugcuuacguaaugggcaa

SEQ ID NO: 1325238 - RNA, 19 nt, Artificial Sequence
  Description of Artificial Sequence: Synthetic oligonucleotide
auuggaguacuuccgcuua

SEQ ID NO: 1325239 - RNA, 19 nt, Artificial Sequence
  Description of Artificial Sequence: Synthetic oligonucleotide
aucgcuggaacaucccagu

SEQ ID NO: 1325240 - RNA, 19 nt, Artificial Sequence
  Description of Artificial Sequence: Synthetic oligonucleotide
aguaagccgccagggagac

SEQ ID NO: 1325241 - RNA, 19 nt, Artificial Sequence
  Description of Artificial Sequence: Synthetic oligonucleotide
ccauguauacgacucguag

SEQ ID NO: 1325242 - RNA, 19 nt, Artificial Sequence
  Description of Artificial Sequence: Synthetic oligonucleotide
ggauauguguacagggucc

SEQ ID NO: 1325243 - RNA, 19 nt, Artificial Sequence
  Description of Artificial Sequence: Synthetic oligonucleotide
ucuccucgcuaccaggauc

SEQ ID NO: 1325244 - RNA, 19 nt, Artificial Sequence
  Description of Artificial Sequence: Synthetic oligonucleotide
cggcauaaaaggcauaccg

SEQ ID NO: 1325245 - RNA, 19 nt, Artificial Sequence
  Description of Artificial Sequence: Synthetic oligonucleotide
caaagcucacccacugcac

SEQ ID NO: 1325246 - RNA, 19 nt, Artificial Sequence
  Description of Artificial Sequence: Synthetic oligonucleotide
ucgguugguauuggggaag

SEQ ID NO: 1325247 - RNA, 19 nt, Artificial Sequence
  Description of Artificial Sequence: Synthetic oligonucleotide
augacacuagcaaaggcau

SEQ ID NO: 1325248 - RNA, 19 nt, Artificial Sequence
  Description of Artificial Sequence: Synthetic oligonucleotide
aagcgguacucagcauacc

SEQ ID NO: 1325249 - RNA, 19 nt, Artificial Sequence
  Description of Artificial Sequence: Synthetic oligonucleotide
ugucggugcugccgcaaag

SEQ ID NO: 1325250 - RNA, 19 nt, Artificial Sequence
  Description of Artificial Sequence: Synthetic oligonucleotide
gacagccguacggaaacag

SEQ ID NO: 1325251 - RNA, 19 nt, Artificial Sequence
  Description of Artificial Sequence: Synthetic oligonucleotide
acagcggccggaaagcgag

SEQ ID NO: 1325252 - RNA, 19 nt, Artificial Sequence
  Description of Artificial Sequence: Synthetic oligonucleotide
aagcgaggacggcauaaaa

SEQ ID NO: 1325253 - RNA, 19 nt, Artificial Sequence
  Description of Artificial Sequence: Synthetic oligonucleotide
caggugagcaaaggggucc

SEQ ID NO: 1325254 - RNA, 19 nt, Artificial Sequence
  Description of Artificial Sequence: Synthetic oligonucleotide
uaaugggcaauggcauugc

SEQ ID NO: 1325255 - RNA, 19 nt, Artificial Sequence
  Description of Artificial Sequence: Synthetic oligonucleotide
agccccgcuguacugagca

SEQ ID NO: 1325256 - RNA, 19 nt, Artificial Sequence
  Description of Artificial Sequence: Synthetic oligonucleotide
aguccaccugccaaucugg

SEQ ID NO: 1325257 - RNA, 19 nt, Artificial Sequence
  Description of Artificial Sequence: Synthetic oligonucleotide
ugcugccgcaaaguaagcc

SEQ ID NO: 1325258 - RNA, 19 nt, Artificial Sequence
  Description of Artificial Sequence: Synthetic oligonucleotide
uucucuucucgugaacccu

SEQ ID NO: 1325259 - RNA, 19 nt, Artificial Sequence
  Description of Artificial Sequence: Synthetic oligonucleotide
gacucagcggaaaggcaag

SEQ ID NO: 1325260 - RNA, 19 nt, Artificial Sequence
  Description of Artificial Sequence: Synthetic oligonucleotide
cagggaagcgguacucagc

SEQ ID NO: 1325261 - RNA, 19 nt, Artificial Sequence
  Description of Artificial Sequence: Synthetic oligonucleotide
ccaucgguugguauugggg

SEQ ID NO: 1325262 - RNA, 19 nt, Artificial Sequence
  Description of Artificial Sequence: Synthetic oligonucleotide
agguugcaacucaugaaag

SEQ ID NO: 1325263 - RNA, 19 nt, Artificial Sequence
  Description of Artificial Sequence: Synthetic oligonucleotide
ggaugacacuagcaaaggc

SEQ ID NO: 1325264 - RNA, 19 nt, Artificial Sequence
  Description of Artificial Sequence: Synthetic oligonucleotide
aaagcgaggacggcauaaa

SEQ ID NO: 1325265 - RNA, 19 nt, Artificial Sequence
  Description of Artificial Sequence: Synthetic oligonucleotide
gcagacaacugugauauca

SEQ ID NO: 1325266 - RNA, 19 nt, Artificial Sequence
  Description of Artificial Sequence: Synthetic oligonucleotide
uuuccgccauguauacgac

SEQ ID NO: 1325267 - RNA, 19 nt, Artificial Sequence
  Description of Artificial Sequence: Synthetic oligonucleotide
aggugauggcaagacaugu

SEQ ID NO: 1325268 - RNA, 19 nt, Artificial Sequence
  Description of Artificial Sequence: Synthetic oligonucleotide
ucgcuggaacaucccagug

SEQ ID NO: 1325269 - RNA, 19 nt, Artificial Sequence
  Description of Artificial Sequence: Synthetic oligonucleotide
ugagccccgcuguacugag

SEQ ID NO: 1325270 - RNA, 19 nt, Artificial Sequence
  Description of Artificial Sequence: Synthetic oligonucleotide
ugccgcaaaguaagccgcc

SEQ ID NO: 1325271 - RNA, 19 nt, Artificial Sequence
  Description of Artificial Sequence: Synthetic oligonucleotide
guacucuugggcaggugag

SEQ ID NO: 1325272 - RNA, 19 nt, Artificial Sequence
  Description of Artificial Sequence: Synthetic oligonucleotide
agguggggaacacccaggu

SEQ ID NO: 1325273 - RNA, 19 nt, Artificial Sequence
  Description of Artificial Sequence: Synthetic oligonucleotide
agaucuugccuugauugaa

SEQ ID NO: 1325274 - RNA, 19 nt, Artificial Sequence
  Description of Artificial Sequence: Synthetic oligonucleotide
aaccaucgguugguauugg

SEQ ID NO: 1325275 - RNA, 19 nt, Artificial Sequence
  Description of Artificial Sequence: Synthetic oligonucleotide
uuggaguacuuccgcuuaa

SEQ ID NO: 1325276 - RNA, 19 nt, Artificial Sequence
  Description of Artificial Sequence: Synthetic oligonucleotide
cagcauaccacagggacca

SEQ ID NO: 1325277 - RNA, 19 nt, Artificial Sequence
  Description of Artificial Sequence: Synthetic oligonucleotide
uggaagugggguggugcgg

SEQ ID NO: 1325278 - RNA, 19 nt, Artificial Sequence
  Description of Artificial Sequence: Synthetic oligonucleotide
cauguauacgacucguagu

SEQ ID NO: 1325279 - RNA, 19 nt, Artificial Sequence
  Description of Artificial Sequence: Synthetic oligonucleotide
uacggaaacagcggccgga

SEQ ID NO: 1325280 - RNA, 19 nt, Artificial Sequence
  Description of Artificial Sequence: Synthetic oligonucleotide
caguuuccgccauguauac

SEQ ID NO: 1325281 - RNA, 19 nt, Artificial Sequence
  Description of Artificial Sequence: Synthetic oligonucleotide
ggcugguuaaugcagguaa

SEQ ID NO: 1325282 - RNA, 19 nt, Artificial Sequence
  Description of Artificial Sequence: Synthetic oligonucleotide
ugcucacacucguccaucu

SEQ ID NO: 1325283 - RNA, 19 nt, Artificial Sequence
  Description of Artificial Sequence: Synthetic oligonucleotide
ggcaagacauguucacuug

SEQ ID NO: 1325284 - RNA, 19 nt, Artificial Sequence
  Description of Artificial Sequence: Synthetic oligonucleotide
caagacauguucacuugaa

SEQ ID NO: 1325285 - RNA, 19 nt, Artificial Sequence
  Description of Artificial Sequence: Synthetic oligonucleotide
cugacgaaaagaaggcucu

SEQ ID NO: 1325286 - RNA, 19 nt, Artificial Sequence
  Description of Artificial Sequence: Synthetic oligonucleotide
cugccaaucuggacucagc

SEQ ID NO: 1325287 - RNA, 19 nt, Artificial Sequence
  Description of Artificial Sequence: Synthetic oligonucleotide
uuggggaaggccugacgaa

SEQ ID NO: 1325288 - RNA, 19 nt, Artificial Sequence
  Description of Artificial Sequence: Synthetic oligonucleotide
aguuuccgccauguauacg

SEQ ID NO: 1325289 - RNA, 19 nt, Artificial Sequence
  Description of Artificial Sequence: Synthetic oligonucleotide
acucuugggcaggugagca

SEQ ID NO: 1325290 - RNA, 19 nt, Artificial Sequence
  Description of Artificial Sequence: Synthetic oligonucleotide
gacgaaaagaaggcucuaa

SEQ ID NO: 1325291 - RNA, 19 nt, Artificial Sequence
  Description of Artificial Sequence: Synthetic oligonucleotide
guacggaaacagcggccgg

SEQ ID NO: 1325292 - RNA, 19 nt, Artificial Sequence
  Description of Artificial Sequence: Synthetic oligonucleotide
agccguacggaaacagcgg

SEQ ID NO: 1325293 - RNA, 19 nt, Artificial Sequence
  Description of Artificial Sequence: Synthetic oligonucleotide
uaccgcacgacaguuccgu

SEQ ID NO: 1325294 - RNA, 19 nt, Artificial Sequence
  Description of Artificial Sequence: Synthetic oligonucleotide
gaaagcgaggacggcauaa

SEQ ID NO: 1325295 - RNA, 19 nt, Artificial Sequence
  Description of Artificial Sequence: Synthetic oligonucleotide
aggcauaccgcacgacagu

SEQ ID NO: 1325296 - RNA, 19 nt, Artificial Sequence
  Description of Artificial Sequence: Synthetic oligonucleotide
cagggucacucgcucaccc

SEQ ID NO: 1325297 - RNA, 19 nt, Artificial Sequence
  Description of Artificial Sequence: Synthetic oligonucleotide
gaagguccucauugcuuac

SEQ ID NO: 1325298 - RNA, 19 nt, Artificial Sequence
  Description of Artificial Sequence: Synthetic oligonucleotide
acguaaugggcaauggcau

SEQ ID NO: 1325299 - RNA, 19 nt, Artificial Sequence
  Description of Artificial Sequence: Synthetic oligonucleotide
ggaacaucccagugaugag

SEQ ID NO: 1325300 - RNA, 19 nt, Artificial Sequence
  Description of Artificial Sequence: Synthetic oligonucleotide
uuccgccauguauacgacu

SEQ ID NO: 1325301 - RNA, 19 nt, Artificial Sequence
  Description of Artificial Sequence: Synthetic oligonucleotide
gggacagccguacggaaac

SEQ ID NO: 1325302 - RNA, 19 nt, Artificial Sequence
  Description of Artificial Sequence: Synthetic oligonucleotide
gccucggaagacccaaacg

SEQ ID NO: 1325303 - RNA, 19 nt, Artificial Sequence
  Description of Artificial Sequence: Synthetic oligonucleotide
gaggaacgaugucacuguc

SEQ ID NO: 1325304 - RNA, 19 nt, Artificial Sequence
  Description of Artificial Sequence: Synthetic oligonucleotide
gcagcuaggugauggcaag

SEQ ID NO: 1325305 - RNA, 19 nt, Artificial Sequence
  Description of Artificial Sequence: Synthetic oligonucleotide
gugauuccgcagagaaagg

SEQ ID NO: 1325306 - RNA, 19 nt, Artificial Sequence
  Description of Artificial Sequence: Synthetic oligonucleotide
cagguaaggaaccaucggu

SEQ ID NO: 1325307 - RNA, 19 nt, Artificial Sequence
  Description of Artificial Sequence: Synthetic oligonucleotide
agguaaggaaccaucgguu

SEQ ID NO: 1325308 - RNA, 19 nt, Artificial Sequence
  Description of Artificial Sequence: Synthetic oligonucleotide
gaagacccaaacgccagaa

SEQ ID NO: 1325309 - RNA, 19 nt, Artificial Sequence
  Description of Artificial Sequence: Synthetic oligonucleotide
ucggugcugccgcaaagua

SEQ ID NO: 1325310 - RNA, 19 nt, Artificial Sequence
  Description of Artificial Sequence: Synthetic oligonucleotide
caaucgcuggaacauccca

SEQ ID NO: 1325311 - RNA, 19 nt, Artificial Sequence
  Description of Artificial Sequence: Synthetic oligonucleotide
aggacggcauaaaaggcau

SEQ ID NO: 1325312 - RNA, 19 nt, Artificial Sequence
  Description of Artificial Sequence: Synthetic oligonucleotide
ggaagcgguacucagcaua

SEQ ID NO: 1325313 - RNA, 19 nt, Artificial Sequence
  Description of Artificial Sequence: Synthetic oligonucleotide
uacuuccgcuuaaacucau

SEQ ID NO: 1325314 - RNA, 19 nt, Artificial Sequence
  Description of Artificial Sequence: Synthetic oligonucleotide
uuggccucggaagacccaa

SEQ ID NO: 1325315 - RNA, 19 nt, Artificial Sequence
  Description of Artificial Sequence: Synthetic oligonucleotide
aacagcggccggaaagcga

SEQ ID NO: 1325316 - RNA, 19 nt, Artificial Sequence
  Description of Artificial Sequence: Synthetic oligonucleotide
aagaaggcucuaagaccug

SEQ ID NO: 1325317 - RNA, 19 nt, Artificial Sequence
  Description of Artificial Sequence: Synthetic oligonucleotide
acgacucguaguccaccug

SEQ ID NO: 1325318 - RNA, 19 nt, Artificial Sequence
  Description of Artificial Sequence: Synthetic oligonucleotide
cucgcuaccaggauccagu

SEQ ID NO: 1325319 - RNA, 19 nt, Artificial Sequence
  Description of Artificial Sequence: Synthetic oligonucleotide
aggaaccaucgguugguau

SEQ ID NO: 1325320 - RNA, 19 nt, Artificial Sequence
  Description of Artificial Sequence: Synthetic oligonucleotide
aggaacgaugucacuguca

SEQ ID NO: 1325321 - RNA, 19 nt, Artificial Sequence
  Description of Artificial Sequence: Synthetic oligonucleotide
gcuuacguaaugggcaaug

SEQ ID NO: 1325322 - RNA, 19 nt, Artificial Sequence
  Description of Artificial Sequence: Synthetic oligonucleotide
aagguacucuugggcaggu

SEQ ID NO: 1325323 - RNA, 19 nt, Artificial Sequence
  Description of Artificial Sequence: Synthetic oligonucleotide
acacuagcaaaggcauucu

SEQ ID NO: 1325324 - RNA, 19 nt, Artificial Sequence
  Description of Artificial Sequence: Synthetic oligonucleotide
gccguacggaaacagcggc

SEQ ID NO: 1325325 - RNA, 19 nt, Artificial Sequence
  Description of Artificial Sequence: Synthetic oligonucleotide
caggauauguguacagggu

SEQ ID NO: 1325326 - RNA, 19 nt, Artificial Sequence
  Description of Artificial Sequence: Synthetic oligonucleotide
gaaccaaggucugggucuc

SEQ ID NO: 1325327 - RNA, 19 nt, Artificial Sequence
  Description of Artificial Sequence: Synthetic oligonucleotide
gggaaggccugacgaaaag

SEQ ID NO: 1325328 - RNA, 19 nt, Artificial Sequence
  Description of Artificial Sequence: Synthetic oligonucleotide
agcgccacagacacugugu

SEQ ID NO: 1325329 - RNA, 19 nt, Artificial Sequence
  Description of Artificial Sequence: Synthetic oligonucleotide
accgcacgacaguuccguc

SEQ ID NO: 1325330 - RNA, 19 nt, Artificial Sequence
  Description of Artificial Sequence: Synthetic oligonucleotide
acuuccgcuuaaacucauc

SEQ ID NO: 1325331 - RNA, 19 nt, Artificial Sequence
  Description of Artificial Sequence: Synthetic oligonucleotide
gguaaggggacagccguac

SEQ ID NO: 1325332 - RNA, 19 nt, Artificial Sequence
  Description of Artificial Sequence: Synthetic oligonucleotide
ucucccuugcaggguaggu

SEQ ID NO: 1325333 - RNA, 19 nt, Artificial Sequence
  Description of Artificial Sequence: Synthetic oligonucleotide
gagagcacgcggaccugag

SEQ ID NO: 1325334 - RNA, 19 nt, Artificial Sequence
  Description of Artificial Sequence: Synthetic oligonucleotide
gcugguuaaugcagguaag

SEQ ID NO: 1325335 - RNA, 19 nt, Artificial Sequence
  Description of Artificial Sequence: Synthetic oligonucleotide
gucacucgcucacccacca

SEQ ID NO: 1325336 - RNA, 19 nt, Artificial Sequence
  Description of Artificial Sequence: Synthetic oligonucleotide
ggcucuaagaccugcuugu

SEQ ID NO: 1325337 - RNA, 19 nt, Artificial Sequence
  Description of Artificial Sequence: Synthetic oligonucleotide
agggucacucgcucaccca

SEQ ID NO: 1325338 - RNA, 19 nt, Artificial Sequence
  Description of Artificial Sequence: Synthetic oligonucleotide
gcaacucaugaaagucugg

SEQ ID NO: 1325339 - RNA, 19 nt, Artificial Sequence
  Description of Artificial Sequence: Synthetic oligonucleotide
ugagggccuugaaggcucu

SEQ ID NO: 1325340 - RNA, 19 nt, Artificial Sequence
  Description of Artificial Sequence: Synthetic oligonucleotide
gaccugcuuguagagccac

SEQ ID NO: 1325341 - RNA, 19 nt, Artificial Sequence
  Description of Artificial Sequence: Synthetic oligonucleotide
cguacggaaacagcggccg

SEQ ID NO: 1325342 - RNA, 19 nt, Artificial Sequence
  Description of Artificial Sequence: Synthetic oligonucleotide
guucuuggccucggaagac

SEQ ID NO: 1325343 - RNA, 19 nt, Artificial Sequence
  Description of Artificial Sequence: Synthetic oligonucleotide
uuccacgaagguccucauu

SEQ ID NO: 1325344 - RNA, 19 nt, Artificial Sequence
  Description of Artificial Sequence: Synthetic oligonucleotide
gggucacucgcucacccac

SEQ ID NO: 1325345 - RNA, 19 nt, Artificial Sequence
  Description of Artificial Sequence: Synthetic oligonucleotide
cccgcuguacugagcagcg

SEQ ID NO: 1325346 - RNA, 19 nt, Artificial Sequence
  Description of Artificial Sequence: Synthetic oligonucleotide
ccaguuuccgccauguaua

SEQ ID NO: 1325347 - RNA, 19 nt, Artificial Sequence
  Description of Artificial Sequence: Synthetic oligonucleotide
ggccggaaagcgaggacgg

SEQ ID NO: 1325348 - RNA, 19 nt, Artificial Sequence
  Description of Artificial Sequence: Synthetic oligonucleotide
cgaggacggcauaaaaggc

SEQ ID NO: 1325349 - RNA, 19 nt, Artificial Sequence
  Description of Artificial Sequence: Synthetic oligonucleotide
auaccgcacgacaguuccg

SEQ ID NO: 1325350 - RNA, 19 nt, Artificial Sequence
  Description of Artificial Sequence: Synthetic oligonucleotide
ccgcuuaaacucauccaac

SEQ ID NO: 1325351 - RNA, 19 nt, Artificial Sequence
  Description of Artificial Sequence: Synthetic oligonucleotide
ggccuugaaggcucuccag

SEQ ID NO: 1325352 - RNA, 19 nt, Artificial Sequence
  Description of Artificial Sequence: Synthetic oligonucleotide
ccucauugcuuacguaaug

SEQ ID NO: 1325353 - RNA, 19 nt, Artificial Sequence
  Description of Artificial Sequence: Synthetic oligonucleotide
ccaaucgcuggaacauccc

SEQ ID NO: 1325354 - RNA, 19 nt, Artificial Sequence
  Description of Artificial Sequence: Synthetic oligonucleotide
ggaggaacgaugucacugu

SEQ ID NO: 1325355 - RNA, 19 nt, Artificial Sequence
  Description of Artificial Sequence: Synthetic oligonucleotide
cgacucguaguccaccugc

SEQ ID NO: 1325356 - RNA, 19 nt, Artificial Sequence
  Description of Artificial Sequence: Synthetic oligonucleotide
ccacgaagguccucauugc

SEQ ID NO: 1325357 - RNA, 19 nt, Artificial Sequence
  Description of Artificial Sequence: Synthetic oligonucleotide
gguggugcggagagcacgc

SEQ ID NO: 1325358 - RNA, 19 nt, Artificial Sequence
  Description of Artificial Sequence: Synthetic oligonucleotide
ggaaccaucgguugguauu

SEQ ID NO: 1325359 - RNA, 19 nt, Artificial Sequence
  Description of Artificial Sequence: Synthetic oligonucleotide
ucgcuaccaggauccaguu

SEQ ID NO: 1325360 - RNA, 19 nt, Artificial Sequence
  Description of Artificial Sequence: Synthetic oligonucleotide
guauuggggaaggccugac

SEQ ID NO: 1325361 - RNA, 19 nt, Artificial Sequence
  Description of Artificial Sequence: Synthetic oligonucleotide
cucgugaacccuuuucuuu

SEQ ID NO: 1325362 - RNA, 19 nt, Artificial Sequence
  Description of Artificial Sequence: Synthetic oligonucleotide
aggugagcaaagggguccu

SEQ ID NO: 1325363 - RNA, 19 nt, Artificial Sequence
  Description of Artificial Sequence: Synthetic oligonucleotide
cauccaacacgaagguacu

SEQ ID NO: 1325364 - RNA, 19 nt, Artificial Sequence
  Description of Artificial Sequence: Synthetic oligonucleotide
ucacucgcucacccaccaa

SEQ ID NO: 1325365 - RNA, 19 nt, Artificial Sequence
  Description of Artificial Sequence: Synthetic oligonucleotide
ccacaugcuggaaggcccc

SEQ ID NO: 1325366 - RNA, 19 nt, Artificial Sequence
  Description of Artificial Sequence: Synthetic oligonucleotide
ccguacggaaacagcggcc

SEQ ID NO: 1325367 - RNA, 19 nt, Artificial Sequence
  Description of Artificial Sequence: Synthetic oligonucleotide
gaccugagccccgcuguac

SEQ ID NO: 1325368 - RNA, 19 nt, Artificial Sequence
  Description of Artificial Sequence: Synthetic oligonucleotide
cacgcggaccugagccccg

SEQ ID NO: 1325369 - RNA, 19 nt, Artificial Sequence
  Description of Artificial Sequence: Synthetic oligonucleotide
ugcuuacguaaugggcaau

SEQ ID NO: 1325370 - RNA, 19 nt, Artificial Sequence
  Description of Artificial Sequence: Synthetic oligonucleotide
cagaagggugcagacaacu

SEQ ID NO: 1325371 - RNA, 19 nt, Artificial Sequence
  Description of Artificial Sequence: Synthetic oligonucleotide
ggaagacccaaacgccaga

SEQ ID NO: 1325372 - RNA, 19 nt, Artificial Sequence
  Description of Artificial Sequence: Synthetic oligonucleotide
cgugaacccuuuucuuucc

SEQ ID NO: 1325373 - RNA, 19 nt, Artificial Sequence
  Description of Artificial Sequence: Synthetic oligonucleotide
ccauggugauuccgcagag

SEQ ID NO: 1325374 - RNA, 19 nt, Artificial Sequence
  Description of Artificial Sequence: Synthetic oligonucleotide
agcggccggaaagcgagga

SEQ ID NO: 1325375 - RNA, 19 nt, Artificial Sequence
  Description of Artificial Sequence: Synthetic oligonucleotide
gaaauucaggggugcgguu

SEQ ID NO: 1325376 - RNA, 19 nt, Artificial Sequence
  Description of Artificial Sequence: Synthetic oligonucleotide
ggccucggaagacccaaac

SEQ ID NO: 1325377 - RNA, 19 nt, Artificial Sequence
  Description of Artificial Sequence: Synthetic oligonucleotide
cugcuuguagagccacaga

SEQ ID NO: 1325378 - RNA, 19 nt, Artificial Sequence
  Description of Artificial Sequence: Synthetic oligonucleotide
cuuggccucggaagaccca

SEQ ID NO: 1325379 - RNA, 19 nt, Artificial Sequence
  Description of Artificial Sequence: Synthetic oligonucleotide
cauggugauuccgcagaga

SEQ ID NO: 1325380 - RNA, 19 nt, Artificial Sequence
  Description of Artificial Sequence: Synthetic oligonucleotide
ccaagaccgcccugaacug

SEQ ID NO: 1325381 - RNA, 19 nt, Artificial Sequence
  Description of Artificial Sequence: Synthetic oligonucleotide
cggaagacccaaacgccag

SEQ ID NO: 1325382 - RNA, 19 nt, Artificial Sequence
  Description of Artificial Sequence: Synthetic oligonucleotide
ggugcggagagcacgcgga

SEQ ID NO: 1325383 - RNA, 19 nt, Artificial Sequence
  Description of Artificial Sequence: Synthetic oligonucleotide
ccagaaauggagcugcuau

SEQ ID NO: 1325384 - RNA, 19 nt, Artificial Sequence
  Description of Artificial Sequence: Synthetic oligonucleotide
ggugcaugaugcccaaggu

SEQ ID NO: 1325385 - RNA, 19 nt, Artificial Sequence
  Description of Artificial Sequence: Synthetic oligonucleotide
uggccucggaagacccaaa

SEQ ID NO: 1325386 - RNA, 19 nt, Artificial Sequence
  Description of Artificial Sequence: Synthetic oligonucleotide
gugcggagagcacgcggac

SEQ ID NO: 1325387 - RNA, 19 nt, Artificial Sequence
  Description of Artificial Sequence: Synthetic oligonucleotide
cacgaagguccucauugcu

SEQ ID NO: 1325388 - RNA, 19 nt, Artificial Sequence
  Description of Artificial Sequence: Synthetic oligonucleotide
gguauuggggaaggccuga

SEQ ID NO: 1325389 - RNA, 19 nt, Artificial Sequence
  Description of Artificial Sequence: Synthetic oligonucleotide
agggaccagccauccuuau

SEQ ID NO: 1325390 - RNA, 19 nt, Artificial Sequence
  Description of Artificial Sequence: Synthetic oligonucleotide
acgcggaccugagccccgc

SEQ ID NO: 1325391 - RNA, 19 nt, Artificial Sequence
  Description of Artificial Sequence: Synthetic oligonucleotide
gcgguacucagcauaccac

SEQ ID NO: 1325392 - RNA, 19 nt, Artificial Sequence
  Description of Artificial Sequence: Synthetic oligonucleotide
ccaccugccaaucuggacu

SEQ ID NO: 1325393 - RNA, 19 nt, Artificial Sequence
  Description of Artificial Sequence: Synthetic oligonucleotide
guggugcggagagcacgcg

SEQ ID NO: 1325394 - RNA, 19 nt, Artificial Sequence
  Description of Artificial Sequence: Synthetic oligonucleotide
caguggccuguuuguugug

SEQ ID NO: 1325395 - RNA, 19 nt, Artificial Sequence
  Description of Artificial Sequence: Synthetic oligonucleotide
ccgccauguauacgacucg

SEQ ID NO: 1325396 - RNA, 19 nt, Artificial Sequence
  Description of Artificial Sequence: Synthetic oligonucleotide
guaguccaccugccaaucu

SEQ ID NO: 1325397 - RNA, 19 nt, Artificial Sequence
  Description of Artificial Sequence: Synthetic oligonucleotide
ccgcaaaguaagccgccag

SEQ ID NO: 1325398 - RNA, 19 nt, Artificial Sequence
  Description of Artificial Sequence: Synthetic oligonucleotide
agaccgcccugaacugggg

SEQ ID NO: 1325399 - RNA, 19 nt, Artificial Sequence
  Description of Artificial Sequence: Synthetic oligonucleotide
cagcggccggaaagcgagg

SEQ ID NO: 1325400 - RNA, 19 nt, Artificial Sequence
  Description of Artificial Sequence: Synthetic oligonucleotide
gcgccacagacacuguguc

SEQ ID NO: 1325401 - RNA, 19 nt, Artificial Sequence
  Description of Artificial Sequence: Synthetic oligonucleotide
ggucacucgcucacccacc

SEQ ID NO: 1325402 - RNA, 19 nt, Artificial Sequence
  Description of Artificial Sequence: Synthetic oligonucleotide
gccuugaaggcucuccagu

SEQ ID NO: 1325403 - RNA, 19 nt, Artificial Sequence
  Description of Artificial Sequence: Synthetic oligonucleotide
cggccggaaagcgaggacg

SEQ ID NO: 1325404 - RNA, 19 nt, Artificial Sequence
  Description of Artificial Sequence: Synthetic oligonucleotide
guacagggucccagccgcc

SEQ ID NO: 1325405 - RNA, 19 nt, Artificial Sequence
  Description of Artificial Sequence: Synthetic oligonucleotide
ccccgcuguacugagcagc

SEQ ID NO: 1325406 - RNA, 19 nt, Artificial Sequence
  Description of Artificial Sequence: Synthetic oligonucleotide
uccucgcuaccaggaucca

SEQ ID NO: 1325407 - RNA, 19 nt, Artificial Sequence
  Description of Artificial Sequence: Synthetic oligonucleotide
cgaagguccucauugcuua

SEQ ID NO: 1325408 - RNA, 19 nt, Artificial Sequence
  Description of Artificial Sequence: Synthetic oligonucleotide
cgaaccaaggucugggucu

SEQ ID NO: 1325409 - RNA, 19 nt, Artificial Sequence
  Description of Artificial Sequence: Synthetic oligonucleotide
cgcacgacaguuccgucuc

SEQ ID NO: 1325410 - RNA, 19 nt, Artificial Sequence
  Description of Artificial Sequence: Synthetic oligonucleotide
guccaccugccaaucugga

SEQ ID NO: 1325411 - RNA, 19 nt, Artificial Sequence
  Description of Artificial Sequence: Synthetic oligonucleotide
ccugagccccgcuguacug

SEQ ID NO: 1325412 - RNA, 19 nt, Artificial Sequence
  Description of Artificial Sequence: Synthetic oligonucleotide
gucggugcugccgcaaagu

SEQ ID NO: 1325413 - RNA, 19 nt, Artificial Sequence
  Description of Artificial Sequence: Synthetic oligonucleotide
gcggaccugagccccgcug

SEQ ID NO: 1325414 - RNA, 19 nt, Artificial Sequence
  Description of Artificial Sequence: Synthetic oligonucleotide
gcacgcggaccugagcccc

SEQ ID NO: 1325415 - RNA, 19 nt, Artificial Sequence
  Description of Artificial Sequence: Synthetic oligonucleotide
gagccccgcuguacugagc

SEQ ID NO: 1325416 - RNA, 19 nt, Artificial Sequence
  Description of Artificial Sequence: Synthetic oligonucleotide
cugucggugcugccgcaaa

SEQ ID NO: 1325417 - RNA, 19 nt, Artificial Sequence
  Description of Artificial Sequence: Synthetic oligonucleotide
uccgcucagccuggggcuu

SEQ ID NO: 1325418 - RNA, 19 nt, Artificial Sequence
  Description of Artificial Sequence: Synthetic oligonucleotide
cgcuggaacaucccaguga

SEQ ID NO: 1325419 - RNA, 19 nt, Artificial Sequence
  Description of Artificial Sequence: Synthetic oligonucleotide
gcauaccgcacgacaguuc

SEQ ID NO: 1325420 - RNA, 19 nt, Artificial Sequence
  Description of Artificial Sequence: Synthetic oligonucleotide
ggggaaggccugacgaaaa

SEQ ID NO: 1325421 - RNA, 19 nt, Artificial Sequence
  Description of Artificial Sequence: Synthetic oligonucleotide
gguggggaacacccaggua

SEQ ID NO: 1325422 - RNA, 19 nt, Artificial Sequence
  Description of Artificial Sequence: Synthetic oligonucleotide
ggaaagcgaggacggcaua

SEQ ID NO: 1325423 - RNA, 19 nt, Artificial Sequence
  Description of Artificial Sequence: Synthetic oligonucleotide
ccucgcuaccaggauccag

SEQ ID NO: 1325424 - RNA, 19 nt, Artificial Sequence
  Description of Artificial Sequence: Synthetic oligonucleotide
cccaaacgccagaaaugga

SEQ ID NO: 1325425 - RNA, 19 nt, Artificial Sequence
  Description of Artificial Sequence: Synthetic oligonucleotide
gccgcaaaguaagccgcca

SEQ ID NO: 1325426 - RNA, 19 nt, Artificial Sequence
  Description of Artificial Sequence: Synthetic oligonucleotide
cugugauaucagccagggu

SEQ ID NO: 1325427 - RNA, 19 nt, Artificial Sequence
  Description of Artificial Sequence: Synthetic oligonucleotide
ggugauggcaagacauguu

SEQ ID NO: 1325428 - RNA, 19 nt, Artificial Sequence
  Description of Artificial Sequence: Synthetic oligonucleotide
gcggccggaaagcgaggac

SEQ ID NO: 1325429 - RNA, 19 nt, Artificial Sequence
  Description of Artificial Sequence: Synthetic oligonucleotide
guacuuccacgaagguccu

SEQ ID NO: 1325430 - RNA, 19 nt, Artificial Sequence
  Description of Artificial Sequence: Synthetic oligonucleotide
cguaguccaccugccaauc

SEQ ID NO: 1325431 - RNA, 19 nt, Artificial Sequence
  Description of Artificial Sequence: Synthetic oligonucleotide
ggucugggucuccucgcua

SEQ ID NO: 1325432 - RNA, 19 nt, Artificial Sequence
  Description of Artificial Sequence: Synthetic oligonucleotide
cuuccacgaagguccucau

SEQ ID NO: 1325433 - RNA, 19 nt, Artificial Sequence
  Description of Artificial Sequence: Synthetic oligonucleotide
gccggaaagcgaggacggc

SEQ ID NO: 1325434 - RNA, 19 nt, Artificial Sequence
  Description of Artificial Sequence: Synthetic oligonucleotide
cucagcggaaaggcaaguu

SEQ ID NO: 1325435 - RNA, 19 nt, Artificial Sequence
  Description of Artificial Sequence: Synthetic oligonucleotide
gccugacgaaaagaaggcu

SEQ ID NO: 1325436 - RNA, 19 nt, Artificial Sequence
  Description of Artificial Sequence: Synthetic oligonucleotide
cagcgaugagggccuugaa

SEQ ID NO: 1325437 - RNA, 19 nt, Artificial Sequence
  Description of Artificial Sequence: Synthetic oligonucleotide
ggacagccguacggaaaca

SEQ ID NO: 1325438 - RNA, 19 nt, Artificial Sequence
  Description of Artificial Sequence: Synthetic oligonucleotide
ggcauaccgcacgacaguu

SEQ ID NO: 1325439 - RNA, 19 nt, Artificial Sequence
  Description of Artificial Sequence: Synthetic oligonucleotide
gcucuaagaccugcuugua

SEQ ID NO: 1325440 - RNA, 19 nt, Artificial Sequence
  Description of Artificial Sequence: Synthetic oligonucleotide
ccgcccugaacuggggcug

SEQ ID NO: 1325441 - RNA, 19 nt, Artificial Sequence
  Description of Artificial Sequence: Synthetic oligonucleotide
cacagggaccagccauccu

SEQ ID NO: 1325442 - RNA, 19 nt, Artificial Sequence
  Description of Artificial Sequence: Synthetic oligonucleotide
ccgcacgacaguuccgucu

SEQ ID NO: 1325443 - RNA, 19 nt, Artificial Sequence
  Description of Artificial Sequence: Synthetic oligonucleotide
cggaaagcgaggacggcau

SEQ ID NO: 1325444 - RNA, 19 nt, Artificial Sequence
  Description of Artificial Sequence: Synthetic oligonucleotide
cguaaugggcaauggcauu

SEQ ID NO: 1325445 - RNA, 19 nt, Artificial Sequence
  Description of Artificial Sequence: Synthetic oligonucleotide
ggguaggugcaggcagcua

SEQ ID NO: 1325446 - RNA, 19 nt, Artificial Sequence
  Description of Artificial Sequence: Synthetic oligonucleotide
cggaaacagcggccggaaa

SEQ ID NO: 1325447 - RNA, 19 nt, Artificial Sequence
  Description of Artificial Sequence: Synthetic oligonucleotide
ccgcuguacugagcagcga

SEQ ID NO: 1325448 - RNA, 19 nt, Artificial Sequence
  Description of Artificial Sequence: Synthetic oligonucleotide
cgcuaccaggauccaguuu

SEQ ID NO: 1325449 - RNA, 19 nt, Artificial Sequence
  Description of Artificial Sequence: Synthetic oligonucleotide
cccugaacuggggcugguu

SEQ ID NO: 1325450 - RNA, 19 nt, Artificial Sequence
  Description of Artificial Sequence: Synthetic oligonucleotide
ucuaagaaaagcaugacgu

SEQ ID NO: 1325451 - RNA, 19 nt, Artificial Sequence
  Description of Artificial Sequence: Synthetic oligonucleotide
uguaaauuaaaugugagac

SEQ ID NO: 1325452 - RNA, 19 nt, Artificial Sequence
  Description of Artificial Sequence: Synthetic oligonucleotide
aaaauaauaccugugcagg

SEQ ID NO: 1325453 - RNA, 19 nt, Artificial Sequence
  Description of Artificial Sequence: Synthetic oligonucleotide
aagaacuguaaugauaagc

SEQ ID NO: 1325454 - RNA, 19 nt, Artificial Sequence
  Description of Artificial Sequence: Synthetic oligonucleotide
aaugcagcuguuucguucc

SEQ ID NO: 1325455 - RNA, 19 nt, Artificial Sequence
  Description of Artificial Sequence: Synthetic oligonucleotide
gauccuagaaucuagggug

SEQ ID NO: 1325456 - RNA, 19 nt, Artificial Sequence
  Description of Artificial Sequence: Synthetic oligonucleotide
uaauucaccaugcagguca

SEQ ID NO: 1325457 - RNA, 19 nt, Artificial Sequence
  Description of Artificial Sequence: Synthetic oligonucleotide
aaaagcaugacgucggccu

SEQ ID NO: 1325458 - RNA, 19 nt, Artificial Sequence
  Description of Artificial Sequence: Synthetic oligonucleotide
aaaugcagcuguuucguuc

SEQ ID NO: 1325459 - RNA, 19 nt, Artificial Sequence
  Description of Artificial Sequence: Synthetic oligonucleotide
agaaaguucguucaggacu

SEQ ID NO: 1325460 - RNA, 19 nt, Artificial Sequence
  Description of Artificial Sequence: Synthetic oligonucleotide
accuuaaaauaccaucugc

SEQ ID NO: 1325461 - RNA, 19 nt, Artificial Sequence
  Description of Artificial Sequence: Synthetic oligonucleotide
aauuaaaugugagacaaaa

SEQ ID NO: 1325462 - RNA, 19 nt, Artificial Sequence
  Description of Artificial Sequence: Synthetic oligonucleotide
ucuuucuccucuaagaaaa

SEQ ID NO: 1325463 - RNA, 19 nt, Artificial Sequence
  Description of Artificial Sequence: Synthetic oligonucleotide
gggaaguugauguagaucc

SEQ ID NO: 1325464 - RNA, 19 nt, Artificial Sequence
  Description of Artificial Sequence: Synthetic oligonucleotide
aaugugaugucacaugcau

SEQ ID NO: 1325465 - RNA, 19 nt, Artificial Sequence
  Description of Artificial Sequence: Synthetic oligonucleotide
uauguaaacacuggggaag

SEQ ID NO: 1325466 - RNA, 19 nt, Artificial Sequence
  Description of Artificial Sequence: Synthetic oligonucleotide
ucagacaagacuucacugc

SEQ ID NO: 1325467 - RNA, 19 nt, Artificial Sequence
  Description of Artificial Sequence: Synthetic oligonucleotide
aaagggccagccuugagug

SEQ ID NO: 1325468 - RNA, 19 nt, Artificial Sequence
  Description of Artificial Sequence: Synthetic oligonucleotide
ugcauauuggagaaacuca

SEQ ID NO: 1325469 - RNA, 19 nt, Artificial Sequence
  Description of Artificial Sequence: Synthetic oligonucleotide
caaaugugaugucacaugc

SEQ ID NO: 1325470 - RNA, 19 nt, Artificial Sequence
  Description of Artificial Sequence: Synthetic oligonucleotide
acaugcauauuggagaaac

SEQ ID NO: 1325471 - RNA, 19 nt, Artificial Sequence
  Description of Artificial Sequence: Synthetic oligonucleotide
aaauaauaccugugcaggu

SEQ ID NO: 1325472 - RNA, 19 nt, Artificial Sequence
  Description of Artificial Sequence: Synthetic oligonucleotide
auugaccugauucagugca

SEQ ID NO: 1325473 - RNA, 19 nt, Artificial Sequence
  Description of Artificial Sequence: Synthetic oligonucleotide
aacgaagcaggcuucucag

SEQ ID NO: 1325474 - RNA, 19 nt, Artificial Sequence
  Description of Artificial Sequence: Synthetic oligonucleotide
agaacuguaaugauaagca

SEQ ID NO: 1325475 - RNA, 19 nt, Artificial Sequence
  Description of Artificial Sequence: Synthetic oligonucleotide
uuuacaagucaagccaacg

SEQ ID NO: 1325476 - RNA, 19 nt, Artificial Sequence
  Description of Artificial Sequence: Synthetic oligonucleotide
uuggagaaacucaucccgg

SEQ ID NO: 1325477 - RNA, 19 nt, Artificial Sequence
  Description of Artificial Sequence: Synthetic oligonucleotide
aagcaggcgagaaaguucg

SEQ ID NO: 1325478 - RNA, 19 nt, Artificial Sequence
  Description of Artificial Sequence: Synthetic oligonucleotide
uagauccuagaaucuaggg

SEQ ID NO: 1325479 - RNA, 19 nt, Artificial Sequence
  Description of Artificial Sequence: Synthetic oligonucleotide
uguucucugguuguggccg

SEQ ID NO: 1325480 - RNA, 19 nt, Artificial Sequence
  Description of Artificial Sequence: Synthetic oligonucleotide
gaaucuaggguguagccuc

SEQ ID NO: 1325481 - RNA, 19 nt, Artificial Sequence
  Description of Artificial Sequence: Synthetic oligonucleotide
guaaugauaagcaggcgag

SEQ ID NO: 1325482 - RNA, 19 nt, Artificial Sequence
  Description of Artificial Sequence: Synthetic oligonucleotide
augcauauuggagaaacuc

SEQ ID NO: 1325483 - RNA, 19 nt, Artificial Sequence
  Description of Artificial Sequence: Synthetic oligonucleotide
uugcacaagaacuguaaug

SEQ ID NO: 1325484 - RNA, 19 nt, Artificial Sequence
  Description of Artificial Sequence: Synthetic oligonucleotide
gaaguugauguagaucccg

SEQ ID NO: 1325485 - RNA, 19 nt, Artificial Sequence
  Description of Artificial Sequence: Synthetic oligonucleotide
gacaacagcagacacuuga

SEQ ID NO: 1325486 - RNA, 19 nt, Artificial Sequence
  Description of Artificial Sequence: Synthetic oligonucleotide
guagccucugcugugaacg

SEQ ID NO: 1325487 - RNA, 19 nt, Artificial Sequence
  Description of Artificial Sequence: Synthetic oligonucleotide
ugccuuuacaagucaagcc

SEQ ID NO: 1325488 - RNA, 19 nt, Artificial Sequence
  Description of Artificial Sequence: Synthetic oligonucleotide
guugggacaacaccugccg

SEQ ID NO: 1325489 - RNA, 19 nt, Artificial Sequence
  Description of Artificial Sequence: Synthetic oligonucleotide
uaccuuaaaauaccaucug

SEQ ID NO: 1325490 - RNA, 19 nt, Artificial Sequence
  Description of Artificial Sequence: Synthetic oligonucleotide
guaaauuaaaugugagaca

SEQ ID NO: 1325491 - RNA, 19 nt, Artificial Sequence
  Description of Artificial Sequence: Synthetic oligonucleotide
agaaaagcaugacgucggc

SEQ ID NO: 1325492 - RNA, 19 nt, Artificial Sequence
  Description of Artificial Sequence: Synthetic oligonucleotide
caugacgucggccugggcc

SEQ ID NO: 1325493 - RNA, 19 nt, Artificial Sequence
  Description of Artificial Sequence: Synthetic oligonucleotide
aaugauaagcaggcgagaa

SEQ ID NO: 1325494 - RNA, 19 nt, Artificial Sequence
  Description of Artificial Sequence: Synthetic oligonucleotide
cauagaaggaaaggguucc

SEQ ID NO: 1325495 - RNA, 19 nt, Artificial Sequence
  Description of Artificial Sequence: Synthetic oligonucleotide
uuggauuaagugcaggguu

SEQ ID NO: 1325496 - RNA, 19 nt, Artificial Sequence
  Description of Artificial Sequence: Synthetic oligonucleotide
caagucaagccaacguagg

SEQ ID NO: 1325497 - RNA, 19 nt, Artificial Sequence
  Description of Artificial Sequence: Synthetic oligonucleotide
uagaaucuaggguguagcc

SEQ ID NO: 1325498 - RNA, 19 nt, Artificial Sequence
  Description of Artificial Sequence: Synthetic oligonucleotide
auguaaacacuggggaagc

SEQ ID NO: 1325499 - RNA, 19 nt, Artificial Sequence
  Description of Artificial Sequence: Synthetic oligonucleotide
ugagguccuauacuugcgc

SEQ ID NO: 1325500 - RNA, 19 nt, Artificial Sequence
  Description of Artificial Sequence: Synthetic oligonucleotide
ugucuaccuuaaaauacca

SEQ ID NO: 1325501 - RNA, 19 nt, Artificial Sequence
  Description of Artificial Sequence: Synthetic oligonucleotide
uugaguaccuuagaguuuc

SEQ ID NO: 1325502 - RNA, 19 nt, Artificial Sequence
  Description of Artificial Sequence: Synthetic oligonucleotide
cuaagaaaagcaugacguc

SEQ ID NO: 1325503 - RNA, 19 nt, Artificial Sequence
  Description of Artificial Sequence: Synthetic oligonucleotide
ucuuucuuagacagccaga

SEQ ID NO: 1325504 - RNA, 19 nt, Artificial Sequence
  Description of Artificial Sequence: Synthetic oligonucleotide
ugcagucuguucuuucucc

SEQ ID NO: 1325505 - RNA, 19 nt, Artificial Sequence
  Description of Artificial Sequence: Synthetic oligonucleotide
aauaauaccugugcaggua

SEQ ID NO: 1325506 - RNA, 19 nt, Artificial Sequence
  Description of Artificial Sequence: Synthetic oligonucleotide
cuagaaucuaggguguagc

SEQ ID NO: 1325507 - RNA, 19 nt, Artificial Sequence
  Description of Artificial Sequence: Synthetic oligonucleotide
uucagcccuauguaaacac

SEQ ID NO: 1325508 - RNA, 19 nt, Artificial Sequence
  Description of Artificial Sequence: Synthetic oligonucleotide
auagacuggcucugagaac

SEQ ID NO: 1325509 - RNA, 19 nt, Artificial Sequence
  Description of Artificial Sequence: Synthetic oligonucleotide
aggcuugaguaccuuagag

SEQ ID NO: 1325510 - RNA, 19 nt, Artificial Sequence
  Description of Artificial Sequence: Synthetic oligonucleotide
acaagucaagccaacguag

SEQ ID NO: 1325511 - RNA, 19 nt, Artificial Sequence
  Description of Artificial Sequence: Synthetic oligonucleotide
agcagauauuucugucuac

SEQ ID NO: 1325512 - RNA, 19 nt, Artificial Sequence
  Description of Artificial Sequence: Synthetic oligonucleotide
uccaucucgacgcuccugu

SEQ ID NO: 1325513 - RNA, 19 nt, Artificial Sequence
  Description of Artificial Sequence: Synthetic oligonucleotide
cacaccauagaaggaaagg

SEQ ID NO: 1325514 - RNA, 19 nt, Artificial Sequence
  Description of Artificial Sequence: Synthetic oligonucleotide
guucguucaggacucacac

SEQ ID NO: 1325515 - RNA, 19 nt, Artificial Sequence
  Description of Artificial Sequence: Synthetic oligonucleotide
uugcagucaaacuugugua

SEQ ID NO: 1325516 - RNA, 19 nt, Artificial Sequence
  Description of Artificial Sequence: Synthetic oligonucleotide
ucauuggauuaagugcagg

SEQ ID NO: 1325517 - RNA, 19 nt, Artificial Sequence
  Description of Artificial Sequence: Synthetic oligonucleotide
gagucauggugucauacuc

SEQ ID NO: 1325518 - RNA, 19 nt, Artificial Sequence
  Description of Artificial Sequence: Synthetic oligonucleotide
guagauccuagaaucuagg

SEQ ID NO: 1325519 - RNA, 19 nt, Artificial Sequence
  Description of Artificial Sequence: Synthetic oligonucleotide
aguugccacaacuagcaaa

SEQ ID NO: 1325520 - RNA, 19 nt, Artificial Sequence
  Description of Artificial Sequence: Synthetic oligonucleotide
cuugcgguuguccuccugc

SEQ ID NO: 1325521 - RNA, 19 nt, Artificial Sequence
  Description of Artificial Sequence: Synthetic oligonucleotide
accaucugcauuccaguug

SEQ ID NO: 1325522 - RNA, 19 nt, Artificial Sequence
  Description of Artificial Sequence: Synthetic oligonucleotide
uaggguguagccucugcug

SEQ ID NO: 1325523 - RNA, 19 nt, Artificial Sequence
  Description of Artificial Sequence: Synthetic oligonucleotide
guaaacacuggggaagcag

SEQ ID NO: 1325524 - RNA, 19 nt, Artificial Sequence
  Description of Artificial Sequence: Synthetic oligonucleotide
auuggauuaagugcagggu

SEQ ID NO: 1325525 - RNA, 19 nt, Artificial Sequence
  Description of Artificial Sequence: Synthetic oligonucleotide
ggcgaagguaucuaugugc

SEQ ID NO: 1325526 - RNA, 19 nt, Artificial Sequence
  Description of Artificial Sequence: Synthetic oligonucleotide
ugggagguagauccuagaa

SEQ ID NO: 1325527 - RNA, 19 nt, Artificial Sequence
  Description of Artificial Sequence: Synthetic oligonucleotide
ugauguagaucccgagccu

SEQ ID NO: 1325528 - RNA, 19 nt, Artificial Sequence
  Description of Artificial Sequence: Synthetic oligonucleotide
aacucaucccggguucugg

SEQ ID NO: 1325529 - RNA, 19 nt, Artificial Sequence
  Description of Artificial Sequence: Synthetic oligonucleotide
cuugcgcuggacaacagca

SEQ ID NO: 1325530 - RNA, 19 nt, Artificial Sequence
  Description of Artificial Sequence: Synthetic oligonucleotide
uaucuaugugccgugucug

SEQ ID NO: 1325531 - RNA, 19 nt, Artificial Sequence
  Description of Artificial Sequence: Synthetic oligonucleotide
uccccuuuacggucaaugc

SEQ ID NO: 1325532 - RNA, 19 nt, Artificial Sequence
  Description of Artificial Sequence: Synthetic oligonucleotide
cauauuggagaaacucauc

SEQ ID NO: 1325533 - RNA, 19 nt, Artificial Sequence
  Description of Artificial Sequence: Synthetic oligonucleotide
uuuacggucaaugccuuua

SEQ ID NO: 1325534 - RNA, 19 nt, Artificial Sequence
  Description of Artificial Sequence: Synthetic oligonucleotide
auuaagugcaggguugagu

SEQ ID NO: 1325535 - RNA, 19 nt, Artificial Sequence
  Description of Artificial Sequence: Synthetic oligonucleotide
aggguugagucugugauga

SEQ ID NO: 1325536 - RNA, 19 nt, Artificial Sequence
  Description of Artificial Sequence: Synthetic oligonucleotide
uugaccugauucagugcag

SEQ ID NO: 1325537 - RNA, 19 nt, Artificial Sequence
  Description of Artificial Sequence: Synthetic oligonucleotide
augcuaccgaaggucagcc

SEQ ID NO: 1325538 - RNA, 19 nt, Artificial Sequence
  Description of Artificial Sequence: Synthetic oligonucleotide
cagaucccggucuugcagg

SEQ ID NO: 1325539 - RNA, 19 nt, Artificial Sequence
  Description of Artificial Sequence: Synthetic oligonucleotide
ugcugugaacgaagcaggc

SEQ ID NO: 1325540 - RNA, 19 nt, Artificial Sequence
  Description of Artificial Sequence: Synthetic oligonucleotide
cacucuguggccccaagac

SEQ ID NO: 1325541 - RNA, 19 nt, Artificial Sequence
  Description of Artificial Sequence: Synthetic oligonucleotide
aucucgacgcuccuguacu

SEQ ID NO: 1325542 - RNA, 19 nt, Artificial Sequence
  Description of Artificial Sequence: Synthetic oligonucleotide
agaaucuaggguguagccu

SEQ ID NO: 1325543 - RNA, 19 nt, Artificial Sequence
  Description of Artificial Sequence: Synthetic oligonucleotide
agaggcuugaguaccuuag

SEQ ID NO: 1325544 - RNA, 19 nt, Artificial Sequence
  Description of Artificial Sequence: Synthetic oligonucleotide
aagccaacguaggugccuc

SEQ ID NO: 1325545 - RNA, 19 nt, Artificial Sequence
  Description of Artificial Sequence: Synthetic oligonucleotide
gaaaagcaugacgucggcc

SEQ ID NO: 1325546 - RNA, 19 nt, Artificial Sequence
  Description of Artificial Sequence: Synthetic oligonucleotide
uauacuugcgcuggacaac

SEQ ID NO: 1325547 - RNA, 19 nt, Artificial Sequence
  Description of Artificial Sequence: Synthetic oligonucleotide
cuugaguggggucucugug

SEQ ID NO: 1325548 - RNA, 19 nt, Artificial Sequence
  Description of Artificial Sequence: Synthetic oligonucleotide
uuacggucaaugccuuuac

SEQ ID NO: 1325549 - RNA, 19 nt, Artificial Sequence
  Description of Artificial Sequence: Synthetic oligonucleotide
uaauaccugugcagguaca

SEQ ID NO: 1325550 - RNA, 19 nt, Artificial Sequence
  Description of Artificial Sequence: Synthetic oligonucleotide
uucugaugucauuggauua

SEQ ID NO: 1325551 - RNA, 19 nt, Artificial Sequence
  Description of Artificial Sequence: Synthetic oligonucleotide
caggcgagaaaguucguuc

SEQ ID NO: 1325552 - RNA, 19 nt, Artificial Sequence
  Description of Artificial Sequence: Synthetic oligonucleotide
cccuauguaaacacugggg

SEQ ID NO: 1325553 - RNA, 19 nt, Artificial Sequence
  Description of Artificial Sequence: Synthetic oligonucleotide
ugcagucaaacuuguguau

SEQ ID NO: 1325554 - RNA, 19 nt, Artificial Sequence
  Description of Artificial Sequence: Synthetic oligonucleotide
caacguaggugccuccucc

SEQ ID NO: 1325555 - RNA, 19 nt, Artificial Sequence
  Description of Artificial Sequence: Synthetic oligonucleotide
uguagaucccgagccuccg

SEQ ID NO: 1325556 - RNA, 19 nt, Artificial Sequence
  Description of Artificial Sequence: Synthetic oligonucleotide
gccuuuacaagucaagcca

SEQ ID NO: 1325557 - RNA, 19 nt, Artificial Sequence
  Description of Artificial Sequence: Synthetic oligonucleotide
guacagacucuguugggac

SEQ ID NO: 1325558 - RNA, 19 nt, Artificial Sequence
  Description of Artificial Sequence: Synthetic oligonucleotide
ucacccucgcuacaugccu

SEQ ID NO: 1325559 - RNA, 19 nt, Artificial Sequence
  Description of Artificial Sequence: Synthetic oligonucleotide
gacgcuccuguacuccagg

SEQ ID NO: 1325560 - RNA, 19 nt, Artificial Sequence
  Description of Artificial Sequence: Synthetic oligonucleotide
aggcgagaaaguucguuca

SEQ ID NO: 1325561 - RNA, 19 nt, Artificial Sequence
  Description of Artificial Sequence: Synthetic oligonucleotide
uagaucccgagccuccgga

SEQ ID NO: 1325562 - RNA, 19 nt, Artificial Sequence
  Description of Artificial Sequence: Synthetic oligonucleotide
uaaugauaagcaggcgaga

SEQ ID NO: 1325563 - RNA, 19 nt, Artificial Sequence
  Description of Artificial Sequence: Synthetic oligonucleotide
agguccuauacuugcgcug

SEQ ID NO: 1325564 - RNA, 19 nt, Artificial Sequence
  Description of Artificial Sequence: Synthetic oligonucleotide
aaguugauguagaucccga

SEQ ID NO: 1325565 - RNA, 19 nt, Artificial Sequence
  Description of Artificial Sequence: Synthetic oligonucleotide
uaugugccgugucuggguc

SEQ ID NO: 1325566 - RNA, 19 nt, Artificial Sequence
  Description of Artificial Sequence: Synthetic oligonucleotide
gauguagaucccgagccuc

SEQ ID NO: 1325567 - RNA, 19 nt, Artificial Sequence
  Description of Artificial Sequence: Synthetic oligonucleotide
cuauacuugcgcuggacaa

SEQ ID NO: 1325568 - RNA, 19 nt, Artificial Sequence
  Description of Artificial Sequence: Synthetic oligonucleotide
augacgucggccugggccu

SEQ ID NO: 1325569 - RNA, 19 nt, Artificial Sequence
  Description of Artificial Sequence: Synthetic oligonucleotide
aggguguagccucugcugu

SEQ ID NO: 1325570 - RNA, 19 nt, Artificial Sequence
  Description of Artificial Sequence: Synthetic oligonucleotide
uggugucauacuccacacc

SEQ ID NO: 1325571 - RNA, 19 nt, Artificial Sequence
  Description of Artificial Sequence: Synthetic oligonucleotide
gaaagggccagccuugagu

SEQ ID NO: 1325572 - RNA, 19 nt, Artificial Sequence
  Description of Artificial Sequence: Synthetic oligonucleotide
aaauuaaaugugagacaaa

SEQ ID NO: 1325573 - RNA, 19 nt, Artificial Sequence
  Description of Artificial Sequence: Synthetic oligonucleotide
acgaagcaggcuucucagg

SEQ ID NO: 1325574 - RNA, 19 nt, Artificial Sequence
  Description of Artificial Sequence: Synthetic oligonucleotide
ucuugcagguuccgucagc

SEQ ID NO: 1325575 - RNA, 19 nt, Artificial Sequence
  Description of Artificial Sequence: Synthetic oligonucleotide
augauaagcaggcgagaaa

SEQ ID NO: 1325576 - RNA, 19 nt, Artificial Sequence
  Description of Artificial Sequence: Synthetic oligonucleotide
ucaagccaacguaggugcc

SEQ ID NO: 1325577 - RNA, 19 nt, Artificial Sequence
  Description of Artificial Sequence: Synthetic oligonucleotide
gcagguacagacucuguug

SEQ ID NO: 1325578 - RNA, 19 nt, Artificial Sequence
  Description of Artificial Sequence: Synthetic oligonucleotide
uugcggaugccugagaguu

SEQ ID NO: 1325579 - RNA, 19 nt, Artificial Sequence
  Description of Artificial Sequence: Synthetic oligonucleotide
aauccggauggcguuuucu

SEQ ID NO: 1325580 - RNA, 19 nt, Artificial Sequence
  Description of Artificial Sequence: Synthetic oligonucleotide
gguccuauacuugcgcugg

SEQ ID NO: 1325581 - RNA, 19 nt, Artificial Sequence
  Description of Artificial Sequence: Synthetic oligonucleotide
caugcuaccgaaggucagc

SEQ ID NO: 1325582 - RNA, 19 nt, Artificial Sequence
  Description of Artificial Sequence: Synthetic oligonucleotide
agcccuauguaaacacugg

SEQ ID NO: 1325583 - RNA, 19 nt, Artificial Sequence
  Description of Artificial Sequence: Synthetic oligonucleotide
gcagauauuucugucuacc

SEQ ID NO: 1325584 - RNA, 19 nt, Artificial Sequence
  Description of Artificial Sequence: Synthetic oligonucleotide
cucacccucgcuacaugcc

SEQ ID NO: 1325585 - RNA, 19 nt, Artificial Sequence
  Description of Artificial Sequence: Synthetic oligonucleotide
cucccagauccacaauccg

SEQ ID NO: 1325586 - RNA, 19 nt, Artificial Sequence
  Description of Artificial Sequence: Synthetic oligonucleotide
uucguucaggacucacaca

SEQ ID NO: 1325587 - RNA, 19 nt, Artificial Sequence
  Description of Artificial Sequence: Synthetic oligonucleotide
ugggaaguugauguagauc

SEQ ID NO: 1325588 - RNA, 19 nt, Artificial Sequence
  Description of Artificial Sequence: Synthetic oligonucleotide
auacuugcgcuggacaaca

SEQ ID NO: 1325589 - RNA, 19 nt, Artificial Sequence
  Description of Artificial Sequence: Synthetic oligonucleotide
guaggugcucuucacagua

SEQ ID NO: 1325590 - RNA, 19 nt, Artificial Sequence
  Description of Artificial Sequence: Synthetic oligonucleotide
agugaaugcuccaggagaa

SEQ ID NO: 1325591 - RNA, 19 nt, Artificial Sequence
  Description of Artificial Sequence: Synthetic oligonucleotide
accugauucagugcagucu

SEQ ID NO: 1325592 - RNA, 19 nt, Artificial Sequence
  Description of Artificial Sequence: Synthetic oligonucleotide
ucaucccggguucugggau

SEQ ID NO: 1325593 - RNA, 19 nt, Artificial Sequence
  Description of Artificial Sequence: Synthetic oligonucleotide
cuccuguacuccagguggg

SEQ ID NO: 1325594 - RNA, 19 nt, Artificial Sequence
  Description of Artificial Sequence: Synthetic oligonucleotide
gguugagucugugaugacc

SEQ ID NO: 1325595 - RNA, 19 nt, Artificial Sequence
  Description of Artificial Sequence: Synthetic oligonucleotide
ucagguuuugagguccuau

SEQ ID NO: 1325596 - RNA, 19 nt, Artificial Sequence
  Description of Artificial Sequence: Synthetic oligonucleotide
cucuguugggacaacaccu

SEQ ID NO: 1325597 - RNA, 19 nt, Artificial Sequence
  Description of Artificial Sequence: Synthetic oligonucleotide
aggcgaagguaucuaugug

SEQ ID NO: 1325598 - RNA, 19 nt, Artificial Sequence
  Description of Artificial Sequence: Synthetic oligonucleotide
cuguaaugauaagcaggcg

SEQ ID NO: 1325599 - RNA, 19 nt, Artificial Sequence
  Description of Artificial Sequence: Synthetic oligonucleotide
agggcgugguguuggugac

SEQ ID NO: 1325600 - RNA, 19 nt, Artificial Sequence
  Description of Artificial Sequence: Synthetic oligonucleotide
caucucgacgcuccuguac

SEQ ID NO: 1325601 - RNA, 19 nt, Artificial Sequence
  Description of Artificial Sequence: Synthetic oligonucleotide
gcccuauguaaacacuggg

SEQ ID NO: 1325602 - RNA, 19 nt, Artificial Sequence
  Description of Artificial Sequence: Synthetic oligonucleotide
caagacuucacugcccuca

SEQ ID NO: 1325603 - RNA, 19 nt, Artificial Sequence
  Description of Artificial Sequence: Synthetic oligonucleotide
agguccgcagaucccgguc

SEQ ID NO: 1325604 - RNA, 19 nt, Artificial Sequence
  Description of Artificial Sequence: Synthetic oligonucleotide
guagaucccgagccuccgg

SEQ ID NO: 1325605 - RNA, 19 nt, Artificial Sequence
  Description of Artificial Sequence: Synthetic oligonucleotide
uguaaacacuggggaagca

SEQ ID NO: 1325606 - RNA, 19 nt, Artificial Sequence
  Description of Artificial Sequence: Synthetic oligonucleotide
ugugcucacccucgcuaca

SEQ ID NO: 1325607 - RNA, 19 nt, Artificial Sequence
  Description of Artificial Sequence: Synthetic oligonucleotide
guaucuaugugccgugucu

SEQ ID NO: 1325608 - RNA, 19 nt, Artificial Sequence
  Description of Artificial Sequence: Synthetic oligonucleotide
ugaccugauucagugcagu

SEQ ID NO: 1325609 - RNA, 19 nt, Artificial Sequence
  Description of Artificial Sequence: Synthetic oligonucleotide
uguagccucugcugugaac

SEQ ID NO: 1325610 - RNA, 19 nt, Artificial Sequence
  Description of Artificial Sequence: Synthetic oligonucleotide
uggggucucugugucacug

SEQ ID NO: 1325611 - RNA, 19 nt, Artificial Sequence
  Description of Artificial Sequence: Synthetic oligonucleotide
cugcaugcuaccgaagguc

SEQ ID NO: 1325612 - RNA, 19 nt, Artificial Sequence
  Description of Artificial Sequence: Synthetic oligonucleotide
uggcguuuucuuucuuaga

SEQ ID NO: 1325613 - RNA, 19 nt, Artificial Sequence
  Description of Artificial Sequence: Synthetic oligonucleotide
uggccguaggugcucuuca

SEQ ID NO: 1325614 - RNA, 19 nt, Artificial Sequence
  Description of Artificial Sequence: Synthetic oligonucleotide
acagccgcaaggaguuccc

SEQ ID NO: 1325615 - RNA, 19 nt, Artificial Sequence
  Description of Artificial Sequence: Synthetic oligonucleotide
guugagucugugaugaccu

SEQ ID NO: 1325616 - RNA, 19 nt, Artificial Sequence
  Description of Artificial Sequence: Synthetic oligonucleotide
aguucguucaggacucaca

SEQ ID NO: 1325617 - RNA, 19 nt, Artificial Sequence
  Description of Artificial Sequence: Synthetic oligonucleotide
caggguugagucugugaug

SEQ ID NO: 1325618 - RNA, 19 nt, Artificial Sequence
  Description of Artificial Sequence: Synthetic oligonucleotide
gcgaagguaucuaugugcc

SEQ ID NO: 1325619 - RNA, 19 nt, Artificial Sequence
  Description of Artificial Sequence: Synthetic oligonucleotide
gcuaccgaaggucagccuc

SEQ ID NO: 1325620 - RNA, 19 nt, Artificial Sequence
  Description of Artificial Sequence: Synthetic oligonucleotide
gaccugauucagugcaguc

SEQ ID NO: 1325621 - RNA, 19 nt, Artificial Sequence
  Description of Artificial Sequence: Synthetic oligonucleotide
gaggcuugaguaccuuaga

SEQ ID NO: 1325622 - RNA, 19 nt, Artificial Sequence
  Description of Artificial Sequence: Synthetic oligonucleotide
ccacaacuagcaaagucug

SEQ ID NO: 1325623 - RNA, 19 nt, Artificial Sequence
  Description of Artificial Sequence: Synthetic oligonucleotide
cacagccgcaaggaguucc

SEQ ID NO: 1325624 - RNA, 19 nt, Artificial Sequence
  Description of Artificial Sequence: Synthetic oligonucleotide
gaagguccggguaggggug

SEQ ID NO: 1325625 - RNA, 19 nt, Artificial Sequence
  Description of Artificial Sequence: Synthetic oligonucleotide
ugcaggcgaagguaucuau

SEQ ID NO: 1325626 - RNA, 19 nt, Artificial Sequence
  Description of Artificial Sequence: Synthetic oligonucleotide
uccuauacuugcgcuggac

SEQ ID NO: 1325627 - RNA, 19 nt, Artificial Sequence
  Description of Artificial Sequence: Synthetic oligonucleotide
gcagaucccggucuugcag

SEQ ID NO: 1325628 - RNA, 19 nt, Artificial Sequence
  Description of Artificial Sequence: Synthetic oligonucleotide
auagaaggaaaggguuccu

SEQ ID NO: 1325629 - RNA, 19 nt, Artificial Sequence
  Description of Artificial Sequence: Synthetic oligonucleotide
guuguggccccugugcuca

SEQ ID NO: 1325630 - RNA, 19 nt, Artificial Sequence
  Description of Artificial Sequence: Synthetic oligonucleotide
ggcgagaaaguucguucag

SEQ ID NO: 1325631 - RNA, 19 nt, Artificial Sequence
  Description of Artificial Sequence: Synthetic oligonucleotide
ugcccucacucuguggccc

SEQ ID NO: 1325632 - RNA, 19 nt, Artificial Sequence
  Description of Artificial Sequence: Synthetic oligonucleotide
agccgcaaggaguucccca

SEQ ID NO: 1325633 - RNA, 19 nt, Artificial Sequence
  Description of Artificial Sequence: Synthetic oligonucleotide
agaucccggucuugcaggu

SEQ ID NO: 1325634 - RNA, 19 nt, Artificial Sequence
  Description of Artificial Sequence: Synthetic oligonucleotide
gcgagaaaguucguucagg

SEQ ID NO: 1325635 - RNA, 19 nt, Artificial Sequence
  Description of Artificial Sequence: Synthetic oligonucleotide
cauuugcacaagaacugua

SEQ ID NO: 1325636 - RNA, 19 nt, Artificial Sequence
  Description of Artificial Sequence: Synthetic oligonucleotide
ugaguaccuuagaguuucu

SEQ ID NO: 1325637 - RNA, 19 nt, Artificial Sequence
  Description of Artificial Sequence: Synthetic oligonucleotide
ggcagguccgcagaucccg

SEQ ID NO: 1325638 - RNA, 19 nt, Artificial Sequence
  Description of Artificial Sequence: Synthetic oligonucleotide
ggucaaaugugaugucaca

SEQ ID NO: 1325639 - RNA, 19 nt, Artificial Sequence
  Description of Artificial Sequence: Synthetic oligonucleotide
ccccuuuacggucaaugcc

SEQ ID NO: 1325640 - RNA, 19 nt, Artificial Sequence
  Description of Artificial Sequence: Synthetic oligonucleotide
cucgacgcuccuguacucc

SEQ ID NO: 1325641 - RNA, 19 nt, Artificial Sequence
  Description of Artificial Sequence: Synthetic oligonucleotide
cccaagacagaagucacac

SEQ ID NO: 1325642 - RNA, 19 nt, Artificial Sequence
  Description of Artificial Sequence: Synthetic oligonucleotide
ucccggucuugcagguucc

SEQ ID NO: 1325643 - RNA, 19 nt, Artificial Sequence
  Description of Artificial Sequence: Synthetic oligonucleotide
gagguccuauacuugcgcu

SEQ ID NO: 1325644 - RNA, 19 nt, Artificial Sequence
  Description of Artificial Sequence: Synthetic oligonucleotide
gguuuugagguccuauacu

SEQ ID NO: 1325645 - RNA, 19 nt, Artificial Sequence
  Description of Artificial Sequence: Synthetic oligonucleotide
caggcgaagguaucuaugu

SEQ ID NO: 1325646 - RNA, 19 nt, Artificial Sequence
  Description of Artificial Sequence: Synthetic oligonucleotide
uugcugacgguggccaacu

SEQ ID NO: 1325647 - RNA, 19 nt, Artificial Sequence
  Description of Artificial Sequence: Synthetic oligonucleotide
acuugaguucugaugucau

SEQ ID NO: 1325648 - RNA, 19 nt, Artificial Sequence
  Description of Artificial Sequence: Synthetic oligonucleotide
ugugccgugucugggucaa

SEQ ID NO: 1325649 - RNA, 19 nt, Artificial Sequence
  Description of Artificial Sequence: Synthetic oligonucleotide
gguaucuaugugccguguc

SEQ ID NO: 1325650 - RNA, 19 nt, Artificial Sequence
  Description of Artificial Sequence: Synthetic oligonucleotide
cagcagauauuucugucua

SEQ ID NO: 1325651 - RNA, 19 nt, Artificial Sequence
  Description of Artificial Sequence: Synthetic oligonucleotide
agacucuguugggacaaca

SEQ ID NO: 1325652 - RNA, 19 nt, Artificial Sequence
  Description of Artificial Sequence: Synthetic oligonucleotide
gcucacccucgcuacaugc

SEQ ID NO: 1325653 - RNA, 19 nt, Artificial Sequence
  Description of Artificial Sequence: Synthetic oligonucleotide
ccuucagcccuauguaaac

SEQ ID NO: 1325654 - RNA, 19 nt, Artificial Sequence
  Description of Artificial Sequence: Synthetic oligonucleotide
gagaggcuugaguaccuua

SEQ ID NO: 1325655 - RNA, 19 nt, Artificial Sequence
  Description of Artificial Sequence: Synthetic oligonucleotide
guuucguuccuccccuuua

SEQ ID NO: 1325656 - RNA, 19 nt, Artificial Sequence
  Description of Artificial Sequence: Synthetic oligonucleotide
ggaaguugauguagauccc

SEQ ID NO: 1325657 - RNA, 19 nt, Artificial Sequence
  Description of Artificial Sequence: Synthetic oligonucleotide
gccacaacuagcaaagucu

SEQ ID NO: 1325658 - RNA, 19 nt, Artificial Sequence
  Description of Artificial Sequence: Synthetic oligonucleotide
ugcuaccgaaggucagccu

SEQ ID NO: 1325659 - RNA, 19 nt, Artificial Sequence
  Description of Artificial Sequence: Synthetic oligonucleotide
cugugaacgaagcaggcuu

SEQ ID NO: 1325660 - RNA, 19 nt, Artificial Sequence
  Description of Artificial Sequence: Synthetic oligonucleotide
cagguuuugagguccuaua

SEQ ID NO: 1325661 - RNA, 19 nt, Artificial Sequence
  Description of Artificial Sequence: Synthetic oligonucleotide
ucucgacgcuccuguacuc

SEQ ID NO: 1325662 - RNA, 19 nt, Artificial Sequence
  Description of Artificial Sequence: Synthetic oligonucleotide
acacaguuuccagaaccaa

SEQ ID NO: 1325663 - RNA, 19 nt, Artificial Sequence
  Description of Artificial Sequence: Synthetic oligonucleotide
ggaagguccggguaggggu

SEQ ID NO: 1325664 - RNA, 19 nt, Artificial Sequence
  Description of Artificial Sequence: Synthetic oligonucleotide
ggccccaagacagaaguca

SEQ ID NO: 1325665 - RNA, 19 nt, Artificial Sequence
  Description of Artificial Sequence: Synthetic oligonucleotide
cacccucgcuacaugccug

SEQ ID NO: 1325666 - RNA, 19 nt, Artificial Sequence
  Description of Artificial Sequence: Synthetic oligonucleotide
ucgcuacaugccuggcaga

SEQ ID NO: 1325667 - RNA, 19 nt, Artificial Sequence
  Description of Artificial Sequence: Synthetic oligonucleotide
acuggggaagcagaaucuu

SEQ ID NO: 1325668 - RNA, 19 nt, Artificial Sequence
  Description of Artificial Sequence: Synthetic oligonucleotide
cuucagcccuauguaaaca

SEQ ID NO: 1325669 - RNA, 19 nt, Artificial Sequence
  Description of Artificial Sequence: Synthetic oligonucleotide
caucccggguucugggauc

SEQ ID NO: 1325670 - RNA, 19 nt, Artificial Sequence
  Description of Artificial Sequence: Synthetic oligonucleotide
uccuguacuccaggugggu

SEQ ID NO: 1325671 - RNA, 19 nt, Artificial Sequence
  Description of Artificial Sequence: Synthetic oligonucleotide
augugccgugucuggguca

SEQ ID NO: 1325672 - RNA, 19 nt, Artificial Sequence
  Description of Artificial Sequence: Synthetic oligonucleotide
acgcuccuguacuccaggu

SEQ ID NO: 1325673 - RNA, 19 nt, Artificial Sequence
  Description of Artificial Sequence: Synthetic oligonucleotide
agaucccgagccuccggaa

SEQ ID NO: 1325674 - RNA, 19 nt, Artificial Sequence
  Description of Artificial Sequence: Synthetic oligonucleotide
ugacgguggccaacuucuc

SEQ ID NO: 1325675 - RNA, 19 nt, Artificial Sequence
  Description of Artificial Sequence: Synthetic oligonucleotide
agguaucuaugugccgugu

SEQ ID NO: 1325676 - RNA, 19 nt, Artificial Sequence
  Description of Artificial Sequence: Synthetic oligonucleotide
cucugcugugaacgaagca

SEQ ID NO: 1325677 - RNA, 19 nt, Artificial Sequence
  Description of Artificial Sequence: Synthetic oligonucleotide
gggaagguccggguagggg

SEQ ID NO: 1325678 - RNA, 19 nt, Artificial Sequence
  Description of Artificial Sequence: Synthetic oligonucleotide
gacaacaccugccgccagu

SEQ ID NO: 1325679 - RNA, 19 nt, Artificial Sequence
  Description of Artificial Sequence: Synthetic oligonucleotide
ccuauacuugcgcuggaca

SEQ ID NO: 1325680 - RNA, 19 nt, Artificial Sequence
  Description of Artificial Sequence: Synthetic oligonucleotide
cuaggguguagccucugcu

SEQ ID NO: 1325681 - RNA, 19 nt, Artificial Sequence
  Description of Artificial Sequence: Synthetic oligonucleotide
cgagaaaguucguucagga

SEQ ID NO: 1325682 - RNA, 19 nt, Artificial Sequence
  Description of Artificial Sequence: Synthetic oligonucleotide
uuccgucagcugguggcug

SEQ ID NO: 1325683 - RNA, 19 nt, Artificial Sequence
  Description of Artificial Sequence: Synthetic oligonucleotide
uccuagaaucuagggugua

SEQ ID NO: 1325684 - RNA, 19 nt, Artificial Sequence
  Description of Artificial Sequence: Synthetic oligonucleotide
cuaugugccgugucugggu

SEQ ID NO: 1325685 - RNA, 19 nt, Artificial Sequence
  Description of Artificial Sequence: Synthetic oligonucleotide
aguuuauccuucagcccua

SEQ ID NO: 1325686 - RNA, 19 nt, Artificial Sequence
  Description of Artificial Sequence: Synthetic oligonucleotide
cucaucccggguucuggga

SEQ ID NO: 1325687 - RNA, 19 nt, Artificial Sequence
  Description of Artificial Sequence: Synthetic oligonucleotide
gcaggcgaagguaucuaug

SEQ ID NO: 1325688 - RNA, 19 nt, Artificial Sequence
  Description of Artificial Sequence: Synthetic oligonucleotide
cgaagguaucuaugugccg

SEQ ID NO: 1325689 - RNA, 19 nt, Artificial Sequence
  Description of Artificial Sequence: Synthetic oligonucleotide
uccgcagaucccggucuug

SEQ ID NO: 1325690 - RNA, 19 nt, Artificial Sequence
  Description of Artificial Sequence: Synthetic oligonucleotide
ugcggaugccugagaguuu

SEQ ID NO: 1325691 - RNA, 19 nt, Artificial Sequence
  Description of Artificial Sequence: Synthetic oligonucleotide
cuaccgaaggucagccucu

SEQ ID NO: 1325692 - RNA, 19 nt, Artificial Sequence
  Description of Artificial Sequence: Synthetic oligonucleotide
caugccuggcagaugcacu

SEQ ID NO: 1325693 - RNA, 19 nt, Artificial Sequence
  Description of Artificial Sequence: Synthetic oligonucleotide
aucccggguucugggauca

SEQ ID NO: 1325694 - RNA, 19 nt, Artificial Sequence
  Description of Artificial Sequence: Synthetic oligonucleotide
gggagguagauccuagaau

SEQ ID NO: 1325695 - RNA, 19 nt, Artificial Sequence
  Description of Artificial Sequence: Synthetic oligonucleotide
uuguggccguaggugcucu

SEQ ID NO: 1325696 - RNA, 19 nt, Artificial Sequence
  Description of Artificial Sequence: Synthetic oligonucleotide
guuguggccguaggugcuc

SEQ ID NO: 1325697 - RNA, 19 nt, Artificial Sequence
  Description of Artificial Sequence: Synthetic oligonucleotide
cuugcggaugccugagagu

SEQ ID NO: 1325698 - RNA, 19 nt, Artificial Sequence
  Description of Artificial Sequence: Synthetic oligonucleotide
gcuguuucguuccuccccu

SEQ ID NO: 1325699 - RNA, 19 nt, Artificial Sequence
  Description of Artificial Sequence: Synthetic oligonucleotide
gcaaccagagggcuguggu

SEQ ID NO: 1325700 - RNA, 19 nt, Artificial Sequence
  Description of Artificial Sequence: Synthetic oligonucleotide
caauccggauggcguuuuc

SEQ ID NO: 1325701 - RNA, 19 nt, Artificial Sequence
  Description of Artificial Sequence: Synthetic oligonucleotide
acaauccggauggcguuuu

SEQ ID NO: 1325702 - RNA, 19 nt, Artificial Sequence
  Description of Artificial Sequence: Synthetic oligonucleotide
gcaugcuaccgaaggucag

SEQ ID NO: 1325703 - RNA, 19 nt, Artificial Sequence
  Description of Artificial Sequence: Synthetic oligonucleotide
gcaaggaguuccccaaacu

SEQ ID NO: 1325704 - RNA, 19 nt, Artificial Sequence
  Description of Artificial Sequence: Synthetic oligonucleotide
guggccguaggugcucuuc

SEQ ID NO: 1325705 - RNA, 19 nt, Artificial Sequence
  Description of Artificial Sequence: Synthetic oligonucleotide
guccuauacuugcgcugga

SEQ ID NO: 1325706 - RNA, 19 nt, Artificial Sequence
  Description of Artificial Sequence: Synthetic oligonucleotide
ccuuccucacagccgcaag

SEQ ID NO: 1325707 - RNA, 19 nt, Artificial Sequence
  Description of Artificial Sequence: Synthetic oligonucleotide
ggacaacaccugccgccag

SEQ ID NO: 1325708 - RNA, 19 nt, Artificial Sequence
  Description of Artificial Sequence: Synthetic oligonucleotide
gccgcaaggaguuccccaa

SEQ ID NO: 1325709 - RNA, 19 nt, Artificial Sequence
  Description of Artificial Sequence: Synthetic oligonucleotide
gggacaacaccugccgcca

SEQ ID NO: 1325710 - RNA, 19 nt, Artificial Sequence
  Description of Artificial Sequence: Synthetic oligonucleotide
gcuacaugccuggcagaug

SEQ ID NO: 1325711 - RNA, 19 nt, Artificial Sequence
  Description of Artificial Sequence: Synthetic oligonucleotide
auucaccaugcaggucaga

SEQ ID NO: 1325712 - RNA, 19 nt, Artificial Sequence
  Description of Artificial Sequence: Synthetic oligonucleotide
ccaagacagaagucacaca

SEQ ID NO: 1325713 - RNA, 19 nt, Artificial Sequence
  Description of Artificial Sequence: Synthetic oligonucleotide
ugcugacgguggccaacuu

SEQ ID NO: 1325714 - RNA, 19 nt, Artificial Sequence
  Description of Artificial Sequence: Synthetic oligonucleotide
gcauuugcacaagaacugu

SEQ ID NO: 1325715 - RNA, 19 nt, Artificial Sequence
  Description of Artificial Sequence: Synthetic oligonucleotide
cagguuccgucagcuggug

SEQ ID NO: 1325716 - RNA, 19 nt, Artificial Sequence
  Description of Artificial Sequence: Synthetic oligonucleotide
cagacucuguugggacaac

SEQ ID NO: 1325717 - RNA, 19 nt, Artificial Sequence
  Description of Artificial Sequence: Synthetic oligonucleotide
cugauucagugcagucugu

SEQ ID NO: 1325718 - RNA, 19 nt, Artificial Sequence
  Description of Artificial Sequence: Synthetic oligonucleotide
agcagacacuugaguucug

SEQ ID NO: 1325719 - RNA, 19 nt, Artificial Sequence
  Description of Artificial Sequence: Synthetic oligonucleotide
ccaacguaggugccuccuc

SEQ ID NO: 1325720 - RNA, 19 nt, Artificial Sequence
  Description of Artificial Sequence: Synthetic oligonucleotide
uuguggccccugugcucac

SEQ ID NO: 1325721 - RNA, 19 nt, Artificial Sequence
  Description of Artificial Sequence: Synthetic oligonucleotide
gcacaagaacuguaaugau

SEQ ID NO: 1325722 - RNA, 19 nt, Artificial Sequence
  Description of Artificial Sequence: Synthetic oligonucleotide
gguccgcagaucccggucu

SEQ ID NO: 1325723 - RNA, 19 nt, Artificial Sequence
  Description of Artificial Sequence: Synthetic oligonucleotide
guuccgucagcugguggcu

SEQ ID NO: 1325724 - RNA, 19 nt, Artificial Sequence
  Description of Artificial Sequence: Synthetic oligonucleotide
ggguugagucugugaugac

SEQ ID NO: 1325725 - RNA, 19 nt, Artificial Sequence
  Description of Artificial Sequence: Synthetic oligonucleotide
cccggguucugggaucagg

SEQ ID NO: 1325726 - RNA, 19 nt, Artificial Sequence
  Description of Artificial Sequence: Synthetic oligonucleotide
ccgcagaucccggucuugc

SEQ ID NO: 1325727 - RNA, 19 nt, Artificial Sequence
  Description of Artificial Sequence: Synthetic oligonucleotide
gcggaugccugagaguuua

SEQ ID NO: 1325728 - RNA, 19 nt, Artificial Sequence
  Description of Artificial Sequence: Synthetic oligonucleotide
ccggguaggggugcucccg

SEQ ID NO: 1325729 - RNA, 19 nt, Artificial Sequence
  Description of Artificial Sequence: Synthetic oligonucleotide
ucccggguucugggaucag

SEQ ID NO: 1325730 - RNA, 19 nt, Artificial Sequence
  Description of Artificial Sequence: Synthetic oligonucleotide
cuuuacggucaaugccuuu

SEQ ID NO: 1325731 - RNA, 19 nt, Artificial Sequence
  Description of Artificial Sequence: Synthetic oligonucleotide
cugcaggcgaagguaucua

SEQ ID NO: 1325732 - RNA, 19 nt, Artificial Sequence
  Description of Artificial Sequence: Synthetic oligonucleotide
gcauuccaguugccacaac

SEQ ID NO: 1325733 - RNA, 19 nt, Artificial Sequence
  Description of Artificial Sequence: Synthetic oligonucleotide
cgacgcuccuguacuccag

SEQ ID NO: 1325734 - RNA, 19 nt, Artificial Sequence
  Description of Artificial Sequence: Synthetic oligonucleotide
gggcagguccgcagauccc

SEQ ID NO: 1325735 - RNA, 19 nt, Artificial Sequence
  Description of Artificial Sequence: Synthetic oligonucleotide
ccggguucugggaucaggu

SEQ ID NO: 1325736 - RNA, 19 nt, Artificial Sequence
  Description of Artificial Sequence: Synthetic oligonucleotide
gacgucggccugggccuuc

SEQ ID NO: 1325737 - RNA, 19 nt, Artificial Sequence
  Description of Artificial Sequence: Synthetic oligonucleotide
ugacgucggccugggccuu

SEQ ID NO: 1325738 - RNA, 19 nt, Artificial Sequence
  Description of Artificial Sequence: Synthetic oligonucleotide
gugcucacccucgcuacau

SEQ ID NO: 1325739 - RNA, 19 nt, Artificial Sequence
  Description of Artificial Sequence: Synthetic oligonucleotide
ccuugaguggggucucugu

SEQ ID NO: 1325740 - RNA, 19 nt, Artificial Sequence
  Description of Artificial Sequence: Synthetic oligonucleotide
cguuccuccccuuuacggu

SEQ ID NO: 1325741 - RNA, 19 nt, Artificial Sequence
  Description of Artificial Sequence: Synthetic oligonucleotide
gcagguuccgucagcuggu

SEQ ID NO: 1325742 - RNA, 19 nt, Artificial Sequence
  Description of Artificial Sequence: Synthetic oligonucleotide
cccggucuugcagguuccg

SEQ ID NO: 1325743 - RNA, 19 nt, Artificial Sequence
  Description of Artificial Sequence: Synthetic oligonucleotide
gcaugacgucggccugggc

SEQ ID NO: 1325744 - RNA, 19 nt, Artificial Sequence
  Description of Artificial Sequence: Synthetic oligonucleotide
gccuccggaaagggccagc

SEQ ID NO: 1325745 - RNA, 19 nt, Artificial Sequence
  Description of Artificial Sequence: Synthetic oligonucleotide
ccugcaggcgaagguaucu

SEQ ID NO: 1325746 - RNA, 19 nt, Artificial Sequence
  Description of Artificial Sequence: Synthetic oligonucleotide
gcaggcgagaaaguucguu

SEQ ID NO: 1325747 - RNA, 19 nt, Artificial Sequence
  Description of Artificial Sequence: Synthetic oligonucleotide
gccaacguaggugccuccu

SEQ ID NO: 1325748 - RNA, 19 nt, Artificial Sequence
  Description of Artificial Sequence: Synthetic oligonucleotide
guccgcagaucccggucuu

SEQ ID NO: 1325749 - RNA, 19 nt, Artificial Sequence
  Description of Artificial Sequence: Synthetic oligonucleotide
gccuuccucacagccgcaa

SEQ ID NO: 1325750 - RNA, 19 nt, Artificial Sequence
  Description of Artificial Sequence: Synthetic oligonucleotide
ccgcaaggaguuccccaaa

SEQ ID NO: 1325751 - RNA, 19 nt, Artificial Sequence
  Description of Artificial Sequence: Synthetic oligonucleotide
cgcuacaugccuggcagau

SEQ ID NO: 1325752 - RNA, 19 nt, Artificial Sequence
  Description of Artificial Sequence: Synthetic oligonucleotide
ggccagccuugaguggggu

SEQ ID NO: 1325753 - RNA, 19 nt, Artificial Sequence
  Description of Artificial Sequence: Synthetic oligonucleotide
gugccgugucugggucaaa

SEQ ID NO: 1325754 - RNA, 19 nt, Artificial Sequence
  Description of Artificial Sequence: Synthetic oligonucleotide
ggggugcucccgagggcgu

SEQ ID NO: 1325755 - RNA, 19 nt, Artificial Sequence
  Description of Artificial Sequence: Synthetic oligonucleotide
cggguucugggaucagguu

SEQ ID NO: 1325756 - RNA, 19 nt, Artificial Sequence
  Description of Artificial Sequence: Synthetic oligonucleotide
ccgagggcgugguguuggu

SEQ ID NO: 1325757 - RNA, 19 nt, Artificial Sequence
  Description of Artificial Sequence: Synthetic oligonucleotide
cggaugccugagaguuuau

SEQ ID NO: 1325758 - RNA, 19 nt, Artificial Sequence
  Description of Artificial Sequence: Synthetic oligonucleotide
ccuccccuuuacggucaau

SEQ ID NO: 1325759 - RNA, 19 nt, Artificial Sequence
  Description of Artificial Sequence: Synthetic oligonucleotide
aauaauccugauaauaagc

SEQ ID NO: 1325760 - RNA, 19 nt, Artificial Sequence
  Description of Artificial Sequence: Synthetic oligonucleotide
agccugaugaaucagauac

SEQ ID NO: 1325761 - RNA, 19 nt, Artificial Sequence
  Description of Artificial Sequence: Synthetic oligonucleotide
gauaauaagcaccagcggc

SEQ ID NO: 1325762 - RNA, 19 nt, Artificial Sequence
  Description of Artificial Sequence: Synthetic oligonucleotide
acaaaguuaauuuccuccc

SEQ ID NO: 1325763 - RNA, 19 nt, Artificial Sequence
  Description of Artificial Sequence: Synthetic oligonucleotide
ugaugaaucagauacguga

SEQ ID NO: 1325764 - RNA, 19 nt, Artificial Sequence
  Description of Artificial Sequence: Synthetic oligonucleotide
auauguggaaaacugauug

SEQ ID NO: 1325765 - RNA, 19 nt, Artificial Sequence
  Description of Artificial Sequence: Synthetic oligonucleotide
ucuucugucaaugacuugg

SEQ ID NO: 1325766 - RNA, 19 nt, Artificial Sequence
  Description of Artificial Sequence: Synthetic oligonucleotide
aauauguuccuucucccag

SEQ ID NO: 1325767 - RNA, 19 nt, Artificial Sequence
  Description of Artificial Sequence: Synthetic oligonucleotide
agggguauggcucaacucc

SEQ ID NO: 1325768 - RNA, 19 nt, Artificial Sequence
  Description of Artificial Sequence: Synthetic oligonucleotide
uuuucuagacagcauaacu

SEQ ID NO: 1325769 - RNA, 19 nt, Artificial Sequence
  Description of Artificial Sequence: Synthetic oligonucleotide
uuuucuaacuuguuaagaa

SEQ ID NO: 1325770 - RNA, 19 nt, Artificial Sequence
  Description of Artificial Sequence: Synthetic oligonucleotide
aaucagauacgugaucugg

SEQ ID NO: 1325771 - RNA, 19 nt, Artificial Sequence
  Description of Artificial Sequence: Synthetic oligonucleotide
ugauaauaagcaccagcgg

SEQ ID NO: 1325772 - RNA, 19 nt, Artificial Sequence
  Description of Artificial Sequence: Synthetic oligonucleotide
acagcauaacucccaaacc

SEQ ID NO: 1325773 - RNA, 19 nt, Artificial Sequence
  Description of Artificial Sequence: Synthetic oligonucleotide
uuugggacgcccuugcccg

SEQ ID NO: 1325774 - RNA, 19 nt, Artificial Sequence
  Description of Artificial Sequence: Synthetic oligonucleotide
ucaaggggagcauuggccg

SEQ ID NO: 1325775 - RNA, 19 nt, Artificial Sequence
  Description of Artificial Sequence: Synthetic oligonucleotide
aaaggcuggggccagcauc

SEQ ID NO: 1325776 - RNA, 19 nt, Artificial Sequence
  Description of Artificial Sequence: Synthetic oligonucleotide
gacagcauaacucccaaac

SEQ ID NO: 1325777 - RNA, 19 nt, Artificial Sequence
  Description of Artificial Sequence: Synthetic oligonucleotide
gaacucagagccuucaggc

SEQ ID NO: 1325778 - RNA, 19 nt, Artificial Sequence
  Description of Artificial Sequence: Synthetic oligonucleotide
uuggcaucgccauaugugg

SEQ ID NO: 1325779 - RNA, 19 nt, Artificial Sequence
  Description of Artificial Sequence: Synthetic oligonucleotide
uacugggacaaaaggacgg

SEQ ID NO: 1325780 - RNA, 19 nt, Artificial Sequence
  Description of Artificial Sequence: Synthetic oligonucleotide
uuugcuuugucaccugcag

SEQ ID NO: 1325781 - RNA, 19 nt, Artificial Sequence
  Description of Artificial Sequence: Synthetic oligonucleotide
uuggucaucaccuuugauc

SEQ ID NO: 1325782 - RNA, 19 nt, Artificial Sequence
  Description of Artificial Sequence: Synthetic oligonucleotide
ugaaucagauacgugaucu

SEQ ID NO: 1325783 - RNA, 19 nt, Artificial Sequence
  Description of Artificial Sequence: Synthetic oligonucleotide
uccucugcuggccaguugg

SEQ ID NO: 1325784 - RNA, 19 nt, Artificial Sequence
  Description of Artificial Sequence: Synthetic oligonucleotide
agaacucagagccuucagg

SEQ ID NO: 1325785 - RNA, 19 nt, Artificial Sequence
  Description of Artificial Sequence: Synthetic oligonucleotide
cauaggagccgccacaucc

SEQ ID NO: 1325786 - RNA, 19 nt, Artificial Sequence
  Description of Artificial Sequence: Synthetic oligonucleotide
uggaaaacugauuguagcu

SEQ ID NO: 1325787 - RNA, 19 nt, Artificial Sequence
  Description of Artificial Sequence: Synthetic oligonucleotide
aggagcuggauuuucuaac

SEQ ID NO: 1325788 - RNA, 19 nt, Artificial Sequence
  Description of Artificial Sequence: Synthetic oligonucleotide
ucaccuuugaucuccacaa

SEQ ID NO: 1325789 - RNA, 19 nt, Artificial Sequence
  Description of Artificial Sequence: Synthetic oligonucleotide
uuucuaacuuguuaagaaa

SEQ ID NO: 1325790 - RNA, 19 nt, Artificial Sequence
  Description of Artificial Sequence: Synthetic oligonucleotide
uuugucaccugcagggcag

SEQ ID NO: 1325791 - RNA, 19 nt, Artificial Sequence
  Description of Artificial Sequence: Synthetic oligonucleotide
auccggcucacucucaucg

SEQ ID NO: 1325792 - RNA, 19 nt, Artificial Sequence
  Description of Artificial Sequence: Synthetic oligonucleotide
gacaaaaggacggggaacc

SEQ ID NO: 1325793 - RNA, 19 nt, Artificial Sequence
  Description of Artificial Sequence: Synthetic oligonucleotide
aaugacuuggucauccacu

SEQ ID NO: 1325794 - RNA, 19 nt, Artificial Sequence
  Description of Artificial Sequence: Synthetic oligonucleotide
uuguggugagaccagggcc

SEQ ID NO: 1325795 - RNA, 19 nt, Artificial Sequence
  Description of Artificial Sequence: Synthetic oligonucleotide
aagggguauggcucaacuc

SEQ ID NO: 1325796 - RNA, 19 nt, Artificial Sequence
  Description of Artificial Sequence: Synthetic oligonucleotide
ccaucuuaaacucaagggg

SEQ ID NO: 1325797 - RNA, 19 nt, Artificial Sequence
  Description of Artificial Sequence: Synthetic oligonucleotide
aacugauuguagcuguagu

SEQ ID NO: 1325798 - RNA, 19 nt, Artificial Sequence
  Description of Artificial Sequence: Synthetic oligonucleotide
guggaaaacugauuguagc

SEQ ID NO: 1325799 - RNA, 19 nt, Artificial Sequence
  Description of Artificial Sequence: Synthetic oligonucleotide
uggauuuucuaacuuguua

SEQ ID NO: 1325800 - RNA, 19 nt, Artificial Sequence
  Description of Artificial Sequence: Synthetic oligonucleotide
auaauccugauaauaagca

SEQ ID NO: 1325801 - RNA, 19 nt, Artificial Sequence
  Description of Artificial Sequence: Synthetic oligonucleotide
ucuggggcaauuuccuggg

SEQ ID NO: 1325802 - RNA, 19 nt, Artificial Sequence
  Description of Artificial Sequence: Synthetic oligonucleotide
ucagauacgugaucuggug

SEQ ID NO: 1325803 - RNA, 19 nt, Artificial Sequence
  Description of Artificial Sequence: Synthetic oligonucleotide
guuccugagcccuagaauc

SEQ ID NO: 1325804 - RNA, 19 nt, Artificial Sequence
  Description of Artificial Sequence: Synthetic oligonucleotide
ucacucucaucgcugcugg

SEQ ID NO: 1325805 - RNA, 19 nt, Artificial Sequence
  Description of Artificial Sequence: Synthetic oligonucleotide
acuaggccuacuugagacc

SEQ ID NO: 1325806 - RNA, 19 nt, Artificial Sequence
  Description of Artificial Sequence: Synthetic oligonucleotide
auggcucaacuccaggugg

SEQ ID NO: 1325807 - RNA, 19 nt, Artificial Sequence
  Description of Artificial Sequence: Synthetic oligonucleotide
ucuucaggaacagugggga

SEQ ID NO: 1325808 - RNA, 19 nt, Artificial Sequence
  Description of Artificial Sequence: Synthetic oligonucleotide
acugucgucauccuccugu

SEQ ID NO: 1325809 - RNA, 19 nt, Artificial Sequence
  Description of Artificial Sequence: Synthetic oligonucleotide
ugaccaaguguucuucagc

SEQ ID NO: 1325810 - RNA, 19 nt, Artificial Sequence
  Description of Artificial Sequence: Synthetic oligonucleotide
aaacugauuguagcuguag

SEQ ID NO: 1325811 - RNA, 19 nt, Artificial Sequence
  Description of Artificial Sequence: Synthetic oligonucleotide
uccggugcaggauaguagc

SEQ ID NO: 1325812 - RNA, 19 nt, Artificial Sequence
  Description of Artificial Sequence: Synthetic oligonucleotide
uaguaggccccacuacugg

SEQ ID NO: 1325813 - RNA, 19 nt, Artificial Sequence
  Description of Artificial Sequence: Synthetic oligonucleotide
agaggugaggggcuggguc

SEQ ID NO: 1325814 - RNA, 19 nt, Artificial Sequence
  Description of Artificial Sequence: Synthetic oligonucleotide
augaaucagauacgugauc

SEQ ID NO: 1325815 - RNA, 19 nt, Artificial Sequence
  Description of Artificial Sequence: Synthetic oligonucleotide
cuggcauaagcaaccagag

SEQ ID NO: 1325816 - RNA, 19 nt, Artificial Sequence
  Description of Artificial Sequence: Synthetic oligonucleotide
acucgagucucuccagccc

SEQ ID NO: 1325817 - RNA, 19 nt, Artificial Sequence
  Description of Artificial Sequence: Synthetic oligonucleotide
aauuuccuggggagggacc

SEQ ID NO: 1325818 - RNA, 19 nt, Artificial Sequence
  Description of Artificial Sequence: Synthetic oligonucleotide
ucuccacaaaguuaauuuc

SEQ ID NO: 1325819 - RNA, 19 nt, Artificial Sequence
  Description of Artificial Sequence: Synthetic oligonucleotide
auaauaagcaccagcggca

SEQ ID NO: 1325820 - RNA, 19 nt, Artificial Sequence
  Description of Artificial Sequence: Synthetic oligonucleotide
uugaccaaguguucuucag

SEQ ID NO: 1325821 - RNA, 19 nt, Artificial Sequence
  Description of Artificial Sequence: Synthetic oligonucleotide
aaggccggacccuugggug

SEQ ID NO: 1325822 - RNA, 19 nt, Artificial Sequence
  Description of Artificial Sequence: Synthetic oligonucleotide
uaauuuccucccucccucg

SEQ ID NO: 1325823 - RNA, 19 nt, Artificial Sequence
  Description of Artificial Sequence: Synthetic oligonucleotide
auuggcaucgccauaugug

SEQ ID NO: 1325824 - RNA, 19 nt, Artificial Sequence
  Description of Artificial Sequence: Synthetic oligonucleotide
caaccagagacauggcgcc

SEQ ID NO: 1325825 - RNA, 19 nt, Artificial Sequence
  Description of Artificial Sequence: Synthetic oligonucleotide
aguaggccccacuacuggg

SEQ ID NO: 1325826 - RNA, 19 nt, Artificial Sequence
  Description of Artificial Sequence: Synthetic oligonucleotide
gaaucagauacgugaucug

SEQ ID NO: 1325827 - RNA, 19 nt, Artificial Sequence
  Description of Artificial Sequence: Synthetic oligonucleotide
aaggagcuggauuuucuaa

SEQ ID NO: 1325828 - RNA, 19 nt, Artificial Sequence
  Description of Artificial Sequence: Synthetic oligonucleotide
gacaggguaagggguaugg

SEQ ID NO: 1325829 - RNA, 19 nt, Artificial Sequence
  Description of Artificial Sequence: Synthetic oligonucleotide
cuuugggacgcccuugccc

SEQ ID NO: 1325830 - RNA, 19 nt, Artificial Sequence
  Description of Artificial Sequence: Synthetic oligonucleotide
accacuguaauaauccuga

SEQ ID NO: 1325831 - RNA, 19 nt, Artificial Sequence
  Description of Artificial Sequence: Synthetic oligonucleotide
guuguggugagaccagggc

SEQ ID NO: 1325832 - RNA, 19 nt, Artificial Sequence
  Description of Artificial Sequence: Synthetic oligonucleotide
gacggggaaccgaaaagcg

SEQ ID NO: 1325833 - RNA, 19 nt, Artificial Sequence
  Description of Artificial Sequence: Synthetic oligonucleotide
ccuagaauccguauuuggc

SEQ ID NO: 1325834 - RNA, 19 nt, Artificial Sequence
  Description of Artificial Sequence: Synthetic oligonucleotide
ucuuaaacucaaggggagc

SEQ ID NO: 1325835 - RNA, 19 nt, Artificial Sequence
  Description of Artificial Sequence: Synthetic oligonucleotide
aaacucaaggggagcauug

SEQ ID NO: 1325836 - RNA, 19 nt, Artificial Sequence
  Description of Artificial Sequence: Synthetic oligonucleotide
agggaccagagccgggucc

SEQ ID NO: 1325837 - RNA, 19 nt, Artificial Sequence
  Description of Artificial Sequence: Synthetic oligonucleotide
aggguaagggguauggcuc

SEQ ID NO: 1325838 - RNA, 19 nt, Artificial Sequence
  Description of Artificial Sequence: Synthetic oligonucleotide
aaggacggggaaccgaaaa

SEQ ID NO: 1325839 - RNA, 19 nt, Artificial Sequence
  Description of Artificial Sequence: Synthetic oligonucleotide
uggggagggaccagagccg

SEQ ID NO: 1325840 - RNA, 19 nt, Artificial Sequence
  Description of Artificial Sequence: Synthetic oligonucleotide
ucaccugcagggcagcacu

SEQ ID NO: 1325841 - RNA, 19 nt, Artificial Sequence
  Description of Artificial Sequence: Synthetic oligonucleotide
ugucccggcggccuaguag

SEQ ID NO: 1325842 - RNA, 19 nt, Artificial Sequence
  Description of Artificial Sequence: Synthetic oligonucleotide
uggggcaauuuccugggga

SEQ ID NO: 1325843 - RNA, 19 nt, Artificial Sequence
  Description of Artificial Sequence: Synthetic oligonucleotide
aggacggggaaccgaaaag

SEQ ID NO: 1325844 - RNA, 19 nt, Artificial Sequence
  Description of Artificial Sequence: Synthetic oligonucleotide
agauacgugaucugguguu

SEQ ID NO: 1325845 - RNA, 19 nt, Artificial Sequence
  Description of Artificial Sequence: Synthetic oligonucleotide
uccuuagccugaugaauca

SEQ ID NO: 1325846 - RNA, 19 nt, Artificial Sequence
  Description of Artificial Sequence: Synthetic oligonucleotide
agagaagcgaacaggccuc

SEQ ID NO: 1325847 - RNA, 19 nt, Artificial Sequence
  Description of Artificial Sequence: Synthetic oligonucleotide
aaaaggacggggaaccgaa

SEQ ID NO: 1325848 - RNA, 19 nt, Artificial Sequence
  Description of Artificial Sequence: Synthetic oligonucleotide
cuugagacccgggaugucc

SEQ ID NO: 1325849 - RNA, 19 nt, Artificial Sequence
  Description of Artificial Sequence: Synthetic oligonucleotide
uugcccgcagacuaggccu

SEQ ID NO: 1325850 - RNA, 19 nt, Artificial Sequence
  Description of Artificial Sequence: Synthetic oligonucleotide
auauguuccuucucccaga

SEQ ID NO: 1325851 - RNA, 19 nt, Artificial Sequence
  Description of Artificial Sequence: Synthetic oligonucleotide
aagcaccagcggcauuggc

SEQ ID NO: 1325852 - RNA, 19 nt, Artificial Sequence
  Description of Artificial Sequence: Synthetic oligonucleotide
gucccggcggccuaguagg

SEQ ID NO: 1325853 - RNA, 19 nt, Artificial Sequence
  Description of Artificial Sequence: Synthetic oligonucleotide
cagacuaggccuacuugag

SEQ ID NO: 1325854 - RNA, 19 nt, Artificial Sequence
  Description of Artificial Sequence: Synthetic oligonucleotide
caaguguucuucagcuccc

SEQ ID NO: 1325855 - RNA, 19 nt, Artificial Sequence
  Description of Artificial Sequence: Synthetic oligonucleotide
aggauaguagccaccacug

SEQ ID NO: 1325856 - RNA, 19 nt, Artificial Sequence
  Description of Artificial Sequence: Synthetic oligonucleotide
gaauccguauuuggcuugg

SEQ ID NO: 1325857 - RNA, 19 nt, Artificial Sequence
  Description of Artificial Sequence: Synthetic oligonucleotide
uacgugaucugguguuucc

SEQ ID NO: 1325858 - RNA, 19 nt, Artificial Sequence
  Description of Artificial Sequence: Synthetic oligonucleotide
gcuuaaaugcuucaucauc

SEQ ID NO: 1325859 - RNA, 19 nt, Artificial Sequence
  Description of Artificial Sequence: Synthetic oligonucleotide
gaagcgccaggccgaaggg

SEQ ID NO: 1325860 - RNA, 19 nt, Artificial Sequence
  Description of Artificial Sequence: Synthetic oligonucleotide
agcaaggccggacccuugg

SEQ ID NO: 1325861 - RNA, 19 nt, Artificial Sequence
  Description of Artificial Sequence: Synthetic oligonucleotide
cuuagccugaugaaucaga

SEQ ID NO: 1325862 - RNA, 19 nt, Artificial Sequence
  Description of Artificial Sequence: Synthetic oligonucleotide
cuagaauccguauuuggcu

SEQ ID NO: 1325863 - RNA, 19 nt, Artificial Sequence
  Description of Artificial Sequence: Synthetic oligonucleotide
ucaaugacuuggucaucca

SEQ ID NO: 1325864 - RNA, 19 nt, Artificial Sequence
  Description of Artificial Sequence: Synthetic oligonucleotide
gggagcauuggccgcaucg

SEQ ID NO: 1325865 - RNA, 19 nt, Artificial Sequence
  Description of Artificial Sequence: Synthetic oligonucleotide
acggggaaccgaaaagcgc

SEQ ID NO: 1325866 - RNA, 19 nt, Artificial Sequence
  Description of Artificial Sequence: Synthetic oligonucleotide
cugaugaaucagauacgug

SEQ ID NO: 1325867 - RNA, 19 nt, Artificial Sequence
  Description of Artificial Sequence: Synthetic oligonucleotide
cuugcccgcagacuaggcc

SEQ ID NO: 1325868 - RNA, 19 nt, Artificial Sequence
  Description of Artificial Sequence: Synthetic oligonucleotide
acaggguaagggguauggc

SEQ ID NO: 1325869 - RNA, 19 nt, Artificial Sequence
  Description of Artificial Sequence: Synthetic oligonucleotide
accagcggcauuggcaucg

SEQ ID NO: 1325870 - RNA, 19 nt, Artificial Sequence
  Description of Artificial Sequence: Synthetic oligonucleotide
uccuaaagcgggcccgggc

SEQ ID NO: 1325871 - RNA, 19 nt, Artificial Sequence
  Description of Artificial Sequence: Synthetic oligonucleotide
agacccgggaugucccggc

SEQ ID NO: 1325872 - RNA, 19 nt, Artificial Sequence
  Description of Artificial Sequence: Synthetic oligonucleotide
caaugacuuggucauccac

SEQ ID NO: 1325873 - RNA, 19 nt, Artificial Sequence
  Description of Artificial Sequence: Synthetic oligonucleotide
agcccuagaauccguauuu

SEQ ID NO: 1325874 - RNA, 19 nt, Artificial Sequence
  Description of Artificial Sequence: Synthetic oligonucleotide
ggggaagcaacaguggcgg

SEQ ID NO: 1325875 - RNA, 19 nt, Artificial Sequence
  Description of Artificial Sequence: Synthetic oligonucleotide
caucgcugcuggcauaagc

SEQ ID NO: 1325876 - RNA, 19 nt, Artificial Sequence
  Description of Artificial Sequence: Synthetic oligonucleotide
ucauccccgggcuuuggca

SEQ ID NO: 1325877 - RNA, 19 nt, Artificial Sequence
  Description of Artificial Sequence: Synthetic oligonucleotide
uacuugagacccgggaugu

SEQ ID NO: 1325878 - RNA, 19 nt, Artificial Sequence
  Description of Artificial Sequence: Synthetic oligonucleotide
ggcaauuuccuggggaggg

SEQ ID NO: 1325879 - RNA, 19 nt, Artificial Sequence
  Description of Artificial Sequence: Synthetic oligonucleotide
gcuguagucauccccgggc

SEQ ID NO: 1325880 - RNA, 19 nt, Artificial Sequence
  Description of Artificial Sequence: Synthetic oligonucleotide
cucagccuugucagggagg

SEQ ID NO: 1325881 - RNA, 19 nt, Artificial Sequence
  Description of Artificial Sequence: Synthetic oligonucleotide
uaggccuacuugagacccg

SEQ ID NO: 1325882 - RNA, 19 nt, Artificial Sequence
  Description of Artificial Sequence: Synthetic oligonucleotide
gcaaccagagacauggcgc

SEQ ID NO: 1325883 - RNA, 19 nt, Artificial Sequence
  Description of Artificial Sequence: Synthetic oligonucleotide
aacgaggccgacaggaaau

SEQ ID NO: 1325884 - RNA, 19 nt, Artificial Sequence
  Description of Artificial Sequence: Synthetic oligonucleotide
aucgcugcuggcauaagca

SEQ ID NO: 1325885 - RNA, 19 nt, Artificial Sequence
  Description of Artificial Sequence: Synthetic oligonucleotide
acaaaaggacggggaaccg

SEQ ID NO: 1325886 - RNA, 19 nt, Artificial Sequence
  Description of Artificial Sequence: Synthetic oligonucleotide
agguggcucagccuuguca

SEQ ID NO: 1325887 - RNA, 19 nt, Artificial Sequence
  Description of Artificial Sequence: Synthetic oligonucleotide
gguauggcucaacuccagg

SEQ ID NO: 1325888 - RNA, 19 nt, Artificial Sequence
  Description of Artificial Sequence: Synthetic oligonucleotide
auacgugaucugguguuuc

SEQ ID NO: 1325889 - RNA, 19 nt, Artificial Sequence
  Description of Artificial Sequence: Synthetic oligonucleotide
aaagcuggcucugguucug

SEQ ID NO: 1325890 - RNA, 19 nt, Artificial Sequence
  Description of Artificial Sequence: Synthetic oligonucleotide
aguuggucaucaccuuuga

SEQ ID NO: 1325891 - RNA, 19 nt, Artificial Sequence
  Description of Artificial Sequence: Synthetic oligonucleotide
ucgccauauguggaaaacu

SEQ ID NO: 1325892 - RNA, 19 nt, Artificial Sequence
  Description of Artificial Sequence: Synthetic oligonucleotide
acaggccuccuaaagcggg

SEQ ID NO: 1325893 - RNA, 19 nt, Artificial Sequence
  Description of Artificial Sequence: Synthetic oligonucleotide
agacuaggccuacuugaga

SEQ ID NO: 1325894 - RNA, 19 nt, Artificial Sequence
  Description of Artificial Sequence: Synthetic oligonucleotide
uugggugcggggagagaag

SEQ ID NO: 1325895 - RNA, 19 nt, Artificial Sequence
  Description of Artificial Sequence: Synthetic oligonucleotide
gcagacuaggccuacuuga

SEQ ID NO: 1325896 - RNA, 19 nt, Artificial Sequence
  Description of Artificial Sequence: Synthetic oligonucleotide
ggggcaauuuccuggggag

SEQ ID NO: 1325897 - RNA, 19 nt, Artificial Sequence
  Description of Artificial Sequence: Synthetic oligonucleotide
ccacuacugggacaaaagg

SEQ ID NO: 1325898 - RNA, 19 nt, Artificial Sequence
  Description of Artificial Sequence: Synthetic oligonucleotide
uggcaucgccauaugugga

SEQ ID NO: 1325899 - RNA, 19 nt, Artificial Sequence
  Description of Artificial Sequence: Synthetic oligonucleotide
uaaacucaaggggagcauu

SEQ ID NO: 1325900 - RNA, 19 nt, Artificial Sequence
  Description of Artificial Sequence: Synthetic oligonucleotide
uaauaagcaccagcggcau

SEQ ID NO: 1325901 - RNA, 19 nt, Artificial Sequence
  Description of Artificial Sequence: Synthetic oligonucleotide
uucuugaccaaguguucuu

SEQ ID NO: 1325902 - RNA, 19 nt, Artificial Sequence
  Description of Artificial Sequence: Synthetic oligonucleotide
uccucaagguagagguccu

SEQ ID NO: 1325903 - RNA, 19 nt, Artificial Sequence
  Description of Artificial Sequence: Synthetic oligonucleotide
ggucauccacugcugagcc

SEQ ID NO: 1325904 - RNA, 19 nt, Artificial Sequence
  Description of Artificial Sequence: Synthetic oligonucleotide
ggugguuguggugagacca

SEQ ID NO: 1325905 - RNA, 19 nt, Artificial Sequence
  Description of Artificial Sequence: Synthetic oligonucleotide
ugagcccuagaauccguau

SEQ ID NO: 1325906 - RNA, 19 nt, Artificial Sequence
  Description of Artificial Sequence: Synthetic oligonucleotide
caaggggagcauuggccgc

SEQ ID NO: 1325907 - RNA, 19 nt, Artificial Sequence
  Description of Artificial Sequence: Synthetic oligonucleotide
accagagacauggcgccuc

SEQ ID NO: 1325908 - RNA, 19 nt, Artificial Sequence
  Description of Artificial Sequence: Synthetic oligonucleotide
aaaacugauuguagcugua

SEQ ID NO: 1325909 - RNA, 19 nt, Artificial Sequence
  Description of Artificial Sequence: Synthetic oligonucleotide
cccuagaauccguauuugg

SEQ ID NO: 1325910 - RNA, 19 nt, Artificial Sequence
  Description of Artificial Sequence: Synthetic oligonucleotide
ugacccugcugccaucuua

SEQ ID NO: 1325911 - RNA, 19 nt, Artificial Sequence
  Description of Artificial Sequence: Synthetic oligonucleotide
ggccgaagggcagaggugg

SEQ ID NO: 1325912 - RNA, 19 nt, Artificial Sequence
  Description of Artificial Sequence: Synthetic oligonucleotide
ggugcaggauaguagccac

SEQ ID NO: 1325913 - RNA, 19 nt, Artificial Sequence
  Description of Artificial Sequence: Synthetic oligonucleotide
uauuuggcuugggucugcc

SEQ ID NO: 1325914 - RNA, 19 nt, Artificial Sequence
  Description of Artificial Sequence: Synthetic oligonucleotide
gggccaacgaggccgacag

SEQ ID NO: 1325915 - RNA, 19 nt, Artificial Sequence
  Description of Artificial Sequence: Synthetic oligonucleotide
cugccggcgacugagcuug

SEQ ID NO: 1325916 - RNA, 19 nt, Artificial Sequence
  Description of Artificial Sequence: Synthetic oligonucleotide
aggccuacuugagacccgg

SEQ ID NO: 1325917 - RNA, 19 nt, Artificial Sequence
  Description of Artificial Sequence: Synthetic oligonucleotide
aggccuccuaaagcgggcc

SEQ ID NO: 1325918 - RNA, 19 nt, Artificial Sequence
  Description of Artificial Sequence: Synthetic oligonucleotide
gccgcaucguccuggaaag

SEQ ID NO: 1325919 - RNA, 19 nt, Artificial Sequence
  Description of Artificial Sequence: Synthetic oligonucleotide
guauggcucaacuccaggu

SEQ ID NO: 1325920 - RNA, 19 nt, Artificial Sequence
  Description of Artificial Sequence: Synthetic oligonucleotide
uggaaagcuggcucugguu

SEQ ID NO: 1325921 - RNA, 19 nt, Artificial Sequence
  Description of Artificial Sequence: Synthetic oligonucleotide
uccugauaauaagcaccag

SEQ ID NO: 1325922 - RNA, 19 nt, Artificial Sequence
  Description of Artificial Sequence: Synthetic oligonucleotide
gcgaacaggccuccuaaag

SEQ ID NO: 1325923 - RNA, 19 nt, Artificial Sequence
  Description of Artificial Sequence: Synthetic oligonucleotide
ggacggggaaccgaaaagc

SEQ ID NO: 1325924 - RNA, 19 nt, Artificial Sequence
  Description of Artificial Sequence: Synthetic oligonucleotide
cucgguuccucuugcccug

SEQ ID NO: 1325925 - RNA, 19 nt, Artificial Sequence
  Description of Artificial Sequence: Synthetic oligonucleotide
cccacuacugggacaaaag

SEQ ID NO: 1325926 - RNA, 19 nt, Artificial Sequence
  Description of Artificial Sequence: Synthetic oligonucleotide
gaagcgaacaggccuccua

SEQ ID NO: 1325927 - RNA, 19 nt, Artificial Sequence
  Description of Artificial Sequence: Synthetic oligonucleotide
aaguguucuucagcuccca

SEQ ID NO: 1325928 - RNA, 19 nt, Artificial Sequence
  Description of Artificial Sequence: Synthetic oligonucleotide
auaagcaaccagagacaug

SEQ ID NO: 1325929 - RNA, 19 nt, Artificial Sequence
  Description of Artificial Sequence: Synthetic oligonucleotide
cggggaaccgaaaagcgcc

SEQ ID NO: 1325930 - RNA, 19 nt, Artificial Sequence
  Description of Artificial Sequence: Synthetic oligonucleotide
cugucgucauccuccugug

SEQ ID NO: 1325931 - RNA, 19 nt, Artificial Sequence
  Description of Artificial Sequence: Synthetic oligonucleotide
uccggcucacucucaucgc

SEQ ID NO: 1325932 - RNA, 19 nt, Artificial Sequence
  Description of Artificial Sequence: Synthetic oligonucleotide
uguagucauccccgggcuu

SEQ ID NO: 1325933 - RNA, 19 nt, Artificial Sequence
  Description of Artificial Sequence: Synthetic oligonucleotide
accagagccggguccggug

SEQ ID NO: 1325934 - RNA, 19 nt, Artificial Sequence
  Description of Artificial Sequence: Synthetic oligonucleotide
uagccugaugaaucagaua

SEQ ID NO: 1325935 - RNA, 19 nt, Artificial Sequence
  Description of Artificial Sequence: Synthetic oligonucleotide
guccggugcaggauaguag

SEQ ID NO: 1325936 - RNA, 19 nt, Artificial Sequence
  Description of Artificial Sequence: Synthetic oligonucleotide
gagacccgggaugucccgg

SEQ ID NO: 1325937 - RNA, 19 nt, Artificial Sequence
  Description of Artificial Sequence: Synthetic oligonucleotide
agcuuguuuucuugaccaa

SEQ ID NO: 1325938 - RNA, 19 nt, Artificial Sequence
  Description of Artificial Sequence: Synthetic oligonucleotide
cgccauauguggaaaacug

SEQ ID NO: 1325939 - RNA, 19 nt, Artificial Sequence
  Description of Artificial Sequence: Synthetic oligonucleotide
ccgcuuaaaugcuucauca

SEQ ID NO: 1325940 - RNA, 19 nt, Artificial Sequence
  Description of Artificial Sequence: Synthetic oligonucleotide
gacgcccuugcccgcagac

SEQ ID NO: 1325941 - RNA, 19 nt, Artificial Sequence
  Description of Artificial Sequence: Synthetic oligonucleotide
acgaggccgacaggaaauc

SEQ ID NO: 1325942 - RNA, 19 nt, Artificial Sequence
  Description of Artificial Sequence: Synthetic oligonucleotide
uugcccugcagccgcuuaa

SEQ ID NO: 1325943 - RNA, 19 nt, Artificial Sequence
  Description of Artificial Sequence: Synthetic oligonucleotide
acccgggaugucccggcgg

SEQ ID NO: 1325944 - RNA, 19 nt, Artificial Sequence
  Description of Artificial Sequence: Synthetic oligonucleotide
gacccgggaugucccggcg

SEQ ID NO: 1325945 - RNA, 19 nt, Artificial Sequence
  Description of Artificial Sequence: Synthetic oligonucleotide
ucguccuggaaagcuggcu

SEQ ID NO: 1325946 - RNA, 19 nt, Artificial Sequence
  Description of Artificial Sequence: Synthetic oligonucleotide
uggcuugggucugccggcg

SEQ ID NO: 1325947 - RNA, 19 nt, Artificial Sequence
  Description of Artificial Sequence: Synthetic oligonucleotide
cuccgguucauccggcuca

SEQ ID NO: 1325948 - RNA, 19 nt, Artificial Sequence
  Description of Artificial Sequence: Synthetic oligonucleotide
caaaguuaauuuccucccu

SEQ ID NO: 1325949 - RNA, 19 nt, Artificial Sequence
  Description of Artificial Sequence: Synthetic oligonucleotide
gugguuguggugagaccag

SEQ ID NO: 1325950 - RNA, 19 nt, Artificial Sequence
  Description of Artificial Sequence: Synthetic oligonucleotide
ggcucacucucaucgcugc

SEQ ID NO: 1325951 - RNA, 19 nt, Artificial Sequence
  Description of Artificial Sequence: Synthetic oligonucleotide
gucauccccgggcuuuggc

SEQ ID NO: 1325952 - RNA, 19 nt, Artificial Sequence
  Description of Artificial Sequence: Synthetic oligonucleotide
caaaaggacggggaaccga

SEQ ID NO: 1325953 - RNA, 19 nt, Artificial Sequence
  Description of Artificial Sequence: Synthetic oligonucleotide
cauauguggaaaacugauu

SEQ ID NO: 1325954 - RNA, 19 nt, Artificial Sequence
  Description of Artificial Sequence: Synthetic oligonucleotide
ccgacaggaaauccugggc

SEQ ID NO: 1325955 - RNA, 19 nt, Artificial Sequence
  Description of Artificial Sequence: Synthetic oligonucleotide
gccugaugaaucagauacg

SEQ ID NO: 1325956 - RNA, 19 nt, Artificial Sequence
  Description of Artificial Sequence: Synthetic oligonucleotide
agcgggcccgggcauagga

SEQ ID NO: 1325957 - RNA, 19 nt, Artificial Sequence
  Description of Artificial Sequence: Synthetic oligonucleotide
aguuggcugcucaccuuuc

SEQ ID NO: 1325958 - RNA, 19 nt, Artificial Sequence
  Description of Artificial Sequence: Synthetic oligonucleotide
acgugaucugguguuuccu

SEQ ID NO: 1325959 - RNA, 19 nt, Artificial Sequence
  Description of Artificial Sequence: Synthetic oligonucleotide
uuggccgcaucguccugga

SEQ ID NO: 1325960 - RNA, 19 nt, Artificial Sequence
  Description of Artificial Sequence: Synthetic oligonucleotide
ucugccggcgacugagcuu

SEQ ID NO: 1325961 - RNA, 19 nt, Artificial Sequence
  Description of Artificial Sequence: Synthetic oligonucleotide
agcgaacaggccuccuaaa

SEQ ID NO: 1325962 - RNA, 19 nt, Artificial Sequence
  Description of Artificial Sequence: Synthetic oligonucleotide
gacccugcugccaucuuaa

SEQ ID NO: 1325963 - RNA, 19 nt, Artificial Sequence
  Description of Artificial Sequence: Synthetic oligonucleotide
guauuuggcuugggucugc

SEQ ID NO: 1325964 - RNA, 19 nt, Artificial Sequence
  Description of Artificial Sequence: Synthetic oligonucleotide
cuggggcaauuuccugggg

SEQ ID NO: 1325965 - RNA, 19 nt, Artificial Sequence
  Description of Artificial Sequence: Synthetic oligonucleotide
acuugagacccgggauguc

SEQ ID NO: 1325966 - RNA, 19 nt, Artificial Sequence
  Description of Artificial Sequence: Synthetic oligonucleotide
ggagcuggauuuucuaacu

SEQ ID NO: 1325967 - RNA, 19 nt, Artificial Sequence
  Description of Artificial Sequence: Synthetic oligonucleotide
cauaagcaaccagagacau

SEQ ID NO: 1325968 - RNA, 19 nt, Artificial Sequence
  Description of Artificial Sequence: Synthetic oligonucleotide
caucaccuuugaucuccac

SEQ ID NO: 1325969 - RNA, 19 nt, Artificial Sequence
  Description of Artificial Sequence: Synthetic oligonucleotide
ucccucgguuccucuugcc

SEQ ID NO: 1325970 - RNA, 19 nt, Artificial Sequence
  Description of Artificial Sequence: Synthetic oligonucleotide
gcagcacucgagucucucc

SEQ ID NO: 1325971 - RNA, 19 nt, Artificial Sequence
  Description of Artificial Sequence: Synthetic oligonucleotide
gaucuccacaaaguuaauu

SEQ ID NO: 1325972 - RNA, 19 nt, Artificial Sequence
  Description of Artificial Sequence: Synthetic oligonucleotide
gggaccagagccggguccg

SEQ ID NO: 1325973 - RNA, 19 nt, Artificial Sequence
  Description of Artificial Sequence: Synthetic oligonucleotide
ucucaucgcugcuggcaua

SEQ ID NO: 1325974 - RNA, 19 nt, Artificial Sequence
  Description of Artificial Sequence: Synthetic oligonucleotide
ggccgcaucguccuggaaa

SEQ ID NO: 1325975 - RNA, 19 nt, Artificial Sequence
  Description of Artificial Sequence: Synthetic oligonucleotide
cagauacgugaucuggugu

SEQ ID NO: 1325976 - RNA, 19 nt, Artificial Sequence
  Description of Artificial Sequence: Synthetic oligonucleotide
caucgccauauguggaaaa

SEQ ID NO: 1325977 - RNA, 19 nt, Artificial Sequence
  Description of Artificial Sequence: Synthetic oligonucleotide
guaggccccacuacuggga

SEQ ID NO: 1325978 - RNA, 19 nt, Artificial Sequence
  Description of Artificial Sequence: Synthetic oligonucleotide
gccuacuugagacccggga

SEQ ID NO: 1325979 - RNA, 19 nt, Artificial Sequence
  Description of Artificial Sequence: Synthetic oligonucleotide
uugggacgcccuugcccgc

SEQ ID NO: 1325980 - RNA, 19 nt, Artificial Sequence
  Description of Artificial Sequence: Synthetic oligonucleotide
uggcgccucccgccuuugg

SEQ ID NO: 1325981 - RNA, 19 nt, Artificial Sequence
  Description of Artificial Sequence: Synthetic oligonucleotide
uggggcgauggcagcccca

SEQ ID NO: 1325982 - RNA, 19 nt, Artificial Sequence
  Description of Artificial Sequence: Synthetic oligonucleotide
ucaucgcugcuggcauaag

SEQ ID NO: 1325983 - RNA, 19 nt, Artificial Sequence
  Description of Artificial Sequence: Synthetic oligonucleotide
gccuuugggacgcccuugc

SEQ ID NO: 1325984 - RNA, 19 nt, Artificial Sequence
  Description of Artificial Sequence: Synthetic oligonucleotide
guaagggguauggcucaac

SEQ ID NO: 1325985 - RNA, 19 nt, Artificial Sequence
  Description of Artificial Sequence: Synthetic oligonucleotide
ugcccgcagacuaggccua

SEQ ID NO: 1325986 - RNA, 19 nt, Artificial Sequence
  Description of Artificial Sequence: Synthetic oligonucleotide
ggcgacugagcuuguuuuc

SEQ ID NO: 1325987 - RNA, 19 nt, Artificial Sequence
  Description of Artificial Sequence: Synthetic oligonucleotide
cauuggcaucgccauaugu

SEQ ID NO: 1325988 - RNA, 19 nt, Artificial Sequence
  Description of Artificial Sequence: Synthetic oligonucleotide
ggggagggaccagagccgg

SEQ ID NO: 1325989 - RNA, 19 nt, Artificial Sequence
  Description of Artificial Sequence: Synthetic oligonucleotide
uccgguucauccggcucac

SEQ ID NO: 1325990 - RNA, 19 nt, Artificial Sequence
  Description of Artificial Sequence: Synthetic oligonucleotide
gggaagcaacaguggcggg

SEQ ID NO: 1325991 - RNA, 19 nt, Artificial Sequence
  Description of Artificial Sequence: Synthetic oligonucleotide
agccgcuuaaaugcuucau

SEQ ID NO: 1325992 - RNA, 19 nt, Artificial Sequence
  Description of Artificial Sequence: Synthetic oligonucleotide
ccuaaagcgggcccgggca

SEQ ID NO: 1325993 - RNA, 19 nt, Artificial Sequence
  Description of Artificial Sequence: Synthetic oligonucleotide
gagcccuagaauccguauu

SEQ ID NO: 1325994 - RNA, 19 nt, Artificial Sequence
  Description of Artificial Sequence: Synthetic oligonucleotide
gucaccugcagggcagcac

SEQ ID NO: 1325995 - RNA, 19 nt, Artificial Sequence
  Description of Artificial Sequence: Synthetic oligonucleotide
cuccuaaagcgggcccggg

SEQ ID NO: 1325996 - RNA, 19 nt, Artificial Sequence
  Description of Artificial Sequence: Synthetic oligonucleotide
gcaaggccggacccuuggg

SEQ ID NO: 1325997 - RNA, 19 nt, Artificial Sequence
  Description of Artificial Sequence: Synthetic oligonucleotide
cucaucgcugcuggcauaa

SEQ ID NO: 1325998 - RNA, 19 nt, Artificial Sequence
  Description of Artificial Sequence: Synthetic oligonucleotide
gccuaguaggccccacuac

SEQ ID NO: 1325999 - RNA, 19 nt, Artificial Sequence
  Description of Artificial Sequence: Synthetic oligonucleotide
agcgcagaaaggagcugga

SEQ ID NO: 1326000 - RNA, 19 nt, Artificial Sequence
  Description of Artificial Sequence: Synthetic oligonucleotide
cccucgguuccucuugccc

SEQ ID NO: 1326001 - RNA, 19 nt, Artificial Sequence
  Description of Artificial Sequence: Synthetic oligonucleotide
ccguauuuggcuugggucu

SEQ ID NO: 1326002 - RNA, 19 nt, Artificial Sequence
  Description of Artificial Sequence: Synthetic oligonucleotide
gagccggguccggugcagg

SEQ ID NO: 1326003 - RNA, 19 nt, Artificial Sequence
  Description of Artificial Sequence: Synthetic oligonucleotide
agagccggguccggugcag

SEQ ID NO: 1326004 - RNA, 19 nt, Artificial Sequence
  Description of Artificial Sequence: Synthetic oligonucleotide
caacuccggcagcuucagc

SEQ ID NO: 1326005 - RNA, 19 nt, Artificial Sequence
  Description of Artificial Sequence: Synthetic oligonucleotide
agccggguccggugcagga

SEQ ID NO: 1326006 - RNA, 19 nt, Artificial Sequence
  Description of Artificial Sequence: Synthetic oligonucleotide
ggguauggcucaacuccag

SEQ ID NO: 1326007 - RNA, 19 nt, Artificial Sequence
  Description of Artificial Sequence: Synthetic oligonucleotide
aggccccacuacugggaca

SEQ ID NO: 1326008 - RNA, 19 nt, Artificial Sequence
  Description of Artificial Sequence: Synthetic oligonucleotide
cacugcugagccccacuga

SEQ ID NO: 1326009 - RNA, 19 nt, Artificial Sequence
  Description of Artificial Sequence: Synthetic oligonucleotide
gggcauaggagccgccaca

SEQ ID NO: 1326010 - RNA, 19 nt, Artificial Sequence
  Description of Artificial Sequence: Synthetic oligonucleotide
gauacgugaucugguguuu

SEQ ID NO: 1326011 - RNA, 19 nt, Artificial Sequence
  Description of Artificial Sequence: Synthetic oligonucleotide
cgugaucugguguuuccuc

SEQ ID NO: 1326012 - RNA, 19 nt, Artificial Sequence
  Description of Artificial Sequence: Synthetic oligonucleotide
cugagcccuagaauccgua

SEQ ID NO: 1326013 - RNA, 19 nt, Artificial Sequence
  Description of Artificial Sequence: Synthetic oligonucleotide
aagcgggcccgggcauagg

SEQ ID NO: 1326014 - RNA, 19 nt, Artificial Sequence
  Description of Artificial Sequence: Synthetic oligonucleotide
ccugaugaaucagauacgu

SEQ ID NO: 1326015 - RNA, 19 nt, Artificial Sequence
  Description of Artificial Sequence: Synthetic oligonucleotide
cagccgcuuaaaugcuuca

SEQ ID NO: 1326016 - RNA, 19 nt, Artificial Sequence
  Description of Artificial Sequence: Synthetic oligonucleotide
ccagagacauggcgccucc

SEQ ID NO: 1326017 - RNA, 19 nt, Artificial Sequence
  Description of Artificial Sequence: Synthetic oligonucleotide
ccuggaaagcuggcucugg

SEQ ID NO: 1326018 - RNA, 19 nt, Artificial Sequence
  Description of Artificial Sequence: Synthetic oligonucleotide
gggguauggcucaacucca

SEQ ID NO: 1326019 - RNA, 19 nt, Artificial Sequence
  Description of Artificial Sequence: Synthetic oligonucleotide
gcugagccccacugaguug

SEQ ID NO: 1326020 - RNA, 19 nt, Artificial Sequence
  Description of Artificial Sequence: Synthetic oligonucleotide
ggggaaccgaaaagcgccc

SEQ ID NO: 1326021 - RNA, 19 nt, Artificial Sequence
  Description of Artificial Sequence: Synthetic oligonucleotide
gcagccgcuuaaaugcuuc

SEQ ID NO: 1326022 - RNA, 19 nt, Artificial Sequence
  Description of Artificial Sequence: Synthetic oligonucleotide
cauuggccgcaucguccug

SEQ ID NO: 1326023 - RNA, 19 nt, Artificial Sequence
  Description of Artificial Sequence: Synthetic oligonucleotide
ggccuccuaaagcgggccc

SEQ ID NO: 1326024 - RNA, 19 nt, Artificial Sequence
  Description of Artificial Sequence: Synthetic oligonucleotide
cagagacauggcgccuccc

SEQ ID NO: 1326025 - RNA, 19 nt, Artificial Sequence
  Description of Artificial Sequence: Synthetic oligonucleotide
ccuaguaggccccacuacu

SEQ ID NO: 1326026 - RNA, 19 nt, Artificial Sequence
  Description of Artificial Sequence: Synthetic oligonucleotide
guuggucaucaccuuugau

SEQ ID NO: 1326027 - RNA, 19 nt, Artificial Sequence
  Description of Artificial Sequence: Synthetic oligonucleotide
cagcaaggccggacccuug

SEQ ID NO: 1326028 - RNA, 19 nt, Artificial Sequence
  Description of Artificial Sequence: Synthetic oligonucleotide
ggccaguuggcugcucacc

SEQ ID NO: 1326029 - RNA, 19 nt, Artificial Sequence
  Description of Artificial Sequence: Synthetic oligonucleotide
gcuugggucugccggcgac

SEQ ID NO: 1326030 - RNA, 19 nt, Artificial Sequence
  Description of Artificial Sequence: Synthetic oligonucleotide
gggugcggggagagaagcg

SEQ ID NO: 1326031 - RNA, 19 nt, Artificial Sequence
  Description of Artificial Sequence: Synthetic oligonucleotide
gcauuggcaucgccauaug

SEQ ID NO: 1326032 - RNA, 19 nt, Artificial Sequence
  Description of Artificial Sequence: Synthetic oligonucleotide
gcccuagaauccguauuug

SEQ ID NO: 1326033 - RNA, 19 nt, Artificial Sequence
  Description of Artificial Sequence: Synthetic oligonucleotide
ggcauuggcaucgccauau

SEQ ID NO: 1326034 - RNA, 19 nt, Artificial Sequence
  Description of Artificial Sequence: Synthetic oligonucleotide
ccgcuccuuagccugauga

SEQ ID NO: 1326035 - RNA, 19 nt, Artificial Sequence
  Description of Artificial Sequence: Synthetic oligonucleotide
caaggccggacccuugggu

SEQ ID NO: 1326036 - RNA, 19 nt, Artificial Sequence
  Description of Artificial Sequence: Synthetic oligonucleotide
guagucauccccgggcuuu

SEQ ID NO: 1326037 - RNA, 19 nt, Artificial Sequence
  Description of Artificial Sequence: Synthetic oligonucleotide
cagguggcgggaagcgcca

SEQ ID NO: 1326038 - RNA, 19 nt, Artificial Sequence
  Description of Artificial Sequence: Synthetic oligonucleotide
gcaccagcggcauuggcau

SEQ ID NO: 1326039 - RNA, 19 nt, Artificial Sequence
  Description of Artificial Sequence: Synthetic oligonucleotide
cccgggaugucccggcggc

SEQ ID NO: 1326040 - RNA, 19 nt, Artificial Sequence
  Description of Artificial Sequence: Synthetic oligonucleotide
ccuccuaaagcgggcccgg

SEQ ID NO: 1326041 - RNA, 19 nt, Artificial Sequence
  Description of Artificial Sequence: Synthetic oligonucleotide
ggccuaguaggccccacua

SEQ ID NO: 1326042 - RNA, 19 nt, Artificial Sequence
  Description of Artificial Sequence: Synthetic oligonucleotide
cgcagacuaggccuacuug

SEQ ID NO: 1326043 - RNA, 19 nt, Artificial Sequence
  Description of Artificial Sequence: Synthetic oligonucleotide
gucugccggcgacugagcu

SEQ ID NO: 1326044 - RNA, 19 nt, Artificial Sequence
  Description of Artificial Sequence: Synthetic oligonucleotide
ggccccacuacugggacaa

SEQ ID NO: 1326045 - RNA, 19 nt, Artificial Sequence
  Description of Artificial Sequence: Synthetic oligonucleotide
agcuucagcugggcucacu

SEQ ID NO: 1326046 - RNA, 19 nt, Artificial Sequence
  Description of Artificial Sequence: Synthetic oligonucleotide
ccuuugggacgcccuugcc

SEQ ID NO: 1326047 - RNA, 19 nt, Artificial Sequence
  Description of Artificial Sequence: Synthetic oligonucleotide
cagcggcauuggcaucgcc

SEQ ID NO: 1326048 - RNA, 19 nt, Artificial Sequence
  Description of Artificial Sequence: Synthetic oligonucleotide
ccuugcccgcagacuaggc

SEQ ID NO: 1326049 - RNA, 19 nt, Artificial Sequence
  Description of Artificial Sequence: Synthetic oligonucleotide
ucccgccuuugggacgccc

SEQ ID NO: 1326050 - RNA, 19 nt, Artificial Sequence
  Description of Artificial Sequence: Synthetic oligonucleotide
gagccgccacauccucuuc

SEQ ID NO: 1326051 - RNA, 19 nt, Artificial Sequence
  Description of Artificial Sequence: Synthetic oligonucleotide
acgcccuugcccgcagacu

SEQ ID NO: 1326052 - RNA, 19 nt, Artificial Sequence
  Description of Artificial Sequence: Synthetic oligonucleotide
ggccggacccuugggugcg

SEQ ID NO: 1326053 - RNA, 19 nt, Artificial Sequence
  Description of Artificial Sequence: Synthetic oligonucleotide
caguuggcugcucaccuuu

SEQ ID NO: 1326054 - RNA, 19 nt, Artificial Sequence
  Description of Artificial Sequence: Synthetic oligonucleotide
ccucccgccuuugggacgc

SEQ ID NO: 1326055 - RNA, 19 nt, Artificial Sequence
  Description of Artificial Sequence: Synthetic oligonucleotide
caccagcggcauuggcauc

SEQ ID NO: 1326056 - RNA, 19 nt, Artificial Sequence
  Description of Artificial Sequence: Synthetic oligonucleotide
ggacaggguaagggguaug

SEQ ID NO: 1326057 - RNA, 19 nt, Artificial Sequence
  Description of Artificial Sequence: Synthetic oligonucleotide
ggccaacgaggccgacagg

SEQ ID NO: 1326058 - RNA, 19 nt, Artificial Sequence
  Description of Artificial Sequence: Synthetic oligonucleotide
ccaacuccggcagcuucag

SEQ ID NO: 1326059 - RNA, 19 nt, Artificial Sequence
  Description of Artificial Sequence: Synthetic oligonucleotide
gcaauuuccuggggaggga

SEQ ID NO: 1326060 - RNA, 19 nt, Artificial Sequence
  Description of Artificial Sequence: Synthetic oligonucleotide
ccuacuugagacccgggau

SEQ ID NO: 1326061 - RNA, 19 nt, Artificial Sequence
  Description of Artificial Sequence: Synthetic oligonucleotide
acccuugggugcggggaga

SEQ ID NO: 1326062 - RNA, 19 nt, Artificial Sequence
  Description of Artificial Sequence: Synthetic oligonucleotide
ggagcauuggccgcaucgu

SEQ ID NO: 1326063 - RNA, 19 nt, Artificial Sequence
  Description of Artificial Sequence: Synthetic oligonucleotide
cugcagccgcuuaaaugcu

SEQ ID NO: 1326064 - RNA, 19 nt, Artificial Sequence
  Description of Artificial Sequence: Synthetic oligonucleotide
cuaaagcgggcccgggcau

SEQ ID NO: 1326065 - RNA, 19 nt, Artificial Sequence
  Description of Artificial Sequence: Synthetic oligonucleotide
gcggcauuggcaucgccau

SEQ ID NO: 1326066 - RNA, 19 nt, Artificial Sequence
  Description of Artificial Sequence: Synthetic oligonucleotide
cugcugagccccacugagu

SEQ ID NO: 1326067 - RNA, 19 nt, Artificial Sequence
  Description of Artificial Sequence: Synthetic oligonucleotide
gcauaggagccgccacauc

SEQ ID NO: 1326068 - RNA, 19 nt, Artificial Sequence
  Description of Artificial Sequence: Synthetic oligonucleotide
ggucucccgggugggcggg

SEQ ID NO: 1326069 - RNA, 19 nt, Artificial Sequence
  Description of Artificial Sequence: Synthetic oligonucleotide
cagagccggguccggugca

SEQ ID NO: 1326070 - RNA, 19 nt, Artificial Sequence
  Description of Artificial Sequence: Synthetic oligonucleotide
gcgacugagcuuguuuucu

SEQ ID NO: 1326071 - RNA, 19 nt, Artificial Sequence
  Description of Artificial Sequence: Synthetic oligonucleotide
ccucgguuccucuugcccu

SEQ ID NO: 1326072 - RNA, 19 nt, Artificial Sequence
  Description of Artificial Sequence: Synthetic oligonucleotide
augucccggcggccuagua

SEQ ID NO: 1326073 - RNA, 19 nt, Artificial Sequence
  Description of Artificial Sequence: Synthetic oligonucleotide
ggaccagagccggguccgg

SEQ ID NO: 1326074 - RNA, 19 nt, Artificial Sequence
  Description of Artificial Sequence: Synthetic oligonucleotide
gcaucgccauauguggaaa

SEQ ID NO: 1326075 - RNA, 19 nt, Artificial Sequence
  Description of Artificial Sequence: Synthetic oligonucleotide
ucccgcuccuuagccugau

SEQ ID NO: 1326076 - RNA, 19 nt, Artificial Sequence
  Description of Artificial Sequence: Synthetic oligonucleotide
cggcucacucucaucgcug

SEQ ID NO: 1326077 - RNA, 19 nt, Artificial Sequence
  Description of Artificial Sequence: Synthetic oligonucleotide
gccccacuugacccugcug

SEQ ID NO: 1326078 - RNA, 19 nt, Artificial Sequence
  Description of Artificial Sequence: Synthetic oligonucleotide
ggcuccgggcuccgguuca

SEQ ID NO: 1326079 - RNA, 19 nt, Artificial Sequence
  Description of Artificial Sequence: Synthetic oligonucleotide
ccaacgaggccgacaggaa

SEQ ID NO: 1326080 - RNA, 19 nt, Artificial Sequence
  Description of Artificial Sequence: Synthetic oligonucleotide
cuccccaacuccggcagcu

SEQ ID NO: 1326081 - RNA, 19 nt, Artificial Sequence
  Description of Artificial Sequence: Synthetic oligonucleotide
ggucugccggcgacugagc

SEQ ID NO: 1326082 - RNA, 19 nt, Artificial Sequence
  Description of Artificial Sequence: Synthetic oligonucleotide
gcccuugcccgcagacuag

SEQ ID NO: 1326083 - RNA, 19 nt, Artificial Sequence
  Description of Artificial Sequence: Synthetic oligonucleotide
aggggagcauuggccgcau

SEQ ID NO: 1326084 - RNA, 19 nt, Artificial Sequence
  Description of Artificial Sequence: Synthetic oligonucleotide
ugccggcgacugagcuugu

SEQ ID NO: 1326085 - RNA, 19 nt, Artificial Sequence
  Description of Artificial Sequence: Synthetic oligonucleotide
ggcauaggagccgccacau

SEQ ID NO: 1326086 - RNA, 19 nt, Artificial Sequence
  Description of Artificial Sequence: Synthetic oligonucleotide
cggguccggugcaggauag

SEQ ID NO: 1326087 - RNA, 19 nt, Artificial Sequence
  Description of Artificial Sequence: Synthetic oligonucleotide
gaugucccggcggccuagu

SEQ ID NO: 1326088 - RNA, 19 nt, Artificial Sequence
  Description of Artificial Sequence: Synthetic oligonucleotide
gguagagguccuggacuua

SEQ ID NO: 1326089 - RNA, 19 nt, Artificial Sequence
  Description of Artificial Sequence: Synthetic oligonucleotide
cuccgggcuccgguucauc

SEQ ID NO: 1326090 - RNA, 19 nt, Artificial Sequence
  Description of Artificial Sequence: Synthetic oligonucleotide
cggugcaggauaguagcca

SEQ ID NO: 1326091 - RNA, 19 nt, Artificial Sequence
  Description of Artificial Sequence: Synthetic oligonucleotide
ggcuugggucugccggcga

SEQ ID NO: 1326092 - RNA, 19 nt, Artificial Sequence
  Description of Artificial Sequence: Synthetic oligonucleotide
aggcagcacucgagucucu

SEQ ID NO: 1326093 - RNA, 19 nt, Artificial Sequence
  Description of Artificial Sequence: Synthetic oligonucleotide
cccggcggccuaguaggcc

SEQ ID NO: 1326094 - RNA, 19 nt, Artificial Sequence
  Description of Artificial Sequence: Synthetic oligonucleotide
cgcuccuuagccugaugaa

SEQ ID NO: 1326095 - RNA, 19 nt, Artificial Sequence
  Description of Artificial Sequence: Synthetic oligonucleotide
gcacucuuggcagcagccu

SEQ ID NO: 1326096 - RNA, 19 nt, Artificial Sequence
  Description of Artificial Sequence: Synthetic oligonucleotide
gcugggccaacgaggccga

SEQ ID NO: 1326097 - RNA, 19 nt, Artificial Sequence
  Description of Artificial Sequence: Synthetic oligonucleotide
ccagcggcauuggcaucgc

SEQ ID NO: 1326098 - RNA, 19 nt, Artificial Sequence
  Description of Artificial Sequence: Synthetic oligonucleotide
cgcuuaaaugcuucaucau

SEQ ID NO: 1326099 - RNA, 19 nt, Artificial Sequence
  Description of Artificial Sequence: Synthetic oligonucleotide
gccccacugaguuggucau

SEQ ID NO: 1326100 - RNA, 19 nt, Artificial Sequence
  Description of Artificial Sequence: Synthetic oligonucleotide
gggaugucccggcggccua

SEQ ID NO: 1326101 - RNA, 19 nt, Artificial Sequence
  Description of Artificial Sequence: Synthetic oligonucleotide
cauggcgccucccgccuuu

SEQ ID NO: 1326102 - RNA, 19 nt, Artificial Sequence
  Description of Artificial Sequence: Synthetic oligonucleotide
cccgggcauaggagccgcc

SEQ ID NO: 1326103 - RNA, 19 nt, Artificial Sequence
  Description of Artificial Sequence: Synthetic oligonucleotide
cgcccuugcccgcagacua

SEQ ID NO: 1326104 - RNA, 19 nt, Artificial Sequence
  Description of Artificial Sequence: Synthetic oligonucleotide
ccgcaucguccuggaaagc

SEQ ID NO: 1326105 - RNA, 19 nt, Artificial Sequence
  Description of Artificial Sequence: Synthetic oligonucleotide
ccugagcccuagaauccgu

SEQ ID NO: 1326106 - RNA, 19 nt, Artificial Sequence
  Description of Artificial Sequence: Synthetic oligonucleotide
gggacaggguaagggguau

SEQ ID NO: 1326107 - RNA, 19 nt, Artificial Sequence
  Description of Artificial Sequence: Synthetic oligonucleotide
ccgggcauaggagccgcca

SEQ ID NO: 1326108 - RNA, 19 nt, Artificial Sequence
  Description of Artificial Sequence: Synthetic oligonucleotide
ggacgcccuugcccgcaga

SEQ ID NO: 1326109 - RNA, 19 nt, Artificial Sequence
  Description of Artificial Sequence: Synthetic oligonucleotide
ccggacccuugggugcggg

SEQ ID NO: 1326110 - RNA, 19 nt, Artificial Sequence
  Description of Artificial Sequence: Synthetic oligonucleotide
cgcaucguccuggaaagcu

SEQ ID NO: 1326111 - RNA, 19 nt, Artificial Sequence
  Description of Artificial Sequence: Synthetic oligonucleotide
ccggguccggugcaggaua

SEQ ID NO: 1326112 - RNA, 19 nt, Artificial Sequence
  Description of Artificial Sequence: Synthetic oligonucleotide
ccgggaugucccggcggcc

SEQ ID NO: 1326113 - RNA, 19 nt, Artificial Sequence
  Description of Artificial Sequence: Synthetic oligonucleotide
gccggacccuugggugcgg

SEQ ID NO: 1326114 - RNA, 19 nt, Artificial Sequence
  Description of Artificial Sequence: Synthetic oligonucleotide
gcccgcagacuaggccuac

SEQ ID NO: 1326115 - RNA, 19 nt, Artificial Sequence
  Description of Artificial Sequence: Synthetic oligonucleotide
gcggccuaguaggccccac

SEQ ID NO: 1326116 - RNA, 19 nt, Artificial Sequence
  Description of Artificial Sequence: Synthetic oligonucleotide
ggcggccuaguaggcccca

SEQ ID NO: 1326117 - RNA, 19 nt, Artificial Sequence
  Description of Artificial Sequence: Synthetic oligonucleotide
cggcgacugagcuuguuuu

SEQ ID NO: 1326118 - RNA, 19 nt, Artificial Sequence
  Description of Artificial Sequence: Synthetic oligonucleotide
gugccuggaggcagcucuu

SEQ ID NO: 1326119 - RNA, 19 nt, Artificial Sequence
  Description of Artificial Sequence: Synthetic oligonucleotide
ccggcgacugagcuuguuu

SEQ ID NO: 1326120 - RNA, 19 nt, Artificial Sequence
  Description of Artificial Sequence: Synthetic oligonucleotide
gcgcagaaaggagcuggau

SEQ ID NO: 1326121 - RNA, 19 nt, Artificial Sequence
  Description of Artificial Sequence: Synthetic oligonucleotide
gcccugcagccgcuuaaau

SEQ ID NO: 1326122 - RNA, 19 nt, Artificial Sequence
  Description of Artificial Sequence: Synthetic oligonucleotide
ccgcagacuaggccuacuu

SEQ ID NO: 1326123 - RNA, 19 nt, Artificial Sequence
  Description of Artificial Sequence: Synthetic oligonucleotide
ccuugggugcggggagaga

SEQ ID NO: 1326124 - RNA, 19 nt, Artificial Sequence
  Description of Artificial Sequence: Synthetic oligonucleotide
ggguccggugcaggauagu

SEQ ID NO: 1326125 - RNA, 19 nt, Artificial Sequence
  Description of Artificial Sequence: Synthetic oligonucleotide
gccggguccggugcaggau

SEQ ID NO: 1326126 - RNA, 19 nt, Artificial Sequence
  Description of Artificial Sequence: Synthetic oligonucleotide
cggcauuggcaucgccaua

SEQ ID NO: 1326127 - RNA, 19 nt, Artificial Sequence
  Description of Artificial Sequence: Synthetic oligonucleotide
cccgcagacuaggccuacu

SEQ ID NO: 1326128 - RNA, 19 nt, Artificial Sequence
  Description of Artificial Sequence: Synthetic oligonucleotide
gcuccgggcuccgguucau

SEQ ID NO: 1326129 - RNA, 19 nt, Artificial Sequence
  Description of Artificial Sequence: Synthetic oligonucleotide
cgggaagcgccaggccgaa

SEQ ID NO: 1326130 - RNA, 19 nt, Artificial Sequence
  Description of Artificial Sequence: Synthetic oligonucleotide
gccggcgacugagcuuguu

SEQ ID NO: 1326131 - RNA, 19 nt, Artificial Sequence
  Description of Artificial Sequence: Synthetic oligonucleotide
ccgguucauccggcucacu

SEQ ID NO: 1326132 - RNA, 19 nt, Artificial Sequence
  Description of Artificial Sequence: Synthetic oligonucleotide
aagacagucauauacauac

SEQ ID NO: 1326133 - RNA, 19 nt, Artificial Sequence
  Description of Artificial Sequence: Synthetic oligonucleotide
uauugauaguguaagacag

SEQ ID NO: 1326134 - RNA, 19 nt, Artificial Sequence
  Description of Artificial Sequence: Synthetic oligonucleotide
ugaaguguaaaauugcagc

SEQ ID NO: 1326135 - RNA, 19 nt, Artificial Sequence
  Description of Artificial Sequence: Synthetic oligonucleotide
guaaaauugcagcacaugg

SEQ ID NO: 1326136 - RNA, 19 nt, Artificial Sequence
  Description of Artificial Sequence: Synthetic oligonucleotide
uaaaauugcagcacauggg

SEQ ID NO: 1326137 - RNA, 19 nt, Artificial Sequence
  Description of Artificial Sequence: Synthetic oligonucleotide
aaacacaagacaaugaagu

SEQ ID NO: 1326138 - RNA, 19 nt, Artificial Sequence
  Description of Artificial Sequence: Synthetic oligonucleotide
aacaccuuuauugauagug

SEQ ID NO: 1326139 - RNA, 19 nt, Artificial Sequence
  Description of Artificial Sequence: Synthetic oligonucleotide
ugagaauggaguuguaggg

SEQ ID NO: 1326140 - RNA, 19 nt, Artificial Sequence
  Description of Artificial Sequence: Synthetic oligonucleotide
uuauugauaguguaagaca

SEQ ID NO: 1326141 - RNA, 19 nt, Artificial Sequence
  Description of Artificial Sequence: Synthetic oligonucleotide
uuuauugauaguguaagac

SEQ ID NO: 1326142 - RNA, 19 nt, Artificial Sequence
  Description of Artificial Sequence: Synthetic oligonucleotide
gaaacaccuuuauugauag

SEQ ID NO: 1326143 - RNA, 19 nt, Artificial Sequence
  Description of Artificial Sequence: Synthetic oligonucleotide
uguaagacagucauauaca

SEQ ID NO: 1326144 - RNA, 19 nt, Artificial Sequence
  Description of Artificial Sequence: Synthetic oligonucleotide
cauacaaagacaaacacaa

SEQ ID NO: 1326145 - RNA, 19 nt, Artificial Sequence
  Description of Artificial Sequence: Synthetic oligonucleotide
aagacaaugaaguguaaaa

SEQ ID NO: 1326146 - RNA, 19 nt, Artificial Sequence
  Description of Artificial Sequence: Synthetic oligonucleotide
cagucauauacauacaaag

SEQ ID NO: 1326147 - RNA, 19 nt, Artificial Sequence
  Description of Artificial Sequence: Synthetic oligonucleotide
acaaagacaaacacaagac

SEQ ID NO: 1326148 - RNA, 19 nt, Artificial Sequence
  Description of Artificial Sequence: Synthetic oligonucleotide
aaagacaaacacaagacaa

SEQ ID NO: 1326149 - RNA, 19 nt, Artificial Sequence
  Description of Artificial Sequence: Synthetic oligonucleotide
uacauacaaagacaaacac

SEQ ID NO: 1326150 - RNA, 19 nt, Artificial Sequence
  Description of Artificial Sequence: Synthetic oligonucleotide
ucugaguuaagagagggug

SEQ ID NO: 1326151 - RNA, 19 nt, Artificial Sequence
  Description of Artificial Sequence: Synthetic oligonucleotide
aaguguaaaauugcagcac

SEQ ID NO: 1326152 - RNA, 19 nt, Artificial Sequence
  Description of Artificial Sequence: Synthetic oligonucleotide
gugagaauggaguuguagg

SEQ ID NO: 1326153 - RNA, 19 nt, Artificial Sequence
  Description of Artificial Sequence: Synthetic oligonucleotide
uguaagcugcucaugguag

SEQ ID NO: 1326154 - RNA, 19 nt, Artificial Sequence
  Description of Artificial Sequence: Synthetic oligonucleotide
aacacaagacaaugaagug

SEQ ID NO: 1326155 - RNA, 19 nt, Artificial Sequence
  Description of Artificial Sequence: Synthetic oligonucleotide
ugggcuaauauucuucacc

SEQ ID NO: 1326156 - RNA, 19 nt, Artificial Sequence
  Description of Artificial Sequence: Synthetic oligonucleotide
guguaagacagucauauac

SEQ ID NO: 1326157 - RNA, 19 nt, Artificial Sequence
  Description of Artificial Sequence: Synthetic oligonucleotide
uuaagagagggugacgagg

SEQ ID NO: 1326158 - RNA, 19 nt, Artificial Sequence
  Description of Artificial Sequence: Synthetic oligonucleotide
caaugaaguguaaaauugc

SEQ ID NO: 1326159 - RNA, 19 nt, Artificial Sequence
  Description of Artificial Sequence: Synthetic oligonucleotide
acaaugaaguguaaaauug

SEQ ID NO: 1326160 - RNA, 19 nt, Artificial Sequence
  Description of Artificial Sequence: Synthetic oligonucleotide
aaugaaguguaaaauugca

SEQ ID NO: 1326161 - RNA, 19 nt, Artificial Sequence
  Description of Artificial Sequence: Synthetic oligonucleotide
agcacaugggcuaauauuc

SEQ ID NO: 1326162 - RNA, 19 nt, Artificial Sequence
  Description of Artificial Sequence: Synthetic oligonucleotide
uagcagacuaccaaggagu

SEQ ID NO: 1326163 - RNA, 19 nt, Artificial Sequence
  Description of Artificial Sequence: Synthetic oligonucleotide
ucaaagcaagcauugguga

SEQ ID NO: 1326164 - RNA, 19 nt, Artificial Sequence
  Description of Artificial Sequence: Synthetic oligonucleotide
gaggucugaguuaagagag

SEQ ID NO: 1326165 - RNA, 19 nt, Artificial Sequence
  Description of Artificial Sequence: Synthetic oligonucleotide
uugucuaggaagcgguccg

SEQ ID NO: 1326166 - RNA, 19 nt, Artificial Sequence
  Description of Artificial Sequence: Synthetic oligonucleotide
aagcauuggugaucucugc

SEQ ID NO: 1326167 - RNA, 19 nt, Artificial Sequence
  Description of Artificial Sequence: Synthetic oligonucleotide
aguguaaaauugcagcaca

SEQ ID NO: 1326168 - RNA, 19 nt, Artificial Sequence
  Description of Artificial Sequence: Synthetic oligonucleotide
caaacacaagacaaugaag

SEQ ID NO: 1326169 - RNA, 19 nt, Artificial Sequence
  Description of Artificial Sequence: Synthetic oligonucleotide
uaagagagggugacgagga

SEQ ID NO: 1326170 - RNA, 19 nt, Artificial Sequence
  Description of Artificial Sequence: Synthetic oligonucleotide
ucuccuucagcacugucug

SEQ ID NO: 1326171 - RNA, 19 nt, Artificial Sequence
  Description of Artificial Sequence: Synthetic oligonucleotide
acgcauguugucuaggaag

SEQ ID NO: 1326172 - RNA, 19 nt, Artificial Sequence
  Description of Artificial Sequence: Synthetic oligonucleotide
uaguguaagacagucauau

SEQ ID NO: 1326173 - RNA, 19 nt, Artificial Sequence
  Description of Artificial Sequence: Synthetic oligonucleotide
aauugcagcacaugggcua

SEQ ID NO: 1326174 - RNA, 19 nt, Artificial Sequence
  Description of Artificial Sequence: Synthetic oligonucleotide
acgaggaccucccacuagc

SEQ ID NO: 1326175 - RNA, 19 nt, Artificial Sequence
  Description of Artificial Sequence: Synthetic oligonucleotide
uacgaauucuguccaagac

SEQ ID NO: 1326176 - RNA, 19 nt, Artificial Sequence
  Description of Artificial Sequence: Synthetic oligonucleotide
agcccugaagaccucgugc

SEQ ID NO: 1326177 - RNA, 19 nt, Artificial Sequence
  Description of Artificial Sequence: Synthetic oligonucleotide
uguaaaauugcagcacaug

SEQ ID NO: 1326178 - RNA, 19 nt, Artificial Sequence
  Description of Artificial Sequence: Synthetic oligonucleotide
agcagugugaguccgccuc

SEQ ID NO: 1326179 - RNA, 19 nt, Artificial Sequence
  Description of Artificial Sequence: Synthetic oligonucleotide
cagacuaccaaggaguccc

SEQ ID NO: 1326180 - RNA, 19 nt, Artificial Sequence
  Description of Artificial Sequence: Synthetic oligonucleotide
ugugaguccgccuccagga

SEQ ID NO: 1326181 - RNA, 19 nt, Artificial Sequence
  Description of Artificial Sequence: Synthetic oligonucleotide
agaauggaguuguagggcu

SEQ ID NO: 1326182 - RNA, 19 nt, Artificial Sequence
  Description of Artificial Sequence: Synthetic oligonucleotide
agagagggugacgaggacc

SEQ ID NO: 1326183 - RNA, 19 nt, Artificial Sequence
  Description of Artificial Sequence: Synthetic oligonucleotide
aguuaagagagggugacga

SEQ ID NO: 1326184 - RNA, 19 nt, Artificial Sequence
  Description of Artificial Sequence: Synthetic oligonucleotide
acuaccaaggagucccggg

SEQ ID NO: 1326185 - RNA, 19 nt, Artificial Sequence
  Description of Artificial Sequence: Synthetic oligonucleotide
cuagcagacuaccaaggag

SEQ ID NO: 1326186 - RNA, 19 nt, Artificial Sequence
  Description of Artificial Sequence: Synthetic oligonucleotide
uugauaguguaagacaguc

SEQ ID NO: 1326187 - RNA, 19 nt, Artificial Sequence
  Description of Artificial Sequence: Synthetic oligonucleotide
ucgugcacuggucagccag

SEQ ID NO: 1326188 - RNA, 19 nt, Artificial Sequence
  Description of Artificial Sequence: Synthetic oligonucleotide
ugcuacuguaagcugcuca

SEQ ID NO: 1326189 - RNA, 19 nt, Artificial Sequence
  Description of Artificial Sequence: Synthetic oligonucleotide
acugucugccccaacuucc

SEQ ID NO: 1326190 - RNA, 19 nt, Artificial Sequence
  Description of Artificial Sequence: Synthetic oligonucleotide
gacagucauauacauacaa

SEQ ID NO: 1326191 - RNA, 19 nt, Artificial Sequence
  Description of Artificial Sequence: Synthetic oligonucleotide
uuacgaauucuguccaaga

SEQ ID NO: 1326192 - RNA, 19 nt, Artificial Sequence
  Description of Artificial Sequence: Synthetic oligonucleotide
cacuagcagacuaccaagg

SEQ ID NO: 1326193 - RNA, 19 nt, Artificial Sequence
  Description of Artificial Sequence: Synthetic oligonucleotide
ugaguuaagagagggugac

SEQ ID NO: 1326194 - RNA, 19 nt, Artificial Sequence
  Description of Artificial Sequence: Synthetic oligonucleotide
acacaagacaaugaagugu

SEQ ID NO: 1326195 - RNA, 19 nt, Artificial Sequence
  Description of Artificial Sequence: Synthetic oligonucleotide
agucauauacauacaaaga

SEQ ID NO: 1326196 - RNA, 19 nt, Artificial Sequence
  Description of Artificial Sequence: Synthetic oligonucleotide
gagaauggaguuguagggc

SEQ ID NO: 1326197 - RNA, 19 nt, Artificial Sequence
  Description of Artificial Sequence: Synthetic oligonucleotide
cauguugucuaggaagcgg

SEQ ID NO: 1326198 - RNA, 19 nt, Artificial Sequence
  Description of Artificial Sequence: Synthetic oligonucleotide
cuaccaaggagucccgggg

SEQ ID NO: 1326199 - RNA, 19 nt, Artificial Sequence
  Description of Artificial Sequence: Synthetic oligonucleotide
ucugcuacuguaagcugcu

SEQ ID NO: 1326200 - RNA, 19 nt, Artificial Sequence
  Description of Artificial Sequence: Synthetic oligonucleotide
aagagagggugacgaggac

SEQ ID NO: 1326201 - RNA, 19 nt, Artificial Sequence
  Description of Artificial Sequence: Synthetic oligonucleotide
cuaauauucuucacccuca

SEQ ID NO: 1326202 - RNA, 19 nt, Artificial Sequence
  Description of Artificial Sequence: Synthetic oligonucleotide
augaaguguaaaauugcag

SEQ ID NO: 1326203 - RNA, 19 nt, Artificial Sequence
  Description of Artificial Sequence: Synthetic oligonucleotide
guaagcugcucaugguagg

SEQ ID NO: 1326204 - RNA, 19 nt, Artificial Sequence
  Description of Artificial Sequence: Synthetic oligonucleotide
gggcuaauauucuucaccc

SEQ ID NO: 1326205 - RNA, 19 nt, Artificial Sequence
  Description of Artificial Sequence: Synthetic oligonucleotide
cuggccaucaggcuggaug

SEQ ID NO: 1326206 - RNA, 19 nt, Artificial Sequence
  Description of Artificial Sequence: Synthetic oligonucleotide
aggagucccggggagaagc

SEQ ID NO: 1326207 - RNA, 19 nt, Artificial Sequence
  Description of Artificial Sequence: Synthetic oligonucleotide
aagcaagcauuggugaucu

SEQ ID NO: 1326208 - RNA, 19 nt, Artificial Sequence
  Description of Artificial Sequence: Synthetic oligonucleotide
uccuucagcacugucugcc

SEQ ID NO: 1326209 - RNA, 19 nt, Artificial Sequence
  Description of Artificial Sequence: Synthetic oligonucleotide
uaggaagcgguccgcgagg

SEQ ID NO: 1326210 - RNA, 19 nt, Artificial Sequence
  Description of Artificial Sequence: Synthetic oligonucleotide
cccaacuuccucauaaucc

SEQ ID NO: 1326211 - RNA, 19 nt, Artificial Sequence
  Description of Artificial Sequence: Synthetic oligonucleotide
cuuacgaauucuguccaag

SEQ ID NO: 1326212 - RNA, 19 nt, Artificial Sequence
  Description of Artificial Sequence: Synthetic oligonucleotide
gacaaugaaguguaaaauu

SEQ ID NO: 1326213 - RNA, 19 nt, Artificial Sequence
  Description of Artificial Sequence: Synthetic oligonucleotide
uaagacagucauauacaua

SEQ ID NO: 1326214 - RNA, 19 nt, Artificial Sequence
  Description of Artificial Sequence: Synthetic oligonucleotide
ugccccaacuuccucauaa

SEQ ID NO: 1326215 - RNA, 19 nt, Artificial Sequence
  Description of Artificial Sequence: Synthetic oligonucleotide
guuaagagagggugacgag

SEQ ID NO: 1326216 - RNA, 19 nt, Artificial Sequence
  Description of Artificial Sequence: Synthetic oligonucleotide
acuagcagacuaccaagga

SEQ ID NO: 1326217 - RNA, 19 nt, Artificial Sequence
  Description of Artificial Sequence: Synthetic oligonucleotide
agacaaugaaguguaaaau

SEQ ID NO: 1326218 - RNA, 19 nt, Artificial Sequence
  Description of Artificial Sequence: Synthetic oligonucleotide
acaugggcuaauauucuuc

SEQ ID NO: 1326219 - RNA, 19 nt, Artificial Sequence
  Description of Artificial Sequence: Synthetic oligonucleotide
aggaccucccacuagcaga

SEQ ID NO: 1326220 - RNA, 19 nt, Artificial Sequence
  Description of Artificial Sequence: Synthetic oligonucleotide
gcuaauauucuucacccuc

SEQ ID NO: 1326221 - RNA, 19 nt, Artificial Sequence
  Description of Artificial Sequence: Synthetic oligonucleotide
cacaagacaaugaagugua

SEQ ID NO: 1326222 - RNA, 19 nt, Artificial Sequence
  Description of Artificial Sequence: Synthetic oligonucleotide
augggcuaauauucuucac

SEQ ID NO: 1326223 - RNA, 19 nt, Artificial Sequence
  Description of Artificial Sequence: Synthetic oligonucleotide
agcacugucugccccaacu

SEQ ID NO: 1326224 - RNA, 19 nt, Artificial Sequence
  Description of Artificial Sequence: Synthetic oligonucleotide
cuaggaagcgguccgcgag

SEQ ID NO: 1326225 - RNA, 19 nt, Artificial Sequence
  Description of Artificial Sequence: Synthetic oligonucleotide
ucacgcauguugucuagga

SEQ ID NO: 1326226 - RNA, 19 nt, Artificial Sequence
  Description of Artificial Sequence: Synthetic oligonucleotide
uaauauucuucacccucau

SEQ ID NO: 1326227 - RNA, 19 nt, Artificial Sequence
  Description of Artificial Sequence: Synthetic oligonucleotide
aaauugcagcacaugggcu

SEQ ID NO: 1326228 - RNA, 19 nt, Artificial Sequence
  Description of Artificial Sequence: Synthetic oligonucleotide
gagaagcagugugaguccg

SEQ ID NO: 1326229 - RNA, 19 nt, Artificial Sequence
  Description of Artificial Sequence: Synthetic oligonucleotide
ccuuuauugauaguguaag

SEQ ID NO: 1326230 - RNA, 19 nt, Artificial Sequence
  Description of Artificial Sequence: Synthetic oligonucleotide
cuuuauugauaguguaaga

SEQ ID NO: 1326231 - RNA, 19 nt, Artificial Sequence
  Description of Artificial Sequence: Synthetic oligonucleotide
ggucugaguuaagagaggg

SEQ ID NO: 1326232 - RNA, 19 nt, Artificial Sequence
  Description of Artificial Sequence: Synthetic oligonucleotide
guugucuaggaagcggucc

SEQ ID NO: 1326233 - RNA, 19 nt, Artificial Sequence
  Description of Artificial Sequence: Synthetic oligonucleotide
gaagcagugugaguccgcc

SEQ ID NO: 1326234 - RNA, 19 nt, Artificial Sequence
  Description of Artificial Sequence: Synthetic oligonucleotide
cugaagaccucgugcacug

SEQ ID NO: 1326235 - RNA, 19 nt, Artificial Sequence
  Description of Artificial Sequence: Synthetic oligonucleotide
caugggcuaauauucuuca

SEQ ID NO: 1326236 - RNA, 19 nt, Artificial Sequence
  Description of Artificial Sequence: Synthetic oligonucleotide
aagaccucgugcacugguc

SEQ ID NO: 1326237 - RNA, 19 nt, Artificial Sequence
  Description of Artificial Sequence: Synthetic oligonucleotide
gaguuaagagagggugacg

SEQ ID NO: 1326238 - RNA, 19 nt, Artificial Sequence
  Description of Artificial Sequence: Synthetic oligonucleotide
gugugaguccgccuccagg

SEQ ID NO: 1326239 - RNA, 19 nt, Artificial Sequence
  Description of Artificial Sequence: Synthetic oligonucleotide
uaccaaggagucccgggga

SEQ ID NO: 1326240 - RNA, 19 nt, Artificial Sequence
  Description of Artificial Sequence: Synthetic oligonucleotide
aagcccugaagaccucgug

SEQ ID NO: 1326241 - RNA, 19 nt, Artificial Sequence
  Description of Artificial Sequence: Synthetic oligonucleotide
aaacaccuuuauugauagu

SEQ ID NO: 1326242 - RNA, 19 nt, Artificial Sequence
  Description of Artificial Sequence: Synthetic oligonucleotide
ucuaggaagcgguccgcga

SEQ ID NO: 1326243 - RNA, 19 nt, Artificial Sequence
  Description of Artificial Sequence: Synthetic oligonucleotide
gggagaagcagugugaguc

SEQ ID NO: 1326244 - RNA, 19 nt, Artificial Sequence
  Description of Artificial Sequence: Synthetic oligonucleotide
accaaggagucccggggag

SEQ ID NO: 1326245 - RNA, 19 nt, Artificial Sequence
  Description of Artificial Sequence: Synthetic oligonucleotide
gaggaccucccacuagcag

SEQ ID NO: 1326246 - RNA, 19 nt, Artificial Sequence
  Description of Artificial Sequence: Synthetic oligonucleotide
ggugagaauggaguuguag

SEQ ID NO: 1326247 - RNA, 19 nt, Artificial Sequence
  Description of Artificial Sequence: Synthetic oligonucleotide
uguugucuaggaagcgguc

SEQ ID NO: 1326248 - RNA, 19 nt, Artificial Sequence
  Description of Artificial Sequence: Synthetic oligonucleotide
cugaguuaagagaggguga

SEQ ID NO: 1326249 - RNA, 19 nt, Artificial Sequence
  Description of Artificial Sequence: Synthetic oligonucleotide
agaccucgugcacugguca

SEQ ID NO: 1326250 - RNA, 19 nt, Artificial Sequence
  Description of Artificial Sequence: Synthetic oligonucleotide
agcagacuaccaaggaguc

SEQ ID NO: 1326251 - RNA, 19 nt, Artificial Sequence
  Description of Artificial Sequence: Synthetic oligonucleotide
cuucacccucaucaucucc

SEQ ID NO: 1326252 - RNA, 19 nt, Artificial Sequence
  Description of Artificial Sequence: Synthetic oligonucleotide
auacaaagacaaacacaag

SEQ ID NO: 1326253 - RNA, 19 nt, Artificial Sequence
  Description of Artificial Sequence: Synthetic oligonucleotide
acaccuuuauugauagugu

SEQ ID NO: 1326254 - RNA, 19 nt, Artificial Sequence
  Description of Artificial Sequence: Synthetic oligonucleotide
auugauaguguaagacagu

SEQ ID NO: 1326255 - RNA, 19 nt, Artificial Sequence
  Description of Artificial Sequence: Synthetic oligonucleotide
gagggugacgaggaccucc

SEQ ID NO: 1326256 - RNA, 19 nt, Artificial Sequence
  Description of Artificial Sequence: Synthetic oligonucleotide
cuucagcacugucugcccc

SEQ ID NO: 1326257 - RNA, 19 nt, Artificial Sequence
  Description of Artificial Sequence: Synthetic oligonucleotide
acucacgcauguugucuag

SEQ ID NO: 1326258 - RNA, 19 nt, Artificial Sequence
  Description of Artificial Sequence: Synthetic oligonucleotide
gacgaggaccucccacuag

SEQ ID NO: 1326259 - RNA, 19 nt, Artificial Sequence
  Description of Artificial Sequence: Synthetic oligonucleotide
guaagacagucauauacau

SEQ ID NO: 1326260 - RNA, 19 nt, Artificial Sequence
  Description of Artificial Sequence: Synthetic oligonucleotide
agaagcagugugaguccgc

SEQ ID NO: 1326261 - RNA, 19 nt, Artificial Sequence
  Description of Artificial Sequence: Synthetic oligonucleotide
auguugucuaggaagcggu

SEQ ID NO: 1326262 - RNA, 19 nt, Artificial Sequence
  Description of Artificial Sequence: Synthetic oligonucleotide
agggugacgaggaccuccc

SEQ ID NO: 1326263 - RNA, 19 nt, Artificial Sequence
  Description of Artificial Sequence: Synthetic oligonucleotide
gaccucgugcacuggucag

SEQ ID NO: 1326264 - RNA, 19 nt, Artificial Sequence
  Description of Artificial Sequence: Synthetic oligonucleotide
uccgcgaggucugaguuaa

SEQ ID NO: 1326265 - RNA, 19 nt, Artificial Sequence
  Description of Artificial Sequence: Synthetic oligonucleotide
ucccacuagcagacuacca

SEQ ID NO: 1326266 - RNA, 19 nt, Artificial Sequence
  Description of Artificial Sequence: Synthetic oligonucleotide
accucgugcacuggucagc

SEQ ID NO: 1326267 - RNA, 19 nt, Artificial Sequence
  Description of Artificial Sequence: Synthetic oligonucleotide
ggagaagcagugugagucc

SEQ ID NO: 1326268 - RNA, 19 nt, Artificial Sequence
  Description of Artificial Sequence: Synthetic oligonucleotide
accuuuauugauaguguaa

SEQ ID NO: 1326269 - RNA, 19 nt, Artificial Sequence
  Description of Artificial Sequence: Synthetic oligonucleotide
gcgaggucugaguuaagag

SEQ ID NO: 1326270 - RNA, 19 nt, Artificial Sequence
  Description of Artificial Sequence: Synthetic oligonucleotide
ccagcuuacgaauucuguc

SEQ ID NO: 1326271 - RNA, 19 nt, Artificial Sequence
  Description of Artificial Sequence: Synthetic oligonucleotide
aagcagugugaguccgccu

SEQ ID NO: 1326272 - RNA, 19 nt, Artificial Sequence
  Description of Artificial Sequence: Synthetic oligonucleotide
auauacauacaaagacaaa

SEQ ID NO: 1326273 - RNA, 19 nt, Artificial Sequence
  Description of Artificial Sequence: Synthetic oligonucleotide
gacuaccaaggagucccgg

SEQ ID NO: 1326274 - RNA, 19 nt, Artificial Sequence
  Description of Artificial Sequence: Synthetic oligonucleotide
gucuaggaagcgguccgcg

SEQ ID NO: 1326275 - RNA, 19 nt, Artificial Sequence
  Description of Artificial Sequence: Synthetic oligonucleotide
aguguaagacagucauaua

SEQ ID NO: 1326276 - RNA, 19 nt, Artificial Sequence
  Description of Artificial Sequence: Synthetic oligonucleotide
caagacaaugaaguguaaa

SEQ ID NO: 1326277 - RNA, 19 nt, Artificial Sequence
  Description of Artificial Sequence: Synthetic oligonucleotide
ccacuagcagacuaccaag

SEQ ID NO: 1326278 - RNA, 19 nt, Artificial Sequence
  Description of Artificial Sequence: Synthetic oligonucleotide
ugaagaccucgugcacugg

SEQ ID NO: 1326279 - RNA, 19 nt, Artificial Sequence
  Description of Artificial Sequence: Synthetic oligonucleotide
agugugaguccgccuccag

SEQ ID NO: 1326280 - RNA, 19 nt, Artificial Sequence
  Description of Artificial Sequence: Synthetic oligonucleotide
ugcacucacgcauguuguc

SEQ ID NO: 1326281 - RNA, 19 nt, Artificial Sequence
  Description of Artificial Sequence: Synthetic oligonucleotide
cgcauguugucuaggaagc

SEQ ID NO: 1326282 - RNA, 19 nt, Artificial Sequence
  Description of Artificial Sequence: Synthetic oligonucleotide
aggucugaguuaagagagg

SEQ ID NO: 1326283 - RNA, 19 nt, Artificial Sequence
  Description of Artificial Sequence: Synthetic oligonucleotide
ugucuaggaagcgguccgc

SEQ ID NO: 1326284 - RNA, 19 nt, Artificial Sequence
  Description of Artificial Sequence: Synthetic oligonucleotide
cacugucugccccaacuuc

SEQ ID NO: 1326285 - RNA, 19 nt, Artificial Sequence
  Description of Artificial Sequence: Synthetic oligonucleotide
gaagcgguccgcgaggucu

SEQ ID NO: 1326286 - RNA, 19 nt, Artificial Sequence
  Description of Artificial Sequence: Synthetic oligonucleotide
ugacgaggaccucccacua

SEQ ID NO: 1326287 - RNA, 19 nt, Artificial Sequence
  Description of Artificial Sequence: Synthetic oligonucleotide
ucuucacccucaucaucuc

SEQ ID NO: 1326288 - RNA, 19 nt, Artificial Sequence
  Description of Artificial Sequence: Synthetic oligonucleotide
cucccacuagcagacuacc

SEQ ID NO: 1326289 - RNA, 19 nt, Artificial Sequence
  Description of Artificial Sequence: Synthetic oligonucleotide
cuguaagcugcucauggua

SEQ ID NO: 1326290 - RNA, 19 nt, Artificial Sequence
  Description of Artificial Sequence: Synthetic oligonucleotide
gagagggugacgaggaccu

SEQ ID NO: 1326291 - RNA, 19 nt, Artificial Sequence
  Description of Artificial Sequence: Synthetic oligonucleotide
ggugacgaggaccucccac

SEQ ID NO: 1326292 - RNA, 19 nt, Artificial Sequence
  Description of Artificial Sequence: Synthetic oligonucleotide
caccuuuauugauagugua

SEQ ID NO: 1326293 - RNA, 19 nt, Artificial Sequence
  Description of Artificial Sequence: Synthetic oligonucleotide
gaagaccucgugcacuggu

SEQ ID NO: 1326294 - RNA, 19 nt, Artificial Sequence
  Description of Artificial Sequence: Synthetic oligonucleotide
ggaaacaccuuuauugaua

SEQ ID NO: 1326295 - RNA, 19 nt, Artificial Sequence
  Description of Artificial Sequence: Synthetic oligonucleotide
cuacuguaagcugcucaug

SEQ ID NO: 1326296 - RNA, 19 nt, Artificial Sequence
  Description of Artificial Sequence: Synthetic oligonucleotide
gugacgaggaccucccacu

SEQ ID NO: 1326297 - RNA, 19 nt, Artificial Sequence
  Description of Artificial Sequence: Synthetic oligonucleotide
accucccacuagcagacua

SEQ ID NO: 1326298 - RNA, 19 nt, Artificial Sequence
  Description of Artificial Sequence: Synthetic oligonucleotide
cuccuucagcacugucugc

SEQ ID NO: 1326299 - RNA, 19 nt, Artificial Sequence
  Description of Artificial Sequence: Synthetic oligonucleotide
guggugagaauggaguugu

SEQ ID NO: 1326300 - RNA, 19 nt, Artificial Sequence
  Description of Artificial Sequence: Synthetic oligonucleotide
agacagucauauacauaca

SEQ ID NO: 1326301 - RNA, 19 nt, Artificial Sequence
  Description of Artificial Sequence: Synthetic oligonucleotide
aacacagcccggggcacau

SEQ ID NO: 1326302 - RNA, 19 nt, Artificial Sequence
  Description of Artificial Sequence: Synthetic oligonucleotide
ugucugccccaacuuccuc

SEQ ID NO: 1326303 - RNA, 19 nt, Artificial Sequence
  Description of Artificial Sequence: Synthetic oligonucleotide
gcauguugucuaggaagcg

SEQ ID NO: 1326304 - RNA, 19 nt, Artificial Sequence
  Description of Artificial Sequence: Synthetic oligonucleotide
agacuaccaaggagucccg

SEQ ID NO: 1326305 - RNA, 19 nt, Artificial Sequence
  Description of Artificial Sequence: Synthetic oligonucleotide
agcaagcauuggugaucuc

SEQ ID NO: 1326306 - RNA, 19 nt, Artificial Sequence
  Description of Artificial Sequence: Synthetic oligonucleotide
gagucccggggagaagcag

SEQ ID NO: 1326307 - RNA, 19 nt, Artificial Sequence
  Description of Artificial Sequence: Synthetic oligonucleotide
caaagcaagcauuggugau

SEQ ID NO: 1326308 - RNA, 19 nt, Artificial Sequence
  Description of Artificial Sequence: Synthetic oligonucleotide
auaguguaagacagucaua

SEQ ID NO: 1326309 - RNA, 19 nt, Artificial Sequence
  Description of Artificial Sequence: Synthetic oligonucleotide
agucccggggagaagcagu

SEQ ID NO: 1326310 - RNA, 19 nt, Artificial Sequence
  Description of Artificial Sequence: Synthetic oligonucleotide
gcccugaagaccucgugca

SEQ ID NO: 1326311 - RNA, 19 nt, Artificial Sequence
  Description of Artificial Sequence: Synthetic oligonucleotide
ugcagcacaugggcuaaua

SEQ ID NO: 1326312 - RNA, 19 nt, Artificial Sequence
  Description of Artificial Sequence: Synthetic oligonucleotide
cgaggucugaguuaagaga

SEQ ID NO: 1326313 - RNA, 19 nt, Artificial Sequence
  Description of Artificial Sequence: Synthetic oligonucleotide
ggaccucccacuagcagac

SEQ ID NO: 1326314 - RNA, 19 nt, Artificial Sequence
  Description of Artificial Sequence: Synthetic oligonucleotide
aagcgguccgcgaggucug

SEQ ID NO: 1326315 - RNA, 19 nt, Artificial Sequence
  Description of Artificial Sequence: Synthetic oligonucleotide
gcagugugaguccgccucc

SEQ ID NO: 1326316 - RNA, 19 nt, Artificial Sequence
  Description of Artificial Sequence: Synthetic oligonucleotide
ccuucagcacugucugccc

SEQ ID NO: 1326317 - RNA, 19 nt, Artificial Sequence
  Description of Artificial Sequence: Synthetic oligonucleotide
gcuacuguaagcugcucau

SEQ ID NO: 1326318 - RNA, 19 nt, Artificial Sequence
  Description of Artificial Sequence: Synthetic oligonucleotide
cacucacgcauguugucua

SEQ ID NO: 1326319 - RNA, 19 nt, Artificial Sequence
  Description of Artificial Sequence: Synthetic oligonucleotide
gcaagcauuggugaucucu

SEQ ID NO: 1326320 - RNA, 19 nt, Artificial Sequence
  Description of Artificial Sequence: Synthetic oligonucleotide
ccucccacuagcagacuac

SEQ ID NO: 1326321 - RNA, 19 nt, Artificial Sequence
  Description of Artificial Sequence: Synthetic oligonucleotide
gucccggggagaagcagug

SEQ ID NO: 1326322 - RNA, 19 nt, Artificial Sequence
  Description of Artificial Sequence: Synthetic oligonucleotide
cacgcauguugucuaggaa

SEQ ID NO: 1326323 - RNA, 19 nt, Artificial Sequence
  Description of Artificial Sequence: Synthetic oligonucleotide
cagcacaugggcuaauauu

SEQ ID NO: 1326324 - RNA, 19 nt, Artificial Sequence
  Description of Artificial Sequence: Synthetic oligonucleotide
uggugagaauggaguugua

SEQ ID NO: 1326325 - RNA, 19 nt, Artificial Sequence
  Description of Artificial Sequence: Synthetic oligonucleotide
aggaagcgguccgcgaggu

SEQ ID NO: 1326326 - RNA, 19 nt, Artificial Sequence
  Description of Artificial Sequence: Synthetic oligonucleotide
acaagacaaugaaguguaa

SEQ ID NO: 1326327 - RNA, 19 nt, Artificial Sequence
  Description of Artificial Sequence: Synthetic oligonucleotide
cccacuagcagacuaccaa

SEQ ID NO: 1326328 - RNA, 19 nt, Artificial Sequence
  Description of Artificial Sequence: Synthetic oligonucleotide
cccggggagaagcagugug

SEQ ID NO: 1326329 - RNA, 19 nt, Artificial Sequence
  Description of Artificial Sequence: Synthetic oligonucleotide
gcagacuaccaaggagucc

SEQ ID NO: 1326330 - RNA, 19 nt, Artificial Sequence
  Description of Artificial Sequence: Synthetic oligonucleotide
gaacacagcccggggcaca

SEQ ID NO: 1326331 - RNA, 19 nt, Artificial Sequence
  Description of Artificial Sequence: Synthetic oligonucleotide
caaggagucccggggagaa

SEQ ID NO: 1326332 - RNA, 19 nt, Artificial Sequence
  Description of Artificial Sequence: Synthetic oligonucleotide
agagggugacgaggaccuc

SEQ ID NO: 1326333 - RNA, 19 nt, Artificial Sequence
  Description of Artificial Sequence: Synthetic oligonucleotide
ccccaacuuccucauaauc

SEQ ID NO: 1326334 - RNA, 19 nt, Artificial Sequence
  Description of Artificial Sequence: Synthetic oligonucleotide
guguaaaauugcagcacau

SEQ ID NO: 1326335 - RNA, 19 nt, Artificial Sequence
  Description of Artificial Sequence: Synthetic oligonucleotide
ccucaucaucuccuucagc

SEQ ID NO: 1326336 - RNA, 19 nt, Artificial Sequence
  Description of Artificial Sequence: Synthetic oligonucleotide
ccucgugcacuggucagcc

SEQ ID NO: 1326337 - RNA, 19 nt, Artificial Sequence
  Description of Artificial Sequence: Synthetic oligonucleotide
ggcuaauauucuucacccu

SEQ ID NO: 1326338 - RNA, 19 nt, Artificial Sequence
  Description of Artificial Sequence: Synthetic oligonucleotide
gaagcccugaagaccucgu

SEQ ID NO: 1326339 - RNA, 19 nt, Artificial Sequence
  Description of Artificial Sequence: Synthetic oligonucleotide
cacaugggcuaauauucuu

SEQ ID NO: 1326340 - RNA, 19 nt, Artificial Sequence
  Description of Artificial Sequence: Synthetic oligonucleotide
gucugaguuaagagagggu

SEQ ID NO: 1326341 - RNA, 19 nt, Artificial Sequence
  Description of Artificial Sequence: Synthetic oligonucleotide
gcuuacgaauucuguccaa

SEQ ID NO: 1326342 - RNA, 19 nt, Artificial Sequence
  Description of Artificial Sequence: Synthetic oligonucleotide
cugucugccccaacuuccu

SEQ ID NO: 1326343 - RNA, 19 nt, Artificial Sequence
  Description of Artificial Sequence: Synthetic oligonucleotide
ucccggggagaagcagugu

SEQ ID NO: 1326344 - RNA, 19 nt, Artificial Sequence
  Description of Artificial Sequence: Synthetic oligonucleotide
guccgcgaggucugaguua

SEQ ID NO: 1326345 - RNA, 19 nt, Artificial Sequence
  Description of Artificial Sequence: Synthetic oligonucleotide
cccugaagaccucgugcac

SEQ ID NO: 1326346 - RNA, 19 nt, Artificial Sequence
  Description of Artificial Sequence: Synthetic oligonucleotide
cugcuacuguaagcugcuc

SEQ ID NO: 1326347 - RNA, 19 nt, Artificial Sequence
  Description of Artificial Sequence: Synthetic oligonucleotide
cagugugaguccgccucca

SEQ ID NO: 1326348 - RNA, 19 nt, Artificial Sequence
  Description of Artificial Sequence: Synthetic oligonucleotide
cucgugcacuggucagcca

SEQ ID NO: 1326349 - RNA, 19 nt, Artificial Sequence
  Description of Artificial Sequence: Synthetic oligonucleotide
uugcagcacaugggcuaau

SEQ ID NO: 1326350 - RNA, 19 nt, Artificial Sequence
  Description of Artificial Sequence: Synthetic oligonucleotide
acagcccggggcacaugcu

SEQ ID NO: 1326351 - RNA, 19 nt, Artificial Sequence
  Description of Artificial Sequence: Synthetic oligonucleotide
gcagcacaugggcuaauau

SEQ ID NO: 1326352 - RNA, 19 nt, Artificial Sequence
  Description of Artificial Sequence: Synthetic oligonucleotide
cagcacugucugccccaac

SEQ ID NO: 1326353 - RNA, 19 nt, Artificial Sequence
  Description of Artificial Sequence: Synthetic oligonucleotide
gcacucacgcauguugucu

SEQ ID NO: 1326354 - RNA, 19 nt, Artificial Sequence
  Description of Artificial Sequence: Synthetic oligonucleotide
gccagcuuacgaauucugu

SEQ ID NO: 1326355 - RNA, 19 nt, Artificial Sequence
  Description of Artificial Sequence: Synthetic oligonucleotide
gcacaugggcuaauauucu

SEQ ID NO: 1326356 - RNA, 19 nt, Artificial Sequence
  Description of Artificial Sequence: Synthetic oligonucleotide
gguccgcgaggucugaguu

SEQ ID NO: 1326357 - RNA, 19 nt, Artificial Sequence
  Description of Artificial Sequence: Synthetic oligonucleotide
ucuggccaucaggcuggau

SEQ ID NO: 1326358 - RNA, 19 nt, Artificial Sequence
  Description of Artificial Sequence: Synthetic oligonucleotide
ggagucccggggagaagca

SEQ ID NO: 1326359 - RNA, 19 nt, Artificial Sequence
  Description of Artificial Sequence: Synthetic oligonucleotide
ggaagcgguccgcgagguc

SEQ ID NO: 1326360 - RNA, 19 nt, Artificial Sequence
  Description of Artificial Sequence: Synthetic oligonucleotide
aucuggccaucaggcugga

SEQ ID NO: 1326361 - RNA, 19 nt, Artificial Sequence
  Description of Artificial Sequence: Synthetic oligonucleotide
ccugaagaccucgugcacu

SEQ ID NO: 1326362 - RNA, 19 nt, Artificial Sequence
  Description of Artificial Sequence: Synthetic oligonucleotide
agcgguccgcgaggucuga

SEQ ID NO: 1326363 - RNA, 19 nt, Artificial Sequence
  Description of Artificial Sequence: Synthetic oligonucleotide
cgcgaggucugaguuaaga

SEQ ID NO: 1326364 - RNA, 19 nt, Artificial Sequence
  Description of Artificial Sequence: Synthetic oligonucleotide
gcacugucugccccaacuu

SEQ ID NO: 1326365 - RNA, 19 nt, Artificial Sequence
  Description of Artificial Sequence: Synthetic oligonucleotide
cgaggaccucccacuagca

SEQ ID NO: 1326366 - RNA, 19 nt, Artificial Sequence
  Description of Artificial Sequence: Synthetic oligonucleotide
ccaaggagucccggggaga

SEQ ID NO: 1326367 - RNA, 19 nt, Artificial Sequence
  Description of Artificial Sequence: Synthetic oligonucleotide
gggugacgaggaccuccca

SEQ ID NO: 1326368 - RNA, 19 nt, Artificial Sequence
  Description of Artificial Sequence: Synthetic oligonucleotide
cagcccggggcacaugcuu

SEQ ID NO: 1326369 - RNA, 19 nt, Artificial Sequence
  Description of Artificial Sequence: Synthetic oligonucleotide
gcgguccgcgaggucugag

SEQ ID NO: 1326370 - RNA, 19 nt, Artificial Sequence
  Description of Artificial Sequence: Synthetic oligonucleotide
gaccucccacuagcagacu

SEQ ID NO: 1326371 - RNA, 19 nt, Artificial Sequence
  Description of Artificial Sequence: Synthetic oligonucleotide
cugccccaacuuccucaua

SEQ ID NO: 1326372 - RNA, 19 nt, Artificial Sequence
  Description of Artificial Sequence: Synthetic oligonucleotide
ccgcgaggucugaguuaag

SEQ ID NO: 1326373 - RNA, 19 nt, Artificial Sequence
  Description of Artificial Sequence: Synthetic oligonucleotide
cgguccgcgaggucugagu

SEQ ID NO: 1326374 - RNA, 19 nt, Artificial Sequence
  Description of Artificial Sequence: Synthetic oligonucleotide
aaauuaaugcaccuuaaag

SEQ ID NO: 1326375 - RNA, 19 nt, Artificial Sequence
  Description of Artificial Sequence: Synthetic oligonucleotide
aauauagugcaauugccgg

SEQ ID NO: 1326376 - RNA, 19 nt, Artificial Sequence
  Description of Artificial Sequence: Synthetic oligonucleotide
uuaacuuucuaugagaaag

SEQ ID NO: 1326377 - RNA, 19 nt, Artificial Sequence
  Description of Artificial Sequence: Synthetic oligonucleotide
aauaugaguaugucaauag

SEQ ID NO: 1326378 - RNA, 19 nt, Artificial Sequence
  Description of Artificial Sequence: Synthetic oligonucleotide
auuaguaagaugaacaaac

SEQ ID NO: 1326379 - RNA, 19 nt, Artificial Sequence
  Description of Artificial Sequence: Synthetic oligonucleotide
aaugaggaugccuaaauug

SEQ ID NO: 1326380 - RNA, 19 nt, Artificial Sequence
  Description of Artificial Sequence: Synthetic oligonucleotide
uauuuuacgaagcugguca

SEQ ID NO: 1326381 - RNA, 19 nt, Artificial Sequence
  Description of Artificial Sequence: Synthetic oligonucleotide
agugaaacaguugucaucc

SEQ ID NO: 1326382 - RNA, 19 nt, Artificial Sequence
  Description of Artificial Sequence: Synthetic oligonucleotide
cauaccauuaguaagauga

SEQ ID NO: 1326383 - RNA, 19 nt, Artificial Sequence
  Description of Artificial Sequence: Synthetic oligonucleotide
uuaaaucuuuccuacauug

SEQ ID NO: 1326384 - RNA, 19 nt, Artificial Sequence
  Description of Artificial Sequence: Synthetic oligonucleotide
accacuauuagcugcaggc

SEQ ID NO: 1326385 - RNA, 19 nt, Artificial Sequence
  Description of Artificial Sequence: Synthetic oligonucleotide
aauugguugaguucuuuuc

SEQ ID NO: 1326386 - RNA, 19 nt, Artificial Sequence
  Description of Artificial Sequence: Synthetic oligonucleotide
aagauaaccacuauuagcu

SEQ ID NO: 1326387 - RNA, 19 nt, Artificial Sequence
  Description of Artificial Sequence: Synthetic oligonucleotide
aaaccauaccauuaguaag

SEQ ID NO: 1326388 - RNA, 19 nt, Artificial Sequence
  Description of Artificial Sequence: Synthetic oligonucleotide
uucacuuccgcauauacug

SEQ ID NO: 1326389 - RNA, 19 nt, Artificial Sequence
  Description of Artificial Sequence: Synthetic oligonucleotide
aaagaauaugaguauguca

SEQ ID NO: 1326390 - RNA, 19 nt, Artificial Sequence
  Description of Artificial Sequence: Synthetic oligonucleotide
ucucaggcaaaauacauag

SEQ ID NO: 1326391 - RNA, 19 nt, Artificial Sequence
  Description of Artificial Sequence: Synthetic oligonucleotide
auugguugaguucuuuucc

SEQ ID NO: 1326392 - RNA, 19 nt, Artificial Sequence
  Description of Artificial Sequence: Synthetic oligonucleotide
gaagagaucaguaagauaa

SEQ ID NO: 1326393 - RNA, 19 nt, Artificial Sequence
  Description of Artificial Sequence: Synthetic oligonucleotide
acauaugucauuuucagau

SEQ ID NO: 1326394 - RNA, 19 nt, Artificial Sequence
  Description of Artificial Sequence: Synthetic oligonucleotide
uaugucaauagcaagggaa

SEQ ID NO: 1326395 - RNA, 19 nt, Artificial Sequence
  Description of Artificial Sequence: Synthetic oligonucleotide
aaauacauagugugcuggg

SEQ ID NO: 1326396 - RNA, 19 nt, Artificial Sequence
  Description of Artificial Sequence: Synthetic oligonucleotide
aaaauacauagugugcugg

SEQ ID NO: 1326397 - RNA, 19 nt, Artificial Sequence
  Description of Artificial Sequence: Synthetic oligonucleotide
aguaagauaaagcagugaa

SEQ ID NO: 1326398 - RNA, 19 nt, Artificial Sequence
  Description of Artificial Sequence: Synthetic oligonucleotide
aagaauaugaguaugucaa

SEQ ID NO: 1326399 - RNA, 19 nt, Artificial Sequence
  Description of Artificial Sequence: Synthetic oligonucleotide
uaaguuaaaucuuuccuac

SEQ ID NO: 1326400 - RNA, 19 nt, Artificial Sequence
  Description of Artificial Sequence: Synthetic oligonucleotide
uuaaacaugggcuccacac

SEQ ID NO: 1326401 - RNA, 19 nt, Artificial Sequence
  Description of Artificial Sequence: Synthetic oligonucleotide
caagauaaccacuauuagc

SEQ ID NO: 1326402 - RNA, 19 nt, Artificial Sequence
  Description of Artificial Sequence: Synthetic oligonucleotide
aagaaaaucuuucccagaa

SEQ ID NO: 1326403 - RNA, 19 nt, Artificial Sequence
  Description of Artificial Sequence: Synthetic oligonucleotide
uuaacaaaccacacagcag

SEQ ID NO: 1326404 - RNA, 19 nt, Artificial Sequence
  Description of Artificial Sequence: Synthetic oligonucleotide
aaagcagugaaaguaauau

SEQ ID NO: 1326405 - RNA, 19 nt, Artificial Sequence
  Description of Artificial Sequence: Synthetic oligonucleotide
gauaaccacuauuagcugc

SEQ ID NO: 1326406 - RNA, 19 nt, Artificial Sequence
  Description of Artificial Sequence: Synthetic oligonucleotide
ugugcauacuugcagaaac

SEQ ID NO: 1326407 - RNA, 19 nt, Artificial Sequence
  Description of Artificial Sequence: Synthetic oligonucleotide
gaguaugucaauagcaagg

SEQ ID NO: 1326408 - RNA, 19 nt, Artificial Sequence
  Description of Artificial Sequence: Synthetic oligonucleotide
uuaaguuaaaucuuuccua

SEQ ID NO: 1326409 - RNA, 19 nt, Artificial Sequence
  Description of Artificial Sequence: Synthetic oligonucleotide
aagucaguagcugaaguuc

SEQ ID NO: 1326410 - RNA, 19 nt, Artificial Sequence
  Description of Artificial Sequence: Synthetic oligonucleotide
aaaggguaucuccaacacg

SEQ ID NO: 1326411 - RNA, 19 nt, Artificial Sequence
  Description of Artificial Sequence: Synthetic oligonucleotide
aaguuaacuuucuaugaga

SEQ ID NO: 1326412 - RNA, 19 nt, Artificial Sequence
  Description of Artificial Sequence: Synthetic oligonucleotide
cuuucuaugagaaaguuua

SEQ ID NO: 1326413 - RNA, 19 nt, Artificial Sequence
  Description of Artificial Sequence: Synthetic oligonucleotide
aggcaaaauacauagugug

SEQ ID NO: 1326414 - RNA, 19 nt, Artificial Sequence
  Description of Artificial Sequence: Synthetic oligonucleotide
gauguuuaaacaugggcuc

SEQ ID NO: 1326415 - RNA, 19 nt, Artificial Sequence
  Description of Artificial Sequence: Synthetic oligonucleotide
cuuggaguauuuuacgaag

SEQ ID NO: 1326416 - RNA, 19 nt, Artificial Sequence
  Description of Artificial Sequence: Synthetic oligonucleotide
aacggcaaauagcuuauug

SEQ ID NO: 1326417 - RNA, 19 nt, Artificial Sequence
  Description of Artificial Sequence: Synthetic oligonucleotide
ucugaggcgcaaaacaagc

SEQ ID NO: 1326418 - RNA, 19 nt, Artificial Sequence
  Description of Artificial Sequence: Synthetic oligonucleotide
auaaaacugcuuuccucgc

SEQ ID NO: 1326419 - RNA, 19 nt, Artificial Sequence
  Description of Artificial Sequence: Synthetic oligonucleotide
uaaugugaaggacggcugg

SEQ ID NO: 1326420 - RNA, 19 nt, Artificial Sequence
  Description of Artificial Sequence: Synthetic oligonucleotide
aguaugucaauagcaaggg

SEQ ID NO: 1326421 - RNA, 19 nt, Artificial Sequence
  Description of Artificial Sequence: Synthetic oligonucleotide
acaaaagccagccaaguaa

SEQ ID NO: 1326422 - RNA, 19 nt, Artificial Sequence
  Description of Artificial Sequence: Synthetic oligonucleotide
ugugugaugguacuaugcu

SEQ ID NO: 1326423 - RNA, 19 nt, Artificial Sequence
  Description of Artificial Sequence: Synthetic oligonucleotide
aaugggcacuuuugaaaac

SEQ ID NO: 1326424 - RNA, 19 nt, Artificial Sequence
  Description of Artificial Sequence: Synthetic oligonucleotide
auauagugcaauugccggg

SEQ ID NO: 1326425 - RNA, 19 nt, Artificial Sequence
  Description of Artificial Sequence: Synthetic oligonucleotide
uccuacauuguuucugagg

SEQ ID NO: 1326426 - RNA, 19 nt, Artificial Sequence
  Description of Artificial Sequence: Synthetic oligonucleotide
ugaaaguaauauguaaaac

SEQ ID NO: 1326427 - RNA, 19 nt, Artificial Sequence
  Description of Artificial Sequence: Synthetic oligonucleotide
uuuuacauggcaguguuau

SEQ ID NO: 1326428 - RNA, 19 nt, Artificial Sequence
  Description of Artificial Sequence: Synthetic oligonucleotide
agaccugguaaugugaagg

SEQ ID NO: 1326429 - RNA, 19 nt, Artificial Sequence
  Description of Artificial Sequence: Synthetic oligonucleotide
agcagugaaaguaauaugu

SEQ ID NO: 1326430 - RNA, 19 nt, Artificial Sequence
  Description of Artificial Sequence: Synthetic oligonucleotide
cuuagccaaggccugaggg

SEQ ID NO: 1326431 - RNA, 19 nt, Artificial Sequence
  Description of Artificial Sequence: Synthetic oligonucleotide
uuggaguauuuuacgaagc

SEQ ID NO: 1326432 - RNA, 19 nt, Artificial Sequence
  Description of Artificial Sequence: Synthetic oligonucleotide
uuaaugcaccuuaaaggca

SEQ ID NO: 1326433 - RNA, 19 nt, Artificial Sequence
  Description of Artificial Sequence: Synthetic oligonucleotide
uaaugcaccuuaaaggcau

SEQ ID NO: 1326434 - RNA, 19 nt, Artificial Sequence
  Description of Artificial Sequence: Synthetic oligonucleotide
uauuccggccuccauacug

SEQ ID NO: 1326435 - RNA, 19 nt, Artificial Sequence
  Description of Artificial Sequence: Synthetic oligonucleotide
uaccuaaaaggguaucucc

SEQ ID NO: 1326436 - RNA, 19 nt, Artificial Sequence
  Description of Artificial Sequence: Synthetic oligonucleotide
accuuaaaggcauguacag

SEQ ID NO: 1326437 - RNA, 19 nt, Artificial Sequence
  Description of Artificial Sequence: Synthetic oligonucleotide
aauagcaagggaaaagaaa

SEQ ID NO: 1326438 - RNA, 19 nt, Artificial Sequence
  Description of Artificial Sequence: Synthetic oligonucleotide
agcaagggaaaagaaaauc

SEQ ID NO: 1326439 - RNA, 19 nt, Artificial Sequence
  Description of Artificial Sequence: Synthetic oligonucleotide
ugaggcgcaaaacaagcca

SEQ ID NO: 1326440 - RNA, 19 nt, Artificial Sequence
  Description of Artificial Sequence: Synthetic oligonucleotide
agacucucaggcaaaauac

SEQ ID NO: 1326441 - RNA, 19 nt, Artificial Sequence
  Description of Artificial Sequence: Synthetic oligonucleotide
aaccauaccauuaguaaga

SEQ ID NO: 1326442 - RNA, 19 nt, Artificial Sequence
  Description of Artificial Sequence: Synthetic oligonucleotide
uguuaucugucccugugac

SEQ ID NO: 1326443 - RNA, 19 nt, Artificial Sequence
  Description of Artificial Sequence: Synthetic oligonucleotide
uguuuaugucacauauuca

SEQ ID NO: 1326444 - RNA, 19 nt, Artificial Sequence
  Description of Artificial Sequence: Synthetic oligonucleotide
aauuccugcaugacuacag

SEQ ID NO: 1326445 - RNA, 19 nt, Artificial Sequence
  Description of Artificial Sequence: Synthetic oligonucleotide
aacacguuucacuuccgca

SEQ ID NO: 1326446 - RNA, 19 nt, Artificial Sequence
  Description of Artificial Sequence: Synthetic oligonucleotide
augacuacagagguaaaag

SEQ ID NO: 1326447 - RNA, 19 nt, Artificial Sequence
  Description of Artificial Sequence: Synthetic oligonucleotide
ugcccaaacuuuaauuuca

SEQ ID NO: 1326448 - RNA, 19 nt, Artificial Sequence
  Description of Artificial Sequence: Synthetic oligonucleotide
uuuccuacauuguuucuga

SEQ ID NO: 1326449 - RNA, 19 nt, Artificial Sequence
  Description of Artificial Sequence: Synthetic oligonucleotide
augaggaugccuaaauugg

SEQ ID NO: 1326450 - RNA, 19 nt, Artificial Sequence
  Description of Artificial Sequence: Synthetic oligonucleotide
ucaugguggaucugcacag

SEQ ID NO: 1326451 - RNA, 19 nt, Artificial Sequence
  Description of Artificial Sequence: Synthetic oligonucleotide
auguuuaaacaugggcucc

SEQ ID NO: 1326452 - RNA, 19 nt, Artificial Sequence
  Description of Artificial Sequence: Synthetic oligonucleotide
cauccuuggaguauuuuac

SEQ ID NO: 1326453 - RNA, 19 nt, Artificial Sequence
  Description of Artificial Sequence: Synthetic oligonucleotide
uuuacgaagcuggucagug

SEQ ID NO: 1326454 - RNA, 19 nt, Artificial Sequence
  Description of Artificial Sequence: Synthetic oligonucleotide
ccaaauauagugcaauugc

SEQ ID NO: 1326455 - RNA, 19 nt, Artificial Sequence
  Description of Artificial Sequence: Synthetic oligonucleotide
uccgucaucucauugugga

SEQ ID NO: 1326456 - RNA, 19 nt, Artificial Sequence
  Description of Artificial Sequence: Synthetic oligonucleotide
uauagugcaauugccgggc

SEQ ID NO: 1326457 - RNA, 19 nt, Artificial Sequence
  Description of Artificial Sequence: Synthetic oligonucleotide
cucgcuguggcuuuuauca

SEQ ID NO: 1326458 - RNA, 19 nt, Artificial Sequence
  Description of Artificial Sequence: Synthetic oligonucleotide
ugacuacagagguaaaagu

SEQ ID NO: 1326459 - RNA, 19 nt, Artificial Sequence
  Description of Artificial Sequence: Synthetic oligonucleotide
aauuucaaugccagcauaa

SEQ ID NO: 1326460 - RNA, 19 nt, Artificial Sequence
  Description of Artificial Sequence: Synthetic oligonucleotide
uaaacaugggcuccacacu

SEQ ID NO: 1326461 - RNA, 19 nt, Artificial Sequence
  Description of Artificial Sequence: Synthetic oligonucleotide
ucaucugcagugaaacagu

SEQ ID NO: 1326462 - RNA, 19 nt, Artificial Sequence
  Description of Artificial Sequence: Synthetic oligonucleotide
gacuacagagguaaaaguc

SEQ ID NO: 1326463 - RNA, 19 nt, Artificial Sequence
  Description of Artificial Sequence: Synthetic oligonucleotide
aucuccaacacguuucacu

SEQ ID NO: 1326464 - RNA, 19 nt, Artificial Sequence
  Description of Artificial Sequence: Synthetic oligonucleotide
ucacuuccgcauauacugg

SEQ ID NO: 1326465 - RNA, 19 nt, Artificial Sequence
  Description of Artificial Sequence: Synthetic oligonucleotide
uuccaaauagggagaacac

SEQ ID NO: 1326466 - RNA, 19 nt, Artificial Sequence
  Description of Artificial Sequence: Synthetic oligonucleotide
acuacagagguaaaaguca

SEQ ID NO: 1326467 - RNA, 19 nt, Artificial Sequence
  Description of Artificial Sequence: Synthetic oligonucleotide
cacuauuagcugcaggccc

SEQ ID NO: 1326468 - RNA, 19 nt, Artificial Sequence
  Description of Artificial Sequence: Synthetic oligonucleotide
auuuuacgaagcuggucag

SEQ ID NO: 1326469 - RNA, 19 nt, Artificial Sequence
  Description of Artificial Sequence: Synthetic oligonucleotide
aaaacaagccacugcccaa

SEQ ID NO: 1326470 - RNA, 19 nt, Artificial Sequence
  Description of Artificial Sequence: Synthetic oligonucleotide
cauaauaugcaggggcagg

SEQ ID NO: 1326471 - RNA, 19 nt, Artificial Sequence
  Description of Artificial Sequence: Synthetic oligonucleotide
uuuaaacaugggcuccaca

SEQ ID NO: 1326472 - RNA, 19 nt, Artificial Sequence
  Description of Artificial Sequence: Synthetic oligonucleotide
aagaccugguaaugugaag

SEQ ID NO: 1326473 - RNA, 19 nt, Artificial Sequence
  Description of Artificial Sequence: Synthetic oligonucleotide
uacuugcagaaacauggcu

SEQ ID NO: 1326474 - RNA, 19 nt, Artificial Sequence
  Description of Artificial Sequence: Synthetic oligonucleotide
ccugguaaugugaaggacg

SEQ ID NO: 1326475 - RNA, 19 nt, Artificial Sequence
  Description of Artificial Sequence: Synthetic oligonucleotide
agagaucaguaagauaaag

SEQ ID NO: 1326476 - RNA, 19 nt, Artificial Sequence
  Description of Artificial Sequence: Synthetic oligonucleotide
aauacauagugugcugggu

SEQ ID NO: 1326477 - RNA, 19 nt, Artificial Sequence
  Description of Artificial Sequence: Synthetic oligonucleotide
uguuugaaucugcagccaa

SEQ ID NO: 1326478 - RNA, 19 nt, Artificial Sequence
  Description of Artificial Sequence: Synthetic oligonucleotide
ugugagcuccgucaucuca

SEQ ID NO: 1326479 - RNA, 19 nt, Artificial Sequence
  Description of Artificial Sequence: Synthetic oligonucleotide
cuaaaaggguaucuccaac

SEQ ID NO: 1326480 - RNA, 19 nt, Artificial Sequence
  Description of Artificial Sequence: Synthetic oligonucleotide
cagaaacauggcucgaccc

SEQ ID NO: 1326481 - RNA, 19 nt, Artificial Sequence
  Description of Artificial Sequence: Synthetic oligonucleotide
uaauuucaaugccagcaua

SEQ ID NO: 1326482 - RNA, 19 nt, Artificial Sequence
  Description of Artificial Sequence: Synthetic oligonucleotide
aguagacacagaaagaaua

SEQ ID NO: 1326483 - RNA, 19 nt, Artificial Sequence
  Description of Artificial Sequence: Synthetic oligonucleotide
gucagguccacccaccaug

SEQ ID NO: 1326484 - RNA, 19 nt, Artificial Sequence
  Description of Artificial Sequence: Synthetic oligonucleotide
gaugccuaaauugguugag

SEQ ID NO: 1326485 - RNA, 19 nt, Artificial Sequence
  Description of Artificial Sequence: Synthetic oligonucleotide
auugccgggcaguuugcac

SEQ ID NO: 1326486 - RNA, 19 nt, Artificial Sequence
  Description of Artificial Sequence: Synthetic oligonucleotide
cuacauuguuucugaggcg

SEQ ID NO: 1326487 - RNA, 19 nt, Artificial Sequence
  Description of Artificial Sequence: Synthetic oligonucleotide
uccaaauagggagaacacu

SEQ ID NO: 1326488 - RNA, 19 nt, Artificial Sequence
  Description of Artificial Sequence: Synthetic oligonucleotide
uacauagugugcuggguau

SEQ ID NO: 1326489 - RNA, 19 nt, Artificial Sequence
  Description of Artificial Sequence: Synthetic oligonucleotide
auggcucgacccuggaugg

SEQ ID NO: 1326490 - RNA, 19 nt, Artificial Sequence
  Description of Artificial Sequence: Synthetic oligonucleotide
aguaagagaacugcccugu

SEQ ID NO: 1326491 - RNA, 19 nt, Artificial Sequence
  Description of Artificial Sequence: Synthetic oligonucleotide
gggcauaauaugcaggggc

SEQ ID NO: 1326492 - RNA, 19 nt, Artificial Sequence
  Description of Artificial Sequence: Synthetic oligonucleotide
uugcguuuaucuucaggca

SEQ ID NO: 1326493 - RNA, 19 nt, Artificial Sequence
  Description of Artificial Sequence: Synthetic oligonucleotide
ccaaguaagagaacugccc

SEQ ID NO: 1326494 - RNA, 19 nt, Artificial Sequence
  Description of Artificial Sequence: Synthetic oligonucleotide
cuacuguuuuauuccggcc

SEQ ID NO: 1326495 - RNA, 19 nt, Artificial Sequence
  Description of Artificial Sequence: Synthetic oligonucleotide
cacaagaccugguaaugug

SEQ ID NO: 1326496 - RNA, 19 nt, Artificial Sequence
  Description of Artificial Sequence: Synthetic oligonucleotide
aguuaacuuucuaugagaa

SEQ ID NO: 1326497 - RNA, 19 nt, Artificial Sequence
  Description of Artificial Sequence: Synthetic oligonucleotide
uuugaccuggacacacugu

SEQ ID NO: 1326498 - RNA, 19 nt, Artificial Sequence
  Description of Artificial Sequence: Synthetic oligonucleotide
cuggguaucaugguggauc

SEQ ID NO: 1326499 - RNA, 19 nt, Artificial Sequence
  Description of Artificial Sequence: Synthetic oligonucleotide
uggguaucaugguggaucu

SEQ ID NO: 1326500 - RNA, 19 nt, Artificial Sequence
  Description of Artificial Sequence: Synthetic oligonucleotide
auacauagugugcugggua

SEQ ID NO: 1326501 - RNA, 19 nt, Artificial Sequence
  Description of Artificial Sequence: Synthetic oligonucleotide
uggccauaccuaaaagggu

SEQ ID NO: 1326502 - RNA, 19 nt, Artificial Sequence
  Description of Artificial Sequence: Synthetic oligonucleotide
uugcccgaaaugcuaccag

SEQ ID NO: 1326503 - RNA, 19 nt, Artificial Sequence
  Description of Artificial Sequence: Synthetic oligonucleotide
auuccggccuccauacugc

SEQ ID NO: 1326504 - RNA, 19 nt, Artificial Sequence
  Description of Artificial Sequence: Synthetic oligonucleotide
accugguugguguggcuac

SEQ ID NO: 1326505 - RNA, 19 nt, Artificial Sequence
  Description of Artificial Sequence: Synthetic oligonucleotide
guaauauguaaaacuuuca

SEQ ID NO: 1326506 - RNA, 19 nt, Artificial Sequence
  Description of Artificial Sequence: Synthetic oligonucleotide
agaacugcccuguuugaau

SEQ ID NO: 1326507 - RNA, 19 nt, Artificial Sequence
  Description of Artificial Sequence: Synthetic oligonucleotide
gcaagauaaccacuauuag

SEQ ID NO: 1326508 - RNA, 19 nt, Artificial Sequence
  Description of Artificial Sequence: Synthetic oligonucleotide
caaaccacaucuguuuaug

SEQ ID NO: 1326509 - RNA, 19 nt, Artificial Sequence
  Description of Artificial Sequence: Synthetic oligonucleotide
aacuuucuaugagaaaguu

SEQ ID NO: 1326510 - RNA, 19 nt, Artificial Sequence
  Description of Artificial Sequence: Synthetic oligonucleotide
ugcccgaaaugcuaccagc

SEQ ID NO: 1326511 - RNA, 19 nt, Artificial Sequence
  Description of Artificial Sequence: Synthetic oligonucleotide
gguaucaugguggaucugc

SEQ ID NO: 1326512 - RNA, 19 nt, Artificial Sequence
  Description of Artificial Sequence: Synthetic oligonucleotide
agaauaugaguaugucaau

SEQ ID NO: 1326513 - RNA, 19 nt, Artificial Sequence
  Description of Artificial Sequence: Synthetic oligonucleotide
auuagcugcaggcccacau

SEQ ID NO: 1326514 - RNA, 19 nt, Artificial Sequence
  Description of Artificial Sequence: Synthetic oligonucleotide
auaaccacuauuagcugca

SEQ ID NO: 1326515 - RNA, 19 nt, Artificial Sequence
  Description of Artificial Sequence: Synthetic oligonucleotide
gcuacuguuuuauuccggc

SEQ ID NO: 1326516 - RNA, 19 nt, Artificial Sequence
  Description of Artificial Sequence: Synthetic oligonucleotide
aaugugaaggacggcuggu

SEQ ID NO: 1326517 - RNA, 19 nt, Artificial Sequence
  Description of Artificial Sequence: Synthetic oligonucleotide
ugguacuaugcuuugcguu

SEQ ID NO: 1326518 - RNA, 19 nt, Artificial Sequence
  Description of Artificial Sequence: Synthetic oligonucleotide
agaaaaucuuucccagaaa

SEQ ID NO: 1326519 - RNA, 19 nt, Artificial Sequence
  Description of Artificial Sequence: Synthetic oligonucleotide
cugaggcgcaaaacaagcc

SEQ ID NO: 1326520 - RNA, 19 nt, Artificial Sequence
  Description of Artificial Sequence: Synthetic oligonucleotide
caucggagcuggaagcacc

SEQ ID NO: 1326521 - RNA, 19 nt, Artificial Sequence
  Description of Artificial Sequence: Synthetic oligonucleotide
agguccacccaccaugcug

SEQ ID NO: 1326522 - RNA, 19 nt, Artificial Sequence
  Description of Artificial Sequence: Synthetic oligonucleotide
auggaugugugaugguacu

SEQ ID NO: 1326523 - RNA, 19 nt, Artificial Sequence
  Description of Artificial Sequence: Synthetic oligonucleotide
aacuccgauggauguguga

SEQ ID NO: 1326524 - RNA, 19 nt, Artificial Sequence
  Description of Artificial Sequence: Synthetic oligonucleotide
ugccuaaauugguugaguu

SEQ ID NO: 1326525 - RNA, 19 nt, Artificial Sequence
  Description of Artificial Sequence: Synthetic oligonucleotide
gcaauugccgggcaguuug

SEQ ID NO: 1326526 - RNA, 19 nt, Artificial Sequence
  Description of Artificial Sequence: Synthetic oligonucleotide
cugucaggagcagaucucg

SEQ ID NO: 1326527 - RNA, 19 nt, Artificial Sequence
  Description of Artificial Sequence: Synthetic oligonucleotide
uagugcaauugccgggcag

SEQ ID NO: 1326528 - RNA, 19 nt, Artificial Sequence
  Description of Artificial Sequence: Synthetic oligonucleotide
uugccgggcaguuugcacu

SEQ ID NO: 1326529 - RNA, 19 nt, Artificial Sequence
  Description of Artificial Sequence: Synthetic oligonucleotide
ugcauacuugcagaaacau

SEQ ID NO: 1326530 - RNA, 19 nt, Artificial Sequence
  Description of Artificial Sequence: Synthetic oligonucleotide
cagugaaacaguugucauc

SEQ ID NO: 1326531 - RNA, 19 nt, Artificial Sequence
  Description of Artificial Sequence: Synthetic oligonucleotide
guaaugugaaggacggcug

SEQ ID NO: 1326532 - RNA, 19 nt, Artificial Sequence
  Description of Artificial Sequence: Synthetic oligonucleotide
uaucaugguggaucugcac

SEQ ID NO: 1326533 - RNA, 19 nt, Artificial Sequence
  Description of Artificial Sequence: Synthetic oligonucleotide
cuaugcuuugcguuuaucu

SEQ ID NO: 1326534 - RNA, 19 nt, Artificial Sequence
  Description of Artificial Sequence: Synthetic oligonucleotide
ugcaccucacguaggugug

SEQ ID NO: 1326535 - RNA, 19 nt, Artificial Sequence
  Description of Artificial Sequence: Synthetic oligonucleotide
acaaaccacaucuguuuau

SEQ ID NO: 1326536 - RNA, 19 nt, Artificial Sequence
  Description of Artificial Sequence: Synthetic oligonucleotide
accugguaaugugaaggac

SEQ ID NO: 1326537 - RNA, 19 nt, Artificial Sequence
  Description of Artificial Sequence: Synthetic oligonucleotide
uuacgaagcuggucaguga

SEQ ID NO: 1326538 - RNA, 19 nt, Artificial Sequence
  Description of Artificial Sequence: Synthetic oligonucleotide
accuaaaaggguaucucca

SEQ ID NO: 1326539 - RNA, 19 nt, Artificial Sequence
  Description of Artificial Sequence: Synthetic oligonucleotide
ggcaaaauacauagugugc

SEQ ID NO: 1326540 - RNA, 19 nt, Artificial Sequence
  Description of Artificial Sequence: Synthetic oligonucleotide
uuuacauggcaguguuauc

SEQ ID NO: 1326541 - RNA, 19 nt, Artificial Sequence
  Description of Artificial Sequence: Synthetic oligonucleotide
ugucaauagcaagggaaaa

SEQ ID NO: 1326542 - RNA, 19 nt, Artificial Sequence
  Description of Artificial Sequence: Synthetic oligonucleotide
augguacuaugcuuugcgu

SEQ ID NO: 1326543 - RNA, 19 nt, Artificial Sequence
  Description of Artificial Sequence: Synthetic oligonucleotide
augggcacuuuugaaaacu

SEQ ID NO: 1326544 - RNA, 19 nt, Artificial Sequence
  Description of Artificial Sequence: Synthetic oligonucleotide
cacuuuugaaaacuuggaa

SEQ ID NO: 1326545 - RNA, 19 nt, Artificial Sequence
  Description of Artificial Sequence: Synthetic oligonucleotide
cuacugauuucuuccuguc

SEQ ID NO: 1326546 - RNA, 19 nt, Artificial Sequence
  Description of Artificial Sequence: Synthetic oligonucleotide
caacacguuucacuuccgc

SEQ ID NO: 1326547 - RNA, 19 nt, Artificial Sequence
  Description of Artificial Sequence: Synthetic oligonucleotide
gaggcgcaaaacaagccac

SEQ ID NO: 1326548 - RNA, 19 nt, Artificial Sequence
  Description of Artificial Sequence: Synthetic oligonucleotide
ccauacugcagcaucggag

SEQ ID NO: 1326549 - RNA, 19 nt, Artificial Sequence
  Description of Artificial Sequence: Synthetic oligonucleotide
guuaacuuucuaugagaaa

SEQ ID NO: 1326550 - RNA, 19 nt, Artificial Sequence
  Description of Artificial Sequence: Synthetic oligonucleotide
ugguugaguucuuuuccaa

SEQ ID NO: 1326551 - RNA, 19 nt, Artificial Sequence
  Description of Artificial Sequence: Synthetic oligonucleotide
ugaccuggacacacugugu

SEQ ID NO: 1326552 - RNA, 19 nt, Artificial Sequence
  Description of Artificial Sequence: Synthetic oligonucleotide
ugaugguacuaugcuuugc

SEQ ID NO: 1326553 - RNA, 19 nt, Artificial Sequence
  Description of Artificial Sequence: Synthetic oligonucleotide
augucaauagcaagggaaa

SEQ ID NO: 1326554 - RNA, 19 nt, Artificial Sequence
  Description of Artificial Sequence: Synthetic oligonucleotide
uuuuacgaagcuggucagu

SEQ ID NO: 1326555 - RNA, 19 nt, Artificial Sequence
  Description of Artificial Sequence: Synthetic oligonucleotide
gugacugccuuccgcacug

SEQ ID NO: 1326556 - RNA, 19 nt, Artificial Sequence
  Description of Artificial Sequence: Synthetic oligonucleotide
gcagcaucggagcuggaag

SEQ ID NO: 1326557 - RNA, 19 nt, Artificial Sequence
  Description of Artificial Sequence: Synthetic oligonucleotide
acuauuagcugcaggccca

SEQ ID NO: 1326558 - RNA, 19 nt, Artificial Sequence
  Description of Artificial Sequence: Synthetic oligonucleotide
ccucgcaugucccagacac

SEQ ID NO: 1326559 - RNA, 19 nt, Artificial Sequence
  Description of Artificial Sequence: Synthetic oligonucleotide
ggcaagauaaccacuauua

SEQ ID NO: 1326560 - RNA, 19 nt, Artificial Sequence
  Description of Artificial Sequence: Synthetic oligonucleotide
gcaccuugugcauacuugc

SEQ ID NO: 1326561 - RNA, 19 nt, Artificial Sequence
  Description of Artificial Sequence: Synthetic oligonucleotide
uaccagccgggcauaauau

SEQ ID NO: 1326562 - RNA, 19 nt, Artificial Sequence
  Description of Artificial Sequence: Synthetic oligonucleotide
gugaugguacuaugcuuug

SEQ ID NO: 1326563 - RNA, 19 nt, Artificial Sequence
  Description of Artificial Sequence: Synthetic oligonucleotide
uuccgcauauacugguguc

SEQ ID NO: 1326564 - RNA, 19 nt, Artificial Sequence
  Description of Artificial Sequence: Synthetic oligonucleotide
agucagaaugaggaugccu

SEQ ID NO: 1326565 - RNA, 19 nt, Artificial Sequence
  Description of Artificial Sequence: Synthetic oligonucleotide
aggcaagauaaccacuauu

SEQ ID NO: 1326566 - RNA, 19 nt, Artificial Sequence
  Description of Artificial Sequence: Synthetic oligonucleotide
gugugacagagcugguaag

SEQ ID NO: 1326567 - RNA, 19 nt, Artificial Sequence
  Description of Artificial Sequence: Synthetic oligonucleotide
acaguggcaaagucagaau

SEQ ID NO: 1326568 - RNA, 19 nt, Artificial Sequence
  Description of Artificial Sequence: Synthetic oligonucleotide
acauagugugcuggguauc

SEQ ID NO: 1326569 - RNA, 19 nt, Artificial Sequence
  Description of Artificial Sequence: Synthetic oligonucleotide
agccaaauauagugcaauu

SEQ ID NO: 1326570 - RNA, 19 nt, Artificial Sequence
  Description of Artificial Sequence: Synthetic oligonucleotide
caaguaagagaacugcccu

SEQ ID NO: 1326571 - RNA, 19 nt, Artificial Sequence
  Description of Artificial Sequence: Synthetic oligonucleotide
acgugacugccuuccgcac

SEQ ID NO: 1326572 - RNA, 19 nt, Artificial Sequence
  Description of Artificial Sequence: Synthetic oligonucleotide
ucuuuccaggcaagauaac

SEQ ID NO: 1326573 - RNA, 19 nt, Artificial Sequence
  Description of Artificial Sequence: Synthetic oligonucleotide
guguggccauaccuaaaag

SEQ ID NO: 1326574 - RNA, 19 nt, Artificial Sequence
  Description of Artificial Sequence: Synthetic oligonucleotide
accuugcccgaaaugcuac

SEQ ID NO: 1326575 - RNA, 19 nt, Artificial Sequence
  Description of Artificial Sequence: Synthetic oligonucleotide
acuaugcuuugcguuuauc

SEQ ID NO: 1326576 - RNA, 19 nt, Artificial Sequence
  Description of Artificial Sequence: Synthetic oligonucleotide
aucccacaagaccugguaa

SEQ ID NO: 1326577 - RNA, 19 nt, Artificial Sequence
  Description of Artificial Sequence: Synthetic oligonucleotide
aagagaucaguaagauaaa

SEQ ID NO: 1326578 - RNA, 19 nt, Artificial Sequence
  Description of Artificial Sequence: Synthetic oligonucleotide
uuccucgcaugucccagac

SEQ ID NO: 1326579 - RNA, 19 nt, Artificial Sequence
  Description of Artificial Sequence: Synthetic oligonucleotide
cuuuccucgcaugucccag

SEQ ID NO: 1326580 - RNA, 19 nt, Artificial Sequence
  Description of Artificial Sequence: Synthetic oligonucleotide
uuuccucgcaugucccaga

SEQ ID NO: 1326581 - RNA, 19 nt, Artificial Sequence
  Description of Artificial Sequence: Synthetic oligonucleotide
aacauggcucgacccugga

SEQ ID NO: 1326582 - RNA, 19 nt, Artificial Sequence
  Description of Artificial Sequence: Synthetic oligonucleotide
agcacccugccugugagcu

SEQ ID NO: 1326583 - RNA, 19 nt, Artificial Sequence
  Description of Artificial Sequence: Synthetic oligonucleotide
guaugucaauagcaaggga

SEQ ID NO: 1326584 - RNA, 19 nt, Artificial Sequence
  Description of Artificial Sequence: Synthetic oligonucleotide
ggcauguacaguggcaaag

SEQ ID NO: 1326585 - RNA, 19 nt, Artificial Sequence
  Description of Artificial Sequence: Synthetic oligonucleotide
acggcugguucccugaauu

SEQ ID NO: 1326586 - RNA, 19 nt, Artificial Sequence
  Description of Artificial Sequence: Synthetic oligonucleotide
cuugugcauacuugcagaa

SEQ ID NO: 1326587 - RNA, 19 nt, Artificial Sequence
  Description of Artificial Sequence: Synthetic oligonucleotide
aauugccgggcaguuugca

SEQ ID NO: 1326588 - RNA, 19 nt, Artificial Sequence
  Description of Artificial Sequence: Synthetic oligonucleotide
gaaaugcuaccagccgggc

SEQ ID NO: 1326589 - RNA, 19 nt, Artificial Sequence
  Description of Artificial Sequence: Synthetic oligonucleotide
gguaaugugaaggacggcu

SEQ ID NO: 1326590 - RNA, 19 nt, Artificial Sequence
  Description of Artificial Sequence: Synthetic oligonucleotide
caaaugguaccuugcccga

SEQ ID NO: 1326591 - RNA, 19 nt, Artificial Sequence
  Description of Artificial Sequence: Synthetic oligonucleotide
cgaaaugcuaccagccggg

SEQ ID NO: 1326592 - RNA, 19 nt, Artificial Sequence
  Description of Artificial Sequence: Synthetic oligonucleotide
guguuaucugucccuguga

SEQ ID NO: 1326593 - RNA, 19 nt, Artificial Sequence
  Description of Artificial Sequence: Synthetic oligonucleotide
caauugccgggcaguuugc

SEQ ID NO: 1326594 - RNA, 19 nt, Artificial Sequence
  Description of Artificial Sequence: Synthetic oligonucleotide
aguuugcacuccacagcac

SEQ ID NO: 1326595 - RNA, 19 nt, Artificial Sequence
  Description of Artificial Sequence: Synthetic oligonucleotide
uuauuccggccuccauacu

SEQ ID NO: 1326596 - RNA, 19 nt, Artificial Sequence
  Description of Artificial Sequence: Synthetic oligonucleotide
gcgugugcaccucacguag

SEQ ID NO: 1326597 - RNA, 19 nt, Artificial Sequence
  Description of Artificial Sequence: Synthetic oligonucleotide
ccucacguaggugugacag

SEQ ID NO: 1326598 - RNA, 19 nt, Artificial Sequence
  Description of Artificial Sequence: Synthetic oligonucleotide
caccaugcuguuacuuuuc

SEQ ID NO: 1326599 - RNA, 19 nt, Artificial Sequence
  Description of Artificial Sequence: Synthetic oligonucleotide
gaaugaggaugccuaaauu

SEQ ID NO: 1326600 - RNA, 19 nt, Artificial Sequence
  Description of Artificial Sequence: Synthetic oligonucleotide
aaaugguaccuugcccgaa

SEQ ID NO: 1326601 - RNA, 19 nt, Artificial Sequence
  Description of Artificial Sequence: Synthetic oligonucleotide
ggaugccuaaauugguuga

SEQ ID NO: 1326602 - RNA, 19 nt, Artificial Sequence
  Description of Artificial Sequence: Synthetic oligonucleotide
cugguucccugaauuccug

SEQ ID NO: 1326603 - RNA, 19 nt, Artificial Sequence
  Description of Artificial Sequence: Synthetic oligonucleotide
guuuaaacaugggcuccac

SEQ ID NO: 1326604 - RNA, 19 nt, Artificial Sequence
  Description of Artificial Sequence: Synthetic oligonucleotide
ugcaccuuaaaggcaugua

SEQ ID NO: 1326605 - RNA, 19 nt, Artificial Sequence
  Description of Artificial Sequence: Synthetic oligonucleotide
ggcauaauaugcaggggca

SEQ ID NO: 1326606 - RNA, 19 nt, Artificial Sequence
  Description of Artificial Sequence: Synthetic oligonucleotide
ccauuaguaagaugaacaa

SEQ ID NO: 1326607 - RNA, 19 nt, Artificial Sequence
  Description of Artificial Sequence: Synthetic oligonucleotide
gugcaccucacguaggugu

SEQ ID NO: 1326608 - RNA, 19 nt, Artificial Sequence
  Description of Artificial Sequence: Synthetic oligonucleotide
aaacuccgauggaugugug

SEQ ID NO: 1326609 - RNA, 19 nt, Artificial Sequence
  Description of Artificial Sequence: Synthetic oligonucleotide
gcauaauaugcaggggcag

SEQ ID NO: 1326610 - RNA, 19 nt, Artificial Sequence
  Description of Artificial Sequence: Synthetic oligonucleotide
agcaucggagcuggaagca

SEQ ID NO: 1326611 - RNA, 19 nt, Artificial Sequence
  Description of Artificial Sequence: Synthetic oligonucleotide
cccgaaaugcuaccagccg

SEQ ID NO: 1326612 - RNA, 19 nt, Artificial Sequence
  Description of Artificial Sequence: Synthetic oligonucleotide
ugguaaugugaaggacggc

SEQ ID NO: 1326613 - RNA, 19 nt, Artificial Sequence
  Description of Artificial Sequence: Synthetic oligonucleotide
accauaccauuaguaagau

SEQ ID NO: 1326614 - RNA, 19 nt, Artificial Sequence
  Description of Artificial Sequence: Synthetic oligonucleotide
agcgugugcaccucacgua

SEQ ID NO: 1326615 - RNA, 19 nt, Artificial Sequence
  Description of Artificial Sequence: Synthetic oligonucleotide
acguuucacuuccgcauau

SEQ ID NO: 1326616 - RNA, 19 nt, Artificial Sequence
  Description of Artificial Sequence: Synthetic oligonucleotide
cacaggccugaagagauca

SEQ ID NO: 1326617 - RNA, 19 nt, Artificial Sequence
  Description of Artificial Sequence: Synthetic oligonucleotide
gaagcuggucagugaaacu

SEQ ID NO: 1326618 - RNA, 19 nt, Artificial Sequence
  Description of Artificial Sequence: Synthetic oligonucleotide
augguaccuugcccgaaau

SEQ ID NO: 1326619 - RNA, 19 nt, Artificial Sequence
  Description of Artificial Sequence: Synthetic oligonucleotide
gcgcaaaacaagccacugc

SEQ ID NO: 1326620 - RNA, 19 nt, Artificial Sequence
  Description of Artificial Sequence: Synthetic oligonucleotide
gcccacauaugucauuuuc

SEQ ID NO: 1326621 - RNA, 19 nt, Artificial Sequence
  Description of Artificial Sequence: Synthetic oligonucleotide
gagaacugcccuguuugaa

SEQ ID NO: 1326622 - RNA, 19 nt, Artificial Sequence
  Description of Artificial Sequence: Synthetic oligonucleotide
guaucaugguggaucugca

SEQ ID NO: 1326623 - RNA, 19 nt, Artificial Sequence
  Description of Artificial Sequence: Synthetic oligonucleotide
caguaagauaaagcaguga

SEQ ID NO: 1326624 - RNA, 19 nt, Artificial Sequence
  Description of Artificial Sequence: Synthetic oligonucleotide
gcaaaacaagccacugccc

SEQ ID NO: 1326625 - RNA, 19 nt, Artificial Sequence
  Description of Artificial Sequence: Synthetic oligonucleotide
gguacuaugcuuugcguuu

SEQ ID NO: 1326626 - RNA, 19 nt, Artificial Sequence
  Description of Artificial Sequence: Synthetic oligonucleotide
ugccgggcaguuugcacuc

SEQ ID NO: 1326627 - RNA, 19 nt, Artificial Sequence
  Description of Artificial Sequence: Synthetic oligonucleotide
ccagucuacugauuucuuc

SEQ ID NO: 1326628 - RNA, 19 nt, Artificial Sequence
  Description of Artificial Sequence: Synthetic oligonucleotide
aggcccacauaugucauuu

SEQ ID NO: 1326629 - RNA, 19 nt, Artificial Sequence
  Description of Artificial Sequence: Synthetic oligonucleotide
uucagccaguagacacaga

SEQ ID NO: 1326630 - RNA, 19 nt, Artificial Sequence
  Description of Artificial Sequence: Synthetic oligonucleotide
aggcauguacaguggcaaa

SEQ ID NO: 1326631 - RNA, 19 nt, Artificial Sequence
  Description of Artificial Sequence: Synthetic oligonucleotide
cuauuagcugcaggcccac

SEQ ID NO: 1326632 - RNA, 19 nt, Artificial Sequence
  Description of Artificial Sequence: Synthetic oligonucleotide
gcucuguccacgugacugc

SEQ ID NO: 1326633 - RNA, 19 nt, Artificial Sequence
  Description of Artificial Sequence: Synthetic oligonucleotide
cagccgggcauaauaugca

SEQ ID NO: 1326634 - RNA, 19 nt, Artificial Sequence
  Description of Artificial Sequence: Synthetic oligonucleotide
cuugcccgaaaugcuacca

SEQ ID NO: 1326635 - RNA, 19 nt, Artificial Sequence
  Description of Artificial Sequence: Synthetic oligonucleotide
caaacuccgauggaugugu

SEQ ID NO: 1326636 - RNA, 19 nt, Artificial Sequence
  Description of Artificial Sequence: Synthetic oligonucleotide
ugagcuccgucaucucauu

SEQ ID NO: 1326637 - RNA, 19 nt, Artificial Sequence
  Description of Artificial Sequence: Synthetic oligonucleotide
ccacuauuagcugcaggcc

SEQ ID NO: 1326638 - RNA, 19 nt, Artificial Sequence
  Description of Artificial Sequence: Synthetic oligonucleotide
cuggaugggcauuccugca

SEQ ID NO: 1326639 - RNA, 19 nt, Artificial Sequence
  Description of Artificial Sequence: Synthetic oligonucleotide
caaauagggagaacacuuu

SEQ ID NO: 1326640 - RNA, 19 nt, Artificial Sequence
  Description of Artificial Sequence: Synthetic oligonucleotide
ccaaauagggagaacacuu

SEQ ID NO: 1326641 - RNA, 19 nt, Artificial Sequence
  Description of Artificial Sequence: Synthetic oligonucleotide
ggcgcaaaacaagccacug

SEQ ID NO: 1326642 - RNA, 19 nt, Artificial Sequence
  Description of Artificial Sequence: Synthetic oligonucleotide
cucacguaggugugacaga

SEQ ID NO: 1326643 - RNA, 19 nt, Artificial Sequence
  Description of Artificial Sequence: Synthetic oligonucleotide
gcccgaaaugcuaccagcc

SEQ ID NO: 1326644 - RNA, 19 nt, Artificial Sequence
  Description of Artificial Sequence: Synthetic oligonucleotide
ggccauaccuaaaagggua

SEQ ID NO: 1326645 - RNA, 19 nt, Artificial Sequence
  Description of Artificial Sequence: Synthetic oligonucleotide
gggcacuuuugaaaacuug

SEQ ID NO: 1326646 - RNA, 19 nt, Artificial Sequence
  Description of Artificial Sequence: Synthetic oligonucleotide
ggccugaagagaucaguaa

SEQ ID NO: 1326647 - RNA, 19 nt, Artificial Sequence
  Description of Artificial Sequence: Synthetic oligonucleotide
cugaagagaucaguaagau

SEQ ID NO: 1326648 - RNA, 19 nt, Artificial Sequence
  Description of Artificial Sequence: Synthetic oligonucleotide
aggcgcaaaacaagccacu

SEQ ID NO: 1326649 - RNA, 19 nt, Artificial Sequence
  Description of Artificial Sequence: Synthetic oligonucleotide
gggcauuccugcauccuug

SEQ ID NO: 1326650 - RNA, 19 nt, Artificial Sequence
  Description of Artificial Sequence: Synthetic oligonucleotide
uggcucgacccuggauggg

SEQ ID NO: 1326651 - RNA, 19 nt, Artificial Sequence
  Description of Artificial Sequence: Synthetic oligonucleotide
augugaaggacggcugguu

SEQ ID NO: 1326652 - RNA, 19 nt, Artificial Sequence
  Description of Artificial Sequence: Synthetic oligonucleotide
ccauaccauuaguaagaug

SEQ ID NO: 1326653 - RNA, 19 nt, Artificial Sequence
  Description of Artificial Sequence: Synthetic oligonucleotide
auagugugcuggguaucau

SEQ ID NO: 1326654 - RNA, 19 nt, Artificial Sequence
  Description of Artificial Sequence: Synthetic oligonucleotide
ugucugcaccuugugcaua

SEQ ID NO: 1326655 - RNA, 19 nt, Artificial Sequence
  Description of Artificial Sequence: Synthetic oligonucleotide
ugcaauugccgggcaguuu

SEQ ID NO: 1326656 - RNA, 19 nt, Artificial Sequence
  Description of Artificial Sequence: Synthetic oligonucleotide
cacguuucacuuccgcaua

SEQ ID NO: 1326657 - RNA, 19 nt, Artificial Sequence
  Description of Artificial Sequence: Synthetic oligonucleotide
gugugaugguacuaugcuu

SEQ ID NO: 1326658 - RNA, 19 nt, Artificial Sequence
  Description of Artificial Sequence: Synthetic oligonucleotide
cgaagcuggucagugaaac

SEQ ID NO: 1326659 - RNA, 19 nt, Artificial Sequence
  Description of Artificial Sequence: Synthetic oligonucleotide
cacuuccgcauauacuggu

SEQ ID NO: 1326660 - RNA, 19 nt, Artificial Sequence
  Description of Artificial Sequence: Synthetic oligonucleotide
gugugcaccucacguaggu

SEQ ID NO: 1326661 - RNA, 19 nt, Artificial Sequence
  Description of Artificial Sequence: Synthetic oligonucleotide
ccaacacguuucacuuccg

SEQ ID NO: 1326662 - RNA, 19 nt, Artificial Sequence
  Description of Artificial Sequence: Synthetic oligonucleotide
cacugcccaaacuuuaauu

SEQ ID NO: 1326663 - RNA, 19 nt, Artificial Sequence
  Description of Artificial Sequence: Synthetic oligonucleotide
guaccuugcccgaaaugcu

SEQ ID NO: 1326664 - RNA, 19 nt, Artificial Sequence
  Description of Artificial Sequence: Synthetic oligonucleotide
ggcucgacccuggaugggc

SEQ ID NO: 1326665 - RNA, 19 nt, Artificial Sequence
  Description of Artificial Sequence: Synthetic oligonucleotide
cccacaagaccugguaaug

SEQ ID NO: 1326666 - RNA, 19 nt, Artificial Sequence
  Description of Artificial Sequence: Synthetic oligonucleotide
cugcaugacuacagaggua

SEQ ID NO: 1326667 - RNA, 19 nt, Artificial Sequence
  Description of Artificial Sequence: Synthetic oligonucleotide
cguuuaucuucaggcaaag

SEQ ID NO: 1326668 - RNA, 19 nt, Artificial Sequence
  Description of Artificial Sequence: Synthetic oligonucleotide
ggaugugugaugguacuau

SEQ ID NO: 1326669 - RNA, 19 nt, Artificial Sequence
  Description of Artificial Sequence: Synthetic oligonucleotide
gcguuuaucuucaggcaaa

SEQ ID NO: 1326670 - RNA, 19 nt, Artificial Sequence
  Description of Artificial Sequence: Synthetic oligonucleotide
ggaaaggguuuggggugag

SEQ ID NO: 1326671 - RNA, 19 nt, Artificial Sequence
  Description of Artificial Sequence: Synthetic oligonucleotide
ccgucaucucauuguggac

SEQ ID NO: 1326672 - RNA, 19 nt, Artificial Sequence
  Description of Artificial Sequence: Synthetic oligonucleotide
ucgacccuggaugggcauu

SEQ ID NO: 1326673 - RNA, 19 nt, Artificial Sequence
  Description of Artificial Sequence: Synthetic oligonucleotide
ccauaccuaaaaggguauc

SEQ ID NO: 1326674 - RNA, 19 nt, Artificial Sequence
  Description of Artificial Sequence: Synthetic oligonucleotide
cgugugcaccucacguagg

SEQ ID NO: 1326675 - RNA, 19 nt, Artificial Sequence
  Description of Artificial Sequence: Synthetic oligonucleotide
cguugcucuguccacguga

SEQ ID NO: 1326676 - RNA, 19 nt, Artificial Sequence
  Description of Artificial Sequence: Synthetic oligonucleotide
cuggaagcacccugccugu

SEQ ID NO: 1326677 - RNA, 19 nt, Artificial Sequence
  Description of Artificial Sequence: Synthetic oligonucleotide
gcauguacaguggcaaagu

SEQ ID NO: 1326678 - RNA, 19 nt, Artificial Sequence
  Description of Artificial Sequence: Synthetic oligonucleotide
ugacugccuuccgcacugu

SEQ ID NO: 1326679 - RNA, 19 nt, Artificial Sequence
  Description of Artificial Sequence: Synthetic oligonucleotide
cugucugcaccuugugcau

SEQ ID NO: 1326680 - RNA, 19 nt, Artificial Sequence
  Description of Artificial Sequence: Synthetic oligonucleotide
ggguaucuccaacacguuu

SEQ ID NO: 1326681 - RNA, 19 nt, Artificial Sequence
  Description of Artificial Sequence: Synthetic oligonucleotide
cgggcauaauaugcagggg

SEQ ID NO: 1326682 - RNA, 19 nt, Artificial Sequence
  Description of Artificial Sequence: Synthetic oligonucleotide
cuggucagugaaacucuuu

SEQ ID NO: 1326683 - RNA, 19 nt, Artificial Sequence
  Description of Artificial Sequence: Synthetic oligonucleotide
ccugccugugagcuccguc

SEQ ID NO: 1326684 - RNA, 19 nt, Artificial Sequence
  Description of Artificial Sequence: Synthetic oligonucleotide
ucccggccguugcucuguc

SEQ ID NO: 1326685 - RNA, 19 nt, Artificial Sequence
  Description of Artificial Sequence: Synthetic oligonucleotide
ggucccggccguugcucug

SEQ ID NO: 1326686 - RNA, 19 nt, Artificial Sequence
  Description of Artificial Sequence: Synthetic oligonucleotide
ccugugacacaaaccacau

SEQ ID NO: 1326687 - RNA, 19 nt, Artificial Sequence
  Description of Artificial Sequence: Synthetic oligonucleotide
ggguaucaugguggaucug

SEQ ID NO: 1326688 - RNA, 19 nt, Artificial Sequence
  Description of Artificial Sequence: Synthetic oligonucleotide
ccuuaaaggcauguacagu

SEQ ID NO: 1326689 - RNA, 19 nt, Artificial Sequence
  Description of Artificial Sequence: Synthetic oligonucleotide
gguuuggggugaggucuuc

SEQ ID NO: 1326690 - RNA, 19 nt, Artificial Sequence
  Description of Artificial Sequence: Synthetic oligonucleotide
acccugccugugagcuccg

SEQ ID NO: 1326691 - RNA, 19 nt, Artificial Sequence
  Description of Artificial Sequence: Synthetic oligonucleotide
cgauggaugugugauggua

SEQ ID NO: 1326692 - RNA, 19 nt, Artificial Sequence
  Description of Artificial Sequence: Synthetic oligonucleotide
gcucgacccuggaugggca

SEQ ID NO: 1326693 - RNA, 19 nt, Artificial Sequence
  Description of Artificial Sequence: Synthetic oligonucleotide
gccauaccuaaaaggguau

SEQ ID NO: 1326694 - RNA, 19 nt, Artificial Sequence
  Description of Artificial Sequence: Synthetic oligonucleotide
cgggcaguuugcacuccac

SEQ ID NO: 1326695 - RNA, 19 nt, Artificial Sequence
  Description of Artificial Sequence: Synthetic oligonucleotide
cucgacccuggaugggcau

SEQ ID NO: 1326696 - RNA, 19 nt, Artificial Sequence
  Description of Artificial Sequence: Synthetic oligonucleotide
ggucagguccacccaccau

SEQ ID NO: 1326697 - RNA, 19 nt, Artificial Sequence
  Description of Artificial Sequence: Synthetic oligonucleotide
gcacaggccugaagagauc

SEQ ID NO: 1326698 - RNA, 19 nt, Artificial Sequence
  Description of Artificial Sequence: Synthetic oligonucleotide
gcaugacuacagagguaaa

SEQ ID NO: 1326699 - RNA, 19 nt, Artificial Sequence
  Description of Artificial Sequence: Synthetic oligonucleotide
ccgggcaguuugcacucca

SEQ ID NO: 1326700 - RNA, 19 nt, Artificial Sequence
  Description of Artificial Sequence: Synthetic oligonucleotide
cagguccacccaccaugcu

SEQ ID NO: 1326701 - RNA, 19 nt, Artificial Sequence
  Description of Artificial Sequence: Synthetic oligonucleotide
cgugacugccuuccgcacu

SEQ ID NO: 1326702 - RNA, 19 nt, Artificial Sequence
  Description of Artificial Sequence: Synthetic oligonucleotide
ccgauggaugugugauggu

SEQ ID NO: 1326703 - RNA, 19 nt, Artificial Sequence
  Description of Artificial Sequence: Synthetic oligonucleotide
ccgcauauacuggugucuu

SEQ ID NO: 1326704 - RNA, 19 nt, Artificial Sequence
  Description of Artificial Sequence: Synthetic oligonucleotide
gcuaccagccgggcauaau

SEQ ID NO: 1326705 - RNA, 19 nt, Artificial Sequence
  Description of Artificial Sequence: Synthetic oligonucleotide
ccuuccgcacugucaugau

SEQ ID NO: 1326706 - RNA, 19 nt, Artificial Sequence
  Description of Artificial Sequence: Synthetic oligonucleotide
ugggcuuuuacacaaaggg

SEQ ID NO: 1326707 - RNA, 19 nt, Artificial Sequence
  Description of Artificial Sequence: Synthetic oligonucleotide
uuugaguccagcaggaagg

SEQ ID NO: 1326708 - RNA, 19 nt, Artificial Sequence
  Description of Artificial Sequence: Synthetic oligonucleotide
aagcuguaggguuuaaggc

SEQ ID NO: 1326709 - RNA, 19 nt, Artificial Sequence
  Description of Artificial Sequence: Synthetic oligonucleotide
uuuucuaugaggagcgucc

SEQ ID NO: 1326710 - RNA, 19 nt, Artificial Sequence
  Description of Artificial Sequence: Synthetic oligonucleotide
ucuagcucugaacagagcu

SEQ ID NO: 1326711 - RNA, 19 nt, Artificial Sequence
  Description of Artificial Sequence: Synthetic oligonucleotide
guagacuucacucugcacc

SEQ ID NO: 1326712 - RNA, 19 nt, Artificial Sequence
  Description of Artificial Sequence: Synthetic oligonucleotide
aacauggcaauccccagag

SEQ ID NO: 1326713 - RNA, 19 nt, Artificial Sequence
  Description of Artificial Sequence: Synthetic oligonucleotide
uuacacaaagggcaugggg

SEQ ID NO: 1326714 - RNA, 19 nt, Artificial Sequence
  Description of Artificial Sequence: Synthetic oligonucleotide
agggcucuguaccugaucc

SEQ ID NO: 1326715 - RNA, 19 nt, Artificial Sequence
  Description of Artificial Sequence: Synthetic oligonucleotide
uucgcucuagcucugaaca

SEQ ID NO: 1326716 - RNA, 19 nt, Artificial Sequence
  Description of Artificial Sequence: Synthetic oligonucleotide
gaagcccaggcacaaaugg

SEQ ID NO: 1326717 - RNA, 19 nt, Artificial Sequence
  Description of Artificial Sequence: Synthetic oligonucleotide
uuauagaggucacaguccu

SEQ ID NO: 1326718 - RNA, 19 nt, Artificial Sequence
  Description of Artificial Sequence: Synthetic oligonucleotide
augaggagcguccaggcac

SEQ ID NO: 1326719 - RNA, 19 nt, Artificial Sequence
  Description of Artificial Sequence: Synthetic oligonucleotide
aguguagagcccugguucc

SEQ ID NO: 1326720 - RNA, 19 nt, Artificial Sequence
  Description of Artificial Sequence: Synthetic oligonucleotide
caagauacggccacgcacc

SEQ ID NO: 1326721 - RNA, 19 nt, Artificial Sequence
  Description of Artificial Sequence: Synthetic oligonucleotide
ugaggaugugcacuguucc

SEQ ID NO: 1326722 - RNA, 19 nt, Artificial Sequence
  Description of Artificial Sequence: Synthetic oligonucleotide
ucuaugaggagcguccagg

SEQ ID NO: 1326723 - RNA, 19 nt, Artificial Sequence
  Description of Artificial Sequence: Synthetic oligonucleotide
gauaguggcuggaagaggc

SEQ ID NO: 1326724 - RNA, 19 nt, Artificial Sequence
  Description of Artificial Sequence: Synthetic oligonucleotide
gauacggccacgcaccacc

SEQ ID NO: 1326725 - RNA, 19 nt, Artificial Sequence
  Description of Artificial Sequence: Synthetic oligonucleotide
ugcaccaacuccuucacac

SEQ ID NO: 1326726 - RNA, 19 nt, Artificial Sequence
  Description of Artificial Sequence: Synthetic oligonucleotide
uguaccugauccuuuugcc

SEQ ID NO: 1326727 - RNA, 19 nt, Artificial Sequence
  Description of Artificial Sequence: Synthetic oligonucleotide
accccgugcacccagcucc

SEQ ID NO: 1326728 - RNA, 19 nt, Artificial Sequence
  Description of Artificial Sequence: Synthetic oligonucleotide
uagagcacgcuucuucagg

SEQ ID NO: 1326729 - RNA, 19 nt, Artificial Sequence
  Description of Artificial Sequence: Synthetic oligonucleotide
auagaggucacaguccuuc

SEQ ID NO: 1326730 - RNA, 19 nt, Artificial Sequence
  Description of Artificial Sequence: Synthetic oligonucleotide
aggguuuaaggcuucgcuc

SEQ ID NO: 1326731 - RNA, 19 nt, Artificial Sequence
  Description of Artificial Sequence: Synthetic oligonucleotide
ucuugcagguacuuguccc

SEQ ID NO: 1326732 - RNA, 19 nt, Artificial Sequence
  Description of Artificial Sequence: Synthetic oligonucleotide
cucauggaaggacugacag

SEQ ID NO: 1326733 - RNA, 19 nt, Artificial Sequence
  Description of Artificial Sequence: Synthetic oligonucleotide
uguuccugcaagauacggc

SEQ ID NO: 1326734 - RNA, 19 nt, Artificial Sequence
  Description of Artificial Sequence: Synthetic oligonucleotide
augacgaugggguagacuu

SEQ ID NO: 1326735 - RNA, 19 nt, Artificial Sequence
  Description of Artificial Sequence: Synthetic oligonucleotide
agcuccaacagacagugcu

SEQ ID NO: 1326736 - RNA, 19 nt, Artificial Sequence
  Description of Artificial Sequence: Synthetic oligonucleotide
uucggugucugcuggagag

SEQ ID NO: 1326737 - RNA, 19 nt, Artificial Sequence
  Description of Artificial Sequence: Synthetic oligonucleotide
aacuccuucacaccccgug

SEQ ID NO: 1326738 - RNA, 19 nt, Artificial Sequence
  Description of Artificial Sequence: Synthetic oligonucleotide
ugguaauugggcacagugc

SEQ ID NO: 1326739 - RNA, 19 nt, Artificial Sequence
  Description of Artificial Sequence: Synthetic oligonucleotide
agcuguaggguuuaaggcu

SEQ ID NO: 1326740 - RNA, 19 nt, Artificial Sequence
  Description of Artificial Sequence: Synthetic oligonucleotide
agauccagcaaguugcgga

SEQ ID NO: 1326741 - RNA, 19 nt, Artificial Sequence
  Description of Artificial Sequence: Synthetic oligonucleotide
caugcggugcuuauagagg

SEQ ID NO: 1326742 - RNA, 19 nt, Artificial Sequence
  Description of Artificial Sequence: Synthetic oligonucleotide
cuuugaguccagcaggaag

SEQ ID NO: 1326743 - RNA, 19 nt, Artificial Sequence
  Description of Artificial Sequence: Synthetic oligonucleotide
ucaccaacccuagagcacg

SEQ ID NO: 1326744 - RNA, 19 nt, Artificial Sequence
  Description of Artificial Sequence: Synthetic oligonucleotide
uaaggcuucgcucuagcuc

SEQ ID NO: 1326745 - RNA, 19 nt, Artificial Sequence
  Description of Artificial Sequence: Synthetic oligonucleotide
cacaaggcgagccuguucc

SEQ ID NO: 1326746 - RNA, 19 nt, Artificial Sequence
  Description of Artificial Sequence: Synthetic oligonucleotide
uaggguuuaaggcuucgcu

SEQ ID NO: 1326747 - RNA, 19 nt, Artificial Sequence
  Description of Artificial Sequence: Synthetic oligonucleotide
cugguaauugggcacagug

SEQ ID NO: 1326748 - RNA, 19 nt, Artificial Sequence
  Description of Artificial Sequence: Synthetic oligonucleotide
caaguugcggaugagccgg

SEQ ID NO: 1326749 - RNA, 19 nt, Artificial Sequence
  Description of Artificial Sequence: Synthetic oligonucleotide
augugcacuguuccucucc

SEQ ID NO: 1326750 - RNA, 19 nt, Artificial Sequence
  Description of Artificial Sequence: Synthetic oligonucleotide
uagacuucacucugcacca

SEQ ID NO: 1326751 - RNA, 19 nt, Artificial Sequence
  Description of Artificial Sequence: Synthetic oligonucleotide
uaauugggcacagugcccc

SEQ ID NO: 1326752 - RNA, 19 nt, Artificial Sequence
  Description of Artificial Sequence: Synthetic oligonucleotide
gaaacuuucugcagggcac

SEQ ID NO: 1326753 - RNA, 19 nt, Artificial Sequence
  Description of Artificial Sequence: Synthetic oligonucleotide
uggauaguggcuggaagag

SEQ ID NO: 1326754 - RNA, 19 nt, Artificial Sequence
  Description of Artificial Sequence: Synthetic oligonucleotide
aguaguggacgcaccaagc

SEQ ID NO: 1326755 - RNA, 19 nt, Artificial Sequence
  Description of Artificial Sequence: Synthetic oligonucleotide
gaucucuugggcuuuuaca

SEQ ID NO: 1326756 - RNA, 19 nt, Artificial Sequence
  Description of Artificial Sequence: Synthetic oligonucleotide
gaucugcccgcucaggcag

SEQ ID NO: 1326757 - RNA, 19 nt, Artificial Sequence
  Description of Artificial Sequence: Synthetic oligonucleotide
gaagaggggaagcccaggc

SEQ ID NO: 1326758 - RNA, 19 nt, Artificial Sequence
  Description of Artificial Sequence: Synthetic oligonucleotide
ugggguagacuucacucug

SEQ ID NO: 1326759 - RNA, 19 nt, Artificial Sequence
  Description of Artificial Sequence: Synthetic oligonucleotide
aauguagaagggcucugua

SEQ ID NO: 1326760 - RNA, 19 nt, Artificial Sequence
  Description of Artificial Sequence: Synthetic oligonucleotide
ugagccccggcacugacga

SEQ ID NO: 1326761 - RNA, 19 nt, Artificial Sequence
  Description of Artificial Sequence: Synthetic oligonucleotide
uccagcaaguugcggauga

SEQ ID NO: 1326762 - RNA, 19 nt, Artificial Sequence
  Description of Artificial Sequence: Synthetic oligonucleotide
guuggcucgaauguagaag

SEQ ID NO: 1326763 - RNA, 19 nt, Artificial Sequence
  Description of Artificial Sequence: Synthetic oligonucleotide
guacuugucccgaaguucc

SEQ ID NO: 1326764 - RNA, 19 nt, Artificial Sequence
  Description of Artificial Sequence: Synthetic oligonucleotide
uccugaacuucuagaagcu

SEQ ID NO: 1326765 - RNA, 19 nt, Artificial Sequence
  Description of Artificial Sequence: Synthetic oligonucleotide
uuccucggcccacugaagc

SEQ ID NO: 1326766 - RNA, 19 nt, Artificial Sequence
  Description of Artificial Sequence: Synthetic oligonucleotide
uuuacacaaagggcauggg

SEQ ID NO: 1326767 - RNA, 19 nt, Artificial Sequence
  Description of Artificial Sequence: Synthetic oligonucleotide
cuaugaggagcguccaggc

SEQ ID NO: 1326768 - RNA, 19 nt, Artificial Sequence
  Description of Artificial Sequence: Synthetic oligonucleotide
gauggcucggauccuguug

SEQ ID NO: 1326769 - RNA, 19 nt, Artificial Sequence
  Description of Artificial Sequence: Synthetic oligonucleotide
aauugggcacagugccccg

SEQ ID NO: 1326770 - RNA, 19 nt, Artificial Sequence
  Description of Artificial Sequence: Synthetic oligonucleotide
ggucccguaagguaagggg

SEQ ID NO: 1326771 - RNA, 19 nt, Artificial Sequence
  Description of Artificial Sequence: Synthetic oligonucleotide
uucuucagguugcuucgag

SEQ ID NO: 1326772 - RNA, 19 nt, Artificial Sequence
  Description of Artificial Sequence: Synthetic oligonucleotide
uucagguugcuucgagggc

SEQ ID NO: 1326773 - RNA, 19 nt, Artificial Sequence
  Description of Artificial Sequence: Synthetic oligonucleotide
acauucuucucagucaccu

SEQ ID NO: 1326774 - RNA, 19 nt, Artificial Sequence
  Description of Artificial Sequence: Synthetic oligonucleotide
gaagcagcucugaaucccg

SEQ ID NO: 1326775 - RNA, 19 nt, Artificial Sequence
  Description of Artificial Sequence: Synthetic oligonucleotide
gagugcagaaccauuccug

SEQ ID NO: 1326776 - RNA, 19 nt, Artificial Sequence
  Description of Artificial Sequence: Synthetic oligonucleotide
gauccuuuugcccaggcau

SEQ ID NO: 1326777 - RNA, 19 nt, Artificial Sequence
  Description of Artificial Sequence: Synthetic oligonucleotide
cucucugguaauugggcac

SEQ ID NO: 1326778 - RNA, 19 nt, Artificial Sequence
  Description of Artificial Sequence: Synthetic oligonucleotide
augggguagacuucacucu

SEQ ID NO: 1326779 - RNA, 19 nt, Artificial Sequence
  Description of Artificial Sequence: Synthetic oligonucleotide
cuucacaccccgugcaccc

SEQ ID NO: 1326780 - RNA, 19 nt, Artificial Sequence
  Description of Artificial Sequence: Synthetic oligonucleotide
ugcguggccccacgcaugg

SEQ ID NO: 1326781 - RNA, 19 nt, Artificial Sequence
  Description of Artificial Sequence: Synthetic oligonucleotide
ucgaauguagaagggcucu

SEQ ID NO: 1326782 - RNA, 19 nt, Artificial Sequence
  Description of Artificial Sequence: Synthetic oligonucleotide
caaauggggagcguccagg

SEQ ID NO: 1326783 - RNA, 19 nt, Artificial Sequence
  Description of Artificial Sequence: Synthetic oligonucleotide
uuaaggcuucgcucuagcu

SEQ ID NO: 1326784 - RNA, 19 nt, Artificial Sequence
  Description of Artificial Sequence: Synthetic oligonucleotide
acaccaguaguggacgcac

SEQ ID NO: 1326785 - RNA, 19 nt, Artificial Sequence
  Description of Artificial Sequence: Synthetic oligonucleotide
ucuguaccugauccuuuug

SEQ ID NO: 1326786 - RNA, 19 nt, Artificial Sequence
  Description of Artificial Sequence: Synthetic oligonucleotide
auggaugacgaugggguag

SEQ ID NO: 1326787 - RNA, 19 nt, Artificial Sequence
  Description of Artificial Sequence: Synthetic oligonucleotide
acccuucgcaccauggccc

SEQ ID NO: 1326788 - RNA, 19 nt, Artificial Sequence
  Description of Artificial Sequence: Synthetic oligonucleotide
uggagcuaggcagauccag

SEQ ID NO: 1326789 - RNA, 19 nt, Artificial Sequence
  Description of Artificial Sequence: Synthetic oligonucleotide
uguaggguuuaaggcuucg

SEQ ID NO: 1326790 - RNA, 19 nt, Artificial Sequence
  Description of Artificial Sequence: Synthetic oligonucleotide
ugcccgcucaggcagggag

SEQ ID NO: 1326791 - RNA, 19 nt, Artificial Sequence
  Description of Artificial Sequence: Synthetic oligonucleotide
gauccuguugcccagcccu

SEQ ID NO: 1326792 - RNA, 19 nt, Artificial Sequence
  Description of Artificial Sequence: Synthetic oligonucleotide
ugacgaagcagcucugaau

SEQ ID NO: 1326793 - RNA, 19 nt, Artificial Sequence
  Description of Artificial Sequence: Synthetic oligonucleotide
ucggcugcugccucgcucc

SEQ ID NO: 1326794 - RNA, 19 nt, Artificial Sequence
  Description of Artificial Sequence: Synthetic oligonucleotide
aaacuuucugcagggcaca

SEQ ID NO: 1326795 - RNA, 19 nt, Artificial Sequence
  Description of Artificial Sequence: Synthetic oligonucleotide
caguaguggacgcaccaag

SEQ ID NO: 1326796 - RNA, 19 nt, Artificial Sequence
  Description of Artificial Sequence: Synthetic oligonucleotide
aggucacaguccuucagca

SEQ ID NO: 1326797 - RNA, 19 nt, Artificial Sequence
  Description of Artificial Sequence: Synthetic oligonucleotide
cugaaucccgccagccugg

SEQ ID NO: 1326798 - RNA, 19 nt, Artificial Sequence
  Description of Artificial Sequence: Synthetic oligonucleotide
ugcaagauacggccacgca

SEQ ID NO: 1326799 - RNA, 19 nt, Artificial Sequence
  Description of Artificial Sequence: Synthetic oligonucleotide
ugagccgcagaucuuccau

SEQ ID NO: 1326800 - RNA, 19 nt, Artificial Sequence
  Description of Artificial Sequence: Synthetic oligonucleotide
ucucugguaauugggcaca

SEQ ID NO: 1326801 - RNA, 19 nt, Artificial Sequence
  Description of Artificial Sequence: Synthetic oligonucleotide
cugagucuccugcagcgcc

SEQ ID NO: 1326802 - RNA, 19 nt, Artificial Sequence
  Description of Artificial Sequence: Synthetic oligonucleotide
caacccuagagcacgcuuc

SEQ ID NO: 1326803 - RNA, 19 nt, Artificial Sequence
  Description of Artificial Sequence: Synthetic oligonucleotide
aagauacggccacgcacca

SEQ ID NO: 1326804 - RNA, 19 nt, Artificial Sequence
  Description of Artificial Sequence: Synthetic oligonucleotide
cacccuucgcaccauggcc

SEQ ID NO: 1326805 - RNA, 19 nt, Artificial Sequence
  Description of Artificial Sequence: Synthetic oligonucleotide
aguggacgcaccaagcugu

SEQ ID NO: 1326806 - RNA, 19 nt, Artificial Sequence
  Description of Artificial Sequence: Synthetic oligonucleotide
uugucccgaaguuccucgg

SEQ ID NO: 1326807 - RNA, 19 nt, Artificial Sequence
  Description of Artificial Sequence: Synthetic oligonucleotide
cucaccaacccuagagcac

SEQ ID NO: 1326808 - RNA, 19 nt, Artificial Sequence
  Description of Artificial Sequence: Synthetic oligonucleotide
ugucccgaaguuccucggc

SEQ ID NO: 1326809 - RNA, 19 nt, Artificial Sequence
  Description of Artificial Sequence: Synthetic oligonucleotide
guugcuucgagggcuucgg

SEQ ID NO: 1326810 - RNA, 19 nt, Artificial Sequence
  Description of Artificial Sequence: Synthetic oligonucleotide
cuagagcacgcuucuucag

SEQ ID NO: 1326811 - RNA, 19 nt, Artificial Sequence
  Description of Artificial Sequence: Synthetic oligonucleotide
auaguggcuggaagaggcc

SEQ ID NO: 1326812 - RNA, 19 nt, Artificial Sequence
  Description of Artificial Sequence: Synthetic oligonucleotide
aggacugacaggccuuuga

SEQ ID NO: 1326813 - RNA, 19 nt, Artificial Sequence
  Description of Artificial Sequence: Synthetic oligonucleotide
acagacuccuggauggcuc

SEQ ID NO: 1326814 - RNA, 19 nt, Artificial Sequence
  Description of Artificial Sequence: Synthetic oligonucleotide
cuucgcucuagcucugaac

SEQ ID NO: 1326815 - RNA, 19 nt, Artificial Sequence
  Description of Artificial Sequence: Synthetic oligonucleotide
cagcguucgguguuugagc

SEQ ID NO: 1326816 - RNA, 19 nt, Artificial Sequence
  Description of Artificial Sequence: Synthetic oligonucleotide
cagugcuucuucccaacag

SEQ ID NO: 1326817 - RNA, 19 nt, Artificial Sequence
  Description of Artificial Sequence: Synthetic oligonucleotide
cagacuccuggauggcucg

SEQ ID NO: 1326818 - RNA, 19 nt, Artificial Sequence
  Description of Artificial Sequence: Synthetic oligonucleotide
accaacuccuucacacccc

SEQ ID NO: 1326819 - RNA, 19 nt, Artificial Sequence
  Description of Artificial Sequence: Synthetic oligonucleotide
gcuccacccacacaaggcg

SEQ ID NO: 1326820 - RNA, 19 nt, Artificial Sequence
  Description of Artificial Sequence: Synthetic oligonucleotide
ucgcucuagcucugaacag

SEQ ID NO: 1326821 - RNA, 19 nt, Artificial Sequence
  Description of Artificial Sequence: Synthetic oligonucleotide
uuucuaugaggagcgucca

SEQ ID NO: 1326822 - RNA, 19 nt, Artificial Sequence
  Description of Artificial Sequence: Synthetic oligonucleotide
ucugcguggccccacgcau

SEQ ID NO: 1326823 - RNA, 19 nt, Artificial Sequence
  Description of Artificial Sequence: Synthetic oligonucleotide
gcaagauacggccacgcac

SEQ ID NO: 1326824 - RNA, 19 nt, Artificial Sequence
  Description of Artificial Sequence: Synthetic oligonucleotide
aacagacuccuggauggcu

SEQ ID NO: 1326825 - RNA, 19 nt, Artificial Sequence
  Description of Artificial Sequence: Synthetic oligonucleotide
gcaaguugcggaugagccg

SEQ ID NO: 1326826 - RNA, 19 nt, Artificial Sequence
  Description of Artificial Sequence: Synthetic oligonucleotide
gacuucacucugcaccaac

SEQ ID NO: 1326827 - RNA, 19 nt, Artificial Sequence
  Description of Artificial Sequence: Synthetic oligonucleotide
gagagguuggcucgaaugu

SEQ ID NO: 1326828 - RNA, 19 nt, Artificial Sequence
  Description of Artificial Sequence: Synthetic oligonucleotide
auggggaucugcccgcuca

SEQ ID NO: 1326829 - RNA, 19 nt, Artificial Sequence
  Description of Artificial Sequence: Synthetic oligonucleotide
agggcagacaccaguagug

SEQ ID NO: 1326830 - RNA, 19 nt, Artificial Sequence
  Description of Artificial Sequence: Synthetic oligonucleotide
ggccucaccaacccuagag

SEQ ID NO: 1326831 - RNA, 19 nt, Artificial Sequence
  Description of Artificial Sequence: Synthetic oligonucleotide
agccgcagaucuuccaucu

SEQ ID NO: 1326832 - RNA, 19 nt, Artificial Sequence
  Description of Artificial Sequence: Synthetic oligonucleotide
uucugcugagucuccugca

SEQ ID NO: 1326833 - RNA, 19 nt, Artificial Sequence
  Description of Artificial Sequence: Synthetic oligonucleotide
ucccgaaguuccucggccc

SEQ ID NO: 1326834 - RNA, 19 nt, Artificial Sequence
  Description of Artificial Sequence: Synthetic oligonucleotide
ggacugacaggccuuugag

SEQ ID NO: 1326835 - RNA, 19 nt, Artificial Sequence
  Description of Artificial Sequence: Synthetic oligonucleotide
uggaugacgaugggguaga

SEQ ID NO: 1326836 - RNA, 19 nt, Artificial Sequence
  Description of Artificial Sequence: Synthetic oligonucleotide
auccuuuugcccaggcauc

SEQ ID NO: 1326837 - RNA, 19 nt, Artificial Sequence
  Description of Artificial Sequence: Synthetic oligonucleotide
gugcagaaccauuccugcc

SEQ ID NO: 1326838 - RNA, 19 nt, Artificial Sequence
  Description of Artificial Sequence: Synthetic oligonucleotide
gccuguuccugcaagauac

SEQ ID NO: 1326839 - RNA, 19 nt, Artificial Sequence
  Description of Artificial Sequence: Synthetic oligonucleotide
uccuucacaccccgugcac

SEQ ID NO: 1326840 - RNA, 19 nt, Artificial Sequence
  Description of Artificial Sequence: Synthetic oligonucleotide
agggcuucggugucugcug

SEQ ID NO: 1326841 - RNA, 19 nt, Artificial Sequence
  Description of Artificial Sequence: Synthetic oligonucleotide
gggcauggggaucugcccg

SEQ ID NO: 1326842 - RNA, 19 nt, Artificial Sequence
  Description of Artificial Sequence: Synthetic oligonucleotide
caggcacaaauggggagcg

SEQ ID NO: 1326843 - RNA, 19 nt, Artificial Sequence
  Description of Artificial Sequence: Synthetic oligonucleotide
uccucugcguggccccacg

SEQ ID NO: 1326844 - RNA, 19 nt, Artificial Sequence
  Description of Artificial Sequence: Synthetic oligonucleotide
gaacuucuagaagcugcug

SEQ ID NO: 1326845 - RNA, 19 nt, Artificial Sequence
  Description of Artificial Sequence: Synthetic oligonucleotide
gaugagccggggugccagg

SEQ ID NO: 1326846 - RNA, 19 nt, Artificial Sequence
  Description of Artificial Sequence: Synthetic oligonucleotide
gaccccuccaggccagugc

SEQ ID NO: 1326847 - RNA, 19 nt, Artificial Sequence
  Description of Artificial Sequence: Synthetic oligonucleotide
uguucuguccuggcugaac

SEQ ID NO: 1326848 - RNA, 19 nt, Artificial Sequence
  Description of Artificial Sequence: Synthetic oligonucleotide
ccagauagcacccuucgca

SEQ ID NO: 1326849 - RNA, 19 nt, Artificial Sequence
  Description of Artificial Sequence: Synthetic oligonucleotide
uugagccgcagaucuucca

SEQ ID NO: 1326850 - RNA, 19 nt, Artificial Sequence
  Description of Artificial Sequence: Synthetic oligonucleotide
ucuugggcuuuuacacaaa

SEQ ID NO: 1326851 - RNA, 19 nt, Artificial Sequence
  Description of Artificial Sequence: Synthetic oligonucleotide
uacuugucccgaaguuccu

SEQ ID NO: 1326852 - RNA, 19 nt, Artificial Sequence
  Description of Artificial Sequence: Synthetic oligonucleotide
agccccggcacugacgaag

SEQ ID NO: 1326853 - RNA, 19 nt, Artificial Sequence
  Description of Artificial Sequence: Synthetic oligonucleotide
uggauggcucggauccugu

SEQ ID NO: 1326854 - RNA, 19 nt, Artificial Sequence
  Description of Artificial Sequence: Synthetic oligonucleotide
cugcaagauacggccacgc

SEQ ID NO: 1326855 - RNA, 19 nt, Artificial Sequence
  Description of Artificial Sequence: Synthetic oligonucleotide
ggcaagguccucugcuggg

SEQ ID NO: 1326856 - RNA, 19 nt, Artificial Sequence
  Description of Artificial Sequence: Synthetic oligonucleotide
uucgguguuugagccgcag

SEQ ID NO: 1326857 - RNA, 19 nt, Artificial Sequence
  Description of Artificial Sequence: Synthetic oligonucleotide
guaggguuuaaggcuucgc

SEQ ID NO: 1326858 - RNA, 19 nt, Artificial Sequence
  Description of Artificial Sequence: Synthetic oligonucleotide
accuguacccaggaacaug

SEQ ID NO: 1326859 - RNA, 19 nt, Artificial Sequence
  Description of Artificial Sequence: Synthetic oligonucleotide
cugagccccggcacugacg

SEQ ID NO: 1326860 - RNA, 19 nt, Artificial Sequence
  Description of Artificial Sequence: Synthetic oligonucleotide
augagccggggugccaggc

SEQ ID NO: 1326861 - RNA, 19 nt, Artificial Sequence
  Description of Artificial Sequence: Synthetic oligonucleotide
guaguggacgcaccaagcu

SEQ ID NO: 1326862 - RNA, 19 nt, Artificial Sequence
  Description of Artificial Sequence: Synthetic oligonucleotide
gaagaggccugggcauagg

SEQ ID NO: 1326863 - RNA, 19 nt, Artificial Sequence
  Description of Artificial Sequence: Synthetic oligonucleotide
uggggagcguccaggcacu

SEQ ID NO: 1326864 - RNA, 19 nt, Artificial Sequence
  Description of Artificial Sequence: Synthetic oligonucleotide
agcacccuucgcaccaugg

SEQ ID NO: 1326865 - RNA, 19 nt, Artificial Sequence
  Description of Artificial Sequence: Synthetic oligonucleotide
ggauaguggcuggaagagg

SEQ ID NO: 1326866 - RNA, 19 nt, Artificial Sequence
  Description of Artificial Sequence: Synthetic oligonucleotide
ggguuuaaggcuucgcucu

SEQ ID NO: 1326867 - RNA, 19 nt, Artificial Sequence
  Description of Artificial Sequence: Synthetic oligonucleotide
gauccagcaaguugcggau

SEQ ID NO: 1326868 - RNA, 19 nt, Artificial Sequence
  Description of Artificial Sequence: Synthetic oligonucleotide
gaugugcacuguuccucuc

SEQ ID NO: 1326869 - RNA, 19 nt, Artificial Sequence
  Description of Artificial Sequence: Synthetic oligonucleotide
ggcucgaauguagaagggc

SEQ ID NO: 1326870 - RNA, 19 nt, Artificial Sequence
  Description of Artificial Sequence: Synthetic oligonucleotide
ucucacggacauucuucuc

SEQ ID NO: 1326871 - RNA, 19 nt, Artificial Sequence
  Description of Artificial Sequence: Synthetic oligonucleotide
agauacggccacgcaccac

SEQ ID NO: 1326872 - RNA, 19 nt, Artificial Sequence
  Description of Artificial Sequence: Synthetic oligonucleotide
cuguacccaggaacauggc

SEQ ID NO: 1326873 - RNA, 19 nt, Artificial Sequence
  Description of Artificial Sequence: Synthetic oligonucleotide
gacaccaguaguggacgca

SEQ ID NO: 1326874 - RNA, 19 nt, Artificial Sequence
  Description of Artificial Sequence: Synthetic oligonucleotide
gcagcguucgguguuugag

SEQ ID NO: 1326875 - RNA, 19 nt, Artificial Sequence
  Description of Artificial Sequence: Synthetic oligonucleotide
aaguugcggaugagccggg

SEQ ID NO: 1326876 - RNA, 19 nt, Artificial Sequence
  Description of Artificial Sequence: Synthetic oligonucleotide
ccacgcaccaccuuggcca

SEQ ID NO: 1326877 - RNA, 19 nt, Artificial Sequence
  Description of Artificial Sequence: Synthetic oligonucleotide
agaggucuggauaguggcu

SEQ ID NO: 1326878 - RNA, 19 nt, Artificial Sequence
  Description of Artificial Sequence: Synthetic oligonucleotide
aaggacugacaggccuuug

SEQ ID NO: 1326879 - RNA, 19 nt, Artificial Sequence
  Description of Artificial Sequence: Synthetic oligonucleotide
gcucuagcucugaacagag

SEQ ID NO: 1326880 - RNA, 19 nt, Artificial Sequence
  Description of Artificial Sequence: Synthetic oligonucleotide
ggagcuaggcagauccagc

SEQ ID NO: 1326881 - RNA, 19 nt, Artificial Sequence
  Description of Artificial Sequence: Synthetic oligonucleotide
cuucgcaccauggccccag

SEQ ID NO: 1326882 - RNA, 19 nt, Artificial Sequence
  Description of Artificial Sequence: Synthetic oligonucleotide
acaaggcgagccuguuccu

SEQ ID NO: 1326883 - RNA, 19 nt, Artificial Sequence
  Description of Artificial Sequence: Synthetic oligonucleotide
aguccagucuggagcuagg

SEQ ID NO: 1326884 - RNA, 19 nt, Artificial Sequence
  Description of Artificial Sequence: Synthetic oligonucleotide
agccuguuccugcaagaua

SEQ ID NO: 1326885 - RNA, 19 nt, Artificial Sequence
  Description of Artificial Sequence: Synthetic oligonucleotide
uugcuucgagggcuucggu

SEQ ID NO: 1326886 - RNA, 19 nt, Artificial Sequence
  Description of Artificial Sequence: Synthetic oligonucleotide
cacgcaccaccuuggccag

SEQ ID NO: 1326887 - RNA, 19 nt, Artificial Sequence
  Description of Artificial Sequence: Synthetic oligonucleotide
ucggugucugcuggagagc

SEQ ID NO: 1326888 - RNA, 19 nt, Artificial Sequence
  Description of Artificial Sequence: Synthetic oligonucleotide
cuguaggguuuaaggcuuc

SEQ ID NO: 1326889 - RNA, 19 nt, Artificial Sequence
  Description of Artificial Sequence: Synthetic oligonucleotide
gcucucugguaauugggca

SEQ ID NO: 1326890 - RNA, 19 nt, Artificial Sequence
  Description of Artificial Sequence: Synthetic oligonucleotide
ugccucgcuccacccacac

SEQ ID NO: 1326891 - RNA, 19 nt, Artificial Sequence
  Description of Artificial Sequence: Synthetic oligonucleotide
cuggccggcccaacaggcc

SEQ ID NO: 1326892 - RNA, 19 nt, Artificial Sequence
  Description of Artificial Sequence: Synthetic oligonucleotide
gcuugggccucaccaaccc

SEQ ID NO: 1326893 - RNA, 19 nt, Artificial Sequence
  Description of Artificial Sequence: Synthetic oligonucleotide
cuuggaaguccagucugga

SEQ ID NO: 1326894 - RNA, 19 nt, Artificial Sequence
  Description of Artificial Sequence: Synthetic oligonucleotide
caacagacuccuggauggc

SEQ ID NO: 1326895 - RNA, 19 nt, Artificial Sequence
  Description of Artificial Sequence: Synthetic oligonucleotide
uagcacccuucgcaccaug

SEQ ID NO: 1326896 - RNA, 19 nt, Artificial Sequence
  Description of Artificial Sequence: Synthetic oligonucleotide
gcacaaauggggagcgucc

SEQ ID NO: 1326897 - RNA, 19 nt, Artificial Sequence
  Description of Artificial Sequence: Synthetic oligonucleotide
gcacugacgaagcagcucu

SEQ ID NO: 1326898 - RNA, 19 nt, Artificial Sequence
  Description of Artificial Sequence: Synthetic oligonucleotide
caaggcgagccuguuccug

SEQ ID NO: 1326899 - RNA, 19 nt, Artificial Sequence
  Description of Artificial Sequence: Synthetic oligonucleotide
caccaacccuagagcacgc

SEQ ID NO: 1326900 - RNA, 19 nt, Artificial Sequence
  Description of Artificial Sequence: Synthetic oligonucleotide
gugcacuguuccucuccag

SEQ ID NO: 1326901 - RNA, 19 nt, Artificial Sequence
  Description of Artificial Sequence: Synthetic oligonucleotide
ucgagggcuucggugucug

SEQ ID NO: 1326902 - RNA, 19 nt, Artificial Sequence
  Description of Artificial Sequence: Synthetic oligonucleotide
ggcacaaauggggagcguc

SEQ ID NO: 1326903 - RNA, 19 nt, Artificial Sequence
  Description of Artificial Sequence: Synthetic oligonucleotide
uggcucggauccuguugcc

SEQ ID NO: 1326904 - RNA, 19 nt, Artificial Sequence
  Description of Artificial Sequence: Synthetic oligonucleotide
gaaucccgccagccuggcc

SEQ ID NO: 1326905 - RNA, 19 nt, Artificial Sequence
  Description of Artificial Sequence: Synthetic oligonucleotide
uggacgcaccaagcuguag

SEQ ID NO: 1326906 - RNA, 19 nt, Artificial Sequence
  Description of Artificial Sequence: Synthetic oligonucleotide
ggcauggggaucugcccgc

SEQ ID NO: 1326907 - RNA, 19 nt, Artificial Sequence
  Description of Artificial Sequence: Synthetic oligonucleotide
guccagucuggagcuaggc

SEQ ID NO: 1326908 - RNA, 19 nt, Artificial Sequence
  Description of Artificial Sequence: Synthetic oligonucleotide
cagcccgcucuucucaauc

SEQ ID NO: 1326909 - RNA, 19 nt, Artificial Sequence
  Description of Artificial Sequence: Synthetic oligonucleotide
aggagcguccaggcacugg

SEQ ID NO: 1326910 - RNA, 19 nt, Artificial Sequence
  Description of Artificial Sequence: Synthetic oligonucleotide
gcagggcagacaccaguag

SEQ ID NO: 1326911 - RNA, 19 nt, Artificial Sequence
  Description of Artificial Sequence: Synthetic oligonucleotide
gcagauccagcaaguugcg

SEQ ID NO: 1326912 - RNA, 19 nt, Artificial Sequence
  Description of Artificial Sequence: Synthetic oligonucleotide
agaagcugcugcgcucucu

SEQ ID NO: 1326913 - RNA, 19 nt, Artificial Sequence
  Description of Artificial Sequence: Synthetic oligonucleotide
ugaaucccgccagccuggc

SEQ ID NO: 1326914 - RNA, 19 nt, Artificial Sequence
  Description of Artificial Sequence: Synthetic oligonucleotide
aggccccugaucucacgga

SEQ ID NO: 1326915 - RNA, 19 nt, Artificial Sequence
  Description of Artificial Sequence: Synthetic oligonucleotide
ccacgcaugggcaggcacc

SEQ ID NO: 1326916 - RNA, 19 nt, Artificial Sequence
  Description of Artificial Sequence: Synthetic oligonucleotide
agcagcguucgguguuuga

SEQ ID NO: 1326917 - RNA, 19 nt, Artificial Sequence
  Description of Artificial Sequence: Synthetic oligonucleotide
cacugacgaagcagcucug

SEQ ID NO: 1326918 - RNA, 19 nt, Artificial Sequence
  Description of Artificial Sequence: Synthetic oligonucleotide
uucgcaccauggccccagc

SEQ ID NO: 1326919 - RNA, 19 nt, Artificial Sequence
  Description of Artificial Sequence: Synthetic oligonucleotide
caacaggccccugaucuca

SEQ ID NO: 1326920 - RNA, 19 nt, Artificial Sequence
  Description of Artificial Sequence: Synthetic oligonucleotide
agacuccuggauggcucgg

SEQ ID NO: 1326921 - RNA, 19 nt, Artificial Sequence
  Description of Artificial Sequence: Synthetic oligonucleotide
ccgagugcagaaccauucc

SEQ ID NO: 1326922 - RNA, 19 nt, Artificial Sequence
  Description of Artificial Sequence: Synthetic oligonucleotide
cauggaugacgauggggua

SEQ ID NO: 1326923 - RNA, 19 nt, Artificial Sequence
  Description of Artificial Sequence: Synthetic oligonucleotide
gauggguccucaggccuca

SEQ ID NO: 1326924 - RNA, 19 nt, Artificial Sequence
  Description of Artificial Sequence: Synthetic oligonucleotide
ggaugagccggggugccag

SEQ ID NO: 1326925 - RNA, 19 nt, Artificial Sequence
  Description of Artificial Sequence: Synthetic oligonucleotide
uucgagggcuucggugucu

SEQ ID NO: 1326926 - RNA, 19 nt, Artificial Sequence
  Description of Artificial Sequence: Synthetic oligonucleotide
cccuagagcacgcuucuuc

SEQ ID NO: 1326927 - RNA, 19 nt, Artificial Sequence
  Description of Artificial Sequence: Synthetic oligonucleotide
cugcguggccccacgcaug

SEQ ID NO: 1326928 - RNA, 19 nt, Artificial Sequence
  Description of Artificial Sequence: Synthetic oligonucleotide
ccucuccagagaaacuuuc

SEQ ID NO: 1326929 - RNA, 19 nt, Artificial Sequence
  Description of Artificial Sequence: Synthetic oligonucleotide
gcuucgagggcuucggugu

SEQ ID NO: 1326930 - RNA, 19 nt, Artificial Sequence
  Description of Artificial Sequence: Synthetic oligonucleotide
ggaagcccaggcacaaaug

SEQ ID NO: 1326931 - RNA, 19 nt, Artificial Sequence
  Description of Artificial Sequence: Synthetic oligonucleotide
cucggcugcugccucgcuc

SEQ ID NO: 1326932 - RNA, 19 nt, Artificial Sequence
  Description of Artificial Sequence: Synthetic oligonucleotide
gguuggcucgaauguagaa

SEQ ID NO: 1326933 - RNA, 19 nt, Artificial Sequence
  Description of Artificial Sequence: Synthetic oligonucleotide
cgcucucugguaauugggc

SEQ ID NO: 1326934 - RNA, 19 nt, Artificial Sequence
  Description of Artificial Sequence: Synthetic oligonucleotide
gcaccuguacccaggaaca

SEQ ID NO: 1326935 - RNA, 19 nt, Artificial Sequence
  Description of Artificial Sequence: Synthetic oligonucleotide
ccuggccggcccaacaggc

SEQ ID NO: 1326936 - RNA, 19 nt, Artificial Sequence
  Description of Artificial Sequence: Synthetic oligonucleotide
gcgcucucugguaauuggg

SEQ ID NO: 1326937 - RNA, 19 nt, Artificial Sequence
  Description of Artificial Sequence: Synthetic oligonucleotide
gguguuugagccgcagauc

SEQ ID NO: 1326938 - RNA, 19 nt, Artificial Sequence
  Description of Artificial Sequence: Synthetic oligonucleotide
gcgagccuguuccugcaag

SEQ ID NO: 1326939 - RNA, 19 nt, Artificial Sequence
  Description of Artificial Sequence: Synthetic oligonucleotide
cccaggcacaaauggggag

SEQ ID NO: 1326940 - RNA, 19 nt, Artificial Sequence
  Description of Artificial Sequence: Synthetic oligonucleotide
ucagcagcguucgguguuu

SEQ ID NO: 1326941 - RNA, 19 nt, Artificial Sequence
  Description of Artificial Sequence: Synthetic oligonucleotide
cgaagcagcucugaauccc

SEQ ID NO: 1326942 - RNA, 19 nt, Artificial Sequence
  Description of Artificial Sequence: Synthetic oligonucleotide
gcuccgggagcugaggaug

SEQ ID NO: 1326943 - RNA, 19 nt, Artificial Sequence
  Description of Artificial Sequence: Synthetic oligonucleotide
guuccucggcccacugaag

SEQ ID NO: 1326944 - RNA, 19 nt, Artificial Sequence
  Description of Artificial Sequence: Synthetic oligonucleotide
gcguucgguguuugagccg

SEQ ID NO: 1326945 - RNA, 19 nt, Artificial Sequence
  Description of Artificial Sequence: Synthetic oligonucleotide
uucacaccccgugcaccca

SEQ ID NO: 1326946 - RNA, 19 nt, Artificial Sequence
  Description of Artificial Sequence: Synthetic oligonucleotide
uagaagcugcugcgcucuc

SEQ ID NO: 1326947 - RNA, 19 nt, Artificial Sequence
  Description of Artificial Sequence: Synthetic oligonucleotide
cuucggugucugcuggaga

SEQ ID NO: 1326948 - RNA, 19 nt, Artificial Sequence
  Description of Artificial Sequence: Synthetic oligonucleotide
cugcgcucucugguaauug

SEQ ID NO: 1326949 - RNA, 19 nt, Artificial Sequence
  Description of Artificial Sequence: Synthetic oligonucleotide
ggauccuguugcccagccc

SEQ ID NO: 1326950 - RNA, 19 nt, Artificial Sequence
  Description of Artificial Sequence: Synthetic oligonucleotide
uccucggcugcugccucgc

SEQ ID NO: 1326951 - RNA, 19 nt, Artificial Sequence
  Description of Artificial Sequence: Synthetic oligonucleotide
cguucgguguuugagccgc

SEQ ID NO: 1326952 - RNA, 19 nt, Artificial Sequence
  Description of Artificial Sequence: Synthetic oligonucleotide
ggccccugaucucacggac

SEQ ID NO: 1326953 - RNA, 19 nt, Artificial Sequence
  Description of Artificial Sequence: Synthetic oligonucleotide
gcucugaaucccgccagcc

SEQ ID NO: 1326954 - RNA, 19 nt, Artificial Sequence
  Description of Artificial Sequence: Synthetic oligonucleotide
cucugcguggccccacgca

SEQ ID NO: 1326955 - RNA, 19 nt, Artificial Sequence
  Description of Artificial Sequence: Synthetic oligonucleotide
gggguagacuucacucugc

SEQ ID NO: 1326956 - RNA, 19 nt, Artificial Sequence
  Description of Artificial Sequence: Synthetic oligonucleotide
ggcaggcaccuguacccag

SEQ ID NO: 1326957 - RNA, 19 nt, Artificial Sequence
  Description of Artificial Sequence: Synthetic oligonucleotide
gcggugcuuauagagguca

SEQ ID NO: 1326958 - RNA, 19 nt, Artificial Sequence
  Description of Artificial Sequence: Synthetic oligonucleotide
gacuccuggauggcucgga

SEQ ID NO: 1326959 - RNA, 19 nt, Artificial Sequence
  Description of Artificial Sequence: Synthetic oligonucleotide
ggaugugcacuguuccucu

SEQ ID NO: 1326960 - RNA, 19 nt, Artificial Sequence
  Description of Artificial Sequence: Synthetic oligonucleotide
ccaagcuguaggguuuaag

SEQ ID NO: 1326961 - RNA, 19 nt, Artificial Sequence
  Description of Artificial Sequence: Synthetic oligonucleotide
ccugcaagauacggccacg

SEQ ID NO: 1326962 - RNA, 19 nt, Artificial Sequence
  Description of Artificial Sequence: Synthetic oligonucleotide
ccuucacaccccgugcacc

SEQ ID NO: 1326963 - RNA, 19 nt, Artificial Sequence
  Description of Artificial Sequence: Synthetic oligonucleotide
cuggagcuaggcagaucca

SEQ ID NO: 1326964 - RNA, 19 nt, Artificial Sequence
  Description of Artificial Sequence: Synthetic oligonucleotide
gccacgcaccaccuuggcc

SEQ ID NO: 1326965 - RNA, 19 nt, Artificial Sequence
  Description of Artificial Sequence: Synthetic oligonucleotide
acgcaccaagcuguagggu

SEQ ID NO: 1326966 - RNA, 19 nt, Artificial Sequence
  Description of Artificial Sequence: Synthetic oligonucleotide
uccgggagcugaggaugug

SEQ ID NO: 1326967 - RNA, 19 nt, Artificial Sequence
  Description of Artificial Sequence: Synthetic oligonucleotide
ggcuugggccucaccaacc

SEQ ID NO: 1326968 - RNA, 19 nt, Artificial Sequence
  Description of Artificial Sequence: Synthetic oligonucleotide
aucugcccgcucaggcagg

SEQ ID NO: 1326969 - RNA, 19 nt, Artificial Sequence
  Description of Artificial Sequence: Synthetic oligonucleotide
gguuuaaggcuucgcucua

SEQ ID NO: 1326970 - RNA, 19 nt, Artificial Sequence
  Description of Artificial Sequence: Synthetic oligonucleotide
cggacauucuucucaguca

SEQ ID NO: 1326971 - RNA, 19 nt, Artificial Sequence
  Description of Artificial Sequence: Synthetic oligonucleotide
cucugaaucccgccagccu

SEQ ID NO: 1326972 - RNA, 19 nt, Artificial Sequence
  Description of Artificial Sequence: Synthetic oligonucleotide
cauggggaucugcccgcuc

SEQ ID NO: 1326973 - RNA, 19 nt, Artificial Sequence
  Description of Artificial Sequence: Synthetic oligonucleotide
ggcucggauccuguugccc

SEQ ID NO: 1326974 - RNA, 19 nt, Artificial Sequence
  Description of Artificial Sequence: Synthetic oligonucleotide
ggcugaaccaggcccagau

SEQ ID NO: 1326975 - RNA, 19 nt, Artificial Sequence
  Description of Artificial Sequence: Synthetic oligonucleotide
cuguuccucuccagagaaa

SEQ ID NO: 1326976 - RNA, 19 nt, Artificial Sequence
  Description of Artificial Sequence: Synthetic oligonucleotide
aguggccaugcggugcuua

SEQ ID NO: 1326977 - RNA, 19 nt, Artificial Sequence
  Description of Artificial Sequence: Synthetic oligonucleotide
cccuucgcaccauggcccc

SEQ ID NO: 1326978 - RNA, 19 nt, Artificial Sequence
  Description of Artificial Sequence: Synthetic oligonucleotide
aggccgcagggcagacacc

SEQ ID NO: 1326979 - RNA, 19 nt, Artificial Sequence
  Description of Artificial Sequence: Synthetic oligonucleotide
auagcacccuucgcaccau

SEQ ID NO: 1326980 - RNA, 19 nt, Artificial Sequence
  Description of Artificial Sequence: Synthetic oligonucleotide
agacuucacucugcaccaa

SEQ ID NO: 1326981 - RNA, 19 nt, Artificial Sequence
  Description of Artificial Sequence: Synthetic oligonucleotide
guggccccacgcaugggca

SEQ ID NO: 1326982 - RNA, 19 nt, Artificial Sequence
  Description of Artificial Sequence: Synthetic oligonucleotide
gagccuguuccugcaagau

SEQ ID NO: 1326983 - RNA, 19 nt, Artificial Sequence
  Description of Artificial Sequence: Synthetic oligonucleotide
cugcugcgcucucugguaa

SEQ ID NO: 1326984 - RNA, 19 nt, Artificial Sequence
  Description of Artificial Sequence: Synthetic oligonucleotide
guccacccgagugcagaac

SEQ ID NO: 1326985 - RNA, 19 nt, Artificial Sequence
  Description of Artificial Sequence: Synthetic oligonucleotide
gccuccgcuugugugcugc

SEQ ID NO: 1326986 - RNA, 19 nt, Artificial Sequence
  Description of Artificial Sequence: Synthetic oligonucleotide
ggccccacgcaugggcagg

SEQ ID NO: 1326987 - RNA, 19 nt, Artificial Sequence
  Description of Artificial Sequence: Synthetic oligonucleotide
ccgggagcugaggaugugc

SEQ ID NO: 1326988 - RNA, 19 nt, Artificial Sequence
  Description of Artificial Sequence: Synthetic oligonucleotide
ugccuccgcuugugugcug

SEQ ID NO: 1326989 - RNA, 19 nt, Artificial Sequence
  Description of Artificial Sequence: Synthetic oligonucleotide
gggccucauggaaggacug

SEQ ID NO: 1326990 - RNA, 19 nt, Artificial Sequence
  Description of Artificial Sequence: Synthetic oligonucleotide
aggcacaaauggggagcgu

SEQ ID NO: 1326991 - RNA, 19 nt, Artificial Sequence
  Description of Artificial Sequence: Synthetic oligonucleotide
ugcccagcccuggggugga

SEQ ID NO: 1326992 - RNA, 19 nt, Artificial Sequence
  Description of Artificial Sequence: Synthetic oligonucleotide
ggccacgcaccaccuuggc

SEQ ID NO: 1326993 - RNA, 19 nt, Artificial Sequence
  Description of Artificial Sequence: Synthetic oligonucleotide
gaaguccagucuggagcua

SEQ ID NO: 1326994 - RNA, 19 nt, Artificial Sequence
  Description of Artificial Sequence: Synthetic oligonucleotide
gguccacccgagugcagaa

SEQ ID NO: 1326995 - RNA, 19 nt, Artificial Sequence
  Description of Artificial Sequence: Synthetic oligonucleotide
cauuccugccuccgcuugu

SEQ ID NO: 1326996 - RNA, 19 nt, Artificial Sequence
  Description of Artificial Sequence: Synthetic oligonucleotide
gcuguaggguuuaaggcuu

SEQ ID NO: 1326997 - RNA, 19 nt, Artificial Sequence
  Description of Artificial Sequence: Synthetic oligonucleotide
acccgagugcagaaccauu

SEQ ID NO: 1326998 - RNA, 19 nt, Artificial Sequence
  Description of Artificial Sequence: Synthetic oligonucleotide
cccacgcaugggcaggcac

SEQ ID NO: 1326999 - RNA, 19 nt, Artificial Sequence
  Description of Artificial Sequence: Synthetic oligonucleotide
gggaguguagagcccuggu

SEQ ID NO: 1327000 - RNA, 19 nt, Artificial Sequence
  Description of Artificial Sequence: Synthetic oligonucleotide
accaagcuguaggguuuaa

SEQ ID NO: 1327001 - RNA, 19 nt, Artificial Sequence
  Description of Artificial Sequence: Synthetic oligonucleotide
ggcacucaggcaggagcac

SEQ ID NO: 1327002 - RNA, 19 nt, Artificial Sequence
  Description of Artificial Sequence: Synthetic oligonucleotide
ccuccgcuugugugcugcg

SEQ ID NO: 1327003 - RNA, 19 nt, Artificial Sequence
  Description of Artificial Sequence: Synthetic oligonucleotide
ccagcaaguugcggaugag

SEQ ID NO: 1327004 - RNA, 19 nt, Artificial Sequence
  Description of Artificial Sequence: Synthetic oligonucleotide
guggccaugcggugcuuau

SEQ ID NO: 1327005 - RNA, 19 nt, Artificial Sequence
  Description of Artificial Sequence: Synthetic oligonucleotide
gcccaggcacaaaugggga

SEQ ID NO: 1327006 - RNA, 19 nt, Artificial Sequence
  Description of Artificial Sequence: Synthetic oligonucleotide
gcuucgcucuagcucugaa

SEQ ID NO: 1327007 - RNA, 19 nt, Artificial Sequence
  Description of Artificial Sequence: Synthetic oligonucleotide
cagcagcguucgguguuug

SEQ ID NO: 1327008 - RNA, 19 nt, Artificial Sequence
  Description of Artificial Sequence: Synthetic oligonucleotide
cacgcaugggcaggcaccu

SEQ ID NO: 1327009 - RNA, 19 nt, Artificial Sequence
  Description of Artificial Sequence: Synthetic oligonucleotide
ccucggcccacugaagcuc

SEQ ID NO: 1327010 - RNA, 19 nt, Artificial Sequence
  Description of Artificial Sequence: Synthetic oligonucleotide
cugccucgcuccacccaca

SEQ ID NO: 1327011 - RNA, 19 nt, Artificial Sequence
  Description of Artificial Sequence: Synthetic oligonucleotide
aggcuucgcucuagcucug

SEQ ID NO: 1327012 - RNA, 19 nt, Artificial Sequence
  Description of Artificial Sequence: Synthetic oligonucleotide
gggcauaggauggguccuc

SEQ ID NO: 1327013 - RNA, 19 nt, Artificial Sequence
  Description of Artificial Sequence: Synthetic oligonucleotide
cuccucugcguggccccac

SEQ ID NO: 1327014 - RNA, 19 nt, Artificial Sequence
  Description of Artificial Sequence: Synthetic oligonucleotide
cggccacgcaccaccuugg

SEQ ID NO: 1327015 - RNA, 19 nt, Artificial Sequence
  Description of Artificial Sequence: Synthetic oligonucleotide
ccccagagccacuguucug

SEQ ID NO: 1327016 - RNA, 19 nt, Artificial Sequence
  Description of Artificial Sequence: Synthetic oligonucleotide
gcggaugagccggggugcc

SEQ ID NO: 1327017 - RNA, 19 nt, Artificial Sequence
  Description of Artificial Sequence: Synthetic oligonucleotide
caccaagcuguaggguuua

SEQ ID NO: 1327018 - RNA, 19 nt, Artificial Sequence
  Description of Artificial Sequence: Synthetic oligonucleotide
gcacuggauggaggaggcc

SEQ ID NO: 1327019 - RNA, 19 nt, Artificial Sequence
  Description of Artificial Sequence: Synthetic oligonucleotide
acgcaugggcaggcaccug

SEQ ID NO: 1327020 - RNA, 19 nt, Artificial Sequence
  Description of Artificial Sequence: Synthetic oligonucleotide
cccgaaguuccucggccca

SEQ ID NO: 1327021 - RNA, 19 nt, Artificial Sequence
  Description of Artificial Sequence: Synthetic oligonucleotide
cgcucuagcucugaacaga

SEQ ID NO: 1327022 - RNA, 19 nt, Artificial Sequence
  Description of Artificial Sequence: Synthetic oligonucleotide
ccucugcguggccccacgc

SEQ ID NO: 1327023 - RNA, 19 nt, Artificial Sequence
  Description of Artificial Sequence: Synthetic oligonucleotide
guucgguguuugagccgca

SEQ ID NO: 1327024 - RNA, 19 nt, Artificial Sequence
  Description of Artificial Sequence: Synthetic oligonucleotide
cacggacauucuucucagu

SEQ ID NO: 1327025 - RNA, 19 nt, Artificial Sequence
  Description of Artificial Sequence: Synthetic oligonucleotide
cgagccuguuccugcaaga

SEQ ID NO: 1327026 - RNA, 19 nt, Artificial Sequence
  Description of Artificial Sequence: Synthetic oligonucleotide
acccuagagcacgcuucuu

SEQ ID NO: 1327027 - RNA, 19 nt, Artificial Sequence
  Description of Artificial Sequence: Synthetic oligonucleotide
ccgaaguuccucggcccac

SEQ ID NO: 1327028 - RNA, 19 nt, Artificial Sequence
  Description of Artificial Sequence: Synthetic oligonucleotide
guggacgcaccaagcugua

SEQ ID NO: 1327029 - RNA, 19 nt, Artificial Sequence
  Description of Artificial Sequence: Synthetic oligonucleotide
gugccccgguccagguccc

SEQ ID NO: 1327030 - RNA, 19 nt, Artificial Sequence
  Description of Artificial Sequence: Synthetic oligonucleotide
gccccugaucucacggaca

SEQ ID NO: 1327031 - RNA, 19 nt, Artificial Sequence
  Description of Artificial Sequence: Synthetic oligonucleotide
caacuccuucacaccccgu

SEQ ID NO: 1327032 - RNA, 19 nt, Artificial Sequence
  Description of Artificial Sequence: Synthetic oligonucleotide
cgagugcagaaccauuccu

SEQ ID NO: 1327033 - RNA, 19 nt, Artificial Sequence
  Description of Artificial Sequence: Synthetic oligonucleotide
ggcgagccuguuccugcaa

SEQ ID NO: 1327034 - RNA, 19 nt, Artificial Sequence
  Description of Artificial Sequence: Synthetic oligonucleotide
cugccuccgcuugugugcu

SEQ ID NO: 1327035 - RNA, 19 nt, Artificial Sequence
  Description of Artificial Sequence: Synthetic oligonucleotide
cacccgagugcagaaccau

SEQ ID NO: 1327036 - RNA, 19 nt, Artificial Sequence
  Description of Artificial Sequence: Synthetic oligonucleotide
ggcccaacaggccccugau

SEQ ID NO: 1327037 - RNA, 19 nt, Artificial Sequence
  Description of Artificial Sequence: Synthetic oligonucleotide
gccccacgcaugggcaggc

SEQ ID NO: 1327038 - RNA, 19 nt, Artificial Sequence
  Description of Artificial Sequence: Synthetic oligonucleotide
gccucgcuccacccacaca

SEQ ID NO: 1327039 - RNA, 19 nt, Artificial Sequence
  Description of Artificial Sequence: Synthetic oligonucleotide
ccacacaaggcgagccugu

SEQ ID NO: 1327040 - RNA, 19 nt, Artificial Sequence
  Description of Artificial Sequence: Synthetic oligonucleotide
ccccugaucucacggacau

SEQ ID NO: 1327041 - RNA, 19 nt, Artificial Sequence
  Description of Artificial Sequence: Synthetic oligonucleotide
ccuuuugcccaggcaucca

SEQ ID NO: 1327042 - RNA, 19 nt, Artificial Sequence
  Description of Artificial Sequence: Synthetic oligonucleotide
gggagagguuggcucgaau

SEQ ID NO: 1327043 - RNA, 19 nt, Artificial Sequence
  Description of Artificial Sequence: Synthetic oligonucleotide
ggauggcucggauccuguu

SEQ ID NO: 1327044 - RNA, 19 nt, Artificial Sequence
  Description of Artificial Sequence: Synthetic oligonucleotide
gcccgcucaggcagggaga

SEQ ID NO: 1327045 - RNA, 19 nt, Artificial Sequence
  Description of Artificial Sequence: Synthetic oligonucleotide
caccuguacccaggaacau

SEQ ID NO: 1327046 - RNA, 19 nt, Artificial Sequence
  Description of Artificial Sequence: Synthetic oligonucleotide
gcaugggcaggcaccugua

SEQ ID NO: 1327047 - RNA, 19 nt, Artificial Sequence
  Description of Artificial Sequence: Synthetic oligonucleotide
ccaacccuagagcacgcuu

SEQ ID NO: 1327048 - RNA, 19 nt, Artificial Sequence
  Description of Artificial Sequence: Synthetic oligonucleotide
ggggagcguccaggcacug

SEQ ID NO: 1327049 - RNA, 19 nt, Artificial Sequence
  Description of Artificial Sequence: Synthetic oligonucleotide
gcguggccccacgcauggg

SEQ ID NO: 1327050 - RNA, 19 nt, Artificial Sequence
  Description of Artificial Sequence: Synthetic oligonucleotide
cccagcccgcucuucucaa

SEQ ID NO: 1327051 - RNA, 19 nt, Artificial Sequence
  Description of Artificial Sequence: Synthetic oligonucleotide
ccgcucaggcagggagagg

SEQ ID NO: 1327052 - RNA, 19 nt, Artificial Sequence
  Description of Artificial Sequence: Synthetic oligonucleotide
gcucuguaccugauccuuu

SEQ ID NO: 1327053 - RNA, 19 nt, Artificial Sequence
  Description of Artificial Sequence: Synthetic oligonucleotide
cugcccgcucaggcaggga

SEQ ID NO: 1327054 - RNA, 19 nt, Artificial Sequence
  Description of Artificial Sequence: Synthetic oligonucleotide
ggcaauccccagagccacu

SEQ ID NO: 1327055 - RNA, 19 nt, Artificial Sequence
  Description of Artificial Sequence: Synthetic oligonucleotide
gcugcgcucucugguaauu

SEQ ID NO: 1327056 - RNA, 19 nt, Artificial Sequence
  Description of Artificial Sequence: Synthetic oligonucleotide
cgcuugugugcugcgucca

SEQ ID NO: 1327057 - RNA, 19 nt, Artificial Sequence
  Description of Artificial Sequence: Synthetic oligonucleotide
gcauggggaucugcccgcu

SEQ ID NO: 1327058 - RNA, 19 nt, Artificial Sequence
  Description of Artificial Sequence: Synthetic oligonucleotide
ccuucgcaccauggcccca

SEQ ID NO: 1327059 - RNA, 19 nt, Artificial Sequence
  Description of Artificial Sequence: Synthetic oligonucleotide
gccagccuggccggcccaa

SEQ ID NO: 1327060 - RNA, 19 nt, Artificial Sequence
  Description of Artificial Sequence: Synthetic oligonucleotide
cgaaguuccucggcccacu

SEQ ID NO: 1327061 - RNA, 19 nt, Artificial Sequence
  Description of Artificial Sequence: Synthetic oligonucleotide
cuucugcccuuggcucuuu

SEQ ID NO: 1327062 - RNA, 19 nt, Artificial Sequence
  Description of Artificial Sequence: Synthetic oligonucleotide
ccagcccgcucuucucaau

SEQ ID NO: 1327063 - RNA, 19 nt, Artificial Sequence
  Description of Artificial Sequence: Synthetic oligonucleotide
gccccgguccaggucccgu

SEQ ID NO: 1327064 - RNA, 19 nt, Artificial Sequence
  Description of Artificial Sequence: Synthetic oligonucleotide
ccucggcugcugccucgcu

SEQ ID NO: 1327065 - RNA, 19 nt, Artificial Sequence
  Description of Artificial Sequence: Synthetic oligonucleotide
cccugaucucacggacauu

SEQ ID NO: 1327066 - RNA, 19 nt, Artificial Sequence
  Description of Artificial Sequence: Synthetic oligonucleotide
uguacuauaguauauauuc

SEQ ID NO: 1327067 - RNA, 19 nt, Artificial Sequence
  Description of Artificial Sequence: Synthetic oligonucleotide
ugaagaugaacaaagacac

SEQ ID NO: 1327068 - RNA, 19 nt, Artificial Sequence
  Description of Artificial Sequence: Synthetic oligonucleotide
uacauagucaauagcacgg

SEQ ID NO: 1327069 - RNA, 19 nt, Artificial Sequence
  Description of Artificial Sequence: Synthetic oligonucleotide
ucuaaaaucuauguuagcc

SEQ ID NO: 1327070 - RNA, 19 nt, Artificial Sequence
  Description of Artificial Sequence: Synthetic oligonucleotide
guaagaaagccauaggagg

SEQ ID NO: 1327071 - RNA, 19 nt, Artificial Sequence
  Description of Artificial Sequence: Synthetic oligonucleotide
augaguuuaagacugauga

SEQ ID NO: 1327072 - RNA, 19 nt, Artificial Sequence
  Description of Artificial Sequence: Synthetic oligonucleotide
ucauaaguaaugaagacau

SEQ ID NO: 1327073 - RNA, 19 nt, Artificial Sequence
  Description of Artificial Sequence: Synthetic oligonucleotide
auuuugcuagucuacaugg

SEQ ID NO: 1327074 - RNA, 19 nt, Artificial Sequence
  Description of Artificial Sequence: Synthetic oligonucleotide
uaaguaaugaagacauagg

SEQ ID NO: 1327075 - RNA, 19 nt, Artificial Sequence
  Description of Artificial Sequence: Synthetic oligonucleotide
uacauuaucucuaaugagu

SEQ ID NO: 1327076 - RNA, 19 nt, Artificial Sequence
  Description of Artificial Sequence: Synthetic oligonucleotide
uguacaauugcuauguuau

SEQ ID NO: 1327077 - RNA, 19 nt, Artificial Sequence
  Description of Artificial Sequence: Synthetic oligonucleotide
agugcauacauuauagucc

SEQ ID NO: 1327078 - RNA, 19 nt, Artificial Sequence
  Description of Artificial Sequence: Synthetic oligonucleotide
auaaguaaugaagacauag

SEQ ID NO: 1327079 - RNA, 19 nt, Artificial Sequence
  Description of Artificial Sequence: Synthetic oligonucleotide
ugagaucacaucuacauac

SEQ ID NO: 1327080 - RNA, 19 nt, Artificial Sequence
  Description of Artificial Sequence: Synthetic oligonucleotide
auaguuaugaauuccacaa

SEQ ID NO: 1327081 - RNA, 19 nt, Artificial Sequence
  Description of Artificial Sequence: Synthetic oligonucleotide
ucuaccgcacuacagagag

SEQ ID NO: 1327082 - RNA, 19 nt, Artificial Sequence
  Description of Artificial Sequence: Synthetic oligonucleotide
uuauauacuuucugaaugc

SEQ ID NO: 1327083 - RNA, 19 nt, Artificial Sequence
  Description of Artificial Sequence: Synthetic oligonucleotide
uauacuuucugaaugcuuc

SEQ ID NO: 1327084 - RNA, 19 nt, Artificial Sequence
  Description of Artificial Sequence: Synthetic oligonucleotide
uuucuuugaaccaaucugu

SEQ ID NO: 1327085 - RNA, 19 nt, Artificial Sequence
  Description of Artificial Sequence: Synthetic oligonucleotide
acuagaugaacucaggagu

SEQ ID NO: 1327086 - RNA, 19 nt, Artificial Sequence
  Description of Artificial Sequence: Synthetic oligonucleotide
ugaugaauggguucaauca

SEQ ID NO: 1327087 - RNA, 19 nt, Artificial Sequence
  Description of Artificial Sequence: Synthetic oligonucleotide
auugcuauguuauuguacu

SEQ ID NO: 1327088 - RNA, 19 nt, Artificial Sequence
  Description of Artificial Sequence: Synthetic oligonucleotide
gaugaacaaagacacacug

SEQ ID NO: 1327089 - RNA, 19 nt, Artificial Sequence
  Description of Artificial Sequence: Synthetic oligonucleotide
aaugcuucgaucaacuuca

SEQ ID NO: 1327090 - RNA, 19 nt, Artificial Sequence
  Description of Artificial Sequence: Synthetic oligonucleotide
uguuauuguacuauaguau

SEQ ID NO: 1327091 - RNA, 19 nt, Artificial Sequence
  Description of Artificial Sequence: Synthetic oligonucleotide
agaggcgacagaaagaggc

SEQ ID NO: 1327092 - RNA, 19 nt, Artificial Sequence
  Description of Artificial Sequence: Synthetic oligonucleotide
aauuaggccaauaauaaaa

SEQ ID NO: 1327093 - RNA, 19 nt, Artificial Sequence
  Description of Artificial Sequence: Synthetic oligonucleotide
uccacaucgacucucccgg

SEQ ID NO: 1327094 - RNA, 19 nt, Artificial Sequence
  Description of Artificial Sequence: Synthetic oligonucleotide
uuuuagggcugauacagag

SEQ ID NO: 1327095 - RNA, 19 nt, Artificial Sequence
  Description of Artificial Sequence: Synthetic oligonucleotide
uagucaauagcacggcugg

SEQ ID NO: 1327096 - RNA, 19 nt, Artificial Sequence
  Description of Artificial Sequence: Synthetic oligonucleotide
ucgucauaaguaaugaaga

SEQ ID NO: 1327097 - RNA, 19 nt, Artificial Sequence
  Description of Artificial Sequence: Synthetic oligonucleotide
aguuaugaauuccacaaca

SEQ ID NO: 1327098 - RNA, 19 nt, Artificial Sequence
  Description of Artificial Sequence: Synthetic oligonucleotide
caaaucagaacaaggacac

SEQ ID NO: 1327099 - RNA, 19 nt, Artificial Sequence
  Description of Artificial Sequence: Synthetic oligonucleotide
acaucuacauacuauuuug

SEQ ID NO: 1327100 - RNA, 19 nt, Artificial Sequence
  Description of Artificial Sequence: Synthetic oligonucleotide
acagcuaugaucaccaccg

SEQ ID NO: 1327101 - RNA, 19 nt, Artificial Sequence
  Description of Artificial Sequence: Synthetic oligonucleotide
gacuagaugaacucaggag

SEQ ID NO: 1327102 - RNA, 19 nt, Artificial Sequence
  Description of Artificial Sequence: Synthetic oligonucleotide
gacauaggcucccacauag

SEQ ID NO: 1327103 - RNA, 19 nt, Artificial Sequence
  Description of Artificial Sequence: Synthetic oligonucleotide
uacauuauaguccuccuau

SEQ ID NO: 1327104 - RNA, 19 nt, Artificial Sequence
  Description of Artificial Sequence: Synthetic oligonucleotide
agagaauaccagcugcccc

SEQ ID NO: 1327105 - RNA, 19 nt, Artificial Sequence
  Description of Artificial Sequence: Synthetic oligonucleotide
ugaacugccaagcugcugu

SEQ ID NO: 1327106 - RNA, 19 nt, Artificial Sequence
  Description of Artificial Sequence: Synthetic oligonucleotide
augaugaauggguucaauc

SEQ ID NO: 1327107 - RNA, 19 nt, Artificial Sequence
  Description of Artificial Sequence: Synthetic oligonucleotide
uccaaaucagaacaaggac

SEQ ID NO: 1327108 - RNA, 19 nt, Artificial Sequence
  Description of Artificial Sequence: Synthetic oligonucleotide
uauaaagccagcuuugauu

SEQ ID NO: 1327109 - RNA, 19 nt, Artificial Sequence
  Description of Artificial Sequence: Synthetic oligonucleotide
acaacagugcaacugucuc

SEQ ID NO: 1327110 - RNA, 19 nt, Artificial Sequence
  Description of Artificial Sequence: Synthetic oligonucleotide
uguuucuuugaaccaaucu

SEQ ID NO: 1327111 - RNA, 19 nt, Artificial Sequence
  Description of Artificial Sequence: Synthetic oligonucleotide
uacacguaucccaaaacca

SEQ ID NO: 1327112 - RNA, 19 nt, Artificial Sequence
  Description of Artificial Sequence: Synthetic oligonucleotide
uacaauugcuauguuauug

SEQ ID NO: 1327113 - RNA, 19 nt, Artificial Sequence
  Description of Artificial Sequence: Synthetic oligonucleotide
cagaaagaggcccacaccc

SEQ ID NO: 1327114 - RNA, 19 nt, Artificial Sequence
  Description of Artificial Sequence: Synthetic oligonucleotide
uaaaaucuauguuagccau

SEQ ID NO: 1327115 - RNA, 19 nt, Artificial Sequence
  Description of Artificial Sequence: Synthetic oligonucleotide
aagacacacugugugauuc

SEQ ID NO: 1327116 - RNA, 19 nt, Artificial Sequence
  Description of Artificial Sequence: Synthetic oligonucleotide
gaugaauggguucaaucac

SEQ ID NO: 1327117 - RNA, 19 nt, Artificial Sequence
  Description of Artificial Sequence: Synthetic oligonucleotide
aguagugcauacauuauag

SEQ ID NO: 1327118 - RNA, 19 nt, Artificial Sequence
  Description of Artificial Sequence: Synthetic oligonucleotide
gucgucauaaguaaugaag

SEQ ID NO: 1327119 - RNA, 19 nt, Artificial Sequence
  Description of Artificial Sequence: Synthetic oligonucleotide
ugauacagaguuuauugaa

SEQ ID NO: 1327120 - RNA, 19 nt, Artificial Sequence
  Description of Artificial Sequence: Synthetic oligonucleotide
uucuuuaaaaggacacuga

SEQ ID NO: 1327121 - RNA, 19 nt, Artificial Sequence
  Description of Artificial Sequence: Synthetic oligonucleotide
cuauguuauuguacuauag

SEQ ID NO: 1327122 - RNA, 19 nt, Artificial Sequence
  Description of Artificial Sequence: Synthetic oligonucleotide
aaaccacaacaacaacuuc

SEQ ID NO: 1327123 - RNA, 19 nt, Artificial Sequence
  Description of Artificial Sequence: Synthetic oligonucleotide
uuagggcugauacagaguu

SEQ ID NO: 1327124 - RNA, 19 nt, Artificial Sequence
  Description of Artificial Sequence: Synthetic oligonucleotide
aaaccacuaguuucaaaga

SEQ ID NO: 1327125 - RNA, 19 nt, Artificial Sequence
  Description of Artificial Sequence: Synthetic oligonucleotide
guacacguaucccaaaacc

SEQ ID NO: 1327126 - RNA, 19 nt, Artificial Sequence
  Description of Artificial Sequence: Synthetic oligonucleotide
ugcuuugacuagaugaacu

SEQ ID NO: 1327127 - RNA, 19 nt, Artificial Sequence
  Description of Artificial Sequence: Synthetic oligonucleotide
ucaauagcacggcuggcag

SEQ ID NO: 1327128 - RNA, 19 nt, Artificial Sequence
  Description of Artificial Sequence: Synthetic oligonucleotide
aacaacuucugugacaaaa

SEQ ID NO: 1327129 - RNA, 19 nt, Artificial Sequence
  Description of Artificial Sequence: Synthetic oligonucleotide
gaugaagacaaagguggcg

SEQ ID NO: 1327130 - RNA, 19 nt, Artificial Sequence
  Description of Artificial Sequence: Synthetic oligonucleotide
ucagcguagaggucggagg

SEQ ID NO: 1327131 - RNA, 19 nt, Artificial Sequence
  Description of Artificial Sequence: Synthetic oligonucleotide
ucuacauacuauuuugcua

SEQ ID NO: 1327132 - RNA, 19 nt, Artificial Sequence
  Description of Artificial Sequence: Synthetic oligonucleotide
cagagagucagcaacaaca

SEQ ID NO: 1327133 - RNA, 19 nt, Artificial Sequence
  Description of Artificial Sequence: Synthetic oligonucleotide
uccuauaaagccagcuuug

SEQ ID NO: 1327134 - RNA, 19 nt, Artificial Sequence
  Description of Artificial Sequence: Synthetic oligonucleotide
gcuucgaucaacuucauuc

SEQ ID NO: 1327135 - RNA, 19 nt, Artificial Sequence
  Description of Artificial Sequence: Synthetic oligonucleotide
gguacauuaucucuaauga

SEQ ID NO: 1327136 - RNA, 19 nt, Artificial Sequence
  Description of Artificial Sequence: Synthetic oligonucleotide
cuaaaaucuauguuagcca

SEQ ID NO: 1327137 - RNA, 19 nt, Artificial Sequence
  Description of Artificial Sequence: Synthetic oligonucleotide
uacuauaguauauauucuu

SEQ ID NO: 1327138 - RNA, 19 nt, Artificial Sequence
  Description of Artificial Sequence: Synthetic oligonucleotide
auuguacuauaguauauau

SEQ ID NO: 1327139 - RNA, 19 nt, Artificial Sequence
  Description of Artificial Sequence: Synthetic oligonucleotide
ucauagucgucauaaguaa

SEQ ID NO: 1327140 - RNA, 19 nt, Artificial Sequence
  Description of Artificial Sequence: Synthetic oligonucleotide
ucugaauaguuaugaauuc

SEQ ID NO: 1327141 - RNA, 19 nt, Artificial Sequence
  Description of Artificial Sequence: Synthetic oligonucleotide
auacuuucugaaugcuucg

SEQ ID NO: 1327142 - RNA, 19 nt, Artificial Sequence
  Description of Artificial Sequence: Synthetic oligonucleotide
uuauuguacuauaguauau

SEQ ID NO: 1327143 - RNA, 19 nt, Artificial Sequence
  Description of Artificial Sequence: Synthetic oligonucleotide
aaaucuauguuagccauuu

SEQ ID NO: 1327144 - RNA, 19 nt, Artificial Sequence
  Description of Artificial Sequence: Synthetic oligonucleotide
aaugaguuuaagacugaug

SEQ ID NO: 1327145 - RNA, 19 nt, Artificial Sequence
  Description of Artificial Sequence: Synthetic oligonucleotide
aucuacauacuauuuugcu

SEQ ID NO: 1327146 - RNA, 19 nt, Artificial Sequence
  Description of Artificial Sequence: Synthetic oligonucleotide
auuauaguccuccuauaaa

SEQ ID NO: 1327147 - RNA, 19 nt, Artificial Sequence
  Description of Artificial Sequence: Synthetic oligonucleotide
guuaugaauuccacaacag

SEQ ID NO: 1327148 - RNA, 19 nt, Artificial Sequence
  Description of Artificial Sequence: Synthetic oligonucleotide
cugaauaguuaugaauucc

SEQ ID NO: 1327149 - RNA, 19 nt, Artificial Sequence
  Description of Artificial Sequence: Synthetic oligonucleotide
gacagaaagaggcccacac

SEQ ID NO: 1327150 - RNA, 19 nt, Artificial Sequence
  Description of Artificial Sequence: Synthetic oligonucleotide
augagguugaggaagacca

SEQ ID NO: 1327151 - RNA, 19 nt, Artificial Sequence
  Description of Artificial Sequence: Synthetic oligonucleotide
auuaucucuaaugaguuua

SEQ ID NO: 1327152 - RNA, 19 nt, Artificial Sequence
  Description of Artificial Sequence: Synthetic oligonucleotide
ugucucuguacauagucaa

SEQ ID NO: 1327153 - RNA, 19 nt, Artificial Sequence
  Description of Artificial Sequence: Synthetic oligonucleotide
ugcugcccagauaacaugc

SEQ ID NO: 1327154 - RNA, 19 nt, Artificial Sequence
  Description of Artificial Sequence: Synthetic oligonucleotide
cuagaugaacucaggaguc

SEQ ID NO: 1327155 - RNA, 19 nt, Artificial Sequence
  Description of Artificial Sequence: Synthetic oligonucleotide
uguacacguaucccaaaac

SEQ ID NO: 1327156 - RNA, 19 nt, Artificial Sequence
  Description of Artificial Sequence: Synthetic oligonucleotide
uuuaguucuaccgcacuac

SEQ ID NO: 1327157 - RNA, 19 nt, Artificial Sequence
  Description of Artificial Sequence: Synthetic oligonucleotide
gguaagaaagccauaggag

SEQ ID NO: 1327158 - RNA, 19 nt, Artificial Sequence
  Description of Artificial Sequence: Synthetic oligonucleotide
gugaugaggagcucauagg

SEQ ID NO: 1327159 - RNA, 19 nt, Artificial Sequence
  Description of Artificial Sequence: Synthetic oligonucleotide
uuaguucuaccgcacuaca

SEQ ID NO: 1327160 - RNA, 19 nt, Artificial Sequence
  Description of Artificial Sequence: Synthetic oligonucleotide
ugugugauucuaaaaucua

SEQ ID NO: 1327161 - RNA, 19 nt, Artificial Sequence
  Description of Artificial Sequence: Synthetic oligonucleotide
aacuucauucuccaccuuu

SEQ ID NO: 1327162 - RNA, 19 nt, Artificial Sequence
  Description of Artificial Sequence: Synthetic oligonucleotide
uguacacguccucaaagaa

SEQ ID NO: 1327163 - RNA, 19 nt, Artificial Sequence
  Description of Artificial Sequence: Synthetic oligonucleotide
acauggguacauuaucucu

SEQ ID NO: 1327164 - RNA, 19 nt, Artificial Sequence
  Description of Artificial Sequence: Synthetic oligonucleotide
uuaaaacaguagugcauac

SEQ ID NO: 1327165 - RNA, 19 nt, Artificial Sequence
  Description of Artificial Sequence: Synthetic oligonucleotide
acauagucaauagcacggc

SEQ ID NO: 1327166 - RNA, 19 nt, Artificial Sequence
  Description of Artificial Sequence: Synthetic oligonucleotide
acacguaucccaaaaccac

SEQ ID NO: 1327167 - RNA, 19 nt, Artificial Sequence
  Description of Artificial Sequence: Synthetic oligonucleotide
ccagauaacaugcaucagg

SEQ ID NO: 1327168 - RNA, 19 nt, Artificial Sequence
  Description of Artificial Sequence: Synthetic oligonucleotide
uccgcugagaacugcuggg

SEQ ID NO: 1327169 - RNA, 19 nt, Artificial Sequence
  Description of Artificial Sequence: Synthetic oligonucleotide
acugaaaagggcccaguga

SEQ ID NO: 1327170 - RNA, 19 nt, Artificial Sequence
  Description of Artificial Sequence: Synthetic oligonucleotide
ucccauuacuccucagagg

SEQ ID NO: 1327171 - RNA, 19 nt, Artificial Sequence
  Description of Artificial Sequence: Synthetic oligonucleotide
uaguucuaccgcacuacag

SEQ ID NO: 1327172 - RNA, 19 nt, Artificial Sequence
  Description of Artificial Sequence: Synthetic oligonucleotide
ucccucagcguagaggucg

SEQ ID NO: 1327173 - RNA, 19 nt, Artificial Sequence
  Description of Artificial Sequence: Synthetic oligonucleotide
uaguuaugaauuccacaac

SEQ ID NO: 1327174 - RNA, 19 nt, Artificial Sequence
  Description of Artificial Sequence: Synthetic oligonucleotide
agaacugcugggcccgagc

SEQ ID NO: 1327175 - RNA, 19 nt, Artificial Sequence
  Description of Artificial Sequence: Synthetic oligonucleotide
guucuaccgcacuacagag

SEQ ID NO: 1327176 - RNA, 19 nt, Artificial Sequence
  Description of Artificial Sequence: Synthetic oligonucleotide
acuccgucugcacaacacg

SEQ ID NO: 1327177 - RNA, 19 nt, Artificial Sequence
  Description of Artificial Sequence: Synthetic oligonucleotide
ugcuagucuacauggguac

SEQ ID NO: 1327178 - RNA, 19 nt, Artificial Sequence
  Description of Artificial Sequence: Synthetic oligonucleotide
auagcagagaauaccagcu

SEQ ID NO: 1327179 - RNA, 19 nt, Artificial Sequence
  Description of Artificial Sequence: Synthetic oligonucleotide
uuguacaauugcuauguua

SEQ ID NO: 1327180 - RNA, 19 nt, Artificial Sequence
  Description of Artificial Sequence: Synthetic oligonucleotide
auagucgucauaaguaaug

SEQ ID NO: 1327181 - RNA, 19 nt, Artificial Sequence
  Description of Artificial Sequence: Synthetic oligonucleotide
ugauacaacauugucccau

SEQ ID NO: 1327182 - RNA, 19 nt, Artificial Sequence
  Description of Artificial Sequence: Synthetic oligonucleotide
gaaguggucauagucguca

SEQ ID NO: 1327183 - RNA, 19 nt, Artificial Sequence
  Description of Artificial Sequence: Synthetic oligonucleotide
uauauacuuucugaaugcu

SEQ ID NO: 1327184 - RNA, 19 nt, Artificial Sequence
  Description of Artificial Sequence: Synthetic oligonucleotide
cccauuacuccucagaggc

SEQ ID NO: 1327185 - RNA, 19 nt, Artificial Sequence
  Description of Artificial Sequence: Synthetic oligonucleotide
agcuaagaggaacacucug

SEQ ID NO: 1327186 - RNA, 19 nt, Artificial Sequence
  Description of Artificial Sequence: Synthetic oligonucleotide
aaagguggcgaguccacau

SEQ ID NO: 1327187 - RNA, 19 nt, Artificial Sequence
  Description of Artificial Sequence: Synthetic oligonucleotide
cugcacaacacgaugcaug

SEQ ID NO: 1327188 - RNA, 19 nt, Artificial Sequence
  Description of Artificial Sequence: Synthetic oligonucleotide
uuuagggcugauacagagu

SEQ ID NO: 1327189 - RNA, 19 nt, Artificial Sequence
  Description of Artificial Sequence: Synthetic oligonucleotide
uuguacuauaguauauauu

SEQ ID NO: 1327190 - RNA, 19 nt, Artificial Sequence
  Description of Artificial Sequence: Synthetic oligonucleotide
uuaucucuaaugaguuuaa

SEQ ID NO: 1327191 - RNA, 19 nt, Artificial Sequence
  Description of Artificial Sequence: Synthetic oligonucleotide
gaauaguuaugaauuccac

SEQ ID NO: 1327192 - RNA, 19 nt, Artificial Sequence
  Description of Artificial Sequence: Synthetic oligonucleotide
uccgcuacgcguagguucc

SEQ ID NO: 1327193 - RNA, 19 nt, Artificial Sequence
  Description of Artificial Sequence: Synthetic oligonucleotide
accacuaguuucaaagauc

SEQ ID NO: 1327194 - RNA, 19 nt, Artificial Sequence
  Description of Artificial Sequence: Synthetic oligonucleotide
guaugugugcuuugacuag

SEQ ID NO: 1327195 - RNA, 19 nt, Artificial Sequence
  Description of Artificial Sequence: Synthetic oligonucleotide
accaccgcagggaagagcg

SEQ ID NO: 1327196 - RNA, 19 nt, Artificial Sequence
  Description of Artificial Sequence: Synthetic oligonucleotide
gaagagcguguacacgucc

SEQ ID NO: 1327197 - RNA, 19 nt, Artificial Sequence
  Description of Artificial Sequence: Synthetic oligonucleotide
gacucucccggauuguagc

SEQ ID NO: 1327198 - RNA, 19 nt, Artificial Sequence
  Description of Artificial Sequence: Synthetic oligonucleotide
auagucaauagcacggcug

SEQ ID NO: 1327199 - RNA, 19 nt, Artificial Sequence
  Description of Artificial Sequence: Synthetic oligonucleotide
uaccgcacuacagagaguc

SEQ ID NO: 1327200 - RNA, 19 nt, Artificial Sequence
  Description of Artificial Sequence: Synthetic oligonucleotide
aucuguauuuucccagucu

SEQ ID NO: 1327201 - RNA, 19 nt, Artificial Sequence
  Description of Artificial Sequence: Synthetic oligonucleotide
agguggcgaguccacaucg

SEQ ID NO: 1327202 - RNA, 19 nt, Artificial Sequence
  Description of Artificial Sequence: Synthetic oligonucleotide
guccacaucgacucucccg

SEQ ID NO: 1327203 - RNA, 19 nt, Artificial Sequence
  Description of Artificial Sequence: Synthetic oligonucleotide
ugcuauguuauuguacuau

SEQ ID NO: 1327204 - RNA, 19 nt, Artificial Sequence
  Description of Artificial Sequence: Synthetic oligonucleotide
uguccaacaccaguguaug

SEQ ID NO: 1327205 - RNA, 19 nt, Artificial Sequence
  Description of Artificial Sequence: Synthetic oligonucleotide
uuuggcagucucucugcag

SEQ ID NO: 1327206 - RNA, 19 nt, Artificial Sequence
  Description of Artificial Sequence: Synthetic oligonucleotide
aaagggcccagugauacaa

SEQ ID NO: 1327207 - RNA, 19 nt, Artificial Sequence
  Description of Artificial Sequence: Synthetic oligonucleotide
uugcuagucuacaugggua

SEQ ID NO: 1327208 - RNA, 19 nt, Artificial Sequence
  Description of Artificial Sequence: Synthetic oligonucleotide
gagcggagcucaccgagcg

SEQ ID NO: 1327209 - RNA, 19 nt, Artificial Sequence
  Description of Artificial Sequence: Synthetic oligonucleotide
ucucuacuccgucugcaca

SEQ ID NO: 1327210 - RNA, 19 nt, Artificial Sequence
  Description of Artificial Sequence: Synthetic oligonucleotide
aaagccagcuuugauuaaa

SEQ ID NO: 1327211 - RNA, 19 nt, Artificial Sequence
  Description of Artificial Sequence: Synthetic oligonucleotide
ggguaagaaagccauagga

SEQ ID NO: 1327212 - RNA, 19 nt, Artificial Sequence
  Description of Artificial Sequence: Synthetic oligonucleotide
ggucuuauauacuuucuga

SEQ ID NO: 1327213 - RNA, 19 nt, Artificial Sequence
  Description of Artificial Sequence: Synthetic oligonucleotide
cuauaguauauauucuuua

SEQ ID NO: 1327214 - RNA, 19 nt, Artificial Sequence
  Description of Artificial Sequence: Synthetic oligonucleotide
uucuuugaaccaaucugua

SEQ ID NO: 1327215 - RNA, 19 nt, Artificial Sequence
  Description of Artificial Sequence: Synthetic oligonucleotide
acauacuauuuugcuaguc

SEQ ID NO: 1327216 - RNA, 19 nt, Artificial Sequence
  Description of Artificial Sequence: Synthetic oligonucleotide
uaggccugcucaauucacc

SEQ ID NO: 1327217 - RNA, 19 nt, Artificial Sequence
  Description of Artificial Sequence: Synthetic oligonucleotide
gagguggguacaugaacug

SEQ ID NO: 1327218 - RNA, 19 nt, Artificial Sequence
  Description of Artificial Sequence: Synthetic oligonucleotide
uuucccagucugaauaguu

SEQ ID NO: 1327219 - RNA, 19 nt, Artificial Sequence
  Description of Artificial Sequence: Synthetic oligonucleotide
cagcguagaggucggaggg

SEQ ID NO: 1327220 - RNA, 19 nt, Artificial Sequence
  Description of Artificial Sequence: Synthetic oligonucleotide
gcuaugaucaccaccgcag

SEQ ID NO: 1327221 - RNA, 19 nt, Artificial Sequence
  Description of Artificial Sequence: Synthetic oligonucleotide
uacuccgucugcacaacac

SEQ ID NO: 1327222 - RNA, 19 nt, Artificial Sequence
  Description of Artificial Sequence: Synthetic oligonucleotide
gcuaagaggaacacucugg

SEQ ID NO: 1327223 - RNA, 19 nt, Artificial Sequence
  Description of Artificial Sequence: Synthetic oligonucleotide
acaucccucagcguagagg

SEQ ID NO: 1327224 - RNA, 19 nt, Artificial Sequence
  Description of Artificial Sequence: Synthetic oligonucleotide
ucccagucugaauaguuau

SEQ ID NO: 1327225 - RNA, 19 nt, Artificial Sequence
  Description of Artificial Sequence: Synthetic oligonucleotide
cucacaucccucagcguag

SEQ ID NO: 1327226 - RNA, 19 nt, Artificial Sequence
  Description of Artificial Sequence: Synthetic oligonucleotide
aggagucaacugcuguagg

SEQ ID NO: 1327227 - RNA, 19 nt, Artificial Sequence
  Description of Artificial Sequence: Synthetic oligonucleotide
cauuauaguccuccuauaa

SEQ ID NO: 1327228 - RNA, 19 nt, Artificial Sequence
  Description of Artificial Sequence: Synthetic oligonucleotide
acgaugcaugcacacagca

SEQ ID NO: 1327229 - RNA, 19 nt, Artificial Sequence
  Description of Artificial Sequence: Synthetic oligonucleotide
aguccuccuauaaagccag

SEQ ID NO: 1327230 - RNA, 19 nt, Artificial Sequence
  Description of Artificial Sequence: Synthetic oligonucleotide
agcuaugaucaccaccgca

SEQ ID NO: 1327231 - RNA, 19 nt, Artificial Sequence
  Description of Artificial Sequence: Synthetic oligonucleotide
aacacgaugcaugcacaca

SEQ ID NO: 1327232 - RNA, 19 nt, Artificial Sequence
  Description of Artificial Sequence: Synthetic oligonucleotide
uucuaccgcacuacagaga

SEQ ID NO: 1327233 - RNA, 19 nt, Artificial Sequence
  Description of Artificial Sequence: Synthetic oligonucleotide
ugcgaaagccaaugcugcc

SEQ ID NO: 1327234 - RNA, 19 nt, Artificial Sequence
  Description of Artificial Sequence: Synthetic oligonucleotide
aaaucagcucaggcuugcg

SEQ ID NO: 1327235 - RNA, 19 nt, Artificial Sequence
  Description of Artificial Sequence: Synthetic oligonucleotide
aguccacaucgacucuccc

SEQ ID NO: 1327236 - RNA, 19 nt, Artificial Sequence
  Description of Artificial Sequence: Synthetic oligonucleotide
ugaucaccaccgcagggaa

SEQ ID NO: 1327237 - RNA, 19 nt, Artificial Sequence
  Description of Artificial Sequence: Synthetic oligonucleotide
agagcguguacacguccuc

SEQ ID NO: 1327238 - RNA, 19 nt, Artificial Sequence
  Description of Artificial Sequence: Synthetic oligonucleotide
uucccagucugaauaguua

SEQ ID NO: 1327239 - RNA, 19 nt, Artificial Sequence
  Description of Artificial Sequence: Synthetic oligonucleotide
ggguacaugaacugccaag

SEQ ID NO: 1327240 - RNA, 19 nt, Artificial Sequence
  Description of Artificial Sequence: Synthetic oligonucleotide
ggagucaacugcuguaggc

SEQ ID NO: 1327241 - RNA, 19 nt, Artificial Sequence
  Description of Artificial Sequence: Synthetic oligonucleotide
acauuaucucuaaugaguu

SEQ ID NO: 1327242 - RNA, 19 nt, Artificial Sequence
  Description of Artificial Sequence: Synthetic oligonucleotide
cuccgcugagaacugcugg

SEQ ID NO: 1327243 - RNA, 19 nt, Artificial Sequence
  Description of Artificial Sequence: Synthetic oligonucleotide
gcagcuaagaggaacacuc

SEQ ID NO: 1327244 - RNA, 19 nt, Artificial Sequence
  Description of Artificial Sequence: Synthetic oligonucleotide
guguacacguccucaaaga

SEQ ID NO: 1327245 - RNA, 19 nt, Artificial Sequence
  Description of Artificial Sequence: Synthetic oligonucleotide
uaaugaguuuaagacugau

SEQ ID NO: 1327246 - RNA, 19 nt, Artificial Sequence
  Description of Artificial Sequence: Synthetic oligonucleotide
uacgcguagguuccaccug

SEQ ID NO: 1327247 - RNA, 19 nt, Artificial Sequence
  Description of Artificial Sequence: Synthetic oligonucleotide
accagagccucacaucccu

SEQ ID NO: 1327248 - RNA, 19 nt, Artificial Sequence
  Description of Artificial Sequence: Synthetic oligonucleotide
gagcgaggcggcaauggcg

SEQ ID NO: 1327249 - RNA, 19 nt, Artificial Sequence
  Description of Artificial Sequence: Synthetic oligonucleotide
agaggaacacucugguuuu

SEQ ID NO: 1327250 - RNA, 19 nt, Artificial Sequence
  Description of Artificial Sequence: Synthetic oligonucleotide
cuacagagagucagcaaca

SEQ ID NO: 1327251 - RNA, 19 nt, Artificial Sequence
  Description of Artificial Sequence: Synthetic oligonucleotide
caacacgaugcaugcacac

SEQ ID NO: 1327252 - RNA, 19 nt, Artificial Sequence
  Description of Artificial Sequence: Synthetic oligonucleotide
guggucauagucgucauaa

SEQ ID NO: 1327253 - RNA, 19 nt, Artificial Sequence
  Description of Artificial Sequence: Synthetic oligonucleotide
gugcauacauuauaguccu

SEQ ID NO: 1327254 - RNA, 19 nt, Artificial Sequence
  Description of Artificial Sequence: Synthetic oligonucleotide
uggcgaguccacaucgacu

SEQ ID NO: 1327255 - RNA, 19 nt, Artificial Sequence
  Description of Artificial Sequence: Synthetic oligonucleotide
cagagaauaccagcugccc

SEQ ID NO: 1327256 - RNA, 19 nt, Artificial Sequence
  Description of Artificial Sequence: Synthetic oligonucleotide
caggagucaacugcuguag

SEQ ID NO: 1327257 - RNA, 19 nt, Artificial Sequence
  Description of Artificial Sequence: Synthetic oligonucleotide
gcaucaggaucucuuguag

SEQ ID NO: 1327258 - RNA, 19 nt, Artificial Sequence
  Description of Artificial Sequence: Synthetic oligonucleotide
agucgucauaaguaaugaa

SEQ ID NO: 1327259 - RNA, 19 nt, Artificial Sequence
  Description of Artificial Sequence: Synthetic oligonucleotide
cauggguacauuaucucua

SEQ ID NO: 1327260 - RNA, 19 nt, Artificial Sequence
  Description of Artificial Sequence: Synthetic oligonucleotide
aggccugcucaauucaccu

SEQ ID NO: 1327261 - RNA, 19 nt, Artificial Sequence
  Description of Artificial Sequence: Synthetic oligonucleotide
aaaaucuauguuagccauu

SEQ ID NO: 1327262 - RNA, 19 nt, Artificial Sequence
  Description of Artificial Sequence: Synthetic oligonucleotide
caauagcacggcuggcagc

SEQ ID NO: 1327263 - RNA, 19 nt, Artificial Sequence
  Description of Artificial Sequence: Synthetic oligonucleotide
caucgacucucccggauug

SEQ ID NO: 1327264 - RNA, 19 nt, Artificial Sequence
  Description of Artificial Sequence: Synthetic oligonucleotide
aagagcguguacacguccu

SEQ ID NO: 1327265 - RNA, 19 nt, Artificial Sequence
  Description of Artificial Sequence: Synthetic oligonucleotide
uagaggucggagggguugg

SEQ ID NO: 1327266 - RNA, 19 nt, Artificial Sequence
  Description of Artificial Sequence: Synthetic oligonucleotide
gguggguacaugaacugcc

SEQ ID NO: 1327267 - RNA, 19 nt, Artificial Sequence
  Description of Artificial Sequence: Synthetic oligonucleotide
cuuugacuagaugaacuca

SEQ ID NO: 1327268 - RNA, 19 nt, Artificial Sequence
  Description of Artificial Sequence: Synthetic oligonucleotide
gcugcgaaagccaaugcug

SEQ ID NO: 1327269 - RNA, 19 nt, Artificial Sequence
  Description of Artificial Sequence: Synthetic oligonucleotide
cacgaugcaugcacacagc

SEQ ID NO: 1327270 - RNA, 19 nt, Artificial Sequence
  Description of Artificial Sequence: Synthetic oligonucleotide
caauuaggccaauaauaaa

SEQ ID NO: 1327271 - RNA, 19 nt, Artificial Sequence
  Description of Artificial Sequence: Synthetic oligonucleotide
gaggcgacagaaagaggcc

SEQ ID NO: 1327272 - RNA, 19 nt, Artificial Sequence
  Description of Artificial Sequence: Synthetic oligonucleotide
acguccucaaagaaguggu

SEQ ID NO: 1327273 - RNA, 19 nt, Artificial Sequence
  Description of Artificial Sequence: Synthetic oligonucleotide
guccgcuacgcguagguuc

SEQ ID NO: 1327274 - RNA, 19 nt, Artificial Sequence
  Description of Artificial Sequence: Synthetic oligonucleotide
caucccucagcguagaggu

SEQ ID NO: 1327275 - RNA, 19 nt, Artificial Sequence
  Description of Artificial Sequence: Synthetic oligonucleotide
cacguaucccaaaaccaca

SEQ ID NO: 1327276 - RNA, 19 nt, Artificial Sequence
  Description of Artificial Sequence: Synthetic oligonucleotide
ucaggcuugcgcuguccgc

SEQ ID NO: 1327277 - RNA, 19 nt, Artificial Sequence
  Description of Artificial Sequence: Synthetic oligonucleotide
acggucuuggaggagguga

SEQ ID NO: 1327278 - RNA, 19 nt, Artificial Sequence
  Description of Artificial Sequence: Synthetic oligonucleotide
agacacacugugugauucu

SEQ ID NO: 1327279 - RNA, 19 nt, Artificial Sequence
  Description of Artificial Sequence: Synthetic oligonucleotide
uggguacaugaacugccaa

SEQ ID NO: 1327280 - RNA, 19 nt, Artificial Sequence
  Description of Artificial Sequence: Synthetic oligonucleotide
cagcugagaucacaucuac

SEQ ID NO: 1327281 - RNA, 19 nt, Artificial Sequence
  Description of Artificial Sequence: Synthetic oligonucleotide
ugcaacugucucuguacau

SEQ ID NO: 1327282 - RNA, 19 nt, Artificial Sequence
  Description of Artificial Sequence: Synthetic oligonucleotide
uccgucugcacaacacgau

SEQ ID NO: 1327283 - RNA, 19 nt, Artificial Sequence
  Description of Artificial Sequence: Synthetic oligonucleotide
cuaaugaguuuaagacuga

SEQ ID NO: 1327284 - RNA, 19 nt, Artificial Sequence
  Description of Artificial Sequence: Synthetic oligonucleotide
aaucuauguuagccauuuu

SEQ ID NO: 1327285 - RNA, 19 nt, Artificial Sequence
  Description of Artificial Sequence: Synthetic oligonucleotide
aggucggagggguuggcca

SEQ ID NO: 1327286 - RNA, 19 nt, Artificial Sequence
  Description of Artificial Sequence: Synthetic oligonucleotide
acgcguagguuccaccugu

SEQ ID NO: 1327287 - RNA, 19 nt, Artificial Sequence
  Description of Artificial Sequence: Synthetic oligonucleotide
cugaaaagggcccagugau

SEQ ID NO: 1327288 - RNA, 19 nt, Artificial Sequence
  Description of Artificial Sequence: Synthetic oligonucleotide
cuaagaggaacacucuggu

SEQ ID NO: 1327289 - RNA, 19 nt, Artificial Sequence
  Description of Artificial Sequence: Synthetic oligonucleotide
aaacaguagugcauacauu

SEQ ID NO: 1327290 - RNA, 19 nt, Artificial Sequence
  Description of Artificial Sequence: Synthetic oligonucleotide
ugaaugcuucgaucaacuu

SEQ ID NO: 1327291 - RNA, 19 nt, Artificial Sequence
  Description of Artificial Sequence: Synthetic oligonucleotide
uggcugcgaaagccaaugc

SEQ ID NO: 1327292 - RNA, 19 nt, Artificial Sequence
  Description of Artificial Sequence: Synthetic oligonucleotide
gccaauuaggccaauaaua

SEQ ID NO: 1327293 - RNA, 19 nt, Artificial Sequence
  Description of Artificial Sequence: Synthetic oligonucleotide
auuacuccucagaggcgac

SEQ ID NO: 1327294 - RNA, 19 nt, Artificial Sequence
  Description of Artificial Sequence: Synthetic oligonucleotide
cuuuaguucuaccgcacua

SEQ ID NO: 1327295 - RNA, 19 nt, Artificial Sequence
  Description of Artificial Sequence: Synthetic oligonucleotide
auuccacaacagugcaacu

SEQ ID NO: 1327296 - RNA, 19 nt, Artificial Sequence
  Description of Artificial Sequence: Synthetic oligonucleotide
uugcuauguuauuguacua

SEQ ID NO: 1327297 - RNA, 19 nt, Artificial Sequence
  Description of Artificial Sequence: Synthetic oligonucleotide
gccgcguucccgcagaccc

SEQ ID NO: 1327298 - RNA, 19 nt, Artificial Sequence
  Description of Artificial Sequence: Synthetic oligonucleotide
cugaaugcuucgaucaacu

SEQ ID NO: 1327299 - RNA, 19 nt, Artificial Sequence
  Description of Artificial Sequence: Synthetic oligonucleotide
gaguccacaucgacucucc

SEQ ID NO: 1327300 - RNA, 19 nt, Artificial Sequence
  Description of Artificial Sequence: Synthetic oligonucleotide
cagaggcgacagaaagagg

SEQ ID NO: 1327301 - RNA, 19 nt, Artificial Sequence
  Description of Artificial Sequence: Synthetic oligonucleotide
aacaugcaucaggaucucu

SEQ ID NO: 1327302 - RNA, 19 nt, Artificial Sequence
  Description of Artificial Sequence: Synthetic oligonucleotide
agcggagcggagcggagcu

SEQ ID NO: 1327303 - RNA, 19 nt, Artificial Sequence
  Description of Artificial Sequence: Synthetic oligonucleotide
agaaguggucauagucguc

SEQ ID NO: 1327304 - RNA, 19 nt, Artificial Sequence
  Description of Artificial Sequence: Synthetic oligonucleotide
gucucuacuccgucugcac

SEQ ID NO: 1327305 - RNA, 19 nt, Artificial Sequence
  Description of Artificial Sequence: Synthetic oligonucleotide
agcagcuaagaggaacacu

SEQ ID NO: 1327306 - RNA, 19 nt, Artificial Sequence
  Description of Artificial Sequence: Synthetic oligonucleotide
gcaugcacacagcaugccc

SEQ ID NO: 1327307 - RNA, 19 nt, Artificial Sequence
  Description of Artificial Sequence: Synthetic oligonucleotide
agcguguacacguccucaa

SEQ ID NO: 1327308 - RNA, 19 nt, Artificial Sequence
  Description of Artificial Sequence: Synthetic oligonucleotide
cuccgucugcacaacacga

SEQ ID NO: 1327309 - RNA, 19 nt, Artificial Sequence
  Description of Artificial Sequence: Synthetic oligonucleotide
aagccagcuuugauuaaaa

SEQ ID NO: 1327310 - RNA, 19 nt, Artificial Sequence
  Description of Artificial Sequence: Synthetic oligonucleotide
cucuacuccgucugcacaa

SEQ ID NO: 1327311 - RNA, 19 nt, Artificial Sequence
  Description of Artificial Sequence: Synthetic oligonucleotide
cgucauaaguaaugaagac

SEQ ID NO: 1327312 - RNA, 19 nt, Artificial Sequence
  Description of Artificial Sequence: Synthetic oligonucleotide
acaucgacucucccggauu

SEQ ID NO: 1327313 - RNA, 19 nt, Artificial Sequence
  Description of Artificial Sequence: Synthetic oligonucleotide
cuguacacguaucccaaaa

SEQ ID NO: 1327314 - RNA, 19 nt, Artificial Sequence
  Description of Artificial Sequence: Synthetic oligonucleotide
cuugcgcuguccgcuacgc

SEQ ID NO: 1327315 - RNA, 19 nt, Artificial Sequence
  Description of Artificial Sequence: Synthetic oligonucleotide
guacuauaguauauauucu

SEQ ID NO: 1327316 - RNA, 19 nt, Artificial Sequence
  Description of Artificial Sequence: Synthetic oligonucleotide
guggcgaguccacaucgac

SEQ ID NO: 1327317 - RNA, 19 nt, Artificial Sequence
  Description of Artificial Sequence: Synthetic oligonucleotide
ugaugaugaauggguucaa

SEQ ID NO: 1327318 - RNA, 19 nt, Artificial Sequence
  Description of Artificial Sequence: Synthetic oligonucleotide
ugcauacauuauaguccuc

SEQ ID NO: 1327319 - RNA, 19 nt, Artificial Sequence
  Description of Artificial Sequence: Synthetic oligonucleotide
cucccggauuguagcacag

SEQ ID NO: 1327320 - RNA, 19 nt, Artificial Sequence
  Description of Artificial Sequence: Synthetic oligonucleotide
gugcuuugacuagaugaac

SEQ ID NO: 1327321 - RNA, 19 nt, Artificial Sequence
  Description of Artificial Sequence: Synthetic oligonucleotide
cauaaguaaugaagacaua

SEQ ID NO: 1327322 - RNA, 19 nt, Artificial Sequence
  Description of Artificial Sequence: Synthetic oligonucleotide
acagcugagaucacaucua

SEQ ID NO: 1327323 - RNA, 19 nt, Artificial Sequence
  Description of Artificial Sequence: Synthetic oligonucleotide
cacaucuacauacuauuuu

SEQ ID NO: 1327324 - RNA, 19 nt, Artificial Sequence
  Description of Artificial Sequence: Synthetic oligonucleotide
cagucugaauaguuaugaa

SEQ ID NO: 1327325 - RNA, 19 nt, Artificial Sequence
  Description of Artificial Sequence: Synthetic oligonucleotide
augaacugccaagcugcug

SEQ ID NO: 1327326 - RNA, 19 nt, Artificial Sequence
  Description of Artificial Sequence: Synthetic oligonucleotide
gagcguguacacguccuca

SEQ ID NO: 1327327 - RNA, 19 nt, Artificial Sequence
  Description of Artificial Sequence: Synthetic oligonucleotide
cuuugcucuguacacguau

SEQ ID NO: 1327328 - RNA, 19 nt, Artificial Sequence
  Description of Artificial Sequence: Synthetic oligonucleotide
cugagaucacaucuacaua

SEQ ID NO: 1327329 - RNA, 19 nt, Artificial Sequence
  Description of Artificial Sequence: Synthetic oligonucleotide
gcgaaagccaaugcugccc

SEQ ID NO: 1327330 - RNA, 19 nt, Artificial Sequence
  Description of Artificial Sequence: Synthetic oligonucleotide
ucacaucccucagcguaga

SEQ ID NO: 1327331 - RNA, 19 nt, Artificial Sequence
  Description of Artificial Sequence: Synthetic oligonucleotide
gcccagugauacaacauug

SEQ ID NO: 1327332 - RNA, 19 nt, Artificial Sequence
  Description of Artificial Sequence: Synthetic oligonucleotide
ccggauuguagcacagcag

SEQ ID NO: 1327333 - RNA, 19 nt, Artificial Sequence
  Description of Artificial Sequence: Synthetic oligonucleotide
gagcucauaggcagggucu

SEQ ID NO: 1327334 - RNA, 19 nt, Artificial Sequence
  Description of Artificial Sequence: Synthetic oligonucleotide
cuacgcguagguuccaccu

SEQ ID NO: 1327335 - RNA, 19 nt, Artificial Sequence
  Description of Artificial Sequence: Synthetic oligonucleotide
cauagucaauagcacggcu

SEQ ID NO: 1327336 - RNA, 19 nt, Artificial Sequence
  Description of Artificial Sequence: Synthetic oligonucleotide
agcugagaucacaucuaca

SEQ ID NO: 1327337 - RNA, 19 nt, Artificial Sequence
  Description of Artificial Sequence: Synthetic oligonucleotide
cauagucgucauaaguaau

SEQ ID NO: 1327338 - RNA, 19 nt, Artificial Sequence
  Description of Artificial Sequence: Synthetic oligonucleotide
cucucccggauuguagcac

SEQ ID NO: 1327339 - RNA, 19 nt, Artificial Sequence
  Description of Artificial Sequence: Synthetic oligonucleotide
gcggagcucaccgagcgag

SEQ ID NO: 1327340 - RNA, 19 nt, Artificial Sequence
  Description of Artificial Sequence: Synthetic oligonucleotide
gacacacugugugauucua

SEQ ID NO: 1327341 - RNA, 19 nt, Artificial Sequence
  Description of Artificial Sequence: Synthetic oligonucleotide
gcuacgcguagguuccacc

SEQ ID NO: 1327342 - RNA, 19 nt, Artificial Sequence
  Description of Artificial Sequence: Synthetic oligonucleotide
caacagugcaacugucucu

SEQ ID NO: 1327343 - RNA, 19 nt, Artificial Sequence
  Description of Artificial Sequence: Synthetic oligonucleotide
guggguacaugaacugcca

SEQ ID NO: 1327344 - RNA, 19 nt, Artificial Sequence
  Description of Artificial Sequence: Synthetic oligonucleotide
cuauaaagccagcuuugau

SEQ ID NO: 1327345 - RNA, 19 nt, Artificial Sequence
  Description of Artificial Sequence: Synthetic oligonucleotide
caguguaugugugcuuuga

SEQ ID NO: 1327346 - RNA, 19 nt, Artificial Sequence
  Description of Artificial Sequence: Synthetic oligonucleotide
gcugccauugcagcuuuug

SEQ ID NO: 1327347 - RNA, 19 nt, Artificial Sequence
  Description of Artificial Sequence: Synthetic oligonucleotide
ucgacucucccggauugua

SEQ ID NO: 1327348 - RNA, 19 nt, Artificial Sequence
  Description of Artificial Sequence: Synthetic oligonucleotide
cacuacagagagucagcaa

SEQ ID NO: 1327349 - RNA, 19 nt, Artificial Sequence
  Description of Artificial Sequence: Synthetic oligonucleotide
gaugaugaauggguucaau

SEQ ID NO: 1327350 - RNA, 19 nt, Artificial Sequence
  Description of Artificial Sequence: Synthetic oligonucleotide
cacaucccucagcguagag

SEQ ID NO: 1327351 - RNA, 19 nt, Artificial Sequence
  Description of Artificial Sequence: Synthetic oligonucleotide
cagcagcuaagaggaacac

SEQ ID NO: 1327352 - RNA, 19 nt, Artificial Sequence
  Description of Artificial Sequence: Synthetic oligonucleotide
ucaccgagcgaggcggcaa

SEQ ID NO: 1327353 - RNA, 19 nt, Artificial Sequence
  Description of Artificial Sequence: Synthetic oligonucleotide
ccgcacuacagagagucag

SEQ ID NO: 1327354 - RNA, 19 nt, Artificial Sequence
  Description of Artificial Sequence: Synthetic oligonucleotide
cccauuguaggucuuauau

SEQ ID NO: 1327355 - RNA, 19 nt, Artificial Sequence
  Description of Artificial Sequence: Synthetic oligonucleotide
gcuugcgcuguccgcuacg

SEQ ID NO: 1327356 - RNA, 19 nt, Artificial Sequence
  Description of Artificial Sequence: Synthetic oligonucleotide
ccgucugcacaacacgaug

SEQ ID NO: 1327357 - RNA, 19 nt, Artificial Sequence
  Description of Artificial Sequence: Synthetic oligonucleotide
acacacugugugauucuaa

SEQ ID NO: 1327358 - RNA, 19 nt, Artificial Sequence
  Description of Artificial Sequence: Synthetic oligonucleotide
caggguuggucccauugua

SEQ ID NO: 1327359 - RNA, 19 nt, Artificial Sequence
  Description of Artificial Sequence: Synthetic oligonucleotide
cccggauuguagcacagca

SEQ ID NO: 1327360 - RNA, 19 nt, Artificial Sequence
  Description of Artificial Sequence: Synthetic oligonucleotide
gaugccgcacuggcccaug

SEQ ID NO: 1327361 - RNA, 19 nt, Artificial Sequence
  Description of Artificial Sequence: Synthetic oligonucleotide
augugugcuuugacuagau

SEQ ID NO: 1327362 - RNA, 19 nt, Artificial Sequence
  Description of Artificial Sequence: Synthetic oligonucleotide
gguuggucccauuguaggu

SEQ ID NO: 1327363 - RNA, 19 nt, Artificial Sequence
  Description of Artificial Sequence: Synthetic oligonucleotide
cuacuccgucugcacaaca

SEQ ID NO: 1327364 - RNA, 19 nt, Artificial Sequence
  Description of Artificial Sequence: Synthetic oligonucleotide
cagugcaacugucucugua

SEQ ID NO: 1327365 - RNA, 19 nt, Artificial Sequence
  Description of Artificial Sequence: Synthetic oligonucleotide
ccucacaucccucagcgua

SEQ ID NO: 1327366 - RNA, 19 nt, Artificial Sequence
  Description of Artificial Sequence: Synthetic oligonucleotide
agcggagcucaccgagcga

SEQ ID NO: 1327367 - RNA, 19 nt, Artificial Sequence
  Description of Artificial Sequence: Synthetic oligonucleotide
ggcugcgaaagccaaugcu

SEQ ID NO: 1327368 - RNA, 19 nt, Artificial Sequence
  Description of Artificial Sequence: Synthetic oligonucleotide
ugggcccgagccgcguucc

SEQ ID NO: 1327369 - RNA, 19 nt, Artificial Sequence
  Description of Artificial Sequence: Synthetic oligonucleotide
aucgacucucccggauugu

SEQ ID NO: 1327370 - RNA, 19 nt, Artificial Sequence
  Description of Artificial Sequence: Synthetic oligonucleotide
aucccucagcguagagguc

SEQ ID NO: 1327371 - RNA, 19 nt, Artificial Sequence
  Description of Artificial Sequence: Synthetic oligonucleotide
ccuauaaagccagcuuuga

SEQ ID NO: 1327372 - RNA, 19 nt, Artificial Sequence
  Description of Artificial Sequence: Synthetic oligonucleotide
cuagucuacauggguacau

SEQ ID NO: 1327373 - RNA, 19 nt, Artificial Sequence
  Description of Artificial Sequence: Synthetic oligonucleotide
cagcuaagaggaacacucu

SEQ ID NO: 1327374 - RNA, 19 nt, Artificial Sequence
  Description of Artificial Sequence: Synthetic oligonucleotide
uguccgcuacgcguagguu

SEQ ID NO: 1327375 - RNA, 19 nt, Artificial Sequence
  Description of Artificial Sequence: Synthetic oligonucleotide
cccucagcguagaggucgg

SEQ ID NO: 1327376 - RNA, 19 nt, Artificial Sequence
  Description of Artificial Sequence: Synthetic oligonucleotide
cgacucucccggauuguag

SEQ ID NO: 1327377 - RNA, 19 nt, Artificial Sequence
  Description of Artificial Sequence: Synthetic oligonucleotide
gcuagucuacauggguaca

SEQ ID NO: 1327378 - RNA, 19 nt, Artificial Sequence
  Description of Artificial Sequence: Synthetic oligonucleotide
gcuguccaacaccagugua

SEQ ID NO: 1327379 - RNA, 19 nt, Artificial Sequence
  Description of Artificial Sequence: Synthetic oligonucleotide
cugggcccgagccgcguuc

SEQ ID NO: 1327380 - RNA, 19 nt, Artificial Sequence
  Description of Artificial Sequence: Synthetic oligonucleotide
ccgagcgaggcggcaaugg

SEQ ID NO: 1327381 - RNA, 19 nt, Artificial Sequence
  Description of Artificial Sequence: Synthetic oligonucleotide
ggcccagugauacaacauu

SEQ ID NO: 1327382 - RNA, 19 nt, Artificial Sequence
  Description of Artificial Sequence: Synthetic oligonucleotide
cccagauaacaugcaucag

SEQ ID NO: 1327383 - RNA, 19 nt, Artificial Sequence
  Description of Artificial Sequence: Synthetic oligonucleotide
ggcccacacccuccuuuag

SEQ ID NO: 1327384 - RNA, 19 nt, Artificial Sequence
  Description of Artificial Sequence: Synthetic oligonucleotide
gagccgcguucccgcagac

SEQ ID NO: 1327385 - RNA, 19 nt, Artificial Sequence
  Description of Artificial Sequence: Synthetic oligonucleotide
accgcacuacagagaguca

SEQ ID NO: 1327386 - RNA, 19 nt, Artificial Sequence
  Description of Artificial Sequence: Synthetic oligonucleotide
aggcuugcgcuguccgcua

SEQ ID NO: 1327387 - RNA, 19 nt, Artificial Sequence
  Description of Artificial Sequence: Synthetic oligonucleotide
cuguccgcuacgcguaggu

SEQ ID NO: 1327388 - RNA, 19 nt, Artificial Sequence
  Description of Artificial Sequence: Synthetic oligonucleotide
gcgacagaaagaggcccac

SEQ ID NO: 1327389 - RNA, 19 nt, Artificial Sequence
  Description of Artificial Sequence: Synthetic oligonucleotide
gcuguccgcuacgcguagg

SEQ ID NO: 1327390 - RNA, 19 nt, Artificial Sequence
  Description of Artificial Sequence: Synthetic oligonucleotide
cacaucgacucucccggau

SEQ ID NO: 1327391 - RNA, 19 nt, Artificial Sequence
  Description of Artificial Sequence: Synthetic oligonucleotide
guuagccauuuuguacaau

SEQ ID NO: 1327392 - RNA, 19 nt, Artificial Sequence
  Description of Artificial Sequence: Synthetic oligonucleotide
gguggcgaguccacaucga

SEQ ID NO: 1327393 - RNA, 19 nt, Artificial Sequence
  Description of Artificial Sequence: Synthetic oligonucleotide
ggcuugcgcuguccgcuac

SEQ ID NO: 1327394 - RNA, 19 nt, Artificial Sequence
  Description of Artificial Sequence: Synthetic oligonucleotide
cucaccgagcgaggcggca

SEQ ID NO: 1327395 - RNA, 19 nt, Artificial Sequence
  Description of Artificial Sequence: Synthetic oligonucleotide
ggucccauuguaggucuua

SEQ ID NO: 1327396 - RNA, 19 nt, Artificial Sequence
  Description of Artificial Sequence: Synthetic oligonucleotide
ccuuuaguucuaccgcacu

SEQ ID NO: 1327397 - RNA, 19 nt, Artificial Sequence
  Description of Artificial Sequence: Synthetic oligonucleotide
augcuucgaucaacuucau

SEQ ID NO: 1327398 - RNA, 19 nt, Artificial Sequence
  Description of Artificial Sequence: Synthetic oligonucleotide
cuaccgcacuacagagagu

SEQ ID NO: 1327399 - RNA, 19 nt, Artificial Sequence
  Description of Artificial Sequence: Synthetic oligonucleotide
ccgcguucccgcagacccc

SEQ ID NO: 1327400 - RNA, 19 nt, Artificial Sequence
  Description of Artificial Sequence: Synthetic oligonucleotide
gcgaggcggcaauggcggc

SEQ ID NO: 1327401 - RNA, 19 nt, Artificial Sequence
  Description of Artificial Sequence: Synthetic oligonucleotide
gcggagcggagcucaccga

SEQ ID NO: 1327402 - RNA, 19 nt, Artificial Sequence
  Description of Artificial Sequence: Synthetic oligonucleotide
ggcuccgcugagaacugcu

SEQ ID NO: 1327403 - RNA, 19 nt, Artificial Sequence
  Description of Artificial Sequence: Synthetic oligonucleotide
gcggcuccgcugagaacug

SEQ ID NO: 1327404 - RNA, 19 nt, Artificial Sequence
  Description of Artificial Sequence: Synthetic oligonucleotide
gaggcccggcugggcgagc

SEQ ID NO: 1327405 - RNA, 19 nt, Artificial Sequence
  Description of Artificial Sequence: Synthetic oligonucleotide
cgagcggagcggagcggag

SEQ ID NO: 1327406 - RNA, 19 nt, Artificial Sequence
  Description of Artificial Sequence: Synthetic oligonucleotide
cagcucaggcuugcgcugu

SEQ ID NO: 1327407 - RNA, 19 nt, Artificial Sequence
  Description of Artificial Sequence: Synthetic oligonucleotide
ccacaucgacucucccgga

SEQ ID NO: 1327408 - RNA, 19 nt, Artificial Sequence
  Description of Artificial Sequence: Synthetic oligonucleotide
gggcccgagccgcguuccc

SEQ ID NO: 1327409 - RNA, 19 nt, Artificial Sequence
  Description of Artificial Sequence: Synthetic oligonucleotide
ggccugcucaauucaccuu

SEQ ID NO: 1327410 - RNA, 19 nt, Artificial Sequence
  Description of Artificial Sequence: Synthetic oligonucleotide
caccgagcgaggcggcaau

SEQ ID NO: 1327411 - RNA, 19 nt, Artificial Sequence
  Description of Artificial Sequence: Synthetic oligonucleotide
gcgaguccacaucgacucu

SEQ ID NO: 1327412 - RNA, 19 nt, Artificial Sequence
  Description of Artificial Sequence: Synthetic oligonucleotide
cgcuguccgcuacgcguag

SEQ ID NO: 1327413 - RNA, 19 nt, Artificial Sequence
  Description of Artificial Sequence: Synthetic oligonucleotide
cgaugcaugcacacagcau

SEQ ID NO: 1327414 - RNA, 19 nt, Artificial Sequence
  Description of Artificial Sequence: Synthetic oligonucleotide
gcgcuguccgcuacgcgua

SEQ ID NO: 1327415 - RNA, 19 nt, Artificial Sequence
  Description of Artificial Sequence: Synthetic oligonucleotide
cggagcggagcggagcuca

SEQ ID NO: 1327416 - RNA, 19 nt, Artificial Sequence
  Description of Artificial Sequence: Synthetic oligonucleotide
cgagccgcguucccgcaga

SEQ ID NO: 1327417 - RNA, 19 nt, Artificial Sequence
  Description of Artificial Sequence: Synthetic oligonucleotide
cgcuacgcguagguuccac

SEQ ID NO: 1327418 - RNA, 19 nt, Artificial Sequence
  Description of Artificial Sequence: Synthetic oligonucleotide
gggcugauacagaguuuau

SEQ ID NO: 1327419 - RNA, 19 nt, Artificial Sequence
  Description of Artificial Sequence: Synthetic oligonucleotide
gcggagcggagcggagcuc

SEQ ID NO: 1327420 - RNA, 19 nt, Artificial Sequence
  Description of Artificial Sequence: Synthetic oligonucleotide
cccgagccgcguucccgca

SEQ ID NO: 1327421 - RNA, 19 nt, Artificial Sequence
  Description of Artificial Sequence: Synthetic oligonucleotide
ccucagcguagaggucgga

SEQ ID NO: 1327422 - RNA, 19 nt, Artificial Sequence
  Description of Artificial Sequence: Synthetic oligonucleotide
ccaccgcagggaagagcgu

SEQ ID NO: 1327423 - RNA, 19 nt, Artificial Sequence
  Description of Artificial Sequence: Synthetic oligonucleotide
ccgcuacgcguagguucca

SEQ ID NO: 1327424 - RNA, 19 nt, Artificial Sequence
  Description of Artificial Sequence: Synthetic oligonucleotide
caauccaugacaaucaccg

SEQ ID NO: 1327425 - RNA, 19 nt, Artificial Sequence
  Description of Artificial Sequence: Synthetic oligonucleotide
aaucagaccugcuucauag

SEQ ID NO: 1327426 - RNA, 19 nt, Artificial Sequence
  Description of Artificial Sequence: Synthetic oligonucleotide
aauuaucaggccaagguac

SEQ ID NO: 1327427 - RNA, 19 nt, Artificial Sequence
  Description of Artificial Sequence: Synthetic oligonucleotide
aagcgauccaccgagaagc

SEQ ID NO: 1327428 - RNA, 19 nt, Artificial Sequence
  Description of Artificial Sequence: Synthetic oligonucleotide
uugcugaucucccagaggg

SEQ ID NO: 1327429 - RNA, 19 nt, Artificial Sequence
  Description of Artificial Sequence: Synthetic oligonucleotide
aaaccagaugccuugaucu

SEQ ID NO: 1327430 - RNA, 19 nt, Artificial Sequence
  Description of Artificial Sequence: Synthetic oligonucleotide
gaagugucggaucagaccc

SEQ ID NO: 1327431 - RNA, 19 nt, Artificial Sequence
  Description of Artificial Sequence: Synthetic oligonucleotide
uccauuugaggccaguggg

SEQ ID NO: 1327432 - RNA, 19 nt, Artificial Sequence
  Description of Artificial Sequence: Synthetic oligonucleotide
gauggugggagacacagcc

SEQ ID NO: 1327433 - RNA, 19 nt, Artificial Sequence
  Description of Artificial Sequence: Synthetic oligonucleotide
gauagcuaccugcagauug

SEQ ID NO: 1327434 - RNA, 19 nt, Artificial Sequence
  Description of Artificial Sequence: Synthetic oligonucleotide
agagauguugaacaguuug

SEQ ID NO: 1327435 - RNA, 19 nt, Artificial Sequence
  Description of Artificial Sequence: Synthetic oligonucleotide
gaagauccggucuucaucc

SEQ ID NO: 1327436 - RNA, 19 nt, Artificial Sequence
  Description of Artificial Sequence: Synthetic oligonucleotide
cuuaugagggucauggcgc

SEQ ID NO: 1327437 - RNA, 19 nt, Artificial Sequence
  Description of Artificial Sequence: Synthetic oligonucleotide
accaccagauacuugggcc

SEQ ID NO: 1327438 - RNA, 19 nt, Artificial Sequence
  Description of Artificial Sequence: Synthetic oligonucleotide
cugaaacgcacaaauaccc

SEQ ID NO: 1327439 - RNA, 19 nt, Artificial Sequence
  Description of Artificial Sequence: Synthetic oligonucleotide
ucagcgaaccaaaugaggu

SEQ ID NO: 1327440 - RNA, 19 nt, Artificial Sequence
  Description of Artificial Sequence: Synthetic oligonucleotide
aaagcgagccaucacuuug

SEQ ID NO: 1327441 - RNA, 19 nt, Artificial Sequence
  Description of Artificial Sequence: Synthetic oligonucleotide
acacgucaaaaucauaguc

SEQ ID NO: 1327442 - RNA, 19 nt, Artificial Sequence
  Description of Artificial Sequence: Synthetic oligonucleotide
ugaaacgcacaaauacccg

SEQ ID NO: 1327443 - RNA, 19 nt, Artificial Sequence
  Description of Artificial Sequence: Synthetic oligonucleotide
aaauuaucaggccaaggua

SEQ ID NO: 1327444 - RNA, 19 nt, Artificial Sequence
  Description of Artificial Sequence: Synthetic oligonucleotide
aauccaugacaaucaccgc

SEQ ID NO: 1327445 - RNA, 19 nt, Artificial Sequence
  Description of Artificial Sequence: Synthetic oligonucleotide
agcaguaucuccuuugucu

SEQ ID NO: 1327446 - RNA, 19 nt, Artificial Sequence
  Description of Artificial Sequence: Synthetic oligonucleotide
uucagcgaaccaaaugagg

SEQ ID NO: 1327447 - RNA, 19 nt, Artificial Sequence
  Description of Artificial Sequence: Synthetic oligonucleotide
uguugaacaguuugguacc

SEQ ID NO: 1327448 - RNA, 19 nt, Artificial Sequence
  Description of Artificial Sequence: Synthetic oligonucleotide
agaugccuugaucucaccc

SEQ ID NO: 1327449 - RNA, 19 nt, Artificial Sequence
  Description of Artificial Sequence: Synthetic oligonucleotide
acgucaaaaucauagucag

SEQ ID NO: 1327450 - RNA, 19 nt, Artificial Sequence
  Description of Artificial Sequence: Synthetic oligonucleotide
uuuucuuaggugcugucgu

SEQ ID NO: 1327451 - RNA, 19 nt, Artificial Sequence
  Description of Artificial Sequence: Synthetic oligonucleotide
accagcgcgacagaaaugc

SEQ ID NO: 1327452 - RNA, 19 nt, Artificial Sequence
  Description of Artificial Sequence: Synthetic oligonucleotide
gaaacgcacaaauacccgc

SEQ ID NO: 1327453 - RNA, 19 nt, Artificial Sequence
  Description of Artificial Sequence: Synthetic oligonucleotide
aguuguggggcauccaaac

SEQ ID NO: 1327454 - RNA, 19 nt, Artificial Sequence
  Description of Artificial Sequence: Synthetic oligonucleotide
agugcaucaaaguccauca

SEQ ID NO: 1327455 - RNA, 19 nt, Artificial Sequence
  Description of Artificial Sequence: Synthetic oligonucleotide
uccaugacaaucaccgcag

SEQ ID NO: 1327456 - RNA, 19 nt, Artificial Sequence
  Description of Artificial Sequence: Synthetic oligonucleotide
aacucaaugagacgagcga

SEQ ID NO: 1327457 - RNA, 19 nt, Artificial Sequence
  Description of Artificial Sequence: Synthetic oligonucleotide
uguuuauuguccagcuucc

SEQ ID NO: 1327458 - RNA, 19 nt, Artificial Sequence
  Description of Artificial Sequence: Synthetic oligonucleotide
ugucgagcaauccaugaca

SEQ ID NO: 1327459 - RNA, 19 nt, Artificial Sequence
  Description of Artificial Sequence: Synthetic oligonucleotide
agucauggcggccauacag

SEQ ID NO: 1327460 - RNA, 19 nt, Artificial Sequence
  Description of Artificial Sequence: Synthetic oligonucleotide
ugaaugcugggccuggugc

SEQ ID NO: 1327461 - RNA, 19 nt, Artificial Sequence
  Description of Artificial Sequence: Synthetic oligonucleotide
cugaguuucguucucggcc

SEQ ID NO: 1327462 - RNA, 19 nt, Artificial Sequence
  Description of Artificial Sequence: Synthetic oligonucleotide
aacaguuugguaccugagu

SEQ ID NO: 1327463 - RNA, 19 nt, Artificial Sequence
  Description of Artificial Sequence: Synthetic oligonucleotide
ucaaugagacgagcgaugg

SEQ ID NO: 1327464 - RNA, 19 nt, Artificial Sequence
  Description of Artificial Sequence: Synthetic oligonucleotide
aacacgucaaaaucauagu

SEQ ID NO: 1327465 - RNA, 19 nt, Artificial Sequence
  Description of Artificial Sequence: Synthetic oligonucleotide
uccaaacacucccacaucu

SEQ ID NO: 1327466 - RNA, 19 nt, Artificial Sequence
  Description of Artificial Sequence: Synthetic oligonucleotide
aaucaccgcagcugugccc

SEQ ID NO: 1327467 - RNA, 19 nt, Artificial Sequence
  Description of Artificial Sequence: Synthetic oligonucleotide
ugggccugccaucugaggg

SEQ ID NO: 1327468 - RNA, 19 nt, Artificial Sequence
  Description of Artificial Sequence: Synthetic oligonucleotide
aggaaucacagcaaggagg

SEQ ID NO: 1327469 - RNA, 19 nt, Artificial Sequence
  Description of Artificial Sequence: Synthetic oligonucleotide
uguucauccagucgacgcc

SEQ ID NO: 1327470 - RNA, 19 nt, Artificial Sequence
  Description of Artificial Sequence: Synthetic oligonucleotide
uuguucauccagucgacgc

SEQ ID NO: 1327471 - RNA, 19 nt, Artificial Sequence
  Description of Artificial Sequence: Synthetic oligonucleotide
aucaaaguccaucaacacu

SEQ ID NO: 1327472 - RNA, 19 nt, Artificial Sequence
  Description of Artificial Sequence: Synthetic oligonucleotide
uuauucaugaagcuccauu

SEQ ID NO: 1327473 - RNA, 19 nt, Artificial Sequence
  Description of Artificial Sequence: Synthetic oligonucleotide
gaacucaaugagacgagcg

SEQ ID NO: 1327474 - RNA, 19 nt, Artificial Sequence
  Description of Artificial Sequence: Synthetic oligonucleotide
ugaacaguuugguaccuga

SEQ ID NO: 1327475 - RNA, 19 nt, Artificial Sequence
  Description of Artificial Sequence: Synthetic oligonucleotide
caccagugcaucaaagucc

SEQ ID NO: 1327476 - RNA, 19 nt, Artificial Sequence
  Description of Artificial Sequence: Synthetic oligonucleotide
aaguccaucaacacugucu

SEQ ID NO: 1327477 - RNA, 19 nt, Artificial Sequence
  Description of Artificial Sequence: Synthetic oligonucleotide
agggucauggcgcaugauc

SEQ ID NO: 1327478 - RNA, 19 nt, Artificial Sequence
  Description of Artificial Sequence: Synthetic oligonucleotide
ucaaaacucagagccgccg

SEQ ID NO: 1327479 - RNA, 19 nt, Artificial Sequence
  Description of Artificial Sequence: Synthetic oligonucleotide
aaauacccgcacgggaagc

SEQ ID NO: 1327480 - RNA, 19 nt, Artificial Sequence
  Description of Artificial Sequence: Synthetic oligonucleotide
cuucaaaacucagagccgc

SEQ ID NO: 1327481 - RNA, 19 nt, Artificial Sequence
  Description of Artificial Sequence: Synthetic oligonucleotide
ugaguuucguucucggcca

SEQ ID NO: 1327482 - RNA, 19 nt, Artificial Sequence
  Description of Artificial Sequence: Synthetic oligonucleotide
gcuuaugagggucauggcg

SEQ ID NO: 1327483 - RNA, 19 nt, Artificial Sequence
  Description of Artificial Sequence: Synthetic oligonucleotide
uaaaccagaugccuugauc

SEQ ID NO: 1327484 - RNA, 19 nt, Artificial Sequence
  Description of Artificial Sequence: Synthetic oligonucleotide
ugucuuguaccagucaccc

SEQ ID NO: 1327485 - RNA, 19 nt, Artificial Sequence
  Description of Artificial Sequence: Synthetic oligonucleotide
ucaagcacuggccggaagu

SEQ ID NO: 1327486 - RNA, 19 nt, Artificial Sequence
  Description of Artificial Sequence: Synthetic oligonucleotide
ucggauagcuaccugcaga

SEQ ID NO: 1327487 - RNA, 19 nt, Artificial Sequence
  Description of Artificial Sequence: Synthetic oligonucleotide
gguccuuacaaguuccugg

SEQ ID NO: 1327488 - RNA, 19 nt, Artificial Sequence
  Description of Artificial Sequence: Synthetic oligonucleotide
uagaacucaaugagacgag

SEQ ID NO: 1327489 - RNA, 19 nt, Artificial Sequence
  Description of Artificial Sequence: Synthetic oligonucleotide
guugcauucgcuccucaag

SEQ ID NO: 1327490 - RNA, 19 nt, Artificial Sequence
  Description of Artificial Sequence: Synthetic oligonucleotide
agaacucaaugagacgagc

SEQ ID NO: 1327491 - RNA, 19 nt, Artificial Sequence
  Description of Artificial Sequence: Synthetic oligonucleotide
auucaugaagcuccauuug

SEQ ID NO: 1327492 - RNA, 19 nt, Artificial Sequence
  Description of Artificial Sequence: Synthetic oligonucleotide
uuucacaaugucugucgag

SEQ ID NO: 1327493 - RNA, 19 nt, Artificial Sequence
  Description of Artificial Sequence: Synthetic oligonucleotide
gaucagacccuguacuggc

SEQ ID NO: 1327494 - RNA, 19 nt, Artificial Sequence
  Description of Artificial Sequence: Synthetic oligonucleotide
caagguacaggcucagaag

SEQ ID NO: 1327495 - RNA, 19 nt, Artificial Sequence
  Description of Artificial Sequence: Synthetic oligonucleotide
ugccgugccgcuagcaucg

SEQ ID NO: 1327496 - RNA, 19 nt, Artificial Sequence
  Description of Artificial Sequence: Synthetic oligonucleotide
cacaaacacgucaaaauca

SEQ ID NO: 1327497 - RNA, 19 nt, Artificial Sequence
  Description of Artificial Sequence: Synthetic oligonucleotide
agcaauccaugacaaucac

SEQ ID NO: 1327498 - RNA, 19 nt, Artificial Sequence
  Description of Artificial Sequence: Synthetic oligonucleotide
cacgucaaaaucauaguca

SEQ ID NO: 1327499 - RNA, 19 nt, Artificial Sequence
  Description of Artificial Sequence: Synthetic oligonucleotide
gaugccuugaucucaccca

SEQ ID NO: 1327500 - RNA, 19 nt, Artificial Sequence
  Description of Artificial Sequence: Synthetic oligonucleotide
uugucuuguaccagucacc

SEQ ID NO: 1327501 - RNA, 19 nt, Artificial Sequence
  Description of Artificial Sequence: Synthetic oligonucleotide
cucucggauagcuaccugc

SEQ ID NO: 1327502 - RNA, 19 nt, Artificial Sequence
  Description of Artificial Sequence: Synthetic oligonucleotide
ccaagauccagucaggccc

SEQ ID NO: 1327503 - RNA, 19 nt, Artificial Sequence
  Description of Artificial Sequence: Synthetic oligonucleotide
aauacccgcacgggaagcg

SEQ ID NO: 1327504 - RNA, 19 nt, Artificial Sequence
  Description of Artificial Sequence: Synthetic oligonucleotide
gaagcgauccaccgagaag

SEQ ID NO: 1327505 - RNA, 19 nt, Artificial Sequence
  Description of Artificial Sequence: Synthetic oligonucleotide
ggccccguaaaccagaugc

SEQ ID NO: 1327506 - RNA, 19 nt, Artificial Sequence
  Description of Artificial Sequence: Synthetic oligonucleotide
ucugcgaacuguugcauuc

SEQ ID NO: 1327507 - RNA, 19 nt, Artificial Sequence
  Description of Artificial Sequence: Synthetic oligonucleotide
gcuuucacaaugucugucg

SEQ ID NO: 1327508 - RNA, 19 nt, Artificial Sequence
  Description of Artificial Sequence: Synthetic oligonucleotide
ucucggauagcuaccugca

SEQ ID NO: 1327509 - RNA, 19 nt, Artificial Sequence
  Description of Artificial Sequence: Synthetic oligonucleotide
ucugucgagcaauccauga

SEQ ID NO: 1327510 - RNA, 19 nt, Artificial Sequence
  Description of Artificial Sequence: Synthetic oligonucleotide
gaauucuccucggauguag

SEQ ID NO: 1327511 - RNA, 19 nt, Artificial Sequence
  Description of Artificial Sequence: Synthetic oligonucleotide
uuuguucauccagucgacg

SEQ ID NO: 1327512 - RNA, 19 nt, Artificial Sequence
  Description of Artificial Sequence: Synthetic oligonucleotide
ucagcaguaucuccuuugu

SEQ ID NO: 1327513 - RNA, 19 nt, Artificial Sequence
  Description of Artificial Sequence: Synthetic oligonucleotide
ugucugucgagcaauccau

SEQ ID NO: 1327514 - RNA, 19 nt, Artificial Sequence
  Description of Artificial Sequence: Synthetic oligonucleotide
agauacuugggccugccau

SEQ ID NO: 1327515 - RNA, 19 nt, Artificial Sequence
  Description of Artificial Sequence: Synthetic oligonucleotide
cuucagcgaaccaaaugag

SEQ ID NO: 1327516 - RNA, 19 nt, Artificial Sequence
  Description of Artificial Sequence: Synthetic oligonucleotide
cacggcaugggguacacug

SEQ ID NO: 1327517 - RNA, 19 nt, Artificial Sequence
  Description of Artificial Sequence: Synthetic oligonucleotide
guccuuacaaguuccuggc

SEQ ID NO: 1327518 - RNA, 19 nt, Artificial Sequence
  Description of Artificial Sequence: Synthetic oligonucleotide
ucggauguagauguaggca

SEQ ID NO: 1327519 - RNA, 19 nt, Artificial Sequence
  Description of Artificial Sequence: Synthetic oligonucleotide
cuagggaucagcggagugg

SEQ ID NO: 1327520 - RNA, 19 nt, Artificial Sequence
  Description of Artificial Sequence: Synthetic oligonucleotide
agcggaguggaugagccac

SEQ ID NO: 1327521 - RNA, 19 nt, Artificial Sequence
  Description of Artificial Sequence: Synthetic oligonucleotide
agcuuaugagggucauggc

SEQ ID NO: 1327522 - RNA, 19 nt, Artificial Sequence
  Description of Artificial Sequence: Synthetic oligonucleotide
agucgaucucagcuggccg

SEQ ID NO: 1327523 - RNA, 19 nt, Artificial Sequence
  Description of Artificial Sequence: Synthetic oligonucleotide
ugcaccagugcaucaaagu

SEQ ID NO: 1327524 - RNA, 19 nt, Artificial Sequence
  Description of Artificial Sequence: Synthetic oligonucleotide
uucaaaacucagagccgcc

SEQ ID NO: 1327525 - RNA, 19 nt, Artificial Sequence
  Description of Artificial Sequence: Synthetic oligonucleotide
ucuuaggugcugucgugcc

SEQ ID NO: 1327526 - RNA, 19 nt, Artificial Sequence
  Description of Artificial Sequence: Synthetic oligonucleotide
ucucucgguccuuacaagu

SEQ ID NO: 1327527 - RNA, 19 nt, Artificial Sequence
  Description of Artificial Sequence: Synthetic oligonucleotide
agcgcgacagaaaugcacg

SEQ ID NO: 1327528 - RNA, 19 nt, Artificial Sequence
  Description of Artificial Sequence: Synthetic oligonucleotide
uccaccgagaagcugccgu

SEQ ID NO: 1327529 - RNA, 19 nt, Artificial Sequence
  Description of Artificial Sequence: Synthetic oligonucleotide
ucacaaugucugucgagca

SEQ ID NO: 1327530 - RNA, 19 nt, Artificial Sequence
  Description of Artificial Sequence: Synthetic oligonucleotide
ugguaccugaguuucguuc

SEQ ID NO: 1327531 - RNA, 19 nt, Artificial Sequence
  Description of Artificial Sequence: Synthetic oligonucleotide
gaucucucgguccuuacaa

SEQ ID NO: 1327532 - RNA, 19 nt, Artificial Sequence
  Description of Artificial Sequence: Synthetic oligonucleotide
aaacgcacaaauacccgca

SEQ ID NO: 1327533 - RNA, 19 nt, Artificial Sequence
  Description of Artificial Sequence: Synthetic oligonucleotide
cagaccugcuucauaggcc

SEQ ID NO: 1327534 - RNA, 19 nt, Artificial Sequence
  Description of Artificial Sequence: Synthetic oligonucleotide
agauguugaacaguuuggu

SEQ ID NO: 1327535 - RNA, 19 nt, Artificial Sequence
  Description of Artificial Sequence: Synthetic oligonucleotide
uuucguucucggccaaagc

SEQ ID NO: 1327536 - RNA, 19 nt, Artificial Sequence
  Description of Artificial Sequence: Synthetic oligonucleotide
aggguuuauucaugaagcu

SEQ ID NO: 1327537 - RNA, 19 nt, Artificial Sequence
  Description of Artificial Sequence: Synthetic oligonucleotide
cucgguccuuacaaguucc

SEQ ID NO: 1327538 - RNA, 19 nt, Artificial Sequence
  Description of Artificial Sequence: Synthetic oligonucleotide
guagcacuuguuuauuguc

SEQ ID NO: 1327539 - RNA, 19 nt, Artificial Sequence
  Description of Artificial Sequence: Synthetic oligonucleotide
aaggagguugucccagcca

SEQ ID NO: 1327540 - RNA, 19 nt, Artificial Sequence
  Description of Artificial Sequence: Synthetic oligonucleotide
uuguagaauucuccucgga

SEQ ID NO: 1327541 - RNA, 19 nt, Artificial Sequence
  Description of Artificial Sequence: Synthetic oligonucleotide
agucaccccgacucugggc

SEQ ID NO: 1327542 - RNA, 19 nt, Artificial Sequence
  Description of Artificial Sequence: Synthetic oligonucleotide
ucucgguccuuacaaguuc

SEQ ID NO: 1327543 - RNA, 19 nt, Artificial Sequence
  Description of Artificial Sequence: Synthetic oligonucleotide
acagaccuagggaucagcg

SEQ ID NO: 1327544 - RNA, 19 nt, Artificial Sequence
  Description of Artificial Sequence: Synthetic oligonucleotide
agccccgcgcaccacaaac

SEQ ID NO: 1327545 - RNA, 19 nt, Artificial Sequence
  Description of Artificial Sequence: Synthetic oligonucleotide
uggggcauccaaacacucc

SEQ ID NO: 1327546 - RNA, 19 nt, Artificial Sequence
  Description of Artificial Sequence: Synthetic oligonucleotide
uuaugagggucauggcgca

SEQ ID NO: 1327547 - RNA, 19 nt, Artificial Sequence
  Description of Artificial Sequence: Synthetic oligonucleotide
gcgacagaaaugcacgggg

SEQ ID NO: 1327548 - RNA, 19 nt, Artificial Sequence
  Description of Artificial Sequence: Synthetic oligonucleotide
accugaguuucguucucgg

SEQ ID NO: 1327549 - RNA, 19 nt, Artificial Sequence
  Description of Artificial Sequence: Synthetic oligonucleotide
accuaugacaccaccagca

SEQ ID NO: 1327550 - RNA, 19 nt, Artificial Sequence
  Description of Artificial Sequence: Synthetic oligonucleotide
cagaccuagggaucagcgg

SEQ ID NO: 1327551 - RNA, 19 nt, Artificial Sequence
  Description of Artificial Sequence: Synthetic oligonucleotide
caauggacucaaugagugc

SEQ ID NO: 1327552 - RNA, 19 nt, Artificial Sequence
  Description of Artificial Sequence: Synthetic oligonucleotide
acccaagauccagucaggc

SEQ ID NO: 1327553 - RNA, 19 nt, Artificial Sequence
  Description of Artificial Sequence: Synthetic oligonucleotide
aucagcggaguggaugagc

SEQ ID NO: 1327554 - RNA, 19 nt, Artificial Sequence
  Description of Artificial Sequence: Synthetic oligonucleotide
aagccugaaugcugggccu

SEQ ID NO: 1327555 - RNA, 19 nt, Artificial Sequence
  Description of Artificial Sequence: Synthetic oligonucleotide
agccaccuaugacaccacc

SEQ ID NO: 1327556 - RNA, 19 nt, Artificial Sequence
  Description of Artificial Sequence: Synthetic oligonucleotide
caggaaucacagcaaggag

SEQ ID NO: 1327557 - RNA, 19 nt, Artificial Sequence
  Description of Artificial Sequence: Synthetic oligonucleotide
cacgggaagcgauccaccg

SEQ ID NO: 1327558 - RNA, 19 nt, Artificial Sequence
  Description of Artificial Sequence: Synthetic oligonucleotide
uuaucaggccaagguacag

SEQ ID NO: 1327559 - RNA, 19 nt, Artificial Sequence
  Description of Artificial Sequence: Synthetic oligonucleotide
caaauacccgcacgggaag

SEQ ID NO: 1327560 - RNA, 19 nt, Artificial Sequence
  Description of Artificial Sequence: Synthetic oligonucleotide
ugcgaacuguugcauucgc

SEQ ID NO: 1327561 - RNA, 19 nt, Artificial Sequence
  Description of Artificial Sequence: Synthetic oligonucleotide
uuggugaagauccggucuu

SEQ ID NO: 1327562 - RNA, 19 nt, Artificial Sequence
  Description of Artificial Sequence: Synthetic oligonucleotide
cuuaggugcugucgugccg

SEQ ID NO: 1327563 - RNA, 19 nt, Artificial Sequence
  Description of Artificial Sequence: Synthetic oligonucleotide
acaaacacgucaaaaucau

SEQ ID NO: 1327564 - RNA, 19 nt, Artificial Sequence
  Description of Artificial Sequence: Synthetic oligonucleotide
cacgacggcagaugguggg

SEQ ID NO: 1327565 - RNA, 19 nt, Artificial Sequence
  Description of Artificial Sequence: Synthetic oligonucleotide
cauggcgcaugaucucucg

SEQ ID NO: 1327566 - RNA, 19 nt, Artificial Sequence
  Description of Artificial Sequence: Synthetic oligonucleotide
caccuucaaaacucagagc

SEQ ID NO: 1327567 - RNA, 19 nt, Artificial Sequence
  Description of Artificial Sequence: Synthetic oligonucleotide
ugucggaucagacccugua

SEQ ID NO: 1327568 - RNA, 19 nt, Artificial Sequence
  Description of Artificial Sequence: Synthetic oligonucleotide
accacgacggcagauggug

SEQ ID NO: 1327569 - RNA, 19 nt, Artificial Sequence
  Description of Artificial Sequence: Synthetic oligonucleotide
ucacaaagcgagccaucac

SEQ ID NO: 1327570 - RNA, 19 nt, Artificial Sequence
  Description of Artificial Sequence: Synthetic oligonucleotide
gcugaaacgcacaaauacc

SEQ ID NO: 1327571 - RNA, 19 nt, Artificial Sequence
  Description of Artificial Sequence: Synthetic oligonucleotide
uagggaucagcggagugga

SEQ ID NO: 1327572 - RNA, 19 nt, Artificial Sequence
  Description of Artificial Sequence: Synthetic oligonucleotide
auccagucgacgcccucac

SEQ ID NO: 1327573 - RNA, 19 nt, Artificial Sequence
  Description of Artificial Sequence: Synthetic oligonucleotide
cauuggccacaguuguggg

SEQ ID NO: 1327574 - RNA, 19 nt, Artificial Sequence
  Description of Artificial Sequence: Synthetic oligonucleotide
uaccugaguuucguucucg

SEQ ID NO: 1327575 - RNA, 19 nt, Artificial Sequence
  Description of Artificial Sequence: Synthetic oligonucleotide
gagccacaggcauucuugc

SEQ ID NO: 1327576 - RNA, 19 nt, Artificial Sequence
  Description of Artificial Sequence: Synthetic oligonucleotide
guacuggccaggcugcccc

SEQ ID NO: 1327577 - RNA, 19 nt, Artificial Sequence
  Description of Artificial Sequence: Synthetic oligonucleotide
gaagcuccauuugaggcca

SEQ ID NO: 1327578 - RNA, 19 nt, Artificial Sequence
  Description of Artificial Sequence: Synthetic oligonucleotide
ccuucagcgaaccaaauga

SEQ ID NO: 1327579 - RNA, 19 nt, Artificial Sequence
  Description of Artificial Sequence: Synthetic oligonucleotide
cugucgagcaauccaugac

SEQ ID NO: 1327580 - RNA, 19 nt, Artificial Sequence
  Description of Artificial Sequence: Synthetic oligonucleotide
auuaucaggccaagguaca

SEQ ID NO: 1327581 - RNA, 19 nt, Artificial Sequence
  Description of Artificial Sequence: Synthetic oligonucleotide
cagcgcgacagaaaugcac

SEQ ID NO: 1327582 - RNA, 19 nt, Artificial Sequence
  Description of Artificial Sequence: Synthetic oligonucleotide
uguugcauucgcuccucaa

SEQ ID NO: 1327583 - RNA, 19 nt, Artificial Sequence
  Description of Artificial Sequence: Synthetic oligonucleotide
uccuuacaaguuccuggcu

SEQ ID NO: 1327584 - RNA, 19 nt, Artificial Sequence
  Description of Artificial Sequence: Synthetic oligonucleotide
guuggugaagauccggucu

SEQ ID NO: 1327585 - RNA, 19 nt, Artificial Sequence
  Description of Artificial Sequence: Synthetic oligonucleotide
ucgaucucagcuggccggg

SEQ ID NO: 1327586 - RNA, 19 nt, Artificial Sequence
  Description of Artificial Sequence: Synthetic oligonucleotide
cacaaauacccgcacggga

SEQ ID NO: 1327587 - RNA, 19 nt, Artificial Sequence
  Description of Artificial Sequence: Synthetic oligonucleotide
aagauccggucuucauccu

SEQ ID NO: 1327588 - RNA, 19 nt, Artificial Sequence
  Description of Artificial Sequence: Synthetic oligonucleotide
agcgaaccaaaugagguuu

SEQ ID NO: 1327589 - RNA, 19 nt, Artificial Sequence
  Description of Artificial Sequence: Synthetic oligonucleotide
cagugcaucaaaguccauc

SEQ ID NO: 1327590 - RNA, 19 nt, Artificial Sequence
  Description of Artificial Sequence: Synthetic oligonucleotide
caccuaugacaccaccagc

SEQ ID NO: 1327591 - RNA, 19 nt, Artificial Sequence
  Description of Artificial Sequence: Synthetic oligonucleotide
ggaucagacccuguacugg

SEQ ID NO: 1327592 - RNA, 19 nt, Artificial Sequence
  Description of Artificial Sequence: Synthetic oligonucleotide
ccagucgacgcccucacgg

SEQ ID NO: 1327593 - RNA, 19 nt, Artificial Sequence
  Description of Artificial Sequence: Synthetic oligonucleotide
ucuugccaaucagaccugc

SEQ ID NO: 1327594 - RNA, 19 nt, Artificial Sequence
  Description of Artificial Sequence: Synthetic oligonucleotide
uugaacaguuugguaccug

SEQ ID NO: 1327595 - RNA, 19 nt, Artificial Sequence
  Description of Artificial Sequence: Synthetic oligonucleotide
gucggaucagacccuguac

SEQ ID NO: 1327596 - RNA, 19 nt, Artificial Sequence
  Description of Artificial Sequence: Synthetic oligonucleotide
uuacaaguuccuggcuccc

SEQ ID NO: 1327597 - RNA, 19 nt, Artificial Sequence
  Description of Artificial Sequence: Synthetic oligonucleotide
aagcgagccaucacuuugu

SEQ ID NO: 1327598 - RNA, 19 nt, Artificial Sequence
  Description of Artificial Sequence: Synthetic oligonucleotide
auucuccucggauguagau

SEQ ID NO: 1327599 - RNA, 19 nt, Artificial Sequence
  Description of Artificial Sequence: Synthetic oligonucleotide
cgauccaccgagaagcugc

SEQ ID NO: 1327600 - RNA, 19 nt, Artificial Sequence
  Description of Artificial Sequence: Synthetic oligonucleotide
cgcacaaauacccgcacgg

SEQ ID NO: 1327601 - RNA, 19 nt, Artificial Sequence
  Description of Artificial Sequence: Synthetic oligonucleotide
caguaucuccuuugucuug

SEQ ID NO: 1327602 - RNA, 19 nt, Artificial Sequence
  Description of Artificial Sequence: Synthetic oligonucleotide
uccagucgacgcccucacg

SEQ ID NO: 1327603 - RNA, 19 nt, Artificial Sequence
  Description of Artificial Sequence: Synthetic oligonucleotide
caaugucugucgagcaauc

SEQ ID NO: 1327604 - RNA, 19 nt, Artificial Sequence
  Description of Artificial Sequence: Synthetic oligonucleotide
ggaucagcggaguggauga

SEQ ID NO: 1327605 - RNA, 19 nt, Artificial Sequence
  Description of Artificial Sequence: Synthetic oligonucleotide
ggaugagccaccaggaauc

SEQ ID NO: 1327606 - RNA, 19 nt, Artificial Sequence
  Description of Artificial Sequence: Synthetic oligonucleotide
gaccuagggaucagcggag

SEQ ID NO: 1327607 - RNA, 19 nt, Artificial Sequence
  Description of Artificial Sequence: Synthetic oligonucleotide
cauccaaacacucccacau

SEQ ID NO: 1327608 - RNA, 19 nt, Artificial Sequence
  Description of Artificial Sequence: Synthetic oligonucleotide
cacaaagcgagccaucacu

SEQ ID NO: 1327609 - RNA, 19 nt, Artificial Sequence
  Description of Artificial Sequence: Synthetic oligonucleotide
uccggucuucauccuucag

SEQ ID NO: 1327610 - RNA, 19 nt, Artificial Sequence
  Description of Artificial Sequence: Synthetic oligonucleotide
ucauggcgcaugaucucuc

SEQ ID NO: 1327611 - RNA, 19 nt, Artificial Sequence
  Description of Artificial Sequence: Synthetic oligonucleotide
cucggauagcuaccugcag

SEQ ID NO: 1327612 - RNA, 19 nt, Artificial Sequence
  Description of Artificial Sequence: Synthetic oligonucleotide
cuucaggcguggcuuuccc

SEQ ID NO: 1327613 - RNA, 19 nt, Artificial Sequence
  Description of Artificial Sequence: Synthetic oligonucleotide
cugcgaacuguugcauucg

SEQ ID NO: 1327614 - RNA, 19 nt, Artificial Sequence
  Description of Artificial Sequence: Synthetic oligonucleotide
acgcccucacggcaugggg

SEQ ID NO: 1327615 - RNA, 19 nt, Artificial Sequence
  Description of Artificial Sequence: Synthetic oligonucleotide
ucgguccuuacaaguuccu

SEQ ID NO: 1327616 - RNA, 19 nt, Artificial Sequence
  Description of Artificial Sequence: Synthetic oligonucleotide
ucgugccgcugcugaaacg

SEQ ID NO: 1327617 - RNA, 19 nt, Artificial Sequence
  Description of Artificial Sequence: Synthetic oligonucleotide
ccggucuucauccuucagc

SEQ ID NO: 1327618 - RNA, 19 nt, Artificial Sequence
  Description of Artificial Sequence: Synthetic oligonucleotide
ugccgcugcugaaacgcac

SEQ ID NO: 1327619 - RNA, 19 nt, Artificial Sequence
  Description of Artificial Sequence: Synthetic oligonucleotide
agugucggaucagacccug

SEQ ID NO: 1327620 - RNA, 19 nt, Artificial Sequence
  Description of Artificial Sequence: Synthetic oligonucleotide
cuagcaucgcgggacccag

SEQ ID NO: 1327621 - RNA, 19 nt, Artificial Sequence
  Description of Artificial Sequence: Synthetic oligonucleotide
gccaucugaggguuuauuc

SEQ ID NO: 1327622 - RNA, 19 nt, Artificial Sequence
  Description of Artificial Sequence: Synthetic oligonucleotide
ugagacgagcgauggcuuu

SEQ ID NO: 1327623 - RNA, 19 nt, Artificial Sequence
  Description of Artificial Sequence: Synthetic oligonucleotide
gugccgcuagcaucgcggg

SEQ ID NO: 1327624 - RNA, 19 nt, Artificial Sequence
  Description of Artificial Sequence: Synthetic oligonucleotide
aaggguggcuucaggcgug

SEQ ID NO: 1327625 - RNA, 19 nt, Artificial Sequence
  Description of Artificial Sequence: Synthetic oligonucleotide
ggguuuauucaugaagcuc

SEQ ID NO: 1327626 - RNA, 19 nt, Artificial Sequence
  Description of Artificial Sequence: Synthetic oligonucleotide
acgggaagcgauccaccga

SEQ ID NO: 1327627 - RNA, 19 nt, Artificial Sequence
  Description of Artificial Sequence: Synthetic oligonucleotide
uucaggcguggcuuucccu

SEQ ID NO: 1327628 - RNA, 19 nt, Artificial Sequence
  Description of Artificial Sequence: Synthetic oligonucleotide
acggcaugggguacacugg

SEQ ID NO: 1327629 - RNA, 19 nt, Artificial Sequence
  Description of Artificial Sequence: Synthetic oligonucleotide
gcugcugaaacgcacaaau

SEQ ID NO: 1327630 - RNA, 19 nt, Artificial Sequence
  Description of Artificial Sequence: Synthetic oligonucleotide
cucaauuagcuccuucagu

SEQ ID NO: 1327631 - RNA, 19 nt, Artificial Sequence
  Description of Artificial Sequence: Synthetic oligonucleotide
ggguagcacuuguuuauug

SEQ ID NO: 1327632 - RNA, 19 nt, Artificial Sequence
  Description of Artificial Sequence: Synthetic oligonucleotide
auucgcuccucaagcacug

SEQ ID NO: 1327633 - RNA, 19 nt, Artificial Sequence
  Description of Artificial Sequence: Synthetic oligonucleotide
uagcaucgcgggacccagg

SEQ ID NO: 1327634 - RNA, 19 nt, Artificial Sequence
  Description of Artificial Sequence: Synthetic oligonucleotide
ccguaaaccagaugccuug

SEQ ID NO: 1327635 - RNA, 19 nt, Artificial Sequence
  Description of Artificial Sequence: Synthetic oligonucleotide
cacacagaccuagggauca

SEQ ID NO: 1327636 - RNA, 19 nt, Artificial Sequence
  Description of Artificial Sequence: Synthetic oligonucleotide
cccaagauccagucaggcc

SEQ ID NO: 1327637 - RNA, 19 nt, Artificial Sequence
  Description of Artificial Sequence: Synthetic oligonucleotide
cagugcagggguuguugac

SEQ ID NO: 1327638 - RNA, 19 nt, Artificial Sequence
  Description of Artificial Sequence: Synthetic oligonucleotide
ucgagcaauccaugacaau

SEQ ID NO: 1327639 - RNA, 19 nt, Artificial Sequence
  Description of Artificial Sequence: Synthetic oligonucleotide
uggcggccauacagguugg

SEQ ID NO: 1327640 - RNA, 19 nt, Artificial Sequence
  Description of Artificial Sequence: Synthetic oligonucleotide
gguaccugaguuucguucu

SEQ ID NO: 1327641 - RNA, 19 nt, Artificial Sequence
  Description of Artificial Sequence: Synthetic oligonucleotide
gguuggugaagauccgguc

SEQ ID NO: 1327642 - RNA, 19 nt, Artificial Sequence
  Description of Artificial Sequence: Synthetic oligonucleotide
guacaggcucagaagccug

SEQ ID NO: 1327643 - RNA, 19 nt, Artificial Sequence
  Description of Artificial Sequence: Synthetic oligonucleotide
gguagcacuuguuuauugu

SEQ ID NO: 1327644 - RNA, 19 nt, Artificial Sequence
  Description of Artificial Sequence: Synthetic oligonucleotide
gggguuguugacauggcca

SEQ ID NO: 1327645 - RNA, 19 nt, Artificial Sequence
  Description of Artificial Sequence: Synthetic oligonucleotide
gcucucaugcuuauagaac

SEQ ID NO: 1327646 - RNA, 19 nt, Artificial Sequence
  Description of Artificial Sequence: Synthetic oligonucleotide
gaugagccaccaggaauca

SEQ ID NO: 1327647 - RNA, 19 nt, Artificial Sequence
  Description of Artificial Sequence: Synthetic oligonucleotide
cagucaccccgacucuggg

SEQ ID NO: 1327648 - RNA, 19 nt, Artificial Sequence
  Description of Artificial Sequence: Synthetic oligonucleotide
agauccggucuucauccuu

SEQ ID NO: 1327649 - RNA, 19 nt, Artificial Sequence
  Description of Artificial Sequence: Synthetic oligonucleotide
cugccgugccgcuagcauc

SEQ ID NO: 1327650 - RNA, 19 nt, Artificial Sequence
  Description of Artificial Sequence: Synthetic oligonucleotide
gacgcccucacggcauggg

SEQ ID NO: 1327651 - RNA, 19 nt, Artificial Sequence
  Description of Artificial Sequence: Synthetic oligonucleotide
caccacggccccguaaacc

SEQ ID NO: 1327652 - RNA, 19 nt, Artificial Sequence
  Description of Artificial Sequence: Synthetic oligonucleotide
gagaguggguagcacuugu

SEQ ID NO: 1327653 - RNA, 19 nt, Artificial Sequence
  Description of Artificial Sequence: Synthetic oligonucleotide
gacaaucaccgcagcugug

SEQ ID NO: 1327654 - RNA, 19 nt, Artificial Sequence
  Description of Artificial Sequence: Synthetic oligonucleotide
ugucgugccgcugcugaaa

SEQ ID NO: 1327655 - RNA, 19 nt, Artificial Sequence
  Description of Artificial Sequence: Synthetic oligonucleotide
gagacgagcgauggcuuuc

SEQ ID NO: 1327656 - RNA, 19 nt, Artificial Sequence
  Description of Artificial Sequence: Synthetic oligonucleotide
uucgcuccucaagcacugg

SEQ ID NO: 1327657 - RNA, 19 nt, Artificial Sequence
  Description of Artificial Sequence: Synthetic oligonucleotide
aagugucggaucagacccu

SEQ ID NO: 1327658 - RNA, 19 nt, Artificial Sequence
  Description of Artificial Sequence: Synthetic oligonucleotide
gucgugccgcugcugaaac

SEQ ID NO: 1327659 - RNA, 19 nt, Artificial Sequence
  Description of Artificial Sequence: Synthetic oligonucleotide
cauucgcuccucaagcacu

SEQ ID NO: 1327660 - RNA, 19 nt, Artificial Sequence
  Description of Artificial Sequence: Synthetic oligonucleotide
cacaaugucugucgagcaa

SEQ ID NO: 1327661 - RNA, 19 nt, Artificial Sequence
  Description of Artificial Sequence: Synthetic oligonucleotide
gucgagcaauccaugacaa

SEQ ID NO: 1327662 - RNA, 19 nt, Artificial Sequence
  Description of Artificial Sequence: Synthetic oligonucleotide
ucgacgcccucacggcaug

SEQ ID NO: 1327663 - RNA, 19 nt, Artificial Sequence
  Description of Artificial Sequence: Synthetic oligonucleotide
ugggcaccuuucagccucc

SEQ ID NO: 1327664 - RNA, 19 nt, Artificial Sequence
  Description of Artificial Sequence: Synthetic oligonucleotide
gaucagcggaguggaugag

SEQ ID NO: 1327665 - RNA, 19 nt, Artificial Sequence
  Description of Artificial Sequence: Synthetic oligonucleotide
cuggaaaggguggcuucag

SEQ ID NO: 1327666 - RNA, 19 nt, Artificial Sequence
  Description of Artificial Sequence: Synthetic oligonucleotide
cgugccgcuagcaucgcgg

SEQ ID NO: 1327667 - RNA, 19 nt, Artificial Sequence
  Description of Artificial Sequence: Synthetic oligonucleotide
ucauccagucgacgcccuc

SEQ ID NO: 1327668 - RNA, 19 nt, Artificial Sequence
  Description of Artificial Sequence: Synthetic oligonucleotide
uacccgcacgggaagcgau

SEQ ID NO: 1327669 - RNA, 19 nt, Artificial Sequence
  Description of Artificial Sequence: Synthetic oligonucleotide
augggguacacuggccaca

SEQ ID NO: 1327670 - RNA, 19 nt, Artificial Sequence
  Description of Artificial Sequence: Synthetic oligonucleotide
ggucacgucccgcugucac

SEQ ID NO: 1327671 - RNA, 19 nt, Artificial Sequence
  Description of Artificial Sequence: Synthetic oligonucleotide
cagaugccuugaucucacc

SEQ ID NO: 1327672 - RNA, 19 nt, Artificial Sequence
  Description of Artificial Sequence: Synthetic oligonucleotide
cagcaguaucuccuuuguc

SEQ ID NO: 1327673 - RNA, 19 nt, Artificial Sequence
  Description of Artificial Sequence: Synthetic oligonucleotide
gcgcgacagaaaugcacgg

SEQ ID NO: 1327674 - RNA, 19 nt, Artificial Sequence
  Description of Artificial Sequence: Synthetic oligonucleotide
cacuggccggaagugucgg

SEQ ID NO: 1327675 - RNA, 19 nt, Artificial Sequence
  Description of Artificial Sequence: Synthetic oligonucleotide
gcgcaugaucucucggucc

SEQ ID NO: 1327676 - RNA, 19 nt, Artificial Sequence
  Description of Artificial Sequence: Synthetic oligonucleotide
caaacacgucaaaaucaua

SEQ ID NO: 1327677 - RNA, 19 nt, Artificial Sequence
  Description of Artificial Sequence: Synthetic oligonucleotide
gccugucugggccugcacc

SEQ ID NO: 1327678 - RNA, 19 nt, Artificial Sequence
  Description of Artificial Sequence: Synthetic oligonucleotide
uggccggaagugucggauc

SEQ ID NO: 1327679 - RNA, 19 nt, Artificial Sequence
  Description of Artificial Sequence: Synthetic oligonucleotide
ugccgcuagcaucgcggga

SEQ ID NO: 1327680 - RNA, 19 nt, Artificial Sequence
  Description of Artificial Sequence: Synthetic oligonucleotide
cucggccaaagccagcaaa

SEQ ID NO: 1327681 - RNA, 19 nt, Artificial Sequence
  Description of Artificial Sequence: Synthetic oligonucleotide
ucucggccaaagccagcaa

SEQ ID NO: 1327682 - RNA, 19 nt, Artificial Sequence
  Description of Artificial Sequence: Synthetic oligonucleotide
ggaagcgauccaccgagaa

SEQ ID NO: 1327683 - RNA, 19 nt, Artificial Sequence
  Description of Artificial Sequence: Synthetic oligonucleotide
caccagauacuugggccug

SEQ ID NO: 1327684 - RNA, 19 nt, Artificial Sequence
  Description of Artificial Sequence: Synthetic oligonucleotide
cccucgucagcauucacca

SEQ ID NO: 1327685 - RNA, 19 nt, Artificial Sequence
  Description of Artificial Sequence: Synthetic oligonucleotide
guaggcagcccgggcaccc

SEQ ID NO: 1327686 - RNA, 19 nt, Artificial Sequence
  Description of Artificial Sequence: Synthetic oligonucleotide
cgggaagcgauccaccgag

SEQ ID NO: 1327687 - RNA, 19 nt, Artificial Sequence
  Description of Artificial Sequence: Synthetic oligonucleotide
uggugaagauccggucuuc

SEQ ID NO: 1327688 - RNA, 19 nt, Artificial Sequence
  Description of Artificial Sequence: Synthetic oligonucleotide
agccugaaugcugggccug

SEQ ID NO: 1327689 - RNA, 19 nt, Artificial Sequence
  Description of Artificial Sequence: Synthetic oligonucleotide
gcugucgugccgcugcuga

SEQ ID NO: 1327690 - RNA, 19 nt, Artificial Sequence
  Description of Artificial Sequence: Synthetic oligonucleotide
aucgcgggacccaggcggg

SEQ ID NO: 1327691 - RNA, 19 nt, Artificial Sequence
  Description of Artificial Sequence: Synthetic oligonucleotide
gcaaggagguugucccagc

SEQ ID NO: 1327692 - RNA, 19 nt, Artificial Sequence
  Description of Artificial Sequence: Synthetic oligonucleotide
cauccagucgacgcccuca

SEQ ID NO: 1327693 - RNA, 19 nt, Artificial Sequence
  Description of Artificial Sequence: Synthetic oligonucleotide
ggcuuucacaaugucuguc

SEQ ID NO: 1327694 - RNA, 19 nt, Artificial Sequence
  Description of Artificial Sequence: Synthetic oligonucleotide
gccgcuagcaucgcgggac

SEQ ID NO: 1327695 - RNA, 19 nt, Artificial Sequence
  Description of Artificial Sequence: Synthetic oligonucleotide
gacgagcgauggcuuucac

SEQ ID NO: 1327696 - RNA, 19 nt, Artificial Sequence
  Description of Artificial Sequence: Synthetic oligonucleotide
ugccaucugaggguuuauu

SEQ ID NO: 1327697 - RNA, 19 nt, Artificial Sequence
  Description of Artificial Sequence: Synthetic oligonucleotide
caagauccagucaggcccu

SEQ ID NO: 1327698 - RNA, 19 nt, Artificial Sequence
  Description of Artificial Sequence: Synthetic oligonucleotide
gugcaucaaaguccaucaa

SEQ ID NO: 1327699 - RNA, 19 nt, Artificial Sequence
  Description of Artificial Sequence: Synthetic oligonucleotide
gcuccauuugaggccagug

SEQ ID NO: 1327700 - RNA, 19 nt, Artificial Sequence
  Description of Artificial Sequence: Synthetic oligonucleotide
auacccgcacgggaagcga

SEQ ID NO: 1327701 - RNA, 19 nt, Artificial Sequence
  Description of Artificial Sequence: Synthetic oligonucleotide
agcgagccaucacuuuguu

SEQ ID NO: 1327702 - RNA, 19 nt, Artificial Sequence
  Description of Artificial Sequence: Synthetic oligonucleotide
ggcaccuuucagccuccag

SEQ ID NO: 1327703 - RNA, 19 nt, Artificial Sequence
  Description of Artificial Sequence: Synthetic oligonucleotide
aggcguggcuuucccugcu

SEQ ID NO: 1327704 - RNA, 19 nt, Artificial Sequence
  Description of Artificial Sequence: Synthetic oligonucleotide
auccaccgagaagcugccg

SEQ ID NO: 1327705 - RNA, 19 nt, Artificial Sequence
  Description of Artificial Sequence: Synthetic oligonucleotide
acgacggcagaugguggga

SEQ ID NO: 1327706 - RNA, 19 nt, Artificial Sequence
  Description of Artificial Sequence: Synthetic oligonucleotide
ggaccagcgcgacagaaau

SEQ ID NO: 1327707 - RNA, 19 nt, Artificial Sequence
  Description of Artificial Sequence: Synthetic oligonucleotide
gcgcaccacaaacacguca

SEQ ID NO: 1327708 - RNA, 19 nt, Artificial Sequence
  Description of Artificial Sequence: Synthetic oligonucleotide
cauggccagagauguugaa

SEQ ID NO: 1327709 - RNA, 19 nt, Artificial Sequence
  Description of Artificial Sequence: Synthetic oligonucleotide
cucacggcaugggguacac

SEQ ID NO: 1327710 - RNA, 19 nt, Artificial Sequence
  Description of Artificial Sequence: Synthetic oligonucleotide
guggggcauccaaacacuc

SEQ ID NO: 1327711 - RNA, 19 nt, Artificial Sequence
  Description of Artificial Sequence: Synthetic oligonucleotide
ggugaagauccggucuuca

SEQ ID NO: 1327712 - RNA, 19 nt, Artificial Sequence
  Description of Artificial Sequence: Synthetic oligonucleotide
ccgagaagcugccgugccg

SEQ ID NO: 1327713 - RNA, 19 nt, Artificial Sequence
  Description of Artificial Sequence: Synthetic oligonucleotide
acccuguacuggccaggcu

SEQ ID NO: 1327714 - RNA, 19 nt, Artificial Sequence
  Description of Artificial Sequence: Synthetic oligonucleotide
agcgauccaccgagaagcu

SEQ ID NO: 1327715 - RNA, 19 nt, Artificial Sequence
  Description of Artificial Sequence: Synthetic oligonucleotide
gaguuucguucucggccaa

SEQ ID NO: 1327716 - RNA, 19 nt, Artificial Sequence
  Description of Artificial Sequence: Synthetic oligonucleotide
gcacuggccggaagugucg

SEQ ID NO: 1327717 - RNA, 19 nt, Artificial Sequence
  Description of Artificial Sequence: Synthetic oligonucleotide
ccacgacggcagauggugg

SEQ ID NO: 1327718 - RNA, 19 nt, Artificial Sequence
  Description of Artificial Sequence: Synthetic oligonucleotide
ccuagggaucagcggagug

SEQ ID NO: 1327719 - RNA, 19 nt, Artificial Sequence
  Description of Artificial Sequence: Synthetic oligonucleotide
cggaucagacccuguacug

SEQ ID NO: 1327720 - RNA, 19 nt, Artificial Sequence
  Description of Artificial Sequence: Synthetic oligonucleotide
ccaugacaaucaccgcagc

SEQ ID NO: 1327721 - RNA, 19 nt, Artificial Sequence
  Description of Artificial Sequence: Synthetic oligonucleotide
cuugccaaucagaccugcu

SEQ ID NO: 1327722 - RNA, 19 nt, Artificial Sequence
  Description of Artificial Sequence: Synthetic oligonucleotide
cccgcgcaccacaaacacg

SEQ ID NO: 1327723 - RNA, 19 nt, Artificial Sequence
  Description of Artificial Sequence: Synthetic oligonucleotide
agaguggguagcacuuguu

SEQ ID NO: 1327724 - RNA, 19 nt, Artificial Sequence
  Description of Artificial Sequence: Synthetic oligonucleotide
agcuccauuugaggccagu

SEQ ID NO: 1327725 - RNA, 19 nt, Artificial Sequence
  Description of Artificial Sequence: Synthetic oligonucleotide
ugcugucgugccgcugcug

SEQ ID NO: 1327726 - RNA, 19 nt, Artificial Sequence
  Description of Artificial Sequence: Synthetic oligonucleotide
acacugucucacacacaga

SEQ ID NO: 1327727 - RNA, 19 nt, Artificial Sequence
  Description of Artificial Sequence: Synthetic oligonucleotide
gcggccauacagguuggug

SEQ ID NO: 1327728 - RNA, 19 nt, Artificial Sequence
  Description of Artificial Sequence: Synthetic oligonucleotide
cggaagugucggaucagac

SEQ ID NO: 1327729 - RNA, 19 nt, Artificial Sequence
  Description of Artificial Sequence: Synthetic oligonucleotide
gccccguaaaccagaugcc

SEQ ID NO: 1327730 - RNA, 19 nt, Artificial Sequence
  Description of Artificial Sequence: Synthetic oligonucleotide
cgcgacagaaaugcacggg

SEQ ID NO: 1327731 - RNA, 19 nt, Artificial Sequence
  Description of Artificial Sequence: Synthetic oligonucleotide
ccgcgcaccacaaacacgu

SEQ ID NO: 1327732 - RNA, 19 nt, Artificial Sequence
  Description of Artificial Sequence: Synthetic oligonucleotide
ccacaguuguggggcaucc

SEQ ID NO: 1327733 - RNA, 19 nt, Artificial Sequence
  Description of Artificial Sequence: Synthetic oligonucleotide
cagcgaaccaaaugagguu

SEQ ID NO: 1327734 - RNA, 19 nt, Artificial Sequence
  Description of Artificial Sequence: Synthetic oligonucleotide
ccgacucugggcaccuuuc

SEQ ID NO: 1327735 - RNA, 19 nt, Artificial Sequence
  Description of Artificial Sequence: Synthetic oligonucleotide
aagauccagucaggcccuu

SEQ ID NO: 1327736 - RNA, 19 nt, Artificial Sequence
  Description of Artificial Sequence: Synthetic oligonucleotide
gcacgggaagcgauccacc

SEQ ID NO: 1327737 - RNA, 19 nt, Artificial Sequence
  Description of Artificial Sequence: Synthetic oligonucleotide
gagaagcugccgugccgcu

SEQ ID NO: 1327738 - RNA, 19 nt, Artificial Sequence
  Description of Artificial Sequence: Synthetic oligonucleotide
cagcggaguggaugagcca

SEQ ID NO: 1327739 - RNA, 19 nt, Artificial Sequence
  Description of Artificial Sequence: Synthetic oligonucleotide
gcuagcaucgcgggaccca

SEQ ID NO: 1327740 - RNA, 19 nt, Artificial Sequence
  Description of Artificial Sequence: Synthetic oligonucleotide
agcugccgugccgcuagca

SEQ ID NO: 1327741 - RNA, 19 nt, Artificial Sequence
  Description of Artificial Sequence: Synthetic oligonucleotide
gcccucuaucugcuugcug

SEQ ID NO: 1327742 - RNA, 19 nt, Artificial Sequence
  Description of Artificial Sequence: Synthetic oligonucleotide
ccaccagauacuugggccu

SEQ ID NO: 1327743 - RNA, 19 nt, Artificial Sequence
  Description of Artificial Sequence: Synthetic oligonucleotide
agauccagucaggcccuuu

SEQ ID NO: 1327744 - RNA, 19 nt, Artificial Sequence
  Description of Artificial Sequence: Synthetic oligonucleotide
cacaguuguggggcaucca

SEQ ID NO: 1327745 - RNA, 19 nt, Artificial Sequence
  Description of Artificial Sequence: Synthetic oligonucleotide
uccagucauggcggccaua

SEQ ID NO: 1327746 - RNA, 19 nt, Artificial Sequence
  Description of Artificial Sequence: Synthetic oligonucleotide
agcuucccaaaaggaugua

SEQ ID NO: 1327747 - RNA, 19 nt, Artificial Sequence
  Description of Artificial Sequence: Synthetic oligonucleotide
gcggaguggaugagccacc

SEQ ID NO: 1327748 - RNA, 19 nt, Artificial Sequence
  Description of Artificial Sequence: Synthetic oligonucleotide
cucugcgaacuguugcauu

SEQ ID NO: 1327749 - RNA, 19 nt, Artificial Sequence
  Description of Artificial Sequence: Synthetic oligonucleotide
gcgauccaccgagaagcug

SEQ ID NO: 1327750 - RNA, 19 nt, Artificial Sequence
  Description of Artificial Sequence: Synthetic oligonucleotide
ccucgucagcauucaccac

SEQ ID NO: 1327751 - RNA, 19 nt, Artificial Sequence
  Description of Artificial Sequence: Synthetic oligonucleotide
gccggaagugucggaucag

SEQ ID NO: 1327752 - RNA, 19 nt, Artificial Sequence
  Description of Artificial Sequence: Synthetic oligonucleotide
ccuccagucauggcggcca

SEQ ID NO: 1327753 - RNA, 19 nt, Artificial Sequence
  Description of Artificial Sequence: Synthetic oligonucleotide
cgcacgggaagcgauccac

SEQ ID NO: 1327754 - RNA, 19 nt, Artificial Sequence
  Description of Artificial Sequence: Synthetic oligonucleotide
gugccgcugcugaaacgca

SEQ ID NO: 1327755 - RNA, 19 nt, Artificial Sequence
  Description of Artificial Sequence: Synthetic oligonucleotide
cgaaccaaaugagguuuuc

SEQ ID NO: 1327756 - RNA, 19 nt, Artificial Sequence
  Description of Artificial Sequence: Synthetic oligonucleotide
ccgcuagcaucgcgggacc

SEQ ID NO: 1327757 - RNA, 19 nt, Artificial Sequence
  Description of Artificial Sequence: Synthetic oligonucleotide
acggccccguaaaccagau

SEQ ID NO: 1327758 - RNA, 19 nt, Artificial Sequence
  Description of Artificial Sequence: Synthetic oligonucleotide
cuggccggaagugucggau

SEQ ID NO: 1327759 - RNA, 19 nt, Artificial Sequence
  Description of Artificial Sequence: Synthetic oligonucleotide
ccgugccgcuagcaucgcg

SEQ ID NO: 1327760 - RNA, 19 nt, Artificial Sequence
  Description of Artificial Sequence: Synthetic oligonucleotide
gggacccaggcgggucacg

SEQ ID NO: 1327761 - RNA, 19 nt, Artificial Sequence
  Description of Artificial Sequence: Synthetic oligonucleotide
gucgacgcccucacggcau

SEQ ID NO: 1327762 - RNA, 19 nt, Artificial Sequence
  Description of Artificial Sequence: Synthetic oligonucleotide
ccaccacggccccguaaac

SEQ ID NO: 1327763 - RNA, 19 nt, Artificial Sequence
  Description of Artificial Sequence: Synthetic oligonucleotide
ccggaagugucggaucaga

SEQ ID NO: 1327764 - RNA, 19 nt, Artificial Sequence
  Description of Artificial Sequence: Synthetic oligonucleotide
cguaaaccagaugccuuga

SEQ ID NO: 1327765 - RNA, 19 nt, Artificial Sequence
  Description of Artificial Sequence: Synthetic oligonucleotide
cgacggcagauggugggag

SEQ ID NO: 1327766 - RNA, 19 nt, Artificial Sequence
  Description of Artificial Sequence: Synthetic oligonucleotide
gcugccgugccgcuagcau

SEQ ID NO: 1327767 - RNA, 19 nt, Artificial Sequence
  Description of Artificial Sequence: Synthetic oligonucleotide
gccuccuaccaggcagccc

SEQ ID NO: 1327768 - RNA, 19 nt, Artificial Sequence
  Description of Artificial Sequence: Synthetic oligonucleotide
ccagcgcgacagaaaugca

SEQ ID NO: 1327769 - RNA, 19 nt, Artificial Sequence
  Description of Artificial Sequence: Synthetic oligonucleotide
gggaagcgauccaccgaga

SEQ ID NO: 1327770 - RNA, 19 nt, Artificial Sequence
  Description of Artificial Sequence: Synthetic oligonucleotide
gugcugucgugccgcugcu

SEQ ID NO: 1327771 - RNA, 19 nt, Artificial Sequence
  Description of Artificial Sequence: Synthetic oligonucleotide
cccguaaaccagaugccuu

SEQ ID NO: 1327772 - RNA, 19 nt, Artificial Sequence
  Description of Artificial Sequence: Synthetic oligonucleotide
ggcagcccgggcacccaug

SEQ ID NO: 1327773 - RNA, 19 nt, Artificial Sequence
  Description of Artificial Sequence: Synthetic oligonucleotide
ccgggcacccauggcccgg

SEQ ID NO: 1327774 - RNA, 19 nt, Artificial Sequence
  Description of Artificial Sequence: Synthetic oligonucleotide
gcgggucacgucccgcugu

SEQ ID NO: 1327775 - RNA, 19 nt, Artificial Sequence
  Description of Artificial Sequence: Synthetic oligonucleotide
cacaggcauucuugccaau

SEQ ID NO: 1327776 - RNA, 19 nt, Artificial Sequence
  Description of Artificial Sequence: Synthetic oligonucleotide
ccccguaaaccagaugccu

SEQ ID NO: 1327777 - RNA, 19 nt, Artificial Sequence
  Description of Artificial Sequence: Synthetic oligonucleotide
cgucccgcugucaccuuca

SEQ ID NO: 1327778 - RNA, 19 nt, Artificial Sequence
  Description of Artificial Sequence: Synthetic oligonucleotide
ccucacggcaugggguaca

SEQ ID NO: 1327779 - RNA, 19 nt, Artificial Sequence
  Description of Artificial Sequence: Synthetic oligonucleotide
ccgcugcugaaacgcacaa

SEQ ID NO: 1327780 - RNA, 19 nt, Artificial Sequence
  Description of Artificial Sequence: Synthetic oligonucleotide
gcucugcgaacuguugcau

SEQ ID NO: 1327781 - RNA, 19 nt, Artificial Sequence
  Description of Artificial Sequence: Synthetic oligonucleotide
cgggucacgucccgcuguc

SEQ ID NO: 1327782 - RNA, 19 nt, Artificial Sequence
  Description of Artificial Sequence: Synthetic oligonucleotide
cgcuagcaucgcgggaccc

SEQ ID NO: 1327783 - RNA, 19 nt, Artificial Sequence
  Description of Artificial Sequence: Synthetic oligonucleotide
ggauagcuaccugcagauu

SEQ ID NO: 1327784 - RNA, 19 nt, Artificial Sequence
  Description of Artificial Sequence: Synthetic oligonucleotide
gggucacgucccgcuguca

SEQ ID NO: 1327785 - RNA, 19 nt, Artificial Sequence
  Description of Artificial Sequence: Synthetic oligonucleotide
gcgaaccaaaugagguuuu

SEQ ID NO: 1327786 - RNA, 19 nt, Artificial Sequence
  Description of Artificial Sequence: Synthetic oligonucleotide
cggaguggaugagccacca

SEQ ID NO: 1327787 - RNA, 19 nt, Artificial Sequence
  Description of Artificial Sequence: Synthetic oligonucleotide
gccggaccagcgcgacaga

SEQ ID NO: 1327788 - RNA, 19 nt, Artificial Sequence
  Description of Artificial Sequence: Synthetic oligonucleotide
ccggaccagcgcgacagaa

SEQ ID NO: 1327789 - RNA, 19 nt, Artificial Sequence
  Description of Artificial Sequence: Synthetic oligonucleotide
gccgugccgcuagcaucgc

SEQ ID NO: 1327790 - RNA, 19 nt, Artificial Sequence
  Description of Artificial Sequence: Synthetic oligonucleotide
ccgcacgggaagcgaucca

SEQ ID NO: 1327791 - RNA, 19 nt, Artificial Sequence
  Description of Artificial Sequence: Synthetic oligonucleotide
ggcguggcuuucccugcuu

SEQ ID NO: 1327792 - RNA, 19 nt, Artificial Sequence
  Description of Artificial Sequence: Synthetic oligonucleotide
cggccccguaaaccagaug

SEQ ID NO: 1327793 - RNA, 19 nt, Artificial Sequence
  Description of Artificial Sequence: Synthetic oligonucleotide
cccgacucugggcaccuuu

SEQ ID NO: 1327794 - RNA, 19 nt, Artificial Sequence
  Description of Artificial Sequence: Synthetic oligonucleotide
ccagugcaucaaaguccau

SEQ ID NO: 1327795 - RNA, 19 nt, Artificial Sequence
  Description of Artificial Sequence: Synthetic oligonucleotide
ccgccggaccagcgcgaca

SEQ ID NO: 1327796 - RNA, 19 nt, Artificial Sequence
  Description of Artificial Sequence: Synthetic oligonucleotide
ccccgacucugggcaccuu

SEQ ID NO: 1327797 - RNA, 19 nt, Artificial Sequence
  Description of Artificial Sequence: Synthetic oligonucleotide
ucauagauguauuauauag

SEQ ID NO: 1327798 - RNA, 19 nt, Artificial Sequence
  Description of Artificial Sequence: Synthetic oligonucleotide
uauaaguaaaagaagucgc

SEQ ID NO: 1327799 - RNA, 19 nt, Artificial Sequence
  Description of Artificial Sequence: Synthetic oligonucleotide
auguagauaagcuucauag

SEQ ID NO: 1327800 - RNA, 19 nt, Artificial Sequence
  Description of Artificial Sequence: Synthetic oligonucleotide
guuugaauaaucuaccaag

SEQ ID NO: 1327801 - RNA, 19 nt, Artificial Sequence
  Description of Artificial Sequence: Synthetic oligonucleotide
uccauaaaaucucaagagg

SEQ ID NO: 1327802 - RNA, 19 nt, Artificial Sequence
  Description of Artificial Sequence: Synthetic oligonucleotide
ugaauaaucuaccaagugu

SEQ ID NO: 1327803 - RNA, 19 nt, Artificial Sequence
  Description of Artificial Sequence: Synthetic oligonucleotide
acuuuuguaauguauaagu

SEQ ID NO: 1327804 - RNA, 19 nt, Artificial Sequence
  Description of Artificial Sequence: Synthetic oligonucleotide
agauaggucaugcaagagc

SEQ ID NO: 1327805 - RNA, 19 nt, Artificial Sequence
  Description of Artificial Sequence: Synthetic oligonucleotide
caaaauagcccucacaccc

SEQ ID NO: 1327806 - RNA, 19 nt, Artificial Sequence
  Description of Artificial Sequence: Synthetic oligonucleotide
aguuguuugaauaaucuac

SEQ ID NO: 1327807 - RNA, 19 nt, Artificial Sequence
  Description of Artificial Sequence: Synthetic oligonucleotide
acaaaauugucacuuuugg

SEQ ID NO: 1327808 - RNA, 19 nt, Artificial Sequence
  Description of Artificial Sequence: Synthetic oligonucleotide
uuucauuguagacacaaga

SEQ ID NO: 1327809 - RNA, 19 nt, Artificial Sequence
  Description of Artificial Sequence: Synthetic oligonucleotide
aacacaagauaggucaugc

SEQ ID NO: 1327810 - RNA, 19 nt, Artificial Sequence
  Description of Artificial Sequence: Synthetic oligonucleotide
aaagguuuguacuuacucu

SEQ ID NO: 1327811 - RNA, 19 nt, Artificial Sequence
  Description of Artificial Sequence: Synthetic oligonucleotide
uuuagguagguuaacacaa

SEQ ID NO: 1327812 - RNA, 19 nt, Artificial Sequence
  Description of Artificial Sequence: Synthetic oligonucleotide
ugauuuccaucauaggugg

SEQ ID NO: 1327813 - RNA, 19 nt, Artificial Sequence
  Description of Artificial Sequence: Synthetic oligonucleotide
agaaucgaccaucucaucg

SEQ ID NO: 1327814 - RNA, 19 nt, Artificial Sequence
  Description of Artificial Sequence: Synthetic oligonucleotide
ugagaauccugucugagca

SEQ ID NO: 1327815 - RNA, 19 nt, Artificial Sequence
  Description of Artificial Sequence: Synthetic oligonucleotide
gaggaguauaauuucauug

SEQ ID NO: 1327816 - RNA, 19 nt, Artificial Sequence
  Description of Artificial Sequence: Synthetic oligonucleotide
ucggcagcgacucaggacg

SEQ ID NO: 1327817 - RNA, 19 nt, Artificial Sequence
  Description of Artificial Sequence: Synthetic oligonucleotide
caauugacgagguacagag

SEQ ID NO: 1327818 - RNA, 19 nt, Artificial Sequence
  Description of Artificial Sequence: Synthetic oligonucleotide
uagguuaacacaagauagg

SEQ ID NO: 1327819 - RNA, 19 nt, Artificial Sequence
  Description of Artificial Sequence: Synthetic oligonucleotide
cuuacucuguacaaaauug

SEQ ID NO: 1327820 - RNA, 19 nt, Artificial Sequence
  Description of Artificial Sequence: Synthetic oligonucleotide
acaagaaucgaccaucuca

SEQ ID NO: 1327821 - RNA, 19 nt, Artificial Sequence
  Description of Artificial Sequence: Synthetic oligonucleotide
ugauugacuagaaaugaga

SEQ ID NO: 1327822 - RNA, 19 nt, Artificial Sequence
  Description of Artificial Sequence: Synthetic oligonucleotide
auugacgagguacagagca

SEQ ID NO: 1327823 - RNA, 19 nt, Artificial Sequence
  Description of Artificial Sequence: Synthetic oligonucleotide
guagguuaacacaagauag

SEQ ID NO: 1327824 - RNA, 19 nt, Artificial Sequence
  Description of Artificial Sequence: Synthetic oligonucleotide
auugacuagaaaugagagg

SEQ ID NO: 1327825 - RNA, 19 nt, Artificial Sequence
  Description of Artificial Sequence: Synthetic oligonucleotide
uggucuuuggcacuuacgc

SEQ ID NO: 1327826 - RNA, 19 nt, Artificial Sequence
  Description of Artificial Sequence: Synthetic oligonucleotide
aguaggaugacgauggccg

SEQ ID NO: 1327827 - RNA, 19 nt, Artificial Sequence
  Description of Artificial Sequence: Synthetic oligonucleotide
cauuguagacacaagaauc

SEQ ID NO: 1327828 - RNA, 19 nt, Artificial Sequence
  Description of Artificial Sequence: Synthetic oligonucleotide
gaaauuugacaguuguuug

SEQ ID NO: 1327829 - RNA, 19 nt, Artificial Sequence
  Description of Artificial Sequence: Synthetic oligonucleotide
auuuuaucaccaaaagcgc

SEQ ID NO: 1327830 - RNA, 19 nt, Artificial Sequence
  Description of Artificial Sequence: Synthetic oligonucleotide
aaaugagaggccucccacg

SEQ ID NO: 1327831 - RNA, 19 nt, Artificial Sequence
  Description of Artificial Sequence: Synthetic oligonucleotide
auuguagacacaagaaucg

SEQ ID NO: 1327832 - RNA, 19 nt, Artificial Sequence
  Description of Artificial Sequence: Synthetic oligonucleotide
gauugacuagaaaugagag

SEQ ID NO: 1327833 - RNA, 19 nt, Artificial Sequence
  Description of Artificial Sequence: Synthetic oligonucleotide
uacaccguggcauaggagc

SEQ ID NO: 1327834 - RNA, 19 nt, Artificial Sequence
  Description of Artificial Sequence: Synthetic oligonucleotide
uagagaauggucuggacga

SEQ ID NO: 1327835 - RNA, 19 nt, Artificial Sequence
  Description of Artificial Sequence: Synthetic oligonucleotide
gaccagugcaaacagaagc

SEQ ID NO: 1327836 - RNA, 19 nt, Artificial Sequence
  Description of Artificial Sequence: Synthetic oligonucleotide
uugaauaaucuaccaagug

SEQ ID NO: 1327837 - RNA, 19 nt, Artificial Sequence
  Description of Artificial Sequence: Synthetic oligonucleotide
guaauguauaaguaaaaga

SEQ ID NO: 1327838 - RNA, 19 nt, Artificial Sequence
  Description of Artificial Sequence: Synthetic oligonucleotide
auagcccucacacccaccc

SEQ ID NO: 1327839 - RNA, 19 nt, Artificial Sequence
  Description of Artificial Sequence: Synthetic oligonucleotide
uucagcaguaggaugacga

SEQ ID NO: 1327840 - RNA, 19 nt, Artificial Sequence
  Description of Artificial Sequence: Synthetic oligonucleotide
cuaaaagugacagguagcc

SEQ ID NO: 1327841 - RNA, 19 nt, Artificial Sequence
  Description of Artificial Sequence: Synthetic oligonucleotide
uauuuagguagguuaacac

SEQ ID NO: 1327842 - RNA, 19 nt, Artificial Sequence
  Description of Artificial Sequence: Synthetic oligonucleotide
aaauagcccucacacccac

SEQ ID NO: 1327843 - RNA, 19 nt, Artificial Sequence
  Description of Artificial Sequence: Synthetic oligonucleotide
auuugugacuaaaagugac

SEQ ID NO: 1327844 - RNA, 19 nt, Artificial Sequence
  Description of Artificial Sequence: Synthetic oligonucleotide
ucauuguagacacaagaau

SEQ ID NO: 1327845 - RNA, 19 nt, Artificial Sequence
  Description of Artificial Sequence: Synthetic oligonucleotide
uuugacaguuguuugaaua

SEQ ID NO: 1327846 - RNA, 19 nt, Artificial Sequence
  Description of Artificial Sequence: Synthetic oligonucleotide
uuugugacuaaaagugaca

SEQ ID NO: 1327847 - RNA, 19 nt, Artificial Sequence
  Description of Artificial Sequence: Synthetic oligonucleotide
gacaugguuguagugaucc

SEQ ID NO: 1327848 - RNA, 19 nt, Artificial Sequence
  Description of Artificial Sequence: Synthetic oligonucleotide
aguugugaagaccagugca

SEQ ID NO: 1327849 - RNA, 19 nt, Artificial Sequence
  Description of Artificial Sequence: Synthetic oligonucleotide
gaguauaauuucauuguag

SEQ ID NO: 1327850 - RNA, 19 nt, Artificial Sequence
  Description of Artificial Sequence: Synthetic oligonucleotide
acuaaaagugacagguagc

SEQ ID NO: 1327851 - RNA, 19 nt, Artificial Sequence
  Description of Artificial Sequence: Synthetic oligonucleotide
cauucagaaggcaggaggc

SEQ ID NO: 1327852 - RNA, 19 nt, Artificial Sequence
  Description of Artificial Sequence: Synthetic oligonucleotide
uguggugagaauccugucu

SEQ ID NO: 1327853 - RNA, 19 nt, Artificial Sequence
  Description of Artificial Sequence: Synthetic oligonucleotide
gaaaugcccgcacaggagc

SEQ ID NO: 1327854 - RNA, 19 nt, Artificial Sequence
  Description of Artificial Sequence: Synthetic oligonucleotide
uuuaucaccaaaagcgcua

SEQ ID NO: 1327855 - RNA, 19 nt, Artificial Sequence
  Description of Artificial Sequence: Synthetic oligonucleotide
ucgaccaucucaucgaagu

SEQ ID NO: 1327856 - RNA, 19 nt, Artificial Sequence
  Description of Artificial Sequence: Synthetic oligonucleotide
gaagcggcgaaagauggcg

SEQ ID NO: 1327857 - RNA, 19 nt, Artificial Sequence
  Description of Artificial Sequence: Synthetic oligonucleotide
uagaucagguacaccgugg

SEQ ID NO: 1327858 - RNA, 19 nt, Artificial Sequence
  Description of Artificial Sequence: Synthetic oligonucleotide
uuauuuagguagguuaaca

SEQ ID NO: 1327859 - RNA, 19 nt, Artificial Sequence
  Description of Artificial Sequence: Synthetic oligonucleotide
uguagacacaagaaucgac

SEQ ID NO: 1327860 - RNA, 19 nt, Artificial Sequence
  Description of Artificial Sequence: Synthetic oligonucleotide
guagacacaagaaucgacc

SEQ ID NO: 1327861 - RNA, 19 nt, Artificial Sequence
  Description of Artificial Sequence: Synthetic oligonucleotide
agaauccugucugagcacc

SEQ ID NO: 1327862 - RNA, 19 nt, Artificial Sequence
  Description of Artificial Sequence: Synthetic oligonucleotide
uugaguacuuuuguaaugu

SEQ ID NO: 1327863 - RNA, 19 nt, Artificial Sequence
  Description of Artificial Sequence: Synthetic oligonucleotide
uuagguagguuaacacaag

SEQ ID NO: 1327864 - RNA, 19 nt, Artificial Sequence
  Description of Artificial Sequence: Synthetic oligonucleotide
aaaagaagucgcaguagag

SEQ ID NO: 1327865 - RNA, 19 nt, Artificial Sequence
  Description of Artificial Sequence: Synthetic oligonucleotide
agguccauaaaaucucaag

SEQ ID NO: 1327866 - RNA, 19 nt, Artificial Sequence
  Description of Artificial Sequence: Synthetic oligonucleotide
ucuaccaagugucgaggag

SEQ ID NO: 1327867 - RNA, 19 nt, Artificial Sequence
  Description of Artificial Sequence: Synthetic oligonucleotide
ucucaucgaaguuucaaaa

SEQ ID NO: 1327868 - RNA, 19 nt, Artificial Sequence
  Description of Artificial Sequence: Synthetic oligonucleotide
aaaucucaagaggagagaa

SEQ ID NO: 1327869 - RNA, 19 nt, Artificial Sequence
  Description of Artificial Sequence: Synthetic oligonucleotide
gaccauuugaaucugacau

SEQ ID NO: 1327870 - RNA, 19 nt, Artificial Sequence
  Description of Artificial Sequence: Synthetic oligonucleotide
aucgugauuuccaucauag

SEQ ID NO: 1327871 - RNA, 19 nt, Artificial Sequence
  Description of Artificial Sequence: Synthetic oligonucleotide
aaagauaaggcaggaugca

SEQ ID NO: 1327872 - RNA, 19 nt, Artificial Sequence
  Description of Artificial Sequence: Synthetic oligonucleotide
cuagaaaugagaggccucc

SEQ ID NO: 1327873 - RNA, 19 nt, Artificial Sequence
  Description of Artificial Sequence: Synthetic oligonucleotide
gaaaugagaggccucccac

SEQ ID NO: 1327874 - RNA, 19 nt, Artificial Sequence
  Description of Artificial Sequence: Synthetic oligonucleotide
aucauaaagagcuguggaa

SEQ ID NO: 1327875 - RNA, 19 nt, Artificial Sequence
  Description of Artificial Sequence: Synthetic oligonucleotide
gguaucgugauuuccauca

SEQ ID NO: 1327876 - RNA, 19 nt, Artificial Sequence
  Description of Artificial Sequence: Synthetic oligonucleotide
accaaaagcgcuaugaaaa

SEQ ID NO: 1327877 - RNA, 19 nt, Artificial Sequence
  Description of Artificial Sequence: Synthetic oligonucleotide
uuccacucgaaagguaucg

SEQ ID NO: 1327878 - RNA, 19 nt, Artificial Sequence
  Description of Artificial Sequence: Synthetic oligonucleotide
uagguagguuaacacaaga

SEQ ID NO: 1327879 - RNA, 19 nt, Artificial Sequence
  Description of Artificial Sequence: Synthetic oligonucleotide
auggauaauuggugcugcc

SEQ ID NO: 1327880 - RNA, 19 nt, Artificial Sequence
  Description of Artificial Sequence: Synthetic oligonucleotide
aagaccagugcaaacagaa

SEQ ID NO: 1327881 - RNA, 19 nt, Artificial Sequence
  Description of Artificial Sequence: Synthetic oligonucleotide
gagcaggcaauguagauaa

SEQ ID NO: 1327882 - RNA, 19 nt, Artificial Sequence
  Description of Artificial Sequence: Synthetic oligonucleotide
uuaacacagcauuaaguuu

SEQ ID NO: 1327883 - RNA, 19 nt, Artificial Sequence
  Description of Artificial Sequence: Synthetic oligonucleotide
aagaaucgaccaucucauc

SEQ ID NO: 1327884 - RNA, 19 nt, Artificial Sequence
  Description of Artificial Sequence: Synthetic oligonucleotide
gaaucgaccaucucaucga

SEQ ID NO: 1327885 - RNA, 19 nt, Artificial Sequence
  Description of Artificial Sequence: Synthetic oligonucleotide
aauugacgagguacagagc

SEQ ID NO: 1327886 - RNA, 19 nt, Artificial Sequence
  Description of Artificial Sequence: Synthetic oligonucleotide
gaauggauaauuggugcug

SEQ ID NO: 1327887 - RNA, 19 nt, Artificial Sequence
  Description of Artificial Sequence: Synthetic oligonucleotide
ugacuagaaaugagaggcc

SEQ ID NO: 1327888 - RNA, 19 nt, Artificial Sequence
  Description of Artificial Sequence: Synthetic oligonucleotide
uuccauuucucagaggagu

SEQ ID NO: 1327889 - RNA, 19 nt, Artificial Sequence
  Description of Artificial Sequence: Synthetic oligonucleotide
ugagcaucccgcaccugcg

SEQ ID NO: 1327890 - RNA, 19 nt, Artificial Sequence
  Description of Artificial Sequence: Synthetic oligonucleotide
accauuugaaucugacaug

SEQ ID NO: 1327891 - RNA, 19 nt, Artificial Sequence
  Description of Artificial Sequence: Synthetic oligonucleotide
auaaguaaaagaagucgca

SEQ ID NO: 1327892 - RNA, 19 nt, Artificial Sequence
  Description of Artificial Sequence: Synthetic oligonucleotide
gaaagguaucgugauuucc

SEQ ID NO: 1327893 - RNA, 19 nt, Artificial Sequence
  Description of Artificial Sequence: Synthetic oligonucleotide
uguagugauccuuggaauu

SEQ ID NO: 1327894 - RNA, 19 nt, Artificial Sequence
  Description of Artificial Sequence: Synthetic oligonucleotide
aauguaaggaauggauaau

SEQ ID NO: 1327895 - RNA, 19 nt, Artificial Sequence
  Description of Artificial Sequence: Synthetic oligonucleotide
agagaagucaugauugacu

SEQ ID NO: 1327896 - RNA, 19 nt, Artificial Sequence
  Description of Artificial Sequence: Synthetic oligonucleotide
guggccuuaaauuucaugu

SEQ ID NO: 1327897 - RNA, 19 nt, Artificial Sequence
  Description of Artificial Sequence: Synthetic oligonucleotide
uguacuuacucuguacaaa

SEQ ID NO: 1327898 - RNA, 19 nt, Artificial Sequence
  Description of Artificial Sequence: Synthetic oligonucleotide
aucaccaaaagcgcuauga

SEQ ID NO: 1327899 - RNA, 19 nt, Artificial Sequence
  Description of Artificial Sequence: Synthetic oligonucleotide
ucgaaagguaucgugauuu

SEQ ID NO: 1327900 - RNA, 19 nt, Artificial Sequence
  Description of Artificial Sequence: Synthetic oligonucleotide
aaagauugucaaucauuuu

SEQ ID NO: 1327901 - RNA, 19 nt, Artificial Sequence
  Description of Artificial Sequence: Synthetic oligonucleotide
gaaguaaaagcgccagauc

SEQ ID NO: 1327902 - RNA, 19 nt, Artificial Sequence
  Description of Artificial Sequence: Synthetic oligonucleotide
auagguggccuuaaauuuc

SEQ ID NO: 1327903 - RNA, 19 nt, Artificial Sequence
  Description of Artificial Sequence: Synthetic oligonucleotide
uucauagauguauuauaua

SEQ ID NO: 1327904 - RNA, 19 nt, Artificial Sequence
  Description of Artificial Sequence: Synthetic oligonucleotide
gugacuaaaagugacaggu

SEQ ID NO: 1327905 - RNA, 19 nt, Artificial Sequence
  Description of Artificial Sequence: Synthetic oligonucleotide
agugucgaggaguauaauu

SEQ ID NO: 1327906 - RNA, 19 nt, Artificial Sequence
  Description of Artificial Sequence: Synthetic oligonucleotide
gaagauguucauggcggcg

SEQ ID NO: 1327907 - RNA, 19 nt, Artificial Sequence
  Description of Artificial Sequence: Synthetic oligonucleotide
ucgugauuuccaucauagg

SEQ ID NO: 1327908 - RNA, 19 nt, Artificial Sequence
  Description of Artificial Sequence: Synthetic oligonucleotide
aagguaucgugauuuccau

SEQ ID NO: 1327909 - RNA, 19 nt, Artificial Sequence
  Description of Artificial Sequence: Synthetic oligonucleotide
agaggaguagaguccuguc

SEQ ID NO: 1327910 - RNA, 19 nt, Artificial Sequence
  Description of Artificial Sequence: Synthetic oligonucleotide
aguacuuuuguaauguaua

SEQ ID NO: 1327911 - RNA, 19 nt, Artificial Sequence
  Description of Artificial Sequence: Synthetic oligonucleotide
auauagugaaaugaaugaa

SEQ ID NO: 1327912 - RNA, 19 nt, Artificial Sequence
  Description of Artificial Sequence: Synthetic oligonucleotide
uuguacuuacucuguacaa

SEQ ID NO: 1327913 - RNA, 19 nt, Artificial Sequence
  Description of Artificial Sequence: Synthetic oligonucleotide
cagguaucgaguugugaag

SEQ ID NO: 1327914 - RNA, 19 nt, Artificial Sequence
  Description of Artificial Sequence: Synthetic oligonucleotide
ugucgaggaguauaauuuc

SEQ ID NO: 1327915 - RNA, 19 nt, Artificial Sequence
  Description of Artificial Sequence: Synthetic oligonucleotide
guagaucagguacaccgug

SEQ ID NO: 1327916 - RNA, 19 nt, Artificial Sequence
  Description of Artificial Sequence: Synthetic oligonucleotide
agguuaacacaagauaggu

SEQ ID NO: 1327917 - RNA, 19 nt, Artificial Sequence
  Description of Artificial Sequence: Synthetic oligonucleotide
cugagcaucccgcaccugc

SEQ ID NO: 1327918 - RNA, 19 nt, Artificial Sequence
  Description of Artificial Sequence: Synthetic oligonucleotide
ucgaggaguauaauuucau

SEQ ID NO: 1327919 - RNA, 19 nt, Artificial Sequence
  Description of Artificial Sequence: Synthetic oligonucleotide
ccauuugaaucugacaugg

SEQ ID NO: 1327920 - RNA, 19 nt, Artificial Sequence
  Description of Artificial Sequence: Synthetic oligonucleotide
agaccauuugaaucugaca

SEQ ID NO: 1327921 - RNA, 19 nt, Artificial Sequence
  Description of Artificial Sequence: Synthetic oligonucleotide
ggcaauguagauaagcuuc

SEQ ID NO: 1327922 - RNA, 19 nt, Artificial Sequence
  Description of Artificial Sequence: Synthetic oligonucleotide
acauuuccauucagaaggc

SEQ ID NO: 1327923 - RNA, 19 nt, Artificial Sequence
  Description of Artificial Sequence: Synthetic oligonucleotide
uccgcacugagcaucccgc

SEQ ID NO: 1327924 - RNA, 19 nt, Artificial Sequence
  Description of Artificial Sequence: Synthetic oligonucleotide
aaaugcccgcacaggagcg

SEQ ID NO: 1327925 - RNA, 19 nt, Artificial Sequence
  Description of Artificial Sequence: Synthetic oligonucleotide
augauugacuagaaaugag

SEQ ID NO: 1327926 - RNA, 19 nt, Artificial Sequence
  Description of Artificial Sequence: Synthetic oligonucleotide
uggauaauuggugcugcca

SEQ ID NO: 1327927 - RNA, 19 nt, Artificial Sequence
  Description of Artificial Sequence: Synthetic oligonucleotide
agguaucgugauuuccauc

SEQ ID NO: 1327928 - RNA, 19 nt, Artificial Sequence
  Description of Artificial Sequence: Synthetic oligonucleotide
aaucgaccaucucaucgaa

SEQ ID NO: 1327929 - RNA, 19 nt, Artificial Sequence
  Description of Artificial Sequence: Synthetic oligonucleotide
gaugacgauggccgccagg

SEQ ID NO: 1327930 - RNA, 19 nt, Artificial Sequence
  Description of Artificial Sequence: Synthetic oligonucleotide
cucgaaguaaaagcgccag

SEQ ID NO: 1327931 - RNA, 19 nt, Artificial Sequence
  Description of Artificial Sequence: Synthetic oligonucleotide
agcggcgaaagauggcggg

SEQ ID NO: 1327932 - RNA, 19 nt, Artificial Sequence
  Description of Artificial Sequence: Synthetic oligonucleotide
ucgaaguaaaagcgccaga

SEQ ID NO: 1327933 - RNA, 19 nt, Artificial Sequence
  Description of Artificial Sequence: Synthetic oligonucleotide
uaacacaagauaggucaug

SEQ ID NO: 1327934 - RNA, 19 nt, Artificial Sequence
  Description of Artificial Sequence: Synthetic oligonucleotide
aggaagcggcgaaagaugg

SEQ ID NO: 1327935 - RNA, 19 nt, Artificial Sequence
  Description of Artificial Sequence: Synthetic oligonucleotide
acuagaaaugagaggccuc

SEQ ID NO: 1327936 - RNA, 19 nt, Artificial Sequence
  Description of Artificial Sequence: Synthetic oligonucleotide
uuguagacacaagaaucga

SEQ ID NO: 1327937 - RNA, 19 nt, Artificial Sequence
  Description of Artificial Sequence: Synthetic oligonucleotide
uccaauugacgagguacag

SEQ ID NO: 1327938 - RNA, 19 nt, Artificial Sequence
  Description of Artificial Sequence: Synthetic oligonucleotide
uccauuucucagaggagua

SEQ ID NO: 1327939 - RNA, 19 nt, Artificial Sequence
  Description of Artificial Sequence: Synthetic oligonucleotide
gaggaagcggcgaaagaug

SEQ ID NO: 1327940 - RNA, 19 nt, Artificial Sequence
  Description of Artificial Sequence: Synthetic oligonucleotide
aauagcccucacacccacc

SEQ ID NO: 1327941 - RNA, 19 nt, Artificial Sequence
  Description of Artificial Sequence: Synthetic oligonucleotide
acucgaaagguaucgugau

SEQ ID NO: 1327942 - RNA, 19 nt, Artificial Sequence
  Description of Artificial Sequence: Synthetic oligonucleotide
uaucgugauuuccaucaua

SEQ ID NO: 1327943 - RNA, 19 nt, Artificial Sequence
  Description of Artificial Sequence: Synthetic oligonucleotide
acccucgaaguaaaagcgc

SEQ ID NO: 1327944 - RNA, 19 nt, Artificial Sequence
  Description of Artificial Sequence: Synthetic oligonucleotide
uccuccgcauccccgaaga

SEQ ID NO: 1327945 - RNA, 19 nt, Artificial Sequence
  Description of Artificial Sequence: Synthetic oligonucleotide
cacucgaaagguaucguga

SEQ ID NO: 1327946 - RNA, 19 nt, Artificial Sequence
  Description of Artificial Sequence: Synthetic oligonucleotide
uucuccgcacugagcaucc

SEQ ID NO: 1327947 - RNA, 19 nt, Artificial Sequence
  Description of Artificial Sequence: Synthetic oligonucleotide
agaauguaaggaauggaua

SEQ ID NO: 1327948 - RNA, 19 nt, Artificial Sequence
  Description of Artificial Sequence: Synthetic oligonucleotide
cuuacgcuggcagacugag

SEQ ID NO: 1327949 - RNA, 19 nt, Artificial Sequence
  Description of Artificial Sequence: Synthetic oligonucleotide
agccauuuguguuccauuu

SEQ ID NO: 1327950 - RNA, 19 nt, Artificial Sequence
  Description of Artificial Sequence: Synthetic oligonucleotide
guaucgaguugugaagacc

SEQ ID NO: 1327951 - RNA, 19 nt, Artificial Sequence
  Description of Artificial Sequence: Synthetic oligonucleotide
ggagaagguccauaaaauc

SEQ ID NO: 1327952 - RNA, 19 nt, Artificial Sequence
  Description of Artificial Sequence: Synthetic oligonucleotide
ucuggacgacaccagccac

SEQ ID NO: 1327953 - RNA, 19 nt, Artificial Sequence
  Description of Artificial Sequence: Synthetic oligonucleotide
uugacgagguacagagcac

SEQ ID NO: 1327954 - RNA, 19 nt, Artificial Sequence
  Description of Artificial Sequence: Synthetic oligonucleotide
agaaaugcccgcacaggag

SEQ ID NO: 1327955 - RNA, 19 nt, Artificial Sequence
  Description of Artificial Sequence: Synthetic oligonucleotide
agacacaagaaucgaccau

SEQ ID NO: 1327956 - RNA, 19 nt, Artificial Sequence
  Description of Artificial Sequence: Synthetic oligonucleotide
uggccuuaaauuucaugua

SEQ ID NO: 1327957 - RNA, 19 nt, Artificial Sequence
  Description of Artificial Sequence: Synthetic oligonucleotide
ucaggacgcggcgacagcc

SEQ ID NO: 1327958 - RNA, 19 nt, Artificial Sequence
  Description of Artificial Sequence: Synthetic oligonucleotide
cggaagauguucauggcgg

SEQ ID NO: 1327959 - RNA, 19 nt, Artificial Sequence
  Description of Artificial Sequence: Synthetic oligonucleotide
gacgagguacagagcacgg

SEQ ID NO: 1327960 - RNA, 19 nt, Artificial Sequence
  Description of Artificial Sequence: Synthetic oligonucleotide
agucaugauugacuagaaa

SEQ ID NO: 1327961 - RNA, 19 nt, Artificial Sequence
  Description of Artificial Sequence: Synthetic oligonucleotide
uagugauccuuggaauuug

SEQ ID NO: 1327962 - RNA, 19 nt, Artificial Sequence
  Description of Artificial Sequence: Synthetic oligonucleotide
agguaucgaguugugaaga

SEQ ID NO: 1327963 - RNA, 19 nt, Artificial Sequence
  Description of Artificial Sequence: Synthetic oligonucleotide
aagaaacccucgaaguaaa

SEQ ID NO: 1327964 - RNA, 19 nt, Artificial Sequence
  Description of Artificial Sequence: Synthetic oligonucleotide
ucagcaguaggaugacgau

SEQ ID NO: 1327965 - RNA, 19 nt, Artificial Sequence
  Description of Artificial Sequence: Synthetic oligonucleotide
ugccccaauucaucuacac

SEQ ID NO: 1327966 - RNA, 19 nt, Artificial Sequence
  Description of Artificial Sequence: Synthetic oligonucleotide
ugacaguuguuugaauaau

SEQ ID NO: 1327967 - RNA, 19 nt, Artificial Sequence
  Description of Artificial Sequence: Synthetic oligonucleotide
caagagcccaaguuuaaaa

SEQ ID NO: 1327968 - RNA, 19 nt, Artificial Sequence
  Description of Artificial Sequence: Synthetic oligonucleotide
ugaguacuuuuguaaugua

SEQ ID NO: 1327969 - RNA, 19 nt, Artificial Sequence
  Description of Artificial Sequence: Synthetic oligonucleotide
auuggugcugccaauuaaa

SEQ ID NO: 1327970 - RNA, 19 nt, Artificial Sequence
  Description of Artificial Sequence: Synthetic oligonucleotide
uggacugagccuccugguc

SEQ ID NO: 1327971 - RNA, 19 nt, Artificial Sequence
  Description of Artificial Sequence: Synthetic oligonucleotide
gaugcaguggacugagccu

SEQ ID NO: 1327972 - RNA, 19 nt, Artificial Sequence
  Description of Artificial Sequence: Synthetic oligonucleotide
auaauuggugcugccaauu

SEQ ID NO: 1327973 - RNA, 19 nt, Artificial Sequence
  Description of Artificial Sequence: Synthetic oligonucleotide
agguacagagcacgguaga

SEQ ID NO: 1327974 - RNA, 19 nt, Artificial Sequence
  Description of Artificial Sequence: Synthetic oligonucleotide
ucgaguugugaagaccagu

SEQ ID NO: 1327975 - RNA, 19 nt, Artificial Sequence
  Description of Artificial Sequence: Synthetic oligonucleotide
caagaaucgaccaucucau

SEQ ID NO: 1327976 - RNA, 19 nt, Artificial Sequence
  Description of Artificial Sequence: Synthetic oligonucleotide
guaggaugacgauggccgc

SEQ ID NO: 1327977 - RNA, 19 nt, Artificial Sequence
  Description of Artificial Sequence: Synthetic oligonucleotide
aagcggcgaaagauggcgg

SEQ ID NO: 1327978 - RNA, 19 nt, Artificial Sequence
  Description of Artificial Sequence: Synthetic oligonucleotide
aagucgcaguagagaaugg

SEQ ID NO: 1327979 - RNA, 19 nt, Artificial Sequence
  Description of Artificial Sequence: Synthetic oligonucleotide
caagugucgaggaguauaa

SEQ ID NO: 1327980 - RNA, 19 nt, Artificial Sequence
  Description of Artificial Sequence: Synthetic oligonucleotide
auuccacucgaaagguauc

SEQ ID NO: 1327981 - RNA, 19 nt, Artificial Sequence
  Description of Artificial Sequence: Synthetic oligonucleotide
ggauaauuggugcugccaa

SEQ ID NO: 1327982 - RNA, 19 nt, Artificial Sequence
  Description of Artificial Sequence: Synthetic oligonucleotide
gguggccuuaaauuucaug

SEQ ID NO: 1327983 - RNA, 19 nt, Artificial Sequence
  Description of Artificial Sequence: Synthetic oligonucleotide
cuccgcacugagcaucccg

SEQ ID NO: 1327984 - RNA, 19 nt, Artificial Sequence
  Description of Artificial Sequence: Synthetic oligonucleotide
cauagguggccuuaaauuu

SEQ ID NO: 1327985 - RNA, 19 nt, Artificial Sequence
  Description of Artificial Sequence: Synthetic oligonucleotide
ccggaagauguucauggcg

SEQ ID NO: 1327986 - RNA, 19 nt, Artificial Sequence
  Description of Artificial Sequence: Synthetic oligonucleotide
gauccagguaucgaguugu

SEQ ID NO: 1327987 - RNA, 19 nt, Artificial Sequence
  Description of Artificial Sequence: Synthetic oligonucleotide
cacuuacgcuggcagacug

SEQ ID NO: 1327988 - RNA, 19 nt, Artificial Sequence
  Description of Artificial Sequence: Synthetic oligonucleotide
agguagguuaacacaagau

SEQ ID NO: 1327989 - RNA, 19 nt, Artificial Sequence
  Description of Artificial Sequence: Synthetic oligonucleotide
cuccgcauccccgaagagc

SEQ ID NO: 1327990 - RNA, 19 nt, Artificial Sequence
  Description of Artificial Sequence: Synthetic oligonucleotide
cauguagaucagguacacc

SEQ ID NO: 1327991 - RNA, 19 nt, Artificial Sequence
  Description of Artificial Sequence: Synthetic oligonucleotide
ucccuugaguacuuuugua

SEQ ID NO: 1327992 - RNA, 19 nt, Artificial Sequence
  Description of Artificial Sequence: Synthetic oligonucleotide
aagucaugauugacuagaa

SEQ ID NO: 1327993 - RNA, 19 nt, Artificial Sequence
  Description of Artificial Sequence: Synthetic oligonucleotide
aucuacacauugaauuuau

SEQ ID NO: 1327994 - RNA, 19 nt, Artificial Sequence
  Description of Artificial Sequence: Synthetic oligonucleotide
agucgcaguagagaauggu

SEQ ID NO: 1327995 - RNA, 19 nt, Artificial Sequence
  Description of Artificial Sequence: Synthetic oligonucleotide
acucaggacgcggcgacag

SEQ ID NO: 1327996 - RNA, 19 nt, Artificial Sequence
  Description of Artificial Sequence: Synthetic oligonucleotide
uaaaagcgccagauccaau

SEQ ID NO: 1327997 - RNA, 19 nt, Artificial Sequence
  Description of Artificial Sequence: Synthetic oligonucleotide
auucagaaggcaggaggcu

SEQ ID NO: 1327998 - RNA, 19 nt, Artificial Sequence
  Description of Artificial Sequence: Synthetic oligonucleotide
gucgaggaguauaauuuca

SEQ ID NO: 1327999 - RNA, 19 nt, Artificial Sequence
  Description of Artificial Sequence: Synthetic oligonucleotide
uuacgcuggcagacugagc

SEQ ID NO: 1328000 - RNA, 19 nt, Artificial Sequence
  Description of Artificial Sequence: Synthetic oligonucleotide
ggugagaauccugucugag

SEQ ID NO: 1328001 - RNA, 19 nt, Artificial Sequence
  Description of Artificial Sequence: Synthetic oligonucleotide
gguaucgaguugugaagac

SEQ ID NO: 1328002 - RNA, 19 nt, Artificial Sequence
  Description of Artificial Sequence: Synthetic oligonucleotide
gaggccucccacgggaacc

SEQ ID NO: 1328003 - RNA, 19 nt, Artificial Sequence
  Description of Artificial Sequence: Synthetic oligonucleotide
acaugguuguagugauccu

SEQ ID NO: 1328004 - RNA, 19 nt, Artificial Sequence
  Description of Artificial Sequence: Synthetic oligonucleotide
uggcacuuacgcuggcaga

SEQ ID NO: 1328005 - RNA, 19 nt, Artificial Sequence
  Description of Artificial Sequence: Synthetic oligonucleotide
ggaguauaauuucauugua

SEQ ID NO: 1328006 - RNA, 19 nt, Artificial Sequence
  Description of Artificial Sequence: Synthetic oligonucleotide
acacaagaaucgaccaucu

SEQ ID NO: 1328007 - RNA, 19 nt, Artificial Sequence
  Description of Artificial Sequence: Synthetic oligonucleotide
agauggcgggagcgggcgc

SEQ ID NO: 1328008 - RNA, 19 nt, Artificial Sequence
  Description of Artificial Sequence: Synthetic oligonucleotide
gauaauuggugcugccaau

SEQ ID NO: 1328009 - RNA, 19 nt, Artificial Sequence
  Description of Artificial Sequence: Synthetic oligonucleotide
accguggcauaggagcagg

SEQ ID NO: 1328010 - RNA, 19 nt, Artificial Sequence
  Description of Artificial Sequence: Synthetic oligonucleotide
uccaucauagguggccuua

SEQ ID NO: 1328011 - RNA, 19 nt, Artificial Sequence
  Description of Artificial Sequence: Synthetic oligonucleotide
aagguccauaaaaucucaa

SEQ ID NO: 1328012 - RNA, 19 nt, Artificial Sequence
  Description of Artificial Sequence: Synthetic oligonucleotide
agguacaccguggcauagg

SEQ ID NO: 1328013 - RNA, 19 nt, Artificial Sequence
  Description of Artificial Sequence: Synthetic oligonucleotide
gacagccccugagagagga

SEQ ID NO: 1328014 - RNA, 19 nt, Artificial Sequence
  Description of Artificial Sequence: Synthetic oligonucleotide
gucugagcacccugaagga

SEQ ID NO: 1328015 - RNA, 19 nt, Artificial Sequence
  Description of Artificial Sequence: Synthetic oligonucleotide
gaguacuuuuguaauguau

SEQ ID NO: 1328016 - RNA, 19 nt, Artificial Sequence
  Description of Artificial Sequence: Synthetic oligonucleotide
gagaauggucuggacgaca

SEQ ID NO: 1328017 - RNA, 19 nt, Artificial Sequence
  Description of Artificial Sequence: Synthetic oligonucleotide
ugacgauggccgccaggug

SEQ ID NO: 1328018 - RNA, 19 nt, Artificial Sequence
  Description of Artificial Sequence: Synthetic oligonucleotide
uccacucgaaagguaucgu

SEQ ID NO: 1328019 - RNA, 19 nt, Artificial Sequence
  Description of Artificial Sequence: Synthetic oligonucleotide
gguuaacacaagauagguc

SEQ ID NO: 1328020 - RNA, 19 nt, Artificial Sequence
  Description of Artificial Sequence: Synthetic oligonucleotide
acgggaaccaccagaaauu

SEQ ID NO: 1328021 - RNA, 19 nt, Artificial Sequence
  Description of Artificial Sequence: Synthetic oligonucleotide
gugauccuuggaauuugug

SEQ ID NO: 1328022 - RNA, 19 nt, Artificial Sequence
  Description of Artificial Sequence: Synthetic oligonucleotide
ggaauggauaauuggugcu

SEQ ID NO: 1328023 - RNA, 19 nt, Artificial Sequence
  Description of Artificial Sequence: Synthetic oligonucleotide
cacaagaaucgaccaucuc

SEQ ID NO: 1328024 - RNA, 19 nt, Artificial Sequence
  Description of Artificial Sequence: Synthetic oligonucleotide
agugauccuuggaauuugu

SEQ ID NO: 1328025 - RNA, 19 nt, Artificial Sequence
  Description of Artificial Sequence: Synthetic oligonucleotide
agauccaauugacgaggua

SEQ ID NO: 1328026 - RNA, 19 nt, Artificial Sequence
  Description of Artificial Sequence: Synthetic oligonucleotide
caucucaucgaaguuucaa

SEQ ID NO: 1328027 - RNA, 19 nt, Artificial Sequence
  Description of Artificial Sequence: Synthetic oligonucleotide
cugcgcuguggugagaauc

SEQ ID NO: 1328028 - RNA, 19 nt, Artificial Sequence
  Description of Artificial Sequence: Synthetic oligonucleotide
ugagccuccuggucccuuc

SEQ ID NO: 1328029 - RNA, 19 nt, Artificial Sequence
  Description of Artificial Sequence: Synthetic oligonucleotide
gugucgaggaguauaauuu

SEQ ID NO: 1328030 - RNA, 19 nt, Artificial Sequence
  Description of Artificial Sequence: Synthetic oligonucleotide
ggucuggacgacaccagcc

SEQ ID NO: 1328031 - RNA, 19 nt, Artificial Sequence
  Description of Artificial Sequence: Synthetic oligonucleotide
cagcgacucaggacgcggc

SEQ ID NO: 1328032 - RNA, 19 nt, Artificial Sequence
  Description of Artificial Sequence: Synthetic oligonucleotide
cacgggaaccaccagaaau

SEQ ID NO: 1328033 - RNA, 19 nt, Artificial Sequence
  Description of Artificial Sequence: Synthetic oligonucleotide
ucccgcaccugcgcugugg

SEQ ID NO: 1328034 - RNA, 19 nt, Artificial Sequence
  Description of Artificial Sequence: Synthetic oligonucleotide
ccacucgaaagguaucgug

SEQ ID NO: 1328035 - RNA, 19 nt, Artificial Sequence
  Description of Artificial Sequence: Synthetic oligonucleotide
caucuacacauugaauuua

SEQ ID NO: 1328036 - RNA, 19 nt, Artificial Sequence
  Description of Artificial Sequence: Synthetic oligonucleotide
ccagaaaugcccgcacagg

SEQ ID NO: 1328037 - RNA, 19 nt, Artificial Sequence
  Description of Artificial Sequence: Synthetic oligonucleotide
aagugucgaggaguauaau

SEQ ID NO: 1328038 - RNA, 19 nt, Artificial Sequence
  Description of Artificial Sequence: Synthetic oligonucleotide
aucgaccaucucaucgaag

SEQ ID NO: 1328039 - RNA, 19 nt, Artificial Sequence
  Description of Artificial Sequence: Synthetic oligonucleotide
acaccguggcauaggagca

SEQ ID NO: 1328040 - RNA, 19 nt, Artificial Sequence
  Description of Artificial Sequence: Synthetic oligonucleotide
guacaccguggcauaggag

SEQ ID NO: 1328041 - RNA, 19 nt, Artificial Sequence
  Description of Artificial Sequence: Synthetic oligonucleotide
cagcauuaaguuucuuugu

SEQ ID NO: 1328042 - RNA, 19 nt, Artificial Sequence
  Description of Artificial Sequence: Synthetic oligonucleotide
cuaccaagugucgaggagu

SEQ ID NO: 1328043 - RNA, 19 nt, Artificial Sequence
  Description of Artificial Sequence: Synthetic oligonucleotide
gaccaucucaucgaaguuu

SEQ ID NO: 1328044 - RNA, 19 nt, Artificial Sequence
  Description of Artificial Sequence: Synthetic oligonucleotide
cccuugaguacuuuuguaa

SEQ ID NO: 1328045 - RNA, 19 nt, Artificial Sequence
  Description of Artificial Sequence: Synthetic oligonucleotide
acgagguacagagcacggu

SEQ ID NO: 1328046 - RNA, 19 nt, Artificial Sequence
  Description of Artificial Sequence: Synthetic oligonucleotide
gguuuguacuuacucugua

SEQ ID NO: 1328047 - RNA, 19 nt, Artificial Sequence
  Description of Artificial Sequence: Synthetic oligonucleotide
accagaaauuccacucgaa

SEQ ID NO: 1328048 - RNA, 19 nt, Artificial Sequence
  Description of Artificial Sequence: Synthetic oligonucleotide
gacgcggcgacagccccug

SEQ ID NO: 1328049 - RNA, 19 nt, Artificial Sequence
  Description of Artificial Sequence: Synthetic oligonucleotide
acuuacgcuggcagacuga

SEQ ID NO: 1328050 - RNA, 19 nt, Artificial Sequence
  Description of Artificial Sequence: Synthetic oligonucleotide
cagguacaccguggcauag

SEQ ID NO: 1328051 - RNA, 19 nt, Artificial Sequence
  Description of Artificial Sequence: Synthetic oligonucleotide
gcagcgacucaggacgcgg

SEQ ID NO: 1328052 - RNA, 19 nt, Artificial Sequence
  Description of Artificial Sequence: Synthetic oligonucleotide
guagugauccuuggaauuu

SEQ ID NO: 1328053 - RNA, 19 nt, Artificial Sequence
  Description of Artificial Sequence: Synthetic oligonucleotide
cucagaggaguagaguccu

SEQ ID NO: 1328054 - RNA, 19 nt, Artificial Sequence
  Description of Artificial Sequence: Synthetic oligonucleotide
caccguggcauaggagcag

SEQ ID NO: 1328055 - RNA, 19 nt, Artificial Sequence
  Description of Artificial Sequence: Synthetic oligonucleotide
caguggacugagccuccug

SEQ ID NO: 1328056 - RNA, 19 nt, Artificial Sequence
  Description of Artificial Sequence: Synthetic oligonucleotide
ccagucagccggaagaugu

SEQ ID NO: 1328057 - RNA, 19 nt, Artificial Sequence
  Description of Artificial Sequence: Synthetic oligonucleotide
ggaagcggcgaaagauggc

SEQ ID NO: 1328058 - RNA, 19 nt, Artificial Sequence
  Description of Artificial Sequence: Synthetic oligonucleotide
guagccauuuguguuccau

SEQ ID NO: 1328059 - RNA, 19 nt, Artificial Sequence
  Description of Artificial Sequence: Synthetic oligonucleotide
gucaugcaagagcccaagu

SEQ ID NO: 1328060 - RNA, 19 nt, Artificial Sequence
  Description of Artificial Sequence: Synthetic oligonucleotide
cagauccaauugacgaggu

SEQ ID NO: 1328061 - RNA, 19 nt, Artificial Sequence
  Description of Artificial Sequence: Synthetic oligonucleotide
gcaucccgcaccugcgcug

SEQ ID NO: 1328062 - RNA, 19 nt, Artificial Sequence
  Description of Artificial Sequence: Synthetic oligonucleotide
cgaaagguaucgugauuuc

SEQ ID NO: 1328063 - RNA, 19 nt, Artificial Sequence
  Description of Artificial Sequence: Synthetic oligonucleotide
ccucgaaguaaaagcgcca

SEQ ID NO: 1328064 - RNA, 19 nt, Artificial Sequence
  Description of Artificial Sequence: Synthetic oligonucleotide
agccuccggguguggaaaa

SEQ ID NO: 1328065 - RNA, 19 nt, Artificial Sequence
  Description of Artificial Sequence: Synthetic oligonucleotide
ggcgacagccccugagaga

SEQ ID NO: 1328066 - RNA, 19 nt, Artificial Sequence
  Description of Artificial Sequence: Synthetic oligonucleotide
ggagcggcugugacagaag

SEQ ID NO: 1328067 - RNA, 19 nt, Artificial Sequence
  Description of Artificial Sequence: Synthetic oligonucleotide
guaucgugauuuccaucau

SEQ ID NO: 1328068 - RNA, 19 nt, Artificial Sequence
  Description of Artificial Sequence: Synthetic oligonucleotide
cucccacgggaaccaccag

SEQ ID NO: 1328069 - RNA, 19 nt, Artificial Sequence
  Description of Artificial Sequence: Synthetic oligonucleotide
ccaauugacgagguacaga

SEQ ID NO: 1328070 - RNA, 19 nt, Artificial Sequence
  Description of Artificial Sequence: Synthetic oligonucleotide
ccaagugucgaggaguaua

SEQ ID NO: 1328071 - RNA, 19 nt, Artificial Sequence
  Description of Artificial Sequence: Synthetic oligonucleotide
gacucaggacgcggcgaca

SEQ ID NO: 1328072 - RNA, 19 nt, Artificial Sequence
  Description of Artificial Sequence: Synthetic oligonucleotide
ggcagcgacucaggacgcg

SEQ ID NO: 1328073 - RNA, 19 nt, Artificial Sequence
  Description of Artificial Sequence: Synthetic oligonucleotide
ccccugagagaggaagcgg

SEQ ID NO: 1328074 - RNA, 19 nt, Artificial Sequence
  Description of Artificial Sequence: Synthetic oligonucleotide
gcacaggagcgcgucuucc

SEQ ID NO: 1328075 - RNA, 19 nt, Artificial Sequence
  Description of Artificial Sequence: Synthetic oligonucleotide
ggcucggcagcgacucagg

SEQ ID NO: 1328076 - RNA, 19 nt, Artificial Sequence
  Description of Artificial Sequence: Synthetic oligonucleotide
gcaagagcccaaguuuaaa

SEQ ID NO: 1328077 - RNA, 19 nt, Artificial Sequence
  Description of Artificial Sequence: Synthetic oligonucleotide
gcggcgacagccccugaga

SEQ ID NO: 1328078 - RNA, 19 nt, Artificial Sequence
  Description of Artificial Sequence: Synthetic oligonucleotide
gggagcggcugugacagaa

SEQ ID NO: 1328079 - RNA, 19 nt, Artificial Sequence
  Description of Artificial Sequence: Synthetic oligonucleotide
agagcacgguagaggccca

SEQ ID NO: 1328080 - RNA, 19 nt, Artificial Sequence
  Description of Artificial Sequence: Synthetic oligonucleotide
cgagguacagagcacggua

SEQ ID NO: 1328081 - RNA, 19 nt, Artificial Sequence
  Description of Artificial Sequence: Synthetic oligonucleotide
ccguggcauaggagcaggc

SEQ ID NO: 1328082 - RNA, 19 nt, Artificial Sequence
  Description of Artificial Sequence: Synthetic oligonucleotide
cgaaguaaaagcgccagau

SEQ ID NO: 1328083 - RNA, 19 nt, Artificial Sequence
  Description of Artificial Sequence: Synthetic oligonucleotide
cgacucaggacgcggcgac

SEQ ID NO: 1328084 - RNA, 19 nt, Artificial Sequence
  Description of Artificial Sequence: Synthetic oligonucleotide
aucccgcaccugcgcugug

SEQ ID NO: 1328085 - RNA, 19 nt, Artificial Sequence
  Description of Artificial Sequence: Synthetic oligonucleotide
cgcaccugcgcugugguga

SEQ ID NO: 1328086 - RNA, 19 nt, Artificial Sequence
  Description of Artificial Sequence: Synthetic oligonucleotide
ccuccgcauccccgaagag

SEQ ID NO: 1328087 - RNA, 19 nt, Artificial Sequence
  Description of Artificial Sequence: Synthetic oligonucleotide
gcggcgaaagauggcggga

SEQ ID NO: 1328088 - RNA, 19 nt, Artificial Sequence
  Description of Artificial Sequence: Synthetic oligonucleotide
ggagcgcgucuuccagauc

SEQ ID NO: 1328089 - RNA, 19 nt, Artificial Sequence
  Description of Artificial Sequence: Synthetic oligonucleotide
caucccgcaccugcgcugu

SEQ ID NO: 1328090 - RNA, 19 nt, Artificial Sequence
  Description of Artificial Sequence: Synthetic oligonucleotide
ggucggcgcggcgcagcgg

SEQ ID NO: 1328091 - RNA, 19 nt, Artificial Sequence
  Description of Artificial Sequence: Synthetic oligonucleotide
cgaggaguauaauuucauu

SEQ ID NO: 1328092 - RNA, 19 nt, Artificial Sequence
  Description of Artificial Sequence: Synthetic oligonucleotide
cgcacaggagcgcgucuuc

SEQ ID NO: 1328093 - RNA, 19 nt, Artificial Sequence
  Description of Artificial Sequence: Synthetic oligonucleotide
gcacuuacgcuggcagacu

SEQ ID NO: 1328094 - RNA, 19 nt, Artificial Sequence
  Description of Artificial Sequence: Synthetic oligonucleotide
cggggcucggcagcgacuc

SEQ ID NO: 1328095 - RNA, 19 nt, Artificial Sequence
  Description of Artificial Sequence: Synthetic oligonucleotide
acgcggcgacagccccuga

SEQ ID NO: 1328096 - RNA, 19 nt, Artificial Sequence
  Description of Artificial Sequence: Synthetic oligonucleotide
cggucggcgcggcgcagcg

SEQ ID NO: 1328097 - RNA, 19 nt, Artificial Sequence
  Description of Artificial Sequence: Synthetic oligonucleotide
gcggucggcgcggcgcagc

SEQ ID NO: 1328098 - RNA, 19 nt, Artificial Sequence
  Description of Artificial Sequence: Synthetic oligonucleotide
gcccgcacaggagcgcguc

SEQ ID NO: 1328099 - RNA, 19 nt, Artificial Sequence
  Description of Artificial Sequence: Synthetic oligonucleotide
ccgcaccugcgcuguggug

SEQ ID NO: 1328100 - RNA, 19 nt, Artificial Sequence
  Description of Artificial Sequence: Synthetic oligonucleotide
gcuggcagacugagcuucu

SEQ ID NO: 1328101 - RNA, 19 nt, Artificial Sequence
  Description of Artificial Sequence: Synthetic oligonucleotide
ggcggucggcgcggcgcag

SEQ ID NO: 1328102 - RNA, 19 nt, Artificial Sequence
  Description of Artificial Sequence: Synthetic oligonucleotide
gcaguggacugagccuccu

SEQ ID NO: 1328103 - RNA, 19 nt, Artificial Sequence
  Description of Artificial Sequence: Synthetic oligonucleotide
ccgcauccccgaagagcca

SEQ ID NO: 1328104 - RNA, 19 nt, Artificial Sequence
  Description of Artificial Sequence: Synthetic oligonucleotide
ggacgcggcgacagccccu

SEQ ID NO: 1328105 - RNA, 19 nt, Artificial Sequence
  Description of Artificial Sequence: Synthetic oligonucleotide
cgaccaucucaucgaaguu

SEQ ID NO: 1328106 - RNA, 19 nt, Artificial Sequence
  Description of Artificial Sequence: Synthetic oligonucleotide
ccugcgcuguggugagaau

SEQ ID NO: 1328107 - RNA, 19 nt, Artificial Sequence
  Description of Artificial Sequence: Synthetic oligonucleotide
cggcggucggcgcggcgca

SEQ ID NO: 1328108 - RNA, 19 nt, Artificial Sequence
  Description of Artificial Sequence: Synthetic oligonucleotide
  modified_base (6)..(6): a, c, u, g, unknown or other
aaaacnuacaucuuaggac

SEQ ID NO: 1328109 - RNA, 19 nt, Artificial Sequence
  Description of Artificial Sequence: Synthetic oligonucleotide
aacuguuauuauuagaagc

SEQ ID NO: 1328110 - RNA, 19 nt, Artificial Sequence
  Description of Artificial Sequence: Synthetic oligonucleotide
aauucucaugaacacaagc

SEQ ID NO: 1328111 - RNA, 19 nt, Artificial Sequence
  Description of Artificial Sequence: Synthetic oligonucleotide
uguguaaucuauaugcgcg

SEQ ID NO: 1328112 - RNA, 19 nt, Artificial Sequence
  Description of Artificial Sequence: Synthetic oligonucleotide
aucaagauaccaaagaucc

SEQ ID NO: 1328113 - RNA, 19 nt, Artificial Sequence
  Description of Artificial Sequence: Synthetic oligonucleotide
aaaagauagccuucaaccg

SEQ ID NO: 1328114 - RNA, 19 nt, Artificial Sequence
  Description of Artificial Sequence: Synthetic oligonucleotide
caaaagauagccuucaacc

SEQ ID NO: 1328115 - RNA, 19 nt, Artificial Sequence
  Description of Artificial Sequence: Synthetic oligonucleotide
uguuucuaaaucaagcugc

SEQ ID NO: 1328116 - RNA, 19 nt, Artificial Sequence
  Description of Artificial Sequence: Synthetic oligonucleotide
aaauucggacuguagaagg

SEQ ID NO: 1328117 - RNA, 19 nt, Artificial Sequence
  Description of Artificial Sequence: Synthetic oligonucleotide
uauauaauagcaguauggg

SEQ ID NO: 1328118 - RNA, 19 nt, Artificial Sequence
  Description of Artificial Sequence: Synthetic oligonucleotide
aagccaucgaacuugagug

SEQ ID NO: 1328119 - RNA, 19 nt, Artificial Sequence
  Description of Artificial Sequence: Synthetic oligonucleotide
auugcaacagcacaguguc

SEQ ID NO: 1328120 - RNA, 19 nt, Artificial Sequence
  Description of Artificial Sequence: Synthetic oligonucleotide
uugguagcaaauaaaacug

SEQ ID NO: 1328121 - RNA, 19 nt, Artificial Sequence
  Description of Artificial Sequence: Synthetic oligonucleotide
auauccugaauacaauggc

SEQ ID NO: 1328122 - RNA, 19 nt, Artificial Sequence
  Description of Artificial Sequence: Synthetic oligonucleotide
auaaucuagugccaauugc

SEQ ID NO: 1328123 - RNA, 19 nt, Artificial Sequence
  Description of Artificial Sequence: Synthetic oligonucleotide
agaaucugauacuagagug

SEQ ID NO: 1328124 - RNA, 19 nt, Artificial Sequence
  Description of Artificial Sequence: Synthetic oligonucleotide
ggauguguaaucuauaugc

SEQ ID NO: 1328125 - RNA, 19 nt, Artificial Sequence
  Description of Artificial Sequence: Synthetic oligonucleotide
augacauuguuucuaaauc

SEQ ID NO: 1328126 - RNA, 19 nt, Artificial Sequence
  Description of Artificial Sequence: Synthetic oligonucleotide
auauauaauagcaguaugg

SEQ ID NO: 1328127 - RNA, 19 nt, Artificial Sequence
  Description of Artificial Sequence: Synthetic oligonucleotide
cauuguuucuaaaucaagc

SEQ ID NO: 1328128 - RNA, 19 nt, Artificial Sequence
  Description of Artificial Sequence: Synthetic oligonucleotide
acaguaaauucucaugaac

SEQ ID NO: 1328129 - RNA, 19 nt, Artificial Sequence
  Description of Artificial Sequence: Synthetic oligonucleotide
auuauuagaagcauuaggu

SEQ ID NO: 1328130 - RNA, 19 nt, Artificial Sequence
  Description of Artificial Sequence: Synthetic oligonucleotide
auguguaaucuauaugcgc

SEQ ID NO: 1328131 - RNA, 19 nt, Artificial Sequence
  Description of Artificial Sequence: Synthetic oligonucleotide
ucucuuuagaaaauggcgu

SEQ ID NO: 1328132 - RNA, 19 nt, Artificial Sequence
  Description of Artificial Sequence: Synthetic oligonucleotide
aagggccuauuccacaacc

SEQ ID NO: 1328133 - RNA, 19 nt, Artificial Sequence
  Description of Artificial Sequence: Synthetic oligonucleotide
uaaucuagugccaauugca

SEQ ID NO: 1328134 - RNA, 19 nt, Artificial Sequence
  Description of Artificial Sequence: Synthetic oligonucleotide
uuauuagaagcauuaggug

SEQ ID NO: 1328135 - RNA, 19 nt, Artificial Sequence
  Description of Artificial Sequence: Synthetic oligonucleotide
ucauucuuugcugauaucc

SEQ ID NO: 1328136 - RNA, 19 nt, Artificial Sequence
  Description of Artificial Sequence: Synthetic oligonucleotide
uauaaucuagugccaauug

SEQ ID NO: 1328137 - RNA, 19 nt, Artificial Sequence
  Description of Artificial Sequence: Synthetic oligonucleotide
aaucuguugcucugaaauc

SEQ ID NO: 1328138 - RNA, 19 nt, Artificial Sequence
  Description of Artificial Sequence: Synthetic oligonucleotide
uuguuucuaaaucaagcug

SEQ ID NO: 1328139 - RNA, 19 nt, Artificial Sequence
  Description of Artificial Sequence: Synthetic oligonucleotide
aguaucaagauaccaaaga

SEQ ID NO: 1328140 - RNA, 19 nt, Artificial Sequence
  Description of Artificial Sequence: Synthetic oligonucleotide
guaaacuguagucagguac

SEQ ID NO: 1328141 - RNA, 19 nt, Artificial Sequence
  Description of Artificial Sequence: Synthetic oligonucleotide
uaaacuguagucagguaca

SEQ ID NO: 1328142 - RNA, 19 nt, Artificial Sequence
  Description of Artificial Sequence: Synthetic oligonucleotide
aaucuauaugcgcguuugc

SEQ ID NO: 1328143 - RNA, 19 nt, Artificial Sequence
  Description of Artificial Sequence: Synthetic oligonucleotide
uucuaaaucaagcugccau

SEQ ID NO: 1328144 - RNA, 19 nt, Artificial Sequence
  Description of Artificial Sequence: Synthetic oligonucleotide
uuuaagaccacaguaaauu

SEQ ID NO: 1328145 - RNA, 19 nt, Artificial Sequence
  Description of Artificial Sequence: Synthetic oligonucleotide
uucuuaaguaaacuguagu

SEQ ID NO: 1328146 - RNA, 19 nt, Artificial Sequence
  Description of Artificial Sequence: Synthetic oligonucleotide
uggaaauucggacuguaga

SEQ ID NO: 1328147 - RNA, 19 nt, Artificial Sequence
  Description of Artificial Sequence: Synthetic oligonucleotide
uuuagcuugguauggcaag

SEQ ID NO: 1328148 - RNA, 19 nt, Artificial Sequence
  Description of Artificial Sequence: Synthetic oligonucleotide
ugaauguaaaccagcauua

SEQ ID NO: 1328149 - RNA, 19 nt, Artificial Sequence
  Description of Artificial Sequence: Synthetic oligonucleotide
uauauacuguuccugggac

SEQ ID NO: 1328150 - RNA, 19 nt, Artificial Sequence
  Description of Artificial Sequence: Synthetic oligonucleotide
aagcgagcaccacacauuc

SEQ ID NO: 1328151 - RNA, 19 nt, Artificial Sequence
  Description of Artificial Sequence: Synthetic oligonucleotide
augccuucgacauucuugg

SEQ ID NO: 1328152 - RNA, 19 nt, Artificial Sequence
  Description of Artificial Sequence: Synthetic oligonucleotide
auauccgucacacaacugu

SEQ ID NO: 1328153 - RNA, 19 nt, Artificial Sequence
  Description of Artificial Sequence: Synthetic oligonucleotide
aaccgucggcacuucaucc

SEQ ID NO: 1328154 - RNA, 19 nt, Artificial Sequence
  Description of Artificial Sequence: Synthetic oligonucleotide
uauuccacaaccauugauu

SEQ ID NO: 1328155 - RNA, 19 nt, Artificial Sequence
  Description of Artificial Sequence: Synthetic oligonucleotide
auuaucuugcaccugugcu

SEQ ID NO: 1328156 - RNA, 19 nt, Artificial Sequence
  Description of Artificial Sequence: Synthetic oligonucleotide
cuuaguugcaggcagagca

SEQ ID NO: 1328157 - RNA, 19 nt, Artificial Sequence
  Description of Artificial Sequence: Synthetic oligonucleotide
ugaucaacuggacuuguga

SEQ ID NO: 1328158 - RNA, 19 nt, Artificial Sequence
  Description of Artificial Sequence: Synthetic oligonucleotide
uacacgagguuuuaagacc

SEQ ID NO: 1328159 - RNA, 19 nt, Artificial Sequence
  Description of Artificial Sequence: Synthetic oligonucleotide
agcaaauaaaacuggcuca

SEQ ID NO: 1328160 - RNA, 19 nt, Artificial Sequence
  Description of Artificial Sequence: Synthetic oligonucleotide
uauccugaauacaauggca

SEQ ID NO: 1328161 - RNA, 19 nt, Artificial Sequence
  Description of Artificial Sequence: Synthetic oligonucleotide
ugaugcaacaugcaccucu

SEQ ID NO: 1328162 - RNA, 19 nt, Artificial Sequence
  Description of Artificial Sequence: Synthetic oligonucleotide
ucaguaucaagauaccaaa

SEQ ID NO: 1328163 - RNA, 19 nt, Artificial Sequence
  Description of Artificial Sequence: Synthetic oligonucleotide
uuaucuugcaccugugcug

SEQ ID NO: 1328164 - RNA, 19 nt, Artificial Sequence
  Description of Artificial Sequence: Synthetic oligonucleotide
aauauaaucuagugccaau

SEQ ID NO: 1328165 - RNA, 19 nt, Artificial Sequence
  Description of Artificial Sequence: Synthetic oligonucleotide
uacaucuuaggacucccag

SEQ ID NO: 1328166 - RNA, 19 nt, Artificial Sequence
  Description of Artificial Sequence: Synthetic oligonucleotide
aaugcuccagcccacgacu

SEQ ID NO: 1328167 - RNA, 19 nt, Artificial Sequence
  Description of Artificial Sequence: Synthetic oligonucleotide
uggauuaucuugcaccugu

SEQ ID NO: 1328168 - RNA, 19 nt, Artificial Sequence
  Description of Artificial Sequence: Synthetic oligonucleotide
cauaggucauccaagcgag

SEQ ID NO: 1328169 - RNA, 19 nt, Artificial Sequence
  Description of Artificial Sequence: Synthetic oligonucleotide
auucucuuggagaagguac

SEQ ID NO: 1328170 - RNA, 19 nt, Artificial Sequence
  Description of Artificial Sequence: Synthetic oligonucleotide
acaaccauugauugcagca

SEQ ID NO: 1328171 - RNA, 19 nt, Artificial Sequence
  Description of Artificial Sequence: Synthetic oligonucleotide
caucuuaggacucccagag

SEQ ID NO: 1328172 - RNA, 19 nt, Artificial Sequence
  Description of Artificial Sequence: Synthetic oligonucleotide
cugccuuugacauacuuug

SEQ ID NO: 1328173 - RNA, 19 nt, Artificial Sequence
  Description of Artificial Sequence: Synthetic oligonucleotide
agcauuaggugccaaaggu

SEQ ID NO: 1328174 - RNA, 19 nt, Artificial Sequence
  Description of Artificial Sequence: Synthetic oligonucleotide
agauaccaaagauccuugc

SEQ ID NO: 1328175 - RNA, 19 nt, Artificial Sequence
  Description of Artificial Sequence: Synthetic oligonucleotide
auauaauagcaguauggga

SEQ ID NO: 1328176 - RNA, 19 nt, Artificial Sequence
  Description of Artificial Sequence: Synthetic oligonucleotide
aaaauggcguugaugcaac

SEQ ID NO: 1328177 - RNA, 19 nt, Artificial Sequence
  Description of Artificial Sequence: Synthetic oligonucleotide
cuauaugcgcguuugcaag

SEQ ID NO: 1328178 - RNA, 19 nt, Artificial Sequence
  Description of Artificial Sequence: Synthetic oligonucleotide
uaaaucaagcugccauagg

SEQ ID NO: 1328179 - RNA, 19 nt, Artificial Sequence
  Description of Artificial Sequence: Synthetic oligonucleotide
ccaaaauauuuccagacgg

SEQ ID NO: 1328180 - RNA, 19 nt, Artificial Sequence
  Description of Artificial Sequence: Synthetic oligonucleotide
acaacuguuauuauuagaa

SEQ ID NO: 1328181 - RNA, 19 nt, Artificial Sequence
  Description of Artificial Sequence: Synthetic oligonucleotide
ugugcggauagccaaguac

SEQ ID NO: 1328182 - RNA, 19 nt, Artificial Sequence
  Description of Artificial Sequence: Synthetic oligonucleotide
aaucaagcugccauagguc

SEQ ID NO: 1328183 - RNA, 19 nt, Artificial Sequence
  Description of Artificial Sequence: Synthetic oligonucleotide
uucugcuguauccagauuu

SEQ ID NO: 1328184 - RNA, 19 nt, Artificial Sequence
  Description of Artificial Sequence: Synthetic oligonucleotide
agcaaacuugacuauuaag

SEQ ID NO: 1328185 - RNA, 19 nt, Artificial Sequence
  Description of Artificial Sequence: Synthetic oligonucleotide
aucuagugccaauugcaac

SEQ ID NO: 1328186 - RNA, 19 nt, Artificial Sequence
  Description of Artificial Sequence: Synthetic oligonucleotide
gaaauucggacuguagaag

SEQ ID NO: 1328187 - RNA, 19 nt, Artificial Sequence
  Description of Artificial Sequence: Synthetic oligonucleotide
guaaaccagcauuagaauc

SEQ ID NO: 1328188 - RNA, 19 nt, Artificial Sequence
  Description of Artificial Sequence: Synthetic oligonucleotide
uaaucuauaugcgcguuug

SEQ ID NO: 1328189 - RNA, 19 nt, Artificial Sequence
  Description of Artificial Sequence: Synthetic oligonucleotide
uacaucuuguuuccuauaa

SEQ ID NO: 1328190 - RNA, 19 nt, Artificial Sequence
  Description of Artificial Sequence: Synthetic oligonucleotide
uccagauuuagguaagaaa

SEQ ID NO: 1328191 - RNA, 19 nt, Artificial Sequence
  Description of Artificial Sequence: Synthetic oligonucleotide
ugaauacaauggcaggucu

SEQ ID NO: 1328192 - RNA, 19 nt, Artificial Sequence
  Description of Artificial Sequence: Synthetic oligonucleotide
aagauagccuucaaccguc

SEQ ID NO: 1328193 - RNA, 19 nt, Artificial Sequence
  Description of Artificial Sequence: Synthetic oligonucleotide
aaauauaaucuagugccaa

SEQ ID NO: 1328194 - RNA, 19 nt, Artificial Sequence
  Description of Artificial Sequence: Synthetic oligonucleotide
agggauacauguuuuaaau

SEQ ID NO: 1328195 - RNA, 19 nt, Artificial Sequence
  Description of Artificial Sequence: Synthetic oligonucleotide
acaucuuguuuccuauaac

SEQ ID NO: 1328196 - RNA, 19 nt, Artificial Sequence
  Description of Artificial Sequence: Synthetic oligonucleotide
uggauguguaaucuauaug

SEQ ID NO: 1328197 - RNA, 19 nt, Artificial Sequence
  Description of Artificial Sequence: Synthetic oligonucleotide
aacucauagaaaucauuua

SEQ ID NO: 1328198 - RNA, 19 nt, Artificial Sequence
  Description of Artificial Sequence: Synthetic oligonucleotide
cugaauuuauauacuguuc

SEQ ID NO: 1328199 - RNA, 19 nt, Artificial Sequence
  Description of Artificial Sequence: Synthetic oligonucleotide
gauuaucuugcaccugugc

SEQ ID NO: 1328200 - RNA, 19 nt, Artificial Sequence
  Description of Artificial Sequence: Synthetic oligonucleotide
aguauucaacugcaaaaga

SEQ ID NO: 1328201 - RNA, 19 nt, Artificial Sequence
  Description of Artificial Sequence: Synthetic oligonucleotide
ucuauaugcgcguuugcaa

SEQ ID NO: 1328202 - RNA, 19 nt, Artificial Sequence
  Description of Artificial Sequence: Synthetic oligonucleotide
aucaagcugccauagguca

SEQ ID NO: 1328203 - RNA, 19 nt, Artificial Sequence
  Description of Artificial Sequence: Synthetic oligonucleotide
gcuuggauuaucuugcacc

SEQ ID NO: 1328204 - RNA, 19 nt, Artificial Sequence
  Description of Artificial Sequence: Synthetic oligonucleotide
cacgacuccagaaccaugc

SEQ ID NO: 1328205 - RNA, 19 nt, Artificial Sequence
  Description of Artificial Sequence: Synthetic oligonucleotide
gacauucuuggaaauucgg

SEQ ID NO: 1328206 - RNA, 19 nt, Artificial Sequence
  Description of Artificial Sequence: Synthetic oligonucleotide
uugauugcagcaacucuga

SEQ ID NO: 1328207 - RNA, 19 nt, Artificial Sequence
  Description of Artificial Sequence: Synthetic oligonucleotide
guacacgagguuuuaagac

SEQ ID NO: 1328208 - RNA, 19 nt, Artificial Sequence
  Description of Artificial Sequence: Synthetic oligonucleotide
gauccuguuucuuaaguaa

SEQ ID NO: 1328209 - RNA, 19 nt, Artificial Sequence
  Description of Artificial Sequence: Synthetic oligonucleotide
agguuuuaagaccacagua

SEQ ID NO: 1328210 - RNA, 19 nt, Artificial Sequence
  Description of Artificial Sequence: Synthetic oligonucleotide
agguacaaugccuuuggug

SEQ ID NO: 1328211 - RNA, 19 nt, Artificial Sequence
  Description of Artificial Sequence: Synthetic oligonucleotide
  modified_base (3)..(3): a, c, u, g, unknown or other
acnuacaucuuaggacucc

SEQ ID NO: 1328212 - RNA, 19 nt, Artificial Sequence
  Description of Artificial Sequence: Synthetic oligonucleotide
uguuuccuauaacacuggc

SEQ ID NO: 1328213 - RNA, 19 nt, Artificial Sequence
  Description of Artificial Sequence: Synthetic oligonucleotide
uguaaaccagcauuagaau

SEQ ID NO: 1328214 - RNA, 19 nt, Artificial Sequence
  Description of Artificial Sequence: Synthetic oligonucleotide
accucuacacggcugaucu

SEQ ID NO: 1328215 - RNA, 19 nt, Artificial Sequence
  Description of Artificial Sequence: Synthetic oligonucleotide
cauuaggugccaaagguga

SEQ ID NO: 1328216 - RNA, 19 nt, Artificial Sequence
  Description of Artificial Sequence: Synthetic oligonucleotide
caguauucaacugcaaaag

SEQ ID NO: 1328217 - RNA, 19 nt, Artificial Sequence
  Description of Artificial Sequence: Synthetic oligonucleotide
ucuuuagaaaauggcguug

SEQ ID NO: 1328218 - RNA, 19 nt, Artificial Sequence
  Description of Artificial Sequence: Synthetic oligonucleotide
uauaugcgcguuugcaagc

SEQ ID NO: 1328219 - RNA, 19 nt, Artificial Sequence
  Description of Artificial Sequence: Synthetic oligonucleotide
uacuuuguuuccuuuuggu

SEQ ID NO: 1328220 - RNA, 19 nt, Artificial Sequence
  Description of Artificial Sequence: Synthetic oligonucleotide
agcccacgacuccagaacc

SEQ ID NO: 1328221 - RNA, 19 nt, Artificial Sequence
  Description of Artificial Sequence: Synthetic oligonucleotide
uccuguuucuuaaguaaac

SEQ ID NO: 1328222 - RNA, 19 nt, Artificial Sequence
  Description of Artificial Sequence: Synthetic oligonucleotide
auacuagagugguccauuc

SEQ ID NO: 1328223 - RNA, 19 nt, Artificial Sequence
  Description of Artificial Sequence: Synthetic oligonucleotide
  modified_base (4)..(4): a, c, u, g, unknown or other
aacnuacaucuuaggacuc

SEQ ID NO: 1328224 - RNA, 19 nt, Artificial Sequence
  Description of Artificial Sequence: Synthetic oligonucleotide
aaagcgguauuguuuuaaa

SEQ ID NO: 1328225 - RNA, 19 nt, Artificial Sequence
  Description of Artificial Sequence: Synthetic oligonucleotide
uagccaaguacgcugagua

SEQ ID NO: 1328226 - RNA, 19 nt, Artificial Sequence
  Description of Artificial Sequence: Synthetic oligonucleotide
aaguacgcugaguauucca

SEQ ID NO: 1328227 - RNA, 19 nt, Artificial Sequence
  Description of Artificial Sequence: Synthetic oligonucleotide
gugcggauagccaaguacg

SEQ ID NO: 1328228 - RNA, 19 nt, Artificial Sequence
  Description of Artificial Sequence: Synthetic oligonucleotide
auggcguugaugcaacaug

SEQ ID NO: 1328229 - RNA, 19 nt, Artificial Sequence
  Description of Artificial Sequence: Synthetic oligonucleotide
aaagauccuugcagcaaac

SEQ ID NO: 1328230 - RNA, 19 nt, Artificial Sequence
  Description of Artificial Sequence: Synthetic oligonucleotide
accgucggcacuucauccc

SEQ ID NO: 1328231 - RNA, 19 nt, Artificial Sequence
  Description of Artificial Sequence: Synthetic oligonucleotide
uucggacuguagaaggagc

SEQ ID NO: 1328232 - RNA, 19 nt, Artificial Sequence
  Description of Artificial Sequence: Synthetic oligonucleotide
uucucaguaucaagauacc

SEQ ID NO: 1328233 - RNA, 19 nt, Artificial Sequence
  Description of Artificial Sequence: Synthetic oligonucleotide
acacaacuguuauuauuag

SEQ ID NO: 1328234 - RNA, 19 nt, Artificial Sequence
  Description of Artificial Sequence: Synthetic oligonucleotide
ucgacauucuuggaaauuc

SEQ ID NO: 1328235 - RNA, 19 nt, Artificial Sequence
  Description of Artificial Sequence: Synthetic oligonucleotide
uuaguugcaggcagagcac

SEQ ID NO: 1328236 - RNA, 19 nt, Artificial Sequence
  Description of Artificial Sequence: Synthetic oligonucleotide
cucaguaucaagauaccaa

SEQ ID NO: 1328237 - RNA, 19 nt, Artificial Sequence
  Description of Artificial Sequence: Synthetic oligonucleotide
ucggacuguagaaggagcu

SEQ ID NO: 1328238 - RNA, 19 nt, Artificial Sequence
  Description of Artificial Sequence: Synthetic oligonucleotide
caguaucaagauaccaaag

SEQ ID NO: 1328239 - RNA, 19 nt, Artificial Sequence
  Description of Artificial Sequence: Synthetic oligonucleotide
accaaagcgguauuguuuu

SEQ ID NO: 1328240 - RNA, 19 nt, Artificial Sequence
  Description of Artificial Sequence: Synthetic oligonucleotide
ucuacacggcugaucuuag

SEQ ID NO: 1328241 - RNA, 19 nt, Artificial Sequence
  Description of Artificial Sequence: Synthetic oligonucleotide
aagcgguauuguuuuaaaa

SEQ ID NO: 1328242 - RNA, 19 nt, Artificial Sequence
  Description of Artificial Sequence: Synthetic oligonucleotide
agugccaauugcaacagca

SEQ ID NO: 1328243 - RNA, 19 nt, Artificial Sequence
  Description of Artificial Sequence: Synthetic oligonucleotide
gguacaucugcauuuccug

SEQ ID NO: 1328244 - RNA, 19 nt, Artificial Sequence
  Description of Artificial Sequence: Synthetic oligonucleotide
gcaacaugcaccucuacac

SEQ ID NO: 1328245 - RNA, 19 nt, Artificial Sequence
  Description of Artificial Sequence: Synthetic oligonucleotide
acaucuuaggacucccaga

SEQ ID NO: 1328246 - RNA, 19 nt, Artificial Sequence
  Description of Artificial Sequence: Synthetic oligonucleotide
ugcggauagccaaguacgc

SEQ ID NO: 1328247 - RNA, 19 nt, Artificial Sequence
  Description of Artificial Sequence: Synthetic oligonucleotide
uacgcugaguauuccaaaa

SEQ ID NO: 1328248 - RNA, 19 nt, Artificial Sequence
  Description of Artificial Sequence: Synthetic oligonucleotide
guuucuaaaucaagcugcc

SEQ ID NO: 1328249 - RNA, 19 nt, Artificial Sequence
  Description of Artificial Sequence: Synthetic oligonucleotide
agccaucgaacuugagugg

SEQ ID NO: 1328250 - RNA, 19 nt, Artificial Sequence
  Description of Artificial Sequence: Synthetic oligonucleotide
ggaaagaguugguaguagc

SEQ ID NO: 1328251 - RNA, 19 nt, Artificial Sequence
  Description of Artificial Sequence: Synthetic oligonucleotide
aacuggacuugugauggug

SEQ ID NO: 1328252 - RNA, 19 nt, Artificial Sequence
  Description of Artificial Sequence: Synthetic oligonucleotide
uccgucacacaacuguuau

SEQ ID NO: 1328253 - RNA, 19 nt, Artificial Sequence
  Description of Artificial Sequence: Synthetic oligonucleotide
gugaauucucaguauuuuc

SEQ ID NO: 1328254 - RNA, 19 nt, Artificial Sequence
  Description of Artificial Sequence: Synthetic oligonucleotide
uugaucaacuggacuugug

SEQ ID NO: 1328255 - RNA, 19 nt, Artificial Sequence
  Description of Artificial Sequence: Synthetic oligonucleotide
auauacuguuccugggaca

SEQ ID NO: 1328256 - RNA, 19 nt, Artificial Sequence
  Description of Artificial Sequence: Synthetic oligonucleotide
uggaaagaguugguaguag

SEQ ID NO: 1328257 - RNA, 19 nt, Artificial Sequence
  Description of Artificial Sequence: Synthetic oligonucleotide
aucgaacuugaguggcugg

SEQ ID NO: 1328258 - RNA, 19 nt, Artificial Sequence
  Description of Artificial Sequence: Synthetic oligonucleotide
  modified_base (2)..(2): a, c, u, g, unknown or other
cnuacaucuuaggacuccc

SEQ ID NO: 1328259 - RNA, 19 nt, Artificial Sequence
  Description of Artificial Sequence: Synthetic oligonucleotide
aaucuagugccaauugcaa

SEQ ID NO: 1328260 - RNA, 19 nt, Artificial Sequence
  Description of Artificial Sequence: Synthetic oligonucleotide
agauccuugcagcaaacuu

SEQ ID NO: 1328261 - RNA, 19 nt, Artificial Sequence
  Description of Artificial Sequence: Synthetic oligonucleotide
guaaauucucaugaacaca

SEQ ID NO: 1328262 - RNA, 19 nt, Artificial Sequence
  Description of Artificial Sequence: Synthetic oligonucleotide
aauucggacuguagaagga

SEQ ID NO: 1328263 - RNA, 19 nt, Artificial Sequence
  Description of Artificial Sequence: Synthetic oligonucleotide
uugcaggcagagcacauau

SEQ ID NO: 1328264 - RNA, 19 nt, Artificial Sequence
  Description of Artificial Sequence: Synthetic oligonucleotide
auggggugaauucucagua

SEQ ID NO: 1328265 - RNA, 19 nt, Artificial Sequence
  Description of Artificial Sequence: Synthetic oligonucleotide
auucggacuguagaaggag

SEQ ID NO: 1328266 - RNA, 19 nt, Artificial Sequence
  Description of Artificial Sequence: Synthetic oligonucleotide
ugccaaaggugaauguaaa

SEQ ID NO: 1328267 - RNA, 19 nt, Artificial Sequence
  Description of Artificial Sequence: Synthetic oligonucleotide
aucuauaugcgcguuugca

SEQ ID NO: 1328268 - RNA, 19 nt, Artificial Sequence
  Description of Artificial Sequence: Synthetic oligonucleotide
guaucaagauaccaaagau

SEQ ID NO: 1328269 - RNA, 19 nt, Artificial Sequence
  Description of Artificial Sequence: Synthetic oligonucleotide
cugaaagggccuauuccac

SEQ ID NO: 1328270 - RNA, 19 nt, Artificial Sequence
  Description of Artificial Sequence: Synthetic oligonucleotide
agcauauccgucacacaac

SEQ ID NO: 1328271 - RNA, 19 nt, Artificial Sequence
  Description of Artificial Sequence: Synthetic oligonucleotide
cuuugaucaacuggacuug

SEQ ID NO: 1328272 - RNA, 19 nt, Artificial Sequence
  Description of Artificial Sequence: Synthetic oligonucleotide
uacuagagugguccauucu

SEQ ID NO: 1328273 - RNA, 19 nt, Artificial Sequence
  Description of Artificial Sequence: Synthetic oligonucleotide
ucuggauguguaaucuaua

SEQ ID NO: 1328274 - RNA, 19 nt, Artificial Sequence
  Description of Artificial Sequence: Synthetic oligonucleotide
gguagcaaauaaaacuggc

SEQ ID NO: 1328275 - RNA, 19 nt, Artificial Sequence
  Description of Artificial Sequence: Synthetic oligonucleotide
gaaugcuccagcccacgac

SEQ ID NO: 1328276 - RNA, 19 nt, Artificial Sequence
  Description of Artificial Sequence: Synthetic oligonucleotide
auauaaucuagugccaauu

SEQ ID NO: 1328277 - RNA, 19 nt, Artificial Sequence
  Description of Artificial Sequence: Synthetic oligonucleotide
aauggcguugaugcaacau

SEQ ID NO: 1328278 - RNA, 19 nt, Artificial Sequence
  Description of Artificial Sequence: Synthetic oligonucleotide
uccccuuaguuucugguuu

SEQ ID NO: 1328279 - RNA, 19 nt, Artificial Sequence
  Description of Artificial Sequence: Synthetic oligonucleotide
aagguacaaugccuuuggu

SEQ ID NO: 1328280 - RNA, 19 nt, Artificial Sequence
  Description of Artificial Sequence: Synthetic oligonucleotide
acaugcaccucuacacggc

SEQ ID NO: 1328281 - RNA, 19 nt, Artificial Sequence
  Description of Artificial Sequence: Synthetic oligonucleotide
uacuguuccugggacaaga

SEQ ID NO: 1328282 - RNA, 19 nt, Artificial Sequence
  Description of Artificial Sequence: Synthetic oligonucleotide
agauccuguuucuuaagua

SEQ ID NO: 1328283 - RNA, 19 nt, Artificial Sequence
  Description of Artificial Sequence: Synthetic oligonucleotide
uccugggacaagauccugu

SEQ ID NO: 1328284 - RNA, 19 nt, Artificial Sequence
  Description of Artificial Sequence: Synthetic oligonucleotide
gaaagggccuauuccacaa

SEQ ID NO: 1328285 - RNA, 19 nt, Artificial Sequence
  Description of Artificial Sequence: Synthetic oligonucleotide
gcugaucuuaguugcaggc

SEQ ID NO: 1328286 - RNA, 19 nt, Artificial Sequence
  Description of Artificial Sequence: Synthetic oligonucleotide
ggaaauucggacuguagaa

SEQ ID NO: 1328287 - RNA, 19 nt, Artificial Sequence
  Description of Artificial Sequence: Synthetic oligonucleotide
cuucaucccacuugacaug

SEQ ID NO: 1328288 - RNA, 19 nt, Artificial Sequence
  Description of Artificial Sequence: Synthetic oligonucleotide
uuagcuugguauggcaagu

SEQ ID NO: 1328289 - RNA, 19 nt, Artificial Sequence
  Description of Artificial Sequence: Synthetic oligonucleotide
accaugcuguaguuccaac

SEQ ID NO: 1328290 - RNA, 19 nt, Artificial Sequence
  Description of Artificial Sequence: Synthetic oligonucleotide
aucuuaguugcaggcagag

SEQ ID NO: 1328291 - RNA, 19 nt, Artificial Sequence
  Description of Artificial Sequence: Synthetic oligonucleotide
caucgcaccauuguuguuc

SEQ ID NO: 1328292 - RNA, 19 nt, Artificial Sequence
  Description of Artificial Sequence: Synthetic oligonucleotide
agaagcauuaggugccaaa

SEQ ID NO: 1328293 - RNA, 19 nt, Artificial Sequence
  Description of Artificial Sequence: Synthetic oligonucleotide
uugcugaaagggccuauuc

SEQ ID NO: 1328294 - RNA, 19 nt, Artificial Sequence
  Description of Artificial Sequence: Synthetic oligonucleotide
ucaaccgucggcacuucau

SEQ ID NO: 1328295 - RNA, 19 nt, Artificial Sequence
  Description of Artificial Sequence: Synthetic oligonucleotide
augcgcguuugcaagcugc

SEQ ID NO: 1328296 - RNA, 19 nt, Artificial Sequence
  Description of Artificial Sequence: Synthetic oligonucleotide
aauguacaucuuguuuccu

SEQ ID NO: 1328297 - RNA, 19 nt, Artificial Sequence
  Description of Artificial Sequence: Synthetic oligonucleotide
cagcauauccgucacacaa

SEQ ID NO: 1328298 - RNA, 19 nt, Artificial Sequence
  Description of Artificial Sequence: Synthetic oligonucleotide
accaugacauuguuucuaa

SEQ ID NO: 1328299 - RNA, 19 nt, Artificial Sequence
  Description of Artificial Sequence: Synthetic oligonucleotide
cuuuagaaaauggcguuga

SEQ ID NO: 1328300 - RNA, 19 nt, Artificial Sequence
  Description of Artificial Sequence: Synthetic oligonucleotide
cguugaugcaacaugcacc

SEQ ID NO: 1328301 - RNA, 19 nt, Artificial Sequence
  Description of Artificial Sequence: Synthetic oligonucleotide
uauccgucacacaacuguu

SEQ ID NO: 1328302 - RNA, 19 nt, Artificial Sequence
  Description of Artificial Sequence: Synthetic oligonucleotide
gauagccaaguacgcugag

SEQ ID NO: 1328303 - RNA, 19 nt, Artificial Sequence
  Description of Artificial Sequence: Synthetic oligonucleotide
ugguccauucugcuguauc

SEQ ID NO: 1328304 - RNA, 19 nt, Artificial Sequence
  Description of Artificial Sequence: Synthetic oligonucleotide
aagauccuugcagcaaacu

SEQ ID NO: 1328305 - RNA, 19 nt, Artificial Sequence
  Description of Artificial Sequence: Synthetic oligonucleotide
uuucuaaaucaagcugcca

SEQ ID NO: 1328306 - RNA, 19 nt, Artificial Sequence
  Description of Artificial Sequence: Synthetic oligonucleotide
caauugcaacagcacagug

SEQ ID NO: 1328307 - RNA, 19 nt, Artificial Sequence
  Description of Artificial Sequence: Synthetic oligonucleotide
ggugcuggcgguuucucag

SEQ ID NO: 1328308 - RNA, 19 nt, Artificial Sequence
  Description of Artificial Sequence: Synthetic oligonucleotide
ugcgcguuugcaagcugcc

SEQ ID NO: 1328309 - RNA, 19 nt, Artificial Sequence
  Description of Artificial Sequence: Synthetic oligonucleotide
uaguagcuuugaucaacug

SEQ ID NO: 1328310 - RNA, 19 nt, Artificial Sequence
  Description of Artificial Sequence: Synthetic oligonucleotide
cuagugccaauugcaacag

SEQ ID NO: 1328311 - RNA, 19 nt, Artificial Sequence
  Description of Artificial Sequence: Synthetic oligonucleotide
uagcuuugaucaacuggac

SEQ ID NO: 1328312 - RNA, 19 nt, Artificial Sequence
  Description of Artificial Sequence: Synthetic oligonucleotide
uccuauaacacuggcugua

SEQ ID NO: 1328313 - RNA, 19 nt, Artificial Sequence
  Description of Artificial Sequence: Synthetic oligonucleotide
gccuauuccacaaccauug

SEQ ID NO: 1328314 - RNA, 19 nt, Artificial Sequence
  Description of Artificial Sequence: Synthetic oligonucleotide
uuuugaccaugacauuguu

SEQ ID NO: 1328315 - RNA, 19 nt, Artificial Sequence
  Description of Artificial Sequence: Synthetic oligonucleotide
ugcugauauccugaauaca

SEQ ID NO: 1328316 - RNA, 19 nt, Artificial Sequence
  Description of Artificial Sequence: Synthetic oligonucleotide
uguuuucaaaauggccacu

SEQ ID NO: 1328317 - RNA, 19 nt, Artificial Sequence
  Description of Artificial Sequence: Synthetic oligonucleotide
aaauggcguugaugcaaca

SEQ ID NO: 1328318 - RNA, 19 nt, Artificial Sequence
  Description of Artificial Sequence: Synthetic oligonucleotide
caugacauuguuucuaaau

SEQ ID NO: 1328319 - RNA, 19 nt, Artificial Sequence
  Description of Artificial Sequence: Synthetic oligonucleotide
acacgagguuuuaagacca

SEQ ID NO: 1328320 - RNA, 19 nt, Artificial Sequence
  Description of Artificial Sequence: Synthetic oligonucleotide
uuagaagcauuaggugcca

SEQ ID NO: 1328321 - RNA, 19 nt, Artificial Sequence
  Description of Artificial Sequence: Synthetic oligonucleotide
uggaagugguacugucccc

SEQ ID NO: 1328322 - RNA, 19 nt, Artificial Sequence
  Description of Artificial Sequence: Synthetic oligonucleotide
uaauagcaguaugggauuc

SEQ ID NO: 1328323 - RNA, 19 nt, Artificial Sequence
  Description of Artificial Sequence: Synthetic oligonucleotide
aucgcaccauuguuguucu

SEQ ID NO: 1328324 - RNA, 19 nt, Artificial Sequence
  Description of Artificial Sequence: Synthetic oligonucleotide
uggcgguuucucaguauca

SEQ ID NO: 1328325 - RNA, 19 nt, Artificial Sequence
  Description of Artificial Sequence: Synthetic oligonucleotide
cuugugaggaacccaucca

SEQ ID NO: 1328326 - RNA, 19 nt, Artificial Sequence
  Description of Artificial Sequence: Synthetic oligonucleotide
ucaagcugccauaggucau

SEQ ID NO: 1328327 - RNA, 19 nt, Artificial Sequence
  Description of Artificial Sequence: Synthetic oligonucleotide
ucuuaguugcaggcagagc

SEQ ID NO: 1328328 - RNA, 19 nt, Artificial Sequence
  Description of Artificial Sequence: Synthetic oligonucleotide
ugccuuugacauacuuugu

SEQ ID NO: 1328329 - RNA, 19 nt, Artificial Sequence
  Description of Artificial Sequence: Synthetic oligonucleotide
ccuugugaggaacccaucc

SEQ ID NO: 1328330 - RNA, 19 nt, Artificial Sequence
  Description of Artificial Sequence: Synthetic oligonucleotide
uguaaucuauaugcgcguu

SEQ ID NO: 1328331 - RNA, 19 nt, Artificial Sequence
  Description of Artificial Sequence: Synthetic oligonucleotide
uaugcgcguuugcaagcug

SEQ ID NO: 1328332 - RNA, 19 nt, Artificial Sequence
  Description of Artificial Sequence: Synthetic oligonucleotide
aaacuguagucagguacau

SEQ ID NO: 1328333 - RNA, 19 nt, Artificial Sequence
  Description of Artificial Sequence: Synthetic oligonucleotide
ggugucucuuuagaaaaug

SEQ ID NO: 1328334 - RNA, 19 nt, Artificial Sequence
  Description of Artificial Sequence: Synthetic oligonucleotide
cauauccgucacacaacug

SEQ ID NO: 1328335 - RNA, 19 nt, Artificial Sequence
  Description of Artificial Sequence: Synthetic oligonucleotide
uauccagauuuagguaaga

SEQ ID NO: 1328336 - RNA, 19 nt, Artificial Sequence
  Description of Artificial Sequence: Synthetic oligonucleotide
uugcaacagcacagugucc

SEQ ID NO: 1328337 - RNA, 19 nt, Artificial Sequence
  Description of Artificial Sequence: Synthetic oligonucleotide
uaguuccaacucauagaaa

SEQ ID NO: 1328338 - RNA, 19 nt, Artificial Sequence
  Description of Artificial Sequence: Synthetic oligonucleotide
caggucuggauguguaauc

SEQ ID NO: 1328339 - RNA, 19 nt, Artificial Sequence
  Description of Artificial Sequence: Synthetic oligonucleotide
uugguauggcaagucagua

SEQ ID NO: 1328340 - RNA, 19 nt, Artificial Sequence
  Description of Artificial Sequence: Synthetic oligonucleotide
aguaaacuguagucaggua

SEQ ID NO: 1328341 - RNA, 19 nt, Artificial Sequence
  Description of Artificial Sequence: Synthetic oligonucleotide
aguacgcugaguauuccaa

SEQ ID NO: 1328342 - RNA, 19 nt, Artificial Sequence
  Description of Artificial Sequence: Synthetic oligonucleotide
caucgaacuugaguggcug

SEQ ID NO: 1328343 - RNA, 19 nt, Artificial Sequence
  Description of Artificial Sequence: Synthetic oligonucleotide
uucccacaucgcaccauug

SEQ ID NO: 1328344 - RNA, 19 nt, Artificial Sequence
  Description of Artificial Sequence: Synthetic oligonucleotide
uuggauuaucuugcaccug

SEQ ID NO: 1328345 - RNA, 19 nt, Artificial Sequence
  Description of Artificial Sequence: Synthetic oligonucleotide
uggggugaauucucaguau

SEQ ID NO: 1328346 - RNA, 19 nt, Artificial Sequence
  Description of Artificial Sequence: Synthetic oligonucleotide
gcaagucaguauucaacug

SEQ ID NO: 1328347 - RNA, 19 nt, Artificial Sequence
  Description of Artificial Sequence: Synthetic oligonucleotide
uucaaccgucggcacuuca

SEQ ID NO: 1328348 - RNA, 19 nt, Artificial Sequence
  Description of Artificial Sequence: Synthetic oligonucleotide
ggucauccaagcgagcacc

SEQ ID NO: 1328349 - RNA, 19 nt, Artificial Sequence
  Description of Artificial Sequence: Synthetic oligonucleotide
guagucagguacaucugca

SEQ ID NO: 1328350 - RNA, 19 nt, Artificial Sequence
  Description of Artificial Sequence: Synthetic oligonucleotide
cagcccacgacuccagaac

SEQ ID NO: 1328351 - RNA, 19 nt, Artificial Sequence
  Description of Artificial Sequence: Synthetic oligonucleotide
uuaggacucccagagucuu

SEQ ID NO: 1328352 - RNA, 19 nt, Artificial Sequence
  Description of Artificial Sequence: Synthetic oligonucleotide
auagccaaguacgcugagu

SEQ ID NO: 1328353 - RNA, 19 nt, Artificial Sequence
  Description of Artificial Sequence: Synthetic oligonucleotide
accagcauuagaaucuguu

SEQ ID NO: 1328354 - RNA, 19 nt, Artificial Sequence
  Description of Artificial Sequence: Synthetic oligonucleotide
auaugcgcguuugcaagcu

SEQ ID NO: 1328355 - RNA, 19 nt, Artificial Sequence
  Description of Artificial Sequence: Synthetic oligonucleotide
aauucccacaucgcaccau

SEQ ID NO: 1328356 - RNA, 19 nt, Artificial Sequence
  Description of Artificial Sequence: Synthetic oligonucleotide
aagugguacuguccccuua

SEQ ID NO: 1328357 - RNA, 19 nt, Artificial Sequence
  Description of Artificial Sequence: Synthetic oligonucleotide
aucuuaggacucccagagu

SEQ ID NO: 1328358 - RNA, 19 nt, Artificial Sequence
  Description of Artificial Sequence: Synthetic oligonucleotide
uggcucaccaaagcgguau

SEQ ID NO: 1328359 - RNA, 19 nt, Artificial Sequence
  Description of Artificial Sequence: Synthetic oligonucleotide
gcuuugaucaacuggacuu

SEQ ID NO: 1328360 - RNA, 19 nt, Artificial Sequence
  Description of Artificial Sequence: Synthetic oligonucleotide
auggaaagaguugguagua

SEQ ID NO: 1328361 - RNA, 19 nt, Artificial Sequence
  Description of Artificial Sequence: Synthetic oligonucleotide
caaccgucggcacuucauc

SEQ ID NO: 1328362 - RNA, 19 nt, Artificial Sequence
  Description of Artificial Sequence: Synthetic oligonucleotide
cugaaaucugguuugcuuu

SEQ ID NO: 1328363 - RNA, 19 nt, Artificial Sequence
  Description of Artificial Sequence: Synthetic oligonucleotide
gaucuuaguugcaggcaga

SEQ ID NO: 1328364 - RNA, 19 nt, Artificial Sequence
  Description of Artificial Sequence: Synthetic oligonucleotide
uucguggaagugguacugu

SEQ ID NO: 1328365 - RNA, 19 nt, Artificial Sequence
  Description of Artificial Sequence: Synthetic oligonucleotide
auccagauuuagguaagaa

SEQ ID NO: 1328366 - RNA, 19 nt, Artificial Sequence
  Description of Artificial Sequence: Synthetic oligonucleotide
aggugccaaaggugaaugu

SEQ ID NO: 1328367 - RNA, 19 nt, Artificial Sequence
  Description of Artificial Sequence: Synthetic oligonucleotide
uuugcugaaagggccuauu

SEQ ID NO: 1328368 - RNA, 19 nt, Artificial Sequence
  Description of Artificial Sequence: Synthetic oligonucleotide
cugguuugcuuuucacuga

SEQ ID NO: 1328369 - RNA, 19 nt, Artificial Sequence
  Description of Artificial Sequence: Synthetic oligonucleotide
agauagccuucaaccgucg

SEQ ID NO: 1328370 - RNA, 19 nt, Artificial Sequence
  Description of Artificial Sequence: Synthetic oligonucleotide
gcugccauaggucauccaa

SEQ ID NO: 1328371 - RNA, 19 nt, Artificial Sequence
  Description of Artificial Sequence: Synthetic oligonucleotide
caaguacgcugaguauucc

SEQ ID NO: 1328372 - RNA, 19 nt, Artificial Sequence
  Description of Artificial Sequence: Synthetic oligonucleotide
uugcagcaaacuugacuau

SEQ ID NO: 1328373 - RNA, 19 nt, Artificial Sequence
  Description of Artificial Sequence: Synthetic oligonucleotide
gcguugaugcaacaugcac

SEQ ID NO: 1328374 - RNA, 19 nt, Artificial Sequence
  Description of Artificial Sequence: Synthetic oligonucleotide
ccaaguacgcugaguauuc

SEQ ID NO: 1328375 - RNA, 19 nt, Artificial Sequence
  Description of Artificial Sequence: Synthetic oligonucleotide
ccacaucgcaccauuguug

SEQ ID NO: 1328376 - RNA, 19 nt, Artificial Sequence
  Description of Artificial Sequence: Synthetic oligonucleotide
auccuguuucuuaaguaaa

SEQ ID NO: 1328377 - RNA, 19 nt, Artificial Sequence
  Description of Artificial Sequence: Synthetic oligonucleotide
caagauaccaaagauccuu

SEQ ID NO: 1328378 - RNA, 19 nt, Artificial Sequence
  Description of Artificial Sequence: Synthetic oligonucleotide
acgagguuuuaagaccaca

SEQ ID NO: 1328379 - RNA, 19 nt, Artificial Sequence
  Description of Artificial Sequence: Synthetic oligonucleotide
cagauuuagguaagaaaau

SEQ ID NO: 1328380 - RNA, 19 nt, Artificial Sequence
  Description of Artificial Sequence: Synthetic oligonucleotide
cuggaaugcuccagcccac

SEQ ID NO: 1328381 - RNA, 19 nt, Artificial Sequence
  Description of Artificial Sequence: Synthetic oligonucleotide
gguauggcaagucaguauu

SEQ ID NO: 1328382 - RNA, 19 nt, Artificial Sequence
  Description of Artificial Sequence: Synthetic oligonucleotide
cuggauguguaaucuauau

SEQ ID NO: 1328383 - RNA, 19 nt, Artificial Sequence
  Description of Artificial Sequence: Synthetic oligonucleotide
gacuguagaaggagcucca

SEQ ID NO: 1328384 - RNA, 19 nt, Artificial Sequence
  Description of Artificial Sequence: Synthetic oligonucleotide
gacuugugauggugcuggc

SEQ ID NO: 1328385 - RNA, 19 nt, Artificial Sequence
  Description of Artificial Sequence: Synthetic oligonucleotide
acgacuccagaaccaugcu

SEQ ID NO: 1328386 - RNA, 19 nt, Artificial Sequence
  Description of Artificial Sequence: Synthetic oligonucleotide
cugaucuuaguugcaggca

SEQ ID NO: 1328387 - RNA, 19 nt, Artificial Sequence
  Description of Artificial Sequence: Synthetic oligonucleotide
cugauacuagaguggucca

SEQ ID NO: 1328388 - RNA, 19 nt, Artificial Sequence
  Description of Artificial Sequence: Synthetic oligonucleotide
gccaaaggugaauguaaac

SEQ ID NO: 1328389 - RNA, 19 nt, Artificial Sequence
  Description of Artificial Sequence: Synthetic oligonucleotide
caagcugccauaggucauc

SEQ ID NO: 1328390 - RNA, 19 nt, Artificial Sequence
  Description of Artificial Sequence: Synthetic oligonucleotide
gugccaauugcaacagcac

SEQ ID NO: 1328391 - RNA, 19 nt, Artificial Sequence
  Description of Artificial Sequence: Synthetic oligonucleotide
guguaaucuauaugcgcgu

SEQ ID NO: 1328392 - RNA, 19 nt, Artificial Sequence
  Description of Artificial Sequence: Synthetic oligonucleotide
gcgguuucucaguaucaag

SEQ ID NO: 1328393 - RNA, 19 nt, Artificial Sequence
  Description of Artificial Sequence: Synthetic oligonucleotide
agcgagcaccacacauucc

SEQ ID NO: 1328394 - RNA, 19 nt, Artificial Sequence
  Description of Artificial Sequence: Synthetic oligonucleotide
guacgcugaguauuccaaa

SEQ ID NO: 1328395 - RNA, 19 nt, Artificial Sequence
  Description of Artificial Sequence: Synthetic oligonucleotide
cacaucgcaccauuguugu

SEQ ID NO: 1328396 - RNA, 19 nt, Artificial Sequence
  Description of Artificial Sequence: Synthetic oligonucleotide
gauacuagagugguccauu

SEQ ID NO: 1328397 - RNA, 19 nt, Artificial Sequence
  Description of Artificial Sequence: Synthetic oligonucleotide
gaguugguaguagcuuuga

SEQ ID NO: 1328398 - RNA, 19 nt, Artificial Sequence
  Description of Artificial Sequence: Synthetic oligonucleotide
caaagcgguauuguuuuaa

SEQ ID NO: 1328399 - RNA, 19 nt, Artificial Sequence
  Description of Artificial Sequence: Synthetic oligonucleotide
ggcuucguggaagugguac

SEQ ID NO: 1328400 - RNA, 19 nt, Artificial Sequence
  Description of Artificial Sequence: Synthetic oligonucleotide
cacgagguuuuaagaccac

SEQ ID NO: 1328401 - RNA, 19 nt, Artificial Sequence
  Description of Artificial Sequence: Synthetic oligonucleotide
cagaaccaugcuguaguuc

SEQ ID NO: 1328402 - RNA, 19 nt, Artificial Sequence
  Description of Artificial Sequence: Synthetic oligonucleotide
uagcuugguauggcaaguc

SEQ ID NO: 1328403 - RNA, 19 nt, Artificial Sequence
  Description of Artificial Sequence: Synthetic oligonucleotide
caagcuggcuuggauuauc

SEQ ID NO: 1328404 - RNA, 19 nt, Artificial Sequence
  Description of Artificial Sequence: Synthetic oligonucleotide
ugcuggcgguuucucagua

SEQ ID NO: 1328405 - RNA, 19 nt, Artificial Sequence
  Description of Artificial Sequence: Synthetic oligonucleotide
gugcugugcggauagccaa

SEQ ID NO: 1328406 - RNA, 19 nt, Artificial Sequence
  Description of Artificial Sequence: Synthetic oligonucleotide
uccagcccacgacuccaga

SEQ ID NO: 1328407 - RNA, 19 nt, Artificial Sequence
  Description of Artificial Sequence: Synthetic oligonucleotide
ccuucgacauucuuggaaa

SEQ ID NO: 1328408 - RNA, 19 nt, Artificial Sequence
  Description of Artificial Sequence: Synthetic oligonucleotide
ggaaaaccagggauacaug

SEQ ID NO: 1328409 - RNA, 19 nt, Artificial Sequence
  Description of Artificial Sequence: Synthetic oligonucleotide
gccaucgaacuugaguggc

SEQ ID NO: 1328410 - RNA, 19 nt, Artificial Sequence
  Description of Artificial Sequence: Synthetic oligonucleotide
cuauuccacaaccauugau

SEQ ID NO: 1328411 - RNA, 19 nt, Artificial Sequence
  Description of Artificial Sequence: Synthetic oligonucleotide
auuuugcugaaagggccua

SEQ ID NO: 1328412 - RNA, 19 nt, Artificial Sequence
  Description of Artificial Sequence: Synthetic oligonucleotide
aaccagcauuagaaucugu

SEQ ID NO: 1328413 - RNA, 19 nt, Artificial Sequence
  Description of Artificial Sequence: Synthetic oligonucleotide
ucggcacuucaucccacuu

SEQ ID NO: 1328414 - RNA, 19 nt, Artificial Sequence
  Description of Artificial Sequence: Synthetic oligonucleotide
gguuucucaguaucaagau

SEQ ID NO: 1328415 - RNA, 19 nt, Artificial Sequence
  Description of Artificial Sequence: Synthetic oligonucleotide
guacaucuuguuuccuaua

SEQ ID NO: 1328416 - RNA, 19 nt, Artificial Sequence
  Description of Artificial Sequence: Synthetic oligonucleotide
agggccuauuccacaacca

SEQ ID NO: 1328417 - RNA, 19 nt, Artificial Sequence
  Description of Artificial Sequence: Synthetic oligonucleotide
ggcuuggauuaucuugcac

SEQ ID NO: 1328418 - RNA, 19 nt, Artificial Sequence
  Description of Artificial Sequence: Synthetic oligonucleotide
gcauauccgucacacaacu

SEQ ID NO: 1328419 - RNA, 19 nt, Artificial Sequence
  Description of Artificial Sequence: Synthetic oligonucleotide
guaaucuauaugcgcguuu

SEQ ID NO: 1328420 - RNA, 19 nt, Artificial Sequence
  Description of Artificial Sequence: Synthetic oligonucleotide
gccuucgacauucuuggaa

SEQ ID NO: 1328421 - RNA, 19 nt, Artificial Sequence
  Description of Artificial Sequence: Synthetic oligonucleotide
uccagacggugaaguugga

SEQ ID NO: 1328422 - RNA, 19 nt, Artificial Sequence
  Description of Artificial Sequence: Synthetic oligonucleotide
cuuggaaauucggacugua

SEQ ID NO: 1328423 - RNA, 19 nt, Artificial Sequence
  Description of Artificial Sequence: Synthetic oligonucleotide
uagaagcauuaggugccaa

SEQ ID NO: 1328424 - RNA, 19 nt, Artificial Sequence
  Description of Artificial Sequence: Synthetic oligonucleotide
ggauuaucuugcaccugug

SEQ ID NO: 1328425 - RNA, 19 nt, Artificial Sequence
  Description of Artificial Sequence: Synthetic oligonucleotide
ggugccaaaggugaaugua

SEQ ID NO: 1328426 - RNA, 19 nt, Artificial Sequence
  Description of Artificial Sequence: Synthetic oligonucleotide
gcugaguauuccaaaauau

SEQ ID NO: 1328427 - RNA, 19 nt, Artificial Sequence
  Description of Artificial Sequence: Synthetic oligonucleotide
ggauagccaaguacgcuga

SEQ ID NO: 1328428 - RNA, 19 nt, Artificial Sequence
  Description of Artificial Sequence: Synthetic oligonucleotide
cuguuauuauuagaagcau

SEQ ID NO: 1328429 - RNA, 19 nt, Artificial Sequence
  Description of Artificial Sequence: Synthetic oligonucleotide
agucaguauucaacugcaa

SEQ ID NO: 1328430 - RNA, 19 nt, Artificial Sequence
  Description of Artificial Sequence: Synthetic oligonucleotide
caacugcaaaagauagccu

SEQ ID NO: 1328431 - RNA, 19 nt, Artificial Sequence
  Description of Artificial Sequence: Synthetic oligonucleotide
ggugaauguaaaccagcau

SEQ ID NO: 1328432 - RNA, 19 nt, Artificial Sequence
  Description of Artificial Sequence: Synthetic oligonucleotide
accacacauuccaccaaaa

SEQ ID NO: 1328433 - RNA, 19 nt, Artificial Sequence
  Description of Artificial Sequence: Synthetic oligonucleotide
caagcgagcaccacacauu

SEQ ID NO: 1328434 - RNA, 19 nt, Artificial Sequence
  Description of Artificial Sequence: Synthetic oligonucleotide
gcucugaaaucugguuugc

SEQ ID NO: 1328435 - RNA, 19 nt, Artificial Sequence
  Description of Artificial Sequence: Synthetic oligonucleotide
gggauacauguuuuaaauu

SEQ ID NO: 1328436 - RNA, 19 nt, Artificial Sequence
  Description of Artificial Sequence: Synthetic oligonucleotide
ggaaugcuccagcccacga

SEQ ID NO: 1328437 - RNA, 19 nt, Artificial Sequence
  Description of Artificial Sequence: Synthetic oligonucleotide
acaucgcaccauuguuguu

SEQ ID NO: 1328438 - RNA, 19 nt, Artificial Sequence
  Description of Artificial Sequence: Synthetic oligonucleotide
acaagcuggcuuggauuau

SEQ ID NO: 1328439 - RNA, 19 nt, Artificial Sequence
  Description of Artificial Sequence: Synthetic oligonucleotide
caccucuacacggcugauc

SEQ ID NO: 1328440 - RNA, 19 nt, Artificial Sequence
  Description of Artificial Sequence: Synthetic oligonucleotide
gcucaccaaagcgguauug

SEQ ID NO: 1328441 - RNA, 19 nt, Artificial Sequence
  Description of Artificial Sequence: Synthetic oligonucleotide
uugaugcaacaugcaccuc

SEQ ID NO: 1328442 - RNA, 19 nt, Artificial Sequence
  Description of Artificial Sequence: Synthetic oligonucleotide
cgucacacaacuguuauua

SEQ ID NO: 1328443 - RNA, 19 nt, Artificial Sequence
  Description of Artificial Sequence: Synthetic oligonucleotide
cauggcuguguguucuagu

SEQ ID NO: 1328444 - RNA, 19 nt, Artificial Sequence
  Description of Artificial Sequence: Synthetic oligonucleotide
cuugacuauuaagugcuuu

SEQ ID NO: 1328445 - RNA, 19 nt, Artificial Sequence
  Description of Artificial Sequence: Synthetic oligonucleotide
auccgucacacaacuguua

SEQ ID NO: 1328446 - RNA, 19 nt, Artificial Sequence
  Description of Artificial Sequence: Synthetic oligonucleotide
ucgcaccauuguuguucug

SEQ ID NO: 1328447 - RNA, 19 nt, Artificial Sequence
  Description of Artificial Sequence: Synthetic oligonucleotide
gacggugaaguuggaggcu

SEQ ID NO: 1328448 - RNA, 19 nt, Artificial Sequence
  Description of Artificial Sequence: Synthetic oligonucleotide
ggugaauucucaguauuuu

SEQ ID NO: 1328449 - RNA, 19 nt, Artificial Sequence
  Description of Artificial Sequence: Synthetic oligonucleotide
cuucgacauucuuggaaau

SEQ ID NO: 1328450 - RNA, 19 nt, Artificial Sequence
  Description of Artificial Sequence: Synthetic oligonucleotide
caugcaccucuacacggcu

SEQ ID NO: 1328451 - RNA, 19 nt, Artificial Sequence
  Description of Artificial Sequence: Synthetic oligonucleotide
ccagacggugaaguuggag

SEQ ID NO: 1328452 - RNA, 19 nt, Artificial Sequence
  Description of Artificial Sequence: Synthetic oligonucleotide
uuccugccuuugacauacu

SEQ ID NO: 1328453 - RNA, 19 nt, Artificial Sequence
  Description of Artificial Sequence: Synthetic oligonucleotide
gaagugguacuguccccuu

SEQ ID NO: 1328454 - RNA, 19 nt, Artificial Sequence
  Description of Artificial Sequence: Synthetic oligonucleotide
acuugacuauuaagugcuu

SEQ ID NO: 1328455 - RNA, 19 nt, Artificial Sequence
  Description of Artificial Sequence: Synthetic oligonucleotide
ggcgguuucucaguaucaa

SEQ ID NO: 1328456 - RNA, 19 nt, Artificial Sequence
  Description of Artificial Sequence: Synthetic oligonucleotide
ggcguugaugcaacaugca

SEQ ID NO: 1328457 - RNA, 19 nt, Artificial Sequence
  Description of Artificial Sequence: Synthetic oligonucleotide
gucggcacuucaucccacu

SEQ ID NO: 1328458 - RNA, 19 nt, Artificial Sequence
  Description of Artificial Sequence: Synthetic oligonucleotide
ccacgacuccagaaccaug

SEQ ID NO: 1328459 - RNA, 19 nt, Artificial Sequence
  Description of Artificial Sequence: Synthetic oligonucleotide
cggcacuucaucccacuug

SEQ ID NO: 1328460 - RNA, 19 nt, Artificial Sequence
  Description of Artificial Sequence: Synthetic oligonucleotide
cuucaaccgucggcacuuc

SEQ ID NO: 1328461 - RNA, 19 nt, Artificial Sequence
  Description of Artificial Sequence: Synthetic oligonucleotide
gggccuauuccacaaccau

SEQ ID NO: 1328462 - RNA, 19 nt, Artificial Sequence
  Description of Artificial Sequence: Synthetic oligonucleotide
cacaaucauggggugaauu

SEQ ID NO: 1328463 - RNA, 19 nt, Artificial Sequence
  Description of Artificial Sequence: Synthetic oligonucleotide
ccuauuccacaaccauuga

SEQ ID NO: 1328464 - RNA, 19 nt, Artificial Sequence
  Description of Artificial Sequence: Synthetic oligonucleotide
gccaaguacgcugaguauu

SEQ ID NO: 1328465 - RNA, 19 nt, Artificial Sequence
  Description of Artificial Sequence: Synthetic oligonucleotide
ccaacucauagaaaucauu

SEQ ID NO: 1328466 - RNA, 19 nt, Artificial Sequence
  Description of Artificial Sequence: Synthetic oligonucleotide
gugcuggcgguuucucagu

SEQ ID NO: 1328467 - RNA, 19 nt, Artificial Sequence
  Description of Artificial Sequence: Synthetic oligonucleotide
ccaagcgagcaccacacau

SEQ ID NO: 1328468 - RNA, 19 nt, Artificial Sequence
  Description of Artificial Sequence: Synthetic oligonucleotide
cuggcucaccaaagcggua

SEQ ID NO: 1328469 - RNA, 19 nt, Artificial Sequence
  Description of Artificial Sequence: Synthetic oligonucleotide
cugugcggauagccaagua

SEQ ID NO: 1328470 - RNA, 19 nt, Artificial Sequence
  Description of Artificial Sequence: Synthetic oligonucleotide
cccuugugaggaacccauc

SEQ ID NO: 1328471 - RNA, 19 nt, Artificial Sequence
  Description of Artificial Sequence: Synthetic oligonucleotide
gcgcguuugcaagcugccc

SEQ ID NO: 1328472 - RNA, 19 nt, Artificial Sequence
  Description of Artificial Sequence: Synthetic oligonucleotide
cccacuugacauggaaaga

SEQ ID NO: 1328473 - RNA, 19 nt, Artificial Sequence
  Description of Artificial Sequence: Synthetic oligonucleotide
ccagcccacgacuccagaa

SEQ ID NO: 1328474 - RNA, 19 nt, Artificial Sequence
  Description of Artificial Sequence: Synthetic oligonucleotide
ccgucggcacuucauccca

SEQ ID NO: 1328475 - RNA, 19 nt, Artificial Sequence
  Description of Artificial Sequence: Synthetic oligonucleotide
ccauaacccuuuucauucu

SEQ ID NO: 1328476 - RNA, 19 nt, Artificial Sequence
  Description of Artificial Sequence: Synthetic oligonucleotide
gcggauagccaaguacgcu

SEQ ID NO: 1328477 - RNA, 19 nt, Artificial Sequence
  Description of Artificial Sequence: Synthetic oligonucleotide
ggccuauuccacaaccauu

SEQ ID NO: 1328478 - RNA, 19 nt, Artificial Sequence
  Description of Artificial Sequence: Synthetic oligonucleotide
ccaucgaacuugaguggcu

SEQ ID NO: 1328479 - RNA, 19 nt, Artificial Sequence
  Description of Artificial Sequence: Synthetic oligonucleotide
ccugugcugugcggauagc

SEQ ID NO: 1328480 - RNA, 19 nt, Artificial Sequence
  Description of Artificial Sequence: Synthetic oligonucleotide
ccaaagcgguauuguuuua

SEQ ID NO: 1328481 - RNA, 19 nt, Artificial Sequence
  Description of Artificial Sequence: Synthetic oligonucleotide
ccuauaacacuggcuguau

SEQ ID NO: 1328482 - RNA, 19 nt, Artificial Sequence
  Description of Artificial Sequence: Synthetic oligonucleotide
ggacaagauccuguuucuu

SEQ ID NO: 1328483 - RNA, 19 nt, Artificial Sequence
  Description of Artificial Sequence: Synthetic oligonucleotide
gcuggcgguuucucaguau

SEQ ID NO: 1328484 - RNA, 19 nt, Artificial Sequence
  Description of Artificial Sequence: Synthetic oligonucleotide
ccuucaaccgucggcacuu

SEQ ID NO: 1328485 - RNA, 19 nt, Artificial Sequence
  Description of Artificial Sequence: Synthetic oligonucleotide
ccgucacacaacuguuauu

SEQ ID NO: 1328486 - RNA, 19 nt, Artificial Sequence
  Description of Artificial Sequence: Synthetic oligonucleotide
gcaccucuacacggcugau

SEQ ID NO: 1328487 - RNA, 19 nt, Artificial Sequence
  Description of Artificial Sequence: Synthetic oligonucleotide
aauacuaucuccaugggag

SEQ ID NO: 1328488 - RNA, 19 nt, Artificial Sequence
  Description of Artificial Sequence: Synthetic oligonucleotide
aaaacgaaaggugaaauag

SEQ ID NO: 1328489 - RNA, 19 nt, Artificial Sequence
  Description of Artificial Sequence: Synthetic oligonucleotide
uauaaaaggaaauggagac

SEQ ID NO: 1328490 - RNA, 19 nt, Artificial Sequence
  Description of Artificial Sequence: Synthetic oligonucleotide
aaaacagacagcuggcuuc

SEQ ID NO: 1328491 - RNA, 19 nt, Artificial Sequence
  Description of Artificial Sequence: Synthetic oligonucleotide
auuaagacaacauugacua

SEQ ID NO: 1328492 - RNA, 19 nt, Artificial Sequence
  Description of Artificial Sequence: Synthetic oligonucleotide
ugucauuuaaaggaaaagg

SEQ ID NO: 1328493 - RNA, 19 nt, Artificial Sequence
  Description of Artificial Sequence: Synthetic oligonucleotide
aaagagacugacauuaacg

SEQ ID NO: 1328494 - RNA, 19 nt, Artificial Sequence
  Description of Artificial Sequence: Synthetic oligonucleotide
agauggaagggguagaugg

SEQ ID NO: 1328495 - RNA, 19 nt, Artificial Sequence
  Description of Artificial Sequence: Synthetic oligonucleotide
accuuaaucaccuagauuu

SEQ ID NO: 1328496 - RNA, 19 nt, Artificial Sequence
  Description of Artificial Sequence: Synthetic oligonucleotide
uucacgauggcucaggggc

SEQ ID NO: 1328497 - RNA, 19 nt, Artificial Sequence
  Description of Artificial Sequence: Synthetic oligonucleotide
gacaacauugacuaaccgg

SEQ ID NO: 1328498 - RNA, 19 nt, Artificial Sequence
  Description of Artificial Sequence: Synthetic oligonucleotide
aacggaaagaggaaggggc

SEQ ID NO: 1328499 - RNA, 19 nt, Artificial Sequence
  Description of Artificial Sequence: Synthetic oligonucleotide
aaauagcuuaaacagaaau

SEQ ID NO: 1328500 - RNA, 19 nt, Artificial Sequence
  Description of Artificial Sequence: Synthetic oligonucleotide
auugguauugguuagucug

SEQ ID NO: 1328501 - RNA, 19 nt, Artificial Sequence
  Description of Artificial Sequence: Synthetic oligonucleotide
auauacagccuccugcucc

SEQ ID NO: 1328502 - RNA, 19 nt, Artificial Sequence
  Description of Artificial Sequence: Synthetic oligonucleotide
ugagguuccaccucaaaag

SEQ ID NO: 1328503 - RNA, 19 nt, Artificial Sequence
  Description of Artificial Sequence: Synthetic oligonucleotide
uguggagaucuuuaaaucc

SEQ ID NO: 1328504 - RNA, 19 nt, Artificial Sequence
  Description of Artificial Sequence: Synthetic oligonucleotide
aaaggaacuuuacagaauu

SEQ ID NO: 1328505 - RNA, 19 nt, Artificial Sequence
  Description of Artificial Sequence: Synthetic oligonucleotide
aggauuucaaaacgaaagg

SEQ ID NO: 1328506 - RNA, 19 nt, Artificial Sequence
  Description of Artificial Sequence: Synthetic oligonucleotide
uguauguaggcucuguaca

SEQ ID NO: 1328507 - RNA, 19 nt, Artificial Sequence
  Description of Artificial Sequence: Synthetic oligonucleotide
gacauuaacggaaagagga

SEQ ID NO: 1328508 - RNA, 19 nt, Artificial Sequence
  Description of Artificial Sequence: Synthetic oligonucleotide
ucugaaagacaaaugcuca

SEQ ID NO: 1328509 - RNA, 19 nt, Artificial Sequence
  Description of Artificial Sequence: Synthetic oligonucleotide
aagacaacauugacuaacc

SEQ ID NO: 1328510 - RNA, 19 nt, Artificial Sequence
  Description of Artificial Sequence: Synthetic oligonucleotide
gauuucaaaacgaaaggug

SEQ ID NO: 1328511 - RNA, 19 nt, Artificial Sequence
  Description of Artificial Sequence: Synthetic oligonucleotide
uauuauugguauugguuag

SEQ ID NO: 1328512 - RNA, 19 nt, Artificial Sequence
  Description of Artificial Sequence: Synthetic oligonucleotide
aagacaaaugcucauuaaa

SEQ ID NO: 1328513 - RNA, 19 nt, Artificial Sequence
  Description of Artificial Sequence: Synthetic oligonucleotide
agugaaugagcaauugugc

SEQ ID NO: 1328514 - RNA, 19 nt, Artificial Sequence
  Description of Artificial Sequence: Synthetic oligonucleotide
gauguguccagacagaaaa

SEQ ID NO: 1328515 - RNA, 19 nt, Artificial Sequence
  Description of Artificial Sequence: Synthetic oligonucleotide
ugacauuaacggaaagagg

SEQ ID NO: 1328516 - RNA, 19 nt, Artificial Sequence
  Description of Artificial Sequence: Synthetic oligonucleotide
uucuccuuaaaagggaagg

SEQ ID NO: 1328517 - RNA, 19 nt, Artificial Sequence
  Description of Artificial Sequence: Synthetic oligonucleotide
auaaugguagugucuacag

SEQ ID NO: 1328518 - RNA, 19 nt, Artificial Sequence
  Description of Artificial Sequence: Synthetic oligonucleotide
ugaugcaagucucaaaguc

SEQ ID NO: 1328519 - RNA, 19 nt, Artificial Sequence
  Description of Artificial Sequence: Synthetic oligonucleotide
uugguauugguuagucugg

SEQ ID NO: 1328520 - RNA, 19 nt, Artificial Sequence
  Description of Artificial Sequence: Synthetic oligonucleotide
accaagacaggaugugucc

SEQ ID NO: 1328521 - RNA, 19 nt, Artificial Sequence
  Description of Artificial Sequence: Synthetic oligonucleotide
gaucuuuaaaucccugccc

SEQ ID NO: 1328522 - RNA, 19 nt, Artificial Sequence
  Description of Artificial Sequence: Synthetic oligonucleotide
ugaaugagcaauugugcug

SEQ ID NO: 1328523 - RNA, 19 nt, Artificial Sequence
  Description of Artificial Sequence: Synthetic oligonucleotide
gaauccugaccccacauug

SEQ ID NO: 1328524 - RNA, 19 nt, Artificial Sequence
  Description of Artificial Sequence: Synthetic oligonucleotide
uuaacggaaagaggaaggg

SEQ ID NO: 1328525 - RNA, 19 nt, Artificial Sequence
  Description of Artificial Sequence: Synthetic oligonucleotide
aauauacagccuccugcuc

SEQ ID NO: 1328526 - RNA, 19 nt, Artificial Sequence
  Description of Artificial Sequence: Synthetic oligonucleotide
uuguuuucgccauuuaaac

SEQ ID NO: 1328527 - RNA, 19 nt, Artificial Sequence
  Description of Artificial Sequence: Synthetic oligonucleotide
ggugauuccucucaugugg

SEQ ID NO: 1328528 - RNA, 19 nt, Artificial Sequence
  Description of Artificial Sequence: Synthetic oligonucleotide
aagucccagaauccugacc

SEQ ID NO: 1328529 - RNA, 19 nt, Artificial Sequence
  Description of Artificial Sequence: Synthetic oligonucleotide
uaaugguagugucuacagg

SEQ ID NO: 1328530 - RNA, 19 nt, Artificial Sequence
  Description of Artificial Sequence: Synthetic oligonucleotide
aagaccccuucccauggcc

SEQ ID NO: 1328531 - RNA, 19 nt, Artificial Sequence
  Description of Artificial Sequence: Synthetic oligonucleotide
uuaucacacaauccuauuc

SEQ ID NO: 1328532 - RNA, 19 nt, Artificial Sequence
  Description of Artificial Sequence: Synthetic oligonucleotide
aaggcuuaguguauguagg

SEQ ID NO: 1328533 - RNA, 19 nt, Artificial Sequence
  Description of Artificial Sequence: Synthetic oligonucleotide
uucagcaucccagugaaug

SEQ ID NO: 1328534 - RNA, 19 nt, Artificial Sequence
  Description of Artificial Sequence: Synthetic oligonucleotide
acauugacuaaccgguuuc

SEQ ID NO: 1328535 - RNA, 19 nt, Artificial Sequence
  Description of Artificial Sequence: Synthetic oligonucleotide
agucccaacaaacccagag

SEQ ID NO: 1328536 - RNA, 19 nt, Artificial Sequence
  Description of Artificial Sequence: Synthetic oligonucleotide
gagaucuuuaaaucccugc

SEQ ID NO: 1328537 - RNA, 19 nt, Artificial Sequence
  Description of Artificial Sequence: Synthetic oligonucleotide
ugauugccugguaaaacag

SEQ ID NO: 1328538 - RNA, 19 nt, Artificial Sequence
  Description of Artificial Sequence: Synthetic oligonucleotide
auuaacggaaagaggaagg

SEQ ID NO: 1328539 - RNA, 19 nt, Artificial Sequence
  Description of Artificial Sequence: Synthetic oligonucleotide
uauugguuagucugggucu

SEQ ID NO: 1328540 - RNA, 19 nt, Artificial Sequence
  Description of Artificial Sequence: Synthetic oligonucleotide
auguuuauuauugguauug

SEQ ID NO: 1328541 - RNA, 19 nt, Artificial Sequence
  Description of Artificial Sequence: Synthetic oligonucleotide
agcaauugugcugaacccc

SEQ ID NO: 1328542 - RNA, 19 nt, Artificial Sequence
  Description of Artificial Sequence: Synthetic oligonucleotide
cuguacacggcagacaugg

SEQ ID NO: 1328543 - RNA, 19 nt, Artificial Sequence
  Description of Artificial Sequence: Synthetic oligonucleotide
ugugaugcugcccauucac

SEQ ID NO: 1328544 - RNA, 19 nt, Artificial Sequence
  Description of Artificial Sequence: Synthetic oligonucleotide
uguuuucgccauuuaaaca

SEQ ID NO: 1328545 - RNA, 19 nt, Artificial Sequence
  Description of Artificial Sequence: Synthetic oligonucleotide
auugccugguaaaacagac

SEQ ID NO: 1328546 - RNA, 19 nt, Artificial Sequence
  Description of Artificial Sequence: Synthetic oligonucleotide
uugucauuuaaaggaaaag

SEQ ID NO: 1328547 - RNA, 19 nt, Artificial Sequence
  Description of Artificial Sequence: Synthetic oligonucleotide
cuucccauggccuggaaug

SEQ ID NO: 1328548 - RNA, 19 nt, Artificial Sequence
  Description of Artificial Sequence: Synthetic oligonucleotide
guauaaaaggaaauggaga

SEQ ID NO: 1328549 - RNA, 19 nt, Artificial Sequence
  Description of Artificial Sequence: Synthetic oligonucleotide
ucaagaggugucugugugg

SEQ ID NO: 1328550 - RNA, 19 nt, Artificial Sequence
  Description of Artificial Sequence: Synthetic oligonucleotide
  modified_base (3)..(3): a, c, u, g, unknown or other
ugngcugucugcugccugg

SEQ ID NO: 1328551 - RNA, 19 nt, Artificial Sequence
  Description of Artificial Sequence: Synthetic oligonucleotide
ucucaaagucuguauaaaa

SEQ ID NO: 1328552 - RNA, 19 nt, Artificial Sequence
  Description of Artificial Sequence: Synthetic oligonucleotide
guauugguuagucuggguc

SEQ ID NO: 1328553 - RNA, 19 nt, Artificial Sequence
  Description of Artificial Sequence: Synthetic oligonucleotide
gccaagagagaauauacag

SEQ ID NO: 1328554 - RNA, 19 nt, Artificial Sequence
  Description of Artificial Sequence: Synthetic oligonucleotide
uauguaggcucuguacacg

SEQ ID NO: 1328555 - RNA, 19 nt, Artificial Sequence
  Description of Artificial Sequence: Synthetic oligonucleotide
ugcacaaaaucauguuuug

SEQ ID NO: 1328556 - RNA, 19 nt, Artificial Sequence
  Description of Artificial Sequence: Synthetic oligonucleotide
aaagucuguauaaaaggaa

SEQ ID NO: 1328557 - RNA, 19 nt, Artificial Sequence
  Description of Artificial Sequence: Synthetic oligonucleotide
auguaggcucuguacacgg

SEQ ID NO: 1328558 - RNA, 19 nt, Artificial Sequence
  Description of Artificial Sequence: Synthetic oligonucleotide
aacauugacuaaccgguuu

SEQ ID NO: 1328559 - RNA, 19 nt, Artificial Sequence
  Description of Artificial Sequence: Synthetic oligonucleotide
cuucaguucacaaaggugu

SEQ ID NO: 1328560 - RNA, 19 nt, Artificial Sequence
  Description of Artificial Sequence: Synthetic oligonucleotide
cacaaccuuaaucaccuag

SEQ ID NO: 1328561 - RNA, 19 nt, Artificial Sequence
  Description of Artificial Sequence: Synthetic oligonucleotide
uaacggaaagaggaagggg

SEQ ID NO: 1328562 - RNA, 19 nt, Artificial Sequence
  Description of Artificial Sequence: Synthetic oligonucleotide
agacaacauugacuaaccg

SEQ ID NO: 1328563 - RNA, 19 nt, Artificial Sequence
  Description of Artificial Sequence: Synthetic oligonucleotide
cauuaacggaaagaggaag

SEQ ID NO: 1328564 - RNA, 19 nt, Artificial Sequence
  Description of Artificial Sequence: Synthetic oligonucleotide
ucgccauuuaaacauuauc

SEQ ID NO: 1328565 - RNA, 19 nt, Artificial Sequence
  Description of Artificial Sequence: Synthetic oligonucleotide
gagcaauugugcugaaccc

SEQ ID NO: 1328566 - RNA, 19 nt, Artificial Sequence
  Description of Artificial Sequence: Synthetic oligonucleotide
acaggaaaauccuccucag

SEQ ID NO: 1328567 - RNA, 19 nt, Artificial Sequence
  Description of Artificial Sequence: Synthetic oligonucleotide
aauccugaccccacauugg

SEQ ID NO: 1328568 - RNA, 19 nt, Artificial Sequence
  Description of Artificial Sequence: Synthetic oligonucleotide
aggaacuuuacagaauugu

SEQ ID NO: 1328569 - RNA, 19 nt, Artificial Sequence
  Description of Artificial Sequence: Synthetic oligonucleotide
ucaaaacgaaaggugaaau

SEQ ID NO: 1328570 - RNA, 19 nt, Artificial Sequence
  Description of Artificial Sequence: Synthetic oligonucleotide
cuaaccgguuuccuuacag

SEQ ID NO: 1328571 - RNA, 19 nt, Artificial Sequence
  Description of Artificial Sequence: Synthetic oligonucleotide
ugacuaaccgguuuccuua

SEQ ID NO: 1328572 - RNA, 19 nt, Artificial Sequence
  Description of Artificial Sequence: Synthetic oligonucleotide
agagacugacauuaacgga

SEQ ID NO: 1328573 - RNA, 19 nt, Artificial Sequence
  Description of Artificial Sequence: Synthetic oligonucleotide
agucucaaagucuguauaa

SEQ ID NO: 1328574 - RNA, 19 nt, Artificial Sequence
  Description of Artificial Sequence: Synthetic oligonucleotide
gaagugagguuccaccuca

SEQ ID NO: 1328575 - RNA, 19 nt, Artificial Sequence
  Description of Artificial Sequence: Synthetic oligonucleotide
gucuacaggaaaauccucc

SEQ ID NO: 1328576 - RNA, 19 nt, Artificial Sequence
  Description of Artificial Sequence: Synthetic oligonucleotide
aucacacaauccuauucug

SEQ ID NO: 1328577 - RNA, 19 nt, Artificial Sequence
  Description of Artificial Sequence: Synthetic oligonucleotide
uggagaucuuuaaaucccu

SEQ ID NO: 1328578 - RNA, 19 nt, Artificial Sequence
  Description of Artificial Sequence: Synthetic oligonucleotide
agacaggauguguccagac

SEQ ID NO: 1328579 - RNA, 19 nt, Artificial Sequence
  Description of Artificial Sequence: Synthetic oligonucleotide
ugcauaaugguagugucua

SEQ ID NO: 1328580 - RNA, 19 nt, Artificial Sequence
  Description of Artificial Sequence: Synthetic oligonucleotide
uauugguauugguuagucu

SEQ ID NO: 1328581 - RNA, 19 nt, Artificial Sequence
  Description of Artificial Sequence: Synthetic oligonucleotide
guggagaucuuuaaauccc

SEQ ID NO: 1328582 - RNA, 19 nt, Artificial Sequence
  Description of Artificial Sequence: Synthetic oligonucleotide
cuguggagaucuuuaaauc

SEQ ID NO: 1328583 - RNA, 19 nt, Artificial Sequence
  Description of Artificial Sequence: Synthetic oligonucleotide
gugauugccugguaaaaca

SEQ ID NO: 1328584 - RNA, 19 nt, Artificial Sequence
  Description of Artificial Sequence: Synthetic oligonucleotide
caggagagucccaacaaac

SEQ ID NO: 1328585 - RNA, 19 nt, Artificial Sequence
  Description of Artificial Sequence: Synthetic oligonucleotide
gagagaauauacagccucc

SEQ ID NO: 1328586 - RNA, 19 nt, Artificial Sequence
  Description of Artificial Sequence: Synthetic oligonucleotide
ucagcaucccagugaauga

SEQ ID NO: 1328587 - RNA, 19 nt, Artificial Sequence
  Description of Artificial Sequence: Synthetic oligonucleotide
gccauuuaaacauuaucac

SEQ ID NO: 1328588 - RNA, 19 nt, Artificial Sequence
  Description of Artificial Sequence: Synthetic oligonucleotide
  modified_base (11)..(11): a, c, u, g, unknown or other
uucacggcugngcugucug

SEQ ID NO: 1328589 - RNA, 19 nt, Artificial Sequence
  Description of Artificial Sequence: Synthetic oligonucleotide
agacaaaugcucauuaaaa

SEQ ID NO: 1328590 - RNA, 19 nt, Artificial Sequence
  Description of Artificial Sequence: Synthetic oligonucleotide
guauguaggcucuguacac

SEQ ID NO: 1328591 - RNA, 19 nt, Artificial Sequence
  Description of Artificial Sequence: Synthetic oligonucleotide
cucaagaggugucugugug

SEQ ID NO: 1328592 - RNA, 19 nt, Artificial Sequence
  Description of Artificial Sequence: Synthetic oligonucleotide
uagcuuuguuaauugcaca

SEQ ID NO: 1328593 - RNA, 19 nt, Artificial Sequence
  Description of Artificial Sequence: Synthetic oligonucleotide
uuauugguauugguuaguc

SEQ ID NO: 1328594 - RNA, 19 nt, Artificial Sequence
  Description of Artificial Sequence: Synthetic oligonucleotide
aagggguagaugggugggc

SEQ ID NO: 1328595 - RNA, 19 nt, Artificial Sequence
  Description of Artificial Sequence: Synthetic oligonucleotide
acggaaagaggaaggggcc

SEQ ID NO: 1328596 - RNA, 19 nt, Artificial Sequence
  Description of Artificial Sequence: Synthetic oligonucleotide
ugguauugguuagucuggg

SEQ ID NO: 1328597 - RNA, 19 nt, Artificial Sequence
  Description of Artificial Sequence: Synthetic oligonucleotide
agguuccaccucaaaagcc

SEQ ID NO: 1328598 - RNA, 19 nt, Artificial Sequence
  Description of Artificial Sequence: Synthetic oligonucleotide
cacauugggaagagaggcc

SEQ ID NO: 1328599 - RNA, 19 nt, Artificial Sequence
  Description of Artificial Sequence: Synthetic oligonucleotide
auuuucacaaugucacauu

SEQ ID NO: 1328600 - RNA, 19 nt, Artificial Sequence
  Description of Artificial Sequence: Synthetic oligonucleotide
ugcucaucuaugaaauguu

SEQ ID NO: 1328601 - RNA, 19 nt, Artificial Sequence
  Description of Artificial Sequence: Synthetic oligonucleotide
acaauccuauucugaaaga

SEQ ID NO: 1328602 - RNA, 19 nt, Artificial Sequence
  Description of Artificial Sequence: Synthetic oligonucleotide
cacccuuacacuccacugc

SEQ ID NO: 1328603 - RNA, 19 nt, Artificial Sequence
  Description of Artificial Sequence: Synthetic oligonucleotide
cuaagucccagaauccuga

SEQ ID NO: 1328604 - RNA, 19 nt, Artificial Sequence
  Description of Artificial Sequence: Synthetic oligonucleotide
uucuuugugauugccuggu

SEQ ID NO: 1328605 - RNA, 19 nt, Artificial Sequence
  Description of Artificial Sequence: Synthetic oligonucleotide
uccaggagagucccaacaa

SEQ ID NO: 1328606 - RNA, 19 nt, Artificial Sequence
  Description of Artificial Sequence: Synthetic oligonucleotide
ggagacaggugacuggucc

SEQ ID NO: 1328607 - RNA, 19 nt, Artificial Sequence
  Description of Artificial Sequence: Synthetic oligonucleotide
agugccuccuuugggaguc

SEQ ID NO: 1328608 - RNA, 19 nt, Artificial Sequence
  Description of Artificial Sequence: Synthetic oligonucleotide
acagaauugucaacaauau

SEQ ID NO: 1328609 - RNA, 19 nt, Artificial Sequence
  Description of Artificial Sequence: Synthetic oligonucleotide
ugggccaaaacaggauggg

SEQ ID NO: 1328610 - RNA, 19 nt, Artificial Sequence
  Description of Artificial Sequence: Synthetic oligonucleotide
caguagcuuuguuaauugc

SEQ ID NO: 1328611 - RNA, 19 nt, Artificial Sequence
  Description of Artificial Sequence: Synthetic oligonucleotide
caaugcccagcucaagagc

SEQ ID NO: 1328612 - RNA, 19 nt, Artificial Sequence
  Description of Artificial Sequence: Synthetic oligonucleotide
aagauggaagggguagaug

SEQ ID NO: 1328613 - RNA, 19 nt, Artificial Sequence
  Description of Artificial Sequence: Synthetic oligonucleotide
uugcuccaugcccaugucc

SEQ ID NO: 1328614 - RNA, 19 nt, Artificial Sequence
  Description of Artificial Sequence: Synthetic oligonucleotide
acaaccuuaaucaccuaga

SEQ ID NO: 1328615 - RNA, 19 nt, Artificial Sequence
  Description of Artificial Sequence: Synthetic oligonucleotide
ugguagugucuacaggaaa

SEQ ID NO: 1328616 - RNA, 19 nt, Artificial Sequence
  Description of Artificial Sequence: Synthetic oligonucleotide
ugcaguagcuuuguuaauu

SEQ ID NO: 1328617 - RNA, 19 nt, Artificial Sequence
  Description of Artificial Sequence: Synthetic oligonucleotide
gcuaaagagacugacauua

SEQ ID NO: 1328618 - RNA, 19 nt, Artificial Sequence
  Description of Artificial Sequence: Synthetic oligonucleotide
ugcccauguccugagaucu

SEQ ID NO: 1328619 - RNA, 19 nt, Artificial Sequence
  Description of Artificial Sequence: Synthetic oligonucleotide
uuucgccauuuaaacauua

SEQ ID NO: 1328620 - RNA, 19 nt, Artificial Sequence
  Description of Artificial Sequence: Synthetic oligonucleotide
ucaggugauuccucucaug

SEQ ID NO: 1328621 - RNA, 19 nt, Artificial Sequence
  Description of Artificial Sequence: Synthetic oligonucleotide
uugacuaaccgguuuccuu

SEQ ID NO: 1328622 - RNA, 19 nt, Artificial Sequence
  Description of Artificial Sequence: Synthetic oligonucleotide
acccuuacacuccacugcu

SEQ ID NO: 1328623 - RNA, 19 nt, Artificial Sequence
  Description of Artificial Sequence: Synthetic oligonucleotide
agguggaaccaguuuccuc

SEQ ID NO: 1328624 - RNA, 19 nt, Artificial Sequence
  Description of Artificial Sequence: Synthetic oligonucleotide
cugaaccccacaagcauuc

SEQ ID NO: 1328625 - RNA, 19 nt, Artificial Sequence
  Description of Artificial Sequence: Synthetic oligonucleotide
cacacaauccuauucugaa

SEQ ID NO: 1328626 - RNA, 19 nt, Artificial Sequence
  Description of Artificial Sequence: Synthetic oligonucleotide
gcauucuaagccucucugg

SEQ ID NO: 1328627 - RNA, 19 nt, Artificial Sequence
  Description of Artificial Sequence: Synthetic oligonucleotide
augcaagucucaaagucug

SEQ ID NO: 1328628 - RNA, 19 nt, Artificial Sequence
  Description of Artificial Sequence: Synthetic oligonucleotide
gacugacauuaacggaaag

SEQ ID NO: 1328629 - RNA, 19 nt, Artificial Sequence
  Description of Artificial Sequence: Synthetic oligonucleotide
uuacacuccacugcuccca

SEQ ID NO: 1328630 - RNA, 19 nt, Artificial Sequence
  Description of Artificial Sequence: Synthetic oligonucleotide
uucgccauuuaaacauuau

SEQ ID NO: 1328631 - RNA, 19 nt, Artificial Sequence
  Description of Artificial Sequence: Synthetic oligonucleotide
gugaaauagcuuaaacaga

SEQ ID NO: 1328632 - RNA, 19 nt, Artificial Sequence
  Description of Artificial Sequence: Synthetic oligonucleotide
cauaaugguagugucuaca

SEQ ID NO: 1328633 - RNA, 19 nt, Artificial Sequence
  Description of Artificial Sequence: Synthetic oligonucleotide
uuaagacaacauugacuaa

SEQ ID NO: 1328634 - RNA, 19 nt, Artificial Sequence
  Description of Artificial Sequence: Synthetic oligonucleotide
uucaguucacaaagguguu

SEQ ID NO: 1328635 - RNA, 19 nt, Artificial Sequence
  Description of Artificial Sequence: Synthetic oligonucleotide
aucccagugaaugagcaau

SEQ ID NO: 1328636 - RNA, 19 nt, Artificial Sequence
  Description of Artificial Sequence: Synthetic oligonucleotide
gaugcaagucucaaagucu

SEQ ID NO: 1328637 - RNA, 19 nt, Artificial Sequence
  Description of Artificial Sequence: Synthetic oligonucleotide
uuuucgccauuuaaacauu

SEQ ID NO: 1328638 - RNA, 19 nt, Artificial Sequence
  Description of Artificial Sequence: Synthetic oligonucleotide
uuccaccucaaaagcccag

SEQ ID NO: 1328639 - RNA, 19 nt, Artificial Sequence
  Description of Artificial Sequence: Synthetic oligonucleotide
gguuccaccucaaaagccc

SEQ ID NO: 1328640 - RNA, 19 nt, Artificial Sequence
  Description of Artificial Sequence: Synthetic oligonucleotide
agagaauauacagccuccu

SEQ ID NO: 1328641 - RNA, 19 nt, Artificial Sequence
  Description of Artificial Sequence: Synthetic oligonucleotide
uccuauucugaaagacaaa

SEQ ID NO: 1328642 - RNA, 19 nt, Artificial Sequence
  Description of Artificial Sequence: Synthetic oligonucleotide
ucuaagccucucugguccc

SEQ ID NO: 1328643 - RNA, 19 nt, Artificial Sequence
  Description of Artificial Sequence: Synthetic oligonucleotide
ugguucacgauggcucagg

SEQ ID NO: 1328644 - RNA, 19 nt, Artificial Sequence
  Description of Artificial Sequence: Synthetic oligonucleotide
ugguuagucugggucuggg

SEQ ID NO: 1328645 - RNA, 19 nt, Artificial Sequence
  Description of Artificial Sequence: Synthetic oligonucleotide
guaggcucuguacacggca

SEQ ID NO: 1328646 - RNA, 19 nt, Artificial Sequence
  Description of Artificial Sequence: Synthetic oligonucleotide
gagcuaagucccagaaucc

SEQ ID NO: 1328647 - RNA, 19 nt, Artificial Sequence
  Description of Artificial Sequence: Synthetic oligonucleotide
gacuaaccgguuuccuuac

SEQ ID NO: 1328648 - RNA, 19 nt, Artificial Sequence
  Description of Artificial Sequence: Synthetic oligonucleotide
gugaaugagcaauugugcu

SEQ ID NO: 1328649 - RNA, 19 nt, Artificial Sequence
  Description of Artificial Sequence: Synthetic oligonucleotide
gcuuaguguauguaggcuc

SEQ ID NO: 1328650 - RNA, 19 nt, Artificial Sequence
  Description of Artificial Sequence: Synthetic oligonucleotide
auugguuagucugggucug

SEQ ID NO: 1328651 - RNA, 19 nt, Artificial Sequence
  Description of Artificial Sequence: Synthetic oligonucleotide
aaccccacaagcauucuuu

SEQ ID NO: 1328652 - RNA, 19 nt, Artificial Sequence
  Description of Artificial Sequence: Synthetic oligonucleotide
cacaaaaucauguuuuguu

SEQ ID NO: 1328653 - RNA, 19 nt, Artificial Sequence
  Description of Artificial Sequence: Synthetic oligonucleotide
ggcauucuaagccucucug

SEQ ID NO: 1328654 - RNA, 19 nt, Artificial Sequence
  Description of Artificial Sequence: Synthetic oligonucleotide
aagacaggauguguccaga

SEQ ID NO: 1328655 - RNA, 19 nt, Artificial Sequence
  Description of Artificial Sequence: Synthetic oligonucleotide
uccagagcuaagucccaga

SEQ ID NO: 1328656 - RNA, 19 nt, Artificial Sequence
  Description of Artificial Sequence: Synthetic oligonucleotide
gguggaaccaguuuccucu

SEQ ID NO: 1328657 - RNA, 19 nt, Artificial Sequence
  Description of Artificial Sequence: Synthetic oligonucleotide
cuuggaaccacuggcagaa

SEQ ID NO: 1328658 - RNA, 19 nt, Artificial Sequence
  Description of Artificial Sequence: Synthetic oligonucleotide
ugcaagucucaaagucugu

SEQ ID NO: 1328659 - RNA, 19 nt, Artificial Sequence
  Description of Artificial Sequence: Synthetic oligonucleotide
gauugccugguaaaacaga

SEQ ID NO: 1328660 - RNA, 19 nt, Artificial Sequence
  Description of Artificial Sequence: Synthetic oligonucleotide
cuuaguguauguaggcucu

SEQ ID NO: 1328661 - RNA, 19 nt, Artificial Sequence
  Description of Artificial Sequence: Synthetic oligonucleotide
ccaacaaacccagagcuug

SEQ ID NO: 1328662 - RNA, 19 nt, Artificial Sequence
  Description of Artificial Sequence: Synthetic oligonucleotide
  modified_base (17)..(17): a, c, u, g, unknown or other
ugcccauucacggcugngc

SEQ ID NO: 1328663 - RNA, 19 nt, Artificial Sequence
  Description of Artificial Sequence: Synthetic oligonucleotide
  modified_base (10)..(10): a, c, u, g, unknown or other
ucacggcugngcugucugc

SEQ ID NO: 1328664 - RNA, 19 nt, Artificial Sequence
  Description of Artificial Sequence: Synthetic oligonucleotide
cugugcugaugcaagucuc

SEQ ID NO: 1328665 - RNA, 19 nt, Artificial Sequence
  Description of Artificial Sequence: Synthetic oligonucleotide
cauuaucacacaauccuau

SEQ ID NO: 1328666 - RNA, 19 nt, Artificial Sequence
  Description of Artificial Sequence: Synthetic oligonucleotide
auugacuaaccgguuuccu

SEQ ID NO: 1328667 - RNA, 19 nt, Artificial Sequence
  Description of Artificial Sequence: Synthetic oligonucleotide
ugcuggucucucuucaguu

SEQ ID NO: 1328668 - RNA, 19 nt, Artificial Sequence
  Description of Artificial Sequence: Synthetic oligonucleotide
cuggucucucuucaguuca

SEQ ID NO: 1328669 - RNA, 19 nt, Artificial Sequence
  Description of Artificial Sequence: Synthetic oligonucleotide
agcuaaagagacugacauu

SEQ ID NO: 1328670 - RNA, 19 nt, Artificial Sequence
  Description of Artificial Sequence: Synthetic oligonucleotide
cauucuaagccucucuggu

SEQ ID NO: 1328671 - RNA, 19 nt, Artificial Sequence
  Description of Artificial Sequence: Synthetic oligonucleotide
cagcuaaagagacugacau

SEQ ID NO: 1328672 - RNA, 19 nt, Artificial Sequence
  Description of Artificial Sequence: Synthetic oligonucleotide
gguucacgauggcucaggg

SEQ ID NO: 1328673 - RNA, 19 nt, Artificial Sequence
  Description of Artificial Sequence: Synthetic oligonucleotide
gcugcauaaugguaguguc

SEQ ID NO: 1328674 - RNA, 19 nt, Artificial Sequence
  Description of Artificial Sequence: Synthetic oligonucleotide
agccucaggugauuccucu

SEQ ID NO: 1328675 - RNA, 19 nt, Artificial Sequence
  Description of Artificial Sequence: Synthetic oligonucleotide
acauuaacggaaagaggaa

SEQ ID NO: 1328676 - RNA, 19 nt, Artificial Sequence
  Description of Artificial Sequence: Synthetic oligonucleotide
ggcccagcuaaagagacug

SEQ ID NO: 1328677 - RNA, 19 nt, Artificial Sequence
  Description of Artificial Sequence: Synthetic oligonucleotide
acacggcagacaugggugu

SEQ ID NO: 1328678 - RNA, 19 nt, Artificial Sequence
  Description of Artificial Sequence: Synthetic oligonucleotide
gcauucuuugcuccaugcc

SEQ ID NO: 1328679 - RNA, 19 nt, Artificial Sequence
  Description of Artificial Sequence: Synthetic oligonucleotide
acauuaucacacaauccua

SEQ ID NO: 1328680 - RNA, 19 nt, Artificial Sequence
  Description of Artificial Sequence: Synthetic oligonucleotide
gguucagcaucccagugaa

SEQ ID NO: 1328681 - RNA, 19 nt, Artificial Sequence
  Description of Artificial Sequence: Synthetic oligonucleotide
ggaaccacuggcagaagug

SEQ ID NO: 1328682 - RNA, 19 nt, Artificial Sequence
  Description of Artificial Sequence: Synthetic oligonucleotide
acaaaaccuccugggagga

SEQ ID NO: 1328683 - RNA, 19 nt, Artificial Sequence
  Description of Artificial Sequence: Synthetic oligonucleotide
gaugggacagaaauacuau

SEQ ID NO: 1328684 - RNA, 19 nt, Artificial Sequence
  Description of Artificial Sequence: Synthetic oligonucleotide
gguagugucuacaggaaaa

SEQ ID NO: 1328685 - RNA, 19 nt, Artificial Sequence
  Description of Artificial Sequence: Synthetic oligonucleotide
cuaaagagacugacauuaa

SEQ ID NO: 1328686 - RNA, 19 nt, Artificial Sequence
  Description of Artificial Sequence: Synthetic oligonucleotide
cuaugaagugcucaucuau

SEQ ID NO: 1328687 - RNA, 19 nt, Artificial Sequence
  Description of Artificial Sequence: Synthetic oligonucleotide
ggugugaugcugcccauuc

SEQ ID NO: 1328688 - RNA, 19 nt, Artificial Sequence
  Description of Artificial Sequence: Synthetic oligonucleotide
gguagaugggugggcaagg

SEQ ID NO: 1328689 - RNA, 19 nt, Artificial Sequence
  Description of Artificial Sequence: Synthetic oligonucleotide
ucccagaauccugacccca

SEQ ID NO: 1328690 - RNA, 19 nt, Artificial Sequence
  Description of Artificial Sequence: Synthetic oligonucleotide
agccuaugaagugcucauc

SEQ ID NO: 1328691 - RNA, 19 nt, Artificial Sequence
  Description of Artificial Sequence: Synthetic oligonucleotide
auggagguggaaccaguuu

SEQ ID NO: 1328692 - RNA, 19 nt, Artificial Sequence
  Description of Artificial Sequence: Synthetic oligonucleotide
cgaaaggugaaauagcuua

SEQ ID NO: 1328693 - RNA, 19 nt, Artificial Sequence
  Description of Artificial Sequence: Synthetic oligonucleotide
caggugauuccucucaugu

SEQ ID NO: 1328694 - RNA, 19 nt, Artificial Sequence
  Description of Artificial Sequence: Synthetic oligonucleotide
ucuuugugauugccuggua

SEQ ID NO: 1328695 - RNA, 19 nt, Artificial Sequence
  Description of Artificial Sequence: Synthetic oligonucleotide
ucccagugaaugagcaauu

SEQ ID NO: 1328696 - RNA, 19 nt, Artificial Sequence
  Description of Artificial Sequence: Synthetic oligonucleotide
ugcaggggaccuguguaga

SEQ ID NO: 1328697 - RNA, 19 nt, Artificial Sequence
  Description of Artificial Sequence: Synthetic oligonucleotide
guagaugggugggcaaggc

SEQ ID NO: 1328698 - RNA, 19 nt, Artificial Sequence
  Description of Artificial Sequence: Synthetic oligonucleotide
ggauuucaaaacgaaaggu

SEQ ID NO: 1328699 - RNA, 19 nt, Artificial Sequence
  Description of Artificial Sequence: Synthetic oligonucleotide
acuaaccgguuuccuuaca

SEQ ID NO: 1328700 - RNA, 19 nt, Artificial Sequence
  Description of Artificial Sequence: Synthetic oligonucleotide
agugagguuccaccucaaa

SEQ ID NO: 1328701 - RNA, 19 nt, Artificial Sequence
  Description of Artificial Sequence: Synthetic oligonucleotide
ccuuacaguaucuucccca

SEQ ID NO: 1328702 - RNA, 19 nt, Artificial Sequence
  Description of Artificial Sequence: Synthetic oligonucleotide
ggaggggcuuucuuacaag

SEQ ID NO: 1328703 - RNA, 19 nt, Artificial Sequence
  Description of Artificial Sequence: Synthetic oligonucleotide
ggaaggauuucaaaacgaa

SEQ ID NO: 1328704 - RNA, 19 nt, Artificial Sequence
  Description of Artificial Sequence: Synthetic oligonucleotide
ggaugggacagaaauacua

SEQ ID NO: 1328705 - RNA, 19 nt, Artificial Sequence
  Description of Artificial Sequence: Synthetic oligonucleotide
  modified_base (8)..(8): a, c, u, g, unknown or other
acggcugngcugucugcug

SEQ ID NO: 1328706 - RNA, 19 nt, Artificial Sequence
  Description of Artificial Sequence: Synthetic oligonucleotide
caugcaggggaccugugua

SEQ ID NO: 1328707 - RNA, 19 nt, Artificial Sequence
  Description of Artificial Sequence: Synthetic oligonucleotide
gaccccacauugggaagag

SEQ ID NO: 1328708 - RNA, 19 nt, Artificial Sequence
  Description of Artificial Sequence: Synthetic oligonucleotide
  modified_base (4)..(4): a, c, u, g, unknown or other
cugngcugucugcugccug

SEQ ID NO: 1328709 - RNA, 19 nt, Artificial Sequence
  Description of Artificial Sequence: Synthetic oligonucleotide
gcuaagucccagaauccug

SEQ ID NO: 1328710 - RNA, 19 nt, Artificial Sequence
  Description of Artificial Sequence: Synthetic oligonucleotide
gucccagaauccugacccc

SEQ ID NO: 1328711 - RNA, 19 nt, Artificial Sequence
  Description of Artificial Sequence: Synthetic oligonucleotide
uugcaguagcuuuguuaau

SEQ ID NO: 1328712 - RNA, 19 nt, Artificial Sequence
  Description of Artificial Sequence: Synthetic oligonucleotide
agacugacauuaacggaaa

SEQ ID NO: 1328713 - RNA, 19 nt, Artificial Sequence
  Description of Artificial Sequence: Synthetic oligonucleotide
uggagacaggugacugguc

SEQ ID NO: 1328714 - RNA, 19 nt, Artificial Sequence
  Description of Artificial Sequence: Synthetic oligonucleotide
aggcucuguacacggcaga

SEQ ID NO: 1328715 - RNA, 19 nt, Artificial Sequence
  Description of Artificial Sequence: Synthetic oligonucleotide
augguagugucuacaggaa

SEQ ID NO: 1328716 - RNA, 19 nt, Artificial Sequence
  Description of Artificial Sequence: Synthetic oligonucleotide
caguaucuuccccacccca

SEQ ID NO: 1328717 - RNA, 19 nt, Artificial Sequence
  Description of Artificial Sequence: Synthetic oligonucleotide
gagagugcugcuguuuacu

SEQ ID NO: 1328718 - RNA, 19 nt, Artificial Sequence
  Description of Artificial Sequence: Synthetic oligonucleotide
accgguuuccuuacaguau

SEQ ID NO: 1328719 - RNA, 19 nt, Artificial Sequence
  Description of Artificial Sequence: Synthetic oligonucleotide
gaagauggaagggguagau

SEQ ID NO: 1328720 - RNA, 19 nt, Artificial Sequence
  Description of Artificial Sequence: Synthetic oligonucleotide
cugcauaaugguagugucu

SEQ ID NO: 1328721 - RNA, 19 nt, Artificial Sequence
  Description of Artificial Sequence: Synthetic oligonucleotide
ccgguuuccuuacaguauc

SEQ ID NO: 1328722 - RNA, 19 nt, Artificial Sequence
  Description of Artificial Sequence: Synthetic oligonucleotide
gugacugguccagagcuaa

SEQ ID NO: 1328723 - RNA, 19 nt, Artificial Sequence
  Description of Artificial Sequence: Synthetic oligonucleotide
acgaaaggugaaauagcuu

SEQ ID NO: 1328724 - RNA, 19 nt, Artificial Sequence
  Description of Artificial Sequence: Synthetic oligonucleotide
gccuaugaagugcucaucu

SEQ ID NO: 1328725 - RNA, 19 nt, Artificial Sequence
  Description of Artificial Sequence: Synthetic oligonucleotide
ccacccuuacacuccacug

SEQ ID NO: 1328726 - RNA, 19 nt, Artificial Sequence
  Description of Artificial Sequence: Synthetic oligonucleotide
gcccucaagaccccuuccc

SEQ ID NO: 1328727 - RNA, 19 nt, Artificial Sequence
  Description of Artificial Sequence: Synthetic oligonucleotide
ccaccucaaaagcccagcc

SEQ ID NO: 1328728 - RNA, 19 nt, Artificial Sequence
  Description of Artificial Sequence: Synthetic oligonucleotide
uucuugcaguagcuuuguu

SEQ ID NO: 1328729 - RNA, 19 nt, Artificial Sequence
  Description of Artificial Sequence: Synthetic oligonucleotide
ccagcuaaagagacugaca

SEQ ID NO: 1328730 - RNA, 19 nt, Artificial Sequence
  Description of Artificial Sequence: Synthetic oligonucleotide
gcuggucucucuucaguuc

SEQ ID NO: 1328731 - RNA, 19 nt, Artificial Sequence
  Description of Artificial Sequence: Synthetic oligonucleotide
ggaccuguguagagcaggc

SEQ ID NO: 1328732 - RNA, 19 nt, Artificial Sequence
  Description of Artificial Sequence: Synthetic oligonucleotide
gugugaugcugcccauuca

SEQ ID NO: 1328733 - RNA, 19 nt, Artificial Sequence
  Description of Artificial Sequence: Synthetic oligonucleotide
caaaaccuccugggaggag

SEQ ID NO: 1328734 - RNA, 19 nt, Artificial Sequence
  Description of Artificial Sequence: Synthetic oligonucleotide
ggccaagagagaauauaca

SEQ ID NO: 1328735 - RNA, 19 nt, Artificial Sequence
  Description of Artificial Sequence: Synthetic oligonucleotide
gcuuggaaccacuggcaga

SEQ ID NO: 1328736 - RNA, 19 nt, Artificial Sequence
  Description of Artificial Sequence: Synthetic oligonucleotide
cccagcuaaagagacugac

SEQ ID NO: 1328737 - RNA, 19 nt, Artificial Sequence
  Description of Artificial Sequence: Synthetic oligonucleotide
ugugugggccaugcugguc

SEQ ID NO: 1328738 - RNA, 19 nt, Artificial Sequence
  Description of Artificial Sequence: Synthetic oligonucleotide
agaccccuucccauggccu

SEQ ID NO: 1328739 - RNA, 19 nt, Artificial Sequence
  Description of Artificial Sequence: Synthetic oligonucleotide
acggcagacauggguguga

SEQ ID NO: 1328740 - RNA, 19 nt, Artificial Sequence
  Description of Artificial Sequence: Synthetic oligonucleotide
  modified_base (6)..(6): a, c, u, g, unknown or other
ggcugngcugucugcugcc

SEQ ID NO: 1328741 - RNA, 19 nt, Artificial Sequence
  Description of Artificial Sequence: Synthetic oligonucleotide
ucacaaccuuaaucaccua

SEQ ID NO: 1328742 - RNA, 19 nt, Artificial Sequence
  Description of Artificial Sequence: Synthetic oligonucleotide
gcuuuguuaauugcacaaa

SEQ ID NO: 1328743 - RNA, 19 nt, Artificial Sequence
  Description of Artificial Sequence: Synthetic oligonucleotide
caccuguggagaucuuuaa

SEQ ID NO: 1328744 - RNA, 19 nt, Artificial Sequence
  Description of Artificial Sequence: Synthetic oligonucleotide
aagugagguuccaccucaa

SEQ ID NO: 1328745 - RNA, 19 nt, Artificial Sequence
  Description of Artificial Sequence: Synthetic oligonucleotide
gagucugcugguucacgau

SEQ ID NO: 1328746 - RNA, 19 nt, Artificial Sequence
  Description of Artificial Sequence: Synthetic oligonucleotide
uggcagaagugagguucca

SEQ ID NO: 1328747 - RNA, 19 nt, Artificial Sequence
  Description of Artificial Sequence: Synthetic oligonucleotide
guggcauucuaagccucuc

SEQ ID NO: 1328748 - RNA, 19 nt, Artificial Sequence
  Description of Artificial Sequence: Synthetic oligonucleotide
gguggcccagcuaaagaga

SEQ ID NO: 1328749 - RNA, 19 nt, Artificial Sequence
  Description of Artificial Sequence: Synthetic oligonucleotide
ggagggagagugcugcugu

SEQ ID NO: 1328750 - RNA, 19 nt, Artificial Sequence
  Description of Artificial Sequence: Synthetic oligonucleotide
cccagaauccugaccccac

SEQ ID NO: 1328751 - RNA, 19 nt, Artificial Sequence
  Description of Artificial Sequence: Synthetic oligonucleotide
agggagagugcugcuguuu

SEQ ID NO: 1328752 - RNA, 19 nt, Artificial Sequence
  Description of Artificial Sequence: Synthetic oligonucleotide
ccucaggugauuccucuca

SEQ ID NO: 1328753 - RNA, 19 nt, Artificial Sequence
  Description of Artificial Sequence: Synthetic oligonucleotide
cacggcagacaugggugug

SEQ ID NO: 1328754 - RNA, 19 nt, Artificial Sequence
  Description of Artificial Sequence: Synthetic oligonucleotide
caccucaaaagcccagccu

SEQ ID NO: 1328755 - RNA, 19 nt, Artificial Sequence
  Description of Artificial Sequence: Synthetic oligonucleotide
cccagugaaugagcaauug

SEQ ID NO: 1328756 - RNA, 19 nt, Artificial Sequence
  Description of Artificial Sequence: Synthetic oligonucleotide
gauggagguggaaccaguu

SEQ ID NO: 1328757 - RNA, 19 nt, Artificial Sequence
  Description of Artificial Sequence: Synthetic oligonucleotide
gguauugguuagucugggu

SEQ ID NO: 1328758 - RNA, 19 nt, Artificial Sequence
  Description of Artificial Sequence: Synthetic oligonucleotide
cagccuaugaagugcucau

SEQ ID NO: 1328759 - RNA, 19 nt, Artificial Sequence
  Description of Artificial Sequence: Synthetic oligonucleotide
  modified_base (16)..(16): a, c, u, g, unknown or other
gcccauucacggcugngcu

SEQ ID NO: 1328760 - RNA, 19 nt, Artificial Sequence
  Description of Artificial Sequence: Synthetic oligonucleotide
  modified_base (2)..(2): a, c, u, g, unknown or other
gngcugucugcugccugga

SEQ ID NO: 1328761 - RNA, 19 nt, Artificial Sequence
  Description of Artificial Sequence: Synthetic oligonucleotide
cccucaagaggugucugug

SEQ ID NO: 1328762 - RNA, 19 nt, Artificial Sequence
  Description of Artificial Sequence: Synthetic oligonucleotide
auacagccuccugcuccag

SEQ ID NO: 1328763 - RNA, 19 nt, Artificial Sequence
  Description of Artificial Sequence: Synthetic oligonucleotide
ccagagcuaagucccagaa

SEQ ID NO: 1328764 - RNA, 19 nt, Artificial Sequence
  Description of Artificial Sequence: Synthetic oligonucleotide
uccucagcuggaggcccac

SEQ ID NO: 1328765 - RNA, 19 nt, Artificial Sequence
  Description of Artificial Sequence: Synthetic oligonucleotide
ccagccuaugaagugcuca

SEQ ID NO: 1328766 - RNA, 19 nt, Artificial Sequence
  Description of Artificial Sequence: Synthetic oligonucleotide
  modified_base (7)..(7): a, c, u, g, unknown or other
cggcugngcugucugcugc

SEQ ID NO: 1328767 - RNA, 19 nt, Artificial Sequence
  Description of Artificial Sequence: Synthetic oligonucleotide
ggcuuaguguauguaggcu

SEQ ID NO: 1328768 - RNA, 19 nt, Artificial Sequence
  Description of Artificial Sequence: Synthetic oligonucleotide
gccuggaaugcaaauccaa

SEQ ID NO: 1328769 - RNA, 19 nt, Artificial Sequence
  Description of Artificial Sequence: Synthetic oligonucleotide
ccaagacaggaugugucca

SEQ ID NO: 1328770 - RNA, 19 nt, Artificial Sequence
  Description of Artificial Sequence: Synthetic oligonucleotide
cagagcuaagucccagaau

SEQ ID NO: 1328771 - RNA, 19 nt, Artificial Sequence
  Description of Artificial Sequence: Synthetic oligonucleotide
ccaggagagucccaacaaa

SEQ ID NO: 1328772 - RNA, 19 nt, Artificial Sequence
  Description of Artificial Sequence: Synthetic oligonucleotide
gagucccaacaaacccaga

SEQ ID NO: 1328773 - RNA, 19 nt, Artificial Sequence
  Description of Artificial Sequence: Synthetic oligonucleotide
cucaggugauuccucucau

SEQ ID NO: 1328774 - RNA, 19 nt, Artificial Sequence
  Description of Artificial Sequence: Synthetic oligonucleotide
ggccuggaaugcaaaucca

SEQ ID NO: 1328775 - RNA, 19 nt, Artificial Sequence
  Description of Artificial Sequence: Synthetic oligonucleotide
ccagaauccugaccccaca

SEQ ID NO: 1328776 - RNA, 19 nt, Artificial Sequence
  Description of Artificial Sequence: Synthetic oligonucleotide
gcaaggcuuaguguaugua

SEQ ID NO: 1328777 - RNA, 19 nt, Artificial Sequence
  Description of Artificial Sequence: Synthetic oligonucleotide
ggggaccuguguagagcag

SEQ ID NO: 1328778 - RNA, 19 nt, Artificial Sequence
  Description of Artificial Sequence: Synthetic oligonucleotide
  modified_base (9)..(9): a, c, u, g, unknown or other
cacggcugngcugucugcu

SEQ ID NO: 1328779 - RNA, 19 nt, Artificial Sequence
  Description of Artificial Sequence: Synthetic oligonucleotide
ccucaagaggugucugugu

SEQ ID NO: 1328780 - RNA, 19 nt, Artificial Sequence
  Description of Artificial Sequence: Synthetic oligonucleotide
gcugaaccccacaagcauu

SEQ ID NO: 1328781 - RNA, 19 nt, Artificial Sequence
  Description of Artificial Sequence: Synthetic oligonucleotide
gcccagcuaaagagacuga

SEQ ID NO: 1328782 - RNA, 19 nt, Artificial Sequence
  Description of Artificial Sequence: Synthetic oligonucleotide
cccaacaaacccagagcuu

SEQ ID NO: 1328783 - RNA, 19 nt, Artificial Sequence
  Description of Artificial Sequence: Synthetic oligonucleotide
  modified_base (5)..(5): a, c, u, g, unknown or other
gcugngcugucugcugccu

SEQ ID NO: 1328784 - RNA, 19 nt, Artificial Sequence
  Description of Artificial Sequence: Synthetic oligonucleotide
ccuucccauggccuggaau

SEQ ID NO: 1328785 - RNA, 19 nt, Artificial Sequence
  Description of Artificial Sequence: Synthetic oligonucleotide
ccccucaagaggugucugu

SEQ ID NO: 1328786 - RNA, 19 nt, Artificial Sequence
  Description of Artificial Sequence: Synthetic oligonucleotide
ggccacccuuacacuccac

SEQ ID NO: 1328787 - RNA, 19 nt, Artificial Sequence
  Description of Artificial Sequence: Synthetic oligonucleotide
cagugcccucaagaccccu

SEQ ID NO: 1328788 - RNA, 19 nt, Artificial Sequence
  Description of Artificial Sequence: Synthetic oligonucleotide
ggucccucuccaggagagu

SEQ ID NO: 1328789 - RNA, 19 nt, Artificial Sequence
  Description of Artificial Sequence: Synthetic oligonucleotide
ccucagcuggaggcccaca

SEQ ID NO: 1328790 - RNA, 19 nt, Artificial Sequence
  Description of Artificial Sequence: Synthetic oligonucleotide
aauaacaugaaauucaaau

SEQ ID NO: 1328791 - RNA, 19 nt, Artificial Sequence
  Description of Artificial Sequence: Synthetic oligonucleotide
uuuauauuaauauaccugu

SEQ ID NO: 1328792 - RNA, 19 nt, Artificial Sequence
  Description of Artificial Sequence: Synthetic oligonucleotide
agcagaaaugcauaaagcc

SEQ ID NO: 1328793 - RNA, 19 nt, Artificial Sequence
  Description of Artificial Sequence: Synthetic oligonucleotide
gauuuuaacaguccuaugc

SEQ ID NO: 1328794 - RNA, 19 nt, Artificial Sequence
  Description of Artificial Sequence: Synthetic oligonucleotide
uggagauagaauaacaugc

SEQ ID NO: 1328795 - RNA, 19 nt, Artificial Sequence
  Description of Artificial Sequence: Synthetic oligonucleotide
aaacuuauacuucugauau

SEQ ID NO: 1328796 - RNA, 19 nt, Artificial Sequence
  Description of Artificial Sequence: Synthetic oligonucleotide
uaagcuuuauucuugguag

SEQ ID NO: 1328797 - RNA, 19 nt, Artificial Sequence
  Description of Artificial Sequence: Synthetic oligonucleotide
aaaacacucaaucuuuaag

SEQ ID NO: 1328798 - RNA, 19 nt, Artificial Sequence
  Description of Artificial Sequence: Synthetic oligonucleotide
uuuuacuacauggagauag

SEQ ID NO: 1328799 - RNA, 19 nt, Artificial Sequence
  Description of Artificial Sequence: Synthetic oligonucleotide
uucugaaaagguuagagug

SEQ ID NO: 1328800 - RNA, 19 nt, Artificial Sequence
  Description of Artificial Sequence: Synthetic oligonucleotide
ucugauauuguucauccag

SEQ ID NO: 1328801 - RNA, 19 nt, Artificial Sequence
  Description of Artificial Sequence: Synthetic oligonucleotide
aaucuauaucaccaaguac

SEQ ID NO: 1328802 - RNA, 19 nt, Artificial Sequence
  Description of Artificial Sequence: Synthetic oligonucleotide
uuaauugccaauguuaagc

SEQ ID NO: 1328803 - RNA, 19 nt, Artificial Sequence
  Description of Artificial Sequence: Synthetic oligonucleotide
ucaagcauuacauuagccc

SEQ ID NO: 1328804 - RNA, 19 nt, Artificial Sequence
  Description of Artificial Sequence: Synthetic oligonucleotide
uuuaaggauaaacacuggc

SEQ ID NO: 1328805 - RNA, 19 nt, Artificial Sequence
  Description of Artificial Sequence: Synthetic oligonucleotide
uauucaagcauuacauuag

SEQ ID NO: 1328806 - RNA, 19 nt, Artificial Sequence
  Description of Artificial Sequence: Synthetic oligonucleotide
ucuacaaguacuaaagaaa

SEQ ID NO: 1328807 - RNA, 19 nt, Artificial Sequence
  Description of Artificial Sequence: Synthetic oligonucleotide
ucacgcaagaguaauauca

SEQ ID NO: 1328808 - RNA, 19 nt, Artificial Sequence
  Description of Artificial Sequence: Synthetic oligonucleotide
uuaaauaaucacuuucuga

SEQ ID NO: 1328809 - RNA, 19 nt, Artificial Sequence
  Description of Artificial Sequence: Synthetic oligonucleotide
gaucaaaucucccuuauac

SEQ ID NO: 1328810 - RNA, 19 nt, Artificial Sequence
  Description of Artificial Sequence: Synthetic oligonucleotide
ucaaaucucccuuauacug

SEQ ID NO: 1328811 - RNA, 19 nt, Artificial Sequence
  Description of Artificial Sequence: Synthetic oligonucleotide
guuagagugucauaaaagc

SEQ ID NO: 1328812 - RNA, 19 nt, Artificial Sequence
  Description of Artificial Sequence: Synthetic oligonucleotide
gaugauaauguucuacaag

SEQ ID NO: 1328813 - RNA, 19 nt, Artificial Sequence
  Description of Artificial Sequence: Synthetic oligonucleotide
uauauuaauauaccuguuc

SEQ ID NO: 1328814 - RNA, 19 nt, Artificial Sequence
  Description of Artificial Sequence: Synthetic oligonucleotide
uuaaggauaaacacuggcu

SEQ ID NO: 1328815 - RNA, 19 nt, Artificial Sequence
  Description of Artificial Sequence: Synthetic oligonucleotide
aguuuacaaauauugaacu

SEQ ID NO: 1328816 - RNA, 19 nt, Artificial Sequence
  Description of Artificial Sequence: Synthetic oligonucleotide
gauaaauucuuuuccaaca

SEQ ID NO: 1328817 - RNA, 19 nt, Artificial Sequence
  Description of Artificial Sequence: Synthetic oligonucleotide
ugucauaaaagcuacuggu

SEQ ID NO: 1328818 - RNA, 19 nt, Artificial Sequence
  Description of Artificial Sequence: Synthetic oligonucleotide
augugaacagcccucaaac

SEQ ID NO: 1328819 - RNA, 19 nt, Artificial Sequence
  Description of Artificial Sequence: Synthetic oligonucleotide
cagaaucuaagccacaucc

SEQ ID NO: 1328820 - RNA, 19 nt, Artificial Sequence
  Description of Artificial Sequence: Synthetic oligonucleotide
uauacuucugauauuguuc

SEQ ID NO: 1328821 - RNA, 19 nt, Artificial Sequence
  Description of Artificial Sequence: Synthetic oligonucleotide
uuuaucaguaggcggaacc

SEQ ID NO: 1328822 - RNA, 19 nt, Artificial Sequence
  Description of Artificial Sequence: Synthetic oligonucleotide
gaauccagauucuuugugg

SEQ ID NO: 1328823 - RNA, 19 nt, Artificial Sequence
  Description of Artificial Sequence: Synthetic oligonucleotide
aagaaucuacaucuuccac

SEQ ID NO: 1328824 - RNA, 19 nt, Artificial Sequence
  Description of Artificial Sequence: Synthetic oligonucleotide
uauauaugugaacagcccu

SEQ ID NO: 1328825 - RNA, 19 nt, Artificial Sequence
  Description of Artificial Sequence: Synthetic oligonucleotide
ugcagauuuauauuuauau

SEQ ID NO: 1328826 - RNA, 19 nt, Artificial Sequence
  Description of Artificial Sequence: Synthetic oligonucleotide
caagcauuacauuagcccc

SEQ ID NO: 1328827 - RNA, 19 nt, Artificial Sequence
  Description of Artificial Sequence: Synthetic oligonucleotide
aaaagcuacugguuaagca

SEQ ID NO: 1328828 - RNA, 19 nt, Artificial Sequence
  Description of Artificial Sequence: Synthetic oligonucleotide
aaggaugauaauguucuac

SEQ ID NO: 1328829 - RNA, 19 nt, Artificial Sequence
  Description of Artificial Sequence: Synthetic oligonucleotide
uuuuacgucccaauuauaa

SEQ ID NO: 1328830 - RNA, 19 nt, Artificial Sequence
  Description of Artificial Sequence: Synthetic oligonucleotide
aucuauaucaccaaguacu

SEQ ID NO: 1328831 - RNA, 19 nt, Artificial Sequence
  Description of Artificial Sequence: Synthetic oligonucleotide
uuucuugccucuaaaaggu

SEQ ID NO: 1328832 - RNA, 19 nt, Artificial Sequence
  Description of Artificial Sequence: Synthetic oligonucleotide
uuaauaacaugaaauucaa

SEQ ID NO: 1328833 - RNA, 19 nt, Artificial Sequence
  Description of Artificial Sequence: Synthetic oligonucleotide
auucaagcauuacauuagc

SEQ ID NO: 1328834 - RNA, 19 nt, Artificial Sequence
  Description of Artificial Sequence: Synthetic oligonucleotide
aaagguuagagugucauaa

SEQ ID NO: 1328835 - RNA, 19 nt, Artificial Sequence
  Description of Artificial Sequence: Synthetic oligonucleotide
agucuguuuaauuucagga

SEQ ID NO: 1328836 - RNA, 19 nt, Artificial Sequence
  Description of Artificial Sequence: Synthetic oligonucleotide
ucuuuaacacuguaucugc

SEQ ID NO: 1328837 - RNA, 19 nt, Artificial Sequence
  Description of Artificial Sequence: Synthetic oligonucleotide
uuagagugucauaaaagcu

SEQ ID NO: 1328838 - RNA, 19 nt, Artificial Sequence
  Description of Artificial Sequence: Synthetic oligonucleotide
acuuauacuucugauauug

SEQ ID NO: 1328839 - RNA, 19 nt, Artificial Sequence
  Description of Artificial Sequence: Synthetic oligonucleotide
uuacgucccaauuauaaac

SEQ ID NO: 1328840 - RNA, 19 nt, Artificial Sequence
  Description of Artificial Sequence: Synthetic oligonucleotide
uuuugaauggguaguacuc

SEQ ID NO: 1328841 - RNA, 19 nt, Artificial Sequence
  Description of Artificial Sequence: Synthetic oligonucleotide
aggaaucuggccuuucagc

SEQ ID NO: 1328842 - RNA, 19 nt, Artificial Sequence
  Description of Artificial Sequence: Synthetic oligonucleotide
uacaaaacgugguacaagu

SEQ ID NO: 1328843 - RNA, 19 nt, Artificial Sequence
  Description of Artificial Sequence: Synthetic oligonucleotide
aguaccaaaggcuuuccag

SEQ ID NO: 1328844 - RNA, 19 nt, Artificial Sequence
  Description of Artificial Sequence: Synthetic oligonucleotide
uuaagcuuuauucuuggua

SEQ ID NO: 1328845 - RNA, 19 nt, Artificial Sequence
  Description of Artificial Sequence: Synthetic oligonucleotide
agaaucuacaucuuccaca

SEQ ID NO: 1328846 - RNA, 19 nt, Artificial Sequence
  Description of Artificial Sequence: Synthetic oligonucleotide
auaucaaucaauaaagaaa

SEQ ID NO: 1328847 - RNA, 19 nt, Artificial Sequence
  Description of Artificial Sequence: Synthetic oligonucleotide
aaagacacagugcauuuau

SEQ ID NO: 1328848 - RNA, 19 nt, Artificial Sequence
  Description of Artificial Sequence: Synthetic oligonucleotide
uuaagaguugucuuauaac

SEQ ID NO: 1328849 - RNA, 19 nt, Artificial Sequence
  Description of Artificial Sequence: Synthetic oligonucleotide
aaaguuuugaauggguagu

SEQ ID NO: 1328850 - RNA, 19 nt, Artificial Sequence
  Description of Artificial Sequence: Synthetic oligonucleotide
uaaagccccauuuacagaa

SEQ ID NO: 1328851 - RNA, 19 nt, Artificial Sequence
  Description of Artificial Sequence: Synthetic oligonucleotide
ugucacaguaccaaaggcu

SEQ ID NO: 1328852 - RNA, 19 nt, Artificial Sequence
  Description of Artificial Sequence: Synthetic oligonucleotide
uaaggauaaacacuggcuu

SEQ ID NO: 1328853 - RNA, 19 nt, Artificial Sequence
  Description of Artificial Sequence: Synthetic oligonucleotide
auggagauagaauaacaug

SEQ ID NO: 1328854 - RNA, 19 nt, Artificial Sequence
  Description of Artificial Sequence: Synthetic oligonucleotide
uucuuuaacacuguaucug

SEQ ID NO: 1328855 - RNA, 19 nt, Artificial Sequence
  Description of Artificial Sequence: Synthetic oligonucleotide
ucauaaaagcuacugguua

SEQ ID NO: 1328856 - RNA, 19 nt, Artificial Sequence
  Description of Artificial Sequence: Synthetic oligonucleotide
ugcauaaagccccauuuac

SEQ ID NO: 1328857 - RNA, 19 nt, Artificial Sequence
  Description of Artificial Sequence: Synthetic oligonucleotide
aauaacaugcauguguuuu

SEQ ID NO: 1328858 - RNA, 19 nt, Artificial Sequence
  Description of Artificial Sequence: Synthetic oligonucleotide
aucucgaagaaagucaagg

SEQ ID NO: 1328859 - RNA, 19 nt, Artificial Sequence
  Description of Artificial Sequence: Synthetic oligonucleotide
agaacuguuacauaauaua

SEQ ID NO: 1328860 - RNA, 19 nt, Artificial Sequence
  Description of Artificial Sequence: Synthetic oligonucleotide
uuaaaguuuugaaugggua

SEQ ID NO: 1328861 - RNA, 19 nt, Artificial Sequence
  Description of Artificial Sequence: Synthetic oligonucleotide
ucugaaaagguuagagugu

SEQ ID NO: 1328862 - RNA, 19 nt, Artificial Sequence
  Description of Artificial Sequence: Synthetic oligonucleotide
uacgucccaauuauaaacc

SEQ ID NO: 1328863 - RNA, 19 nt, Artificial Sequence
  Description of Artificial Sequence: Synthetic oligonucleotide
uuuaccacaucacgcaaga

SEQ ID NO: 1328864 - RNA, 19 nt, Artificial Sequence
  Description of Artificial Sequence: Synthetic oligonucleotide
uaaacuuauacuucugaua

SEQ ID NO: 1328865 - RNA, 19 nt, Artificial Sequence
  Description of Artificial Sequence: Synthetic oligonucleotide
uguuuggaaaccugaacca

SEQ ID NO: 1328866 - RNA, 19 nt, Artificial Sequence
  Description of Artificial Sequence: Synthetic oligonucleotide
uuuaacaguccuaugcaau

SEQ ID NO: 1328867 - RNA, 19 nt, Artificial Sequence
  Description of Artificial Sequence: Synthetic oligonucleotide
aaacgugguacaaguauac

SEQ ID NO: 1328868 - RNA, 19 nt, Artificial Sequence
  Description of Artificial Sequence: Synthetic oligonucleotide
acacuuuaucaguaggcgg

SEQ ID NO: 1328869 - RNA, 19 nt, Artificial Sequence
  Description of Artificial Sequence: Synthetic oligonucleotide
uauacuggcauugcaaaga

SEQ ID NO: 1328870 - RNA, 19 nt, Artificial Sequence
  Description of Artificial Sequence: Synthetic oligonucleotide
acugaucucgaagaaaguc

SEQ ID NO: 1328871 - RNA, 19 nt, Artificial Sequence
  Description of Artificial Sequence: Synthetic oligonucleotide
uuaucaguaggcggaaccg

SEQ ID NO: 1328872 - RNA, 19 nt, Artificial Sequence
  Description of Artificial Sequence: Synthetic oligonucleotide
uaccacaucacgcaagagu

SEQ ID NO: 1328873 - RNA, 19 nt, Artificial Sequence
  Description of Artificial Sequence: Synthetic oligonucleotide
uuaauuauucuugcuguga

SEQ ID NO: 1328874 - RNA, 19 nt, Artificial Sequence
  Description of Artificial Sequence: Synthetic oligonucleotide
uuauacuggcauugcaaag

SEQ ID NO: 1328875 - RNA, 19 nt, Artificial Sequence
  Description of Artificial Sequence: Synthetic oligonucleotide
ucacuuucugaaaagguua

SEQ ID NO: 1328876 - RNA, 19 nt, Artificial Sequence
  Description of Artificial Sequence: Synthetic oligonucleotide
aaucccuagauggauccgg

SEQ ID NO: 1328877 - RNA, 19 nt, Artificial Sequence
  Description of Artificial Sequence: Synthetic oligonucleotide
cugauauuguucauccagc

SEQ ID NO: 1328878 - RNA, 19 nt, Artificial Sequence
  Description of Artificial Sequence: Synthetic oligonucleotide
uaauugccaauguuaagcu

SEQ ID NO: 1328879 - RNA, 19 nt, Artificial Sequence
  Description of Artificial Sequence: Synthetic oligonucleotide
agauagaauaacaugcaug

SEQ ID NO: 1328880 - RNA, 19 nt, Artificial Sequence
  Description of Artificial Sequence: Synthetic oligonucleotide
acgucccaauuauaaaccc

SEQ ID NO: 1328881 - RNA, 19 nt, Artificial Sequence
  Description of Artificial Sequence: Synthetic oligonucleotide
acauugaucaaaucucccu

SEQ ID NO: 1328882 - RNA, 19 nt, Artificial Sequence
  Description of Artificial Sequence: Synthetic oligonucleotide
ugguuaagcagaaaugcau

SEQ ID NO: 1328883 - RNA, 19 nt, Artificial Sequence
  Description of Artificial Sequence: Synthetic oligonucleotide
guagaaucauccuuguuuc

SEQ ID NO: 1328884 - RNA, 19 nt, Artificial Sequence
  Description of Artificial Sequence: Synthetic oligonucleotide
agagugucauaaaagcuac

SEQ ID NO: 1328885 - RNA, 19 nt, Artificial Sequence
  Description of Artificial Sequence: Synthetic oligonucleotide
gugaacagcccucaaacug

SEQ ID NO: 1328886 - RNA, 19 nt, Artificial Sequence
  Description of Artificial Sequence: Synthetic oligonucleotide
ucaccaaguacuucuguca

SEQ ID NO: 1328887 - RNA, 19 nt, Artificial Sequence
  Description of Artificial Sequence: Synthetic oligonucleotide
cauugcaaagacacagugc

SEQ ID NO: 1328888 - RNA, 19 nt, Artificial Sequence
  Description of Artificial Sequence: Synthetic oligonucleotide
ugauauuguucauccagcu

SEQ ID NO: 1328889 - RNA, 19 nt, Artificial Sequence
  Description of Artificial Sequence: Synthetic oligonucleotide
aaucuaagccacauccguc

SEQ ID NO: 1328890 - RNA, 19 nt, Artificial Sequence
  Description of Artificial Sequence: Synthetic oligonucleotide
uuuuaccagaaucuauauc

SEQ ID NO: 1328891 - RNA, 19 nt, Artificial Sequence
  Description of Artificial Sequence: Synthetic oligonucleotide
uuaccuuagcuuaaaguuu

SEQ ID NO: 1328892 - RNA, 19 nt, Artificial Sequence
  Description of Artificial Sequence: Synthetic oligonucleotide
uuuacuacauggagauaga

SEQ ID NO: 1328893 - RNA, 19 nt, Artificial Sequence
  Description of Artificial Sequence: Synthetic oligonucleotide
caaaggaugauaauguucu

SEQ ID NO: 1328894 - RNA, 19 nt, Artificial Sequence
  Description of Artificial Sequence: Synthetic oligonucleotide
aaauacuguuaauugcaua

SEQ ID NO: 1328895 - RNA, 19 nt, Artificial Sequence
  Description of Artificial Sequence: Synthetic oligonucleotide
cuuuaaggauaaacacugg

SEQ ID NO: 1328896 - RNA, 19 nt, Artificial Sequence
  Description of Artificial Sequence: Synthetic oligonucleotide
ucucgaagaaagucaaggu

SEQ ID NO: 1328897 - RNA, 19 nt, Artificial Sequence
  Description of Artificial Sequence: Synthetic oligonucleotide
aauggguaguacucucuca

SEQ ID NO: 1328898 - RNA, 19 nt, Artificial Sequence
  Description of Artificial Sequence: Synthetic oligonucleotide
aacauguuuggaaaccuga

SEQ ID NO: 1328899 - RNA, 19 nt, Artificial Sequence
  Description of Artificial Sequence: Synthetic oligonucleotide
uuuacgucccaauuauaaa

SEQ ID NO: 1328900 - RNA, 19 nt, Artificial Sequence
  Description of Artificial Sequence: Synthetic oligonucleotide
guccuaugcaauuuuaauc

SEQ ID NO: 1328901 - RNA, 19 nt, Artificial Sequence
  Description of Artificial Sequence: Synthetic oligonucleotide
uuaccagaaucuauaucac

SEQ ID NO: 1328902 - RNA, 19 nt, Artificial Sequence
  Description of Artificial Sequence: Synthetic oligonucleotide
cucgaagaaagucaagguc

SEQ ID NO: 1328903 - RNA, 19 nt, Artificial Sequence
  Description of Artificial Sequence: Synthetic oligonucleotide
uacuacauggagauagaau

SEQ ID NO: 1328904 - RNA, 19 nt, Artificial Sequence
  Description of Artificial Sequence: Synthetic oligonucleotide
aucaaaucucccuuauacu

SEQ ID NO: 1328905 - RNA, 19 nt, Artificial Sequence
  Description of Artificial Sequence: Synthetic oligonucleotide
gccauauugacuucuguag

SEQ ID NO: 1328906 - RNA, 19 nt, Artificial Sequence
  Description of Artificial Sequence: Synthetic oligonucleotide
ugaauugguagacuccuuu

SEQ ID NO: 1328907 - RNA, 19 nt, Artificial Sequence
  Description of Artificial Sequence: Synthetic oligonucleotide
guuaagaguugucuuauaa

SEQ ID NO: 1328908 - RNA, 19 nt, Artificial Sequence
  Description of Artificial Sequence: Synthetic oligonucleotide
auauugacuucuguaguag

SEQ ID NO: 1328909 - RNA, 19 nt, Artificial Sequence
  Description of Artificial Sequence: Synthetic oligonucleotide
accagaaucuauaucacca

SEQ ID NO: 1328910 - RNA, 19 nt, Artificial Sequence
  Description of Artificial Sequence: Synthetic oligonucleotide
acuggcuuauuuaacaugu

SEQ ID NO: 1328911 - RNA, 19 nt, Artificial Sequence
  Description of Artificial Sequence: Synthetic oligonucleotide
gucuauauaugugaacagc

SEQ ID NO: 1328912 - RNA, 19 nt, Artificial Sequence
  Description of Artificial Sequence: Synthetic oligonucleotide
uuuguggcaguugauaaau

SEQ ID NO: 1328913 - RNA, 19 nt, Artificial Sequence
  Description of Artificial Sequence: Synthetic oligonucleotide
uuaacaguccuaugcaauu

SEQ ID NO: 1328914 - RNA, 19 nt, Artificial Sequence
  Description of Artificial Sequence: Synthetic oligonucleotide
acaaacaccgcuucaggaa

SEQ ID NO: 1328915 - RNA, 19 nt, Artificial Sequence
  Description of Artificial Sequence: Synthetic oligonucleotide
ugaauggguaguacucucu

SEQ ID NO: 1328916 - RNA, 19 nt, Artificial Sequence
  Description of Artificial Sequence: Synthetic oligonucleotide
aguccuaugcaauuuuaau

SEQ ID NO: 1328917 - RNA, 19 nt, Artificial Sequence
  Description of Artificial Sequence: Synthetic oligonucleotide
uaccuuagcuuaaaguuuu

SEQ ID NO: 1328918 - RNA, 19 nt, Artificial Sequence
  Description of Artificial Sequence: Synthetic oligonucleotide
cuuagcuuaaaguuuugaa

SEQ ID NO: 1328919 - RNA, 19 nt, Artificial Sequence
  Description of Artificial Sequence: Synthetic oligonucleotide
agaguaauaucaaucaaua

SEQ ID NO: 1328920 - RNA, 19 nt, Artificial Sequence
  Description of Artificial Sequence: Synthetic oligonucleotide
cacauugaucaaaucuccc

SEQ ID NO: 1328921 - RNA, 19 nt, Artificial Sequence
  Description of Artificial Sequence: Synthetic oligonucleotide
uaaaagcuacugguuaagc

SEQ ID NO: 1328922 - RNA, 19 nt, Artificial Sequence
  Description of Artificial Sequence: Synthetic oligonucleotide
uuccaacaaugccugagcu

SEQ ID NO: 1328923 - RNA, 19 nt, Artificial Sequence
  Description of Artificial Sequence: Synthetic oligonucleotide
agaaucuaagccacauccg

SEQ ID NO: 1328924 - RNA, 19 nt, Artificial Sequence
  Description of Artificial Sequence: Synthetic oligonucleotide
ucucucacauugaucaaau

SEQ ID NO: 1328925 - RNA, 19 nt, Artificial Sequence
  Description of Artificial Sequence: Synthetic oligonucleotide
aguacucucucacauugau

SEQ ID NO: 1328926 - RNA, 19 nt, Artificial Sequence
  Description of Artificial Sequence: Synthetic oligonucleotide
uaagaaucuggucuccauu

SEQ ID NO: 1328927 - RNA, 19 nt, Artificial Sequence
  Description of Artificial Sequence: Synthetic oligonucleotide
agcuuugcaguacagguua

SEQ ID NO: 1328928 - RNA, 19 nt, Artificial Sequence
  Description of Artificial Sequence: Synthetic oligonucleotide
uauugacuucuguaguagu

SEQ ID NO: 1328929 - RNA, 19 nt, Artificial Sequence
  Description of Artificial Sequence: Synthetic oligonucleotide
aucacgcaagaguaauauc

SEQ ID NO: 1328930 - RNA, 19 nt, Artificial Sequence
  Description of Artificial Sequence: Synthetic oligonucleotide
uagcauuccucacaguuuu

SEQ ID NO: 1328931 - RNA, 19 nt, Artificial Sequence
  Description of Artificial Sequence: Synthetic oligonucleotide
guaccaaaggcuuuccaga

SEQ ID NO: 1328932 - RNA, 19 nt, Artificial Sequence
  Description of Artificial Sequence: Synthetic oligonucleotide
uuccagagauuuuaacagu

SEQ ID NO: 1328933 - RNA, 19 nt, Artificial Sequence
  Description of Artificial Sequence: Synthetic oligonucleotide
aaaacgugguacaaguaua

SEQ ID NO: 1328934 - RNA, 19 nt, Artificial Sequence
  Description of Artificial Sequence: Synthetic oligonucleotide
uugcaguacagguuaucug

SEQ ID NO: 1328935 - RNA, 19 nt, Artificial Sequence
  Description of Artificial Sequence: Synthetic oligonucleotide
gcagcauuacuuugcaggg

SEQ ID NO: 1328936 - RNA, 19 nt, Artificial Sequence
  Description of Artificial Sequence: Synthetic oligonucleotide
cuuauacuggcauugcaaa

SEQ ID NO: 1328937 - RNA, 19 nt, Artificial Sequence
  Description of Artificial Sequence: Synthetic oligonucleotide
ucaguagccuccauagcau

SEQ ID NO: 1328938 - RNA, 19 nt, Artificial Sequence
  Description of Artificial Sequence: Synthetic oligonucleotide
ugugaacagcccucaaacu

SEQ ID NO: 1328939 - RNA, 19 nt, Artificial Sequence
  Description of Artificial Sequence: Synthetic oligonucleotide
acaugaaauucaaauacaa

SEQ ID NO: 1328940 - RNA, 19 nt, Artificial Sequence
  Description of Artificial Sequence: Synthetic oligonucleotide
agauuuuaacaguccuaug

SEQ ID NO: 1328941 - RNA, 19 nt, Artificial Sequence
  Description of Artificial Sequence: Synthetic oligonucleotide
uuaagcagaaaugcauaaa

SEQ ID NO: 1328942 - RNA, 19 nt, Artificial Sequence
  Description of Artificial Sequence: Synthetic oligonucleotide
aaccgaagcuuugcaguac

SEQ ID NO: 1328943 - RNA, 19 nt, Artificial Sequence
  Description of Artificial Sequence: Synthetic oligonucleotide
gaauggguaguacucucuc

SEQ ID NO: 1328944 - RNA, 19 nt, Artificial Sequence
  Description of Artificial Sequence: Synthetic oligonucleotide
auugccaauguuaagcuuu

SEQ ID NO: 1328945 - RNA, 19 nt, Artificial Sequence
  Description of Artificial Sequence: Synthetic oligonucleotide
cauaaaagcuacugguuaa

SEQ ID NO: 1328946 - RNA, 19 nt, Artificial Sequence
  Description of Artificial Sequence: Synthetic oligonucleotide
uugacuucuguaguaguaa

SEQ ID NO: 1328947 - RNA, 19 nt, Artificial Sequence
  Description of Artificial Sequence: Synthetic oligonucleotide
auaaagccccauuuacaga

SEQ ID NO: 1328948 - RNA, 19 nt, Artificial Sequence
  Description of Artificial Sequence: Synthetic oligonucleotide
acgugguacaaguauacuu

SEQ ID NO: 1328949 - RNA, 19 nt, Artificial Sequence
  Description of Artificial Sequence: Synthetic oligonucleotide
uuauaaacccuggccauau

SEQ ID NO: 1328950 - RNA, 19 nt, Artificial Sequence
  Description of Artificial Sequence: Synthetic oligonucleotide
ggaaucccuagauggaucc

SEQ ID NO: 1328951 - RNA, 19 nt, Artificial Sequence
  Description of Artificial Sequence: Synthetic oligonucleotide
uaagccacauccguccuga

SEQ ID NO: 1328952 - RNA, 19 nt, Artificial Sequence
  Description of Artificial Sequence: Synthetic oligonucleotide
ggucuauauaugugaacag

SEQ ID NO: 1328953 - RNA, 19 nt, Artificial Sequence
  Description of Artificial Sequence: Synthetic oligonucleotide
acacuguaucugcagucuc

SEQ ID NO: 1328954 - RNA, 19 nt, Artificial Sequence
  Description of Artificial Sequence: Synthetic oligonucleotide
ugagccgcggccaucuuaa

SEQ ID NO: 1328955 - RNA, 19 nt, Artificial Sequence
  Description of Artificial Sequence: Synthetic oligonucleotide
caauguuaagcuuuauucu

SEQ ID NO: 1328956 - RNA, 19 nt, Artificial Sequence
  Description of Artificial Sequence: Synthetic oligonucleotide
ugcaaacugugcugguacc

SEQ ID NO: 1328957 - RNA, 19 nt, Artificial Sequence
  Description of Artificial Sequence: Synthetic oligonucleotide
ucggccauuucaguuaaga

SEQ ID NO: 1328958 - RNA, 19 nt, Artificial Sequence
  Description of Artificial Sequence: Synthetic oligonucleotide
gccucuaaaagguuuacca

SEQ ID NO: 1328959 - RNA, 19 nt, Artificial Sequence
  Description of Artificial Sequence: Synthetic oligonucleotide
ggcacacuuuaucaguagg

SEQ ID NO: 1328960 - RNA, 19 nt, Artificial Sequence
  Description of Artificial Sequence: Synthetic oligonucleotide
uaucugccaguaagaaucu

SEQ ID NO: 1328961 - RNA, 19 nt, Artificial Sequence
  Description of Artificial Sequence: Synthetic oligonucleotide
aacuuauacuucugauauu

SEQ ID NO: 1328962 - RNA, 19 nt, Artificial Sequence
  Description of Artificial Sequence: Synthetic oligonucleotide
caguaggcggaaccgaagc

SEQ ID NO: 1328963 - RNA, 19 nt, Artificial Sequence
  Description of Artificial Sequence: Synthetic oligonucleotide
guuuaccacaucacgcaag

SEQ ID NO: 1328964 - RNA, 19 nt, Artificial Sequence
  Description of Artificial Sequence: Synthetic oligonucleotide
uugguagaaucauccuugu

SEQ ID NO: 1328965 - RNA, 19 nt, Artificial Sequence
  Description of Artificial Sequence: Synthetic oligonucleotide
gggucuauauaugugaaca

SEQ ID NO: 1328966 - RNA, 19 nt, Artificial Sequence
  Description of Artificial Sequence: Synthetic oligonucleotide
acccuggccauauugacuu

SEQ ID NO: 1328967 - RNA, 19 nt, Artificial Sequence
  Description of Artificial Sequence: Synthetic oligonucleotide
auauugaacuguuggucuu

SEQ ID NO: 1328968 - RNA, 19 nt, Artificial Sequence
  Description of Artificial Sequence: Synthetic oligonucleotide
acauggagauagaauaaca

SEQ ID NO: 1328969 - RNA, 19 nt, Artificial Sequence
  Description of Artificial Sequence: Synthetic oligonucleotide
uucuuuguggcaguugaua

SEQ ID NO: 1328970 - RNA, 19 nt, Artificial Sequence
  Description of Artificial Sequence: Synthetic oligonucleotide
aacagcaacaaaggaugau

SEQ ID NO: 1328971 - RNA, 19 nt, Artificial Sequence
  Description of Artificial Sequence: Synthetic oligonucleotide
aaaggaugauaauguucua

SEQ ID NO: 1328972 - RNA, 19 nt, Artificial Sequence
  Description of Artificial Sequence: Synthetic oligonucleotide
uucugauauuguucaucca

SEQ ID NO: 1328973 - RNA, 19 nt, Artificial Sequence
  Description of Artificial Sequence: Synthetic oligonucleotide
cccauuuacagaauacaac

SEQ ID NO: 1328974 - RNA, 19 nt, Artificial Sequence
  Description of Artificial Sequence: Synthetic oligonucleotide
caccaaguacuucugucac

SEQ ID NO: 1328975 - RNA, 19 nt, Artificial Sequence
  Description of Artificial Sequence: Synthetic oligonucleotide
aaacaccgcuucaggaauc

SEQ ID NO: 1328976 - RNA, 19 nt, Artificial Sequence
  Description of Artificial Sequence: Synthetic oligonucleotide
cauauugacuucuguagua

SEQ ID NO: 1328977 - RNA, 19 nt, Artificial Sequence
  Description of Artificial Sequence: Synthetic oligonucleotide
auagaauaacaugcaugug

SEQ ID NO: 1328978 - RNA, 19 nt, Artificial Sequence
  Description of Artificial Sequence: Synthetic oligonucleotide
gguagaaucauccuuguuu

SEQ ID NO: 1328979 - RNA, 19 nt, Artificial Sequence
  Description of Artificial Sequence: Synthetic oligonucleotide
uuuggagaacuguuacaua

SEQ ID NO: 1328980 - RNA, 19 nt, Artificial Sequence
  Description of Artificial Sequence: Synthetic oligonucleotide
gacuucuguaguaguaaac

SEQ ID NO: 1328981 - RNA, 19 nt, Artificial Sequence
  Description of Artificial Sequence: Synthetic oligonucleotide
ugaucaaaucucccuuaua

SEQ ID NO: 1328982 - RNA, 19 nt, Artificial Sequence
  Description of Artificial Sequence: Synthetic oligonucleotide
aacgugguacaaguauacu

SEQ ID NO: 1328983 - RNA, 19 nt, Artificial Sequence
  Description of Artificial Sequence: Synthetic oligonucleotide
uuacuacauggagauagaa

SEQ ID NO: 1328984 - RNA, 19 nt, Artificial Sequence
  Description of Artificial Sequence: Synthetic oligonucleotide
gcaagguugaguuccauaa

SEQ ID NO: 1328985 - RNA, 19 nt, Artificial Sequence
  Description of Artificial Sequence: Synthetic oligonucleotide
aaguuuugaauggguagua

SEQ ID NO: 1328986 - RNA, 19 nt, Artificial Sequence
  Description of Artificial Sequence: Synthetic oligonucleotide
agccccauuuacagaauac

SEQ ID NO: 1328987 - RNA, 19 nt, Artificial Sequence
  Description of Artificial Sequence: Synthetic oligonucleotide
uaucaguaggcggaaccga

SEQ ID NO: 1328988 - RNA, 19 nt, Artificial Sequence
  Description of Artificial Sequence: Synthetic oligonucleotide
accacaucacgcaagagua

SEQ ID NO: 1328989 - RNA, 19 nt, Artificial Sequence
  Description of Artificial Sequence: Synthetic oligonucleotide
aggcacacuuuaucaguag

SEQ ID NO: 1328990 - RNA, 19 nt, Artificial Sequence
  Description of Artificial Sequence: Synthetic oligonucleotide
cuacauggagauagaauaa

SEQ ID NO: 1328991 - RNA, 19 nt, Artificial Sequence
  Description of Artificial Sequence: Synthetic oligonucleotide
cucccuuauacuggcauug

SEQ ID NO: 1328992 - RNA, 19 nt, Artificial Sequence
  Description of Artificial Sequence: Synthetic oligonucleotide
agaaucauccuuguuucuu

SEQ ID NO: 1328993 - RNA, 19 nt, Artificial Sequence
  Description of Artificial Sequence: Synthetic oligonucleotide
guugaguuccauaaacuua

SEQ ID NO: 1328994 - RNA, 19 nt, Artificial Sequence
  Description of Artificial Sequence: Synthetic oligonucleotide
gaaucccuagauggauccg

SEQ ID NO: 1328995 - RNA, 19 nt, Artificial Sequence
  Description of Artificial Sequence: Synthetic oligonucleotide
ugccucuaaaagguuuacc

SEQ ID NO: 1328996 - RNA, 19 nt, Artificial Sequence
  Description of Artificial Sequence: Synthetic oligonucleotide
accgaagcuuugcaguaca

SEQ ID NO: 1328997 - RNA, 19 nt, Artificial Sequence
  Description of Artificial Sequence: Synthetic oligonucleotide
aagccccauuuacagaaua

SEQ ID NO: 1328998 - RNA, 19 nt, Artificial Sequence
  Description of Artificial Sequence: Synthetic oligonucleotide
augcauaaagccccauuua

SEQ ID NO: 1328999 - RNA, 19 nt, Artificial Sequence
  Description of Artificial Sequence: Synthetic oligonucleotide
gaaaagguuagagugucau

SEQ ID NO: 1329000 - RNA, 19 nt, Artificial Sequence
  Description of Artificial Sequence: Synthetic oligonucleotide
caagaguaauaucaaucaa

SEQ ID NO: 1329001 - RNA, 19 nt, Artificial Sequence
  Description of Artificial Sequence: Synthetic oligonucleotide
ccaacaaugccugagcuuc

SEQ ID NO: 1329002 - RNA, 19 nt, Artificial Sequence
  Description of Artificial Sequence: Synthetic oligonucleotide
guaguaaacugaucucgaa

SEQ ID NO: 1329003 - RNA, 19 nt, Artificial Sequence
  Description of Artificial Sequence: Synthetic oligonucleotide
accaaguacuucugucaca

SEQ ID NO: 1329004 - RNA, 19 nt, Artificial Sequence
  Description of Artificial Sequence: Synthetic oligonucleotide
caaaacgugguacaaguau

SEQ ID NO: 1329005 - RNA, 19 nt, Artificial Sequence
  Description of Artificial Sequence: Synthetic oligonucleotide
cugcauguauuuuagaauu

SEQ ID NO: 1329006 - RNA, 19 nt, Artificial Sequence
  Description of Artificial Sequence: Synthetic oligonucleotide
cauggagauagaauaacau

SEQ ID NO: 1329007 - RNA, 19 nt, Artificial Sequence
  Description of Artificial Sequence: Synthetic oligonucleotide
uugccaauguuaagcuuua

SEQ ID NO: 1329008 - RNA, 19 nt, Artificial Sequence
  Description of Artificial Sequence: Synthetic oligonucleotide
cuucuuuaacacuguaucu

SEQ ID NO: 1329009 - RNA, 19 nt, Artificial Sequence
  Description of Artificial Sequence: Synthetic oligonucleotide
cacaguaccaaaggcuuuc

SEQ ID NO: 1329010 - RNA, 19 nt, Artificial Sequence
  Description of Artificial Sequence: Synthetic oligonucleotide
uacagguuaucugccagua

SEQ ID NO: 1329011 - RNA, 19 nt, Artificial Sequence
  Description of Artificial Sequence: Synthetic oligonucleotide
cgcaagaguaauaucaauc

SEQ ID NO: 1329012 - RNA, 19 nt, Artificial Sequence
  Description of Artificial Sequence: Synthetic oligonucleotide
auugacuucuguaguagua

SEQ ID NO: 1329013 - RNA, 19 nt, Artificial Sequence
  Description of Artificial Sequence: Synthetic oligonucleotide
uaggcggaaccgaagcuuu

SEQ ID NO: 1329014 - RNA, 19 nt, Artificial Sequence
  Description of Artificial Sequence: Synthetic oligonucleotide
agcuuuauucuugguagaa

SEQ ID NO: 1329015 - RNA, 19 nt, Artificial Sequence
  Description of Artificial Sequence: Synthetic oligonucleotide
acgcaagaguaauaucaau

SEQ ID NO: 1329016 - RNA, 19 nt, Artificial Sequence
  Description of Artificial Sequence: Synthetic oligonucleotide
agauucuuuguggcaguug

SEQ ID NO: 1329017 - RNA, 19 nt, Artificial Sequence
  Description of Artificial Sequence: Synthetic oligonucleotide
cccaauuauaaacccuggc

SEQ ID NO: 1329018 - RNA, 19 nt, Artificial Sequence
  Description of Artificial Sequence: Synthetic oligonucleotide
agcaagguugaguuccaua

SEQ ID NO: 1329019 - RNA, 19 nt, Artificial Sequence
  Description of Artificial Sequence: Synthetic oligonucleotide
acucaaucuuuaaggauaa

SEQ ID NO: 1329020 - RNA, 19 nt, Artificial Sequence
  Description of Artificial Sequence: Synthetic oligonucleotide
cuugccucuaaaagguuua

SEQ ID NO: 1329021 - RNA, 19 nt, Artificial Sequence
  Description of Artificial Sequence: Synthetic oligonucleotide
uuaccacaucacgcaagag

SEQ ID NO: 1329022 - RNA, 19 nt, Artificial Sequence
  Description of Artificial Sequence: Synthetic oligonucleotide
uugaauugguagacuccuu

SEQ ID NO: 1329023 - RNA, 19 nt, Artificial Sequence
  Description of Artificial Sequence: Synthetic oligonucleotide
ucucccuuauacuggcauu

SEQ ID NO: 1329024 - RNA, 19 nt, Artificial Sequence
  Description of Artificial Sequence: Synthetic oligonucleotide
ucccuuauacuggcauugc

SEQ ID NO: 1329025 - RNA, 19 nt, Artificial Sequence
  Description of Artificial Sequence: Synthetic oligonucleotide
cacgcaagaguaauaucaa

SEQ ID NO: 1329026 - RNA, 19 nt, Artificial Sequence
  Description of Artificial Sequence: Synthetic oligonucleotide
cuggccauauugacuucug

SEQ ID NO: 1329027 - RNA, 19 nt, Artificial Sequence
  Description of Artificial Sequence: Synthetic oligonucleotide
aguuaagaguugucuuaua

SEQ ID NO: 1329028 - RNA, 19 nt, Artificial Sequence
  Description of Artificial Sequence: Synthetic oligonucleotide
agcuucuuuaacacuguau

SEQ ID NO: 1329029 - RNA, 19 nt, Artificial Sequence
  Description of Artificial Sequence: Synthetic oligonucleotide
cuaagccacauccguccug

SEQ ID NO: 1329030 - RNA, 19 nt, Artificial Sequence
  Description of Artificial Sequence: Synthetic oligonucleotide
ugaguuccauaaacuuaua

SEQ ID NO: 1329031 - RNA, 19 nt, Artificial Sequence
  Description of Artificial Sequence: Synthetic oligonucleotide
cuagauggauccggcgccc

SEQ ID NO: 1329032 - RNA, 19 nt, Artificial Sequence
  Description of Artificial Sequence: Synthetic oligonucleotide
acauguuuggaaaccugaa

SEQ ID NO: 1329033 - RNA, 19 nt, Artificial Sequence
  Description of Artificial Sequence: Synthetic oligonucleotide
ggaaccgaagcuuugcagu

SEQ ID NO: 1329034 - RNA, 19 nt, Artificial Sequence
  Description of Artificial Sequence: Synthetic oligonucleotide
gagaacuguuacauaauau

SEQ ID NO: 1329035 - RNA, 19 nt, Artificial Sequence
  Description of Artificial Sequence: Synthetic oligonucleotide
agcccucaaacuguguaga

SEQ ID NO: 1329036 - RNA, 19 nt, Artificial Sequence
  Description of Artificial Sequence: Synthetic oligonucleotide
uagauggauccggcgcccg

SEQ ID NO: 1329037 - RNA, 19 nt, Artificial Sequence
  Description of Artificial Sequence: Synthetic oligonucleotide
ugguagaaucauccuuguu

SEQ ID NO: 1329038 - RNA, 19 nt, Artificial Sequence
  Description of Artificial Sequence: Synthetic oligonucleotide
aggugcuuuggagaacugu

SEQ ID NO: 1329039 - RNA, 19 nt, Artificial Sequence
  Description of Artificial Sequence: Synthetic oligonucleotide
cucucacauugaucaaauc

SEQ ID NO: 1329040 - RNA, 19 nt, Artificial Sequence
  Description of Artificial Sequence: Synthetic oligonucleotide
uauaaacccuggccauauu

SEQ ID NO: 1329041 - RNA, 19 nt, Artificial Sequence
  Description of Artificial Sequence: Synthetic oligonucleotide
caguccuaugcaauuuuaa

SEQ ID NO: 1329042 - RNA, 19 nt, Artificial Sequence
  Description of Artificial Sequence: Synthetic oligonucleotide
cuuuaucaguaggcggaac

SEQ ID NO: 1329043 - RNA, 19 nt, Artificial Sequence
  Description of Artificial Sequence: Synthetic oligonucleotide
uugccucuaaaagguuuac

SEQ ID NO: 1329044 - RNA, 19 nt, Artificial Sequence
  Description of Artificial Sequence: Synthetic oligonucleotide
acuuuaucaguaggcggaa

SEQ ID NO: 1329045 - RNA, 19 nt, Artificial Sequence
  Description of Artificial Sequence: Synthetic oligonucleotide
agccgcggccaucuuaaga

SEQ ID NO: 1329046 - RNA, 19 nt, Artificial Sequence
  Description of Artificial Sequence: Synthetic oligonucleotide
ccuuauacuggcauugcaa

SEQ ID NO: 1329047 - RNA, 19 nt, Artificial Sequence
  Description of Artificial Sequence: Synthetic oligonucleotide
ggccauauugacuucugua

SEQ ID NO: 1329048 - RNA, 19 nt, Artificial Sequence
  Description of Artificial Sequence: Synthetic oligonucleotide
gcaaacugugcugguaccc

SEQ ID NO: 1329049 - RNA, 19 nt, Artificial Sequence
  Description of Artificial Sequence: Synthetic oligonucleotide
ggggucuauauaugugaac

SEQ ID NO: 1329050 - RNA, 19 nt, Artificial Sequence
  Description of Artificial Sequence: Synthetic oligonucleotide
gcauaaagccccauuuaca

SEQ ID NO: 1329051 - RNA, 19 nt, Artificial Sequence
  Description of Artificial Sequence: Synthetic oligonucleotide
aucaguaggcggaaccgaa

SEQ ID NO: 1329052 - RNA, 19 nt, Artificial Sequence
  Description of Artificial Sequence: Synthetic oligonucleotide
aguugucuuauaacagaua

SEQ ID NO: 1329053 - RNA, 19 nt, Artificial Sequence
  Description of Artificial Sequence: Synthetic oligonucleotide
caagguugaguuccauaaa

SEQ ID NO: 1329054 - RNA, 19 nt, Artificial Sequence
  Description of Artificial Sequence: Synthetic oligonucleotide
guacucucucacauugauc

SEQ ID NO: 1329055 - RNA, 19 nt, Artificial Sequence
  Description of Artificial Sequence: Synthetic oligonucleotide
cugccaguaagaaucuggu

SEQ ID NO: 1329056 - RNA, 19 nt, Artificial Sequence
  Description of Artificial Sequence: Synthetic oligonucleotide
agauggauccggcgcccgu

SEQ ID NO: 1329057 - RNA, 19 nt, Artificial Sequence
  Description of Artificial Sequence: Synthetic oligonucleotide
gccgcggccaucuuaagaa

SEQ ID NO: 1329058 - RNA, 19 nt, Artificial Sequence
  Description of Artificial Sequence: Synthetic oligonucleotide
gguuaucugccaguaagaa

SEQ ID NO: 1329059 - RNA, 19 nt, Artificial Sequence
  Description of Artificial Sequence: Synthetic oligonucleotide
cucucucacauugaucaaa

SEQ ID NO: 1329060 - RNA, 19 nt, Artificial Sequence
  Description of Artificial Sequence: Synthetic oligonucleotide
acaaaacgugguacaagua

SEQ ID NO: 1329061 - RNA, 19 nt, Artificial Sequence
  Description of Artificial Sequence: Synthetic oligonucleotide
acauccguccugagccgcg

SEQ ID NO: 1329062 - RNA, 19 nt, Artificial Sequence
  Description of Artificial Sequence: Synthetic oligonucleotide
gucauaaaagcuacugguu

SEQ ID NO: 1329063 - RNA, 19 nt, Artificial Sequence
  Description of Artificial Sequence: Synthetic oligonucleotide
caaacaccgcuucaggaau

SEQ ID NO: 1329064 - RNA, 19 nt, Artificial Sequence
  Description of Artificial Sequence: Synthetic oligonucleotide
gguuuaccacaucacgcaa

SEQ ID NO: 1329065 - RNA, 19 nt, Artificial Sequence
  Description of Artificial Sequence: Synthetic oligonucleotide
caucacgcaagaguaauau

SEQ ID NO: 1329066 - RNA, 19 nt, Artificial Sequence
  Description of Artificial Sequence: Synthetic oligonucleotide
cgaagcuuugcaguacagg

SEQ ID NO: 1329067 - RNA, 19 nt, Artificial Sequence
  Description of Artificial Sequence: Synthetic oligonucleotide
ggauccggcgcccguuucc

SEQ ID NO: 1329068 - RNA, 19 nt, Artificial Sequence
  Description of Artificial Sequence: Synthetic oligonucleotide
caacaaugccugagcuuca

SEQ ID NO: 1329069 - RNA, 19 nt, Artificial Sequence
  Description of Artificial Sequence: Synthetic oligonucleotide
cauccguccugagccgcgg

SEQ ID NO: 1329070 - RNA, 19 nt, Artificial Sequence
  Description of Artificial Sequence: Synthetic oligonucleotide
accuuagcuuaaaguuuug

SEQ ID NO: 1329071 - RNA, 19 nt, Artificial Sequence
  Description of Artificial Sequence: Synthetic oligonucleotide
auucuuuguggcaguugau

SEQ ID NO: 1329072 - RNA, 19 nt, Artificial Sequence
  Description of Artificial Sequence: Synthetic oligonucleotide
gccccauuuacagaauaca

SEQ ID NO: 1329073 - RNA, 19 nt, Artificial Sequence
  Description of Artificial Sequence: Synthetic oligonucleotide
gcauucaguagccuccaua

SEQ ID NO: 1329074 - RNA, 19 nt, Artificial Sequence
  Description of Artificial Sequence: Synthetic oligonucleotide
uggauccggcgcccguuuc

SEQ ID NO: 1329075 - RNA, 19 nt, Artificial Sequence
  Description of Artificial Sequence: Synthetic oligonucleotide
caccgcuucaggaaucccu

SEQ ID NO: 1329076 - RNA, 19 nt, Artificial Sequence
  Description of Artificial Sequence: Synthetic oligonucleotide
acaucacgcaagaguaaua

SEQ ID NO: 1329077 - RNA, 19 nt, Artificial Sequence
  Description of Artificial Sequence: Synthetic oligonucleotide
auggauccggcgcccguuu

SEQ ID NO: 1329078 - RNA, 19 nt, Artificial Sequence
  Description of Artificial Sequence: Synthetic oligonucleotide
ccuguucaaggugcuuugg

SEQ ID NO: 1329079 - RNA, 19 nt, Artificial Sequence
  Description of Artificial Sequence: Synthetic oligonucleotide
cggaaccgaagcuuugcag

SEQ ID NO: 1329080 - RNA, 19 nt, Artificial Sequence
  Description of Artificial Sequence: Synthetic oligonucleotide
cgcggccaucuuaagaaag

SEQ ID NO: 1329081 - RNA, 19 nt, Artificial Sequence
  Description of Artificial Sequence: Synthetic oligonucleotide
cacaucacgcaagaguaau

SEQ ID NO: 1329082 - RNA, 19 nt, Artificial Sequence
  Description of Artificial Sequence: Synthetic oligonucleotide
caguuaagaguugucuuau

SEQ ID NO: 1329083 - RNA, 19 nt, Artificial Sequence
  Description of Artificial Sequence: Synthetic oligonucleotide
cagcauuacuuugcaggga

SEQ ID NO: 1329084 - RNA, 19 nt, Artificial Sequence
  Description of Artificial Sequence: Synthetic oligonucleotide
ugccaauguuaagcuuuau

SEQ ID NO: 1329085 - RNA, 19 nt, Artificial Sequence
  Description of Artificial Sequence: Synthetic oligonucleotide
ccgaagcuuugcaguacag

SEQ ID NO: 1329086 - RNA, 19 nt, Artificial Sequence
  Description of Artificial Sequence: Synthetic oligonucleotide
cugcuucaugaaagaaucu

SEQ ID NO: 1329087 - RNA, 19 nt, Artificial Sequence
  Description of Artificial Sequence: Synthetic oligonucleotide
auaccuguucaaggugcuu

SEQ ID NO: 1329088 - RNA, 19 nt, Artificial Sequence
  Description of Artificial Sequence: Synthetic oligonucleotide
guaggcggaaccgaagcuu

SEQ ID NO: 1329089 - RNA, 19 nt, Artificial Sequence
  Description of Artificial Sequence: Synthetic oligonucleotide
ccuuagcuuaaaguuuuga

SEQ ID NO: 1329090 - RNA, 19 nt, Artificial Sequence
  Description of Artificial Sequence: Synthetic oligonucleotide
cgugguacaaguauacuuu

SEQ ID NO: 1329091 - RNA, 19 nt, Artificial Sequence
  Description of Artificial Sequence: Synthetic oligonucleotide
cccuuauacuggcauugca

SEQ ID NO: 1329092 - RNA, 19 nt, Artificial Sequence
  Description of Artificial Sequence: Synthetic oligonucleotide
aggcggaaccgaagcuuug

SEQ ID NO: 1329093 - RNA, 19 nt, Artificial Sequence
  Description of Artificial Sequence: Synthetic oligonucleotide
gauggauccggcgcccguu

SEQ ID NO: 1329094 - RNA, 19 nt, Artificial Sequence
  Description of Artificial Sequence: Synthetic oligonucleotide
cuggcuuauuuaacauguu

SEQ ID NO: 1329095 - RNA, 19 nt, Artificial Sequence
  Description of Artificial Sequence: Synthetic oligonucleotide
ggcaguugauaaauucuuu

SEQ ID NO: 1329096 - RNA, 19 nt, Artificial Sequence
  Description of Artificial Sequence: Synthetic oligonucleotide
gcuacugguuaagcagaaa

SEQ ID NO: 1329097 - RNA, 19 nt, Artificial Sequence
  Description of Artificial Sequence: Synthetic oligonucleotide
caguagccuccauagcauu

SEQ ID NO: 1329098 - RNA, 19 nt, Artificial Sequence
  Description of Artificial Sequence: Synthetic oligonucleotide
gccugagcuucaucaauau

SEQ ID NO: 1329099 - RNA, 19 nt, Artificial Sequence
  Description of Artificial Sequence: Synthetic oligonucleotide
ccacaucacgcaagaguaa

SEQ ID NO: 1329100 - RNA, 19 nt, Artificial Sequence
  Description of Artificial Sequence: Synthetic oligonucleotide
gcauuacuuugcagggaaa

SEQ ID NO: 1329101 - RNA, 19 nt, Artificial Sequence
  Description of Artificial Sequence: Synthetic oligonucleotide
cgucccaauuauaaacccu

SEQ ID NO: 1329102 - RNA, 19 nt, Artificial Sequence
  Description of Artificial Sequence: Synthetic oligonucleotide
gagcaagguugaguuccau

SEQ ID NO: 1329103 - RNA, 19 nt, Artificial Sequence
  Description of Artificial Sequence: Synthetic oligonucleotide
cccaaccacaggcacacuu

SEQ ID NO: 1329104 - RNA, 19 nt, Artificial Sequence
  Description of Artificial Sequence: Synthetic oligonucleotide
ccgcggccaucuuaagaaa

SEQ ID NO: 1329105 - RNA, 19 nt, Artificial Sequence
  Description of Artificial Sequence: Synthetic oligonucleotide
ccguccugagccgcggcca

SEQ ID NO: 1329106 - RNA, 19 nt, Artificial Sequence
  Description of Artificial Sequence: Synthetic oligonucleotide
gcuuugcaguacagguuau

SEQ ID NO: 1329107 - RNA, 19 nt, Artificial Sequence
  Description of Artificial Sequence: Synthetic oligonucleotide
cggcgcccguuuccagcag

SEQ ID NO: 1329108 - RNA, 19 nt, Artificial Sequence
  Description of Artificial Sequence: Synthetic oligonucleotide
ccccaaccacaggcacacu

SEQ ID NO: 1329109 - RNA, 19 nt, Artificial Sequence
  Description of Artificial Sequence: Synthetic oligonucleotide
aaagcuggccucuaguucc

SEQ ID NO: 1329110 - RNA, 19 nt, Artificial Sequence
  Description of Artificial Sequence: Synthetic oligonucleotide
aaaugaauuggccauggag

SEQ ID NO: 1329111 - RNA, 19 nt, Artificial Sequence
  Description of Artificial Sequence: Synthetic oligonucleotide
cuuaaugaggcauuuauuc

SEQ ID NO: 1329112 - RNA, 19 nt, Artificial Sequence
  Description of Artificial Sequence: Synthetic oligonucleotide
acauauaggagcguguucc

SEQ ID NO: 1329113 - RNA, 19 nt, Artificial Sequence
  Description of Artificial Sequence: Synthetic oligonucleotide
ucuggagacauauaggagc

SEQ ID NO: 1329114 - RNA, 19 nt, Artificial Sequence
  Description of Artificial Sequence: Synthetic oligonucleotide
aacgcacggaagcaggucc

SEQ ID NO: 1329115 - RNA, 19 nt, Artificial Sequence
  Description of Artificial Sequence: Synthetic oligonucleotide
aaggaaggccuccagucgc

SEQ ID NO: 1329116 - RNA, 19 nt, Artificial Sequence
  Description of Artificial Sequence: Synthetic oligonucleotide
uuugguuuugcaaacgcac

SEQ ID NO: 1329117 - RNA, 19 nt, Artificial Sequence
  Description of Artificial Sequence: Synthetic oligonucleotide
acaauguagggugaguugc

SEQ ID NO: 1329118 - RNA, 19 nt, Artificial Sequence
  Description of Artificial Sequence: Synthetic oligonucleotide
ugcgccaucgaccacaggc

SEQ ID NO: 1329119 - RNA, 19 nt, Artificial Sequence
  Description of Artificial Sequence: Synthetic oligonucleotide
gacacuauggggcucuccg

SEQ ID NO: 1329120 - RNA, 19 nt, Artificial Sequence
  Description of Artificial Sequence: Synthetic oligonucleotide
uucuuaaugaggcauuuau

SEQ ID NO: 1329121 - RNA, 19 nt, Artificial Sequence
  Description of Artificial Sequence: Synthetic oligonucleotide
augaauuggccauggaguc

SEQ ID NO: 1329122 - RNA, 19 nt, Artificial Sequence
  Description of Artificial Sequence: Synthetic oligonucleotide
aguaccgcaaugcugaccu

SEQ ID NO: 1329123 - RNA, 19 nt, Artificial Sequence
  Description of Artificial Sequence: Synthetic oligonucleotide
aacuccuggaaguccgagc

SEQ ID NO: 1329124 - RNA, 19 nt, Artificial Sequence
  Description of Artificial Sequence: Synthetic oligonucleotide
uaaggaaggccuccagucg

SEQ ID NO: 1329125 - RNA, 19 nt, Artificial Sequence
  Description of Artificial Sequence: Synthetic oligonucleotide
uguuugguuuugcaaacgc

SEQ ID NO: 1329126 - RNA, 19 nt, Artificial Sequence
  Description of Artificial Sequence: Synthetic oligonucleotide
accagcgacagucccaugc

SEQ ID NO: 1329127 - RNA, 19 nt, Artificial Sequence
  Description of Artificial Sequence: Synthetic oligonucleotide
ugauggggcguccaggcgg

SEQ ID NO: 1329128 - RNA, 19 nt, Artificial Sequence
  Description of Artificial Sequence: Synthetic oligonucleotide
ucggagugcuugaugaagg

SEQ ID NO: 1329129 - RNA, 19 nt, Artificial Sequence
  Description of Artificial Sequence: Synthetic oligonucleotide
uaugcugggccuuagugac

SEQ ID NO: 1329130 - RNA, 19 nt, Artificial Sequence
  Description of Artificial Sequence: Synthetic oligonucleotide
agcaucuucagauccgcuc

SEQ ID NO: 1329131 - RNA, 19 nt, Artificial Sequence
  Description of Artificial Sequence: Synthetic oligonucleotide
uggcucauucacaauguag

SEQ ID NO: 1329132 - RNA, 19 nt, Artificial Sequence
  Description of Artificial Sequence: Synthetic oligonucleotide
uuaugcugggccuuaguga

SEQ ID NO: 1329133 - RNA, 19 nt, Artificial Sequence
  Description of Artificial Sequence: Synthetic oligonucleotide
aauguagggugaguugcac

SEQ ID NO: 1329134 - RNA, 19 nt, Artificial Sequence
  Description of Artificial Sequence: Synthetic oligonucleotide
gaaggcgugguucaucagc

SEQ ID NO: 1329135 - RNA, 19 nt, Artificial Sequence
  Description of Artificial Sequence: Synthetic oligonucleotide
cuugaucucaccgcgacag

SEQ ID NO: 1329136 - RNA, 19 nt, Artificial Sequence
  Description of Artificial Sequence: Synthetic oligonucleotide
aucccaugaccgcugaugg

SEQ ID NO: 1329137 - RNA, 19 nt, Artificial Sequence
  Description of Artificial Sequence: Synthetic oligonucleotide
agcguguucccacaaauga

SEQ ID NO: 1329138 - RNA, 19 nt, Artificial Sequence
  Description of Artificial Sequence: Synthetic oligonucleotide
ucagggauccgcuuggccu

SEQ ID NO: 1329139 - RNA, 19 nt, Artificial Sequence
  Description of Artificial Sequence: Synthetic oligonucleotide
ugucacacugcagugcgcg

SEQ ID NO: 1329140 - RNA, 19 nt, Artificial Sequence
  Description of Artificial Sequence: Synthetic oligonucleotide
uaaugcgugcccuguagcc

SEQ ID NO: 1329141 - RNA, 19 nt, Artificial Sequence
  Description of Artificial Sequence: Synthetic oligonucleotide
accgcgacaguucaccagg

SEQ ID NO: 1329142 - RNA, 19 nt, Artificial Sequence
  Description of Artificial Sequence: Synthetic oligonucleotide
cuuaugcugggccuuagug

SEQ ID NO: 1329143 - RNA, 19 nt, Artificial Sequence
  Description of Artificial Sequence: Synthetic oligonucleotide
uugaguuccccgaccuugg

SEQ ID NO: 1329144 - RNA, 19 nt, Artificial Sequence
  Description of Artificial Sequence: Synthetic oligonucleotide
guaaggaaggccuccaguc

SEQ ID NO: 1329145 - RNA, 19 nt, Artificial Sequence
  Description of Artificial Sequence: Synthetic oligonucleotide
aaguccgagcugaacacac

SEQ ID NO: 1329146 - RNA, 19 nt, Artificial Sequence
  Description of Artificial Sequence: Synthetic oligonucleotide
augggguaccucccgaugg

SEQ ID NO: 1329147 - RNA, 19 nt, Artificial Sequence
  Description of Artificial Sequence: Synthetic oligonucleotide
uauaggagcguguucccac

SEQ ID NO: 1329148 - RNA, 19 nt, Artificial Sequence
  Description of Artificial Sequence: Synthetic oligonucleotide
gacgcugcggcgcagccgg

SEQ ID NO: 1329149 - RNA, 19 nt, Artificial Sequence
  Description of Artificial Sequence: Synthetic oligonucleotide
caaagauggccauggcagg

SEQ ID NO: 1329150 - RNA, 19 nt, Artificial Sequence
  Description of Artificial Sequence: Synthetic oligonucleotide
ugccggguucuuaaugagg

SEQ ID NO: 1329151 - RNA, 19 nt, Artificial Sequence
  Description of Artificial Sequence: Synthetic oligonucleotide
uccucagggauccgcuugg

SEQ ID NO: 1329152 - RNA, 19 nt, Artificial Sequence
  Description of Artificial Sequence: Synthetic oligonucleotide
augaaggcgugguucauca

SEQ ID NO: 1329153 - RNA, 19 nt, Artificial Sequence
  Description of Artificial Sequence: Synthetic oligonucleotide
ucggaguaccgcaaugcug

SEQ ID NO: 1329154 - RNA, 19 nt, Artificial Sequence
  Description of Artificial Sequence: Synthetic oligonucleotide
uccgucugcgccaucgacc

SEQ ID NO: 1329155 - RNA, 19 nt, Artificial Sequence
  Description of Artificial Sequence: Synthetic oligonucleotide
agcgacagucccaugcucc

SEQ ID NO: 1329156 - RNA, 19 nt, Artificial Sequence
  Description of Artificial Sequence: Synthetic oligonucleotide
agcaucggggcuccgcggc

SEQ ID NO: 1329157 - RNA, 19 nt, Artificial Sequence
  Description of Artificial Sequence: Synthetic oligonucleotide
uucagauccgcucgcucug

SEQ ID NO: 1329158 - RNA, 19 nt, Artificial Sequence
  Description of Artificial Sequence: Synthetic oligonucleotide
gucaucguccuugaguucc

SEQ ID NO: 1329159 - RNA, 19 nt, Artificial Sequence
  Description of Artificial Sequence: Synthetic oligonucleotide
acggaagcagguccccugc

SEQ ID NO: 1329160 - RNA, 19 nt, Artificial Sequence
  Description of Artificial Sequence: Synthetic oligonucleotide
gguagcaccggcuuccucc

SEQ ID NO: 1329161 - RNA, 19 nt, Artificial Sequence
  Description of Artificial Sequence: Synthetic oligonucleotide
ucaaucagcuggccgcuca

SEQ ID NO: 1329162 - RNA, 19 nt, Artificial Sequence
  Description of Artificial Sequence: Synthetic oligonucleotide
uaugccaggccucggagua

SEQ ID NO: 1329163 - RNA, 19 nt, Artificial Sequence
  Description of Artificial Sequence: Synthetic oligonucleotide
ggugccgacaggaacaagg

SEQ ID NO: 1329164 - RNA, 19 nt, Artificial Sequence
  Description of Artificial Sequence: Synthetic oligonucleotide
ggacagaggcuauugggcg

SEQ ID NO: 1329165 - RNA, 19 nt, Artificial Sequence
  Description of Artificial Sequence: Synthetic oligonucleotide
cauauaggagcguguuccc

SEQ ID NO: 1329166 - RNA, 19 nt, Artificial Sequence
  Description of Artificial Sequence: Synthetic oligonucleotide
caggguucggcacagccag

SEQ ID NO: 1329167 - RNA, 19 nt, Artificial Sequence
  Description of Artificial Sequence: Synthetic oligonucleotide
cucggcgagacacuauggg

SEQ ID NO: 1329168 - RNA, 19 nt, Artificial Sequence
  Description of Artificial Sequence: Synthetic oligonucleotide
cacaauguagggugaguug

SEQ ID NO: 1329169 - RNA, 19 nt, Artificial Sequence
  Description of Artificial Sequence: Synthetic oligonucleotide
uugagcaccugguccagug

SEQ ID NO: 1329170 - RNA, 19 nt, Artificial Sequence
  Description of Artificial Sequence: Synthetic oligonucleotide
ugacggcuuaugcugggcc

SEQ ID NO: 1329171 - RNA, 19 nt, Artificial Sequence
  Description of Artificial Sequence: Synthetic oligonucleotide
gaagcugacgcugcggcgc

SEQ ID NO: 1329172 - RNA, 19 nt, Artificial Sequence
  Description of Artificial Sequence: Synthetic oligonucleotide
auggagucaaucagcuggc

SEQ ID NO: 1329173 - RNA, 19 nt, Artificial Sequence
  Description of Artificial Sequence: Synthetic oligonucleotide
aaacgcacggaagcagguc

SEQ ID NO: 1329174 - RNA, 19 nt, Artificial Sequence
  Description of Artificial Sequence: Synthetic oligonucleotide
uucucacggagguaugcca

SEQ ID NO: 1329175 - RNA, 19 nt, Artificial Sequence
  Description of Artificial Sequence: Synthetic oligonucleotide
cagugagccaccauccaug

SEQ ID NO: 1329176 - RNA, 19 nt, Artificial Sequence
  Description of Artificial Sequence: Synthetic oligonucleotide
uccauuuuguuugguuuug

SEQ ID NO: 1329177 - RNA, 19 nt, Artificial Sequence
  Description of Artificial Sequence: Synthetic oligonucleotide
cugcacagaguaaugcgug

SEQ ID NO: 1329178 - RNA, 19 nt, Artificial Sequence
  Description of Artificial Sequence: Synthetic oligonucleotide
ugcaaacgcacggaagcag

SEQ ID NO: 1329179 - RNA, 19 nt, Artificial Sequence
  Description of Artificial Sequence: Synthetic oligonucleotide
uccagauggaucagcuuuc

SEQ ID NO: 1329180 - RNA, 19 nt, Artificial Sequence
  Description of Artificial Sequence: Synthetic oligonucleotide
cugaacacaccacugggca

SEQ ID NO: 1329181 - RNA, 19 nt, Artificial Sequence
  Description of Artificial Sequence: Synthetic oligonucleotide
ucguccuugaguuccccga

SEQ ID NO: 1329182 - RNA, 19 nt, Artificial Sequence
  Description of Artificial Sequence: Synthetic oligonucleotide
acggagguaugccaggccu

SEQ ID NO: 1329183 - RNA, 19 nt, Artificial Sequence
  Description of Artificial Sequence: Synthetic oligonucleotide
ugggccuuagugaccacac

SEQ ID NO: 1329184 - RNA, 19 nt, Artificial Sequence
  Description of Artificial Sequence: Synthetic oligonucleotide
ugaggcauuuauucacaaa

SEQ ID NO: 1329185 - RNA, 19 nt, Artificial Sequence
  Description of Artificial Sequence: Synthetic oligonucleotide
aaggcgugguucaucagca

SEQ ID NO: 1329186 - RNA, 19 nt, Artificial Sequence
  Description of Artificial Sequence: Synthetic oligonucleotide
gaugggguaccucccgaug

SEQ ID NO: 1329187 - RNA, 19 nt, Artificial Sequence
  Description of Artificial Sequence: Synthetic oligonucleotide
gauggugagcgccgguagc

SEQ ID NO: 1329188 - RNA, 19 nt, Artificial Sequence
  Description of Artificial Sequence: Synthetic oligonucleotide
gacauauaggagcguguuc

SEQ ID NO: 1329189 - RNA, 19 nt, Artificial Sequence
  Description of Artificial Sequence: Synthetic oligonucleotide
caaagcuggccucuaguuc

SEQ ID NO: 1329190 - RNA, 19 nt, Artificial Sequence
  Description of Artificial Sequence: Synthetic oligonucleotide
guagcaccggcuuccuccg

SEQ ID NO: 1329191 - RNA, 19 nt, Artificial Sequence
  Description of Artificial Sequence: Synthetic oligonucleotide
guugcggacggcugguuug

SEQ ID NO: 1329192 - RNA, 19 nt, Artificial Sequence
  Description of Artificial Sequence: Synthetic oligonucleotide
cucaccgcgacaguucacc

SEQ ID NO: 1329193 - RNA, 19 nt, Artificial Sequence
  Description of Artificial Sequence: Synthetic oligonucleotide
accgcaaugcugaccuucc

SEQ ID NO: 1329194 - RNA, 19 nt, Artificial Sequence
  Description of Artificial Sequence: Synthetic oligonucleotide
aagccgagcgaagcugacg

SEQ ID NO: 1329195 - RNA, 19 nt, Artificial Sequence
  Description of Artificial Sequence: Synthetic oligonucleotide
agguucgccucggaggcgc

SEQ ID NO: 1329196 - RNA, 19 nt, Artificial Sequence
  Description of Artificial Sequence: Synthetic oligonucleotide
agaggcuauugggcgaugg

SEQ ID NO: 1329197 - RNA, 19 nt, Artificial Sequence
  Description of Artificial Sequence: Synthetic oligonucleotide
acuauggggcucuccgucu

SEQ ID NO: 1329198 - RNA, 19 nt, Artificial Sequence
  Description of Artificial Sequence: Synthetic oligonucleotide
ugcugaagccgagcgaagc

SEQ ID NO: 1329199 - RNA, 19 nt, Artificial Sequence
  Description of Artificial Sequence: Synthetic oligonucleotide
uggccgcucaccccgaagu

SEQ ID NO: 1329200 - RNA, 19 nt, Artificial Sequence
  Description of Artificial Sequence: Synthetic oligonucleotide
caucccaugaccgcugaug

SEQ ID NO: 1329201 - RNA, 19 nt, Artificial Sequence
  Description of Artificial Sequence: Synthetic oligonucleotide
ucccaugaccgcugauggg

SEQ ID NO: 1329202 - RNA, 19 nt, Artificial Sequence
  Description of Artificial Sequence: Synthetic oligonucleotide
aucucaccgcgacaguuca

SEQ ID NO: 1329203 - RNA, 19 nt, Artificial Sequence
  Description of Artificial Sequence: Synthetic oligonucleotide
ucaucguccuugaguuccc

SEQ ID NO: 1329204 - RNA, 19 nt, Artificial Sequence
  Description of Artificial Sequence: Synthetic oligonucleotide
ucugcgccaucgaccacag

SEQ ID NO: 1329205 - RNA, 19 nt, Artificial Sequence
  Description of Artificial Sequence: Synthetic oligonucleotide
auguagggugaguugcacu

SEQ ID NO: 1329206 - RNA, 19 nt, Artificial Sequence
  Description of Artificial Sequence: Synthetic oligonucleotide
cucggagugcuugaugaag

SEQ ID NO: 1329207 - RNA, 19 nt, Artificial Sequence
  Description of Artificial Sequence: Synthetic oligonucleotide
uguccaucccaugaccgcu

SEQ ID NO: 1329208 - RNA, 19 nt, Artificial Sequence
  Description of Artificial Sequence: Synthetic oligonucleotide
guucggcacagccagccug

SEQ ID NO: 1329209 - RNA, 19 nt, Artificial Sequence
  Description of Artificial Sequence: Synthetic oligonucleotide
auugggcgauggcugucac

SEQ ID NO: 1329210 - RNA, 19 nt, Artificial Sequence
  Description of Artificial Sequence: Synthetic oligonucleotide
ugcccuguagccgcucugg

SEQ ID NO: 1329211 - RNA, 19 nt, Artificial Sequence
  Description of Artificial Sequence: Synthetic oligonucleotide
gacagaggcuauugggcga

SEQ ID NO: 1329212 - RNA, 19 nt, Artificial Sequence
  Description of Artificial Sequence: Synthetic oligonucleotide
aggccugacggcuuaugcu

SEQ ID NO: 1329213 - RNA, 19 nt, Artificial Sequence
  Description of Artificial Sequence: Synthetic oligonucleotide
auaggagcguguucccaca

SEQ ID NO: 1329214 - RNA, 19 nt, Artificial Sequence
  Description of Artificial Sequence: Synthetic oligonucleotide
uugcaaacgcacggaagca

SEQ ID NO: 1329215 - RNA, 19 nt, Artificial Sequence
  Description of Artificial Sequence: Synthetic oligonucleotide
guuuugcaaacgcacggaa

SEQ ID NO: 1329216 - RNA, 19 nt, Artificial Sequence
  Description of Artificial Sequence: Synthetic oligonucleotide
gcgggguugauggugagcg

SEQ ID NO: 1329217 - RNA, 19 nt, Artificial Sequence
  Description of Artificial Sequence: Synthetic oligonucleotide
uccgagcugaacacaccac

SEQ ID NO: 1329218 - RNA, 19 nt, Artificial Sequence
  Description of Artificial Sequence: Synthetic oligonucleotide
ggaaguccgagcugaacac

SEQ ID NO: 1329219 - RNA, 19 nt, Artificial Sequence
  Description of Artificial Sequence: Synthetic oligonucleotide
caugaccgcugauggggcg

SEQ ID NO: 1329220 - RNA, 19 nt, Artificial Sequence
  Description of Artificial Sequence: Synthetic oligonucleotide
acagaguaaugcgugcccu

SEQ ID NO: 1329221 - RNA, 19 nt, Artificial Sequence
  Description of Artificial Sequence: Synthetic oligonucleotide
agaguaaugcgugcccugu

SEQ ID NO: 1329222 - RNA, 19 nt, Artificial Sequence
  Description of Artificial Sequence: Synthetic oligonucleotide
gagugcuugaugaaggcgu

SEQ ID NO: 1329223 - RNA, 19 nt, Artificial Sequence
  Description of Artificial Sequence: Synthetic oligonucleotide
cacuauggggcucuccguc

SEQ ID NO: 1329224 - RNA, 19 nt, Artificial Sequence
  Description of Artificial Sequence: Synthetic oligonucleotide
gacggcugguuugaucucc

SEQ ID NO: 1329225 - RNA, 19 nt, Artificial Sequence
  Description of Artificial Sequence: Synthetic oligonucleotide
ggccugacggcuuaugcug

SEQ ID NO: 1329226 - RNA, 19 nt, Artificial Sequence
  Description of Artificial Sequence: Synthetic oligonucleotide
gcgacaguucaccaggaug

SEQ ID NO: 1329227 - RNA, 19 nt, Artificial Sequence
  Description of Artificial Sequence: Synthetic oligonucleotide
cagaguaaugcgugcccug

SEQ ID NO: 1329228 - RNA, 19 nt, Artificial Sequence
  Description of Artificial Sequence: Synthetic oligonucleotide
ugaguuccccgaccuuggc

SEQ ID NO: 1329229 - RNA, 19 nt, Artificial Sequence
  Description of Artificial Sequence: Synthetic oligonucleotide
uauggggcucuccgucugc

SEQ ID NO: 1329230 - RNA, 19 nt, Artificial Sequence
  Description of Artificial Sequence: Synthetic oligonucleotide
cagcuggccgcucaccccg

SEQ ID NO: 1329231 - RNA, 19 nt, Artificial Sequence
  Description of Artificial Sequence: Synthetic oligonucleotide
gguccagugagccaccauc

SEQ ID NO: 1329232 - RNA, 19 nt, Artificial Sequence
  Description of Artificial Sequence: Synthetic oligonucleotide
gugagcgccgguagcaccg

SEQ ID NO: 1329233 - RNA, 19 nt, Artificial Sequence
  Description of Artificial Sequence: Synthetic oligonucleotide
agacacuauggggcucucc

SEQ ID NO: 1329234 - RNA, 19 nt, Artificial Sequence
  Description of Artificial Sequence: Synthetic oligonucleotide
uagggugaguugcacucau

SEQ ID NO: 1329235 - RNA, 19 nt, Artificial Sequence
  Description of Artificial Sequence: Synthetic oligonucleotide
aggcuauugggcgauggcu

SEQ ID NO: 1329236 - RNA, 19 nt, Artificial Sequence
  Description of Artificial Sequence: Synthetic oligonucleotide
aguccgagcugaacacacc

SEQ ID NO: 1329237 - RNA, 19 nt, Artificial Sequence
  Description of Artificial Sequence: Synthetic oligonucleotide
cacaggccggccaaagcug

SEQ ID NO: 1329238 - RNA, 19 nt, Artificial Sequence
  Description of Artificial Sequence: Synthetic oligonucleotide
gaugaaggcgugguucauc

SEQ ID NO: 1329239 - RNA, 19 nt, Artificial Sequence
  Description of Artificial Sequence: Synthetic oligonucleotide
gagcguguucccacaaaug

SEQ ID NO: 1329240 - RNA, 19 nt, Artificial Sequence
  Description of Artificial Sequence: Synthetic oligonucleotide
gaucucaccgcgacaguuc

SEQ ID NO: 1329241 - RNA, 19 nt, Artificial Sequence
  Description of Artificial Sequence: Synthetic oligonucleotide
ugcuucucacggagguaug

SEQ ID NO: 1329242 - RNA, 19 nt, Artificial Sequence
  Description of Artificial Sequence: Synthetic oligonucleotide
cucagggauccgcuuggcc

SEQ ID NO: 1329243 - RNA, 19 nt, Artificial Sequence
  Description of Artificial Sequence: Synthetic oligonucleotide
gcaaacgcacggaagcagg

SEQ ID NO: 1329244 - RNA, 19 nt, Artificial Sequence
  Description of Artificial Sequence: Synthetic oligonucleotide
uaccgcaaugcugaccuuc

SEQ ID NO: 1329245 - RNA, 19 nt, Artificial Sequence
  Description of Artificial Sequence: Synthetic oligonucleotide
cugccggguucuuaaugag

SEQ ID NO: 1329246 - RNA, 19 nt, Artificial Sequence
  Description of Artificial Sequence: Synthetic oligonucleotide
cucugccggguucuuaaug

SEQ ID NO: 1329247 - RNA, 19 nt, Artificial Sequence
  Description of Artificial Sequence: Synthetic oligonucleotide
acacuauggggcucuccgu

SEQ ID NO: 1329248 - RNA, 19 nt, Artificial Sequence
  Description of Artificial Sequence: Synthetic oligonucleotide
aacaaggacagaggcuauu

SEQ ID NO: 1329249 - RNA, 19 nt, Artificial Sequence
  Description of Artificial Sequence: Synthetic oligonucleotide
gccggguucuuaaugaggc

SEQ ID NO: 1329250 - RNA, 19 nt, Artificial Sequence
  Description of Artificial Sequence: Synthetic oligonucleotide
ggagguaugccaggccucg

SEQ ID NO: 1329251 - RNA, 19 nt, Artificial Sequence
  Description of Artificial Sequence: Synthetic oligonucleotide
cacggaagcagguccccug

SEQ ID NO: 1329252 - RNA, 19 nt, Artificial Sequence
  Description of Artificial Sequence: Synthetic oligonucleotide
uugauggugagcgccggua

SEQ ID NO: 1329253 - RNA, 19 nt, Artificial Sequence
  Description of Artificial Sequence: Synthetic oligonucleotide
uccaucccaugaccgcuga

SEQ ID NO: 1329254 - RNA, 19 nt, Artificial Sequence
  Description of Artificial Sequence: Synthetic oligonucleotide
aagcugacgcugcggcgca

SEQ ID NO: 1329255 - RNA, 19 nt, Artificial Sequence
  Description of Artificial Sequence: Synthetic oligonucleotide
caauguagggugaguugca

SEQ ID NO: 1329256 - RNA, 19 nt, Artificial Sequence
  Description of Artificial Sequence: Synthetic oligonucleotide
ugcgcgugggugugcuggg

SEQ ID NO: 1329257 - RNA, 19 nt, Artificial Sequence
  Description of Artificial Sequence: Synthetic oligonucleotide
ccgcucuggagacauauag

SEQ ID NO: 1329258 - RNA, 19 nt, Artificial Sequence
  Description of Artificial Sequence: Synthetic oligonucleotide
aggccggccaaagcuggcc

SEQ ID NO: 1329259 - RNA, 19 nt, Artificial Sequence
  Description of Artificial Sequence: Synthetic oligonucleotide
ucaccgcgacaguucacca

SEQ ID NO: 1329260 - RNA, 19 nt, Artificial Sequence
  Description of Artificial Sequence: Synthetic oligonucleotide
cugggccucggcgagacac

SEQ ID NO: 1329261 - RNA, 19 nt, Artificial Sequence
  Description of Artificial Sequence: Synthetic oligonucleotide
cucggaggcgcccucgcug

SEQ ID NO: 1329262 - RNA, 19 nt, Artificial Sequence
  Description of Artificial Sequence: Synthetic oligonucleotide
acgcacggaagcagguccc

SEQ ID NO: 1329263 - RNA, 19 nt, Artificial Sequence
  Description of Artificial Sequence: Synthetic oligonucleotide
ccuuagugaccacaccacc

SEQ ID NO: 1329264 - RNA, 19 nt, Artificial Sequence
  Description of Artificial Sequence: Synthetic oligonucleotide
cuauggggcucuccgucug

SEQ ID NO: 1329265 - RNA, 19 nt, Artificial Sequence
  Description of Artificial Sequence: Synthetic oligonucleotide
gccacaacacagcuucacc

SEQ ID NO: 1329266 - RNA, 19 nt, Artificial Sequence
  Description of Artificial Sequence: Synthetic oligonucleotide
guccuugaguuccccgacc

SEQ ID NO: 1329267 - RNA, 19 nt, Artificial Sequence
  Description of Artificial Sequence: Synthetic oligonucleotide
gaaguccgagcugaacaca

SEQ ID NO: 1329268 - RNA, 19 nt, Artificial Sequence
  Description of Artificial Sequence: Synthetic oligonucleotide
ggcuauugggcgauggcug

SEQ ID NO: 1329269 - RNA, 19 nt, Artificial Sequence
  Description of Artificial Sequence: Synthetic oligonucleotide
gaguaccgcaaugcugacc

SEQ ID NO: 1329270 - RNA, 19 nt, Artificial Sequence
  Description of Artificial Sequence: Synthetic oligonucleotide
gauggggcguccaggcggc

SEQ ID NO: 1329271 - RNA, 19 nt, Artificial Sequence
  Description of Artificial Sequence: Synthetic oligonucleotide
cuucagauccgcucgcucu

SEQ ID NO: 1329272 - RNA, 19 nt, Artificial Sequence
  Description of Artificial Sequence: Synthetic oligonucleotide
aucgaccacaggccggcca

SEQ ID NO: 1329273 - RNA, 19 nt, Artificial Sequence
  Description of Artificial Sequence: Synthetic oligonucleotide
agucaaucagcuggccgcu

SEQ ID NO: 1329274 - RNA, 19 nt, Artificial Sequence
  Description of Artificial Sequence: Synthetic oligonucleotide
ugcggcgcagccgggaggc

SEQ ID NO: 1329275 - RNA, 19 nt, Artificial Sequence
  Description of Artificial Sequence: Synthetic oligonucleotide
cacggagguaugccaggcc

SEQ ID NO: 1329276 - RNA, 19 nt, Artificial Sequence
  Description of Artificial Sequence: Synthetic oligonucleotide
uaggagcguguucccacaa

SEQ ID NO: 1329277 - RNA, 19 nt, Artificial Sequence
  Description of Artificial Sequence: Synthetic oligonucleotide
ugacgcugcggcgcagccg

SEQ ID NO: 1329278 - RNA, 19 nt, Artificial Sequence
  Description of Artificial Sequence: Synthetic oligonucleotide
caccauugccagcucccag

SEQ ID NO: 1329279 - RNA, 19 nt, Artificial Sequence
  Description of Artificial Sequence: Synthetic oligonucleotide
acagucccaugcuccagau

SEQ ID NO: 1329280 - RNA, 19 nt, Artificial Sequence
  Description of Artificial Sequence: Synthetic oligonucleotide
cagauggaucagcuuucug

SEQ ID NO: 1329281 - RNA, 19 nt, Artificial Sequence
  Description of Artificial Sequence: Synthetic oligonucleotide
uagugaccacaccaccauu

SEQ ID NO: 1329282 - RNA, 19 nt, Artificial Sequence
  Description of Artificial Sequence: Synthetic oligonucleotide
gcugaacacaccacugggc

SEQ ID NO: 1329283 - RNA, 19 nt, Artificial Sequence
  Description of Artificial Sequence: Synthetic oligonucleotide
ugcagugcgcgugggugug

SEQ ID NO: 1329284 - RNA, 19 nt, Artificial Sequence
  Description of Artificial Sequence: Synthetic oligonucleotide
caaaugaauuggccaugga

SEQ ID NO: 1329285 - RNA, 19 nt, Artificial Sequence
  Description of Artificial Sequence: Synthetic oligonucleotide
cugucacacugcagugcgc

SEQ ID NO: 1329286 - RNA, 19 nt, Artificial Sequence
  Description of Artificial Sequence: Synthetic oligonucleotide
agggauccgcuuggccucc

SEQ ID NO: 1329287 - RNA, 19 nt, Artificial Sequence
  Description of Artificial Sequence: Synthetic oligonucleotide
gagcggagaccgcugcuga

SEQ ID NO: 1329288 - RNA, 19 nt, Artificial Sequence
  Description of Artificial Sequence: Synthetic oligonucleotide
uucagccgcaggguucggc

SEQ ID NO: 1329289 - RNA, 19 nt, Artificial Sequence
  Description of Artificial Sequence: Synthetic oligonucleotide
gacgggcccucggcgaugg

SEQ ID NO: 1329290 - RNA, 19 nt, Artificial Sequence
  Description of Artificial Sequence: Synthetic oligonucleotide
caggccucggaguaccgca

SEQ ID NO: 1329291 - RNA, 19 nt, Artificial Sequence
  Description of Artificial Sequence: Synthetic oligonucleotide
cuuugcugcucauccaggu

SEQ ID NO: 1329292 - RNA, 19 nt, Artificial Sequence
  Description of Artificial Sequence: Synthetic oligonucleotide
gucugcgccaucgaccaca

SEQ ID NO: 1329293 - RNA, 19 nt, Artificial Sequence
  Description of Artificial Sequence: Synthetic oligonucleotide
agguccccugccacaacac

SEQ ID NO: 1329294 - RNA, 19 nt, Artificial Sequence
  Description of Artificial Sequence: Synthetic oligonucleotide
gagguaugccaggccucgg

SEQ ID NO: 1329295 - RNA, 19 nt, Artificial Sequence
  Description of Artificial Sequence: Synthetic oligonucleotide
acagaggcuauugggcgau

SEQ ID NO: 1329296 - RNA, 19 nt, Artificial Sequence
  Description of Artificial Sequence: Synthetic oligonucleotide
gacggcuuaugcugggccu

SEQ ID NO: 1329297 - RNA, 19 nt, Artificial Sequence
  Description of Artificial Sequence: Synthetic oligonucleotide
ccucccgauggccagcucc

SEQ ID NO: 1329298 - RNA, 19 nt, Artificial Sequence
  Description of Artificial Sequence: Synthetic oligonucleotide
ucucaccgcgacaguucac

SEQ ID NO: 1329299 - RNA, 19 nt, Artificial Sequence
  Description of Artificial Sequence: Synthetic oligonucleotide
gguuuugcaaacgcacgga

SEQ ID NO: 1329300 - RNA, 19 nt, Artificial Sequence
  Description of Artificial Sequence: Synthetic oligonucleotide
gccucggcgagacacuaug

SEQ ID NO: 1329301 - RNA, 19 nt, Artificial Sequence
  Description of Artificial Sequence: Synthetic oligonucleotide
ggguugauggugagcgccg

SEQ ID NO: 1329302 - RNA, 19 nt, Artificial Sequence
  Description of Artificial Sequence: Synthetic oligonucleotide
ugggccucggcgagacacu

SEQ ID NO: 1329303 - RNA, 19 nt, Artificial Sequence
  Description of Artificial Sequence: Synthetic oligonucleotide
ugagcgccgguagcaccgg

SEQ ID NO: 1329304 - RNA, 19 nt, Artificial Sequence
  Description of Artificial Sequence: Synthetic oligonucleotide
uugcggacggcugguuuga

SEQ ID NO: 1329305 - RNA, 19 nt, Artificial Sequence
  Description of Artificial Sequence: Synthetic oligonucleotide
cggaguaccgcaaugcuga

SEQ ID NO: 1329306 - RNA, 19 nt, Artificial Sequence
  Description of Artificial Sequence: Synthetic oligonucleotide
agccugcgaaguccaccuc

SEQ ID NO: 1329307 - RNA, 19 nt, Artificial Sequence
  Description of Artificial Sequence: Synthetic oligonucleotide
cuaggccgggcgugcggcg

SEQ ID NO: 1329308 - RNA, 19 nt, Artificial Sequence
  Description of Artificial Sequence: Synthetic oligonucleotide
aggagcguguucccacaaa

SEQ ID NO: 1329309 - RNA, 19 nt, Artificial Sequence
  Description of Artificial Sequence: Synthetic oligonucleotide
cugacggcuuaugcugggc

SEQ ID NO: 1329310 - RNA, 19 nt, Artificial Sequence
  Description of Artificial Sequence: Synthetic oligonucleotide
gguugauggugagcgccgg

SEQ ID NO: 1329311 - RNA, 19 nt, Artificial Sequence
  Description of Artificial Sequence: Synthetic oligonucleotide
cagauccgcucgcucugcc

SEQ ID NO: 1329312 - RNA, 19 nt, Artificial Sequence
  Description of Artificial Sequence: Synthetic oligonucleotide
ugcggccuaggccgggcgu

SEQ ID NO: 1329313 - RNA, 19 nt, Artificial Sequence
  Description of Artificial Sequence: Synthetic oligonucleotide
augaccgcugauggggcgu

SEQ ID NO: 1329314 - RNA, 19 nt, Artificial Sequence
  Description of Artificial Sequence: Synthetic oligonucleotide
cucccgauggccagcucca

SEQ ID NO: 1329315 - RNA, 19 nt, Artificial Sequence
  Description of Artificial Sequence: Synthetic oligonucleotide
gaagccgagcgaagcugac

SEQ ID NO: 1329316 - RNA, 19 nt, Artificial Sequence
  Description of Artificial Sequence: Synthetic oligonucleotide
gaguaaugcgugcccugua

SEQ ID NO: 1329317 - RNA, 19 nt, Artificial Sequence
  Description of Artificial Sequence: Synthetic oligonucleotide
gcugcugaagccgagcgaa

SEQ ID NO: 1329318 - RNA, 19 nt, Artificial Sequence
  Description of Artificial Sequence: Synthetic oligonucleotide
ccucggaguaccgcaaugc

SEQ ID NO: 1329319 - RNA, 19 nt, Artificial Sequence
  Description of Artificial Sequence: Synthetic oligonucleotide
cagguccccugccacaaca

SEQ ID NO: 1329320 - RNA, 19 nt, Artificial Sequence
  Description of Artificial Sequence: Synthetic oligonucleotide
augccaggccucggaguac

SEQ ID NO: 1329321 - RNA, 19 nt, Artificial Sequence
  Description of Artificial Sequence: Synthetic oligonucleotide
guagggugaguugcacuca

SEQ ID NO: 1329322 - RNA, 19 nt, Artificial Sequence
  Description of Artificial Sequence: Synthetic oligonucleotide
aucugguugcggacggcug

SEQ ID NO: 1329323 - RNA, 19 nt, Artificial Sequence
  Description of Artificial Sequence: Synthetic oligonucleotide
ggguucggcacagccagcc

SEQ ID NO: 1329324 - RNA, 19 nt, Artificial Sequence
  Description of Artificial Sequence: Synthetic oligonucleotide
gccuuagugaccacaccac

SEQ ID NO: 1329325 - RNA, 19 nt, Artificial Sequence
  Description of Artificial Sequence: Synthetic oligonucleotide
ccaugaccgcugauggggc

SEQ ID NO: 1329326 - RNA, 19 nt, Artificial Sequence
  Description of Artificial Sequence: Synthetic oligonucleotide
cuauugggcgauggcuguc

SEQ ID NO: 1329327 - RNA, 19 nt, Artificial Sequence
  Description of Artificial Sequence: Synthetic oligonucleotide
caucguccuugaguucccc

SEQ ID NO: 1329328 - RNA, 19 nt, Artificial Sequence
  Description of Artificial Sequence: Synthetic oligonucleotide
ccucggcgagacacuaugg

SEQ ID NO: 1329329 - RNA, 19 nt, Artificial Sequence
  Description of Artificial Sequence: Synthetic oligonucleotide
ccugacggcuuaugcuggg

SEQ ID NO: 1329330 - RNA, 19 nt, Artificial Sequence
  Description of Artificial Sequence: Synthetic oligonucleotide
cagcgacagucccaugcuc

SEQ ID NO: 1329331 - RNA, 19 nt, Artificial Sequence
  Description of Artificial Sequence: Synthetic oligonucleotide
aggggcagccacggugccg

SEQ ID NO: 1329332 - RNA, 19 nt, Artificial Sequence
  Description of Artificial Sequence: Synthetic oligonucleotide
guaugccaggccucggagu

SEQ ID NO: 1329333 - RNA, 19 nt, Artificial Sequence
  Description of Artificial Sequence: Synthetic oligonucleotide
uaccucccgauggccagcu

SEQ ID NO: 1329334 - RNA, 19 nt, Artificial Sequence
  Description of Artificial Sequence: Synthetic oligonucleotide
guccaucccaugaccgcug

SEQ ID NO: 1329335 - RNA, 19 nt, Artificial Sequence
  Description of Artificial Sequence: Synthetic oligonucleotide
caaacgcacggaagcaggu

SEQ ID NO: 1329336 - RNA, 19 nt, Artificial Sequence
  Description of Artificial Sequence: Synthetic oligonucleotide
caggccggccaaagcuggc

SEQ ID NO: 1329337 - RNA, 19 nt, Artificial Sequence
  Description of Artificial Sequence: Synthetic oligonucleotide
gcaggucggcuguccaucc

SEQ ID NO: 1329338 - RNA, 19 nt, Artificial Sequence
  Description of Artificial Sequence: Synthetic oligonucleotide
acacugcagugcgcguggg

SEQ ID NO: 1329339 - RNA, 19 nt, Artificial Sequence
  Description of Artificial Sequence: Synthetic oligonucleotide
cugcggcgcagccgggagg

SEQ ID NO: 1329340 - RNA, 19 nt, Artificial Sequence
  Description of Artificial Sequence: Synthetic oligonucleotide
agcggagaccgcugcugaa

SEQ ID NO: 1329341 - RNA, 19 nt, Artificial Sequence
  Description of Artificial Sequence: Synthetic oligonucleotide
gccgguagcaccggcuucc

SEQ ID NO: 1329342 - RNA, 19 nt, Artificial Sequence
  Description of Artificial Sequence: Synthetic oligonucleotide
ggccaaagcuggccucuag

SEQ ID NO: 1329343 - RNA, 19 nt, Artificial Sequence
  Description of Artificial Sequence: Synthetic oligonucleotide
caccaggauguuggagggc

SEQ ID NO: 1329344 - RNA, 19 nt, Artificial Sequence
  Description of Artificial Sequence: Synthetic oligonucleotide
cucggaguaccgcaaugcu

SEQ ID NO: 1329345 - RNA, 19 nt, Artificial Sequence
  Description of Artificial Sequence: Synthetic oligonucleotide
ggagcguguucccacaaau

SEQ ID NO: 1329346 - RNA, 19 nt, Artificial Sequence
  Description of Artificial Sequence: Synthetic oligonucleotide
agugcgcgugggugugcug

SEQ ID NO: 1329347 - RNA, 19 nt, Artificial Sequence
  Description of Artificial Sequence: Synthetic oligonucleotide
gcggagaccgcugcugaag

SEQ ID NO: 1329348 - RNA, 19 nt, Artificial Sequence
  Description of Artificial Sequence: Synthetic oligonucleotide
gugcccuguagccgcucug

SEQ ID NO: 1329349 - RNA, 19 nt, Artificial Sequence
  Description of Artificial Sequence: Synthetic oligonucleotide
gcgccaucgaccacaggcc

SEQ ID NO: 1329350 - RNA, 19 nt, Artificial Sequence
  Description of Artificial Sequence: Synthetic oligonucleotide
cccgaccuuggccuucugg

SEQ ID NO: 1329351 - RNA, 19 nt, Artificial Sequence
  Description of Artificial Sequence: Synthetic oligonucleotide
gggccuuagugaccacacc

SEQ ID NO: 1329352 - RNA, 19 nt, Artificial Sequence
  Description of Artificial Sequence: Synthetic oligonucleotide
cggagugcuugaugaaggc

SEQ ID NO: 1329353 - RNA, 19 nt, Artificial Sequence
  Description of Artificial Sequence: Synthetic oligonucleotide
cucggcgauggcgggguug

SEQ ID NO: 1329354 - RNA, 19 nt, Artificial Sequence
  Description of Artificial Sequence: Synthetic oligonucleotide
ccgcucaccccgaagucac

SEQ ID NO: 1329355 - RNA, 19 nt, Artificial Sequence
  Description of Artificial Sequence: Synthetic oligonucleotide
gccucggaguaccgcaaug

SEQ ID NO: 1329356 - RNA, 19 nt, Artificial Sequence
  Description of Artificial Sequence: Synthetic oligonucleotide
ccagccugcgaaguccacc

SEQ ID NO: 1329357 - RNA, 19 nt, Artificial Sequence
  Description of Artificial Sequence: Synthetic oligonucleotide
ugaccgcugauggggcguc

SEQ ID NO: 1329358 - RNA, 19 nt, Artificial Sequence
  Description of Artificial Sequence: Synthetic oligonucleotide
acggcuuaugcugggccuu

SEQ ID NO: 1329359 - RNA, 19 nt, Artificial Sequence
  Description of Artificial Sequence: Synthetic oligonucleotide
gguccccugccacaacaca

SEQ ID NO: 1329360 - RNA, 19 nt, Artificial Sequence
  Description of Artificial Sequence: Synthetic oligonucleotide
cgaagcugacgcugcggcg

SEQ ID NO: 1329361 - RNA, 19 nt, Artificial Sequence
  Description of Artificial Sequence: Synthetic oligonucleotide
ggaguaccgcaaugcugac

SEQ ID NO: 1329362 - RNA, 19 nt, Artificial Sequence
  Description of Artificial Sequence: Synthetic oligonucleotide
gcgacagucccaugcucca

SEQ ID NO: 1329363 - RNA, 19 nt, Artificial Sequence
  Description of Artificial Sequence: Synthetic oligonucleotide
guagccgcucuggagacau

SEQ ID NO: 1329364 - RNA, 19 nt, Artificial Sequence
  Description of Artificial Sequence: Synthetic oligonucleotide
cagguucgccucggaggcg

SEQ ID NO: 1329365 - RNA, 19 nt, Artificial Sequence
  Description of Artificial Sequence: Synthetic oligonucleotide
agcgccgguagcaccggcu

SEQ ID NO: 1329366 - RNA, 19 nt, Artificial Sequence
  Description of Artificial Sequence: Synthetic oligonucleotide
gcuugaucucaccgcgaca

SEQ ID NO: 1329367 - RNA, 19 nt, Artificial Sequence
  Description of Artificial Sequence: Synthetic oligonucleotide
gagcgccgguagcaccggc

SEQ ID NO: 1329368 - RNA, 19 nt, Artificial Sequence
  Description of Artificial Sequence: Synthetic oligonucleotide
accgcugauggggcgucca

SEQ ID NO: 1329369 - RNA, 19 nt, Artificial Sequence
  Description of Artificial Sequence: Synthetic oligonucleotide
acggcugguuugaucucca

SEQ ID NO: 1329370 - RNA, 19 nt, Artificial Sequence
  Description of Artificial Sequence: Synthetic oligonucleotide
guugauggugagcgccggu

SEQ ID NO: 1329371 - RNA, 19 nt, Artificial Sequence
  Description of Artificial Sequence: Synthetic oligonucleotide
gcugaagccgagcgaagcu

SEQ ID NO: 1329372 - RNA, 19 nt, Artificial Sequence
  Description of Artificial Sequence: Synthetic oligonucleotide
agccagccugcgaagucca

SEQ ID NO: 1329373 - RNA, 19 nt, Artificial Sequence
  Description of Artificial Sequence: Synthetic oligonucleotide
ggcgagacacuauggggcu

SEQ ID NO: 1329374 - RNA, 19 nt, Artificial Sequence
  Description of Artificial Sequence: Synthetic oligonucleotide
uccccgaccuuggccuucu

SEQ ID NO: 1329375 - RNA, 19 nt, Artificial Sequence
  Description of Artificial Sequence: Synthetic oligonucleotide
accucccgauggccagcuc

SEQ ID NO: 1329376 - RNA, 19 nt, Artificial Sequence
  Description of Artificial Sequence: Synthetic oligonucleotide
aggcgcccucgcugguggg

SEQ ID NO: 1329377 - RNA, 19 nt, Artificial Sequence
  Description of Artificial Sequence: Synthetic oligonucleotide
acggugccgacaggaacaa

SEQ ID NO: 1329378 - RNA, 19 nt, Artificial Sequence
  Description of Artificial Sequence: Synthetic oligonucleotide
cgccaucgaccacaggccg

SEQ ID NO: 1329379 - RNA, 19 nt, Artificial Sequence
  Description of Artificial Sequence: Synthetic oligonucleotide
cggagaccgcugcugaagc

SEQ ID NO: 1329380 - RNA, 19 nt, Artificial Sequence
  Description of Artificial Sequence: Synthetic oligonucleotide
gcccacaauguagggugag

SEQ ID NO: 1329381 - RNA, 19 nt, Artificial Sequence
  Description of Artificial Sequence: Synthetic oligonucleotide
gcguguucccacaaaugaa

SEQ ID NO: 1329382 - RNA, 19 nt, Artificial Sequence
  Description of Artificial Sequence: Synthetic oligonucleotide
cagcucccagcucugagau

SEQ ID NO: 1329383 - RNA, 19 nt, Artificial Sequence
  Description of Artificial Sequence: Synthetic oligonucleotide
guucgccucggaggcgccc

SEQ ID NO: 1329384 - RNA, 19 nt, Artificial Sequence
  Description of Artificial Sequence: Synthetic oligonucleotide
ggcgccucagccggggccc

SEQ ID NO: 1329385 - RNA, 19 nt, Artificial Sequence
  Description of Artificial Sequence: Synthetic oligonucleotide
gcggcggcaggcgaccggg

SEQ ID NO: 1329386 - RNA, 19 nt, Artificial Sequence
  Description of Artificial Sequence: Synthetic oligonucleotide
gccuaggccgggcgugcgg

SEQ ID NO: 1329387 - RNA, 19 nt, Artificial Sequence
  Description of Artificial Sequence: Synthetic oligonucleotide
auggggcguccaggcggcc

SEQ ID NO: 1329388 - RNA, 19 nt, Artificial Sequence
  Description of Artificial Sequence: Synthetic oligonucleotide
ggcuuaugcugggccuuag

SEQ ID NO: 1329389 - RNA, 19 nt, Artificial Sequence
  Description of Artificial Sequence: Synthetic oligonucleotide
caucgaccacaggccggcc

SEQ ID NO: 1329390 - RNA, 19 nt, Artificial Sequence
  Description of Artificial Sequence: Synthetic oligonucleotide
ggugcgacgcgggcccggg

SEQ ID NO: 1329391 - RNA, 19 nt, Artificial Sequence
  Description of Artificial Sequence: Synthetic oligonucleotide
acgggcccucggcgauggc

SEQ ID NO: 1329392 - RNA, 19 nt, Artificial Sequence
  Description of Artificial Sequence: Synthetic oligonucleotide
gucaaucagcuggccgcuc

SEQ ID NO: 1329393 - RNA, 19 nt, Artificial Sequence
  Description of Artificial Sequence: Synthetic oligonucleotide
gaccgcugauggggcgucc

SEQ ID NO: 1329394 - RNA, 19 nt, Artificial Sequence
  Description of Artificial Sequence: Synthetic oligonucleotide
ccuaggccgggcgugcggc

SEQ ID NO: 1329395 - RNA, 19 nt, Artificial Sequence
  Description of Artificial Sequence: Synthetic oligonucleotide
gguucuuaaugaggcauuu

SEQ ID NO: 1329396 - RNA, 19 nt, Artificial Sequence
  Description of Artificial Sequence: Synthetic oligonucleotide
cugcagugcgcgugggugu

SEQ ID NO: 1329397 - RNA, 19 nt, Artificial Sequence
  Description of Artificial Sequence: Synthetic oligonucleotide
cuucagccgcaggguucgg

SEQ ID NO: 1329398 - RNA, 19 nt, Artificial Sequence
  Description of Artificial Sequence: Synthetic oligonucleotide
gcaucggggcuccgcggcc

SEQ ID NO: 1329399 - RNA, 19 nt, Artificial Sequence
  Description of Artificial Sequence: Synthetic oligonucleotide
ggguaccucccgauggcca

SEQ ID NO: 1329400 - RNA, 19 nt, Artificial Sequence
  Description of Artificial Sequence: Synthetic oligonucleotide
ggcgggguugauggugagc

SEQ ID NO: 1329401 - RNA, 19 nt, Artificial Sequence
  Description of Artificial Sequence: Synthetic oligonucleotide
gucacacugcagugcgcgu

SEQ ID NO: 1329402 - RNA, 19 nt, Artificial Sequence
  Description of Artificial Sequence: Synthetic oligonucleotide
ggacggcugguuugaucuc

SEQ ID NO: 1329403 - RNA, 19 nt, Artificial Sequence
  Description of Artificial Sequence: Synthetic oligonucleotide
ggggacgggcccucggcga

SEQ ID NO: 1329404 - RNA, 19 nt, Artificial Sequence
  Description of Artificial Sequence: Synthetic oligonucleotide
cugcgccaucgaccacagg

SEQ ID NO: 1329405 - RNA, 19 nt, Artificial Sequence
  Description of Artificial Sequence: Synthetic oligonucleotide
ccucagccggggcccauag

SEQ ID NO: 1329406 - RNA, 19 nt, Artificial Sequence
  Description of Artificial Sequence: Synthetic oligonucleotide
ccgagcugaacacaccacu

SEQ ID NO: 1329407 - RNA, 19 nt, Artificial Sequence
  Description of Artificial Sequence: Synthetic oligonucleotide
ggccgcucaccccgaaguc

SEQ ID NO: 1329408 - RNA, 19 nt, Artificial Sequence
  Description of Artificial Sequence: Synthetic oligonucleotide
ggggcggugcgacgcgggc

SEQ ID NO: 1329409 - RNA, 19 nt, Artificial Sequence
  Description of Artificial Sequence: Synthetic oligonucleotide
cagaggcuauugggcgaug

SEQ ID NO: 1329410 - RNA, 19 nt, Artificial Sequence
  Description of Artificial Sequence: Synthetic oligonucleotide
ucgcucugccggguucuua

SEQ ID NO: 1329411 - RNA, 19 nt, Artificial Sequence
  Description of Artificial Sequence: Synthetic oligonucleotide
cccgggacgccggggagcg

SEQ ID NO: 1329412 - RNA, 19 nt, Artificial Sequence
  Description of Artificial Sequence: Synthetic oligonucleotide
gccgcaggguucggcacag

SEQ ID NO: 1329413 - RNA, 19 nt, Artificial Sequence
  Description of Artificial Sequence: Synthetic oligonucleotide
aggccucggaguaccgcaa

SEQ ID NO: 1329414 - RNA, 19 nt, Artificial Sequence
  Description of Artificial Sequence: Synthetic oligonucleotide
uagccgcucuggagacaua

SEQ ID NO: 1329415 - RNA, 19 nt, Artificial Sequence
  Description of Artificial Sequence: Synthetic oligonucleotide
ccaggccucggaguaccgc

SEQ ID NO: 1329416 - RNA, 19 nt, Artificial Sequence
  Description of Artificial Sequence: Synthetic oligonucleotide
ggaggcgcccucgcuggug

SEQ ID NO: 1329417 - RNA, 19 nt, Artificial Sequence
  Description of Artificial Sequence: Synthetic oligonucleotide
caccagcgacagucccaug

SEQ ID NO: 1329418 - RNA, 19 nt, Artificial Sequence
  Description of Artificial Sequence: Synthetic oligonucleotide
gcuuaugcugggccuuagu

SEQ ID NO: 1329419 - RNA, 19 nt, Artificial Sequence
  Description of Artificial Sequence: Synthetic oligonucleotide
augaggccugacggcuuau

SEQ ID NO: 1329420 - RNA, 19 nt, Artificial Sequence
  Description of Artificial Sequence: Synthetic oligonucleotide
gggcgugcggcggcaggcg

SEQ ID NO: 1329421 - RNA, 19 nt, Artificial Sequence
  Description of Artificial Sequence: Synthetic oligonucleotide
ggcggcgccucagccgggg

SEQ ID NO: 1329422 - RNA, 19 nt, Artificial Sequence
  Description of Artificial Sequence: Synthetic oligonucleotide
cugguccagugagccacca

SEQ ID NO: 1329423 - RNA, 19 nt, Artificial Sequence
  Description of Artificial Sequence: Synthetic oligonucleotide
ugguugcggacggcugguu

SEQ ID NO: 1329424 - RNA, 19 nt, Artificial Sequence
  Description of Artificial Sequence: Synthetic oligonucleotide
ggaugggguaccucccgau

SEQ ID NO: 1329425 - RNA, 19 nt, Artificial Sequence
  Description of Artificial Sequence: Synthetic oligonucleotide
cgcugauggggcguccagg

SEQ ID NO: 1329426 - RNA, 19 nt, Artificial Sequence
  Description of Artificial Sequence: Synthetic oligonucleotide
ugcggacggcugguuugau

SEQ ID NO: 1329427 - RNA, 19 nt, Artificial Sequence
  Description of Artificial Sequence: Synthetic oligonucleotide
gccggccaaagcuggccuc

SEQ ID NO: 1329428 - RNA, 19 nt, Artificial Sequence
  Description of Artificial Sequence: Synthetic oligonucleotide
gggcggugcgacgcgggcc

SEQ ID NO: 1329429 - RNA, 19 nt, Artificial Sequence
  Description of Artificial Sequence: Synthetic oligonucleotide
gcggccuaggccgggcgug

SEQ ID NO: 1329430 - RNA, 19 nt, Artificial Sequence
  Description of Artificial Sequence: Synthetic oligonucleotide
ccgcugauggggcguccag

SEQ ID NO: 1329431 - RNA, 19 nt, Artificial Sequence
  Description of Artificial Sequence: Synthetic oligonucleotide
gcccuguagccgcucugga

SEQ ID NO: 1329432 - RNA, 19 nt, Artificial Sequence
  Description of Artificial Sequence: Synthetic oligonucleotide
gguugcggacggcugguuu

SEQ ID NO: 1329433 - RNA, 19 nt, Artificial Sequence
  Description of Artificial Sequence: Synthetic oligonucleotide
ggguucuuaaugaggcauu

SEQ ID NO: 1329434 - RNA, 19 nt, Artificial Sequence
  Description of Artificial Sequence: Synthetic oligonucleotide
gggccagcaucggggcucc

SEQ ID NO: 1329435 - RNA, 19 nt, Artificial Sequence
  Description of Artificial Sequence: Synthetic oligonucleotide
gguucggcacagccagccu

SEQ ID NO: 1329436 - RNA, 19 nt, Artificial Sequence
  Description of Artificial Sequence: Synthetic oligonucleotide
cgggguugauggugagcgc

SEQ ID NO: 1329437 - RNA, 19 nt, Artificial Sequence
  Description of Artificial Sequence: Synthetic oligonucleotide
ccagcgacagucccaugcu

SEQ ID NO: 1329438 - RNA, 19 nt, Artificial Sequence
  Description of Artificial Sequence: Synthetic oligonucleotide
gcugcggccuaggccgggc

SEQ ID NO: 1329439 - RNA, 19 nt, Artificial Sequence
  Description of Artificial Sequence: Synthetic oligonucleotide
ccucggagugcuugaugaa

SEQ ID NO: 1329440 - RNA, 19 nt, Artificial Sequence
  Description of Artificial Sequence: Synthetic oligonucleotide
ggcgugcggcggcaggcga

SEQ ID NO: 1329441 - RNA, 19 nt, Artificial Sequence
  Description of Artificial Sequence: Synthetic oligonucleotide
ccacaauguagggugaguu

SEQ ID NO: 1329442 - RNA, 19 nt, Artificial Sequence
  Description of Artificial Sequence: Synthetic oligonucleotide
cacugcagugcgcgugggu

SEQ ID NO: 1329443 - RNA, 19 nt, Artificial Sequence
  Description of Artificial Sequence: Synthetic oligonucleotide
ggcguccaggcggccuggg

SEQ ID NO: 1329444 - RNA, 19 nt, Artificial Sequence
  Description of Artificial Sequence: Synthetic oligonucleotide
gguucgccucggaggcgcc

SEQ ID NO: 1329445 - RNA, 19 nt, Artificial Sequence
  Description of Artificial Sequence: Synthetic oligonucleotide
gcgagacacuauggggcuc

SEQ ID NO: 1329446 - RNA, 19 nt, Artificial Sequence
  Description of Artificial Sequence: Synthetic oligonucleotide
ggccggccaaagcuggccu

SEQ ID NO: 1329447 - RNA, 19 nt, Artificial Sequence
  Description of Artificial Sequence: Synthetic oligonucleotide
gggcguccaggcggccugg

SEQ ID NO: 1329448 - RNA, 19 nt, Artificial Sequence
  Description of Artificial Sequence: Synthetic oligonucleotide
gcaggcgaccgggcccggg

SEQ ID NO: 1329449 - RNA, 19 nt, Artificial Sequence
  Description of Artificial Sequence: Synthetic oligonucleotide
cgugcggcggcaggcgacc

SEQ ID NO: 1329450 - RNA, 19 nt, Artificial Sequence
  Description of Artificial Sequence: Synthetic oligonucleotide
cgcacggaagcaggucccc

SEQ ID NO: 1329451 - RNA, 19 nt, Artificial Sequence
  Description of Artificial Sequence: Synthetic oligonucleotide
gcagugcgcgugggugugc

SEQ ID NO: 1329452 - RNA, 19 nt, Artificial Sequence
  Description of Artificial Sequence: Synthetic oligonucleotide
ggacgggcccucggcgaug

SEQ ID NO: 1329453 - RNA, 19 nt, Artificial Sequence
  Description of Artificial Sequence: Synthetic oligonucleotide
acgcgggcccggggcugcg

SEQ ID NO: 1329454 - RNA, 19 nt, Artificial Sequence
  Description of Artificial Sequence: Synthetic oligonucleotide
guuccccgaccuuggccuu

SEQ ID NO: 1329455 - RNA, 19 nt, Artificial Sequence
  Description of Artificial Sequence: Synthetic oligonucleotide
gggagcggagaccgcugcu

SEQ ID NO: 1329456 - RNA, 19 nt, Artificial Sequence
  Description of Artificial Sequence: Synthetic oligonucleotide
cggcgccucagccggggcc

SEQ ID NO: 1329457 - RNA, 19 nt, Artificial Sequence
  Description of Artificial Sequence: Synthetic oligonucleotide
cagugcgcgugggugugcu

SEQ ID NO: 1329458 - RNA, 19 nt, Artificial Sequence
  Description of Artificial Sequence: Synthetic oligonucleotide
ccgcgacaguucaccagga

SEQ ID NO: 1329459 - RNA, 19 nt, Artificial Sequence
  Description of Artificial Sequence: Synthetic oligonucleotide
gcgugcggcggcaggcgac

SEQ ID NO: 1329460 - RNA, 19 nt, Artificial Sequence
  Description of Artificial Sequence: Synthetic oligonucleotide
gcgcgugggugugcugggc

SEQ ID NO: 1329461 - RNA, 19 nt, Artificial Sequence
  Description of Artificial Sequence: Synthetic oligonucleotide
guaccgcaaugcugaccuu

SEQ ID NO: 1329462 - RNA, 19 nt, Artificial Sequence
  Description of Artificial Sequence: Synthetic oligonucleotide
ggccucggaguaccgcaau

SEQ ID NO: 1329463 - RNA, 19 nt, Artificial Sequence
  Description of Artificial Sequence: Synthetic oligonucleotide
gggacgggcccucggcgau

SEQ ID NO: 1329464 - RNA, 19 nt, Artificial Sequence
  Description of Artificial Sequence: Synthetic oligonucleotide
ccaccagcgacagucccau

SEQ ID NO: 1329465 - RNA, 19 nt, Artificial Sequence
  Description of Artificial Sequence: Synthetic oligonucleotide
ccccugccacaacacagcu

SEQ ID NO: 1329466 - RNA, 19 nt, Artificial Sequence
  Description of Artificial Sequence: Synthetic oligonucleotide
gcacggaagcagguccccu

SEQ ID NO: 1329467 - RNA, 19 nt, Artificial Sequence
  Description of Artificial Sequence: Synthetic oligonucleotide
gcggugcgacgcgggcccg

SEQ ID NO: 1329468 - RNA, 19 nt, Artificial Sequence
  Description of Artificial Sequence: Synthetic oligonucleotide
gcgacgcgggcccggggcu

SEQ ID NO: 1329469 - RNA, 19 nt, Artificial Sequence
  Description of Artificial Sequence: Synthetic oligonucleotide
cgccucggaggcgcccucg

SEQ ID NO: 1329470 - RNA, 19 nt, Artificial Sequence
  Description of Artificial Sequence: Synthetic oligonucleotide
gccggggagcggagaccgc

SEQ ID NO: 1329471 - RNA, 19 nt, Artificial Sequence
  Description of Artificial Sequence: Synthetic oligonucleotide
cggccuaggccgggcgugc

SEQ ID NO: 1329472 - RNA, 19 nt, Artificial Sequence
  Description of Artificial Sequence: Synthetic oligonucleotide
cgggacgccggggagcgga

SEQ ID NO: 1329473 - RNA, 19 nt, Artificial Sequence
  Description of Artificial Sequence: Synthetic oligonucleotide
cgguagcaccggcuuccuc

SEQ ID NO: 1329474 - RNA, 19 nt, Artificial Sequence
  Description of Artificial Sequence: Synthetic oligonucleotide
gccgggcgugcggcggcag

SEQ ID NO: 1329475 - RNA, 19 nt, Artificial Sequence
  Description of Artificial Sequence: Synthetic oligonucleotide
cgucugcgccaucgaccac

SEQ ID NO: 1329476 - RNA, 19 nt, Artificial Sequence
  Description of Artificial Sequence: Synthetic oligonucleotide
ccggggagcggagaccgcu

SEQ ID NO: 1329477 - RNA, 19 nt, Artificial Sequence
  Description of Artificial Sequence: Synthetic oligonucleotide
gcccggggcugcggccuag

SEQ ID NO: 1329478 - RNA, 19 nt, Artificial Sequence
  Description of Artificial Sequence: Synthetic oligonucleotide
cggugcgacgcgggcccgg

SEQ ID NO: 1329479 - RNA, 19 nt, Artificial Sequence
  Description of Artificial Sequence: Synthetic oligonucleotide
cccugccacaacacagcuu

SEQ ID NO: 1329480 - RNA, 19 nt, Artificial Sequence
  Description of Artificial Sequence: Synthetic oligonucleotide
cggugccgacaggaacaag

SEQ ID NO: 1329481 - RNA, 19 nt, Artificial Sequence
  Description of Artificial Sequence: Synthetic oligonucleotide
ccgcaggguucggcacagc

SEQ ID NO: 1329482 - RNA, 19 nt, Artificial Sequence
  Description of Artificial Sequence: Synthetic oligonucleotide
cgugcccuguagccgcucu

SEQ ID NO: 1329483 - RNA, 19 nt, Artificial Sequence
  Description of Artificial Sequence: Synthetic oligonucleotide
ccccgaccuuggccuucug

SEQ ID NO: 1329484 - RNA, 19 nt, Artificial Sequence
  Description of Artificial Sequence: Synthetic oligonucleotide
ggccucggcgagacacuau

SEQ ID NO: 1329485 - RNA, 19 nt, Artificial Sequence
  Description of Artificial Sequence: Synthetic oligonucleotide
cgacgcgggcccggggcug

SEQ ID NO: 1329486 - RNA, 19 nt, Artificial Sequence
  Description of Artificial Sequence: Synthetic oligonucleotide
cucgcucugccggguucuu

SEQ ID NO: 1329487 - RNA, 19 nt, Artificial Sequence
  Description of Artificial Sequence: Synthetic oligonucleotide
cgcgacaguucaccaggau

SEQ ID NO: 1329488 - RNA, 19 nt, Artificial Sequence
  Description of Artificial Sequence: Synthetic oligonucleotide
ccugggccucggcgagaca

SEQ ID NO: 1329489 - RNA, 19 nt, Artificial Sequence
  Description of Artificial Sequence: Synthetic oligonucleotide
ccaucccaugaccgcugau

SEQ ID NO: 1329490 - RNA, 19 nt, Artificial Sequence
  Description of Artificial Sequence: Synthetic oligonucleotide
ccgggacgccggggagcgg

SEQ ID NO: 1329491 - RNA, 19 nt, Artificial Sequence
  Description of Artificial Sequence: Synthetic oligonucleotide
cgaccgggcccgggacgcc

SEQ ID NO: 1329492 - RNA, 19 nt, Artificial Sequence
  Description of Artificial Sequence: Synthetic oligonucleotide
cgauggcgggguugauggu

SEQ ID NO: 1329493 - RNA, 19 nt, Artificial Sequence
  Description of Artificial Sequence: Synthetic oligonucleotide
cggcuuaugcugggccuua

SEQ ID NO: 1329494 - RNA, 19 nt, Artificial Sequence
  Description of Artificial Sequence: Synthetic oligonucleotide
ccgguagcaccggcuuccu

SEQ ID NO: 1329495 - RNA, 19 nt, Artificial Sequence
  Description of Artificial Sequence: Synthetic oligonucleotide
cggccaaagcuggccucua

SEQ ID NO: 1329496 - RNA, 19 nt, Artificial Sequence
  Description of Artificial Sequence: Synthetic oligonucleotide
ccucggcgauggcgggguu

SEQ ID NO: 1329497 - RNA, 19 nt, Artificial Sequence
  Description of Artificial Sequence: Synthetic oligonucleotide
cggcgauggcgggguugau

SEQ ID NO: 1329498 - RNA, 19 nt, Artificial Sequence
  Description of Artificial Sequence: Synthetic oligonucleotide
ugaagaaguacuaauuucc

SEQ ID NO: 1329499 - RNA, 19 nt, Artificial Sequence
  Description of Artificial Sequence: Synthetic oligonucleotide
gacuuuaccacccacacag

SEQ ID NO: 1329500 - RNA, 19 nt, Artificial Sequence
  Description of Artificial Sequence: Synthetic oligonucleotide
aauugaaguguugauuucc

SEQ ID NO: 1329501 - RNA, 19 nt, Artificial Sequence
  Description of Artificial Sequence: Synthetic oligonucleotide
gauacauucagagacagug

SEQ ID NO: 1329502 - RNA, 19 nt, Artificial Sequence
  Description of Artificial Sequence: Synthetic oligonucleotide
gauuuuauggaauggauuc

SEQ ID NO: 1329503 - RNA, 19 nt, Artificial Sequence
  Description of Artificial Sequence: Synthetic oligonucleotide
acuguuagaacccuucugg

SEQ ID NO: 1329504 - RNA, 19 nt, Artificial Sequence
  Description of Artificial Sequence: Synthetic oligonucleotide
uucagagagguccacaggg

SEQ ID NO: 1329505 - RNA, 19 nt, Artificial Sequence
  Description of Artificial Sequence: Synthetic oligonucleotide
uauggaauggauuccuugg

SEQ ID NO: 1329506 - RNA, 19 nt, Artificial Sequence
  Description of Artificial Sequence: Synthetic oligonucleotide
cugagauacauucagagac

SEQ ID NO: 1329507 - RNA, 19 nt, Artificial Sequence
  Description of Artificial Sequence: Synthetic oligonucleotide
aaguggagcuuucagagag

SEQ ID NO: 1329508 - RNA, 19 nt, Artificial Sequence
  Description of Artificial Sequence: Synthetic oligonucleotide
accugauuugauuuuaugg

SEQ ID NO: 1329509 - RNA, 19 nt, Artificial Sequence
  Description of Artificial Sequence: Synthetic oligonucleotide
uucuggagaauucuuacag

SEQ ID NO: 1329510 - RNA, 19 nt, Artificial Sequence
  Description of Artificial Sequence: Synthetic oligonucleotide
agaaguacuaauuuccuca

SEQ ID NO: 1329511 - RNA, 19 nt, Artificial Sequence
  Description of Artificial Sequence: Synthetic oligonucleotide
uucugagauacauucagag

SEQ ID NO: 1329512 - RNA, 19 nt, Artificial Sequence
  Description of Artificial Sequence: Synthetic oligonucleotide
auuuccucaacucucccac

SEQ ID NO: 1329513 - RNA, 19 nt, Artificial Sequence
  Description of Artificial Sequence: Synthetic oligonucleotide
aagaaguacuaauuuccuc

SEQ ID NO: 1329514 - RNA, 19 nt, Artificial Sequence
  Description of Artificial Sequence: Synthetic oligonucleotide
uuuuauauaggggagcgug

SEQ ID NO: 1329515 - RNA, 19 nt, Artificial Sequence
  Description of Artificial Sequence: Synthetic oligonucleotide
aguacuaauuuccucaacu

SEQ ID NO: 1329516 - RNA, 19 nt, Artificial Sequence
  Description of Artificial Sequence: Synthetic oligonucleotide
cugguaaccuuucacaugg

SEQ ID NO: 1329517 - RNA, 19 nt, Artificial Sequence
  Description of Artificial Sequence: Synthetic oligonucleotide
gauuugauuuuauggaaug

SEQ ID NO: 1329518 - RNA, 19 nt, Artificial Sequence
  Description of Artificial Sequence: Synthetic oligonucleotide
uguuucaaggaauuccucc

SEQ ID NO: 1329519 - RNA, 19 nt, Artificial Sequence
  Description of Artificial Sequence: Synthetic oligonucleotide
cuuguuuucccgauguagg

SEQ ID NO: 1329520 - RNA, 19 nt, Artificial Sequence
  Description of Artificial Sequence: Synthetic oligonucleotide
uauuuaauugaaguguuga

SEQ ID NO: 1329521 - RNA, 19 nt, Artificial Sequence
  Description of Artificial Sequence: Synthetic oligonucleotide
uuugaagaaguacuaauuu

SEQ ID NO: 1329522 - RNA, 19 nt, Artificial Sequence
  Description of Artificial Sequence: Synthetic oligonucleotide
aaggaacaguuccuguccc

SEQ ID NO: 1329523 - RNA, 19 nt, Artificial Sequence
  Description of Artificial Sequence: Synthetic oligonucleotide
uuuccuaggaagaacugca

SEQ ID NO: 1329524 - RNA, 19 nt, Artificial Sequence
  Description of Artificial Sequence: Synthetic oligonucleotide
agacaguacacauguaagg

SEQ ID NO: 1329525 - RNA, 19 nt, Artificial Sequence
  Description of Artificial Sequence: Synthetic oligonucleotide
uuugauuuuauggaaugga

SEQ ID NO: 1329526 - RNA, 19 nt, Artificial Sequence
  Description of Artificial Sequence: Synthetic oligonucleotide
uauagucucuaccugauuu

SEQ ID NO: 1329527 - RNA, 19 nt, Artificial Sequence
  Description of Artificial Sequence: Synthetic oligonucleotide
ugaaguguugauuucccug

SEQ ID NO: 1329528 - RNA, 19 nt, Artificial Sequence
  Description of Artificial Sequence: Synthetic oligonucleotide
aagaacugcaucaacugag

SEQ ID NO: 1329529 - RNA, 19 nt, Artificial Sequence
  Description of Artificial Sequence: Synthetic oligonucleotide
uaaccuuucacauggggac

SEQ ID NO: 1329530 - RNA, 19 nt, Artificial Sequence
  Description of Artificial Sequence: Synthetic oligonucleotide
uuuugaagaaguacuaauu

SEQ ID NO: 1329531 - RNA, 19 nt, Artificial Sequence
  Description of Artificial Sequence: Synthetic oligonucleotide
auuuuauggaauggauucc

SEQ ID NO: 1329532 - RNA, 19 nt, Artificial Sequence
  Description of Artificial Sequence: Synthetic oligonucleotide
uacuaauuuccucaacucu

SEQ ID NO: 1329533 - RNA, 19 nt, Artificial Sequence
  Description of Artificial Sequence: Synthetic oligonucleotide
uucuuuccuaggaagaacu

SEQ ID NO: 1329534 - RNA, 19 nt, Artificial Sequence
  Description of Artificial Sequence: Synthetic oligonucleotide
uugaagaaguacuaauuuc

SEQ ID NO: 1329535 - RNA, 19 nt, Artificial Sequence
  Description of Artificial Sequence: Synthetic oligonucleotide
ugagaaguggagcuuucag

SEQ ID NO: 1329536 - RNA, 19 nt, Artificial Sequence
  Description of Artificial Sequence: Synthetic oligonucleotide
aaguacuaauuuccucaac

SEQ ID NO: 1329537 - RNA, 19 nt, Artificial Sequence
  Description of Artificial Sequence: Synthetic oligonucleotide
uccuguauagucucuaccu

SEQ ID NO: 1329538 - RNA, 19 nt, Artificial Sequence
  Description of Artificial Sequence: Synthetic oligonucleotide
ugauucuuuccuaggaaga

SEQ ID NO: 1329539 - RNA, 19 nt, Artificial Sequence
  Description of Artificial Sequence: Synthetic oligonucleotide
uuauggaauggauuccuug

SEQ ID NO: 1329540 - RNA, 19 nt, Artificial Sequence
  Description of Artificial Sequence: Synthetic oligonucleotide
gaauucuuacaggugaagc

SEQ ID NO: 1329541 - RNA, 19 nt, Artificial Sequence
  Description of Artificial Sequence: Synthetic oligonucleotide
uugauuuuauggaauggau

SEQ ID NO: 1329542 - RNA, 19 nt, Artificial Sequence
  Description of Artificial Sequence: Synthetic oligonucleotide
ugagauacauucagagaca

SEQ ID NO: 1329543 - RNA, 19 nt, Artificial Sequence
  Description of Artificial Sequence: Synthetic oligonucleotide
auugaaguguugauuuccc

SEQ ID NO: 1329544 - RNA, 19 nt, Artificial Sequence
  Description of Artificial Sequence: Synthetic oligonucleotide
ucaggugauucuuuccuag

SEQ ID NO: 1329545 - RNA, 19 nt, Artificial Sequence
  Description of Artificial Sequence: Synthetic oligonucleotide
ugauuugauuuuauggaau

SEQ ID NO: 1329546 - RNA, 19 nt, Artificial Sequence
  Description of Artificial Sequence: Synthetic oligonucleotide
uugugugcagguuacuuug

SEQ ID NO: 1329547 - RNA, 19 nt, Artificial Sequence
  Description of Artificial Sequence: Synthetic oligonucleotide
gugauucuuuccuaggaag

SEQ ID NO: 1329548 - RNA, 19 nt, Artificial Sequence
  Description of Artificial Sequence: Synthetic oligonucleotide
ugauuuuauggaauggauu

SEQ ID NO: 1329549 - RNA, 19 nt, Artificial Sequence
  Description of Artificial Sequence: Synthetic oligonucleotide
ucugagauacauucagaga

SEQ ID NO: 1329550 - RNA, 19 nt, Artificial Sequence
  Description of Artificial Sequence: Synthetic oligonucleotide
uuucagagagguccacagg

SEQ ID NO: 1329551 - RNA, 19 nt, Artificial Sequence
  Description of Artificial Sequence: Synthetic oligonucleotide
uuuauauaggggagcgugu

SEQ ID NO: 1329552 - RNA, 19 nt, Artificial Sequence
  Description of Artificial Sequence: Synthetic oligonucleotide
gacuguauuuaauugaagu

SEQ ID NO: 1329553 - RNA, 19 nt, Artificial Sequence
  Description of Artificial Sequence: Synthetic oligonucleotide
ggagcuuucagagaggucc

SEQ ID NO: 1329554 - RNA, 19 nt, Artificial Sequence
  Description of Artificial Sequence: Synthetic oligonucleotide
cagacaguacacauguaag

SEQ ID NO: 1329555 - RNA, 19 nt, Artificial Sequence
  Description of Artificial Sequence: Synthetic oligonucleotide
acugcaucaacugagcacu

SEQ ID NO: 1329556 - RNA, 19 nt, Artificial Sequence
  Description of Artificial Sequence: Synthetic oligonucleotide
uuuuauggaauggauuccu

SEQ ID NO: 1329557 - RNA, 19 nt, Artificial Sequence
  Description of Artificial Sequence: Synthetic oligonucleotide
ugugacucuaccccacacc

SEQ ID NO: 1329558 - RNA, 19 nt, Artificial Sequence
  Description of Artificial Sequence: Synthetic oligonucleotide
uuuaccacccacacagccu

SEQ ID NO: 1329559 - RNA, 19 nt, Artificial Sequence
  Description of Artificial Sequence: Synthetic oligonucleotide
uggacuuuaccacccacac

SEQ ID NO: 1329560 - RNA, 19 nt, Artificial Sequence
  Description of Artificial Sequence: Synthetic oligonucleotide
acccacacagccuuucugg

SEQ ID NO: 1329561 - RNA, 19 nt, Artificial Sequence
  Description of Artificial Sequence: Synthetic oligonucleotide
ucugguuagcucuuccaug

SEQ ID NO: 1329562 - RNA, 19 nt, Artificial Sequence
  Description of Artificial Sequence: Synthetic oligonucleotide
ucaacugagcacuggcuug

SEQ ID NO: 1329563 - RNA, 19 nt, Artificial Sequence
  Description of Artificial Sequence: Synthetic oligonucleotide
cuuuaccacccacacagcc

SEQ ID NO: 1329564 - RNA, 19 nt, Artificial Sequence
  Description of Artificial Sequence: Synthetic oligonucleotide
ucucccacuguuagaaccc

SEQ ID NO: 1329565 - RNA, 19 nt, Artificial Sequence
  Description of Artificial Sequence: Synthetic oligonucleotide
uuccuguauagucucuacc

SEQ ID NO: 1329566 - RNA, 19 nt, Artificial Sequence
  Description of Artificial Sequence: Synthetic oligonucleotide
uggagaauucuuacaggug

SEQ ID NO: 1329567 - RNA, 19 nt, Artificial Sequence
  Description of Artificial Sequence: Synthetic oligonucleotide
auagucucuaccugauuug

SEQ ID NO: 1329568 - RNA, 19 nt, Artificial Sequence
  Description of Artificial Sequence: Synthetic oligonucleotide
aggaauuccuccuucccug

SEQ ID NO: 1329569 - RNA, 19 nt, Artificial Sequence
  Description of Artificial Sequence: Synthetic oligonucleotide
cucucccacuguuagaacc

SEQ ID NO: 1329570 - RNA, 19 nt, Artificial Sequence
  Description of Artificial Sequence: Synthetic oligonucleotide
uuguuuucccgauguaggc

SEQ ID NO: 1329571 - RNA, 19 nt, Artificial Sequence
  Description of Artificial Sequence: Synthetic oligonucleotide
uggggacuguauuuaauug

SEQ ID NO: 1329572 - RNA, 19 nt, Artificial Sequence
  Description of Artificial Sequence: Synthetic oligonucleotide
uuucuggagaauucuuaca

SEQ ID NO: 1329573 - RNA, 19 nt, Artificial Sequence
  Description of Artificial Sequence: Synthetic oligonucleotide
gugacucuaccccacaccc

SEQ ID NO: 1329574 - RNA, 19 nt, Artificial Sequence
  Description of Artificial Sequence: Synthetic oligonucleotide
acaguacacauguaaggcu

SEQ ID NO: 1329575 - RNA, 19 nt, Artificial Sequence
  Description of Artificial Sequence: Synthetic oligonucleotide
agaacugcaucaacugagc

SEQ ID NO: 1329576 - RNA, 19 nt, Artificial Sequence
  Description of Artificial Sequence: Synthetic oligonucleotide
gagauacauucagagacag

SEQ ID NO: 1329577 - RNA, 19 nt, Artificial Sequence
  Description of Artificial Sequence: Synthetic oligonucleotide
uacaggugaagccuguguc

SEQ ID NO: 1329578 - RNA, 19 nt, Artificial Sequence
  Description of Artificial Sequence: Synthetic oligonucleotide
uuagaacccuucugguuag

SEQ ID NO: 1329579 - RNA, 19 nt, Artificial Sequence
  Description of Artificial Sequence: Synthetic oligonucleotide
acucuuguuuucccgaugu

SEQ ID NO: 1329580 - RNA, 19 nt, Artificial Sequence
  Description of Artificial Sequence: Synthetic oligonucleotide
ggagaauucuuacagguga

SEQ ID NO: 1329581 - RNA, 19 nt, Artificial Sequence
  Description of Artificial Sequence: Synthetic oligonucleotide
uggaauggauuccuuggac

SEQ ID NO: 1329582 - RNA, 19 nt, Artificial Sequence
  Description of Artificial Sequence: Synthetic oligonucleotide
ugucuuucccucuuuccca

SEQ ID NO: 1329583 - RNA, 19 nt, Artificial Sequence
  Description of Artificial Sequence: Synthetic oligonucleotide
uugauuucccugucuuucc

SEQ ID NO: 1329584 - RNA, 19 nt, Artificial Sequence
  Description of Artificial Sequence: Synthetic oligonucleotide
guuagaacccuucugguua

SEQ ID NO: 1329585 - RNA, 19 nt, Artificial Sequence
  Description of Artificial Sequence: Synthetic oligonucleotide
uucuuacaggugaagccug

SEQ ID NO: 1329586 - RNA, 19 nt, Artificial Sequence
  Description of Artificial Sequence: Synthetic oligonucleotide
cuuuccuaggaagaacugc

SEQ ID NO: 1329587 - RNA, 19 nt, Artificial Sequence
  Description of Artificial Sequence: Synthetic oligonucleotide
ugugcagguuacuuugucu

SEQ ID NO: 1329588 - RNA, 19 nt, Artificial Sequence
  Description of Artificial Sequence: Synthetic oligonucleotide
ugauuucccugucuuuccc

SEQ ID NO: 1329589 - RNA, 19 nt, Artificial Sequence
  Description of Artificial Sequence: Synthetic oligonucleotide
guuacuuugucuccugaga

SEQ ID NO: 1329590 - RNA, 19 nt, Artificial Sequence
  Description of Artificial Sequence: Synthetic oligonucleotide
ucuuuccuaggaagaacug

SEQ ID NO: 1329591 - RNA, 19 nt, Artificial Sequence
  Description of Artificial Sequence: Synthetic oligonucleotide
guacuaauuuccucaacuc

SEQ ID NO: 1329592 - RNA, 19 nt, Artificial Sequence
  Description of Artificial Sequence: Synthetic oligonucleotide
uuccucaacucucccacug

SEQ ID NO: 1329593 - RNA, 19 nt, Artificial Sequence
  Description of Artificial Sequence: Synthetic oligonucleotide
cuucccuggacuuuaccac

SEQ ID NO: 1329594 - RNA, 19 nt, Artificial Sequence
  Description of Artificial Sequence: Synthetic oligonucleotide
aacucuuguuuucccgaug

SEQ ID NO: 1329595 - RNA, 19 nt, Artificial Sequence
  Description of Artificial Sequence: Synthetic oligonucleotide
ucucuaccugauuugauuu

SEQ ID NO: 1329596 - RNA, 19 nt, Artificial Sequence
  Description of Artificial Sequence: Synthetic oligonucleotide
gaucuuccuaccucagccc

SEQ ID NO: 1329597 - RNA, 19 nt, Artificial Sequence
  Description of Artificial Sequence: Synthetic oligonucleotide
aacaguuccugucccugga

SEQ ID NO: 1329598 - RNA, 19 nt, Artificial Sequence
  Description of Artificial Sequence: Synthetic oligonucleotide
cugagcacuggcuugugug

SEQ ID NO: 1329599 - RNA, 19 nt, Artificial Sequence
  Description of Artificial Sequence: Synthetic oligonucleotide
ggaauggauuccuuggacc

SEQ ID NO: 1329600 - RNA, 19 nt, Artificial Sequence
  Description of Artificial Sequence: Synthetic oligonucleotide
uuucacauggggacuguau

SEQ ID NO: 1329601 - RNA, 19 nt, Artificial Sequence
  Description of Artificial Sequence: Synthetic oligonucleotide
uaauugaaguguugauuuc

SEQ ID NO: 1329602 - RNA, 19 nt, Artificial Sequence
  Description of Artificial Sequence: Synthetic oligonucleotide
auacauucagagacagugg

SEQ ID NO: 1329603 - RNA, 19 nt, Artificial Sequence
  Description of Artificial Sequence: Synthetic oligonucleotide
uaccugauuugauuuuaug

SEQ ID NO: 1329604 - RNA, 19 nt, Artificial Sequence
  Description of Artificial Sequence: Synthetic oligonucleotide
aguuccugucccuggaucu

SEQ ID NO: 1329605 - RNA, 19 nt, Artificial Sequence
  Description of Artificial Sequence: Synthetic oligonucleotide
uucugguuagcucuuccau

SEQ ID NO: 1329606 - RNA, 19 nt, Artificial Sequence
  Description of Artificial Sequence: Synthetic oligonucleotide
uucacauggggacuguauu

SEQ ID NO: 1329607 - RNA, 19 nt, Artificial Sequence
  Description of Artificial Sequence: Synthetic oligonucleotide
ugcagguuacuuugucucc

SEQ ID NO: 1329608 - RNA, 19 nt, Artificial Sequence
  Description of Artificial Sequence: Synthetic oligonucleotide
uucccuggacuuuaccacc

SEQ ID NO: 1329609 - RNA, 19 nt, Artificial Sequence
  Description of Artificial Sequence: Synthetic oligonucleotide
gaaguguugauuucccugu

SEQ ID NO: 1329610 - RNA, 19 nt, Artificial Sequence
  Description of Artificial Sequence: Synthetic oligonucleotide
caaggaauuccuccuuccc

SEQ ID NO: 1329611 - RNA, 19 nt, Artificial Sequence
  Description of Artificial Sequence: Synthetic oligonucleotide
uauccuguauguguuuucu

SEQ ID NO: 1329612 - RNA, 19 nt, Artificial Sequence
  Description of Artificial Sequence: Synthetic oligonucleotide
guugauuucccugucuuuc

SEQ ID NO: 1329613 - RNA, 19 nt, Artificial Sequence
  Description of Artificial Sequence: Synthetic oligonucleotide
aggugauucuuuccuagga

SEQ ID NO: 1329614 - RNA, 19 nt, Artificial Sequence
  Description of Artificial Sequence: Synthetic oligonucleotide
uccuaggaagaacugcauc

SEQ ID NO: 1329615 - RNA, 19 nt, Artificial Sequence
  Description of Artificial Sequence: Synthetic oligonucleotide
gaccaaguugcccaagguc

SEQ ID NO: 1329616 - RNA, 19 nt, Artificial Sequence
  Description of Artificial Sequence: Synthetic oligonucleotide
acaggugaagccuguguca

SEQ ID NO: 1329617 - RNA, 19 nt, Artificial Sequence
  Description of Artificial Sequence: Synthetic oligonucleotide
uuuccuguauagucucuac

SEQ ID NO: 1329618 - RNA, 19 nt, Artificial Sequence
  Description of Artificial Sequence: Synthetic oligonucleotide
uuaccacccacacagccuu

SEQ ID NO: 1329619 - RNA, 19 nt, Artificial Sequence
  Description of Artificial Sequence: Synthetic oligonucleotide
uguuagaacccuucugguu

SEQ ID NO: 1329620 - RNA, 19 nt, Artificial Sequence
  Description of Artificial Sequence: Synthetic oligonucleotide
uaggaagaacugcaucaac

SEQ ID NO: 1329621 - RNA, 19 nt, Artificial Sequence
  Description of Artificial Sequence: Synthetic oligonucleotide
agaauucuuacaggugaag

SEQ ID NO: 1329622 - RNA, 19 nt, Artificial Sequence
  Description of Artificial Sequence: Synthetic oligonucleotide
uucccucuuucccagggcu

SEQ ID NO: 1329623 - RNA, 19 nt, Artificial Sequence
  Description of Artificial Sequence: Synthetic oligonucleotide
aucaacugagcacuggcuu

SEQ ID NO: 1329624 - RNA, 19 nt, Artificial Sequence
  Description of Artificial Sequence: Synthetic oligonucleotide
auggaauggauuccuugga

SEQ ID NO: 1329625 - RNA, 19 nt, Artificial Sequence
  Description of Artificial Sequence: Synthetic oligonucleotide
agcuuuaccgcagacagua

SEQ ID NO: 1329626 - RNA, 19 nt, Artificial Sequence
  Description of Artificial Sequence: Synthetic oligonucleotide
guaaccuuucacaugggga

SEQ ID NO: 1329627 - RNA, 19 nt, Artificial Sequence
  Description of Artificial Sequence: Synthetic oligonucleotide
cuuuccuugcaguggcccc

SEQ ID NO: 1329628 - RNA, 19 nt, Artificial Sequence
  Description of Artificial Sequence: Synthetic oligonucleotide
caggugauucuuuccuagg

SEQ ID NO: 1329629 - RNA, 19 nt, Artificial Sequence
  Description of Artificial Sequence: Synthetic oligonucleotide
ugcaucaacugagcacugg

SEQ ID NO: 1329630 - RNA, 19 nt, Artificial Sequence
  Description of Artificial Sequence: Synthetic oligonucleotide
auggggacuguauuuaauu

SEQ ID NO: 1329631 - RNA, 19 nt, Artificial Sequence
  Description of Artificial Sequence: Synthetic oligonucleotide
acauucagagacaguggac

SEQ ID NO: 1329632 - RNA, 19 nt, Artificial Sequence
  Description of Artificial Sequence: Synthetic oligonucleotide
uauaggggagcguguuuug

SEQ ID NO: 1329633 - RNA, 19 nt, Artificial Sequence
  Description of Artificial Sequence: Synthetic oligonucleotide
ggugaagccugugucaagg

SEQ ID NO: 1329634 - RNA, 19 nt, Artificial Sequence
  Description of Artificial Sequence: Synthetic oligonucleotide
aggggagcguguuuugaag

SEQ ID NO: 1329635 - RNA, 19 nt, Artificial Sequence
  Description of Artificial Sequence: Synthetic oligonucleotide
cuguauuuaauugaagugu

SEQ ID NO: 1329636 - RNA, 19 nt, Artificial Sequence
  Description of Artificial Sequence: Synthetic oligonucleotide
uuuauggaauggauuccuu

SEQ ID NO: 1329637 - RNA, 19 nt, Artificial Sequence
  Description of Artificial Sequence: Synthetic oligonucleotide
ucuuacaggugaagccugu

SEQ ID NO: 1329638 - RNA, 19 nt, Artificial Sequence
  Description of Artificial Sequence: Synthetic oligonucleotide
uguuggcuuuccuugcagu

SEQ ID NO: 1329639 - RNA, 19 nt, Artificial Sequence
  Description of Artificial Sequence: Synthetic oligonucleotide
gguuacuuugucuccugag

SEQ ID NO: 1329640 - RNA, 19 nt, Artificial Sequence
  Description of Artificial Sequence: Synthetic oligonucleotide
uuuauccuguauguguuuu

SEQ ID NO: 1329641 - RNA, 19 nt, Artificial Sequence
  Description of Artificial Sequence: Synthetic oligonucleotide
ucacauggggacuguauuu

SEQ ID NO: 1329642 - RNA, 19 nt, Artificial Sequence
  Description of Artificial Sequence: Synthetic oligonucleotide
ucuaccugauuugauuuua

SEQ ID NO: 1329643 - RNA, 19 nt, Artificial Sequence
  Description of Artificial Sequence: Synthetic oligonucleotide
ggugacacagcucccgaag

SEQ ID NO: 1329644 - RNA, 19 nt, Artificial Sequence
  Description of Artificial Sequence: Synthetic oligonucleotide
guuagcucuuccauguuuc

SEQ ID NO: 1329645 - RNA, 19 nt, Artificial Sequence
  Description of Artificial Sequence: Synthetic oligonucleotide
ucccuggacuuuaccaccc

SEQ ID NO: 1329646 - RNA, 19 nt, Artificial Sequence
  Description of Artificial Sequence: Synthetic oligonucleotide
cacuguuagaacccuucug

SEQ ID NO: 1329647 - RNA, 19 nt, Artificial Sequence
  Description of Artificial Sequence: Synthetic oligonucleotide
uagucucuaccugauuuga

SEQ ID NO: 1329648 - RNA, 19 nt, Artificial Sequence
  Description of Artificial Sequence: Synthetic oligonucleotide
uauauaggggagcguguuu

SEQ ID NO: 1329649 - RNA, 19 nt, Artificial Sequence
  Description of Artificial Sequence: Synthetic oligonucleotide
auuccuccuucccuggacu

SEQ ID NO: 1329650 - RNA, 19 nt, Artificial Sequence
  Description of Artificial Sequence: Synthetic oligonucleotide
uuauauaggggagcguguu

SEQ ID NO: 1329651 - RNA, 19 nt, Artificial Sequence
  Description of Artificial Sequence: Synthetic oligonucleotide
uguuuccuguauagucucu

SEQ ID NO: 1329652 - RNA, 19 nt, Artificial Sequence
  Description of Artificial Sequence: Synthetic oligonucleotide
gaacccuucugguuagcuc

SEQ ID NO: 1329653 - RNA, 19 nt, Artificial Sequence
  Description of Artificial Sequence: Synthetic oligonucleotide
cuggagaauucuuacaggu

SEQ ID NO: 1329654 - RNA, 19 nt, Artificial Sequence
  Description of Artificial Sequence: Synthetic oligonucleotide
ugguaaccuuucacauggg

SEQ ID NO: 1329655 - RNA, 19 nt, Artificial Sequence
  Description of Artificial Sequence: Synthetic oligonucleotide
aguacacauguaaggcuuc

SEQ ID NO: 1329656 - RNA, 19 nt, Artificial Sequence
  Description of Artificial Sequence: Synthetic oligonucleotide
gaaguggagcuuucagaga

SEQ ID NO: 1329657 - RNA, 19 nt, Artificial Sequence
  Description of Artificial Sequence: Synthetic oligonucleotide
agaccaaguugcccaaggu

SEQ ID NO: 1329658 - RNA, 19 nt, Artificial Sequence
  Description of Artificial Sequence: Synthetic oligonucleotide
cacagggaggccuguuucc

SEQ ID NO: 1329659 - RNA, 19 nt, Artificial Sequence
  Description of Artificial Sequence: Synthetic oligonucleotide
ccuaggaagaacugcauca

SEQ ID NO: 1329660 - RNA, 19 nt, Artificial Sequence
  Description of Artificial Sequence: Synthetic oligonucleotide
acucucccacuguuagaac

SEQ ID NO: 1329661 - RNA, 19 nt, Artificial Sequence
  Description of Artificial Sequence: Synthetic oligonucleotide
uggcuugugugcagguuac

SEQ ID NO: 1329662 - RNA, 19 nt, Artificial Sequence
  Description of Artificial Sequence: Synthetic oligonucleotide
ucccgaagcugagacacug

SEQ ID NO: 1329663 - RNA, 19 nt, Artificial Sequence
  Description of Artificial Sequence: Synthetic oligonucleotide
uccucaacucucccacugu

SEQ ID NO: 1329664 - RNA, 19 nt, Artificial Sequence
  Description of Artificial Sequence: Synthetic oligonucleotide
gaagaaguacuaauuuccu

SEQ ID NO: 1329665 - RNA, 19 nt, Artificial Sequence
  Description of Artificial Sequence: Synthetic oligonucleotide
auauaggggagcguguuuu

SEQ ID NO: 1329666 - RNA, 19 nt, Artificial Sequence
  Description of Artificial Sequence: Synthetic oligonucleotide
gcaucaacugagcacuggc

SEQ ID NO: 1329667 - RNA, 19 nt, Artificial Sequence
  Description of Artificial Sequence: Synthetic oligonucleotide
uaccgcagacaguacacau

SEQ ID NO: 1329668 - RNA, 19 nt, Artificial Sequence
  Description of Artificial Sequence: Synthetic oligonucleotide
cuucugagauacauucaga

SEQ ID NO: 1329669 - RNA, 19 nt, Artificial Sequence
  Description of Artificial Sequence: Synthetic oligonucleotide
uuccuaggaagaacugcau

SEQ ID NO: 1329670 - RNA, 19 nt, Artificial Sequence
  Description of Artificial Sequence: Synthetic oligonucleotide
ggaauuccuccuucccugg

SEQ ID NO: 1329671 - RNA, 19 nt, Artificial Sequence
  Description of Artificial Sequence: Synthetic oligonucleotide
gcagacaguacacauguaa

SEQ ID NO: 1329672 - RNA, 19 nt, Artificial Sequence
  Description of Artificial Sequence: Synthetic oligonucleotide
ggggacuguauuuaauuga

SEQ ID NO: 1329673 - RNA, 19 nt, Artificial Sequence
  Description of Artificial Sequence: Synthetic oligonucleotide
acuuuaccacccacacagc

SEQ ID NO: 1329674 - RNA, 19 nt, Artificial Sequence
  Description of Artificial Sequence: Synthetic oligonucleotide
uaggggagcguguuuugaa

SEQ ID NO: 1329675 - RNA, 19 nt, Artificial Sequence
  Description of Artificial Sequence: Synthetic oligonucleotide
agggaggccuguuuccugu

SEQ ID NO: 1329676 - RNA, 19 nt, Artificial Sequence
  Description of Artificial Sequence: Synthetic oligonucleotide
ucuaccccacacccgcaac

SEQ ID NO: 1329677 - RNA, 19 nt, Artificial Sequence
  Description of Artificial Sequence: Synthetic oligonucleotide
gccuguuuccuguauaguc

SEQ ID NO: 1329678 - RNA, 19 nt, Artificial Sequence
  Description of Artificial Sequence: Synthetic oligonucleotide
uuaccgcagacaguacaca

SEQ ID NO: 1329679 - RNA, 19 nt, Artificial Sequence
  Description of Artificial Sequence: Synthetic oligonucleotide
agcacuggcuugugugcag

SEQ ID NO: 1329680 - RNA, 19 nt, Artificial Sequence
  Description of Artificial Sequence: Synthetic oligonucleotide
accggugacacagcucccg

SEQ ID NO: 1329681 - RNA, 19 nt, Artificial Sequence
  Description of Artificial Sequence: Synthetic oligonucleotide
uuuccucaacucucccacu

SEQ ID NO: 1329682 - RNA, 19 nt, Artificial Sequence
  Description of Artificial Sequence: Synthetic oligonucleotide
uccucagcugccuggcagu

SEQ ID NO: 1329683 - RNA, 19 nt, Artificial Sequence
  Description of Artificial Sequence: Synthetic oligonucleotide
aggaacaguuccugucccu

SEQ ID NO: 1329684 - RNA, 19 nt, Artificial Sequence
  Description of Artificial Sequence: Synthetic oligonucleotide
aucaggugauucuuuccua

SEQ ID NO: 1329685 - RNA, 19 nt, Artificial Sequence
  Description of Artificial Sequence: Synthetic oligonucleotide
cagcucccgaagcugagac

SEQ ID NO: 1329686 - RNA, 19 nt, Artificial Sequence
  Description of Artificial Sequence: Synthetic oligonucleotide
gagaauucuuacaggugaa

SEQ ID NO: 1329687 - RNA, 19 nt, Artificial Sequence
  Description of Artificial Sequence: Synthetic oligonucleotide
aguggagcuuucagagagg

SEQ ID NO: 1329688 - RNA, 19 nt, Artificial Sequence
  Description of Artificial Sequence: Synthetic oligonucleotide
ggugauucuuuccuaggaa

SEQ ID NO: 1329689 - RNA, 19 nt, Artificial Sequence
  Description of Artificial Sequence: Synthetic oligonucleotide
caucaggugauucuuuccu

SEQ ID NO: 1329690 - RNA, 19 nt, Artificial Sequence
  Description of Artificial Sequence: Synthetic oligonucleotide
accuuucacauggggacug

SEQ ID NO: 1329691 - RNA, 19 nt, Artificial Sequence
  Description of Artificial Sequence: Synthetic oligonucleotide
cccgcaacuucucagcagc

SEQ ID NO: 1329692 - RNA, 19 nt, Artificial Sequence
  Description of Artificial Sequence: Synthetic oligonucleotide
caaguugcccaaggucucc

SEQ ID NO: 1329693 - RNA, 19 nt, Artificial Sequence
  Description of Artificial Sequence: Synthetic oligonucleotide
agaacccuucugguuagcu

SEQ ID NO: 1329694 - RNA, 19 nt, Artificial Sequence
  Description of Artificial Sequence: Synthetic oligonucleotide
ccuguauagucucuaccug

SEQ ID NO: 1329695 - RNA, 19 nt, Artificial Sequence
  Description of Artificial Sequence: Synthetic oligonucleotide
gaauuccuccuucccugga

SEQ ID NO: 1329696 - RNA, 19 nt, Artificial Sequence
  Description of Artificial Sequence: Synthetic oligonucleotide
uccugagaaguggagcuuu

SEQ ID NO: 1329697 - RNA, 19 nt, Artificial Sequence
  Description of Artificial Sequence: Synthetic oligonucleotide
gagcguguuuugaagaagu

SEQ ID NO: 1329698 - RNA, 19 nt, Artificial Sequence
  Description of Artificial Sequence: Synthetic oligonucleotide
gauuucccugucuuucccu

SEQ ID NO: 1329699 - RNA, 19 nt, Artificial Sequence
  Description of Artificial Sequence: Synthetic oligonucleotide
auaggggagcguguuuuga

SEQ ID NO: 1329700 - RNA, 19 nt, Artificial Sequence
  Description of Artificial Sequence: Synthetic oligonucleotide
accgcagacaguacacaug

SEQ ID NO: 1329701 - RNA, 19 nt, Artificial Sequence
  Description of Artificial Sequence: Synthetic oligonucleotide
ggaacaguuccugucccug

SEQ ID NO: 1329702 - RNA, 19 nt, Artificial Sequence
  Description of Artificial Sequence: Synthetic oligonucleotide
ccaucaggugauucuuucc

SEQ ID NO: 1329703 - RNA, 19 nt, Artificial Sequence
  Description of Artificial Sequence: Synthetic oligonucleotide
gugugacucuaccccacac

SEQ ID NO: 1329704 - RNA, 19 nt, Artificial Sequence
  Description of Artificial Sequence: Synthetic oligonucleotide
ggacuguauuuaauugaag

SEQ ID NO: 1329705 - RNA, 19 nt, Artificial Sequence
  Description of Artificial Sequence: Synthetic oligonucleotide
guguuuugaagaaguacua

SEQ ID NO: 1329706 - RNA, 19 nt, Artificial Sequence
  Description of Artificial Sequence: Synthetic oligonucleotide
accacccacacagccuuuc

SEQ ID NO: 1329707 - RNA, 19 nt, Artificial Sequence
  Description of Artificial Sequence: Synthetic oligonucleotide
cuaggaagaacugcaucaa

SEQ ID NO: 1329708 - RNA, 19 nt, Artificial Sequence
  Description of Artificial Sequence: Synthetic oligonucleotide
uggagcuuucagagagguc

SEQ ID NO: 1329709 - RNA, 19 nt, Artificial Sequence
  Description of Artificial Sequence: Synthetic oligonucleotide
cuuccauguuucaaggaau

SEQ ID NO: 1329710 - RNA, 19 nt, Artificial Sequence
  Description of Artificial Sequence: Synthetic oligonucleotide
gcguguuuugaagaaguac

SEQ ID NO: 1329711 - RNA, 19 nt, Artificial Sequence
  Description of Artificial Sequence: Synthetic oligonucleotide
aagcuuuaccgcagacagu

SEQ ID NO: 1329712 - RNA, 19 nt, Artificial Sequence
  Description of Artificial Sequence: Synthetic oligonucleotide
cuggcuugugugcagguua

SEQ ID NO: 1329713 - RNA, 19 nt, Artificial Sequence
  Description of Artificial Sequence: Synthetic oligonucleotide
gggacuguauuuaauugaa

SEQ ID NO: 1329714 - RNA, 19 nt, Artificial Sequence
  Description of Artificial Sequence: Synthetic oligonucleotide
aucccucugguaaccuuuc

SEQ ID NO: 1329715 - RNA, 19 nt, Artificial Sequence
  Description of Artificial Sequence: Synthetic oligonucleotide
ccucugguaaccuuucaca

SEQ ID NO: 1329716 - RNA, 19 nt, Artificial Sequence
  Description of Artificial Sequence: Synthetic oligonucleotide
cguguuuugaagaaguacu

SEQ ID NO: 1329717 - RNA, 19 nt, Artificial Sequence
  Description of Artificial Sequence: Synthetic oligonucleotide
acaguuccugucccuggau

SEQ ID NO: 1329718 - RNA, 19 nt, Artificial Sequence
  Description of Artificial Sequence: Synthetic oligonucleotide
agagaccaaguugcccaag

SEQ ID NO: 1329719 - RNA, 19 nt, Artificial Sequence
  Description of Artificial Sequence: Synthetic oligonucleotide
agauacauucagagacagu

SEQ ID NO: 1329720 - RNA, 19 nt, Artificial Sequence
  Description of Artificial Sequence: Synthetic oligonucleotide
aacugagcacuggcuugug

SEQ ID NO: 1329721 - RNA, 19 nt, Artificial Sequence
  Description of Artificial Sequence: Synthetic oligonucleotide
agccaccggugacacagcu

SEQ ID NO: 1329722 - RNA, 19 nt, Artificial Sequence
  Description of Artificial Sequence: Synthetic oligonucleotide
caguacacauguaaggcuu

SEQ ID NO: 1329723 - RNA, 19 nt, Artificial Sequence
  Description of Artificial Sequence: Synthetic oligonucleotide
agggcuucgggcgaauuuu

SEQ ID NO: 1329724 - RNA, 19 nt, Artificial Sequence
  Description of Artificial Sequence: Synthetic oligonucleotide
cucugguaaccuuucacau

SEQ ID NO: 1329725 - RNA, 19 nt, Artificial Sequence
  Description of Artificial Sequence: Synthetic oligonucleotide
cccacuguuagaacccuuc

SEQ ID NO: 1329726 - RNA, 19 nt, Artificial Sequence
  Description of Artificial Sequence: Synthetic oligonucleotide
gagcuuucagagaggucca

SEQ ID NO: 1329727 - RNA, 19 nt, Artificial Sequence
  Description of Artificial Sequence: Synthetic oligonucleotide
ccuucccuggacuuuacca

SEQ ID NO: 1329728 - RNA, 19 nt, Artificial Sequence
  Description of Artificial Sequence: Synthetic oligonucleotide
gucaaggaacaguuccugu

SEQ ID NO: 1329729 - RNA, 19 nt, Artificial Sequence
  Description of Artificial Sequence: Synthetic oligonucleotide
ggggagcguguuuugaaga

SEQ ID NO: 1329730 - RNA, 19 nt, Artificial Sequence
  Description of Artificial Sequence: Synthetic oligonucleotide
gaggccuguuuccuguaua

SEQ ID NO: 1329731 - RNA, 19 nt, Artificial Sequence
  Description of Artificial Sequence: Synthetic oligonucleotide
cuguuagaacccuucuggu

SEQ ID NO: 1329732 - RNA, 19 nt, Artificial Sequence
  Description of Artificial Sequence: Synthetic oligonucleotide
guuuccuguauagucucua

SEQ ID NO: 1329733 - RNA, 19 nt, Artificial Sequence
  Description of Artificial Sequence: Synthetic oligonucleotide
ugguuagcucuuccauguu

SEQ ID NO: 1329734 - RNA, 19 nt, Artificial Sequence
  Description of Artificial Sequence: Synthetic oligonucleotide
cuugugugcagguuacuuu

SEQ ID NO: 1329735 - RNA, 19 nt, Artificial Sequence
  Description of Artificial Sequence: Synthetic oligonucleotide
ccuucugguuagcucuucc

SEQ ID NO: 1329736 - RNA, 19 nt, Artificial Sequence
  Description of Artificial Sequence: Synthetic oligonucleotide
cucaacucucccacuguua

SEQ ID NO: 1329737 - RNA, 19 nt, Artificial Sequence
  Description of Artificial Sequence: Synthetic oligonucleotide
cacauggggacuguauuua

SEQ ID NO: 1329738 - RNA, 19 nt, Artificial Sequence
  Description of Artificial Sequence: Synthetic oligonucleotide
uagaacccuucugguuagc

SEQ ID NO: 1329739 - RNA, 19 nt, Artificial Sequence
  Description of Artificial Sequence: Synthetic oligonucleotide
cccucugguaaccuuucac

SEQ ID NO: 1329740 - RNA, 19 nt, Artificial Sequence
  Description of Artificial Sequence: Synthetic oligonucleotide
ggacuuuaccacccacaca

SEQ ID NO: 1329741 - RNA, 19 nt, Artificial Sequence
  Description of Artificial Sequence: Synthetic oligonucleotide
caacucucccacuguuaga

SEQ ID NO: 1329742 - RNA, 19 nt, Artificial Sequence
  Description of Artificial Sequence: Synthetic oligonucleotide
gggagcguguuuugaagaa

SEQ ID NO: 1329743 - RNA, 19 nt, Artificial Sequence
  Description of Artificial Sequence: Synthetic oligonucleotide
ccuguuuccuguauagucu

SEQ ID NO: 1329744 - RNA, 19 nt, Artificial Sequence
  Description of Artificial Sequence: Synthetic oligonucleotide
ccaaguugcccaaggucuc

SEQ ID NO: 1329745 - RNA, 19 nt, Artificial Sequence
  Description of Artificial Sequence: Synthetic oligonucleotide
acagcucccgaagcugaga

SEQ ID NO: 1329746 - RNA, 19 nt, Artificial Sequence
  Description of Artificial Sequence: Synthetic oligonucleotide
cugagaaguggagcuuuca

SEQ ID NO: 1329747 - RNA, 19 nt, Artificial Sequence
  Description of Artificial Sequence: Synthetic oligonucleotide
gaucccucugguaaccuuu

SEQ ID NO: 1329748 - RNA, 19 nt, Artificial Sequence
  Description of Artificial Sequence: Synthetic oligonucleotide
guggagcuuucagagaggu

SEQ ID NO: 1329749 - RNA, 19 nt, Artificial Sequence
  Description of Artificial Sequence: Synthetic oligonucleotide
gugucaaggaacaguuccu

SEQ ID NO: 1329750 - RNA, 19 nt, Artificial Sequence
  Description of Artificial Sequence: Synthetic oligonucleotide
uaccccacacccgcaacuu

SEQ ID NO: 1329751 - RNA, 19 nt, Artificial Sequence
  Description of Artificial Sequence: Synthetic oligonucleotide
agguccacagggaggccug

SEQ ID NO: 1329752 - RNA, 19 nt, Artificial Sequence
  Description of Artificial Sequence: Synthetic oligonucleotide
ggugugacucuaccccaca

SEQ ID NO: 1329753 - RNA, 19 nt, Artificial Sequence
  Description of Artificial Sequence: Synthetic oligonucleotide
caccggugacacagcuccc

SEQ ID NO: 1329754 - RNA, 19 nt, Artificial Sequence
  Description of Artificial Sequence: Synthetic oligonucleotide
agcguguuuugaagaagua

SEQ ID NO: 1329755 - RNA, 19 nt, Artificial Sequence
  Description of Artificial Sequence: Synthetic oligonucleotide
cagagaccaaguugcccaa

SEQ ID NO: 1329756 - RNA, 19 nt, Artificial Sequence
  Description of Artificial Sequence: Synthetic oligonucleotide
agccugugucaaggaacag

SEQ ID NO: 1329757 - RNA, 19 nt, Artificial Sequence
  Description of Artificial Sequence: Synthetic oligonucleotide
gcacuggcuugugugcagg

SEQ ID NO: 1329758 - RNA, 19 nt, Artificial Sequence
  Description of Artificial Sequence: Synthetic oligonucleotide
cuaccugauuugauuuuau

SEQ ID NO: 1329759 - RNA, 19 nt, Artificial Sequence
  Description of Artificial Sequence: Synthetic oligonucleotide
ccgcaacuucucagcagcg

SEQ ID NO: 1329760 - RNA, 19 nt, Artificial Sequence
  Description of Artificial Sequence: Synthetic oligonucleotide
ccugugucaaggaacaguu

SEQ ID NO: 1329761 - RNA, 19 nt, Artificial Sequence
  Description of Artificial Sequence: Synthetic oligonucleotide
ggggaucccucugguaacc

SEQ ID NO: 1329762 - RNA, 19 nt, Artificial Sequence
  Description of Artificial Sequence: Synthetic oligonucleotide
cccgaagcugagacacugc

SEQ ID NO: 1329763 - RNA, 19 nt, Artificial Sequence
  Description of Artificial Sequence: Synthetic oligonucleotide
gcuuucagagagguccaca

SEQ ID NO: 1329764 - RNA, 19 nt, Artificial Sequence
  Description of Artificial Sequence: Synthetic oligonucleotide
gguuagcucuuccauguuu

SEQ ID NO: 1329765 - RNA, 19 nt, Artificial Sequence
  Description of Artificial Sequence: Synthetic oligonucleotide
ugcagccaccggugacaca

SEQ ID NO: 1329766 - RNA, 19 nt, Artificial Sequence
  Description of Artificial Sequence: Synthetic oligonucleotide
cagccaccggugacacagc

SEQ ID NO: 1329767 - RNA, 19 nt, Artificial Sequence
  Description of Artificial Sequence: Synthetic oligonucleotide
cucuaccccacacccgcaa

SEQ ID NO: 1329768 - RNA, 19 nt, Artificial Sequence
  Description of Artificial Sequence: Synthetic oligonucleotide
cuaccccacacccgcaacu

SEQ ID NO: 1329769 - RNA, 19 nt, Artificial Sequence
  Description of Artificial Sequence: Synthetic oligonucleotide
cucuaccugauuugauuuu

SEQ ID NO: 1329770 - RNA, 19 nt, Artificial Sequence
  Description of Artificial Sequence: Synthetic oligonucleotide
cugucccuggaucuuccua

SEQ ID NO: 1329771 - RNA, 19 nt, Artificial Sequence
  Description of Artificial Sequence: Synthetic oligonucleotide
guauagucucuaccugauu

SEQ ID NO: 1329772 - RNA, 19 nt, Artificial Sequence
  Description of Artificial Sequence: Synthetic oligonucleotide
ccgcagacaguacacaugu

SEQ ID NO: 1329773 - RNA, 19 nt, Artificial Sequence
  Description of Artificial Sequence: Synthetic oligonucleotide
ggauuccuuggaccucauc

SEQ ID NO: 1329774 - RNA, 19 nt, Artificial Sequence
  Description of Artificial Sequence: Synthetic oligonucleotide
uaccacccacacagccuuu

SEQ ID NO: 1329775 - RNA, 19 nt, Artificial Sequence
  Description of Artificial Sequence: Synthetic oligonucleotide
cuuucacauggggacugua

SEQ ID NO: 1329776 - RNA, 19 nt, Artificial Sequence
  Description of Artificial Sequence: Synthetic oligonucleotide
acucuaccccacacccgca

SEQ ID NO: 1329777 - RNA, 19 nt, Artificial Sequence
  Description of Artificial Sequence: Synthetic oligonucleotide
ccucuuucccagggcuucg

SEQ ID NO: 1329778 - RNA, 19 nt, Artificial Sequence
  Description of Artificial Sequence: Synthetic oligonucleotide
cgcaacuucucagcagcgc

SEQ ID NO: 1329779 - RNA, 19 nt, Artificial Sequence
  Description of Artificial Sequence: Synthetic oligonucleotide
gccugugucaaggaacagu

SEQ ID NO: 1329780 - RNA, 19 nt, Artificial Sequence
  Description of Artificial Sequence: Synthetic oligonucleotide
cccucuuucccagggcuuc

SEQ ID NO: 1329781 - RNA, 19 nt, Artificial Sequence
  Description of Artificial Sequence: Synthetic oligonucleotide
ggcuuuccuugcaguggcc

SEQ ID NO: 1329782 - RNA, 19 nt, Artificial Sequence
  Description of Artificial Sequence: Synthetic oligonucleotide
gcuugugugcagguuacuu

SEQ ID NO: 1329783 - RNA, 19 nt, Artificial Sequence
  Description of Artificial Sequence: Synthetic oligonucleotide
cagggcuucgggcgaauuu

SEQ ID NO: 1329784 - RNA, 19 nt, Artificial Sequence
  Description of Artificial Sequence: Synthetic oligonucleotide
ccacuguuagaacccuucu

SEQ ID NO: 1329785 - RNA, 19 nt, Artificial Sequence
  Description of Artificial Sequence: Synthetic oligonucleotide
cucccacuguuagaacccu

SEQ ID NO: 1329786 - RNA, 19 nt, Artificial Sequence
  Description of Artificial Sequence: Synthetic oligonucleotide
cucccgaagcugagacacu

SEQ ID NO: 1329787 - RNA, 19 nt, Artificial Sequence
  Description of Artificial Sequence: Synthetic oligonucleotide
ggaggccuguuuccuguau

SEQ ID NO: 1329788 - RNA, 19 nt, Artificial Sequence
  Description of Artificial Sequence: Synthetic oligonucleotide
gccaccggugacacagcuc

SEQ ID NO: 1329789 - RNA, 19 nt, Artificial Sequence
  Description of Artificial Sequence: Synthetic oligonucleotide
ccggugacacagcucccga

SEQ ID NO: 1329790 - RNA, 19 nt, Artificial Sequence
  Description of Artificial Sequence: Synthetic oligonucleotide
ggccuguuuccuguauagu

SEQ ID NO: 1329791 - RNA, 19 nt, Artificial Sequence
  Description of Artificial Sequence: Synthetic oligonucleotide
ccucagcugccuggcaguc

SEQ ID NO: 1329792 - RNA, 19 nt, Artificial Sequence
  Description of Artificial Sequence: Synthetic oligonucleotide
gggaggccuguuuccugua

SEQ ID NO: 1329793 - RNA, 19 nt, Artificial Sequence
  Description of Artificial Sequence: Synthetic oligonucleotide
ccuggggaucccucuggua

SEQ ID NO: 1329794 - RNA, 19 nt, Artificial Sequence
  Description of Artificial Sequence: Synthetic oligonucleotide
ccucaacucucccacuguu

SEQ ID NO: 1329795 - RNA, 19 nt, Artificial Sequence
  Description of Artificial Sequence: Synthetic oligonucleotide
gggaucccucugguaaccu

SEQ ID NO: 1329796 - RNA, 19 nt, Artificial Sequence
  Description of Artificial Sequence: Synthetic oligonucleotide
ggcuugugugcagguuacu

SEQ ID NO: 1329797 - RNA, 19 nt, Artificial Sequence
  Description of Artificial Sequence: Synthetic oligonucleotide
cggugacacagcucccgaa

SEQ ID NO: 1329798 - RNA, 19 nt, Artificial Sequence
  Description of Artificial Sequence: Synthetic oligonucleotide
cacagccuuucuggagaau

SEQ ID NO: 1329799 - RNA, 19 nt, Artificial Sequence
  Description of Artificial Sequence: Synthetic oligonucleotide
gguccacagggaggccugu

SEQ ID NO: 1329800 - RNA, 19 nt, Artificial Sequence
  Description of Artificial Sequence: Synthetic oligonucleotide
ccuuucacauggggacugu

SEQ ID NO: 1329801 - RNA, 19 nt, Artificial Sequence
  Description of Artificial Sequence: Synthetic oligonucleotide
cgcagacaguacacaugua

SEQ ID NO: 1329802 - RNA, 19 nt, Artificial Sequence
  Description of Artificial Sequence: Synthetic oligonucleotide
ccccaucaggugauucuuu

SEQ ID NO: 1329803 - RNA, 19 nt, Artificial Sequence
  Description of Artificial Sequence: Synthetic oligonucleotide
cccagggcuucgggcgaau

SEQ ID NO: 1329804 - RNA, 19 nt, Artificial Sequence
  Description of Artificial Sequence: Synthetic oligonucleotide
caaacuaugguccacaagg

SEQ ID NO: 1329805 - RNA, 19 nt, Artificial Sequence
  Description of Artificial Sequence: Synthetic oligonucleotide
uuauuaauccagaucagcc

SEQ ID NO: 1329806 - RNA, 19 nt, Artificial Sequence
  Description of Artificial Sequence: Synthetic oligonucleotide
aaguuauacagaucguugg

SEQ ID NO: 1329807 - RNA, 19 nt, Artificial Sequence
  Description of Artificial Sequence: Synthetic oligonucleotide
aauuugauuggaauuaauc

SEQ ID NO: 1329808 - RNA, 19 nt, Artificial Sequence
  Description of Artificial Sequence: Synthetic oligonucleotide
uuuuguaucggccugugug

SEQ ID NO: 1329809 - RNA, 19 nt, Artificial Sequence
  Description of Artificial Sequence: Synthetic oligonucleotide
aauucuuugggaauaggac

SEQ ID NO: 1329810 - RNA, 19 nt, Artificial Sequence
  Description of Artificial Sequence: Synthetic oligonucleotide
uugauuggaauuaaucugc

SEQ ID NO: 1329811 - RNA, 19 nt, Artificial Sequence
  Description of Artificial Sequence: Synthetic oligonucleotide
acaggagcgauccagauag

SEQ ID NO: 1329812 - RNA, 19 nt, Artificial Sequence
  Description of Artificial Sequence: Synthetic oligonucleotide
uguauaaauaaacgagaag

SEQ ID NO: 1329813 - RNA, 19 nt, Artificial Sequence
  Description of Artificial Sequence: Synthetic oligonucleotide
aauguuaguguacaccucu

SEQ ID NO: 1329814 - RNA, 19 nt, Artificial Sequence
  Description of Artificial Sequence: Synthetic oligonucleotide
agaaauguuaguguacacc

SEQ ID NO: 1329815 - RNA, 19 nt, Artificial Sequence
  Description of Artificial Sequence: Synthetic oligonucleotide
cuaaacucuccauagacag

SEQ ID NO: 1329816 - RNA, 19 nt, Artificial Sequence
  Description of Artificial Sequence: Synthetic oligonucleotide
uauagguacgcgaugcgcg

SEQ ID NO: 1329817 - RNA, 19 nt, Artificial Sequence
  Description of Artificial Sequence: Synthetic oligonucleotide
uugaauagaggauagccug

SEQ ID NO: 1329818 - RNA, 19 nt, Artificial Sequence
  Description of Artificial Sequence: Synthetic oligonucleotide
auagaggauagccugacag

SEQ ID NO: 1329819 - RNA, 19 nt, Artificial Sequence
  Description of Artificial Sequence: Synthetic oligonucleotide
agcuaaacucuccauagac

SEQ ID NO: 1329820 - RNA, 19 nt, Artificial Sequence
  Description of Artificial Sequence: Synthetic oligonucleotide
uuggaauuaaucugcaucu

SEQ ID NO: 1329821 - RNA, 19 nt, Artificial Sequence
  Description of Artificial Sequence: Synthetic oligonucleotide
ugcucaaagagcuucagac

SEQ ID NO: 1329822 - RNA, 19 nt, Artificial Sequence
  Description of Artificial Sequence: Synthetic oligonucleotide
auaggacucacuuagugca

SEQ ID NO: 1329823 - RNA, 19 nt, Artificial Sequence
  Description of Artificial Sequence: Synthetic oligonucleotide
uugccauccacguuugucg

SEQ ID NO: 1329824 - RNA, 19 nt, Artificial Sequence
  Description of Artificial Sequence: Synthetic oligonucleotide
cuccauagacagaagaggg

SEQ ID NO: 1329825 - RNA, 19 nt, Artificial Sequence
  Description of Artificial Sequence: Synthetic oligonucleotide
gcuuuaaagagcuagagga

SEQ ID NO: 1329826 - RNA, 19 nt, Artificial Sequence
  Description of Artificial Sequence: Synthetic oligonucleotide
agagcuagaggaugacucc

SEQ ID NO: 1329827 - RNA, 19 nt, Artificial Sequence
  Description of Artificial Sequence: Synthetic oligonucleotide
gaauagcuugaauagagga

SEQ ID NO: 1329828 - RNA, 19 nt, Artificial Sequence
  Description of Artificial Sequence: Synthetic oligonucleotide
ugcuuugccaugucaaggg

SEQ ID NO: 1329829 - RNA, 19 nt, Artificial Sequence
  Description of Artificial Sequence: Synthetic oligonucleotide
cuuugaaaccaucccaggg

SEQ ID NO: 1329830 - RNA, 19 nt, Artificial Sequence
  Description of Artificial Sequence: Synthetic oligonucleotide
auuccaagcccugagaguc

SEQ ID NO: 1329831 - RNA, 19 nt, Artificial Sequence
  Description of Artificial Sequence: Synthetic oligonucleotide
acaauguccaucugcaugu

SEQ ID NO: 1329832 - RNA, 19 nt, Artificial Sequence
  Description of Artificial Sequence: Synthetic oligonucleotide
gggaauaggacucacuuag

SEQ ID NO: 1329833 - RNA, 19 nt, Artificial Sequence
  Description of Artificial Sequence: Synthetic oligonucleotide
uccauauucuucagauccg

SEQ ID NO: 1329834 - RNA, 19 nt, Artificial Sequence
  Description of Artificial Sequence: Synthetic oligonucleotide
auauucuucagauccguga

SEQ ID NO: 1329835 - RNA, 19 nt, Artificial Sequence
  Description of Artificial Sequence: Synthetic oligonucleotide
aaacgagaaggccaagacu

SEQ ID NO: 1329836 - RNA, 19 nt, Artificial Sequence
  Description of Artificial Sequence: Synthetic oligonucleotide
uuguaugcccauuccaaag

SEQ ID NO: 1329837 - RNA, 19 nt, Artificial Sequence
  Description of Artificial Sequence: Synthetic oligonucleotide
ucaguuauguggcaagguc

SEQ ID NO: 1329838 - RNA, 19 nt, Artificial Sequence
  Description of Artificial Sequence: Synthetic oligonucleotide
acauguuguaugcccauuc

SEQ ID NO: 1329839 - RNA, 19 nt, Artificial Sequence
  Description of Artificial Sequence: Synthetic oligonucleotide
caguuauguggcaaggucc

SEQ ID NO: 1329840 - RNA, 19 nt, Artificial Sequence
  Description of Artificial Sequence: Synthetic oligonucleotide
aacgagaaggccaagacuu

SEQ ID NO: 1329841 - RNA, 19 nt, Artificial Sequence
  Description of Artificial Sequence: Synthetic oligonucleotide
ugagcaaguaucccuugcc

SEQ ID NO: 1329842 - RNA, 19 nt, Artificial Sequence
  Description of Artificial Sequence: Synthetic oligonucleotide
ugaucaguuauguggcaag

SEQ ID NO: 1329843 - RNA, 19 nt, Artificial Sequence
  Description of Artificial Sequence: Synthetic oligonucleotide
uuuguaucggccuguguga

SEQ ID NO: 1329844 - RNA, 19 nt, Artificial Sequence
  Description of Artificial Sequence: Synthetic oligonucleotide
auagguacgcgaugcgcgc

SEQ ID NO: 1329845 - RNA, 19 nt, Artificial Sequence
  Description of Artificial Sequence: Synthetic oligonucleotide
uuuccccuauuuuguaucg

SEQ ID NO: 1329846 - RNA, 19 nt, Artificial Sequence
  Description of Artificial Sequence: Synthetic oligonucleotide
agaucguugguacugucug

SEQ ID NO: 1329847 - RNA, 19 nt, Artificial Sequence
  Description of Artificial Sequence: Synthetic oligonucleotide
caugggaucuggaagauca

SEQ ID NO: 1329848 - RNA, 19 nt, Artificial Sequence
  Description of Artificial Sequence: Synthetic oligonucleotide
uccacaaggaauagcuuga

SEQ ID NO: 1329849 - RNA, 19 nt, Artificial Sequence
  Description of Artificial Sequence: Synthetic oligonucleotide
caaagucacgccaaaucgc

SEQ ID NO: 1329850 - RNA, 19 nt, Artificial Sequence
  Description of Artificial Sequence: Synthetic oligonucleotide
aggaauagcuugaauagag

SEQ ID NO: 1329851 - RNA, 19 nt, Artificial Sequence
  Description of Artificial Sequence: Synthetic oligonucleotide
uguaugcccauuccaaagu

SEQ ID NO: 1329852 - RNA, 19 nt, Artificial Sequence
  Description of Artificial Sequence: Synthetic oligonucleotide
agcuccggaacagacaggc

SEQ ID NO: 1329853 - RNA, 19 nt, Artificial Sequence
  Description of Artificial Sequence: Synthetic oligonucleotide
auucgcauccgagugauag

SEQ ID NO: 1329854 - RNA, 19 nt, Artificial Sequence
  Description of Artificial Sequence: Synthetic oligonucleotide
uacaccucugaucaguuau

SEQ ID NO: 1329855 - RNA, 19 nt, Artificial Sequence
  Description of Artificial Sequence: Synthetic oligonucleotide
caaggcuuuaaagagcuag

SEQ ID NO: 1329856 - RNA, 19 nt, Artificial Sequence
  Description of Artificial Sequence: Synthetic oligonucleotide
guccacaaggaauagcuug

SEQ ID NO: 1329857 - RNA, 19 nt, Artificial Sequence
  Description of Artificial Sequence: Synthetic oligonucleotide
aaauaaacgagaaggccaa

SEQ ID NO: 1329858 - RNA, 19 nt, Artificial Sequence
  Description of Artificial Sequence: Synthetic oligonucleotide
uggcacaacggaaauuuug

SEQ ID NO: 1329859 - RNA, 19 nt, Artificial Sequence
  Description of Artificial Sequence: Synthetic oligonucleotide
aguuauacagaucguuggu

SEQ ID NO: 1329860 - RNA, 19 nt, Artificial Sequence
  Description of Artificial Sequence: Synthetic oligonucleotide
acugucuggcacaaugucc

SEQ ID NO: 1329861 - RNA, 19 nt, Artificial Sequence
  Description of Artificial Sequence: Synthetic oligonucleotide
aagagcaagaacgggucag

SEQ ID NO: 1329862 - RNA, 19 nt, Artificial Sequence
  Description of Artificial Sequence: Synthetic oligonucleotide
uagcuugaauagaggauag

SEQ ID NO: 1329863 - RNA, 19 nt, Artificial Sequence
  Description of Artificial Sequence: Synthetic oligonucleotide
ugacaacacauggugacag

SEQ ID NO: 1329864 - RNA, 19 nt, Artificial Sequence
  Description of Artificial Sequence: Synthetic oligonucleotide
gcaugugccacucagggag

SEQ ID NO: 1329865 - RNA, 19 nt, Artificial Sequence
  Description of Artificial Sequence: Synthetic oligonucleotide
aucguugguacugucuggc

SEQ ID NO: 1329866 - RNA, 19 nt, Artificial Sequence
  Description of Artificial Sequence: Synthetic oligonucleotide
aaagucacgccaaaucgcu

SEQ ID NO: 1329867 - RNA, 19 nt, Artificial Sequence
  Description of Artificial Sequence: Synthetic oligonucleotide
agggacccaaacuaugguc

SEQ ID NO: 1329868 - RNA, 19 nt, Artificial Sequence
  Description of Artificial Sequence: Synthetic oligonucleotide
uguuaguguacaccucuga

SEQ ID NO: 1329869 - RNA, 19 nt, Artificial Sequence
  Description of Artificial Sequence: Synthetic oligonucleotide
gaguucauggcacaacgga

SEQ ID NO: 1329870 - RNA, 19 nt, Artificial Sequence
  Description of Artificial Sequence: Synthetic oligonucleotide
uugagcaaguaucccuugc

SEQ ID NO: 1329871 - RNA, 19 nt, Artificial Sequence
  Description of Artificial Sequence: Synthetic oligonucleotide
aacuaugguccacaaggaa

SEQ ID NO: 1329872 - RNA, 19 nt, Artificial Sequence
  Description of Artificial Sequence: Synthetic oligonucleotide
aguccauauucuucagauc

SEQ ID NO: 1329873 - RNA, 19 nt, Artificial Sequence
  Description of Artificial Sequence: Synthetic oligonucleotide
aauagaggauagccugaca

SEQ ID NO: 1329874 - RNA, 19 nt, Artificial Sequence
  Description of Artificial Sequence: Synthetic oligonucleotide
auagcuugaauagaggaua

SEQ ID NO: 1329875 - RNA, 19 nt, Artificial Sequence
  Description of Artificial Sequence: Synthetic oligonucleotide
uccauagacagaagagggu

SEQ ID NO: 1329876 - RNA, 19 nt, Artificial Sequence
  Description of Artificial Sequence: Synthetic oligonucleotide
gaucguugguacugucugg

SEQ ID NO: 1329877 - RNA, 19 nt, Artificial Sequence
  Description of Artificial Sequence: Synthetic oligonucleotide
agcagucuagcuuuucugu

SEQ ID NO: 1329878 - RNA, 19 nt, Artificial Sequence
  Description of Artificial Sequence: Synthetic oligonucleotide
uccccuauuuuguaucggc

SEQ ID NO: 1329879 - RNA, 19 nt, Artificial Sequence
  Description of Artificial Sequence: Synthetic oligonucleotide
uuaauccagaucagcccug

SEQ ID NO: 1329880 - RNA, 19 nt, Artificial Sequence
  Description of Artificial Sequence: Synthetic oligonucleotide
ugcagcuaaacucuccaua

SEQ ID NO: 1329881 - RNA, 19 nt, Artificial Sequence
  Description of Artificial Sequence: Synthetic oligonucleotide
cugcugacaacacauggug

SEQ ID NO: 1329882 - RNA, 19 nt, Artificial Sequence
  Description of Artificial Sequence: Synthetic oligonucleotide
augacaccagaccuugcuc

SEQ ID NO: 1329883 - RNA, 19 nt, Artificial Sequence
  Description of Artificial Sequence: Synthetic oligonucleotide
uuugggaauaggacucacu

SEQ ID NO: 1329884 - RNA, 19 nt, Artificial Sequence
  Description of Artificial Sequence: Synthetic oligonucleotide
gauccagauagggugcccg

SEQ ID NO: 1329885 - RNA, 19 nt, Artificial Sequence
  Description of Artificial Sequence: Synthetic oligonucleotide
aauugucucccagugcaca

SEQ ID NO: 1329886 - RNA, 19 nt, Artificial Sequence
  Description of Artificial Sequence: Synthetic oligonucleotide
agucacgccaaaucgcuca

SEQ ID NO: 1329887 - RNA, 19 nt, Artificial Sequence
  Description of Artificial Sequence: Synthetic oligonucleotide
auaggcaugguggcuuugc

SEQ ID NO: 1329888 - RNA, 19 nt, Artificial Sequence
  Description of Artificial Sequence: Synthetic oligonucleotide
agaccuugcucauucagaa

SEQ ID NO: 1329889 - RNA, 19 nt, Artificial Sequence
  Description of Artificial Sequence: Synthetic oligonucleotide
ucuagcuuuucuguauuac

SEQ ID NO: 1329890 - RNA, 19 nt, Artificial Sequence
  Description of Artificial Sequence: Synthetic oligonucleotide
ugcgguauagguacgcgau

SEQ ID NO: 1329891 - RNA, 19 nt, Artificial Sequence
  Description of Artificial Sequence: Synthetic oligonucleotide
aaaucgcucacaaccccuc

SEQ ID NO: 1329892 - RNA, 19 nt, Artificial Sequence
  Description of Artificial Sequence: Synthetic oligonucleotide
agcuucagacaccugcaag

SEQ ID NO: 1329893 - RNA, 19 nt, Artificial Sequence
  Description of Artificial Sequence: Synthetic oligonucleotide
agcccuggaauuugauugg

SEQ ID NO: 1329894 - RNA, 19 nt, Artificial Sequence
  Description of Artificial Sequence: Synthetic oligonucleotide
aguaucccuugccauccac

SEQ ID NO: 1329895 - RNA, 19 nt, Artificial Sequence
  Description of Artificial Sequence: Synthetic oligonucleotide
uucauugagcaaguauccc

SEQ ID NO: 1329896 - RNA, 19 nt, Artificial Sequence
  Description of Artificial Sequence: Synthetic oligonucleotide
cauagacagaagaggguug

SEQ ID NO: 1329897 - RNA, 19 nt, Artificial Sequence
  Description of Artificial Sequence: Synthetic oligonucleotide
uaucccuugccauccacgu

SEQ ID NO: 1329898 - RNA, 19 nt, Artificial Sequence
  Description of Artificial Sequence: Synthetic oligonucleotide
ucgcucacaaccccucucc

SEQ ID NO: 1329899 - RNA, 19 nt, Artificial Sequence
  Description of Artificial Sequence: Synthetic oligonucleotide
auacagaucguugguacug

SEQ ID NO: 1329900 - RNA, 19 nt, Artificial Sequence
  Description of Artificial Sequence: Synthetic oligonucleotide
uagaggauagccugacagu

SEQ ID NO: 1329901 - RNA, 19 nt, Artificial Sequence
  Description of Artificial Sequence: Synthetic oligonucleotide
caaguaucccuugccaucc

SEQ ID NO: 1329902 - RNA, 19 nt, Artificial Sequence
  Description of Artificial Sequence: Synthetic oligonucleotide
cgagugauaggcauggugg

SEQ ID NO: 1329903 - RNA, 19 nt, Artificial Sequence
  Description of Artificial Sequence: Synthetic oligonucleotide
ugccauccacguuugucgg

SEQ ID NO: 1329904 - RNA, 19 nt, Artificial Sequence
  Description of Artificial Sequence: Synthetic oligonucleotide
ugcugacaacacaugguga

SEQ ID NO: 1329905 - RNA, 19 nt, Artificial Sequence
  Description of Artificial Sequence: Synthetic oligonucleotide
aaacuaugguccacaagga

SEQ ID NO: 1329906 - RNA, 19 nt, Artificial Sequence
  Description of Artificial Sequence: Synthetic oligonucleotide
auccgagugauaggcaugg

SEQ ID NO: 1329907 - RNA, 19 nt, Artificial Sequence
  Description of Artificial Sequence: Synthetic oligonucleotide
ucgcauccgagugauaggc

SEQ ID NO: 1329908 - RNA, 19 nt, Artificial Sequence
  Description of Artificial Sequence: Synthetic oligonucleotide
agcaaggcuuuaaagagcu

SEQ ID NO: 1329909 - RNA, 19 nt, Artificial Sequence
  Description of Artificial Sequence: Synthetic oligonucleotide
aauaaacgagaaggccaag

SEQ ID NO: 1329910 - RNA, 19 nt, Artificial Sequence
  Description of Artificial Sequence: Synthetic oligonucleotide
auccacguuugucggcugc

SEQ ID NO: 1329911 - RNA, 19 nt, Artificial Sequence
  Description of Artificial Sequence: Synthetic oligonucleotide
ugcaaguuauacagaucgu

SEQ ID NO: 1329912 - RNA, 19 nt, Artificial Sequence
  Description of Artificial Sequence: Synthetic oligonucleotide
acuaugguccacaaggaau

SEQ ID NO: 1329913 - RNA, 19 nt, Artificial Sequence
  Description of Artificial Sequence: Synthetic oligonucleotide
cugucuggcacaaugucca

SEQ ID NO: 1329914 - RNA, 19 nt, Artificial Sequence
  Description of Artificial Sequence: Synthetic oligonucleotide
guugguacugucuggcaca

SEQ ID NO: 1329915 - RNA, 19 nt, Artificial Sequence
  Description of Artificial Sequence: Synthetic oligonucleotide
accccaacuccaucuuccc

SEQ ID NO: 1329916 - RNA, 19 nt, Artificial Sequence
  Description of Artificial Sequence: Synthetic oligonucleotide
ugaagacauguuguaugcc

SEQ ID NO: 1329917 - RNA, 19 nt, Artificial Sequence
  Description of Artificial Sequence: Synthetic oligonucleotide
agcuugaauagaggauagc

SEQ ID NO: 1329918 - RNA, 19 nt, Artificial Sequence
  Description of Artificial Sequence: Synthetic oligonucleotide
gaguccauauucuucagau

SEQ ID NO: 1329919 - RNA, 19 nt, Artificial Sequence
  Description of Artificial Sequence: Synthetic oligonucleotide
aacaggagcgauccagaua

SEQ ID NO: 1329920 - RNA, 19 nt, Artificial Sequence
  Description of Artificial Sequence: Synthetic oligonucleotide
aggagcgauccagauaggg

SEQ ID NO: 1329921 - RNA, 19 nt, Artificial Sequence
  Description of Artificial Sequence: Synthetic oligonucleotide
agcgauccagauagggugc

SEQ ID NO: 1329922 - RNA, 19 nt, Artificial Sequence
  Description of Artificial Sequence: Synthetic oligonucleotide
gaauagaggauagccugac

SEQ ID NO: 1329923 - RNA, 19 nt, Artificial Sequence
  Description of Artificial Sequence: Synthetic oligonucleotide
ugugugaauggcccagcuc

SEQ ID NO: 1329924 - RNA, 19 nt, Artificial Sequence
  Description of Artificial Sequence: Synthetic oligonucleotide
gcugacaacacauggugac

SEQ ID NO: 1329925 - RNA, 19 nt, Artificial Sequence
  Description of Artificial Sequence: Synthetic oligonucleotide
cuuugcaacaggagcgauc

SEQ ID NO: 1329926 - RNA, 19 nt, Artificial Sequence
  Description of Artificial Sequence: Synthetic oligonucleotide
aucgcucacaaccccucuc

SEQ ID NO: 1329927 - RNA, 19 nt, Artificial Sequence
  Description of Artificial Sequence: Synthetic oligonucleotide
guauagguacgcgaugcgc

SEQ ID NO: 1329928 - RNA, 19 nt, Artificial Sequence
  Description of Artificial Sequence: Synthetic oligonucleotide
ugaauggcccagcuccgga

SEQ ID NO: 1329929 - RNA, 19 nt, Artificial Sequence
  Description of Artificial Sequence: Synthetic oligonucleotide
acgcgaugcgcgcacagag

SEQ ID NO: 1329930 - RNA, 19 nt, Artificial Sequence
  Description of Artificial Sequence: Synthetic oligonucleotide
aaucgcucacaaccccucu

SEQ ID NO: 1329931 - RNA, 19 nt, Artificial Sequence
  Description of Artificial Sequence: Synthetic oligonucleotide
uugcgguauagguacgcga

SEQ ID NO: 1329932 - RNA, 19 nt, Artificial Sequence
  Description of Artificial Sequence: Synthetic oligonucleotide
cuaugguccacaaggaaua

SEQ ID NO: 1329933 - RNA, 19 nt, Artificial Sequence
  Description of Artificial Sequence: Synthetic oligonucleotide
cuugcagcuaaacucucca

SEQ ID NO: 1329934 - RNA, 19 nt, Artificial Sequence
  Description of Artificial Sequence: Synthetic oligonucleotide
caagaacgggucagggacc

SEQ ID NO: 1329935 - RNA, 19 nt, Artificial Sequence
  Description of Artificial Sequence: Synthetic oligonucleotide
cagauagggugcccgacag

SEQ ID NO: 1329936 - RNA, 19 nt, Artificial Sequence
  Description of Artificial Sequence: Synthetic oligonucleotide
ugagcccuacagcuggaga

SEQ ID NO: 1329937 - RNA, 19 nt, Artificial Sequence
  Description of Artificial Sequence: Synthetic oligonucleotide
uaugguccacaaggaauag

SEQ ID NO: 1329938 - RNA, 19 nt, Artificial Sequence
  Description of Artificial Sequence: Synthetic oligonucleotide
agcccuacagcuggagagc

SEQ ID NO: 1329939 - RNA, 19 nt, Artificial Sequence
  Description of Artificial Sequence: Synthetic oligonucleotide
ggcacaacggaaauuuugc

SEQ ID NO: 1329940 - RNA, 19 nt, Artificial Sequence
  Description of Artificial Sequence: Synthetic oligonucleotide
uccggaacagacaggcauc

SEQ ID NO: 1329941 - RNA, 19 nt, Artificial Sequence
  Description of Artificial Sequence: Synthetic oligonucleotide
uaucggccugugugaaugg

SEQ ID NO: 1329942 - RNA, 19 nt, Artificial Sequence
  Description of Artificial Sequence: Synthetic oligonucleotide
ccagauggaguccauauuc

SEQ ID NO: 1329943 - RNA, 19 nt, Artificial Sequence
  Description of Artificial Sequence: Synthetic oligonucleotide
guaucccuugccauccacg

SEQ ID NO: 1329944 - RNA, 19 nt, Artificial Sequence
  Description of Artificial Sequence: Synthetic oligonucleotide
agcaauucuuugggaauag

SEQ ID NO: 1329945 - RNA, 19 nt, Artificial Sequence
  Description of Artificial Sequence: Synthetic oligonucleotide
augucuggcagggaguuca

SEQ ID NO: 1329946 - RNA, 19 nt, Artificial Sequence
  Description of Artificial Sequence: Synthetic oligonucleotide
uguacaccucugaucaguu

SEQ ID NO: 1329947 - RNA, 19 nt, Artificial Sequence
  Description of Artificial Sequence: Synthetic oligonucleotide
gguauagguacgcgaugcg

SEQ ID NO: 1329948 - RNA, 19 nt, Artificial Sequence
  Description of Artificial Sequence: Synthetic oligonucleotide
aggcagagcuccucugagg

SEQ ID NO: 1329949 - RNA, 19 nt, Artificial Sequence
  Description of Artificial Sequence: Synthetic oligonucleotide
gaagagcaagaacggguca

SEQ ID NO: 1329950 - RNA, 19 nt, Artificial Sequence
  Description of Artificial Sequence: Synthetic oligonucleotide
ugggaauaggacucacuua

SEQ ID NO: 1329951 - RNA, 19 nt, Artificial Sequence
  Description of Artificial Sequence: Synthetic oligonucleotide
uccgugaagacauguugua

SEQ ID NO: 1329952 - RNA, 19 nt, Artificial Sequence
  Description of Artificial Sequence: Synthetic oligonucleotide
uggaguccauauucuucag

SEQ ID NO: 1329953 - RNA, 19 nt, Artificial Sequence
  Description of Artificial Sequence: Synthetic oligonucleotide
uccacgucuugggaucugg

SEQ ID NO: 1329954 - RNA, 19 nt, Artificial Sequence
  Description of Artificial Sequence: Synthetic oligonucleotide
gguagcgaggcagagcucc

SEQ ID NO: 1329955 - RNA, 19 nt, Artificial Sequence
  Description of Artificial Sequence: Synthetic oligonucleotide
agagcugggguaagguccg

SEQ ID NO: 1329956 - RNA, 19 nt, Artificial Sequence
  Description of Artificial Sequence: Synthetic oligonucleotide
acgggucagggacccaaac

SEQ ID NO: 1329957 - RNA, 19 nt, Artificial Sequence
  Description of Artificial Sequence: Synthetic oligonucleotide
ucauucgcauccgagugau

SEQ ID NO: 1329958 - RNA, 19 nt, Artificial Sequence
  Description of Artificial Sequence: Synthetic oligonucleotide
uuccccuauuuuguaucgg

SEQ ID NO: 1329959 - RNA, 19 nt, Artificial Sequence
  Description of Artificial Sequence: Synthetic oligonucleotide
guuguaugcccauuccaaa

SEQ ID NO: 1329960 - RNA, 19 nt, Artificial Sequence
  Description of Artificial Sequence: Synthetic oligonucleotide
ugcccgacagcgaggguug

SEQ ID NO: 1329961 - RNA, 19 nt, Artificial Sequence
  Description of Artificial Sequence: Synthetic oligonucleotide
agguacgcgaugcgcgcac

SEQ ID NO: 1329962 - RNA, 19 nt, Artificial Sequence
  Description of Artificial Sequence: Synthetic oligonucleotide
ugaggcuaagggagcccag

SEQ ID NO: 1329963 - RNA, 19 nt, Artificial Sequence
  Description of Artificial Sequence: Synthetic oligonucleotide
ugcgcgcacagagggaagg

SEQ ID NO: 1329964 - RNA, 19 nt, Artificial Sequence
  Description of Artificial Sequence: Synthetic oligonucleotide
acgccaaaucgcucacaac

SEQ ID NO: 1329965 - RNA, 19 nt, Artificial Sequence
  Description of Artificial Sequence: Synthetic oligonucleotide
gcgaugcgcgcacagaggg

SEQ ID NO: 1329966 - RNA, 19 nt, Artificial Sequence
  Description of Artificial Sequence: Synthetic oligonucleotide
cccaacuccaucuucccag

SEQ ID NO: 1329967 - RNA, 19 nt, Artificial Sequence
  Description of Artificial Sequence: Synthetic oligonucleotide
uccagauggaguccauauu

SEQ ID NO: 1329968 - RNA, 19 nt, Artificial Sequence
  Description of Artificial Sequence: Synthetic oligonucleotide
aagucacgccaaaucgcuc

SEQ ID NO: 1329969 - RNA, 19 nt, Artificial Sequence
  Description of Artificial Sequence: Synthetic oligonucleotide
auuuuguaucggccugugu

SEQ ID NO: 1329970 - RNA, 19 nt, Artificial Sequence
  Description of Artificial Sequence: Synthetic oligonucleotide
cauccgagugauaggcaug

SEQ ID NO: 1329971 - RNA, 19 nt, Artificial Sequence
  Description of Artificial Sequence: Synthetic oligonucleotide
caccagaccuugcucauuc

SEQ ID NO: 1329972 - RNA, 19 nt, Artificial Sequence
  Description of Artificial Sequence: Synthetic oligonucleotide
ucagauccgugaagacaug

SEQ ID NO: 1329973 - RNA, 19 nt, Artificial Sequence
  Description of Artificial Sequence: Synthetic oligonucleotide
cacaacggaaauuuugccu

SEQ ID NO: 1329974 - RNA, 19 nt, Artificial Sequence
  Description of Artificial Sequence: Synthetic oligonucleotide
guaagguccgguggggcag

SEQ ID NO: 1329975 - RNA, 19 nt, Artificial Sequence
  Description of Artificial Sequence: Synthetic oligonucleotide
acguuugucggcugccacu

SEQ ID NO: 1329976 - RNA, 19 nt, Artificial Sequence
  Description of Artificial Sequence: Synthetic oligonucleotide
ugaaaccaucccagggcuc

SEQ ID NO: 1329977 - RNA, 19 nt, Artificial Sequence
  Description of Artificial Sequence: Synthetic oligonucleotide
uacagaucguugguacugu

SEQ ID NO: 1329978 - RNA, 19 nt, Artificial Sequence
  Description of Artificial Sequence: Synthetic oligonucleotide
agugauaggcaugguggcu

SEQ ID NO: 1329979 - RNA, 19 nt, Artificial Sequence
  Description of Artificial Sequence: Synthetic oligonucleotide
acugacccaaggagggugg

SEQ ID NO: 1329980 - RNA, 19 nt, Artificial Sequence
  Description of Artificial Sequence: Synthetic oligonucleotide
uaggacucacuuagugcaa

SEQ ID NO: 1329981 - RNA, 19 nt, Artificial Sequence
  Description of Artificial Sequence: Synthetic oligonucleotide
acagagaaagugccauuuu

SEQ ID NO: 1329982 - RNA, 19 nt, Artificial Sequence
  Description of Artificial Sequence: Synthetic oligonucleotide
agacauguuguaugcccau

SEQ ID NO: 1329983 - RNA, 19 nt, Artificial Sequence
  Description of Artificial Sequence: Synthetic oligonucleotide
uccgguggggcagaccugc

SEQ ID NO: 1329984 - RNA, 19 nt, Artificial Sequence
  Description of Artificial Sequence: Synthetic oligonucleotide
ccuauuuuguaucggccug

SEQ ID NO: 1329985 - RNA, 19 nt, Artificial Sequence
  Description of Artificial Sequence: Synthetic oligonucleotide
cagaccuugcucauucaga

SEQ ID NO: 1329986 - RNA, 19 nt, Artificial Sequence
  Description of Artificial Sequence: Synthetic oligonucleotide
guuauacagaucguuggua

SEQ ID NO: 1329987 - RNA, 19 nt, Artificial Sequence
  Description of Artificial Sequence: Synthetic oligonucleotide
gacaacacauggugacaga

SEQ ID NO: 1329988 - RNA, 19 nt, Artificial Sequence
  Description of Artificial Sequence: Synthetic oligonucleotide
acggaaauuuugccuucca

SEQ ID NO: 1329989 - RNA, 19 nt, Artificial Sequence
  Description of Artificial Sequence: Synthetic oligonucleotide
gaggcuaagggagcccagc

SEQ ID NO: 1329990 - RNA, 19 nt, Artificial Sequence
  Description of Artificial Sequence: Synthetic oligonucleotide
aagggacccacagcagucu

SEQ ID NO: 1329991 - RNA, 19 nt, Artificial Sequence
  Description of Artificial Sequence: Synthetic oligonucleotide
gaugcgcgcacagagggaa

SEQ ID NO: 1329992 - RNA, 19 nt, Artificial Sequence
  Description of Artificial Sequence: Synthetic oligonucleotide
ucguugguacugucuggca

SEQ ID NO: 1329993 - RNA, 19 nt, Artificial Sequence
  Description of Artificial Sequence: Synthetic oligonucleotide
cuuuaaagagcuagaggau

SEQ ID NO: 1329994 - RNA, 19 nt, Artificial Sequence
  Description of Artificial Sequence: Synthetic oligonucleotide
cagguagcgaggcagagcu

SEQ ID NO: 1329995 - RNA, 19 nt, Artificial Sequence
  Description of Artificial Sequence: Synthetic oligonucleotide
gcacaacggaaauuuugcc

SEQ ID NO: 1329996 - RNA, 19 nt, Artificial Sequence
  Description of Artificial Sequence: Synthetic oligonucleotide
ggcagcaauucuuugggaa

SEQ ID NO: 1329997 - RNA, 19 nt, Artificial Sequence
  Description of Artificial Sequence: Synthetic oligonucleotide
cacucagacugcucaaaga

SEQ ID NO: 1329998 - RNA, 19 nt, Artificial Sequence
  Description of Artificial Sequence: Synthetic oligonucleotide
ggaguucauggcacaacgg

SEQ ID NO: 1329999 - RNA, 19 nt, Artificial Sequence
  Description of Artificial Sequence: Synthetic oligonucleotide
cucugaggcuaagggagcc

SEQ ID NO: 1330000 - RNA, 19 nt, Artificial Sequence
  Description of Artificial Sequence: Synthetic oligonucleotide
uccacguuugucggcugcc

SEQ ID NO: 1330001 - RNA, 19 nt, Artificial Sequence
  Description of Artificial Sequence: Synthetic oligonucleotide
aggacugccaaggccugag

SEQ ID NO: 1330002 - RNA, 19 nt, Artificial Sequence
  Description of Artificial Sequence: Synthetic oligonucleotide
uugccaugucaagggaccc

SEQ ID NO: 1330003 - RNA, 19 nt, Artificial Sequence
  Description of Artificial Sequence: Synthetic oligonucleotide
uugcagcuaaacucuccau

SEQ ID NO: 1330004 - RNA, 19 nt, Artificial Sequence
  Description of Artificial Sequence: Synthetic oligonucleotide
cacugacccaaggagggug

SEQ ID NO: 1330005 - RNA, 19 nt, Artificial Sequence
  Description of Artificial Sequence: Synthetic oligonucleotide
uccuugcagcuaaacucuc

SEQ ID NO: 1330006 - RNA, 19 nt, Artificial Sequence
  Description of Artificial Sequence: Synthetic oligonucleotide
ccaaaucgcucacaacccc

SEQ ID NO: 1330007 - RNA, 19 nt, Artificial Sequence
  Description of Artificial Sequence: Synthetic oligonucleotide
auguuaguguacaccucug

SEQ ID NO: 1330008 - RNA, 19 nt, Artificial Sequence
  Description of Artificial Sequence: Synthetic oligonucleotide
uguaucggccugugugaau

SEQ ID NO: 1330009 - RNA, 19 nt, Artificial Sequence
  Description of Artificial Sequence: Synthetic oligonucleotide
agugggcaccaggcaaggc

SEQ ID NO: 1330010 - RNA, 19 nt, Artificial Sequence
  Description of Artificial Sequence: Synthetic oligonucleotide
uuguaucggccugugugaa

SEQ ID NO: 1330011 - RNA, 19 nt, Artificial Sequence
  Description of Artificial Sequence: Synthetic oligonucleotide
ucccaccucacagcaaccu

SEQ ID NO: 1330012 - RNA, 19 nt, Artificial Sequence
  Description of Artificial Sequence: Synthetic oligonucleotide
gccaaaucgcucacaaccc

SEQ ID NO: 1330013 - RNA, 19 nt, Artificial Sequence
  Description of Artificial Sequence: Synthetic oligonucleotide
gaauggcccagcuccggaa

SEQ ID NO: 1330014 - RNA, 19 nt, Artificial Sequence
  Description of Artificial Sequence: Synthetic oligonucleotide
cucauucgcauccgaguga

SEQ ID NO: 1330015 - RNA, 19 nt, Artificial Sequence
  Description of Artificial Sequence: Synthetic oligonucleotide
caugacaccagaccuugcu

SEQ ID NO: 1330016 - RNA, 19 nt, Artificial Sequence
  Description of Artificial Sequence: Synthetic oligonucleotide
agucaaagucacgccaaau

SEQ ID NO: 1330017 - RNA, 19 nt, Artificial Sequence
  Description of Artificial Sequence: Synthetic oligonucleotide
cacguuugucggcugccac

SEQ ID NO: 1330018 - RNA, 19 nt, Artificial Sequence
  Description of Artificial Sequence: Synthetic oligonucleotide
ccccuauuuuguaucggcc

SEQ ID NO: 1330019 - RNA, 19 nt, Artificial Sequence
  Description of Artificial Sequence: Synthetic oligonucleotide
cucccagugcacagccagc

SEQ ID NO: 1330020 - RNA, 19 nt, Artificial Sequence
  Description of Artificial Sequence: Synthetic oligonucleotide
guacgcgaugcgcgcacag

SEQ ID NO: 1330021 - RNA, 19 nt, Artificial Sequence
  Description of Artificial Sequence: Synthetic oligonucleotide
acaccucugaucaguuaug

SEQ ID NO: 1330022 - RNA, 19 nt, Artificial Sequence
  Description of Artificial Sequence: Synthetic oligonucleotide
agcuagaggaugacuccug

SEQ ID NO: 1330023 - RNA, 19 nt, Artificial Sequence
  Description of Artificial Sequence: Synthetic oligonucleotide
gaggguugcgguauaggua

SEQ ID NO: 1330024 - RNA, 19 nt, Artificial Sequence
  Description of Artificial Sequence: Synthetic oligonucleotide
cagaccugcugacagccga

SEQ ID NO: 1330025 - RNA, 19 nt, Artificial Sequence
  Description of Artificial Sequence: Synthetic oligonucleotide
ccaacuccaucuucccagg

SEQ ID NO: 1330026 - RNA, 19 nt, Artificial Sequence
  Description of Artificial Sequence: Synthetic oligonucleotide
caaaguccccuccagggcu

SEQ ID NO: 1330027 - RNA, 19 nt, Artificial Sequence
  Description of Artificial Sequence: Synthetic oligonucleotide
ugcccuuguuccugcucug

SEQ ID NO: 1330028 - RNA, 19 nt, Artificial Sequence
  Description of Artificial Sequence: Synthetic oligonucleotide
ccaaaguccccuccagggc

SEQ ID NO: 1330029 - RNA, 19 nt, Artificial Sequence
  Description of Artificial Sequence: Synthetic oligonucleotide
cauugagcaaguaucccuu

SEQ ID NO: 1330030 - RNA, 19 nt, Artificial Sequence
  Description of Artificial Sequence: Synthetic oligonucleotide
ccuugcagcuaaacucucc

SEQ ID NO: 1330031 - RNA, 19 nt, Artificial Sequence
  Description of Artificial Sequence: Synthetic oligonucleotide
gguaagguccgguggggca

SEQ ID NO: 1330032 - RNA, 19 nt, Artificial Sequence
  Description of Artificial Sequence: Synthetic oligonucleotide
gauaggcaugguggcuuug

SEQ ID NO: 1330033 - RNA, 19 nt, Artificial Sequence
  Description of Artificial Sequence: Synthetic oligonucleotide
gcucacaaccccucucccc

SEQ ID NO: 1330034 - RNA, 19 nt, Artificial Sequence
  Description of Artificial Sequence: Synthetic oligonucleotide
uacgcgaugcgcgcacaga

SEQ ID NO: 1330035 - RNA, 19 nt, Artificial Sequence
  Description of Artificial Sequence: Synthetic oligonucleotide
ggaguccauauucuucaga

SEQ ID NO: 1330036 - RNA, 19 nt, Artificial Sequence
  Description of Artificial Sequence: Synthetic oligonucleotide
ccgagugauaggcauggug

SEQ ID NO: 1330037 - RNA, 19 nt, Artificial Sequence
  Description of Artificial Sequence: Synthetic oligonucleotide
cugaucaguuauguggcaa

SEQ ID NO: 1330038 - RNA, 19 nt, Artificial Sequence
  Description of Artificial Sequence: Synthetic oligonucleotide
ccuuccacgucuugggauc

SEQ ID NO: 1330039 - RNA, 19 nt, Artificial Sequence
  Description of Artificial Sequence: Synthetic oligonucleotide
ugucccagccgugcuuggc

SEQ ID NO: 1330040 - RNA, 19 nt, Artificial Sequence
  Description of Artificial Sequence: Synthetic oligonucleotide
gacccaaacuaugguccac

SEQ ID NO: 1330041 - RNA, 19 nt, Artificial Sequence
  Description of Artificial Sequence: Synthetic oligonucleotide
accagaccuugcucauuca

SEQ ID NO: 1330042 - RNA, 19 nt, Artificial Sequence
  Description of Artificial Sequence: Synthetic oligonucleotide
caaccccucuccccugggc

SEQ ID NO: 1330043 - RNA, 19 nt, Artificial Sequence
  Description of Artificial Sequence: Synthetic oligonucleotide
uagguacgcgaugcgcgca

SEQ ID NO: 1330044 - RNA, 19 nt, Artificial Sequence
  Description of Artificial Sequence: Synthetic oligonucleotide
gaucagcccuggaauuuga

SEQ ID NO: 1330045 - RNA, 19 nt, Artificial Sequence
  Description of Artificial Sequence: Synthetic oligonucleotide
aggacucacuuagugcaau

SEQ ID NO: 1330046 - RNA, 19 nt, Artificial Sequence
  Description of Artificial Sequence: Synthetic oligonucleotide
gacagcgaggguugcggua

SEQ ID NO: 1330047 - RNA, 19 nt, Artificial Sequence
  Description of Artificial Sequence: Synthetic oligonucleotide
gggcuccugguucauugag

SEQ ID NO: 1330048 - RNA, 19 nt, Artificial Sequence
  Description of Artificial Sequence: Synthetic oligonucleotide
caaggaggguggucucuuc

SEQ ID NO: 1330049 - RNA, 19 nt, Artificial Sequence
  Description of Artificial Sequence: Synthetic oligonucleotide
gguugcgguauagguacgc

SEQ ID NO: 1330050 - RNA, 19 nt, Artificial Sequence
  Description of Artificial Sequence: Synthetic oligonucleotide
agauccgugaagacauguu

SEQ ID NO: 1330051 - RNA, 19 nt, Artificial Sequence
  Description of Artificial Sequence: Synthetic oligonucleotide
cagaucguugguacugucu

SEQ ID NO: 1330052 - RNA, 19 nt, Artificial Sequence
  Description of Artificial Sequence: Synthetic oligonucleotide
gaugcccgggaugcuggug

SEQ ID NO: 1330053 - RNA, 19 nt, Artificial Sequence
  Description of Artificial Sequence: Synthetic oligonucleotide
guggggcuaugcuuugcca

SEQ ID NO: 1330054 - RNA, 19 nt, Artificial Sequence
  Description of Artificial Sequence: Synthetic oligonucleotide
acagccgagcugcccuugu

SEQ ID NO: 1330055 - RNA, 19 nt, Artificial Sequence
  Description of Artificial Sequence: Synthetic oligonucleotide
agacuuggggagaaauguu

SEQ ID NO: 1330056 - RNA, 19 nt, Artificial Sequence
  Description of Artificial Sequence: Synthetic oligonucleotide
ugucuggcagggaguucau

SEQ ID NO: 1330057 - RNA, 19 nt, Artificial Sequence
  Description of Artificial Sequence: Synthetic oligonucleotide
cugaggcuaagggagccca

SEQ ID NO: 1330058 - RNA, 19 nt, Artificial Sequence
  Description of Artificial Sequence: Synthetic oligonucleotide
agcaaccuccagaacccca

SEQ ID NO: 1330059 - RNA, 19 nt, Artificial Sequence
  Description of Artificial Sequence: Synthetic oligonucleotide
ggacccaaacuauggucca

SEQ ID NO: 1330060 - RNA, 19 nt, Artificial Sequence
  Description of Artificial Sequence: Synthetic oligonucleotide
ugcugacagccgagcugcc

SEQ ID NO: 1330061 - RNA, 19 nt, Artificial Sequence
  Description of Artificial Sequence: Synthetic oligonucleotide
cgguauagguacgcgaugc

SEQ ID NO: 1330062 - RNA, 19 nt, Artificial Sequence
  Description of Artificial Sequence: Synthetic oligonucleotide
caauguccaucugcaugug

SEQ ID NO: 1330063 - RNA, 19 nt, Artificial Sequence
  Description of Artificial Sequence: Synthetic oligonucleotide
cauccacguuugucggcug

SEQ ID NO: 1330064 - RNA, 19 nt, Artificial Sequence
  Description of Artificial Sequence: Synthetic oligonucleotide
cagucuagcuuuucuguau

SEQ ID NO: 1330065 - RNA, 19 nt, Artificial Sequence
  Description of Artificial Sequence: Synthetic oligonucleotide
cugacagccgagcugcccu

SEQ ID NO: 1330066 - RNA, 19 nt, Artificial Sequence
  Description of Artificial Sequence: Synthetic oligonucleotide
ggaacagacaggcauccuu

SEQ ID NO: 1330067 - RNA, 19 nt, Artificial Sequence
  Description of Artificial Sequence: Synthetic oligonucleotide
ggauagccugacagugggg

SEQ ID NO: 1330068 - RNA, 19 nt, Artificial Sequence
  Description of Artificial Sequence: Synthetic oligonucleotide
cuauuuuguaucggccugu

SEQ ID NO: 1330069 - RNA, 19 nt, Artificial Sequence
  Description of Artificial Sequence: Synthetic oligonucleotide
gcaugguggcuuugcaaca

SEQ ID NO: 1330070 - RNA, 19 nt, Artificial Sequence
  Description of Artificial Sequence: Synthetic oligonucleotide
cggaaauuuugccuuccac

SEQ ID NO: 1330071 - RNA, 19 nt, Artificial Sequence
  Description of Artificial Sequence: Synthetic oligonucleotide
agguccgguggggcagacc

SEQ ID NO: 1330072 - RNA, 19 nt, Artificial Sequence
  Description of Artificial Sequence: Synthetic oligonucleotide
ccgacagcgaggguugcgg

SEQ ID NO: 1330073 - RNA, 19 nt, Artificial Sequence
  Description of Artificial Sequence: Synthetic oligonucleotide
gcagucuagcuuuucugua

SEQ ID NO: 1330074 - RNA, 19 nt, Artificial Sequence
  Description of Artificial Sequence: Synthetic oligonucleotide
gacagccgagcugcccuug

SEQ ID NO: 1330075 - RNA, 19 nt, Artificial Sequence
  Description of Artificial Sequence: Synthetic oligonucleotide
cccugagaguccacugacc

SEQ ID NO: 1330076 - RNA, 19 nt, Artificial Sequence
  Description of Artificial Sequence: Synthetic oligonucleotide
gcgcacagagggaaggaug

SEQ ID NO: 1330077 - RNA, 19 nt, Artificial Sequence
  Description of Artificial Sequence: Synthetic oligonucleotide
guacaccucugaucaguua

SEQ ID NO: 1330078 - RNA, 19 nt, Artificial Sequence
  Description of Artificial Sequence: Synthetic oligonucleotide
gccaugucaagggacccac

SEQ ID NO: 1330079 - RNA, 19 nt, Artificial Sequence
  Description of Artificial Sequence: Synthetic oligonucleotide
uuccacgucuugggaucug

SEQ ID NO: 1330080 - RNA, 19 nt, Artificial Sequence
  Description of Artificial Sequence: Synthetic oligonucleotide
ugacagccgagcugcccuu

SEQ ID NO: 1330081 - RNA, 19 nt, Artificial Sequence
  Description of Artificial Sequence: Synthetic oligonucleotide
ccuggaauuugauuggaau

SEQ ID NO: 1330082 - RNA, 19 nt, Artificial Sequence
  Description of Artificial Sequence: Synthetic oligonucleotide
ccggaacagacaggcaucc

SEQ ID NO: 1330083 - RNA, 19 nt, Artificial Sequence
  Description of Artificial Sequence: Synthetic oligonucleotide
gcgaggguugcgguauagg

SEQ ID NO: 1330084 - RNA, 19 nt, Artificial Sequence
  Description of Artificial Sequence: Synthetic oligonucleotide
gugauaggcaugguggcuu

SEQ ID NO: 1330085 - RNA, 19 nt, Artificial Sequence
  Description of Artificial Sequence: Synthetic oligonucleotide
ccuggcauuccaagcccug

SEQ ID NO: 1330086 - RNA, 19 nt, Artificial Sequence
  Description of Artificial Sequence: Synthetic oligonucleotide
uccgagugauaggcauggu

SEQ ID NO: 1330087 - RNA, 19 nt, Artificial Sequence
  Description of Artificial Sequence: Synthetic oligonucleotide
cccuauuuuguaucggccu

SEQ ID NO: 1330088 - RNA, 19 nt, Artificial Sequence
  Description of Artificial Sequence: Synthetic oligonucleotide
caccaggcaaggcacugua

SEQ ID NO: 1330089 - RNA, 19 nt, Artificial Sequence
  Description of Artificial Sequence: Synthetic oligonucleotide
ggguaagguccgguggggc

SEQ ID NO: 1330090 - RNA, 19 nt, Artificial Sequence
  Description of Artificial Sequence: Synthetic oligonucleotide
agguagcgaggcagagcuc

SEQ ID NO: 1330091 - RNA, 19 nt, Artificial Sequence
  Description of Artificial Sequence: Synthetic oligonucleotide
ggagcgauccagauagggu

SEQ ID NO: 1330092 - RNA, 19 nt, Artificial Sequence
  Description of Artificial Sequence: Synthetic oligonucleotide
caacaggagcgauccagau

SEQ ID NO: 1330093 - RNA, 19 nt, Artificial Sequence
  Description of Artificial Sequence: Synthetic oligonucleotide
gacauguuguaugcccauu

SEQ ID NO: 1330094 - RNA, 19 nt, Artificial Sequence
  Description of Artificial Sequence: Synthetic oligonucleotide
cgcgaugcgcgcacagagg

SEQ ID NO: 1330095 - RNA, 19 nt, Artificial Sequence
  Description of Artificial Sequence: Synthetic oligonucleotide
gcgauccagauagggugcc

SEQ ID NO: 1330096 - RNA, 19 nt, Artificial Sequence
  Description of Artificial Sequence: Synthetic oligonucleotide
augcgcgcacagagggaag

SEQ ID NO: 1330097 - RNA, 19 nt, Artificial Sequence
  Description of Artificial Sequence: Synthetic oligonucleotide
gcaaggcacuguauaaaua

SEQ ID NO: 1330098 - RNA, 19 nt, Artificial Sequence
  Description of Artificial Sequence: Synthetic oligonucleotide
ggguugcgguauagguacg

SEQ ID NO: 1330099 - RNA, 19 nt, Artificial Sequence
  Description of Artificial Sequence: Synthetic oligonucleotide
cauccagauggaguccaua

SEQ ID NO: 1330100 - RNA, 19 nt, Artificial Sequence
  Description of Artificial Sequence: Synthetic oligonucleotide
cacgucuugggaucugguu

SEQ ID NO: 1330101 - RNA, 19 nt, Artificial Sequence
  Description of Artificial Sequence: Synthetic oligonucleotide
caccaugacaccagaccuu

SEQ ID NO: 1330102 - RNA, 19 nt, Artificial Sequence
  Description of Artificial Sequence: Synthetic oligonucleotide
gucggcugccacucagacu

SEQ ID NO: 1330103 - RNA, 19 nt, Artificial Sequence
  Description of Artificial Sequence: Synthetic oligonucleotide
cguuugucggcugccacuc

SEQ ID NO: 1330104 - RNA, 19 nt, Artificial Sequence
  Description of Artificial Sequence: Synthetic oligonucleotide
cagggaguucauggcacaa

SEQ ID NO: 1330105 - RNA, 19 nt, Artificial Sequence
  Description of Artificial Sequence: Synthetic oligonucleotide
cugucccugucucccaccu

SEQ ID NO: 1330106 - RNA, 19 nt, Artificial Sequence
  Description of Artificial Sequence: Synthetic oligonucleotide
agaacgggucagggaccca

SEQ ID NO: 1330107 - RNA, 19 nt, Artificial Sequence
  Description of Artificial Sequence: Synthetic oligonucleotide
gugcccgacagcgaggguu

SEQ ID NO: 1330108 - RNA, 19 nt, Artificial Sequence
  Description of Artificial Sequence: Synthetic oligonucleotide
cagaucagcccuggaauuu

SEQ ID NO: 1330109 - RNA, 19 nt, Artificial Sequence
  Description of Artificial Sequence: Synthetic oligonucleotide
guccgguggggcagaccug

SEQ ID NO: 1330110 - RNA, 19 nt, Artificial Sequence
  Description of Artificial Sequence: Synthetic oligonucleotide
cgcucacaaccccucuccc

SEQ ID NO: 1330111 - RNA, 19 nt, Artificial Sequence
  Description of Artificial Sequence: Synthetic oligonucleotide
cccuggaauuugauuggaa

SEQ ID NO: 1330112 - RNA, 19 nt, Artificial Sequence
  Description of Artificial Sequence: Synthetic oligonucleotide
cccgacagcgaggguugcg

SEQ ID NO: 1330113 - RNA, 19 nt, Artificial Sequence
  Description of Artificial Sequence: Synthetic oligonucleotide
ccgggaugcugguggccgc

SEQ ID NO: 1330114 - RNA, 19 nt, Artificial Sequence
  Description of Artificial Sequence: Synthetic oligonucleotide
cauucgcauccgagugaua

SEQ ID NO: 1330115 - RNA, 19 nt, Artificial Sequence
  Description of Artificial Sequence: Synthetic oligonucleotide
ggacucacuuagugcaauu

SEQ ID NO: 1330116 - RNA, 19 nt, Artificial Sequence
  Description of Artificial Sequence: Synthetic oligonucleotide
guagcgaggcagagcuccu

SEQ ID NO: 1330117 - RNA, 19 nt, Artificial Sequence
  Description of Artificial Sequence: Synthetic oligonucleotide
ggccaagacuuggggagaa

SEQ ID NO: 1330118 - RNA, 19 nt, Artificial Sequence
  Description of Artificial Sequence: Synthetic oligonucleotide
ccaagacuuggggagaaau

SEQ ID NO: 1330119 - RNA, 19 nt, Artificial Sequence
  Description of Artificial Sequence: Synthetic oligonucleotide
gguacgcgaugcgcgcaca

SEQ ID NO: 1330120 - RNA, 19 nt, Artificial Sequence
  Description of Artificial Sequence: Synthetic oligonucleotide
gggcuaugcuuugccaugu

SEQ ID NO: 1330121 - RNA, 19 nt, Artificial Sequence
  Description of Artificial Sequence: Synthetic oligonucleotide
ccccaacuccaucuuccca

SEQ ID NO: 1330122 - RNA, 19 nt, Artificial Sequence
  Description of Artificial Sequence: Synthetic oligonucleotide
ccagaucagcccuggaauu

SEQ ID NO: 1330123 - RNA, 19 nt, Artificial Sequence
  Description of Artificial Sequence: Synthetic oligonucleotide
gcgcgcacagagggaagga

SEQ ID NO: 1330124 - RNA, 19 nt, Artificial Sequence
  Description of Artificial Sequence: Synthetic oligonucleotide
gcaaggcuuuaaagagcua

SEQ ID NO: 1330125 - RNA, 19 nt, Artificial Sequence
  Description of Artificial Sequence: Synthetic oligonucleotide
cgaugcgcgcacagaggga

SEQ ID NO: 1330126 - RNA, 19 nt, Artificial Sequence
  Description of Artificial Sequence: Synthetic oligonucleotide
ccgugaagacauguuguau

SEQ ID NO: 1330127 - RNA, 19 nt, Artificial Sequence
  Description of Artificial Sequence: Synthetic oligonucleotide
cccgcuuggcaguggggcu

SEQ ID NO: 1330128 - RNA, 19 nt, Artificial Sequence
  Description of Artificial Sequence: Synthetic oligonucleotide
gcccgacagcgaggguugc

SEQ ID NO: 1330129 - RNA, 19 nt, Artificial Sequence
  Description of Artificial Sequence: Synthetic oligonucleotide
ccgcuuggcaguggggcua

SEQ ID NO: 1330130 - RNA, 19 nt, Artificial Sequence
  Description of Artificial Sequence: Synthetic oligonucleotide
ggugcccgacagcgagggu

SEQ ID NO: 1330131 - RNA, 19 nt, Artificial Sequence
  Description of Artificial Sequence: Synthetic oligonucleotide
cgcgcacagagggaaggau

SEQ ID NO: 1330132 - RNA, 19 nt, Artificial Sequence
  Description of Artificial Sequence: Synthetic oligonucleotide
aagaaaaguugccacagcc

SEQ ID NO: 1330133 - RNA, 19 nt, Artificial Sequence
  Description of Artificial Sequence: Synthetic oligonucleotide
uguacugagauuuaacugg

SEQ ID NO: 1330134 - RNA, 19 nt, Artificial Sequence
  Description of Artificial Sequence: Synthetic oligonucleotide
acuuaagguguuuagaggc

SEQ ID NO: 1330135 - RNA, 19 nt, Artificial Sequence
  Description of Artificial Sequence: Synthetic oligonucleotide
gauuuaacuggauagauac

SEQ ID NO: 1330136 - RNA, 19 nt, Artificial Sequence
  Description of Artificial Sequence: Synthetic oligonucleotide
aguauucagauguuggggc

SEQ ID NO: 1330137 - RNA, 19 nt, Artificial Sequence
  Description of Artificial Sequence: Synthetic oligonucleotide
uacuuaccaauccagaggg

SEQ ID NO: 1330138 - RNA, 19 nt, Artificial Sequence
  Description of Artificial Sequence: Synthetic oligonucleotide
uggauagauaccaagcagg

SEQ ID NO: 1330139 - RNA, 19 nt, Artificial Sequence
  Description of Artificial Sequence: Synthetic oligonucleotide
ucauaaaugacgagugccg

SEQ ID NO: 1330140 - RNA, 19 nt, Artificial Sequence
  Description of Artificial Sequence: Synthetic oligonucleotide
ucuguuaaggcacaguaca

SEQ ID NO: 1330141 - RNA, 19 nt, Artificial Sequence
  Description of Artificial Sequence: Synthetic oligonucleotide
aacuuaagguguuuagagg

SEQ ID NO: 1330142 - RNA, 19 nt, Artificial Sequence
  Description of Artificial Sequence: Synthetic oligonucleotide
cuaaguauucagauguugg

SEQ ID NO: 1330143 - RNA, 19 nt, Artificial Sequence
  Description of Artificial Sequence: Synthetic oligonucleotide
uuagugaagacuuuccucu

SEQ ID NO: 1330144 - RNA, 19 nt, Artificial Sequence
  Description of Artificial Sequence: Synthetic oligonucleotide
uaaguauucagauguuggg

SEQ ID NO: 1330145 - RNA, 19 nt, Artificial Sequence
  Description of Artificial Sequence: Synthetic oligonucleotide
agguuauggaaguggaucc

SEQ ID NO: 1330146 - RNA, 19 nt, Artificial Sequence
  Description of Artificial Sequence: Synthetic oligonucleotide
cugagauuuaacuggauag

SEQ ID NO: 1330147 - RNA, 19 nt, Artificial Sequence
  Description of Artificial Sequence: Synthetic oligonucleotide
caugaaaccacuagaaaug

SEQ ID NO: 1330148 - RNA, 19 nt, Artificial Sequence
  Description of Artificial Sequence: Synthetic oligonucleotide
accaagaccugauuauucc

SEQ ID NO: 1330149 - RNA, 19 nt, Artificial Sequence
  Description of Artificial Sequence: Synthetic oligonucleotide
aaguauucagauguugggg

SEQ ID NO: 1330150 - RNA, 19 nt, Artificial Sequence
  Description of Artificial Sequence: Synthetic oligonucleotide
gaacaaaguaaguugguac

SEQ ID NO: 1330151 - RNA, 19 nt, Artificial Sequence
  Description of Artificial Sequence: Synthetic oligonucleotide
uguugaggggucuugauga

SEQ ID NO: 1330152 - RNA, 19 nt, Artificial Sequence
  Description of Artificial Sequence: Synthetic oligonucleotide
ugcagaggucauaugaagg

SEQ ID NO: 1330153 - RNA, 19 nt, Artificial Sequence
  Description of Artificial Sequence: Synthetic oligonucleotide
acuacuuaccaauccagag

SEQ ID NO: 1330154 - RNA, 19 nt, Artificial Sequence
  Description of Artificial Sequence: Synthetic oligonucleotide
aucaaaucagaauggacug

SEQ ID NO: 1330155 - RNA, 19 nt, Artificial Sequence
  Description of Artificial Sequence: Synthetic oligonucleotide
uugauuaggauguggaggu

SEQ ID NO: 1330156 - RNA, 19 nt, Artificial Sequence
  Description of Artificial Sequence: Synthetic oligonucleotide
caaugugcaucucaaagcc

SEQ ID NO: 1330157 - RNA, 19 nt, Artificial Sequence
  Description of Artificial Sequence: Synthetic oligonucleotide
aucgcaaccaucucagcac

SEQ ID NO: 1330158 - RNA, 19 nt, Artificial Sequence
  Description of Artificial Sequence: Synthetic oligonucleotide
ugguacaaacuuaaggugu

SEQ ID NO: 1330159 - RNA, 19 nt, Artificial Sequence
  Description of Artificial Sequence: Synthetic oligonucleotide
aguaaguugguacaaacuu

SEQ ID NO: 1330160 - RNA, 19 nt, Artificial Sequence
  Description of Artificial Sequence: Synthetic oligonucleotide
caggaacaaaguaaguugg

SEQ ID NO: 1330161 - RNA, 19 nt, Artificial Sequence
  Description of Artificial Sequence: Synthetic oligonucleotide
cauugaccacccuugaugg

SEQ ID NO: 1330162 - RNA, 19 nt, Artificial Sequence
  Description of Artificial Sequence: Synthetic oligonucleotide
agccauuucauaaaugacg

SEQ ID NO: 1330163 - RNA, 19 nt, Artificial Sequence
  Description of Artificial Sequence: Synthetic oligonucleotide
cuacuuaccaauccagagg

SEQ ID NO: 1330164 - RNA, 19 nt, Artificial Sequence
  Description of Artificial Sequence: Synthetic oligonucleotide
gcaagcuaaauacacacgg

SEQ ID NO: 1330165 - RNA, 19 nt, Artificial Sequence
  Description of Artificial Sequence: Synthetic oligonucleotide
aaugcaccaauccuagggu

SEQ ID NO: 1330166 - RNA, 19 nt, Artificial Sequence
  Description of Artificial Sequence: Synthetic oligonucleotide
uuguugauuaggaugugga

SEQ ID NO: 1330167 - RNA, 19 nt, Artificial Sequence
  Description of Artificial Sequence: Synthetic oligonucleotide
aagguguuuagaggcaccc

SEQ ID NO: 1330168 - RNA, 19 nt, Artificial Sequence
  Description of Artificial Sequence: Synthetic oligonucleotide
aaaccacuagaaauguugg

SEQ ID NO: 1330169 - RNA, 19 nt, Artificial Sequence
  Description of Artificial Sequence: Synthetic oligonucleotide
aauccuaggguuuccauuu

SEQ ID NO: 1330170 - RNA, 19 nt, Artificial Sequence
  Description of Artificial Sequence: Synthetic oligonucleotide
auaggcaagaccugcacug

SEQ ID NO: 1330171 - RNA, 19 nt, Artificial Sequence
  Description of Artificial Sequence: Synthetic oligonucleotide
ucucauuacgaccuuggcu

SEQ ID NO: 1330172 - RNA, 19 nt, Artificial Sequence
  Description of Artificial Sequence: Synthetic oligonucleotide
uacugucucauuacgaccu

SEQ ID NO: 1330173 - RNA, 19 nt, Artificial Sequence
  Description of Artificial Sequence: Synthetic oligonucleotide
aauagacuugguaucagcu

SEQ ID NO: 1330174 - RNA, 19 nt, Artificial Sequence
  Description of Artificial Sequence: Synthetic oligonucleotide
ucuuuugaguccaaaccac

SEQ ID NO: 1330175 - RNA, 19 nt, Artificial Sequence
  Description of Artificial Sequence: Synthetic oligonucleotide
agaggucauaugaaggucc

SEQ ID NO: 1330176 - RNA, 19 nt, Artificial Sequence
  Description of Artificial Sequence: Synthetic oligonucleotide
ugggguucaacugagguug

SEQ ID NO: 1330177 - RNA, 19 nt, Artificial Sequence
  Description of Artificial Sequence: Synthetic oligonucleotide
uguugauuaggauguggag

SEQ ID NO: 1330178 - RNA, 19 nt, Artificial Sequence
  Description of Artificial Sequence: Synthetic oligonucleotide
aauaggcaagaccugcacu

SEQ ID NO: 1330179 - RNA, 19 nt, Artificial Sequence
  Description of Artificial Sequence: Synthetic oligonucleotide
aggaguagcuuuccaaagg

SEQ ID NO: 1330180 - RNA, 19 nt, Artificial Sequence
  Description of Artificial Sequence: Synthetic oligonucleotide
uuugaguccaaaccacuac

SEQ ID NO: 1330181 - RNA, 19 nt, Artificial Sequence
  Description of Artificial Sequence: Synthetic oligonucleotide
auaugaagguccucuaucu

SEQ ID NO: 1330182 - RNA, 19 nt, Artificial Sequence
  Description of Artificial Sequence: Synthetic oligonucleotide
aaaugacgagugccgaauc

SEQ ID NO: 1330183 - RNA, 19 nt, Artificial Sequence
  Description of Artificial Sequence: Synthetic oligonucleotide
cuaucuaguccaugaaacc

SEQ ID NO: 1330184 - RNA, 19 nt, Artificial Sequence
  Description of Artificial Sequence: Synthetic oligonucleotide
acuggauagauaccaagca

SEQ ID NO: 1330185 - RNA, 19 nt, Artificial Sequence
  Description of Artificial Sequence: Synthetic oligonucleotide
gccgaaucaaaucagaaug

SEQ ID NO: 1330186 - RNA, 19 nt, Artificial Sequence
  Description of Artificial Sequence: Synthetic oligonucleotide
uuagcaccggugacuaugg

SEQ ID NO: 1330187 - RNA, 19 nt, Artificial Sequence
  Description of Artificial Sequence: Synthetic oligonucleotide
uaucuaguccaugaaacca

SEQ ID NO: 1330188 - RNA, 19 nt, Artificial Sequence
  Description of Artificial Sequence: Synthetic oligonucleotide
uagaaauguuggcaggagc

SEQ ID NO: 1330189 - RNA, 19 nt, Artificial Sequence
  Description of Artificial Sequence: Synthetic oligonucleotide
caagcuaaauacacacggg

SEQ ID NO: 1330190 - RNA, 19 nt, Artificial Sequence
  Description of Artificial Sequence: Synthetic oligonucleotide
uucagacugacagauuuag

SEQ ID NO: 1330191 - RNA, 19 nt, Artificial Sequence
  Description of Artificial Sequence: Synthetic oligonucleotide
ucuaaguauucagauguug

SEQ ID NO: 1330192 - RNA, 19 nt, Artificial Sequence
  Description of Artificial Sequence: Synthetic oligonucleotide
cauugcaaugcaccaaucc

SEQ ID NO: 1330193 - RNA, 19 nt, Artificial Sequence
  Description of Artificial Sequence: Synthetic oligonucleotide
gaauagacuugguaucagc

SEQ ID NO: 1330194 - RNA, 19 nt, Artificial Sequence
  Description of Artificial Sequence: Synthetic oligonucleotide
ugugcucaagguuuuggcc

SEQ ID NO: 1330195 - RNA, 19 nt, Artificial Sequence
  Description of Artificial Sequence: Synthetic oligonucleotide
uguagaacuucuccccuug

SEQ ID NO: 1330196 - RNA, 19 nt, Artificial Sequence
  Description of Artificial Sequence: Synthetic oligonucleotide
uccucuaucuaguccauga

SEQ ID NO: 1330197 - RNA, 19 nt, Artificial Sequence
  Description of Artificial Sequence: Synthetic oligonucleotide
aggguuuccauuucccuag

SEQ ID NO: 1330198 - RNA, 19 nt, Artificial Sequence
  Description of Artificial Sequence: Synthetic oligonucleotide
agaugaugugccaaggagg

SEQ ID NO: 1330199 - RNA, 19 nt, Artificial Sequence
  Description of Artificial Sequence: Synthetic oligonucleotide
auauguugucacuccagag

SEQ ID NO: 1330200 - RNA, 19 nt, Artificial Sequence
  Description of Artificial Sequence: Synthetic oligonucleotide
aggagcuacaucuaaucca

SEQ ID NO: 1330201 - RNA, 19 nt, Artificial Sequence
  Description of Artificial Sequence: Synthetic oligonucleotide
aaugccuguguuagcaccg

SEQ ID NO: 1330202 - RNA, 19 nt, Artificial Sequence
  Description of Artificial Sequence: Synthetic oligonucleotide
aguacaggcucgucugagc

SEQ ID NO: 1330203 - RNA, 19 nt, Artificial Sequence
  Description of Artificial Sequence: Synthetic oligonucleotide
uugaguccaaaccacuacu

SEQ ID NO: 1330204 - RNA, 19 nt, Artificial Sequence
  Description of Artificial Sequence: Synthetic oligonucleotide
cucauuacgaccuuggcua

SEQ ID NO: 1330205 - RNA, 19 nt, Artificial Sequence
  Description of Artificial Sequence: Synthetic oligonucleotide
uacgaccuuggcuagagac

SEQ ID NO: 1330206 - RNA, 19 nt, Artificial Sequence
  Description of Artificial Sequence: Synthetic oligonucleotide
cuuaccaauccagagggag

SEQ ID NO: 1330207 - RNA, 19 nt, Artificial Sequence
  Description of Artificial Sequence: Synthetic oligonucleotide
aguuuccuuaccaagaccu

SEQ ID NO: 1330208 - RNA, 19 nt, Artificial Sequence
  Description of Artificial Sequence: Synthetic oligonucleotide
acgagugccgaaucaaauc

SEQ ID NO: 1330209 - RNA, 19 nt, Artificial Sequence
  Description of Artificial Sequence: Synthetic oligonucleotide
ugagauuuaacuggauaga

SEQ ID NO: 1330210 - RNA, 19 nt, Artificial Sequence
  Description of Artificial Sequence: Synthetic oligonucleotide
aaggcucgaauagacuugg

SEQ ID NO: 1330211 - RNA, 19 nt, Artificial Sequence
  Description of Artificial Sequence: Synthetic oligonucleotide
aagaccugauuauucccug

SEQ ID NO: 1330212 - RNA, 19 nt, Artificial Sequence
  Description of Artificial Sequence: Synthetic oligonucleotide
gauuauucccugugguggc

SEQ ID NO: 1330213 - RNA, 19 nt, Artificial Sequence
  Description of Artificial Sequence: Synthetic oligonucleotide
aaaugggucaagaggaagu

SEQ ID NO: 1330214 - RNA, 19 nt, Artificial Sequence
  Description of Artificial Sequence: Synthetic oligonucleotide
ugaugugccaaggaggaca

SEQ ID NO: 1330215 - RNA, 19 nt, Artificial Sequence
  Description of Artificial Sequence: Synthetic oligonucleotide
agaccugcacuguagaacu

SEQ ID NO: 1330216 - RNA, 19 nt, Artificial Sequence
  Description of Artificial Sequence: Synthetic oligonucleotide
cuggauagauaccaagcag

SEQ ID NO: 1330217 - RNA, 19 nt, Artificial Sequence
  Description of Artificial Sequence: Synthetic oligonucleotide
uagauguacacaucccaca

SEQ ID NO: 1330218 - RNA, 19 nt, Artificial Sequence
  Description of Artificial Sequence: Synthetic oligonucleotide
agucccucaguuuuccuag

SEQ ID NO: 1330219 - RNA, 19 nt, Artificial Sequence
  Description of Artificial Sequence: Synthetic oligonucleotide
uauggaaguggauccuucc

SEQ ID NO: 1330220 - RNA, 19 nt, Artificial Sequence
  Description of Artificial Sequence: Synthetic oligonucleotide
acaggcucgucugagcucc

SEQ ID NO: 1330221 - RNA, 19 nt, Artificial Sequence
  Description of Artificial Sequence: Synthetic oligonucleotide
auggaaaaguguuucagua

SEQ ID NO: 1330222 - RNA, 19 nt, Artificial Sequence
  Description of Artificial Sequence: Synthetic oligonucleotide
gacaauaggcaagaccugc

SEQ ID NO: 1330223 - RNA, 19 nt, Artificial Sequence
  Description of Artificial Sequence: Synthetic oligonucleotide
gauuaggauguggaggugc

SEQ ID NO: 1330224 - RNA, 19 nt, Artificial Sequence
  Description of Artificial Sequence: Synthetic oligonucleotide
gguguuuagaggcacccgg

SEQ ID NO: 1330225 - RNA, 19 nt, Artificial Sequence
  Description of Artificial Sequence: Synthetic oligonucleotide
cauaugaagguccucuauc

SEQ ID NO: 1330226 - RNA, 19 nt, Artificial Sequence
  Description of Artificial Sequence: Synthetic oligonucleotide
agguccucuaucuagucca

SEQ ID NO: 1330227 - RNA, 19 nt, Artificial Sequence
  Description of Artificial Sequence: Synthetic oligonucleotide
auguuggcuaacuugcugu

SEQ ID NO: 1330228 - RNA, 19 nt, Artificial Sequence
  Description of Artificial Sequence: Synthetic oligonucleotide
uagauaccaagcaggcaag

SEQ ID NO: 1330229 - RNA, 19 nt, Artificial Sequence
  Description of Artificial Sequence: Synthetic oligonucleotide
aaagcuuuguugguuggga

SEQ ID NO: 1330230 - RNA, 19 nt, Artificial Sequence
  Description of Artificial Sequence: Synthetic oligonucleotide
gaauauguugucacuccag

SEQ ID NO: 1330231 - RNA, 19 nt, Artificial Sequence
  Description of Artificial Sequence: Synthetic oligonucleotide
uucuguuaaggcacaguac

SEQ ID NO: 1330232 - RNA, 19 nt, Artificial Sequence
  Description of Artificial Sequence: Synthetic oligonucleotide
gauguacacaucccacaag

SEQ ID NO: 1330233 - RNA, 19 nt, Artificial Sequence
  Description of Artificial Sequence: Synthetic oligonucleotide
uauggcuaccuucccagga

SEQ ID NO: 1330234 - RNA, 19 nt, Artificial Sequence
  Description of Artificial Sequence: Synthetic oligonucleotide
gaucgcaaccaucucagca

SEQ ID NO: 1330235 - RNA, 19 nt, Artificial Sequence
  Description of Artificial Sequence: Synthetic oligonucleotide
uuuagaggcacccggcaau

SEQ ID NO: 1330236 - RNA, 19 nt, Artificial Sequence
  Description of Artificial Sequence: Synthetic oligonucleotide
ugauucuugguguggccag

SEQ ID NO: 1330237 - RNA, 19 nt, Artificial Sequence
  Description of Artificial Sequence: Synthetic oligonucleotide
cucgcuagccaccuguucc

SEQ ID NO: 1330238 - RNA, 19 nt, Artificial Sequence
  Description of Artificial Sequence: Synthetic oligonucleotide
aggaaagcuuuguugguug

SEQ ID NO: 1330239 - RNA, 19 nt, Artificial Sequence
  Description of Artificial Sequence: Synthetic oligonucleotide
cucgaauagacuugguauc

SEQ ID NO: 1330240 - RNA, 19 nt, Artificial Sequence
  Description of Artificial Sequence: Synthetic oligonucleotide
uuuugaguccaaaccacua

SEQ ID NO: 1330241 - RNA, 19 nt, Artificial Sequence
  Description of Artificial Sequence: Synthetic oligonucleotide
uguuggggccacaaaggcc

SEQ ID NO: 1330242 - RNA, 19 nt, Artificial Sequence
  Description of Artificial Sequence: Synthetic oligonucleotide
agaggaagugacccaagug

SEQ ID NO: 1330243 - RNA, 19 nt, Artificial Sequence
  Description of Artificial Sequence: Synthetic oligonucleotide
ugccaaguggcaaucgcug

SEQ ID NO: 1330244 - RNA, 19 nt, Artificial Sequence
  Description of Artificial Sequence: Synthetic oligonucleotide
accugauuauucccugugg

SEQ ID NO: 1330245 - RNA, 19 nt, Artificial Sequence
  Description of Artificial Sequence: Synthetic oligonucleotide
uuccugagugaagagaaug

SEQ ID NO: 1330246 - RNA, 19 nt, Artificial Sequence
  Description of Artificial Sequence: Synthetic oligonucleotide
accacuacuuaccaaucca

SEQ ID NO: 1330247 - RNA, 19 nt, Artificial Sequence
  Description of Artificial Sequence: Synthetic oligonucleotide
gcaauggagcucuucaagg

SEQ ID NO: 1330248 - RNA, 19 nt, Artificial Sequence
  Description of Artificial Sequence: Synthetic oligonucleotide
uugcaaugcaccaauccua

SEQ ID NO: 1330249 - RNA, 19 nt, Artificial Sequence
  Description of Artificial Sequence: Synthetic oligonucleotide
aggggcacaucaucacucc

SEQ ID NO: 1330250 - RNA, 19 nt, Artificial Sequence
  Description of Artificial Sequence: Synthetic oligonucleotide
cugauuauucccuguggug

SEQ ID NO: 1330251 - RNA, 19 nt, Artificial Sequence
  Description of Artificial Sequence: Synthetic oligonucleotide
guaguaaacacuucagacu

SEQ ID NO: 1330252 - RNA, 19 nt, Artificial Sequence
  Description of Artificial Sequence: Synthetic oligonucleotide
ucuaguccaugaaaccacu

SEQ ID NO: 1330253 - RNA, 19 nt, Artificial Sequence
  Description of Artificial Sequence: Synthetic oligonucleotide
aaaggcucgaauagacuug

SEQ ID NO: 1330254 - RNA, 19 nt, Artificial Sequence
  Description of Artificial Sequence: Synthetic oligonucleotide
ucgaauagacuugguauca

SEQ ID NO: 1330255 - RNA, 19 nt, Artificial Sequence
  Description of Artificial Sequence: Synthetic oligonucleotide
ugaagacuuuccucuaagu

SEQ ID NO: 1330256 - RNA, 19 nt, Artificial Sequence
  Description of Artificial Sequence: Synthetic oligonucleotide
ucauaugaagguccucuau

SEQ ID NO: 1330257 - RNA, 19 nt, Artificial Sequence
  Description of Artificial Sequence: Synthetic oligonucleotide
uuuccugauucuuggugug

SEQ ID NO: 1330258 - RNA, 19 nt, Artificial Sequence
  Description of Artificial Sequence: Synthetic oligonucleotide
agauguacacaucccacaa

SEQ ID NO: 1330259 - RNA, 19 nt, Artificial Sequence
  Description of Artificial Sequence: Synthetic oligonucleotide
gacugacagauuuagugaa

SEQ ID NO: 1330260 - RNA, 19 nt, Artificial Sequence
  Description of Artificial Sequence: Synthetic oligonucleotide
gauaccaagcaggcaaggc

SEQ ID NO: 1330261 - RNA, 19 nt, Artificial Sequence
  Description of Artificial Sequence: Synthetic oligonucleotide
gugaagacuuuccucuaag

SEQ ID NO: 1330262 - RNA, 19 nt, Artificial Sequence
  Description of Artificial Sequence: Synthetic oligonucleotide
uagagacccaugccaagug

SEQ ID NO: 1330263 - RNA, 19 nt, Artificial Sequence
  Description of Artificial Sequence: Synthetic oligonucleotide
uuaagguguuuagaggcac

SEQ ID NO: 1330264 - RNA, 19 nt, Artificial Sequence
  Description of Artificial Sequence: Synthetic oligonucleotide
cuguuaaggcacaguacag

SEQ ID NO: 1330265 - RNA, 19 nt, Artificial Sequence
  Description of Artificial Sequence: Synthetic oligonucleotide
gaccugauuauucccugug

SEQ ID NO: 1330266 - RNA, 19 nt, Artificial Sequence
  Description of Artificial Sequence: Synthetic oligonucleotide
auuacgaccuuggcuagag

SEQ ID NO: 1330267 - RNA, 19 nt, Artificial Sequence
  Description of Artificial Sequence: Synthetic oligonucleotide
agcuacaucuaauccacau

SEQ ID NO: 1330268 - RNA, 19 nt, Artificial Sequence
  Description of Artificial Sequence: Synthetic oligonucleotide
guuagcaccggugacuaug

SEQ ID NO: 1330269 - RNA, 19 nt, Artificial Sequence
  Description of Artificial Sequence: Synthetic oligonucleotide
cagguuauggaaguggauc

SEQ ID NO: 1330270 - RNA, 19 nt, Artificial Sequence
  Description of Artificial Sequence: Synthetic oligonucleotide
uaaaugacgagugccgaau

SEQ ID NO: 1330271 - RNA, 19 nt, Artificial Sequence
  Description of Artificial Sequence: Synthetic oligonucleotide
ugccgaaucaaaucagaau

SEQ ID NO: 1330272 - RNA, 19 nt, Artificial Sequence
  Description of Artificial Sequence: Synthetic oligonucleotide
gacaguuuagcuuuauuuu

SEQ ID NO: 1330273 - RNA, 19 nt, Artificial Sequence
  Description of Artificial Sequence: Synthetic oligonucleotide
aguggcaaucgcugaagug

SEQ ID NO: 1330274 - RNA, 19 nt, Artificial Sequence
  Description of Artificial Sequence: Synthetic oligonucleotide
cucaagaccuucuguuaag

SEQ ID NO: 1330275 - RNA, 19 nt, Artificial Sequence
  Description of Artificial Sequence: Synthetic oligonucleotide
ucauuacgaccuuggcuag

SEQ ID NO: 1330276 - RNA, 19 nt, Artificial Sequence
  Description of Artificial Sequence: Synthetic oligonucleotide
gguuuuggccacuuugaag

SEQ ID NO: 1330277 - RNA, 19 nt, Artificial Sequence
  Description of Artificial Sequence: Synthetic oligonucleotide
aaacuucauagagaaggaa

SEQ ID NO: 1330278 - RNA, 19 nt, Artificial Sequence
  Description of Artificial Sequence: Synthetic oligonucleotide
guggcaaucgcugaaguga

SEQ ID NO: 1330279 - RNA, 19 nt, Artificial Sequence
  Description of Artificial Sequence: Synthetic oligonucleotide
caggucuuuagcagucucc

SEQ ID NO: 1330280 - RNA, 19 nt, Artificial Sequence
  Description of Artificial Sequence: Synthetic oligonucleotide
auaaaugacgagugccgaa

SEQ ID NO: 1330281 - RNA, 19 nt, Artificial Sequence
  Description of Artificial Sequence: Synthetic oligonucleotide
auagacuugguaucagcua

SEQ ID NO: 1330282 - RNA, 19 nt, Artificial Sequence
  Description of Artificial Sequence: Synthetic oligonucleotide
auugaccacccuugauggg

SEQ ID NO: 1330283 - RNA, 19 nt, Artificial Sequence
  Description of Artificial Sequence: Synthetic oligonucleotide
uucccuaggaguagcuuuc

SEQ ID NO: 1330284 - RNA, 19 nt, Artificial Sequence
  Description of Artificial Sequence: Synthetic oligonucleotide
uaugaagguccucuaucua

SEQ ID NO: 1330285 - RNA, 19 nt, Artificial Sequence
  Description of Artificial Sequence: Synthetic oligonucleotide
uauucagauguuggggcca

SEQ ID NO: 1330286 - RNA, 19 nt, Artificial Sequence
  Description of Artificial Sequence: Synthetic oligonucleotide
uggcaaucgcugaagugac

SEQ ID NO: 1330287 - RNA, 19 nt, Artificial Sequence
  Description of Artificial Sequence: Synthetic oligonucleotide
gugcucaagguuuuggcca

SEQ ID NO: 1330288 - RNA, 19 nt, Artificial Sequence
  Description of Artificial Sequence: Synthetic oligonucleotide
aguuccugagugaagagaa

SEQ ID NO: 1330289 - RNA, 19 nt, Artificial Sequence
  Description of Artificial Sequence: Synthetic oligonucleotide
uggacauggaaaaguguuu

SEQ ID NO: 1330290 - RNA, 19 nt, Artificial Sequence
  Description of Artificial Sequence: Synthetic oligonucleotide
uuccuuaccaagaccugau

SEQ ID NO: 1330291 - RNA, 19 nt, Artificial Sequence
  Description of Artificial Sequence: Synthetic oligonucleotide
agcaccggugacuauggcu

SEQ ID NO: 1330292 - RNA, 19 nt, Artificial Sequence
  Description of Artificial Sequence: Synthetic oligonucleotide
gcuacugucucauuacgac

SEQ ID NO: 1330293 - RNA, 19 nt, Artificial Sequence
  Description of Artificial Sequence: Synthetic oligonucleotide
agaaaaguugccacagcca

SEQ ID NO: 1330294 - RNA, 19 nt, Artificial Sequence
  Description of Artificial Sequence: Synthetic oligonucleotide
cuaggaguagcuuuccaaa

SEQ ID NO: 1330295 - RNA, 19 nt, Artificial Sequence
  Description of Artificial Sequence: Synthetic oligonucleotide
cuagaaauguuggcaggag

SEQ ID NO: 1330296 - RNA, 19 nt, Artificial Sequence
  Description of Artificial Sequence: Synthetic oligonucleotide
aggaucgcaaccaucucag

SEQ ID NO: 1330297 - RNA, 19 nt, Artificial Sequence
  Description of Artificial Sequence: Synthetic oligonucleotide
ggguggacagaauauguug

SEQ ID NO: 1330298 - RNA, 19 nt, Artificial Sequence
  Description of Artificial Sequence: Synthetic oligonucleotide
cuuaagguguuuagaggca

SEQ ID NO: 1330299 - RNA, 19 nt, Artificial Sequence
  Description of Artificial Sequence: Synthetic oligonucleotide
caauaggcaagaccugcac

SEQ ID NO: 1330300 - RNA, 19 nt, Artificial Sequence
  Description of Artificial Sequence: Synthetic oligonucleotide
aaggaaagcuuuguugguu

SEQ ID NO: 1330301 - RNA, 19 nt, Artificial Sequence
  Description of Artificial Sequence: Synthetic oligonucleotide
cuugaugaaaaggaagaaa

SEQ ID NO: 1330302 - RNA, 19 nt, Artificial Sequence
  Description of Artificial Sequence: Synthetic oligonucleotide
ggaaguggauccuucccag

SEQ ID NO: 1330303 - RNA, 19 nt, Artificial Sequence
  Description of Artificial Sequence: Synthetic oligonucleotide
guuggcaggagcaggaaca

SEQ ID NO: 1330304 - RNA, 19 nt, Artificial Sequence
  Description of Artificial Sequence: Synthetic oligonucleotide
uccccuuucugcacauccc

SEQ ID NO: 1330305 - RNA, 19 nt, Artificial Sequence
  Description of Artificial Sequence: Synthetic oligonucleotide
uuccugauucuuggugugg

SEQ ID NO: 1330306 - RNA, 19 nt, Artificial Sequence
  Description of Artificial Sequence: Synthetic oligonucleotide
ccacuagaaauguuggcag

SEQ ID NO: 1330307 - RNA, 19 nt, Artificial Sequence
  Description of Artificial Sequence: Synthetic oligonucleotide
ggauagauaccaagcaggc

SEQ ID NO: 1330308 - RNA, 19 nt, Artificial Sequence
  Description of Artificial Sequence: Synthetic oligonucleotide
caaucgcugaagugacugc

SEQ ID NO: 1330309 - RNA, 19 nt, Artificial Sequence
  Description of Artificial Sequence: Synthetic oligonucleotide
caguaguaaacacuucaga

SEQ ID NO: 1330310 - RNA, 19 nt, Artificial Sequence
  Description of Artificial Sequence: Synthetic oligonucleotide
ucgcuagccaccuguuccc

SEQ ID NO: 1330311 - RNA, 19 nt, Artificial Sequence
  Description of Artificial Sequence: Synthetic oligonucleotide
ggagcuacaucuaauccac

SEQ ID NO: 1330312 - RNA, 19 nt, Artificial Sequence
  Description of Artificial Sequence: Synthetic oligonucleotide
agauaccaagcaggcaagg

SEQ ID NO: 1330313 - RNA, 19 nt, Artificial Sequence
  Description of Artificial Sequence: Synthetic oligonucleotide
ugaaaccacuagaaauguu

SEQ ID NO: 1330314 - RNA, 19 nt, Artificial Sequence
  Description of Artificial Sequence: Synthetic oligonucleotide
cuauggcuaccuucccagg

SEQ ID NO: 1330315 - RNA, 19 nt, Artificial Sequence
  Description of Artificial Sequence: Synthetic oligonucleotide
cacccggcaauguacugag

SEQ ID NO: 1330316 - RNA, 19 nt, Artificial Sequence
  Description of Artificial Sequence: Synthetic oligonucleotide
ggugacuauggcuaccuuc

SEQ ID NO: 1330317 - RNA, 19 nt, Artificial Sequence
  Description of Artificial Sequence: Synthetic oligonucleotide
cuaacuugcugugacaaua

SEQ ID NO: 1330318 - RNA, 19 nt, Artificial Sequence
  Description of Artificial Sequence: Synthetic oligonucleotide
guggucuggacauggaaaa

SEQ ID NO: 1330319 - RNA, 19 nt, Artificial Sequence
  Description of Artificial Sequence: Synthetic oligonucleotide
uguugucacuccagagccu

SEQ ID NO: 1330320 - RNA, 19 nt, Artificial Sequence
  Description of Artificial Sequence: Synthetic oligonucleotide
gagugccgaaucaaaucag

SEQ ID NO: 1330321 - RNA, 19 nt, Artificial Sequence
  Description of Artificial Sequence: Synthetic oligonucleotide
uggaguaggggcacaucau

SEQ ID NO: 1330322 - RNA, 19 nt, Artificial Sequence
  Description of Artificial Sequence: Synthetic oligonucleotide
ggaggagcuacaucuaauc

SEQ ID NO: 1330323 - RNA, 19 nt, Artificial Sequence
  Description of Artificial Sequence: Synthetic oligonucleotide
ugccacuuagggucucaag

SEQ ID NO: 1330324 - RNA, 19 nt, Artificial Sequence
  Description of Artificial Sequence: Synthetic oligonucleotide
gaagguccucuaucuaguc

SEQ ID NO: 1330325 - RNA, 19 nt, Artificial Sequence
  Description of Artificial Sequence: Synthetic oligonucleotide
gucucauuacgaccuuggc

SEQ ID NO: 1330326 - RNA, 19 nt, Artificial Sequence
  Description of Artificial Sequence: Synthetic oligonucleotide
cuuaccaagaccugauuau

SEQ ID NO: 1330327 - RNA, 19 nt, Artificial Sequence
  Description of Artificial Sequence: Synthetic oligonucleotide
uuaccaagaccugauuauu

SEQ ID NO: 1330328 - RNA, 19 nt, Artificial Sequence
  Description of Artificial Sequence: Synthetic oligonucleotide
ggacauuagauguacacau

SEQ ID NO: 1330329 - RNA, 19 nt, Artificial Sequence
  Description of Artificial Sequence: Synthetic oligonucleotide
auggacugugccagggugg

SEQ ID NO: 1330330 - RNA, 19 nt, Artificial Sequence
  Description of Artificial Sequence: Synthetic oligonucleotide
uccuagcagcaaauggguc

SEQ ID NO: 1330331 - RNA, 19 nt, Artificial Sequence
  Description of Artificial Sequence: Synthetic oligonucleotide
gacugugccaggguggaca

SEQ ID NO: 1330332 - RNA, 19 nt, Artificial Sequence
  Description of Artificial Sequence: Synthetic oligonucleotide
cacuacuuaccaauccaga

SEQ ID NO: 1330333 - RNA, 19 nt, Artificial Sequence
  Description of Artificial Sequence: Synthetic oligonucleotide
guaaguugguacaaacuua

SEQ ID NO: 1330334 - RNA, 19 nt, Artificial Sequence
  Description of Artificial Sequence: Synthetic oligonucleotide
cugacagauuuagugaaga

SEQ ID NO: 1330335 - RNA, 19 nt, Artificial Sequence
  Description of Artificial Sequence: Synthetic oligonucleotide
cucuaucuaguccaugaaa

SEQ ID NO: 1330336 - RNA, 19 nt, Artificial Sequence
  Description of Artificial Sequence: Synthetic oligonucleotide
agauuuaacuggauagaua

SEQ ID NO: 1330337 - RNA, 19 nt, Artificial Sequence
  Description of Artificial Sequence: Synthetic oligonucleotide
gucaagaggaagugaccca

SEQ ID NO: 1330338 - RNA, 19 nt, Artificial Sequence
  Description of Artificial Sequence: Synthetic oligonucleotide
cauaaaugacgagugccga

SEQ ID NO: 1330339 - RNA, 19 nt, Artificial Sequence
  Description of Artificial Sequence: Synthetic oligonucleotide
agugccgaaucaaaucaga

SEQ ID NO: 1330340 - RNA, 19 nt, Artificial Sequence
  Description of Artificial Sequence: Synthetic oligonucleotide
uaaauacacacgggcuccu

SEQ ID NO: 1330341 - RNA, 19 nt, Artificial Sequence
  Description of Artificial Sequence: Synthetic oligonucleotide
gaucucgcuagccaccugu

SEQ ID NO: 1330342 - RNA, 19 nt, Artificial Sequence
  Description of Artificial Sequence: Synthetic oligonucleotide
ggcaagcuaaauacacacg

SEQ ID NO: 1330343 - RNA, 19 nt, Artificial Sequence
  Description of Artificial Sequence: Synthetic oligonucleotide
ccaagaccugauuauuccc

SEQ ID NO: 1330344 - RNA, 19 nt, Artificial Sequence
  Description of Artificial Sequence: Synthetic oligonucleotide
agguguuuagaggcacccg

SEQ ID NO: 1330345 - RNA, 19 nt, Artificial Sequence
  Description of Artificial Sequence: Synthetic oligonucleotide
caggaucgcaaccaucuca

SEQ ID NO: 1330346 - RNA, 19 nt, Artificial Sequence
  Description of Artificial Sequence: Synthetic oligonucleotide
guuggggccacaaaggccu

SEQ ID NO: 1330347 - RNA, 19 nt, Artificial Sequence
  Description of Artificial Sequence: Synthetic oligonucleotide
gaggcacccggcaauguac

SEQ ID NO: 1330348 - RNA, 19 nt, Artificial Sequence
  Description of Artificial Sequence: Synthetic oligonucleotide
uaucagcuagguccaguuu

SEQ ID NO: 1330349 - RNA, 19 nt, Artificial Sequence
  Description of Artificial Sequence: Synthetic oligonucleotide
guacugagauuuaacugga

SEQ ID NO: 1330350 - RNA, 19 nt, Artificial Sequence
  Description of Artificial Sequence: Synthetic oligonucleotide
uggcaaaggcucgaauaga

SEQ ID NO: 1330351 - RNA, 19 nt, Artificial Sequence
  Description of Artificial Sequence: Synthetic oligonucleotide
acaauaggcaagaccugca

SEQ ID NO: 1330352 - RNA, 19 nt, Artificial Sequence
  Description of Artificial Sequence: Synthetic oligonucleotide
ccucuaaguauucagaugu

SEQ ID NO: 1330353 - RNA, 19 nt, Artificial Sequence
  Description of Artificial Sequence: Synthetic oligonucleotide
uggcuaacuugcugugaca

SEQ ID NO: 1330354 - RNA, 19 nt, Artificial Sequence
  Description of Artificial Sequence: Synthetic oligonucleotide
uacugagauuuaacuggau

SEQ ID NO: 1330355 - RNA, 19 nt, Artificial Sequence
  Description of Artificial Sequence: Synthetic oligonucleotide
ccacuacuuaccaauccag

SEQ ID NO: 1330356 - RNA, 19 nt, Artificial Sequence
  Description of Artificial Sequence: Synthetic oligonucleotide
acacacgggcuccucuuug

SEQ ID NO: 1330357 - RNA, 19 nt, Artificial Sequence
  Description of Artificial Sequence: Synthetic oligonucleotide
guguuuagaggcacccggc

SEQ ID NO: 1330358 - RNA, 19 nt, Artificial Sequence
  Description of Artificial Sequence: Synthetic oligonucleotide
ugauuaggauguggaggug

SEQ ID NO: 1330359 - RNA, 19 nt, Artificial Sequence
  Description of Artificial Sequence: Synthetic oligonucleotide
guuuccuuaccaagaccug

SEQ ID NO: 1330360 - RNA, 19 nt, Artificial Sequence
  Description of Artificial Sequence: Synthetic oligonucleotide
cuguguuagcaccggugac

SEQ ID NO: 1330361 - RNA, 19 nt, Artificial Sequence
  Description of Artificial Sequence: Synthetic oligonucleotide
ggauccuucccagaugaug

SEQ ID NO: 1330362 - RNA, 19 nt, Artificial Sequence
  Description of Artificial Sequence: Synthetic oligonucleotide
ggcaaaggcucgaauagac

SEQ ID NO: 1330363 - RNA, 19 nt, Artificial Sequence
  Description of Artificial Sequence: Synthetic oligonucleotide
gagucccucaguuuuccua

SEQ ID NO: 1330364 - RNA, 19 nt, Artificial Sequence
  Description of Artificial Sequence: Synthetic oligonucleotide
acauugcaaugcaccaauc

SEQ ID NO: 1330365 - RNA, 19 nt, Artificial Sequence
  Description of Artificial Sequence: Synthetic oligonucleotide
augaugugccaaggaggac

SEQ ID NO: 1330366 - RNA, 19 nt, Artificial Sequence
  Description of Artificial Sequence: Synthetic oligonucleotide
caagaccugauuauucccu

SEQ ID NO: 1330367 - RNA, 19 nt, Artificial Sequence
  Description of Artificial Sequence: Synthetic oligonucleotide
accggugacuauggcuacc

SEQ ID NO: 1330368 - RNA, 19 nt, Artificial Sequence
  Description of Artificial Sequence: Synthetic oligonucleotide
cuaccuucccaggaagcug

SEQ ID NO: 1330369 - RNA, 19 nt, Artificial Sequence
  Description of Artificial Sequence: Synthetic oligonucleotide
cugcagucuuggaguaggg

SEQ ID NO: 1330370 - RNA, 19 nt, Artificial Sequence
  Description of Artificial Sequence: Synthetic oligonucleotide
cagaggucauaugaagguc

SEQ ID NO: 1330371 - RNA, 19 nt, Artificial Sequence
  Description of Artificial Sequence: Synthetic oligonucleotide
ggaggacacauugaccacc

SEQ ID NO: 1330372 - RNA, 19 nt, Artificial Sequence
  Description of Artificial Sequence: Synthetic oligonucleotide
uccuucccaaugccugugu

SEQ ID NO: 1330373 - RNA, 19 nt, Artificial Sequence
  Description of Artificial Sequence: Synthetic oligonucleotide
gcuagguccaguuuccuua

SEQ ID NO: 1330374 - RNA, 19 nt, Artificial Sequence
  Description of Artificial Sequence: Synthetic oligonucleotide
aguuuuccuagcagcaaau

SEQ ID NO: 1330375 - RNA, 19 nt, Artificial Sequence
  Description of Artificial Sequence: Synthetic oligonucleotide
ggaguaggggcacaucauc

SEQ ID NO: 1330376 - RNA, 19 nt, Artificial Sequence
  Description of Artificial Sequence: Synthetic oligonucleotide
uuacgaccuuggcuagaga

SEQ ID NO: 1330377 - RNA, 19 nt, Artificial Sequence
  Description of Artificial Sequence: Synthetic oligonucleotide
uacaggcucgucugagcuc

SEQ ID NO: 1330378 - RNA, 19 nt, Artificial Sequence
  Description of Artificial Sequence: Synthetic oligonucleotide
guacaggcucgucugagcu

SEQ ID NO: 1330379 - RNA, 19 nt, Artificial Sequence
  Description of Artificial Sequence: Synthetic oligonucleotide
acagccgccuggcuacugu

SEQ ID NO: 1330380 - RNA, 19 nt, Artificial Sequence
  Description of Artificial Sequence: Synthetic oligonucleotide
gcuagagacccaugccaag

SEQ ID NO: 1330381 - RNA, 19 nt, Artificial Sequence
  Description of Artificial Sequence: Synthetic oligonucleotide
aggucauaugaagguccuc

SEQ ID NO: 1330382 - RNA, 19 nt, Artificial Sequence
  Description of Artificial Sequence: Synthetic oligonucleotide
uacacacgggcuccucuuu

SEQ ID NO: 1330383 - RNA, 19 nt, Artificial Sequence
  Description of Artificial Sequence: Synthetic oligonucleotide
gcagaggucauaugaaggu

SEQ ID NO: 1330384 - RNA, 19 nt, Artificial Sequence
  Description of Artificial Sequence: Synthetic oligonucleotide
augccuguguuagcaccgg

SEQ ID NO: 1330385 - RNA, 19 nt, Artificial Sequence
  Description of Artificial Sequence: Synthetic oligonucleotide
ggucauaugaagguccucu

SEQ ID NO: 1330386 - RNA, 19 nt, Artificial Sequence
  Description of Artificial Sequence: Synthetic oligonucleotide
ggaacaaaguaaguuggua

SEQ ID NO: 1330387 - RNA, 19 nt, Artificial Sequence
  Description of Artificial Sequence: Synthetic oligonucleotide
accaauccuaggguuucca

SEQ ID NO: 1330388 - RNA, 19 nt, Artificial Sequence
  Description of Artificial Sequence: Synthetic oligonucleotide
uagcaccggugacuauggc

SEQ ID NO: 1330389 - RNA, 19 nt, Artificial Sequence
  Description of Artificial Sequence: Synthetic oligonucleotide
cuucauagagaaggaagcu

SEQ ID NO: 1330390 - RNA, 19 nt, Artificial Sequence
  Description of Artificial Sequence: Synthetic oligonucleotide
caagaccugcacuguagaa

SEQ ID NO: 1330391 - RNA, 19 nt, Artificial Sequence
  Description of Artificial Sequence: Synthetic oligonucleotide
cugucucauuacgaccuug

SEQ ID NO: 1330392 - RNA, 19 nt, Artificial Sequence
  Description of Artificial Sequence: Synthetic oligonucleotide
uguugguugggaggagcua

SEQ ID NO: 1330393 - RNA, 19 nt, Artificial Sequence
  Description of Artificial Sequence: Synthetic oligonucleotide
caguaggucacagcugaca

SEQ ID NO: 1330394 - RNA, 19 nt, Artificial Sequence
  Description of Artificial Sequence: Synthetic oligonucleotide
guaucagcuagguccaguu

SEQ ID NO: 1330395 - RNA, 19 nt, Artificial Sequence
  Description of Artificial Sequence: Synthetic oligonucleotide
uugauggggccgagucccu

SEQ ID NO: 1330396 - RNA, 19 nt, Artificial Sequence
  Description of Artificial Sequence: Synthetic oligonucleotide
cccuugcagguuauggaag

SEQ ID NO: 1330397 - RNA, 19 nt, Artificial Sequence
  Description of Artificial Sequence: Synthetic oligonucleotide
ccaauccagagggaggccc

SEQ ID NO: 1330398 - RNA, 19 nt, Artificial Sequence
  Description of Artificial Sequence: Synthetic oligonucleotide
gaccacccuugauggggcc

SEQ ID NO: 1330399 - RNA, 19 nt, Artificial Sequence
  Description of Artificial Sequence: Synthetic oligonucleotide
cccaguaggucacagcuga

SEQ ID NO: 1330400 - RNA, 19 nt, Artificial Sequence
  Description of Artificial Sequence: Synthetic oligonucleotide
ggcccaguaggucacagcu

SEQ ID NO: 1330401 - RNA, 19 nt, Artificial Sequence
  Description of Artificial Sequence: Synthetic oligonucleotide
acugucucauuacgaccuu

SEQ ID NO: 1330402 - RNA, 19 nt, Artificial Sequence
  Description of Artificial Sequence: Synthetic oligonucleotide
ggcucgaauagacuuggua

SEQ ID NO: 1330403 - RNA, 19 nt, Artificial Sequence
  Description of Artificial Sequence: Synthetic oligonucleotide
ccuguguuagcaccgguga

SEQ ID NO: 1330404 - RNA, 19 nt, Artificial Sequence
  Description of Artificial Sequence: Synthetic oligonucleotide
gugccgaaucaaaucagaa

SEQ ID NO: 1330405 - RNA, 19 nt, Artificial Sequence
  Description of Artificial Sequence: Synthetic oligonucleotide
gguggacagaauauguugu

SEQ ID NO: 1330406 - RNA, 19 nt, Artificial Sequence
  Description of Artificial Sequence: Synthetic oligonucleotide
ggcuaacuugcugugacaa

SEQ ID NO: 1330407 - RNA, 19 nt, Artificial Sequence
  Description of Artificial Sequence: Synthetic oligonucleotide
aggguggacagaauauguu

SEQ ID NO: 1330408 - RNA, 19 nt, Artificial Sequence
  Description of Artificial Sequence: Synthetic oligonucleotide
gcaagaccugcacuguaga

SEQ ID NO: 1330409 - RNA, 19 nt, Artificial Sequence
  Description of Artificial Sequence: Synthetic oligonucleotide
gaauguuggcuaacuugcu

SEQ ID NO: 1330410 - RNA, 19 nt, Artificial Sequence
  Description of Artificial Sequence: Synthetic oligonucleotide
gaggucauaugaagguccu

SEQ ID NO: 1330411 - RNA, 19 nt, Artificial Sequence
  Description of Artificial Sequence: Synthetic oligonucleotide
cgagugccgaaucaaauca

SEQ ID NO: 1330412 - RNA, 19 nt, Artificial Sequence
  Description of Artificial Sequence: Synthetic oligonucleotide
uggauccuucccagaugau

SEQ ID NO: 1330413 - RNA, 19 nt, Artificial Sequence
  Description of Artificial Sequence: Synthetic oligonucleotide
ccuugauggggccgagucc

SEQ ID NO: 1330414 - RNA, 19 nt, Artificial Sequence
  Description of Artificial Sequence: Synthetic oligonucleotide
ccuaggaguagcuuuccaa

SEQ ID NO: 1330415 - RNA, 19 nt, Artificial Sequence
  Description of Artificial Sequence: Synthetic oligonucleotide
ggaagcucaucuguggucu

SEQ ID NO: 1330416 - RNA, 19 nt, Artificial Sequence
  Description of Artificial Sequence: Synthetic oligonucleotide
gggucaagaggaagugacc

SEQ ID NO: 1330417 - RNA, 19 nt, Artificial Sequence
  Description of Artificial Sequence: Synthetic oligonucleotide
caccggugacuauggcuac

SEQ ID NO: 1330418 - RNA, 19 nt, Artificial Sequence
  Description of Artificial Sequence: Synthetic oligonucleotide
ugguaucagcuagguccag

SEQ ID NO: 1330419 - RNA, 19 nt, Artificial Sequence
  Description of Artificial Sequence: Synthetic oligonucleotide
uguuagcaccggugacuau

SEQ ID NO: 1330420 - RNA, 19 nt, Artificial Sequence
  Description of Artificial Sequence: Synthetic oligonucleotide
caauccuaggguuuccauu

SEQ ID NO: 1330421 - RNA, 19 nt, Artificial Sequence
  Description of Artificial Sequence: Synthetic oligonucleotide
cuagagacccaugccaagu

SEQ ID NO: 1330422 - RNA, 19 nt, Artificial Sequence
  Description of Artificial Sequence: Synthetic oligonucleotide
ccuuaccaagaccugauua

SEQ ID NO: 1330423 - RNA, 19 nt, Artificial Sequence
  Description of Artificial Sequence: Synthetic oligonucleotide
gcaauguacugagauuuaa

SEQ ID NO: 1330424 - RNA, 19 nt, Artificial Sequence
  Description of Artificial Sequence: Synthetic oligonucleotide
acuuaccaauccagaggga

SEQ ID NO: 1330425 - RNA, 19 nt, Artificial Sequence
  Description of Artificial Sequence: Synthetic oligonucleotide
uugucacuccagagccuuu

SEQ ID NO: 1330426 - RNA, 19 nt, Artificial Sequence
  Description of Artificial Sequence: Synthetic oligonucleotide
ggcuacugucucauuacga

SEQ ID NO: 1330427 - RNA, 19 nt, Artificial Sequence
  Description of Artificial Sequence: Synthetic oligonucleotide
ggaucgcaaccaucucagc

SEQ ID NO: 1330428 - RNA, 19 nt, Artificial Sequence
  Description of Artificial Sequence: Synthetic oligonucleotide
gccuguguuagcaccggug

SEQ ID NO: 1330429 - RNA, 19 nt, Artificial Sequence
  Description of Artificial Sequence: Synthetic oligonucleotide
guccucuaucuaguccaug

SEQ ID NO: 1330430 - RNA, 19 nt, Artificial Sequence
  Description of Artificial Sequence: Synthetic oligonucleotide
ggcuaccuucccaggaagc

SEQ ID NO: 1330431 - RNA, 19 nt, Artificial Sequence
  Description of Artificial Sequence: Synthetic oligonucleotide
ugauggggccgagucccuc

SEQ ID NO: 1330432 - RNA, 19 nt, Artificial Sequence
  Description of Artificial Sequence: Synthetic oligonucleotide
ggcucgucugagcucccug

SEQ ID NO: 1330433 - RNA, 19 nt, Artificial Sequence
  Description of Artificial Sequence: Synthetic oligonucleotide
ccugauuauucccuguggu

SEQ ID NO: 1330434 - RNA, 19 nt, Artificial Sequence
  Description of Artificial Sequence: Synthetic oligonucleotide
gugguggcuuggaucucgc

SEQ ID NO: 1330435 - RNA, 19 nt, Artificial Sequence
  Description of Artificial Sequence: Synthetic oligonucleotide
cauuacgaccuuggcuaga

SEQ ID NO: 1330436 - RNA, 19 nt, Artificial Sequence
  Description of Artificial Sequence: Synthetic oligonucleotide
ggcuagagacccaugccaa

SEQ ID NO: 1330437 - RNA, 19 nt, Artificial Sequence
  Description of Artificial Sequence: Synthetic oligonucleotide
gcuacaucuaauccacauu

SEQ ID NO: 1330438 - RNA, 19 nt, Artificial Sequence
  Description of Artificial Sequence: Synthetic oligonucleotide
cgaaucaaaucagaaugga

SEQ ID NO: 1330439 - RNA, 19 nt, Artificial Sequence
  Description of Artificial Sequence: Synthetic oligonucleotide
cugggguucaacugagguu

SEQ ID NO: 1330440 - RNA, 19 nt, Artificial Sequence
  Description of Artificial Sequence: Synthetic oligonucleotide
cgaauagacuugguaucag

SEQ ID NO: 1330441 - RNA, 19 nt, Artificial Sequence
  Description of Artificial Sequence: Synthetic oligonucleotide
ggcacccggcaauguacug

SEQ ID NO: 1330442 - RNA, 19 nt, Artificial Sequence
  Description of Artificial Sequence: Synthetic oligonucleotide
gcacaucccggcaagcuaa

SEQ ID NO: 1330443 - RNA, 19 nt, Artificial Sequence
  Description of Artificial Sequence: Synthetic oligonucleotide
ccaugccaaguggcaaucg

SEQ ID NO: 1330444 - RNA, 19 nt, Artificial Sequence
  Description of Artificial Sequence: Synthetic oligonucleotide
cuuuggcaaaggcucgaau

SEQ ID NO: 1330445 - RNA, 19 nt, Artificial Sequence
  Description of Artificial Sequence: Synthetic oligonucleotide
ccccuugcagguuauggaa

SEQ ID NO: 1330446 - RNA, 19 nt, Artificial Sequence
  Description of Artificial Sequence: Synthetic oligonucleotide
gguuauggaaguggauccu

SEQ ID NO: 1330447 - RNA, 19 nt, Artificial Sequence
  Description of Artificial Sequence: Synthetic oligonucleotide
gcaggaucgcaaccaucuc

SEQ ID NO: 1330448 - RNA, 19 nt, Artificial Sequence
  Description of Artificial Sequence: Synthetic oligonucleotide
gcacccggcaauguacuga

SEQ ID NO: 1330449 - RNA, 19 nt, Artificial Sequence
  Description of Artificial Sequence: Synthetic oligonucleotide
ccaaguggcaaucgcugaa

SEQ ID NO: 1330450 - RNA, 19 nt, Artificial Sequence
  Description of Artificial Sequence: Synthetic oligonucleotide
cacauugaccacccuugau

SEQ ID NO: 1330451 - RNA, 19 nt, Artificial Sequence
  Description of Artificial Sequence: Synthetic oligonucleotide
gggucucaagaccuucugu

SEQ ID NO: 1330452 - RNA, 19 nt, Artificial Sequence
  Description of Artificial Sequence: Synthetic oligonucleotide
gcaggcaaggcuccaaguu

SEQ ID NO: 1330453 - RNA, 19 nt, Artificial Sequence
  Description of Artificial Sequence: Synthetic oligonucleotide
ccgagucccucaguuuucc

SEQ ID NO: 1330454 - RNA, 19 nt, Artificial Sequence
  Description of Artificial Sequence: Synthetic oligonucleotide
ccuugcagguuauggaagu

SEQ ID NO: 1330455 - RNA, 19 nt, Artificial Sequence
  Description of Artificial Sequence: Synthetic oligonucleotide
cacaucccggcaagcuaaa

SEQ ID NO: 1330456 - RNA, 19 nt, Artificial Sequence
  Description of Artificial Sequence: Synthetic oligonucleotide
cugaagugacugccacuua

SEQ ID NO: 1330457 - RNA, 19 nt, Artificial Sequence
  Description of Artificial Sequence: Synthetic oligonucleotide
ccaguaggucacagcugac

SEQ ID NO: 1330458 - RNA, 19 nt, Artificial Sequence
  Description of Artificial Sequence: Synthetic oligonucleotide
aucucgcuagccaccuguu

SEQ ID NO: 1330459 - RNA, 19 nt, Artificial Sequence
  Description of Artificial Sequence: Synthetic oligonucleotide
gguaucagcuagguccagu

SEQ ID NO: 1330460 - RNA, 19 nt, Artificial Sequence
  Description of Artificial Sequence: Synthetic oligonucleotide
gggguucaacugagguugc

SEQ ID NO: 1330461 - RNA, 19 nt, Artificial Sequence
  Description of Artificial Sequence: Synthetic oligonucleotide
ggcaauguacugagauuua

SEQ ID NO: 1330462 - RNA, 19 nt, Artificial Sequence
  Description of Artificial Sequence: Synthetic oligonucleotide
gcccaguaggucacagcug

SEQ ID NO: 1330463 - RNA, 19 nt, Artificial Sequence
  Description of Artificial Sequence: Synthetic oligonucleotide
acccuugauggggccgagu

SEQ ID NO: 1330464 - RNA, 19 nt, Artificial Sequence
  Description of Artificial Sequence: Synthetic oligonucleotide
gcaaaggcucgaauagacu

SEQ ID NO: 1330465 - RNA, 19 nt, Artificial Sequence
  Description of Artificial Sequence: Synthetic oligonucleotide
gcuaacuugcugugacaau

SEQ ID NO: 1330466 - RNA, 19 nt, Artificial Sequence
  Description of Artificial Sequence: Synthetic oligonucleotide
cugcacaucccggcaagcu

SEQ ID NO: 1330467 - RNA, 19 nt, Artificial Sequence
  Description of Artificial Sequence: Synthetic oligonucleotide
gcucgucugagcucccugu

SEQ ID NO: 1330468 - RNA, 19 nt, Artificial Sequence
  Description of Artificial Sequence: Synthetic oligonucleotide
aggcucgaauagacuuggu

SEQ ID NO: 1330469 - RNA, 19 nt, Artificial Sequence
  Description of Artificial Sequence: Synthetic oligonucleotide
cacccuugauggggccgag

SEQ ID NO: 1330470 - RNA, 19 nt, Artificial Sequence
  Description of Artificial Sequence: Synthetic oligonucleotide
gugacccaagugguugacu

SEQ ID NO: 1330471 - RNA, 19 nt, Artificial Sequence
  Description of Artificial Sequence: Synthetic oligonucleotide
ccacauugcaaugcaccaa

SEQ ID NO: 1330472 - RNA, 19 nt, Artificial Sequence
  Description of Artificial Sequence: Synthetic oligonucleotide
cucgucugagcucccuguu

SEQ ID NO: 1330473 - RNA, 19 nt, Artificial Sequence
  Description of Artificial Sequence: Synthetic oligonucleotide
cggcaauguacugagauuu

SEQ ID NO: 1330474 - RNA, 19 nt, Artificial Sequence
  Description of Artificial Sequence: Synthetic oligonucleotide
ccugagugaagagaauguu

SEQ ID NO: 1330475 - RNA, 19 nt, Artificial Sequence
  Description of Artificial Sequence: Synthetic oligonucleotide
gcagguuauggaaguggau

SEQ ID NO: 1330476 - RNA, 19 nt, Artificial Sequence
  Description of Artificial Sequence: Synthetic oligonucleotide
ccaauccuaggguuuccau

SEQ ID NO: 1330477 - RNA, 19 nt, Artificial Sequence
  Description of Artificial Sequence: Synthetic oligonucleotide
cagcuagguccaguuuccu

SEQ ID NO: 1330478 - RNA, 19 nt, Artificial Sequence
  Description of Artificial Sequence: Synthetic oligonucleotide
cgcuagccaccuguucccc

SEQ ID NO: 1330479 - RNA, 19 nt, Artificial Sequence
  Description of Artificial Sequence: Synthetic oligonucleotide
ccggcaauguacugagauu

SEQ ID NO: 1330480 - RNA, 19 nt, Artificial Sequence
  Description of Artificial Sequence: Synthetic oligonucleotide
ccgccuggcuacugucuca

SEQ ID NO: 1330481 - RNA, 19 nt, Artificial Sequence
  Description of Artificial Sequence: Synthetic oligonucleotide
gguccucuaucuaguccau

SEQ ID NO: 1330482 - RNA, 19 nt, Artificial Sequence
  Description of Artificial Sequence: Synthetic oligonucleotide
ccggugacuauggcuaccu

SEQ ID NO: 1330483 - RNA, 19 nt, Artificial Sequence
  Description of Artificial Sequence: Synthetic oligonucleotide
agguugcaauggagcucuu

SEQ ID NO: 1330484 - RNA, 19 nt, Artificial Sequence
  Description of Artificial Sequence: Synthetic oligonucleotide
gcucccuguugaggggucu

SEQ ID NO: 1330485 - RNA, 19 nt, Artificial Sequence
  Description of Artificial Sequence: Synthetic oligonucleotide
cgagucccucaguuuuccu

SEQ ID NO: 1330486 - RNA, 19 nt, Artificial Sequence
  Description of Artificial Sequence: Synthetic oligonucleotide
aaccaaaauggucugacgc

SEQ ID NO: 1330487 - RNA, 19 nt, Artificial Sequence
  Description of Artificial Sequence: Synthetic oligonucleotide
auaaaaggcauccaguggg

SEQ ID NO: 1330488 - RNA, 19 nt, Artificial Sequence
  Description of Artificial Sequence: Synthetic oligonucleotide
uuuaugaaaguaauugcag

SEQ ID NO: 1330489 - RNA, 19 nt, Artificial Sequence
  Description of Artificial Sequence: Synthetic oligonucleotide
aaacacuaguacuggaggc

SEQ ID NO: 1330490 - RNA, 19 nt, Artificial Sequence
  Description of Artificial Sequence: Synthetic oligonucleotide
uuuaggauuucaaauaacu

SEQ ID NO: 1330491 - RNA, 19 nt, Artificial Sequence
  Description of Artificial Sequence: Synthetic oligonucleotide
uuacugauaacauauaaua

SEQ ID NO: 1330492 - RNA, 19 nt, Artificial Sequence
  Description of Artificial Sequence: Synthetic oligonucleotide
uauuauauccagaagucgu

SEQ ID NO: 1330493 - RNA, 19 nt, Artificial Sequence
  Description of Artificial Sequence: Synthetic oligonucleotide
uaagaaugagugccgaugg

SEQ ID NO: 1330494 - RNA, 19 nt, Artificial Sequence
  Description of Artificial Sequence: Synthetic oligonucleotide
cugaugaacauacucaucc

SEQ ID NO: 1330495 - RNA, 19 nt, Artificial Sequence
  Description of Artificial Sequence: Synthetic oligonucleotide
aaaaucuacuggaaguggc

SEQ ID NO: 1330496 - RNA, 19 nt, Artificial Sequence
  Description of Artificial Sequence: Synthetic oligonucleotide
uuagaguuguuauuuauga

SEQ ID NO: 1330497 - RNA, 19 nt, Artificial Sequence
  Description of Artificial Sequence: Synthetic oligonucleotide
ucuuguuggcguaagaaug

SEQ ID NO: 1330498 - RNA, 19 nt, Artificial Sequence
  Description of Artificial Sequence: Synthetic oligonucleotide
uaagcgauggagcuguggg

SEQ ID NO: 1330499 - RNA, 19 nt, Artificial Sequence
  Description of Artificial Sequence: Synthetic oligonucleotide
auguccaugagguuagccc

SEQ ID NO: 1330500 - RNA, 19 nt, Artificial Sequence
  Description of Artificial Sequence: Synthetic oligonucleotide
uuuagaguuguuauuuaug

SEQ ID NO: 1330501 - RNA, 19 nt, Artificial Sequence
  Description of Artificial Sequence: Synthetic oligonucleotide
ugcaguuccguuuugacca

SEQ ID NO: 1330502 - RNA, 19 nt, Artificial Sequence
  Description of Artificial Sequence: Synthetic oligonucleotide
ucugauuuaaggucucagg

SEQ ID NO: 1330503 - RNA, 19 nt, Artificial Sequence
  Description of Artificial Sequence: Synthetic oligonucleotide
acugauaacauauaauaaa

SEQ ID NO: 1330504 - RNA, 19 nt, Artificial Sequence
  Description of Artificial Sequence: Synthetic oligonucleotide
uaggauuucaaauaacuuc

SEQ ID NO: 1330505 - RNA, 19 nt, Artificial Sequence
  Description of Artificial Sequence: Synthetic oligonucleotide
cugauuuaaggucucaggg

SEQ ID NO: 1330506 - RNA, 19 nt, Artificial Sequence
  Description of Artificial Sequence: Synthetic oligonucleotide
aacaucaagcacuugcugu

SEQ ID NO: 1330507 - RNA, 19 nt, Artificial Sequence
  Description of Artificial Sequence: Synthetic oligonucleotide
aaucccuucaguaugucuc

SEQ ID NO: 1330508 - RNA, 19 nt, Artificial Sequence
  Description of Artificial Sequence: Synthetic oligonucleotide
aauaauguccaugagguua

SEQ ID NO: 1330509 - RNA, 19 nt, Artificial Sequence
  Description of Artificial Sequence: Synthetic oligonucleotide
uuauuauauccagaagucg

SEQ ID NO: 1330510 - RNA, 19 nt, Artificial Sequence
  Description of Artificial Sequence: Synthetic oligonucleotide
aaccgagauuccuaacugc

SEQ ID NO: 1330511 - RNA, 19 nt, Artificial Sequence
  Description of Artificial Sequence: Synthetic oligonucleotide
uccguuuugaccaagucuc

SEQ ID NO: 1330512 - RNA, 19 nt, Artificial Sequence
  Description of Artificial Sequence: Synthetic oligonucleotide
aauaaaggggugcucuuug

SEQ ID NO: 1330513 - RNA, 19 nt, Artificial Sequence
  Description of Artificial Sequence: Synthetic oligonucleotide
uugugaauugcuucuuucg

SEQ ID NO: 1330514 - RNA, 19 nt, Artificial Sequence
  Description of Artificial Sequence: Synthetic oligonucleotide
agaguuguuauuuaugaaa

SEQ ID NO: 1330515 - RNA, 19 nt, Artificial Sequence
  Description of Artificial Sequence: Synthetic oligonucleotide
uuaugaaaguaauugcagu

SEQ ID NO: 1330516 - RNA, 19 nt, Artificial Sequence
  Description of Artificial Sequence: Synthetic oligonucleotide
aaaccaaaauggucugacg

SEQ ID NO: 1330517 - RNA, 19 nt, Artificial Sequence
  Description of Artificial Sequence: Synthetic oligonucleotide
uggaguuuuauccuccagc

SEQ ID NO: 1330518 - RNA, 19 nt, Artificial Sequence
  Description of Artificial Sequence: Synthetic oligonucleotide
ucauuuaggauuucaaaua

SEQ ID NO: 1330519 - RNA, 19 nt, Artificial Sequence
  Description of Artificial Sequence: Synthetic oligonucleotide
aguacuggaggcuuaaaga

SEQ ID NO: 1330520 - RNA, 19 nt, Artificial Sequence
  Description of Artificial Sequence: Synthetic oligonucleotide
uuuuaugccacugagugau

SEQ ID NO: 1330521 - RNA, 19 nt, Artificial Sequence
  Description of Artificial Sequence: Synthetic oligonucleotide
acguugaccaaguccaggc

SEQ ID NO: 1330522 - RNA, 19 nt, Artificial Sequence
  Description of Artificial Sequence: Synthetic oligonucleotide
ugaaccgagauuccuaacu

SEQ ID NO: 1330523 - RNA, 19 nt, Artificial Sequence
  Description of Artificial Sequence: Synthetic oligonucleotide
uguccuugaaccgagauuc

SEQ ID NO: 1330524 - RNA, 19 nt, Artificial Sequence
  Description of Artificial Sequence: Synthetic oligonucleotide
uaaaaucuacuggaagugg

SEQ ID NO: 1330525 - RNA, 19 nt, Artificial Sequence
  Description of Artificial Sequence: Synthetic oligonucleotide
cuugacguugaccaagucc

SEQ ID NO: 1330526 - RNA, 19 nt, Artificial Sequence
  Description of Artificial Sequence: Synthetic oligonucleotide
cuaauaauguccaugaggu

SEQ ID NO: 1330527 - RNA, 19 nt, Artificial Sequence
  Description of Artificial Sequence: Synthetic oligonucleotide
aaaauggucugacgcucac

SEQ ID NO: 1330528 - RNA, 19 nt, Artificial Sequence
  Description of Artificial Sequence: Synthetic oligonucleotide
guacuggaggcuuaaagag

SEQ ID NO: 1330529 - RNA, 19 nt, Artificial Sequence
  Description of Artificial Sequence: Synthetic oligonucleotide
uaguacuggaggcuuaaag

SEQ ID NO: 1330530 - RNA, 19 nt, Artificial Sequence
  Description of Artificial Sequence: Synthetic oligonucleotide
ugccgauggaguuuuaucc

SEQ ID NO: 1330531 - RNA, 19 nt, Artificial Sequence
  Description of Artificial Sequence: Synthetic oligonucleotide
uggucugacgcucaccagg

SEQ ID NO: 1330532 - RNA, 19 nt, Artificial Sequence
  Description of Artificial Sequence: Synthetic oligonucleotide
ugauuuaaggucucaggga

SEQ ID NO: 1330533 - RNA, 19 nt, Artificial Sequence
  Description of Artificial Sequence: Synthetic oligonucleotide
uacugauaacauauaauaa

SEQ ID NO: 1330534 - RNA, 19 nt, Artificial Sequence
  Description of Artificial Sequence: Synthetic oligonucleotide
aauguccaugagguuagcc

SEQ ID NO: 1330535 - RNA, 19 nt, Artificial Sequence
  Description of Artificial Sequence: Synthetic oligonucleotide
accacgaccucauagucuc

SEQ ID NO: 1330536 - RNA, 19 nt, Artificial Sequence
  Description of Artificial Sequence: Synthetic oligonucleotide
ugugaauugcuucuuucgu

SEQ ID NO: 1330537 - RNA, 19 nt, Artificial Sequence
  Description of Artificial Sequence: Synthetic oligonucleotide
guuggcguaagaaugagug

SEQ ID NO: 1330538 - RNA, 19 nt, Artificial Sequence
  Description of Artificial Sequence: Synthetic oligonucleotide
ccuaauaauguccaugagg

SEQ ID NO: 1330539 - RNA, 19 nt, Artificial Sequence
  Description of Artificial Sequence: Synthetic oligonucleotide
ugauaauccuuacaggguu

SEQ ID NO: 1330540 - RNA, 19 nt, Artificial Sequence
  Description of Artificial Sequence: Synthetic oligonucleotide
aaagcucggaugauaacag

SEQ ID NO: 1330541 - RNA, 19 nt, Artificial Sequence
  Description of Artificial Sequence: Synthetic oligonucleotide
uuccguuuugaccaagucu

SEQ ID NO: 1330542 - RNA, 19 nt, Artificial Sequence
  Description of Artificial Sequence: Synthetic oligonucleotide
uuaggauuucaaauaacuu

SEQ ID NO: 1330543 - RNA, 19 nt, Artificial Sequence
  Description of Artificial Sequence: Synthetic oligonucleotide
aggaguguuuuccaaaaca

SEQ ID NO: 1330544 - RNA, 19 nt, Artificial Sequence
  Description of Artificial Sequence: Synthetic oligonucleotide
agggguugcuaugauaacc

SEQ ID NO: 1330545 - RNA, 19 nt, Artificial Sequence
  Description of Artificial Sequence: Synthetic oligonucleotide
aguaauugcaguuccguuu

SEQ ID NO: 1330546 - RNA, 19 nt, Artificial Sequence
  Description of Artificial Sequence: Synthetic oligonucleotide
uggcguaagaaugagugcc

SEQ ID NO: 1330547 - RNA, 19 nt, Artificial Sequence
  Description of Artificial Sequence: Synthetic oligonucleotide
uugucucucuaucuggaug

SEQ ID NO: 1330548 - RNA, 19 nt, Artificial Sequence
  Description of Artificial Sequence: Synthetic oligonucleotide
aaauucacaaccagcuuga

SEQ ID NO: 1330549 - RNA, 19 nt, Artificial Sequence
  Description of Artificial Sequence: Synthetic oligonucleotide
auuauauccagaagucguc

SEQ ID NO: 1330550 - RNA, 19 nt, Artificial Sequence
  Description of Artificial Sequence: Synthetic oligonucleotide
guugaaagcccaucuuuag

SEQ ID NO: 1330551 - RNA, 19 nt, Artificial Sequence
  Description of Artificial Sequence: Synthetic oligonucleotide
gaaaguaauugcaguuccg

SEQ ID NO: 1330552 - RNA, 19 nt, Artificial Sequence
  Description of Artificial Sequence: Synthetic oligonucleotide
uuauauccagaagucgucc

SEQ ID NO: 1330553 - RNA, 19 nt, Artificial Sequence
  Description of Artificial Sequence: Synthetic oligonucleotide
uaugcugccuggaaucgug

SEQ ID NO: 1330554 - RNA, 19 nt, Artificial Sequence
  Description of Artificial Sequence: Synthetic oligonucleotide
aauaaugggccuggcaacu

SEQ ID NO: 1330555 - RNA, 19 nt, Artificial Sequence
  Description of Artificial Sequence: Synthetic oligonucleotide
uacuggaaguggcauacca

SEQ ID NO: 1330556 - RNA, 19 nt, Artificial Sequence
  Description of Artificial Sequence: Synthetic oligonucleotide
gaaggcauaucaaaauuca

SEQ ID NO: 1330557 - RNA, 19 nt, Artificial Sequence
  Description of Artificial Sequence: Synthetic oligonucleotide
aaauggucugacgcucacc

SEQ ID NO: 1330558 - RNA, 19 nt, Artificial Sequence
  Description of Artificial Sequence: Synthetic oligonucleotide
auuuaggauuucaaauaac

SEQ ID NO: 1330559 - RNA, 19 nt, Artificial Sequence
  Description of Artificial Sequence: Synthetic oligonucleotide
uuaugcagaagcugaucug

SEQ ID NO: 1330560 - RNA, 19 nt, Artificial Sequence
  Description of Artificial Sequence: Synthetic oligonucleotide
guaagaaugagugccgaug

SEQ ID NO: 1330561 - RNA, 19 nt, Artificial Sequence
  Description of Artificial Sequence: Synthetic oligonucleotide
uucuaugcugccuggaauc

SEQ ID NO: 1330562 - RNA, 19 nt, Artificial Sequence
  Description of Artificial Sequence: Synthetic oligonucleotide
agguaaggggaauucagca

SEQ ID NO: 1330563 - RNA, 19 nt, Artificial Sequence
  Description of Artificial Sequence: Synthetic oligonucleotide
aacacuaguacuggaggcu

SEQ ID NO: 1330564 - RNA, 19 nt, Artificial Sequence
  Description of Artificial Sequence: Synthetic oligonucleotide
agaaugagugccgauggag

SEQ ID NO: 1330565 - RNA, 19 nt, Artificial Sequence
  Description of Artificial Sequence: Synthetic oligonucleotide
uccuuacaggguuaugcag

SEQ ID NO: 1330566 - RNA, 19 nt, Artificial Sequence
  Description of Artificial Sequence: Synthetic oligonucleotide
uugcaguuccguuuugacc

SEQ ID NO: 1330567 - RNA, 19 nt, Artificial Sequence
  Description of Artificial Sequence: Synthetic oligonucleotide
agguaagccucccacaaga

SEQ ID NO: 1330568 - RNA, 19 nt, Artificial Sequence
  Description of Artificial Sequence: Synthetic oligonucleotide
gugaauugcuucuuucgug

SEQ ID NO: 1330569 - RNA, 19 nt, Artificial Sequence
  Description of Artificial Sequence: Synthetic oligonucleotide
cuugucgccagugauaauc

SEQ ID NO: 1330570 - RNA, 19 nt, Artificial Sequence
  Description of Artificial Sequence: Synthetic oligonucleotide
agugauacggaacucuguu

SEQ ID NO: 1330571 - RNA, 19 nt, Artificial Sequence
  Description of Artificial Sequence: Synthetic oligonucleotide
gcuaugauaaccuucacgu

SEQ ID NO: 1330572 - RNA, 19 nt, Artificial Sequence
  Description of Artificial Sequence: Synthetic oligonucleotide
ucuaugcugccuggaaucg

SEQ ID NO: 1330573 - RNA, 19 nt, Artificial Sequence
  Description of Artificial Sequence: Synthetic oligonucleotide
cuggaaucguggcagaaac

SEQ ID NO: 1330574 - RNA, 19 nt, Artificial Sequence
  Description of Artificial Sequence: Synthetic oligonucleotide
guuguuauuuaugaaagua

SEQ ID NO: 1330575 - RNA, 19 nt, Artificial Sequence
  Description of Artificial Sequence: Synthetic oligonucleotide
acccauaggaugaucugcc

SEQ ID NO: 1330576 - RNA, 19 nt, Artificial Sequence
  Description of Artificial Sequence: Synthetic oligonucleotide
auagucuccuuccaguaau

SEQ ID NO: 1330577 - RNA, 19 nt, Artificial Sequence
  Description of Artificial Sequence: Synthetic oligonucleotide
caguaaucccuucaguaug

SEQ ID NO: 1330578 - RNA, 19 nt, Artificial Sequence
  Description of Artificial Sequence: Synthetic oligonucleotide
aaaucuacuggaaguggca

SEQ ID NO: 1330579 - RNA, 19 nt, Artificial Sequence
  Description of Artificial Sequence: Synthetic oligonucleotide
agugcucaaagucaauaau

SEQ ID NO: 1330580 - RNA, 19 nt, Artificial Sequence
  Description of Artificial Sequence: Synthetic oligonucleotide
ugcgaacuguucuaugcug

SEQ ID NO: 1330581 - RNA, 19 nt, Artificial Sequence
  Description of Artificial Sequence: Synthetic oligonucleotide
aaguaauugcaguuccguu

SEQ ID NO: 1330582 - RNA, 19 nt, Artificial Sequence
  Description of Artificial Sequence: Synthetic oligonucleotide
augaagguaaggggaauuc

SEQ ID NO: 1330583 - RNA, 19 nt, Artificial Sequence
  Description of Artificial Sequence: Synthetic oligonucleotide
agggucacaauaaaggggu

SEQ ID NO: 1330584 - RNA, 19 nt, Artificial Sequence
  Description of Artificial Sequence: Synthetic oligonucleotide
uggauggcuaauucucuug

SEQ ID NO: 1330585 - RNA, 19 nt, Artificial Sequence
  Description of Artificial Sequence: Synthetic oligonucleotide
uucacgugcugucguaagc

SEQ ID NO: 1330586 - RNA, 19 nt, Artificial Sequence
  Description of Artificial Sequence: Synthetic oligonucleotide
aggcauaucaaaauucaca

SEQ ID NO: 1330587 - RNA, 19 nt, Artificial Sequence
  Description of Artificial Sequence: Synthetic oligonucleotide
ggcauaucaaaauucacaa

SEQ ID NO: 1330588 - RNA, 19 nt, Artificial Sequence
  Description of Artificial Sequence: Synthetic oligonucleotide
uucuugucauuuaggauuu

SEQ ID NO: 1330589 - RNA, 19 nt, Artificial Sequence
  Description of Artificial Sequence: Synthetic oligonucleotide
aagaaugagugccgaugga

SEQ ID NO: 1330590 - RNA, 19 nt, Artificial Sequence
  Description of Artificial Sequence: Synthetic oligonucleotide
uuccuaacugcuguuuaag

SEQ ID NO: 1330591 - RNA, 19 nt, Artificial Sequence
  Description of Artificial Sequence: Synthetic oligonucleotide
uuggcguaagaaugagugc

SEQ ID NO: 1330592 - RNA, 19 nt, Artificial Sequence
  Description of Artificial Sequence: Synthetic oligonucleotide
acuguucuaugcugccugg

SEQ ID NO: 1330593 - RNA, 19 nt, Artificial Sequence
  Description of Artificial Sequence: Synthetic oligonucleotide
uuuagcauggugucagcuu

SEQ ID NO: 1330594 - RNA, 19 nt, Artificial Sequence
  Description of Artificial Sequence: Synthetic oligonucleotide
uaaccuucacgugcugucg

SEQ ID NO: 1330595 - RNA, 19 nt, Artificial Sequence
  Description of Artificial Sequence: Synthetic oligonucleotide
guuaugcagaagcugaucu

SEQ ID NO: 1330596 - RNA, 19 nt, Artificial Sequence
  Description of Artificial Sequence: Synthetic oligonucleotide
cuaugauaaccuucacgug

SEQ ID NO: 1330597 - RNA, 19 nt, Artificial Sequence
  Description of Artificial Sequence: Synthetic oligonucleotide
gguaaggggaauucagcag

SEQ ID NO: 1330598 - RNA, 19 nt, Artificial Sequence
  Description of Artificial Sequence: Synthetic oligonucleotide
ucacucaacagaucugcuc

SEQ ID NO: 1330599 - RNA, 19 nt, Artificial Sequence
  Description of Artificial Sequence: Synthetic oligonucleotide
gagguuagccccugugacc

SEQ ID NO: 1330600 - RNA, 19 nt, Artificial Sequence
  Description of Artificial Sequence: Synthetic oligonucleotide
augaacauacucauccaug

SEQ ID NO: 1330601 - RNA, 19 nt, Artificial Sequence
  Description of Artificial Sequence: Synthetic oligonucleotide
ugggucuuccacccauagg

SEQ ID NO: 1330602 - RNA, 19 nt, Artificial Sequence
  Description of Artificial Sequence: Synthetic oligonucleotide
uucuugucgccagugauaa

SEQ ID NO: 1330603 - RNA, 19 nt, Artificial Sequence
  Description of Artificial Sequence: Synthetic oligonucleotide
cuaucuggauggcuaauuc

SEQ ID NO: 1330604 - RNA, 19 nt, Artificial Sequence
  Description of Artificial Sequence: Synthetic oligonucleotide
augagguuagccccuguga

SEQ ID NO: 1330605 - RNA, 19 nt, Artificial Sequence
  Description of Artificial Sequence: Synthetic oligonucleotide
ggaguuuuauccuccagca

SEQ ID NO: 1330606 - RNA, 19 nt, Artificial Sequence
  Description of Artificial Sequence: Synthetic oligonucleotide
gaaguggcauaccagguua

SEQ ID NO: 1330607 - RNA, 19 nt, Artificial Sequence
  Description of Artificial Sequence: Synthetic oligonucleotide
cuuguuggcguaagaauga

SEQ ID NO: 1330608 - RNA, 19 nt, Artificial Sequence
  Description of Artificial Sequence: Synthetic oligonucleotide
ucguaagcgauggagcugu

SEQ ID NO: 1330609 - RNA, 19 nt, Artificial Sequence
  Description of Artificial Sequence: Synthetic oligonucleotide
ucugcucaugaagguaagg

SEQ ID NO: 1330610 - RNA, 19 nt, Artificial Sequence
  Description of Artificial Sequence: Synthetic oligonucleotide
uggcauaccagguuauuuu

SEQ ID NO: 1330611 - RNA, 19 nt, Artificial Sequence
  Description of Artificial Sequence: Synthetic oligonucleotide
aaucuacuggaaguggcau

SEQ ID NO: 1330612 - RNA, 19 nt, Artificial Sequence
  Description of Artificial Sequence: Synthetic oligonucleotide
gcuaauucucuuguuggcg

SEQ ID NO: 1330613 - RNA, 19 nt, Artificial Sequence
  Description of Artificial Sequence: Synthetic oligonucleotide
ucgccagugauaauccuua

SEQ ID NO: 1330614 - RNA, 19 nt, Artificial Sequence
  Description of Artificial Sequence: Synthetic oligonucleotide
uuaugccacugagugauac

SEQ ID NO: 1330615 - RNA, 19 nt, Artificial Sequence
  Description of Artificial Sequence: Synthetic oligonucleotide
cagaaaccaaaauggucug

SEQ ID NO: 1330616 - RNA, 19 nt, Artificial Sequence
  Description of Artificial Sequence: Synthetic oligonucleotide
ugaucugcgaacuguucua

SEQ ID NO: 1330617 - RNA, 19 nt, Artificial Sequence
  Description of Artificial Sequence: Synthetic oligonucleotide
cuucaugcguggcagacca

SEQ ID NO: 1330618 - RNA, 19 nt, Artificial Sequence
  Description of Artificial Sequence: Synthetic oligonucleotide
ggaguuggcacuucauagc

SEQ ID NO: 1330619 - RNA, 19 nt, Artificial Sequence
  Description of Artificial Sequence: Synthetic oligonucleotide
uguuggcguaagaaugagu

SEQ ID NO: 1330620 - RNA, 19 nt, Artificial Sequence
  Description of Artificial Sequence: Synthetic oligonucleotide
auaaaggggugcucuuugu

SEQ ID NO: 1330621 - RNA, 19 nt, Artificial Sequence
  Description of Artificial Sequence: Synthetic oligonucleotide
aaccuucacgugcugucgu

SEQ ID NO: 1330622 - RNA, 19 nt, Artificial Sequence
  Description of Artificial Sequence: Synthetic oligonucleotide
ugggaguuggcacuucaua

SEQ ID NO: 1330623 - RNA, 19 nt, Artificial Sequence
  Description of Artificial Sequence: Synthetic oligonucleotide
auggaguuuuauccuccag

SEQ ID NO: 1330624 - RNA, 19 nt, Artificial Sequence
  Description of Artificial Sequence: Synthetic oligonucleotide
acggaacucuguuuuauua

SEQ ID NO: 1330625 - RNA, 19 nt, Artificial Sequence
  Description of Artificial Sequence: Synthetic oligonucleotide
auaggaugaucugccgcac

SEQ ID NO: 1330626 - RNA, 19 nt, Artificial Sequence
  Description of Artificial Sequence: Synthetic oligonucleotide
agaauggauccugugggcu

SEQ ID NO: 1330627 - RNA, 19 nt, Artificial Sequence
  Description of Artificial Sequence: Synthetic oligonucleotide
caugagguuagccccugug

SEQ ID NO: 1330628 - RNA, 19 nt, Artificial Sequence
  Description of Artificial Sequence: Synthetic oligonucleotide
uuguuggcguaagaaugag

SEQ ID NO: 1330629 - RNA, 19 nt, Artificial Sequence
  Description of Artificial Sequence: Synthetic oligonucleotide
ucaugcguggcagaccacu

SEQ ID NO: 1330630 - RNA, 19 nt, Artificial Sequence
  Description of Artificial Sequence: Synthetic oligonucleotide
uagcccgauuucuucaagu

SEQ ID NO: 1330631 - RNA, 19 nt, Artificial Sequence
  Description of Artificial Sequence: Synthetic oligonucleotide
agguuagccccugugacca

SEQ ID NO: 1330632 - RNA, 19 nt, Artificial Sequence
  Description of Artificial Sequence: Synthetic oligonucleotide
ggaaucguggcagaaacca

SEQ ID NO: 1330633 - RNA, 19 nt, Artificial Sequence
  Description of Artificial Sequence: Synthetic oligonucleotide
uggccagaaugucucuccc

SEQ ID NO: 1330634 - RNA, 19 nt, Artificial Sequence
  Description of Artificial Sequence: Synthetic oligonucleotide
cacccauaggaugaucugc

SEQ ID NO: 1330635 - RNA, 19 nt, Artificial Sequence
  Description of Artificial Sequence: Synthetic oligonucleotide
aguaaucccuucaguaugu

SEQ ID NO: 1330636 - RNA, 19 nt, Artificial Sequence
  Description of Artificial Sequence: Synthetic oligonucleotide
uuugaccaagucuccccac

SEQ ID NO: 1330637 - RNA, 19 nt, Artificial Sequence
  Description of Artificial Sequence: Synthetic oligonucleotide
ugcuguuuaaggguuucaa

SEQ ID NO: 1330638 - RNA, 19 nt, Artificial Sequence
  Description of Artificial Sequence: Synthetic oligonucleotide
ugaguggauggaugugcug

SEQ ID NO: 1330639 - RNA, 19 nt, Artificial Sequence
  Description of Artificial Sequence: Synthetic oligonucleotide
cuucacgugcugucguaag

SEQ ID NO: 1330640 - RNA, 19 nt, Artificial Sequence
  Description of Artificial Sequence: Synthetic oligonucleotide
auagcccgauuucuucaag

SEQ ID NO: 1330641 - RNA, 19 nt, Artificial Sequence
  Description of Artificial Sequence: Synthetic oligonucleotide
acugagugauacggaacuc

SEQ ID NO: 1330642 - RNA, 19 nt, Artificial Sequence
  Description of Artificial Sequence: Synthetic oligonucleotide
gcagaaaccaaaauggucu

SEQ ID NO: 1330643 - RNA, 19 nt, Artificial Sequence
  Description of Artificial Sequence: Synthetic oligonucleotide
ucaguaugucucuccuuuc

SEQ ID NO: 1330644 - RNA, 19 nt, Artificial Sequence
  Description of Artificial Sequence: Synthetic oligonucleotide
ugauaaccuucacgugcug

SEQ ID NO: 1330645 - RNA, 19 nt, Artificial Sequence
  Description of Artificial Sequence: Synthetic oligonucleotide
cuugaaggcauaucaaaau

SEQ ID NO: 1330646 - RNA, 19 nt, Artificial Sequence
  Description of Artificial Sequence: Synthetic oligonucleotide
uaauucucuuguuggcgua

SEQ ID NO: 1330647 - RNA, 19 nt, Artificial Sequence
  Description of Artificial Sequence: Synthetic oligonucleotide
guaagcgauggagcugugg

SEQ ID NO: 1330648 - RNA, 19 nt, Artificial Sequence
  Description of Artificial Sequence: Synthetic oligonucleotide
ggauggaugugcuguuuag

SEQ ID NO: 1330649 - RNA, 19 nt, Artificial Sequence
  Description of Artificial Sequence: Synthetic oligonucleotide
accgagauuccuaacugcu

SEQ ID NO: 1330650 - RNA, 19 nt, Artificial Sequence
  Description of Artificial Sequence: Synthetic oligonucleotide
ugcguggcagaccacucau

SEQ ID NO: 1330651 - RNA, 19 nt, Artificial Sequence
  Description of Artificial Sequence: Synthetic oligonucleotide
caguccacaaacacuagua

SEQ ID NO: 1330652 - RNA, 19 nt, Artificial Sequence
  Description of Artificial Sequence: Synthetic oligonucleotide
gcucuuuguagacauaaaa

SEQ ID NO: 1330653 - RNA, 19 nt, Artificial Sequence
  Description of Artificial Sequence: Synthetic oligonucleotide
ucugccgcacgcuggggca

SEQ ID NO: 1330654 - RNA, 19 nt, Artificial Sequence
  Description of Artificial Sequence: Synthetic oligonucleotide
uccuugaaccgagauuccu

SEQ ID NO: 1330655 - RNA, 19 nt, Artificial Sequence
  Description of Artificial Sequence: Synthetic oligonucleotide
ugccacugagugauacgga

SEQ ID NO: 1330656 - RNA, 19 nt, Artificial Sequence
  Description of Artificial Sequence: Synthetic oligonucleotide
agcaaagcucggaugauaa

SEQ ID NO: 1330657 - RNA, 19 nt, Artificial Sequence
  Description of Artificial Sequence: Synthetic oligonucleotide
uugaaccgagauuccuaac

SEQ ID NO: 1330658 - RNA, 19 nt, Artificial Sequence
  Description of Artificial Sequence: Synthetic oligonucleotide
caacuuccuguccuugaac

SEQ ID NO: 1330659 - RNA, 19 nt, Artificial Sequence
  Description of Artificial Sequence: Synthetic oligonucleotide
auaauccuuacaggguuau

SEQ ID NO: 1330660 - RNA, 19 nt, Artificial Sequence
  Description of Artificial Sequence: Synthetic oligonucleotide
ugaccaaguccaggccucg

SEQ ID NO: 1330661 - RNA, 19 nt, Artificial Sequence
  Description of Artificial Sequence: Synthetic oligonucleotide
gcucaccacgaccucauag

SEQ ID NO: 1330662 - RNA, 19 nt, Artificial Sequence
  Description of Artificial Sequence: Synthetic oligonucleotide
ucguccagggguugcuaug

SEQ ID NO: 1330663 - RNA, 19 nt, Artificial Sequence
  Description of Artificial Sequence: Synthetic oligonucleotide
uugcuaugauaaccuucac

SEQ ID NO: 1330664 - RNA, 19 nt, Artificial Sequence
  Description of Artificial Sequence: Synthetic oligonucleotide
guugaccaaguccaggccu

SEQ ID NO: 1330665 - RNA, 19 nt, Artificial Sequence
  Description of Artificial Sequence: Synthetic oligonucleotide
cugggucuuccacccauag

SEQ ID NO: 1330666 - RNA, 19 nt, Artificial Sequence
  Description of Artificial Sequence: Synthetic oligonucleotide
uuuuccggagccggugucu

SEQ ID NO: 1330667 - RNA, 19 nt, Artificial Sequence
  Description of Artificial Sequence: Synthetic oligonucleotide
ucguggcagaaaccaaaau

SEQ ID NO: 1330668 - RNA, 19 nt, Artificial Sequence
  Description of Artificial Sequence: Synthetic oligonucleotide
gaagucguccagggguugc

SEQ ID NO: 1330669 - RNA, 19 nt, Artificial Sequence
  Description of Artificial Sequence: Synthetic oligonucleotide
guaauugcaguuccguuuu

SEQ ID NO: 1330670 - RNA, 19 nt, Artificial Sequence
  Description of Artificial Sequence: Synthetic oligonucleotide
gaguggauggaugugcugu

SEQ ID NO: 1330671 - RNA, 19 nt, Artificial Sequence
  Description of Artificial Sequence: Synthetic oligonucleotide
aaggggaauucagcagcug

SEQ ID NO: 1330672 - RNA, 19 nt, Artificial Sequence
  Description of Artificial Sequence: Synthetic oligonucleotide
gugccgauggaguuuuauc

SEQ ID NO: 1330673 - RNA, 19 nt, Artificial Sequence
  Description of Artificial Sequence: Synthetic oligonucleotide
ccauaggaugaucugccgc

SEQ ID NO: 1330674 - RNA, 19 nt, Artificial Sequence
  Description of Artificial Sequence: Synthetic oligonucleotide
uguuuagaccugugauuuu

SEQ ID NO: 1330675 - RNA, 19 nt, Artificial Sequence
  Description of Artificial Sequence: Synthetic oligonucleotide
uacggaacucuguuuuauu

SEQ ID NO: 1330676 - RNA, 19 nt, Artificial Sequence
  Description of Artificial Sequence: Synthetic oligonucleotide
gaaugagugccgauggagu

SEQ ID NO: 1330677 - RNA, 19 nt, Artificial Sequence
  Description of Artificial Sequence: Synthetic oligonucleotide
aucuacuggaaguggcaua

SEQ ID NO: 1330678 - RNA, 19 nt, Artificial Sequence
  Description of Artificial Sequence: Synthetic oligonucleotide
ggcguaagaaugagugccg

SEQ ID NO: 1330679 - RNA, 19 nt, Artificial Sequence
  Description of Artificial Sequence: Synthetic oligonucleotide
ugucgccagugauaauccu

SEQ ID NO: 1330680 - RNA, 19 nt, Artificial Sequence
  Description of Artificial Sequence: Synthetic oligonucleotide
gauaauccuuacaggguua

SEQ ID NO: 1330681 - RNA, 19 nt, Artificial Sequence
  Description of Artificial Sequence: Synthetic oligonucleotide
ucacaauaaaggggugcuc

SEQ ID NO: 1330682 - RNA, 19 nt, Artificial Sequence
  Description of Artificial Sequence: Synthetic oligonucleotide
uuuccggagccggugucug

SEQ ID NO: 1330683 - RNA, 19 nt, Artificial Sequence
  Description of Artificial Sequence: Synthetic oligonucleotide
ccuuacaggguuaugcaga

SEQ ID NO: 1330684 - RNA, 19 nt, Artificial Sequence
  Description of Artificial Sequence: Synthetic oligonucleotide
ugagugccgauggaguuuu

SEQ ID NO: 1330685 - RNA, 19 nt, Artificial Sequence
  Description of Artificial Sequence: Synthetic oligonucleotide
augcguggcagaccacuca

SEQ ID NO: 1330686 - RNA, 19 nt, Artificial Sequence
  Description of Artificial Sequence: Synthetic oligonucleotide
acuaguacuggaggcuuaa

SEQ ID NO: 1330687 - RNA, 19 nt, Artificial Sequence
  Description of Artificial Sequence: Synthetic oligonucleotide
caugcguggcagaccacuc

SEQ ID NO: 1330688 - RNA, 19 nt, Artificial Sequence
  Description of Artificial Sequence: Synthetic oligonucleotide
cucaccacgaccucauagu

SEQ ID NO: 1330689 - RNA, 19 nt, Artificial Sequence
  Description of Artificial Sequence: Synthetic oligonucleotide
ccagggguugcuaugauaa

SEQ ID NO: 1330690 - RNA, 19 nt, Artificial Sequence
  Description of Artificial Sequence: Synthetic oligonucleotide
gauaaccuucacgugcugu

SEQ ID NO: 1330691 - RNA, 19 nt, Artificial Sequence
  Description of Artificial Sequence: Synthetic oligonucleotide
aagucguccagggguugcu

SEQ ID NO: 1330692 - RNA, 19 nt, Artificial Sequence
  Description of Artificial Sequence: Synthetic oligonucleotide
gucguaagcgauggagcug

SEQ ID NO: 1330693 - RNA, 19 nt, Artificial Sequence
  Description of Artificial Sequence: Synthetic oligonucleotide
gugauaauccuuacagggu

SEQ ID NO: 1330694 - RNA, 19 nt, Artificial Sequence
  Description of Artificial Sequence: Synthetic oligonucleotide
cauacucauccaugcuuga

SEQ ID NO: 1330695 - RNA, 19 nt, Artificial Sequence
  Description of Artificial Sequence: Synthetic oligonucleotide
ggggaauucagcagcugug

SEQ ID NO: 1330696 - RNA, 19 nt, Artificial Sequence
  Description of Artificial Sequence: Synthetic oligonucleotide
gcgaacuguucuaugcugc

SEQ ID NO: 1330697 - RNA, 19 nt, Artificial Sequence
  Description of Artificial Sequence: Synthetic oligonucleotide
cagggguugcuaugauaac

SEQ ID NO: 1330698 - RNA, 19 nt, Artificial Sequence
  Description of Artificial Sequence: Synthetic oligonucleotide
cauagcccgauuucuucaa

SEQ ID NO: 1330699 - RNA, 19 nt, Artificial Sequence
  Description of Artificial Sequence: Synthetic oligonucleotide
ggcuucacucuuuuggcaa

SEQ ID NO: 1330700 - RNA, 19 nt, Artificial Sequence
  Description of Artificial Sequence: Synthetic oligonucleotide
aaguggcauaccagguuau

SEQ ID NO: 1330701 - RNA, 19 nt, Artificial Sequence
  Description of Artificial Sequence: Synthetic oligonucleotide
gaccaaguccaggccucgg

SEQ ID NO: 1330702 - RNA, 19 nt, Artificial Sequence
  Description of Artificial Sequence: Synthetic oligonucleotide
agugccgauggaguuuuau

SEQ ID NO: 1330703 - RNA, 19 nt, Artificial Sequence
  Description of Artificial Sequence: Synthetic oligonucleotide
uccaugcuugaaggcauau

SEQ ID NO: 1330704 - RNA, 19 nt, Artificial Sequence
  Description of Artificial Sequence: Synthetic oligonucleotide
cgauggaguuuuauccucc

SEQ ID NO: 1330705 - RNA, 19 nt, Artificial Sequence
  Description of Artificial Sequence: Synthetic oligonucleotide
augcuugaaggcauaucaa

SEQ ID NO: 1330706 - RNA, 19 nt, Artificial Sequence
  Description of Artificial Sequence: Synthetic oligonucleotide
gaauggauccugugggcuu

SEQ ID NO: 1330707 - RNA, 19 nt, Artificial Sequence
  Description of Artificial Sequence: Synthetic oligonucleotide
ugcugucguaagcgaugga

SEQ ID NO: 1330708 - RNA, 19 nt, Artificial Sequence
  Description of Artificial Sequence: Synthetic oligonucleotide
cccauaggaugaucugccg

SEQ ID NO: 1330709 - RNA, 19 nt, Artificial Sequence
  Description of Artificial Sequence: Synthetic oligonucleotide
uggcacuucauagcccgau

SEQ ID NO: 1330710 - RNA, 19 nt, Artificial Sequence
  Description of Artificial Sequence: Synthetic oligonucleotide
ggccagaaugucucucccc

SEQ ID NO: 1330711 - RNA, 19 nt, Artificial Sequence
  Description of Artificial Sequence: Synthetic oligonucleotide
gccagugauaauccuuaca

SEQ ID NO: 1330712 - RNA, 19 nt, Artificial Sequence
  Description of Artificial Sequence: Synthetic oligonucleotide
agaagucguccagggguug

SEQ ID NO: 1330713 - RNA, 19 nt, Artificial Sequence
  Description of Artificial Sequence: Synthetic oligonucleotide
guucuugucgccagugaua

SEQ ID NO: 1330714 - RNA, 19 nt, Artificial Sequence
  Description of Artificial Sequence: Synthetic oligonucleotide
ccacugagugauacggaac

SEQ ID NO: 1330715 - RNA, 19 nt, Artificial Sequence
  Description of Artificial Sequence: Synthetic oligonucleotide
cgaacuguucuaugcugcc

SEQ ID NO: 1330716 - RNA, 19 nt, Artificial Sequence
  Description of Artificial Sequence: Synthetic oligonucleotide
aacugcuguuuaaggguuu

SEQ ID NO: 1330717 - RNA, 19 nt, Artificial Sequence
  Description of Artificial Sequence: Synthetic oligonucleotide
augagugccgauggaguuu

SEQ ID NO: 1330718 - RNA, 19 nt, Artificial Sequence
  Description of Artificial Sequence: Synthetic oligonucleotide
cugagugauacggaacucu

SEQ ID NO: 1330719 - RNA, 19 nt, Artificial Sequence
  Description of Artificial Sequence: Synthetic oligonucleotide
gauggcuaauucucuuguu

SEQ ID NO: 1330720 - RNA, 19 nt, Artificial Sequence
  Description of Artificial Sequence: Synthetic oligonucleotide
ggauggcuaauucucuugu

SEQ ID NO: 1330721 - RNA, 19 nt, Artificial Sequence
  Description of Artificial Sequence: Synthetic oligonucleotide
gcccgauuucuucaaguuc

SEQ ID NO: 1330722 - RNA, 19 nt, Artificial Sequence
  Description of Artificial Sequence: Synthetic oligonucleotide
ccgauggaguuuuauccuc

SEQ ID NO: 1330723 - RNA, 19 nt, Artificial Sequence
  Description of Artificial Sequence: Synthetic oligonucleotide
cuucacucuuuuggcaaca

SEQ ID NO: 1330724 - RNA, 19 nt, Artificial Sequence
  Description of Artificial Sequence: Synthetic oligonucleotide
gcaaagcucggaugauaac

SEQ ID NO: 1330725 - RNA, 19 nt, Artificial Sequence
  Description of Artificial Sequence: Synthetic oligonucleotide
guccuugaaccgagauucc

SEQ ID NO: 1330726 - RNA, 19 nt, Artificial Sequence
  Description of Artificial Sequence: Synthetic oligonucleotide
ccguuuugaccaagucucc

SEQ ID NO: 1330727 - RNA, 19 nt, Artificial Sequence
  Description of Artificial Sequence: Synthetic oligonucleotide
accuucacgugcugucgua

SEQ ID NO: 1330728 - RNA, 19 nt, Artificial Sequence
  Description of Artificial Sequence: Synthetic oligonucleotide
aguggcauaccagguuauu

SEQ ID NO: 1330729 - RNA, 19 nt, Artificial Sequence
  Description of Artificial Sequence: Synthetic oligonucleotide
auaaugggccuggcaacuu

SEQ ID NO: 1330730 - RNA, 19 nt, Artificial Sequence
  Description of Artificial Sequence: Synthetic oligonucleotide
ccacccauaggaugaucug

SEQ ID NO: 1330731 - RNA, 19 nt, Artificial Sequence
  Description of Artificial Sequence: Synthetic oligonucleotide
ucuugucgccagugauaau

SEQ ID NO: 1330732 - RNA, 19 nt, Artificial Sequence
  Description of Artificial Sequence: Synthetic oligonucleotide
acgaccucauagucuccuu

SEQ ID NO: 1330733 - RNA, 19 nt, Artificial Sequence
  Description of Artificial Sequence: Synthetic oligonucleotide
gggguugcuaugauaaccu

SEQ ID NO: 1330734 - RNA, 19 nt, Artificial Sequence
  Description of Artificial Sequence: Synthetic oligonucleotide
ccgauuucuucaaguucug

SEQ ID NO: 1330735 - RNA, 19 nt, Artificial Sequence
  Description of Artificial Sequence: Synthetic oligonucleotide
cguuuugaccaagucuccc

SEQ ID NO: 1330736 - RNA, 19 nt, Artificial Sequence
  Description of Artificial Sequence: Synthetic oligonucleotide
ugccgcacgcuggggcagg

SEQ ID NO: 1330737 - RNA, 19 nt, Artificial Sequence
  Description of Artificial Sequence: Synthetic oligonucleotide
caccacgaccucauagucu

SEQ ID NO: 1330738 - RNA, 19 nt, Artificial Sequence
  Description of Artificial Sequence: Synthetic oligonucleotide
gaucugcgaacuguucuau

SEQ ID NO: 1330739 - RNA, 19 nt, Artificial Sequence
  Description of Artificial Sequence: Synthetic oligonucleotide
caguuccguuuugaccaag

SEQ ID NO: 1330740 - RNA, 19 nt, Artificial Sequence
  Description of Artificial Sequence: Synthetic oligonucleotide
gccgauggaguuuuauccu

SEQ ID NO: 1330741 - RNA, 19 nt, Artificial Sequence
  Description of Artificial Sequence: Synthetic oligonucleotide
acgugcugucguaagcgau

SEQ ID NO: 1330742 - RNA, 19 nt, Artificial Sequence
  Description of Artificial Sequence: Synthetic oligonucleotide
gcaguccacaaacacuagu

SEQ ID NO: 1330743 - RNA, 19 nt, Artificial Sequence
  Description of Artificial Sequence: Synthetic oligonucleotide
ugcucaccacgaccucaua

SEQ ID NO: 1330744 - RNA, 19 nt, Artificial Sequence
  Description of Artificial Sequence: Synthetic oligonucleotide
ccaguaaucccuucaguau

SEQ ID NO: 1330745 - RNA, 19 nt, Artificial Sequence
  Description of Artificial Sequence: Synthetic oligonucleotide
caucuacuaccacaauuuu

SEQ ID NO: 1330746 - RNA, 19 nt, Artificial Sequence
  Description of Artificial Sequence: Synthetic oligonucleotide
cacuaguacuggaggcuua

SEQ ID NO: 1330747 - RNA, 19 nt, Artificial Sequence
  Description of Artificial Sequence: Synthetic oligonucleotide
cuguucuaugcugccugga

SEQ ID NO: 1330748 - RNA, 19 nt, Artificial Sequence
  Description of Artificial Sequence: Synthetic oligonucleotide
cggaugauaacaggaagga

SEQ ID NO: 1330749 - RNA, 19 nt, Artificial Sequence
  Description of Artificial Sequence: Synthetic oligonucleotide
cugccaaccugaugaacau

SEQ ID NO: 1330750 - RNA, 19 nt, Artificial Sequence
  Description of Artificial Sequence: Synthetic oligonucleotide
caugaagguaaggggaauu

SEQ ID NO: 1330751 - RNA, 19 nt, Artificial Sequence
  Description of Artificial Sequence: Synthetic oligonucleotide
ccccgugcucaccacgacc

SEQ ID NO: 1330752 - RNA, 19 nt, Artificial Sequence
  Description of Artificial Sequence: Synthetic oligonucleotide
gggucacaauaaaggggug

SEQ ID NO: 1330753 - RNA, 19 nt, Artificial Sequence
  Description of Artificial Sequence: Synthetic oligonucleotide
agagccuuuuagaguuguu

SEQ ID NO: 1330754 - RNA, 19 nt, Artificial Sequence
  Description of Artificial Sequence: Synthetic oligonucleotide
cagaagucguccagggguu

SEQ ID NO: 1330755 - RNA, 19 nt, Artificial Sequence
  Description of Artificial Sequence: Synthetic oligonucleotide
gcguaagaaugagugccga

SEQ ID NO: 1330756 - RNA, 19 nt, Artificial Sequence
  Description of Artificial Sequence: Synthetic oligonucleotide
caauaaaggggugcucuuu

SEQ ID NO: 1330757 - RNA, 19 nt, Artificial Sequence
  Description of Artificial Sequence: Synthetic oligonucleotide
gucgccagugauaauccuu

SEQ ID NO: 1330758 - RNA, 19 nt, Artificial Sequence
  Description of Artificial Sequence: Synthetic oligonucleotide
cuaguacuggaggcuuaaa

SEQ ID NO: 1330759 - RNA, 19 nt, Artificial Sequence
  Description of Artificial Sequence: Synthetic oligonucleotide
acgcucaccaggaguguuu

SEQ ID NO: 1330760 - RNA, 19 nt, Artificial Sequence
  Description of Artificial Sequence: Synthetic oligonucleotide
auccaugcuugaaggcaua

SEQ ID NO: 1330761 - RNA, 19 nt, Artificial Sequence
  Description of Artificial Sequence: Synthetic oligonucleotide
agucguccagggguugcua

SEQ ID NO: 1330762 - RNA, 19 nt, Artificial Sequence
  Description of Artificial Sequence: Synthetic oligonucleotide
cccgugcucaccacgaccu

SEQ ID NO: 1330763 - RNA, 19 nt, Artificial Sequence
  Description of Artificial Sequence: Synthetic oligonucleotide
cuaugcugccuggaaucgu

SEQ ID NO: 1330764 - RNA, 19 nt, Artificial Sequence
  Description of Artificial Sequence: Synthetic oligonucleotide
gcaguuccguuuugaccaa

SEQ ID NO: 1330765 - RNA, 19 nt, Artificial Sequence
  Description of Artificial Sequence: Synthetic oligonucleotide
gacgcucaccaggaguguu

SEQ ID NO: 1330766 - RNA, 19 nt, Artificial Sequence
  Description of Artificial Sequence: Synthetic oligonucleotide
gggcagguucuugucgcca

SEQ ID NO: 1330767 - RNA, 19 nt, Artificial Sequence
  Description of Artificial Sequence: Synthetic oligonucleotide
ccuggaaucguggcagaaa

SEQ ID NO: 1330768 - RNA, 19 nt, Artificial Sequence
  Description of Artificial Sequence: Synthetic oligonucleotide
caucccagaagagccuuuu

SEQ ID NO: 1330769 - RNA, 19 nt, Artificial Sequence
  Description of Artificial Sequence: Synthetic oligonucleotide
ccacaagaagcacugucuu

SEQ ID NO: 1330770 - RNA, 19 nt, Artificial Sequence
  Description of Artificial Sequence: Synthetic oligonucleotide
ggaugggaguuggcacuuc

SEQ ID NO: 1330771 - RNA, 19 nt, Artificial Sequence
  Description of Artificial Sequence: Synthetic oligonucleotide
cugugggcuucacucuuuu

SEQ ID NO: 1330772 - RNA, 19 nt, Artificial Sequence
  Description of Artificial Sequence: Synthetic oligonucleotide
ccaaccugaugaacauacu

SEQ ID NO: 1330773 - RNA, 19 nt, Artificial Sequence
  Description of Artificial Sequence: Synthetic oligonucleotide
ggguuaugcagaagcugau

SEQ ID NO: 1330774 - RNA, 19 nt, Artificial Sequence
  Description of Artificial Sequence: Synthetic oligonucleotide
guccagggguugcuaugau

SEQ ID NO: 1330775 - RNA, 19 nt, Artificial Sequence
  Description of Artificial Sequence: Synthetic oligonucleotide
gcguggcagaccacucauc

SEQ ID NO: 1330776 - RNA, 19 nt, Artificial Sequence
  Description of Artificial Sequence: Synthetic oligonucleotide
cguaagcgauggagcugug

SEQ ID NO: 1330777 - RNA, 19 nt, Artificial Sequence
  Description of Artificial Sequence: Synthetic oligonucleotide
ccgugcucaccacgaccuc

SEQ ID NO: 1330778 - RNA, 19 nt, Artificial Sequence
  Description of Artificial Sequence: Synthetic oligonucleotide
gagugccgauggaguuuua

SEQ ID NO: 1330779 - RNA, 19 nt, Artificial Sequence
  Description of Artificial Sequence: Synthetic oligonucleotide
acuaucauaauuuugcagg

SEQ ID NO: 1330780 - RNA, 19 nt, Artificial Sequence
  Description of Artificial Sequence: Synthetic oligonucleotide
gaucauagaauacagagag

SEQ ID NO: 1330781 - RNA, 19 nt, Artificial Sequence
  Description of Artificial Sequence: Synthetic oligonucleotide
uugaucauagaauacagag

SEQ ID NO: 1330782 - RNA, 19 nt, Artificial Sequence
  Description of Artificial Sequence: Synthetic oligonucleotide
acaacuaucauaauuuugc

SEQ ID NO: 1330783 - RNA, 19 nt, Artificial Sequence
  Description of Artificial Sequence: Synthetic oligonucleotide
auugcuucgagauguaagc

SEQ ID NO: 1330784 - RNA, 19 nt, Artificial Sequence
  Description of Artificial Sequence: Synthetic oligonucleotide
uguuuuaugacccuuaguu

SEQ ID NO: 1330785 - RNA, 19 nt, Artificial Sequence
  Description of Artificial Sequence: Synthetic oligonucleotide
gacacuaaugucaacaggg

SEQ ID NO: 1330786 - RNA, 19 nt, Artificial Sequence
  Description of Artificial Sequence: Synthetic oligonucleotide
ucuauuugccugaaggagg

SEQ ID NO: 1330787 - RNA, 19 nt, Artificial Sequence
  Description of Artificial Sequence: Synthetic oligonucleotide
aauacagagagguagcgaa

SEQ ID NO: 1330788 - RNA, 19 nt, Artificial Sequence
  Description of Artificial Sequence: Synthetic oligonucleotide
auacagaucaaucucgcuc

SEQ ID NO: 1330789 - RNA, 19 nt, Artificial Sequence
  Description of Artificial Sequence: Synthetic oligonucleotide
auagaauacagagagguag

SEQ ID NO: 1330790 - RNA, 19 nt, Artificial Sequence
  Description of Artificial Sequence: Synthetic oligonucleotide
caggcuacgggcaagaacg

SEQ ID NO: 1330791 - RNA, 19 nt, Artificial Sequence
  Description of Artificial Sequence: Synthetic oligonucleotide
gaagcaauaauuucuguca

SEQ ID NO: 1330792 - RNA, 19 nt, Artificial Sequence
  Description of Artificial Sequence: Synthetic oligonucleotide
aggaggacuaccaacaucc

SEQ ID NO: 1330793 - RNA, 19 nt, Artificial Sequence
  Description of Artificial Sequence: Synthetic oligonucleotide
ucauagaauacagagaggu

SEQ ID NO: 1330794 - RNA, 19 nt, Artificial Sequence
  Description of Artificial Sequence: Synthetic oligonucleotide
auacuagugagaguaaggc

SEQ ID NO: 1330795 - RNA, 19 nt, Artificial Sequence
  Description of Artificial Sequence: Synthetic oligonucleotide
gucucuauuugccugaagg

SEQ ID NO: 1330796 - RNA, 19 nt, Artificial Sequence
  Description of Artificial Sequence: Synthetic oligonucleotide
aagaacgggaacgaugcgc

SEQ ID NO: 1330797 - RNA, 19 nt, Artificial Sequence
  Description of Artificial Sequence: Synthetic oligonucleotide
ucucagaugagacacgcug

SEQ ID NO: 1330798 - RNA, 19 nt, Artificial Sequence
  Description of Artificial Sequence: Synthetic oligonucleotide
aaucugaucucuuuauaga

SEQ ID NO: 1330799 - RNA, 19 nt, Artificial Sequence
  Description of Artificial Sequence: Synthetic oligonucleotide
gauaacucagacauuagac

SEQ ID NO: 1330800 - RNA, 19 nt, Artificial Sequence
  Description of Artificial Sequence: Synthetic oligonucleotide
guuauacagaucaaucucg

SEQ ID NO: 1330801 - RNA, 19 nt, Artificial Sequence
  Description of Artificial Sequence: Synthetic oligonucleotide
agaucaaucucgcuccucg

SEQ ID NO: 1330802 - RNA, 19 nt, Artificial Sequence
  Description of Artificial Sequence: Synthetic oligonucleotide
aagcaauaauuucugucag

SEQ ID NO: 1330803 - RNA, 19 nt, Artificial Sequence
  Description of Artificial Sequence: Synthetic oligonucleotide
uuagacuuagagacaaaug

SEQ ID NO: 1330804 - RNA, 19 nt, Artificial Sequence
  Description of Artificial Sequence: Synthetic oligonucleotide
agguaauaugguuauuaac

SEQ ID NO: 1330805 - RNA, 19 nt, Artificial Sequence
  Description of Artificial Sequence: Synthetic oligonucleotide
aacggaaacgcccuggcca

SEQ ID NO: 1330806 - RNA, 19 nt, Artificial Sequence
  Description of Artificial Sequence: Synthetic oligonucleotide
cuuagagacaaaugaagac

SEQ ID NO: 1330807 - RNA, 19 nt, Artificial Sequence
  Description of Artificial Sequence: Synthetic oligonucleotide
gacaguauugauaacucag

SEQ ID NO: 1330808 - RNA, 19 nt, Artificial Sequence
  Description of Artificial Sequence: Synthetic oligonucleotide
ugauacaacuaucauaauu

SEQ ID NO: 1330809 - RNA, 19 nt, Artificial Sequence
  Description of Artificial Sequence: Synthetic oligonucleotide
guuagcauacuagugagag

SEQ ID NO: 1330810 - RNA, 19 nt, Artificial Sequence
  Description of Artificial Sequence: Synthetic oligonucleotide
caaucugaucucuuuauag

SEQ ID NO: 1330811 - RNA, 19 nt, Artificial Sequence
  Description of Artificial Sequence: Synthetic oligonucleotide
ugauaacucagacauuaga

SEQ ID NO: 1330812 - RNA, 19 nt, Artificial Sequence
  Description of Artificial Sequence: Synthetic oligonucleotide
uuauacagaucaaucucgc

SEQ ID NO: 1330813 - RNA, 19 nt, Artificial Sequence
  Description of Artificial Sequence: Synthetic oligonucleotide
ugaagcaauaauuucuguc

SEQ ID NO: 1330814 - RNA, 19 nt, Artificial Sequence
  Description of Artificial Sequence: Synthetic oligonucleotide
uuuugcaggucugauagag

SEQ ID NO: 1330815 - RNA, 19 nt, Artificial Sequence
  Description of Artificial Sequence: Synthetic oligonucleotide
cauacuagugagaguaagg

SEQ ID NO: 1330816 - RNA, 19 nt, Artificial Sequence
  Description of Artificial Sequence: Synthetic oligonucleotide
aguauugauaacucagaca

SEQ ID NO: 1330817 - RNA, 19 nt, Artificial Sequence
  Description of Artificial Sequence: Synthetic oligonucleotide
cagggcaauaaucucagcg

SEQ ID NO: 1330818 - RNA, 19 nt, Artificial Sequence
  Description of Artificial Sequence: Synthetic oligonucleotide
aaagguuauaaagagcaau

SEQ ID NO: 1330819 - RNA, 19 nt, Artificial Sequence
  Description of Artificial Sequence: Synthetic oligonucleotide
acuaccaacauccucuggu

SEQ ID NO: 1330820 - RNA, 19 nt, Artificial Sequence
  Description of Artificial Sequence: Synthetic oligonucleotide
aucugaaaucccgauaucg

SEQ ID NO: 1330821 - RNA, 19 nt, Artificial Sequence
  Description of Artificial Sequence: Synthetic oligonucleotide
agaauacaagcacggcugc

SEQ ID NO: 1330822 - RNA, 19 nt, Artificial Sequence
  Description of Artificial Sequence: Synthetic oligonucleotide
cagaauacaagcacggcug

SEQ ID NO: 1330823 - RNA, 19 nt, Artificial Sequence
  Description of Artificial Sequence: Synthetic oligonucleotide
gauguuauacagaucaauc

SEQ ID NO: 1330824 - RNA, 19 nt, Artificial Sequence
  Description of Artificial Sequence: Synthetic oligonucleotide
aguaccccgagguaucccc

SEQ ID NO: 1330825 - RNA, 19 nt, Artificial Sequence
  Description of Artificial Sequence: Synthetic oligonucleotide
ugucuuaaacuccucggca

SEQ ID NO: 1330826 - RNA, 19 nt, Artificial Sequence
  Description of Artificial Sequence: Synthetic oligonucleotide
aaggaggacuaccaacauc

SEQ ID NO: 1330827 - RNA, 19 nt, Artificial Sequence
  Description of Artificial Sequence: Synthetic oligonucleotide
agcaguaagcuugauuggc

SEQ ID NO: 1330828 - RNA, 19 nt, Artificial Sequence
  Description of Artificial Sequence: Synthetic oligonucleotide
agucucucggucuaugguc

SEQ ID NO: 1330829 - RNA, 19 nt, Artificial Sequence
  Description of Artificial Sequence: Synthetic oligonucleotide
gagaguaaggcauccgcag

SEQ ID NO: 1330830 - RNA, 19 nt, Artificial Sequence
  Description of Artificial Sequence: Synthetic oligonucleotide
uggauguuagcauacuagu

SEQ ID NO: 1330831 - RNA, 19 nt, Artificial Sequence
  Description of Artificial Sequence: Synthetic oligonucleotide
auugauaacucagacauua

SEQ ID NO: 1330832 - RNA, 19 nt, Artificial Sequence
  Description of Artificial Sequence: Synthetic oligonucleotide
gaguucacaauuucacggc

SEQ ID NO: 1330833 - RNA, 19 nt, Artificial Sequence
  Description of Artificial Sequence: Synthetic oligonucleotide
gauaucgucauguacuugu

SEQ ID NO: 1330834 - RNA, 19 nt, Artificial Sequence
  Description of Artificial Sequence: Synthetic oligonucleotide
aaucccgauaucgucaugu

SEQ ID NO: 1330835 - RNA, 19 nt, Artificial Sequence
  Description of Artificial Sequence: Synthetic oligonucleotide
ugagaguaaggcauccgca

SEQ ID NO: 1330836 - RNA, 19 nt, Artificial Sequence
  Description of Artificial Sequence: Synthetic oligonucleotide
auaggcaucauagagccga

SEQ ID NO: 1330837 - RNA, 19 nt, Artificial Sequence
  Description of Artificial Sequence: Synthetic oligonucleotide
caggcagaauacaagcacg

SEQ ID NO: 1330838 - RNA, 19 nt, Artificial Sequence
  Description of Artificial Sequence: Synthetic oligonucleotide
agaugagacacgcugcgug

SEQ ID NO: 1330839 - RNA, 19 nt, Artificial Sequence
  Description of Artificial Sequence: Synthetic oligonucleotide
agcgaaguucuuccuaaac

SEQ ID NO: 1330840 - RNA, 19 nt, Artificial Sequence
  Description of Artificial Sequence: Synthetic oligonucleotide
cuugauuggcagcauuucc

SEQ ID NO: 1330841 - RNA, 19 nt, Artificial Sequence
  Description of Artificial Sequence: Synthetic oligonucleotide
agaguaaggcauccgcagg

SEQ ID NO: 1330842 - RNA, 19 nt, Artificial Sequence
  Description of Artificial Sequence: Synthetic oligonucleotide
ucuuccuaaacuccuuccu

SEQ ID NO: 1330843 - RNA, 19 nt, Artificial Sequence
  Description of Artificial Sequence: Synthetic oligonucleotide
agggagaucaaggaagggg

SEQ ID NO: 1330844 - RNA, 19 nt, Artificial Sequence
  Description of Artificial Sequence: Synthetic oligonucleotide
ucaauugcaguaucagggu

SEQ ID NO: 1330845 - RNA, 19 nt, Artificial Sequence
  Description of Artificial Sequence: Synthetic oligonucleotide
aggguaugaucaucgguac

SEQ ID NO: 1330846 - RNA, 19 nt, Artificial Sequence
  Description of Artificial Sequence: Synthetic oligonucleotide
ucaaucucgcuccucgaca

SEQ ID NO: 1330847 - RNA, 19 nt, Artificial Sequence
  Description of Artificial Sequence: Synthetic oligonucleotide
aauugcaguaucagggucu

SEQ ID NO: 1330848 - RNA, 19 nt, Artificial Sequence
  Description of Artificial Sequence: Synthetic oligonucleotide
uuccagucaguucugauuu

SEQ ID NO: 1330849 - RNA, 19 nt, Artificial Sequence
  Description of Artificial Sequence: Synthetic oligonucleotide
acuugagcaucaucaauug

SEQ ID NO: 1330850 - RNA, 19 nt, Artificial Sequence
  Description of Artificial Sequence: Synthetic oligonucleotide
aacgggaacgaugcgcucg

SEQ ID NO: 1330851 - RNA, 19 nt, Artificial Sequence
  Description of Artificial Sequence: Synthetic oligonucleotide
ucacccuugaucauagaau

SEQ ID NO: 1330852 - RNA, 19 nt, Artificial Sequence
  Description of Artificial Sequence: Synthetic oligonucleotide
uuccuaaacuccuuccuga

SEQ ID NO: 1330853 - RNA, 19 nt, Artificial Sequence
  Description of Artificial Sequence: Synthetic oligonucleotide
uugauaacucagacauuag

SEQ ID NO: 1330854 - RNA, 19 nt, Artificial Sequence
  Description of Artificial Sequence: Synthetic oligonucleotide
uucacaauuucacggcuaa

SEQ ID NO: 1330855 - RNA, 19 nt, Artificial Sequence
  Description of Artificial Sequence: Synthetic oligonucleotide
ugagcauccaguucaacuu

SEQ ID NO: 1330856 - RNA, 19 nt, Artificial Sequence
  Description of Artificial Sequence: Synthetic oligonucleotide
gguuauaaagagcaaucug

SEQ ID NO: 1330857 - RNA, 19 nt, Artificial Sequence
  Description of Artificial Sequence: Synthetic oligonucleotide
gaagguccuugccaaacag

SEQ ID NO: 1330858 - RNA, 19 nt, Artificial Sequence
  Description of Artificial Sequence: Synthetic oligonucleotide
cuuguuuuaugacccuuag

SEQ ID NO: 1330859 - RNA, 19 nt, Artificial Sequence
  Description of Artificial Sequence: Synthetic oligonucleotide
ucgagauguaagcaggguc

SEQ ID NO: 1330860 - RNA, 19 nt, Artificial Sequence
  Description of Artificial Sequence: Synthetic oligonucleotide
ccugauguuauacagauca

SEQ ID NO: 1330861 - RNA, 19 nt, Artificial Sequence
  Description of Artificial Sequence: Synthetic oligonucleotide
agaauacagagagguagcg

SEQ ID NO: 1330862 - RNA, 19 nt, Artificial Sequence
  Description of Artificial Sequence: Synthetic oligonucleotide
cucuauuugccugaaggag

SEQ ID NO: 1330863 - RNA, 19 nt, Artificial Sequence
  Description of Artificial Sequence: Synthetic oligonucleotide
auggugauaaacuucucuu

SEQ ID NO: 1330864 - RNA, 19 nt, Artificial Sequence
  Description of Artificial Sequence: Synthetic oligonucleotide
gguaauaugguuauuaacu

SEQ ID NO: 1330865 - RNA, 19 nt, Artificial Sequence
  Description of Artificial Sequence: Synthetic oligonucleotide
ugauuucaggucauccaga

SEQ ID NO: 1330866 - RNA, 19 nt, Artificial Sequence
  Description of Artificial Sequence: Synthetic oligonucleotide
uccgaauagacuucaccac

SEQ ID NO: 1330867 - RNA, 19 nt, Artificial Sequence
  Description of Artificial Sequence: Synthetic oligonucleotide
acuuagagacaaaugaaga

SEQ ID NO: 1330868 - RNA, 19 nt, Artificial Sequence
  Description of Artificial Sequence: Synthetic oligonucleotide
ugaggguaugaucaucggu

SEQ ID NO: 1330869 - RNA, 19 nt, Artificial Sequence
  Description of Artificial Sequence: Synthetic oligonucleotide
aagucucucggucuauggu

SEQ ID NO: 1330870 - RNA, 19 nt, Artificial Sequence
  Description of Artificial Sequence: Synthetic oligonucleotide
uuccgauccagguaauaug

SEQ ID NO: 1330871 - RNA, 19 nt, Artificial Sequence
  Description of Artificial Sequence: Synthetic oligonucleotide
caguauugauaacucagac

SEQ ID NO: 1330872 - RNA, 19 nt, Artificial Sequence
  Description of Artificial Sequence: Synthetic oligonucleotide
cucagaugagacacgcugc

SEQ ID NO: 1330873 - RNA, 19 nt, Artificial Sequence
  Description of Artificial Sequence: Synthetic oligonucleotide
uccaaguucccugaagucu

SEQ ID NO: 1330874 - RNA, 19 nt, Artificial Sequence
  Description of Artificial Sequence: Synthetic oligonucleotide
aaugagccggggcgagacc

SEQ ID NO: 1330875 - RNA, 19 nt, Artificial Sequence
  Description of Artificial Sequence: Synthetic oligonucleotide
gugagaguaaggcauccgc

SEQ ID NO: 1330876 - RNA, 19 nt, Artificial Sequence
  Description of Artificial Sequence: Synthetic oligonucleotide
uguacuugucaaacacucu

SEQ ID NO: 1330877 - RNA, 19 nt, Artificial Sequence
  Description of Artificial Sequence: Synthetic oligonucleotide
ucaaucugaaaucccgaua

SEQ ID NO: 1330878 - RNA, 19 nt, Artificial Sequence
  Description of Artificial Sequence: Synthetic oligonucleotide
cagacauuagacuuagaga

SEQ ID NO: 1330879 - RNA, 19 nt, Artificial Sequence
  Description of Artificial Sequence: Synthetic oligonucleotide
uaucagggucucuauuugc

SEQ ID NO: 1330880 - RNA, 19 nt, Artificial Sequence
  Description of Artificial Sequence: Synthetic oligonucleotide
gaugcgcucgccgagagac

SEQ ID NO: 1330881 - RNA, 19 nt, Artificial Sequence
  Description of Artificial Sequence: Synthetic oligonucleotide
ugcaagguaggcagguaug

SEQ ID NO: 1330882 - RNA, 19 nt, Artificial Sequence
  Description of Artificial Sequence: Synthetic oligonucleotide
gaucaucgguaccagcacc

SEQ ID NO: 1330883 - RNA, 19 nt, Artificial Sequence
  Description of Artificial Sequence: Synthetic oligonucleotide
uuugcaggucugauagagc

SEQ ID NO: 1330884 - RNA, 19 nt, Artificial Sequence
  Description of Artificial Sequence: Synthetic oligonucleotide
cuucgagauguaagcaggg

SEQ ID NO: 1330885 - RNA, 19 nt, Artificial Sequence
  Description of Artificial Sequence: Synthetic oligonucleotide
gugucuuaaacuccucggc

SEQ ID NO: 1330886 - RNA, 19 nt, Artificial Sequence
  Description of Artificial Sequence: Synthetic oligonucleotide
cugcaugugcugaaggaag

SEQ ID NO: 1330887 - RNA, 19 nt, Artificial Sequence
  Description of Artificial Sequence: Synthetic oligonucleotide
aguacccaagccuuucaug

SEQ ID NO: 1330888 - RNA, 19 nt, Artificial Sequence
  Description of Artificial Sequence: Synthetic oligonucleotide
uauacagaucaaucucgcu

SEQ ID NO: 1330889 - RNA, 19 nt, Artificial Sequence
  Description of Artificial Sequence: Synthetic oligonucleotide
uccaguucaacuugagcau

SEQ ID NO: 1330890 - RNA, 19 nt, Artificial Sequence
  Description of Artificial Sequence: Synthetic oligonucleotide
cugaaaucccgauaucguc

SEQ ID NO: 1330891 - RNA, 19 nt, Artificial Sequence
  Description of Artificial Sequence: Synthetic oligonucleotide
ugaucaucgguaccagcac

SEQ ID NO: 1330892 - RNA, 19 nt, Artificial Sequence
  Description of Artificial Sequence: Synthetic oligonucleotide
cacggugccucugagaacc

SEQ ID NO: 1330893 - RNA, 19 nt, Artificial Sequence
  Description of Artificial Sequence: Synthetic oligonucleotide
uaaggcauccgcaggcaga

SEQ ID NO: 1330894 - RNA, 19 nt, Artificial Sequence
  Description of Artificial Sequence: Synthetic oligonucleotide
gauggugauaaacuucucu

SEQ ID NO: 1330895 - RNA, 19 nt, Artificial Sequence
  Description of Artificial Sequence: Synthetic oligonucleotide
acgggcaagaacgggaacg

SEQ ID NO: 1330896 - RNA, 19 nt, Artificial Sequence
  Description of Artificial Sequence: Synthetic oligonucleotide
agccgagaaggcuucauca

SEQ ID NO: 1330897 - RNA, 19 nt, Artificial Sequence
  Description of Artificial Sequence: Synthetic oligonucleotide
guaucagggucucuauuug

SEQ ID NO: 1330898 - RNA, 19 nt, Artificial Sequence
  Description of Artificial Sequence: Synthetic oligonucleotide
ggaaaggaauguuuauuug

SEQ ID NO: 1330899 - RNA, 19 nt, Artificial Sequence
  Description of Artificial Sequence: Synthetic oligonucleotide
agguuauaaagagcaaucu

SEQ ID NO: 1330900 - RNA, 19 nt, Artificial Sequence
  Description of Artificial Sequence: Synthetic oligonucleotide
cuugagcaucaucaauugc

SEQ ID NO: 1330901 - RNA, 19 nt, Artificial Sequence
  Description of Artificial Sequence: Synthetic oligonucleotide
augaggguaugaucaucgg

SEQ ID NO: 1330902 - RNA, 19 nt, Artificial Sequence
  Description of Artificial Sequence: Synthetic oligonucleotide
acucagacauuagacuuag

SEQ ID NO: 1330903 - RNA, 19 nt, Artificial Sequence
  Description of Artificial Sequence: Synthetic oligonucleotide
uuuauuugucauucaucuu

SEQ ID NO: 1330904 - RNA, 19 nt, Artificial Sequence
  Description of Artificial Sequence: Synthetic oligonucleotide
acgggaacgaugcgcucgc

SEQ ID NO: 1330905 - RNA, 19 nt, Artificial Sequence
  Description of Artificial Sequence: Synthetic oligonucleotide
uuagcauacuagugagagu

SEQ ID NO: 1330906 - RNA, 19 nt, Artificial Sequence
  Description of Artificial Sequence: Synthetic oligonucleotide
gaggguaugaucaucggua

SEQ ID NO: 1330907 - RNA, 19 nt, Artificial Sequence
  Description of Artificial Sequence: Synthetic oligonucleotide
uccuccgcagagcagcagc

SEQ ID NO: 1330908 - RNA, 19 nt, Artificial Sequence
  Description of Artificial Sequence: Synthetic oligonucleotide
cagagcgcaggcuacgggc

SEQ ID NO: 1330909 - RNA, 19 nt, Artificial Sequence
  Description of Artificial Sequence: Synthetic oligonucleotide
aucgguaccagcacccuuc

SEQ ID NO: 1330910 - RNA, 19 nt, Artificial Sequence
  Description of Artificial Sequence: Synthetic oligonucleotide
cuauuugccugaaggagga

SEQ ID NO: 1330911 - RNA, 19 nt, Artificial Sequence
  Description of Artificial Sequence: Synthetic oligonucleotide
gcaagaacgggaacgaugc

SEQ ID NO: 1330912 - RNA, 19 nt, Artificial Sequence
  Description of Artificial Sequence: Synthetic oligonucleotide
caaucucgcuccucgacac

SEQ ID NO: 1330913 - RNA, 19 nt, Artificial Sequence
  Description of Artificial Sequence: Synthetic oligonucleotide
gagacagggcaauaaucuc

SEQ ID NO: 1330914 - RNA, 19 nt, Artificial Sequence
  Description of Artificial Sequence: Synthetic oligonucleotide
ccuugaucauagaauacag

SEQ ID NO: 1330915 - RNA, 19 nt, Artificial Sequence
  Description of Artificial Sequence: Synthetic oligonucleotide
acaguauugauaacucaga

SEQ ID NO: 1330916 - RNA, 19 nt, Artificial Sequence
  Description of Artificial Sequence: Synthetic oligonucleotide
ucauagagccgagaaggcu

SEQ ID NO: 1330917 - RNA, 19 nt, Artificial Sequence
  Description of Artificial Sequence: Synthetic oligonucleotide
ucggcaauuuccuggcgcu

SEQ ID NO: 1330918 - RNA, 19 nt, Artificial Sequence
  Description of Artificial Sequence: Synthetic oligonucleotide
cuccucgacaccacgacuc

SEQ ID NO: 1330919 - RNA, 19 nt, Artificial Sequence
  Description of Artificial Sequence: Synthetic oligonucleotide
uacaagcacggcugcaugu

SEQ ID NO: 1330920 - RNA, 19 nt, Artificial Sequence
  Description of Artificial Sequence: Synthetic oligonucleotide
ucccgauaucgucauguac

SEQ ID NO: 1330921 - RNA, 19 nt, Artificial Sequence
  Description of Artificial Sequence: Synthetic oligonucleotide
cuagugagaguaaggcauc

SEQ ID NO: 1330922 - RNA, 19 nt, Artificial Sequence
  Description of Artificial Sequence: Synthetic oligonucleotide
cuccgugcaacggaaacgc

SEQ ID NO: 1330923 - RNA, 19 nt, Artificial Sequence
  Description of Artificial Sequence: Synthetic oligonucleotide
agaagguccuugccaaaca

SEQ ID NO: 1330924 - RNA, 19 nt, Artificial Sequence
  Description of Artificial Sequence: Synthetic oligonucleotide
cacgcugcguguuccaaag

SEQ ID NO: 1330925 - RNA, 19 nt, Artificial Sequence
  Description of Artificial Sequence: Synthetic oligonucleotide
agacagggcaauaaucuca

SEQ ID NO: 1330926 - RNA, 19 nt, Artificial Sequence
  Description of Artificial Sequence: Synthetic oligonucleotide
agugagaguaaggcauccg

SEQ ID NO: 1330927 - RNA, 19 nt, Artificial Sequence
  Description of Artificial Sequence: Synthetic oligonucleotide
auaauuuugcaggucugau

SEQ ID NO: 1330928 - RNA, 19 nt, Artificial Sequence
  Description of Artificial Sequence: Synthetic oligonucleotide
gagauguaagcagggucag

SEQ ID NO: 1330929 - RNA, 19 nt, Artificial Sequence
  Description of Artificial Sequence: Synthetic oligonucleotide
guagcgaaguucuuccuaa

SEQ ID NO: 1330930 - RNA, 19 nt, Artificial Sequence
  Description of Artificial Sequence: Synthetic oligonucleotide
guaugcuccgaauagacuu

SEQ ID NO: 1330931 - RNA, 19 nt, Artificial Sequence
  Description of Artificial Sequence: Synthetic oligonucleotide
uaucauaauuuugcagguc

SEQ ID NO: 1330932 - RNA, 19 nt, Artificial Sequence
  Description of Artificial Sequence: Synthetic oligonucleotide
agcucauaggcaucauaga

SEQ ID NO: 1330933 - RNA, 19 nt, Artificial Sequence
  Description of Artificial Sequence: Synthetic oligonucleotide
agacuuagagacaaaugaa

SEQ ID NO: 1330934 - RNA, 19 nt, Artificial Sequence
  Description of Artificial Sequence: Synthetic oligonucleotide
auuucacggcuaagguucc

SEQ ID NO: 1330935 - RNA, 19 nt, Artificial Sequence
  Description of Artificial Sequence: Synthetic oligonucleotide
gcuucgagauguaagcagg

SEQ ID NO: 1330936 - RNA, 19 nt, Artificial Sequence
  Description of Artificial Sequence: Synthetic oligonucleotide
cucugaugaggguaugauc

SEQ ID NO: 1330937 - RNA, 19 nt, Artificial Sequence
  Description of Artificial Sequence: Synthetic oligonucleotide
augagccggggcgagaccg

SEQ ID NO: 1330938 - RNA, 19 nt, Artificial Sequence
  Description of Artificial Sequence: Synthetic oligonucleotide
agaacgggaacgaugcgcu

SEQ ID NO: 1330939 - RNA, 19 nt, Artificial Sequence
  Description of Artificial Sequence: Synthetic oligonucleotide
ugagcucauaggcaucaua

SEQ ID NO: 1330940 - RNA, 19 nt, Artificial Sequence
  Description of Artificial Sequence: Synthetic oligonucleotide
uacccaagccuuucauggc

SEQ ID NO: 1330941 - RNA, 19 nt, Artificial Sequence
  Description of Artificial Sequence: Synthetic oligonucleotide
gaggacuaccaacauccuc

SEQ ID NO: 1330942 - RNA, 19 nt, Artificial Sequence
  Description of Artificial Sequence: Synthetic oligonucleotide
aucucagcggcuccgugca

SEQ ID NO: 1330943 - RNA, 19 nt, Artificial Sequence
  Description of Artificial Sequence: Synthetic oligonucleotide
gacccuuaguucuucaggu

SEQ ID NO: 1330944 - RNA, 19 nt, Artificial Sequence
  Description of Artificial Sequence: Synthetic oligonucleotide
gacuaccaacauccucugg

SEQ ID NO: 1330945 - RNA, 19 nt, Artificial Sequence
  Description of Artificial Sequence: Synthetic oligonucleotide
uaaucucagcggcuccgug

SEQ ID NO: 1330946 - RNA, 19 nt, Artificial Sequence
  Description of Artificial Sequence: Synthetic oligonucleotide
gaacgaugcgcucgccgag

SEQ ID NO: 1330947 - RNA, 19 nt, Artificial Sequence
  Description of Artificial Sequence: Synthetic oligonucleotide
ugaucucuuuauagacagu

SEQ ID NO: 1330948 - RNA, 19 nt, Artificial Sequence
  Description of Artificial Sequence: Synthetic oligonucleotide
gucacccuugaucauagaa

SEQ ID NO: 1330949 - RNA, 19 nt, Artificial Sequence
  Description of Artificial Sequence: Synthetic oligonucleotide
ugugucacccuugaucaua

SEQ ID NO: 1330950 - RNA, 19 nt, Artificial Sequence
  Description of Artificial Sequence: Synthetic oligonucleotide
uugcuucgagauguaagca

SEQ ID NO: 1330951 - RNA, 19 nt, Artificial Sequence
  Description of Artificial Sequence: Synthetic oligonucleotide
cucgccgagagacagggca

SEQ ID NO: 1330952 - RNA, 19 nt, Artificial Sequence
  Description of Artificial Sequence: Synthetic oligonucleotide
aggggugugccacuacugu

SEQ ID NO: 1330953 - RNA, 19 nt, Artificial Sequence
  Description of Artificial Sequence: Synthetic oligonucleotide
gacgcuguuggucaggaau

SEQ ID NO: 1330954 - RNA, 19 nt, Artificial Sequence
  Description of Artificial Sequence: Synthetic oligonucleotide
cacccuugaucauagaaua

SEQ ID NO: 1330955 - RNA, 19 nt, Artificial Sequence
  Description of Artificial Sequence: Synthetic oligonucleotide
aaaucccgauaucgucaug

SEQ ID NO: 1330956 - RNA, 19 nt, Artificial Sequence
  Description of Artificial Sequence: Synthetic oligonucleotide
auagagccgagaaggcuuc

SEQ ID NO: 1330957 - RNA, 19 nt, Artificial Sequence
  Description of Artificial Sequence: Synthetic oligonucleotide
acccuuaguucuucaggug

SEQ ID NO: 1330958 - RNA, 19 nt, Artificial Sequence
  Description of Artificial Sequence: Synthetic oligonucleotide
ugcgcucgccgagagacag

SEQ ID NO: 1330959 - RNA, 19 nt, Artificial Sequence
  Description of Artificial Sequence: Synthetic oligonucleotide
agggucucuauuugccuga

SEQ ID NO: 1330960 - RNA, 19 nt, Artificial Sequence
  Description of Artificial Sequence: Synthetic oligonucleotide
gaaugagccggggcgagac

SEQ ID NO: 1330961 - RNA, 19 nt, Artificial Sequence
  Description of Artificial Sequence: Synthetic oligonucleotide
gcuaucaaauccagggaag

SEQ ID NO: 1330962 - RNA, 19 nt, Artificial Sequence
  Description of Artificial Sequence: Synthetic oligonucleotide
uucucagaugagacacgcu

SEQ ID NO: 1330963 - RNA, 19 nt, Artificial Sequence
  Description of Artificial Sequence: Synthetic oligonucleotide
cacuacugucaucugugac

SEQ ID NO: 1330964 - RNA, 19 nt, Artificial Sequence
  Description of Artificial Sequence: Synthetic oligonucleotide
uagagggucucugcaaggu

SEQ ID NO: 1330965 - RNA, 19 nt, Artificial Sequence
  Description of Artificial Sequence: Synthetic oligonucleotide
uucgagauguaagcagggu

SEQ ID NO: 1330966 - RNA, 19 nt, Artificial Sequence
  Description of Artificial Sequence: Synthetic oligonucleotide
uuccgaagaguuucugcau

SEQ ID NO: 1330967 - RNA, 19 nt, Artificial Sequence
  Description of Artificial Sequence: Synthetic oligonucleotide
ugagacacgcugcguguuc

SEQ ID NO: 1330968 - RNA, 19 nt, Artificial Sequence
  Description of Artificial Sequence: Synthetic oligonucleotide
uaggcagguaugcuccgaa

SEQ ID NO: 1330969 - RNA, 19 nt, Artificial Sequence
  Description of Artificial Sequence: Synthetic oligonucleotide
ggauguuagcauacuagug

SEQ ID NO: 1330970 - RNA, 19 nt, Artificial Sequence
  Description of Artificial Sequence: Synthetic oligonucleotide
uucacggcuaagguuccga

SEQ ID NO: 1330971 - RNA, 19 nt, Artificial Sequence
  Description of Artificial Sequence: Synthetic oligonucleotide
cucgacaccacgacucuga

SEQ ID NO: 1330972 - RNA, 19 nt, Artificial Sequence
  Description of Artificial Sequence: Synthetic oligonucleotide
cucugguaguaccccgagg

SEQ ID NO: 1330973 - RNA, 19 nt, Artificial Sequence
  Description of Artificial Sequence: Synthetic oligonucleotide
uccucgacaccacgacucu

SEQ ID NO: 1330974 - RNA, 19 nt, Artificial Sequence
  Description of Artificial Sequence: Synthetic oligonucleotide
gagacacgcugcguguucc

SEQ ID NO: 1330975 - RNA, 19 nt, Artificial Sequence
  Description of Artificial Sequence: Synthetic oligonucleotide
ggcaagaacgggaacgaug

SEQ ID NO: 1330976 - RNA, 19 nt, Artificial Sequence
  Description of Artificial Sequence: Synthetic oligonucleotide
ggcaucauagagccgagaa

SEQ ID NO: 1330977 - RNA, 19 nt, Artificial Sequence
  Description of Artificial Sequence: Synthetic oligonucleotide
gugucacccuugaucauag

SEQ ID NO: 1330978 - RNA, 19 nt, Artificial Sequence
  Description of Artificial Sequence: Synthetic oligonucleotide
uccugauguuauacagauc

SEQ ID NO: 1330979 - RNA, 19 nt, Artificial Sequence
  Description of Artificial Sequence: Synthetic oligonucleotide
cauagaauacagagaggua

SEQ ID NO: 1330980 - RNA, 19 nt, Artificial Sequence
  Description of Artificial Sequence: Synthetic oligonucleotide
uuucacggcuaagguuccg

SEQ ID NO: 1330981 - RNA, 19 nt, Artificial Sequence
  Description of Artificial Sequence: Synthetic oligonucleotide
caacggaaacgcccuggcc

SEQ ID NO: 1330982 - RNA, 19 nt, Artificial Sequence
  Description of Artificial Sequence: Synthetic oligonucleotide
gggaacgaugcgcucgccg

SEQ ID NO: 1330983 - RNA, 19 nt, Artificial Sequence
  Description of Artificial Sequence: Synthetic oligonucleotide
acucugaugaggguaugau

SEQ ID NO: 1330984 - RNA, 19 nt, Artificial Sequence
  Description of Artificial Sequence: Synthetic oligonucleotide
gcgugcuugagcucauagg

SEQ ID NO: 1330985 - RNA, 19 nt, Artificial Sequence
  Description of Artificial Sequence: Synthetic oligonucleotide
acagaucaaucucgcuccu

SEQ ID NO: 1330986 - RNA, 19 nt, Artificial Sequence
  Description of Artificial Sequence: Synthetic oligonucleotide
ucgguaccagcacccuuca

SEQ ID NO: 1330987 - RNA, 19 nt, Artificial Sequence
  Description of Artificial Sequence: Synthetic oligonucleotide
uugauacaacuaucauaau

SEQ ID NO: 1330988 - RNA, 19 nt, Artificial Sequence
  Description of Artificial Sequence: Synthetic oligonucleotide
acgucaucuuccaggcugg

SEQ ID NO: 1330989 - RNA, 19 nt, Artificial Sequence
  Description of Artificial Sequence: Synthetic oligonucleotide
ucgcuccucgacaccacga

SEQ ID NO: 1330990 - RNA, 19 nt, Artificial Sequence
  Description of Artificial Sequence: Synthetic oligonucleotide
cgaauagacuucaccacag

SEQ ID NO: 1330991 - RNA, 19 nt, Artificial Sequence
  Description of Artificial Sequence: Synthetic oligonucleotide
cuaagguuccgauccaggu

SEQ ID NO: 1330992 - RNA, 19 nt, Artificial Sequence
  Description of Artificial Sequence: Synthetic oligonucleotide
gaaaucccgauaucgucau

SEQ ID NO: 1330993 - RNA, 19 nt, Artificial Sequence
  Description of Artificial Sequence: Synthetic oligonucleotide
ccaaguucccugaagucuc

SEQ ID NO: 1330994 - RNA, 19 nt, Artificial Sequence
  Description of Artificial Sequence: Synthetic oligonucleotide
aacgaugcgcucgccgaga

SEQ ID NO: 1330995 - RNA, 19 nt, Artificial Sequence
  Description of Artificial Sequence: Synthetic oligonucleotide
uccgugcaacggaaacgcc

SEQ ID NO: 1330996 - RNA, 19 nt, Artificial Sequence
  Description of Artificial Sequence: Synthetic oligonucleotide
ccgcaggcagaauacaagc

SEQ ID NO: 1330997 - RNA, 19 nt, Artificial Sequence
  Description of Artificial Sequence: Synthetic oligonucleotide
caggcuggaaccauauucu

SEQ ID NO: 1330998 - RNA, 19 nt, Artificial Sequence
  Description of Artificial Sequence: Synthetic oligonucleotide
ggaacgaugcgcucgccga

SEQ ID NO: 1330999 - RNA, 19 nt, Artificial Sequence
  Description of Artificial Sequence: Synthetic oligonucleotide
gccgagaaggcuucaucag

SEQ ID NO: 1331000 - RNA, 19 nt, Artificial Sequence
  Description of Artificial Sequence: Synthetic oligonucleotide
gcuaagguuccgauccagg

SEQ ID NO: 1331001 - RNA, 19 nt, Artificial Sequence
  Description of Artificial Sequence: Synthetic oligonucleotide
agcggcuccgugcaacgga

SEQ ID NO: 1331002 - RNA, 19 nt, Artificial Sequence
  Description of Artificial Sequence: Synthetic oligonucleotide
ccgugcaacggaaacgccc

SEQ ID NO: 1331003 - RNA, 19 nt, Artificial Sequence
  Description of Artificial Sequence: Synthetic oligonucleotide
agggucucugcaagguagg

SEQ ID NO: 1331004 - RNA, 19 nt, Artificial Sequence
  Description of Artificial Sequence: Synthetic oligonucleotide
acgaugcgcucgccgagag

SEQ ID NO: 1331005 - RNA, 19 nt, Artificial Sequence
  Description of Artificial Sequence: Synthetic oligonucleotide
uacgggcaagaacgggaac

SEQ ID NO: 1331006 - RNA, 19 nt, Artificial Sequence
  Description of Artificial Sequence: Synthetic oligonucleotide
ucgccgagagacagggcaa

SEQ ID NO: 1331007 - RNA, 19 nt, Artificial Sequence
  Description of Artificial Sequence: Synthetic oligonucleotide
cauagagccgagaaggcuu

SEQ ID NO: 1331008 - RNA, 19 nt, Artificial Sequence
  Description of Artificial Sequence: Synthetic oligonucleotide
ucacggcuaagguuccgau

SEQ ID NO: 1331009 - RNA, 19 nt, Artificial Sequence
  Description of Artificial Sequence: Synthetic oligonucleotide
agguagcgaaguucuuccu

SEQ ID NO: 1331010 - RNA, 19 nt, Artificial Sequence
  Description of Artificial Sequence: Synthetic oligonucleotide
uccagucaguucugauuuc

SEQ ID NO: 1331011 - RNA, 19 nt, Artificial Sequence
  Description of Artificial Sequence: Synthetic oligonucleotide
gguaggcagguaugcuccg

SEQ ID NO: 1331012 - RNA, 19 nt, Artificial Sequence
  Description of Artificial Sequence: Synthetic oligonucleotide
gcaagguaggcagguaugc

SEQ ID NO: 1331013 - RNA, 19 nt, Artificial Sequence
  Description of Artificial Sequence: Synthetic oligonucleotide
gagaucaaggaaggggugu

SEQ ID NO: 1331014 - RNA, 19 nt, Artificial Sequence
  Description of Artificial Sequence: Synthetic oligonucleotide
guaguaccccgagguaucc

SEQ ID NO: 1331015 - RNA, 19 nt, Artificial Sequence
  Description of Artificial Sequence: Synthetic oligonucleotide
aagagcaaucugaucucuu

SEQ ID NO: 1331016 - RNA, 19 nt, Artificial Sequence
  Description of Artificial Sequence: Synthetic oligonucleotide
auaugguuauuaacuuaau

SEQ ID NO: 1331017 - RNA, 19 nt, Artificial Sequence
  Description of Artificial Sequence: Synthetic oligonucleotide
ucauuggucccagcucccu

SEQ ID NO: 1331018 - RNA, 19 nt, Artificial Sequence
  Description of Artificial Sequence: Synthetic oligonucleotide
gagggaaaggaauguuuau

SEQ ID NO: 1331019 - RNA, 19 nt, Artificial Sequence
  Description of Artificial Sequence: Synthetic oligonucleotide
ucgacaccacgacucugau

SEQ ID NO: 1331020 - RNA, 19 nt, Artificial Sequence
  Description of Artificial Sequence: Synthetic oligonucleotide
ugcuccgaauagacuucac

SEQ ID NO: 1331021 - RNA, 19 nt, Artificial Sequence
  Description of Artificial Sequence: Synthetic oligonucleotide
ggguaugaucaucgguacc

SEQ ID NO: 1331022 - RNA, 19 nt, Artificial Sequence
  Description of Artificial Sequence: Synthetic oligonucleotide
guguccuugaagcaauaau

SEQ ID NO: 1331023 - RNA, 19 nt, Artificial Sequence
  Description of Artificial Sequence: Synthetic oligonucleotide
gcaacggaaacgcccuggc

SEQ ID NO: 1331024 - RNA, 19 nt, Artificial Sequence
  Description of Artificial Sequence: Synthetic oligonucleotide
gcuccgugcaacggaaacg

SEQ ID NO: 1331025 - RNA, 19 nt, Artificial Sequence
  Description of Artificial Sequence: Synthetic oligonucleotide
accgcagagcgcaggcuac

SEQ ID NO: 1331026 - RNA, 19 nt, Artificial Sequence
  Description of Artificial Sequence: Synthetic oligonucleotide
cugauguuauacagaucaa

SEQ ID NO: 1331027 - RNA, 19 nt, Artificial Sequence
  Description of Artificial Sequence: Synthetic oligonucleotide
ucaucgguaccagcacccu

SEQ ID NO: 1331028 - RNA, 19 nt, Artificial Sequence
  Description of Artificial Sequence: Synthetic oligonucleotide
cuacgggcaagaacgggaa

SEQ ID NO: 1331029 - RNA, 19 nt, Artificial Sequence
  Description of Artificial Sequence: Synthetic oligonucleotide
gaagcugauggaggcggca

SEQ ID NO: 1331030 - RNA, 19 nt, Artificial Sequence
  Description of Artificial Sequence: Synthetic oligonucleotide
caauuuccuggcgcugagc

SEQ ID NO: 1331031 - RNA, 19 nt, Artificial Sequence
  Description of Artificial Sequence: Synthetic oligonucleotide
ggacuaccaacauccucug

SEQ ID NO: 1331032 - RNA, 19 nt, Artificial Sequence
  Description of Artificial Sequence: Synthetic oligonucleotide
ucacggugccucugagaac

SEQ ID NO: 1331033 - RNA, 19 nt, Artificial Sequence
  Description of Artificial Sequence: Synthetic oligonucleotide
uaguaccccgagguauccc

SEQ ID NO: 1331034 - RNA, 19 nt, Artificial Sequence
  Description of Artificial Sequence: Synthetic oligonucleotide
acgacucugaugaggguau

SEQ ID NO: 1331035 - RNA, 19 nt, Artificial Sequence
  Description of Artificial Sequence: Synthetic oligonucleotide
acacgcugcguguuccaaa

SEQ ID NO: 1331036 - RNA, 19 nt, Artificial Sequence
  Description of Artificial Sequence: Synthetic oligonucleotide
cucagcggcuccgugcaac

SEQ ID NO: 1331037 - RNA, 19 nt, Artificial Sequence
  Description of Artificial Sequence: Synthetic oligonucleotide
cucaaucugaaaucccgau

SEQ ID NO: 1331038 - RNA, 19 nt, Artificial Sequence
  Description of Artificial Sequence: Synthetic oligonucleotide
ggcagaauacaagcacggc

SEQ ID NO: 1331039 - RNA, 19 nt, Artificial Sequence
  Description of Artificial Sequence: Synthetic oligonucleotide
acaccacgacucugaugag

SEQ ID NO: 1331040 - RNA, 19 nt, Artificial Sequence
  Description of Artificial Sequence: Synthetic oligonucleotide
ugugacacuuuuggauguu

SEQ ID NO: 1331041 - RNA, 19 nt, Artificial Sequence
  Description of Artificial Sequence: Synthetic oligonucleotide
gcaggcuacgggcaagaac

SEQ ID NO: 1331042 - RNA, 19 nt, Artificial Sequence
  Description of Artificial Sequence: Synthetic oligonucleotide
gaaggaggacuaccaacau

SEQ ID NO: 1331043 - RNA, 19 nt, Artificial Sequence
  Description of Artificial Sequence: Synthetic oligonucleotide
ggagaucaaggaaggggug

SEQ ID NO: 1331044 - RNA, 19 nt, Artificial Sequence
  Description of Artificial Sequence: Synthetic oligonucleotide
ccgaauagacuucaccaca

SEQ ID NO: 1331045 - RNA, 19 nt, Artificial Sequence
  Description of Artificial Sequence: Synthetic oligonucleotide
augcuccgaauagacuuca

SEQ ID NO: 1331046 - RNA, 19 nt, Artificial Sequence
  Description of Artificial Sequence: Synthetic oligonucleotide
agacacgcugcguguucca

SEQ ID NO: 1331047 - RNA, 19 nt, Artificial Sequence
  Description of Artificial Sequence: Synthetic oligonucleotide
gguagcgaaguucuuccua

SEQ ID NO: 1331048 - RNA, 19 nt, Artificial Sequence
  Description of Artificial Sequence: Synthetic oligonucleotide
ggcuccgugcaacggaaac

SEQ ID NO: 1331049 - RNA, 19 nt, Artificial Sequence
  Description of Artificial Sequence: Synthetic oligonucleotide
ggcgagaccgcagagcgca

SEQ ID NO: 1331050 - RNA, 19 nt, Artificial Sequence
  Description of Artificial Sequence: Synthetic oligonucleotide
gcuacgggcaagaacggga

SEQ ID NO: 1331051 - RNA, 19 nt, Artificial Sequence
  Description of Artificial Sequence: Synthetic oligonucleotide
agagcgcaggcuacgggca

SEQ ID NO: 1331052 - RNA, 19 nt, Artificial Sequence
  Description of Artificial Sequence: Synthetic oligonucleotide
gcagagcgcaggcuacggg

SEQ ID NO: 1331053 - RNA, 19 nt, Artificial Sequence
  Description of Artificial Sequence: Synthetic oligonucleotide
gaacgggaacgaugcgcuc

SEQ ID NO: 1331054 - RNA, 19 nt, Artificial Sequence
  Description of Artificial Sequence: Synthetic oligonucleotide
ggcagguaugcuccgaaua

SEQ ID NO: 1331055 - RNA, 19 nt, Artificial Sequence
  Description of Artificial Sequence: Synthetic oligonucleotide
guuccgauccagguaauau

SEQ ID NO: 1331056 - RNA, 19 nt, Artificial Sequence
  Description of Artificial Sequence: Synthetic oligonucleotide
gggugugccacuacuguca

SEQ ID NO: 1331057 - RNA, 19 nt, Artificial Sequence
  Description of Artificial Sequence: Synthetic oligonucleotide
aggcagguaugcuccgaau

SEQ ID NO: 1331058 - RNA, 19 nt, Artificial Sequence
  Description of Artificial Sequence: Synthetic oligonucleotide
cacgacucugaugagggua

SEQ ID NO: 1331059 - RNA, 19 nt, Artificial Sequence
  Description of Artificial Sequence: Synthetic oligonucleotide
cagguaugcuccgaauaga

SEQ ID NO: 1331060 - RNA, 19 nt, Artificial Sequence
  Description of Artificial Sequence: Synthetic oligonucleotide
auccgcaggcagaauacaa

SEQ ID NO: 1331061 - RNA, 19 nt, Artificial Sequence
  Description of Artificial Sequence: Synthetic oligonucleotide
gcaguaagcuugauuggca

SEQ ID NO: 1331062 - RNA, 19 nt, Artificial Sequence
  Description of Artificial Sequence: Synthetic oligonucleotide
aggcuacgggcaagaacgg

SEQ ID NO: 1331063 - RNA, 19 nt, Artificial Sequence
  Description of Artificial Sequence: Synthetic oligonucleotide
cccugcuaucaaauccagg

SEQ ID NO: 1331064 - RNA, 19 nt, Artificial Sequence
  Description of Artificial Sequence: Synthetic oligonucleotide
ggucucuauuugccugaag

SEQ ID NO: 1331065 - RNA, 19 nt, Artificial Sequence
  Description of Artificial Sequence: Synthetic oligonucleotide
ggcauccgcaggcagaaua

SEQ ID NO: 1331066 - RNA, 19 nt, Artificial Sequence
  Description of Artificial Sequence: Synthetic oligonucleotide
ggcuaagguuccgauccag

SEQ ID NO: 1331067 - RNA, 19 nt, Artificial Sequence
  Description of Artificial Sequence: Synthetic oligonucleotide
uuucugcaucagcccugcu

SEQ ID NO: 1331068 - RNA, 19 nt, Artificial Sequence
  Description of Artificial Sequence: Synthetic oligonucleotide
gcaaucugaucucuuuaua

SEQ ID NO: 1331069 - RNA, 19 nt, Artificial Sequence
  Description of Artificial Sequence: Synthetic oligonucleotide
ggcuacgggcaagaacggg

SEQ ID NO: 1331070 - RNA, 19 nt, Artificial Sequence
  Description of Artificial Sequence: Synthetic oligonucleotide
gcauccgcaggcagaauac

SEQ ID NO: 1331071 - RNA, 19 nt, Artificial Sequence
  Description of Artificial Sequence: Synthetic oligonucleotide
ccucaaucugaaaucccga

SEQ ID NO: 1331072 - RNA, 19 nt, Artificial Sequence
  Description of Artificial Sequence: Synthetic oligonucleotide
agagccgagaaggcuucau

SEQ ID NO: 1331073 - RNA, 19 nt, Artificial Sequence
  Description of Artificial Sequence: Synthetic oligonucleotide
gugcaacggaaacgcccug

SEQ ID NO: 1331074 - RNA, 19 nt, Artificial Sequence
  Description of Artificial Sequence: Synthetic oligonucleotide
ggucucugcaagguaggca

SEQ ID NO: 1331075 - RNA, 19 nt, Artificial Sequence
  Description of Artificial Sequence: Synthetic oligonucleotide
ggccaugacgcuguugguc

SEQ ID NO: 1331076 - RNA, 19 nt, Artificial Sequence
  Description of Artificial Sequence: Synthetic oligonucleotide
cugcaagguaggcagguau

SEQ ID NO: 1331077 - RNA, 19 nt, Artificial Sequence
  Description of Artificial Sequence: Synthetic oligonucleotide
uccagguaauaugguuauu

SEQ ID NO: 1331078 - RNA, 19 nt, Artificial Sequence
  Description of Artificial Sequence: Synthetic oligonucleotide
uagagccgagaaggcuuca

SEQ ID NO: 1331079 - RNA, 19 nt, Artificial Sequence
  Description of Artificial Sequence: Synthetic oligonucleotide
acgcugcguguuccaaaga

SEQ ID NO: 1331080 - RNA, 19 nt, Artificial Sequence
  Description of Artificial Sequence: Synthetic oligonucleotide
guaggcagguaugcuccga

SEQ ID NO: 1331081 - RNA, 19 nt, Artificial Sequence
  Description of Artificial Sequence: Synthetic oligonucleotide
ccaguucaacuugagcauc

SEQ ID NO: 1331082 - RNA, 19 nt, Artificial Sequence
  Description of Artificial Sequence: Synthetic oligonucleotide
ccucugguaguaccccgag

SEQ ID NO: 1331083 - RNA, 19 nt, Artificial Sequence
  Description of Artificial Sequence: Synthetic oligonucleotide
cauccgcaggcagaauaca

SEQ ID NO: 1331084 - RNA, 19 nt, Artificial Sequence
  Description of Artificial Sequence: Synthetic oligonucleotide
gugacacuuuuggauguua

SEQ ID NO: 1331085 - RNA, 19 nt, Artificial Sequence
  Description of Artificial Sequence: Synthetic oligonucleotide
aggcaucauagagccgaga

SEQ ID NO: 1331086 - RNA, 19 nt, Artificial Sequence
  Description of Artificial Sequence: Synthetic oligonucleotide
ccgagaaggcuucaucaga

SEQ ID NO: 1331087 - RNA, 19 nt, Artificial Sequence
  Description of Artificial Sequence: Synthetic oligonucleotide
agaccgcagagcgcaggcu

SEQ ID NO: 1331088 - RNA, 19 nt, Artificial Sequence
  Description of Artificial Sequence: Synthetic oligonucleotide
auagagcaguaagcuugau

SEQ ID NO: 1331089 - RNA, 19 nt, Artificial Sequence
  Description of Artificial Sequence: Synthetic oligonucleotide
gagcgcaggcuacgggcaa

SEQ ID NO: 1331090 - RNA, 19 nt, Artificial Sequence
  Description of Artificial Sequence: Synthetic oligonucleotide
gggucucugcaagguaggc

SEQ ID NO: 1331091 - RNA, 19 nt, Artificial Sequence
  Description of Artificial Sequence: Synthetic oligonucleotide
cccuuaguucuucaggugu

SEQ ID NO: 1331092 - RNA, 19 nt, Artificial Sequence
  Description of Artificial Sequence: Synthetic oligonucleotide
gguguccuugaagcaauaa

SEQ ID NO: 1331093 - RNA, 19 nt, Artificial Sequence
  Description of Artificial Sequence: Synthetic oligonucleotide
cagcggcuccgugcaacgg

SEQ ID NO: 1331094 - RNA, 19 nt, Artificial Sequence
  Description of Artificial Sequence: Synthetic oligonucleotide
ggcaauaaucucagcggcu

SEQ ID NO: 1331095 - RNA, 19 nt, Artificial Sequence
  Description of Artificial Sequence: Synthetic oligonucleotide
ccaugacgcuguuggucag

SEQ ID NO: 1331096 - RNA, 19 nt, Artificial Sequence
  Description of Artificial Sequence: Synthetic oligonucleotide
cgcucgccgagagacaggg

SEQ ID NO: 1331097 - RNA, 19 nt, Artificial Sequence
  Description of Artificial Sequence: Synthetic oligonucleotide
cugggccaugacgcuguug

SEQ ID NO: 1331098 - RNA, 19 nt, Artificial Sequence
  Description of Artificial Sequence: Synthetic oligonucleotide
ccugaagucucucggucua

SEQ ID NO: 1331099 - RNA, 19 nt, Artificial Sequence
  Description of Artificial Sequence: Synthetic oligonucleotide
agagcgugcuugagcucau

SEQ ID NO: 1331100 - RNA, 19 nt, Artificial Sequence
  Description of Artificial Sequence: Synthetic oligonucleotide
agccuggaacaaggccuga

SEQ ID NO: 1331101 - RNA, 19 nt, Artificial Sequence
  Description of Artificial Sequence: Synthetic oligonucleotide
cgcuccucgacaccacgac

SEQ ID NO: 1331102 - RNA, 19 nt, Artificial Sequence
  Description of Artificial Sequence: Synthetic oligonucleotide
cgugcaacggaaacgcccu

SEQ ID NO: 1331103 - RNA, 19 nt, Artificial Sequence
  Description of Artificial Sequence: Synthetic oligonucleotide
gccggggcgagaccgcaga

SEQ ID NO: 1331104 - RNA, 19 nt, Artificial Sequence
  Description of Artificial Sequence: Synthetic oligonucleotide
ggugugccacuacugucau

SEQ ID NO: 1331105 - RNA, 19 nt, Artificial Sequence
  Description of Artificial Sequence: Synthetic oligonucleotide
augcgcucgccgagagaca

SEQ ID NO: 1331106 - RNA, 19 nt, Artificial Sequence
  Description of Artificial Sequence: Synthetic oligonucleotide
ggucuauggucuccucaau

SEQ ID NO: 1331107 - RNA, 19 nt, Artificial Sequence
  Description of Artificial Sequence: Synthetic oligonucleotide
ccgagagacagggcaauaa

SEQ ID NO: 1331108 - RNA, 19 nt, Artificial Sequence
  Description of Artificial Sequence: Synthetic oligonucleotide
cauuggucccagcucccuu

SEQ ID NO: 1331109 - RNA, 19 nt, Artificial Sequence
  Description of Artificial Sequence: Synthetic oligonucleotide
gcuccucgacaccacgacu

SEQ ID NO: 1331110 - RNA, 19 nt, Artificial Sequence
  Description of Artificial Sequence: Synthetic oligonucleotide
ccgcagagcgcaggcuacg

SEQ ID NO: 1331111 - RNA, 19 nt, Artificial Sequence
  Description of Artificial Sequence: Synthetic oligonucleotide
caucgguaccagcacccuu

SEQ ID NO: 1331112 - RNA, 19 nt, Artificial Sequence
  Description of Artificial Sequence: Synthetic oligonucleotide
cgcagagcgcaggcuacgg

SEQ ID NO: 1331113 - RNA, 19 nt, Artificial Sequence
  Description of Artificial Sequence: Synthetic oligonucleotide
acggugccucugagaaccu

SEQ ID NO: 1331114 - RNA, 19 nt, Artificial Sequence
  Description of Artificial Sequence: Synthetic oligonucleotide
ccucgacaccacgacucug

SEQ ID NO: 1331115 - RNA, 19 nt, Artificial Sequence
  Description of Artificial Sequence: Synthetic oligonucleotide
gagagguagcgaaguucuu

SEQ ID NO: 1331116 - RNA, 19 nt, Artificial Sequence
  Description of Artificial Sequence: Synthetic oligonucleotide
ccgauaucgucauguacuu

SEQ ID NO: 1331117 - RNA, 19 nt, Artificial Sequence
  Description of Artificial Sequence: Synthetic oligonucleotide
gggcgagaccgcagagcgc

SEQ ID NO: 1331118 - RNA, 19 nt, Artificial Sequence
  Description of Artificial Sequence: Synthetic oligonucleotide
ggaggacuaccaacauccu

SEQ ID NO: 1331119 - RNA, 19 nt, Artificial Sequence
  Description of Artificial Sequence: Synthetic oligonucleotide
gcgcucgccgagagacagg

SEQ ID NO: 1331120 - RNA, 19 nt, Artificial Sequence
  Description of Artificial Sequence: Synthetic oligonucleotide
gagcgugcuugagcucaua

SEQ ID NO: 1331121 - RNA, 19 nt, Artificial Sequence
  Description of Artificial Sequence: Synthetic oligonucleotide
ccggggcgagaccgcagag

SEQ ID NO: 1331122 - RNA, 19 nt, Artificial Sequence
  Description of Artificial Sequence: Synthetic oligonucleotide
cucugagaaccugggccau

SEQ ID NO: 1331123 - RNA, 19 nt, Artificial Sequence
  Description of Artificial Sequence: Synthetic oligonucleotide
cggggcgagaccgcagagc

SEQ ID NO: 1331124 - RNA, 19 nt, Artificial Sequence
  Description of Artificial Sequence: Synthetic oligonucleotide
cgagagacagggcaauaau

SEQ ID NO: 1331125 - RNA, 19 nt, Artificial Sequence
  Description of Artificial Sequence: Synthetic oligonucleotide
gcggcuccgugcaacggaa

SEQ ID NO: 1331126 - RNA, 19 nt, Artificial Sequence
  Description of Artificial Sequence: Synthetic oligonucleotide
cgggcaagaacgggaacga

SEQ ID NO: 1331127 - RNA, 19 nt, Artificial Sequence
  Description of Artificial Sequence: Synthetic oligonucleotide
gcgagaccgcagagcgcag

SEQ ID NO: 1331128 - RNA, 19 nt, Artificial Sequence
  Description of Artificial Sequence: Synthetic oligonucleotide
gcucgccgagagacagggc

SEQ ID NO: 1331129 - RNA, 19 nt, Artificial Sequence
  Description of Artificial Sequence: Synthetic oligonucleotide
cgacucugaugaggguaug

SEQ ID NO: 1331130 - RNA, 19 nt, Artificial Sequence
  Description of Artificial Sequence: Synthetic oligonucleotide
gggcaagaacgggaacgau

SEQ ID NO: 1331131 - RNA, 19 nt, Artificial Sequence
  Description of Artificial Sequence: Synthetic oligonucleotide
cggcuaagguuccgaucca

SEQ ID NO: 1331132 - RNA, 19 nt, Artificial Sequence
  Description of Artificial Sequence: Synthetic oligonucleotide
ccacgacucugaugagggu

SEQ ID NO: 1331133 - RNA, 19 nt, Artificial Sequence
  Description of Artificial Sequence: Synthetic oligonucleotide
cgggaacgaugcgcucgcc

SEQ ID NO: 1331134 - RNA, 19 nt, Artificial Sequence
  Description of Artificial Sequence: Synthetic oligonucleotide
cggcuccgugcaacggaaa

SEQ ID NO: 1331135 - RNA, 19 nt, Artificial Sequence
  Description of Artificial Sequence: Synthetic oligonucleotide
uuauagucgauguagcagg

SEQ ID NO: 1331136 - RNA, 19 nt, Artificial Sequence
  Description of Artificial Sequence: Synthetic oligonucleotide
uuaauaucaaccugaguag

SEQ ID NO: 1331137 - RNA, 19 nt, Artificial Sequence
  Description of Artificial Sequence: Synthetic oligonucleotide
aguaggugaaugcagcucc

SEQ ID NO: 1331138 - RNA, 19 nt, Artificial Sequence
  Description of Artificial Sequence: Synthetic oligonucleotide
uguaguuccgagaaucugg

SEQ ID NO: 1331139 - RNA, 19 nt, Artificial Sequence
  Description of Artificial Sequence: Synthetic oligonucleotide
guucucauauaucauaggg

SEQ ID NO: 1331140 - RNA, 19 nt, Artificial Sequence
  Description of Artificial Sequence: Synthetic oligonucleotide
uuuaugauccaccaguuau

SEQ ID NO: 1331141 - RNA, 19 nt, Artificial Sequence
  Description of Artificial Sequence: Synthetic oligonucleotide
aauaccaggcuacaaccag

SEQ ID NO: 1331142 - RNA, 19 nt, Artificial Sequence
  Description of Artificial Sequence: Synthetic oligonucleotide
ugugaggaggaauaaaucu

SEQ ID NO: 1331143 - RNA, 19 nt, Artificial Sequence
  Description of Artificial Sequence: Synthetic oligonucleotide
aagaguaggguguaggcca

SEQ ID NO: 1331144 - RNA, 19 nt, Artificial Sequence
  Description of Artificial Sequence: Synthetic oligonucleotide
gaagacguuccucagagug

SEQ ID NO: 1331145 - RNA, 19 nt, Artificial Sequence
  Description of Artificial Sequence: Synthetic oligonucleotide
ugaaaccacaauuaauccc

SEQ ID NO: 1331146 - RNA, 19 nt, Artificial Sequence
  Description of Artificial Sequence: Synthetic oligonucleotide
aggaauaccaggcuacaac

SEQ ID NO: 1331147 - RNA, 19 nt, Artificial Sequence
  Description of Artificial Sequence: Synthetic oligonucleotide
ucucauauaucauagggua

SEQ ID NO: 1331148 - RNA, 19 nt, Artificial Sequence
  Description of Artificial Sequence: Synthetic oligonucleotide
aucagaaugucccaggugu

SEQ ID NO: 1331149 - RNA, 19 nt, Artificial Sequence
  Description of Artificial Sequence: Synthetic oligonucleotide
gaaauccccagucagggag

SEQ ID NO: 1331150 - RNA, 19 nt, Artificial Sequence
  Description of Artificial Sequence: Synthetic oligonucleotide
uguacaaugucuccauggc

SEQ ID NO: 1331151 - RNA, 19 nt, Artificial Sequence
  Description of Artificial Sequence: Synthetic oligonucleotide
auauucuucacugugugag

SEQ ID NO: 1331152 - RNA, 19 nt, Artificial Sequence
  Description of Artificial Sequence: Synthetic oligonucleotide
cauggagauguuauagucg

SEQ ID NO: 1331153 - RNA, 19 nt, Artificial Sequence
  Description of Artificial Sequence: Synthetic oligonucleotide
cuuggcuugugccauaccg

SEQ ID NO: 1331154 - RNA, 19 nt, Artificial Sequence
  Description of Artificial Sequence: Synthetic oligonucleotide
uucucauauaucauagggu

SEQ ID NO: 1331155 - RNA, 19 nt, Artificial Sequence
  Description of Artificial Sequence: Synthetic oligonucleotide
uaccagaagaagaguaggg

SEQ ID NO: 1331156 - RNA, 19 nt, Artificial Sequence
  Description of Artificial Sequence: Synthetic oligonucleotide
ugagagugaggacucagug

SEQ ID NO: 1331157 - RNA, 19 nt, Artificial Sequence
  Description of Artificial Sequence: Synthetic oligonucleotide
augagaaauccauggacag

SEQ ID NO: 1331158 - RNA, 19 nt, Artificial Sequence
  Description of Artificial Sequence: Synthetic oligonucleotide
caggguauauucuucacug

SEQ ID NO: 1331159 - RNA, 19 nt, Artificial Sequence
  Description of Artificial Sequence: Synthetic oligonucleotide
guucuugugggaaugaagc

SEQ ID NO: 1331160 - RNA, 19 nt, Artificial Sequence
  Description of Artificial Sequence: Synthetic oligonucleotide
ugggauguagccaguaggc

SEQ ID NO: 1331161 - RNA, 19 nt, Artificial Sequence
  Description of Artificial Sequence: Synthetic oligonucleotide
aguuaguggacgcagcaug

SEQ ID NO: 1331162 - RNA, 19 nt, Artificial Sequence
  Description of Artificial Sequence: Synthetic oligonucleotide
guuauagucgauguagcag

SEQ ID NO: 1331163 - RNA, 19 nt, Artificial Sequence
  Description of Artificial Sequence: Synthetic oligonucleotide
uaaguuaguggacgcagca

SEQ ID NO: 1331164 - RNA, 19 nt, Artificial Sequence
  Description of Artificial Sequence: Synthetic oligonucleotide
auggagauguuauagucga

SEQ ID NO: 1331165 - RNA, 19 nt, Artificial Sequence
  Description of Artificial Sequence: Synthetic oligonucleotide
uuggcuugugccauaccgg

SEQ ID NO: 1331166 - RNA, 19 nt, Artificial Sequence
  Description of Artificial Sequence: Synthetic oligonucleotide
acugccgaaauccccaguc

SEQ ID NO: 1331167 - RNA, 19 nt, Artificial Sequence
  Description of Artificial Sequence: Synthetic oligonucleotide
uguuauagucgauguagca

SEQ ID NO: 1331168 - RNA, 19 nt, Artificial Sequence
  Description of Artificial Sequence: Synthetic oligonucleotide
aaccacaauuaaucccugg

SEQ ID NO: 1331169 - RNA, 19 nt, Artificial Sequence
  Description of Artificial Sequence: Synthetic oligonucleotide
aauuaaucccuggaguccu

SEQ ID NO: 1331170 - RNA, 19 nt, Artificial Sequence
  Description of Artificial Sequence: Synthetic oligonucleotide
uagucgauguagcaggaga

SEQ ID NO: 1331171 - RNA, 19 nt, Artificial Sequence
  Description of Artificial Sequence: Synthetic oligonucleotide
uccuguuaauaucaaccug

SEQ ID NO: 1331172 - RNA, 19 nt, Artificial Sequence
  Description of Artificial Sequence: Synthetic oligonucleotide
aaggguuugccgaagacgu

SEQ ID NO: 1331173 - RNA, 19 nt, Artificial Sequence
  Description of Artificial Sequence: Synthetic oligonucleotide
agguaguugagcgccagcc

SEQ ID NO: 1331174 - RNA, 19 nt, Artificial Sequence
  Description of Artificial Sequence: Synthetic oligonucleotide
caucaugcguguuaaggag

SEQ ID NO: 1331175 - RNA, 19 nt, Artificial Sequence
  Description of Artificial Sequence: Synthetic oligonucleotide
aucacgauguuuccaagca

SEQ ID NO: 1331176 - RNA, 19 nt, Artificial Sequence
  Description of Artificial Sequence: Synthetic oligonucleotide
gaucacgauguuuccaagc

SEQ ID NO: 1331177 - RNA, 19 nt, Artificial Sequence
  Description of Artificial Sequence: Synthetic oligonucleotide
cugaguaggugaaugcagc

SEQ ID NO: 1331178 - RNA, 19 nt, Artificial Sequence
  Description of Artificial Sequence: Synthetic oligonucleotide
uaggguguaggccacugug

SEQ ID NO: 1331179 - RNA, 19 nt, Artificial Sequence
  Description of Artificial Sequence: Synthetic oligonucleotide
uuggacacauggcaugcag

SEQ ID NO: 1331180 - RNA, 19 nt, Artificial Sequence
  Description of Artificial Sequence: Synthetic oligonucleotide
ugcguguuaaggaggcggg

SEQ ID NO: 1331181 - RNA, 19 nt, Artificial Sequence
  Description of Artificial Sequence: Synthetic oligonucleotide
agaauccucauucuucagu

SEQ ID NO: 1331182 - RNA, 19 nt, Artificial Sequence
  Description of Artificial Sequence: Synthetic oligonucleotide
cucauauaucauaggguag

SEQ ID NO: 1331183 - RNA, 19 nt, Artificial Sequence
  Description of Artificial Sequence: Synthetic oligonucleotide
uaugauccaccaguuauug

SEQ ID NO: 1331184 - RNA, 19 nt, Artificial Sequence
  Description of Artificial Sequence: Synthetic oligonucleotide
augcagaggaauaccaggc

SEQ ID NO: 1331185 - RNA, 19 nt, Artificial Sequence
  Description of Artificial Sequence: Synthetic oligonucleotide
ggaauaccaggcuacaacc

SEQ ID NO: 1331186 - RNA, 19 nt, Artificial Sequence
  Description of Artificial Sequence: Synthetic oligonucleotide
guccccauaaguuagugga

SEQ ID NO: 1331187 - RNA, 19 nt, Artificial Sequence
  Description of Artificial Sequence: Synthetic oligonucleotide
auguuauagucgauguagc

SEQ ID NO: 1331188 - RNA, 19 nt, Artificial Sequence
  Description of Artificial Sequence: Synthetic oligonucleotide
ugaagcccagaucacgaug

SEQ ID NO: 1331189 - RNA, 19 nt, Artificial Sequence
  Description of Artificial Sequence: Synthetic oligonucleotide
ugcaugaagcgcacuuccg

SEQ ID NO: 1331190 - RNA, 19 nt, Artificial Sequence
  Description of Artificial Sequence: Synthetic oligonucleotide
uuguuuaccaccagcugau

SEQ ID NO: 1331191 - RNA, 19 nt, Artificial Sequence
  Description of Artificial Sequence: Synthetic oligonucleotide
uguccccauaaguuagugg

SEQ ID NO: 1331192 - RNA, 19 nt, Artificial Sequence
  Description of Artificial Sequence: Synthetic oligonucleotide
auaaguuaguggacgcagc

SEQ ID NO: 1331193 - RNA, 19 nt, Artificial Sequence
  Description of Artificial Sequence: Synthetic oligonucleotide
ugugccauaccgguguucc

SEQ ID NO: 1331194 - RNA, 19 nt, Artificial Sequence
  Description of Artificial Sequence: Synthetic oligonucleotide
cuguuaauaucaaccugag

SEQ ID NO: 1331195 - RNA, 19 nt, Artificial Sequence
  Description of Artificial Sequence: Synthetic oligonucleotide
aggguagguguucuugugg

SEQ ID NO: 1331196 - RNA, 19 nt, Artificial Sequence
  Description of Artificial Sequence: Synthetic oligonucleotide
acaagauggucuuccaggu

SEQ ID NO: 1331197 - RNA, 19 nt, Artificial Sequence
  Description of Artificial Sequence: Synthetic oligonucleotide
guaccagaagaagaguagg

SEQ ID NO: 1331198 - RNA, 19 nt, Artificial Sequence
  Description of Artificial Sequence: Synthetic oligonucleotide
guguuaaggaggcgggugg

SEQ ID NO: 1331199 - RNA, 19 nt, Artificial Sequence
  Description of Artificial Sequence: Synthetic oligonucleotide
guaguugagcgccagccgc

SEQ ID NO: 1331200 - RNA, 19 nt, Artificial Sequence
  Description of Artificial Sequence: Synthetic oligonucleotide
uguuaauaucaaccugagu

SEQ ID NO: 1331201 - RNA, 19 nt, Artificial Sequence
  Description of Artificial Sequence: Synthetic oligonucleotide
guaacaggucaccugcugc

SEQ ID NO: 1331202 - RNA, 19 nt, Artificial Sequence
  Description of Artificial Sequence: Synthetic oligonucleotide
agacguuccucagagugac

SEQ ID NO: 1331203 - RNA, 19 nt, Artificial Sequence
  Description of Artificial Sequence: Synthetic oligonucleotide
caaggguuugccgaagacg

SEQ ID NO: 1331204 - RNA, 19 nt, Artificial Sequence
  Description of Artificial Sequence: Synthetic oligonucleotide
cucuaguacuuccugauca

SEQ ID NO: 1331205 - RNA, 19 nt, Artificial Sequence
  Description of Artificial Sequence: Synthetic oligonucleotide
ugacguguccccauaaguu

SEQ ID NO: 1331206 - RNA, 19 nt, Artificial Sequence
  Description of Artificial Sequence: Synthetic oligonucleotide
ucucccaggguccuuuaug

SEQ ID NO: 1331207 - RNA, 19 nt, Artificial Sequence
  Description of Artificial Sequence: Synthetic oligonucleotide
agcaaggcaaggguuugcc

SEQ ID NO: 1331208 - RNA, 19 nt, Artificial Sequence
  Description of Artificial Sequence: Synthetic oligonucleotide
cagaggaauaccaggcuac

SEQ ID NO: 1331209 - RNA, 19 nt, Artificial Sequence
  Description of Artificial Sequence: Synthetic oligonucleotide
ugaagcgcacuuccgacaa

SEQ ID NO: 1331210 - RNA, 19 nt, Artificial Sequence
  Description of Artificial Sequence: Synthetic oligonucleotide
caagcaaguggaucugagc

SEQ ID NO: 1331211 - RNA, 19 nt, Artificial Sequence
  Description of Artificial Sequence: Synthetic oligonucleotide
aauccucauucuucagugu

SEQ ID NO: 1331212 - RNA, 19 nt, Artificial Sequence
  Description of Artificial Sequence: Synthetic oligonucleotide
gugaccugggaaccaaagg

SEQ ID NO: 1331213 - RNA, 19 nt, Artificial Sequence
  Description of Artificial Sequence: Synthetic oligonucleotide
agugccggcagguaguggu

SEQ ID NO: 1331214 - RNA, 19 nt, Artificial Sequence
  Description of Artificial Sequence: Synthetic oligonucleotide
uccgacaagauggucuucc

SEQ ID NO: 1331215 - RNA, 19 nt, Artificial Sequence
  Description of Artificial Sequence: Synthetic oligonucleotide
uggcaaggcuagcugaagc

SEQ ID NO: 1331216 - RNA, 19 nt, Artificial Sequence
  Description of Artificial Sequence: Synthetic oligonucleotide
augcguguuaaggaggcgg

SEQ ID NO: 1331217 - RNA, 19 nt, Artificial Sequence
  Description of Artificial Sequence: Synthetic oligonucleotide
auaucaaccugaguaggug

SEQ ID NO: 1331218 - RNA, 19 nt, Artificial Sequence
  Description of Artificial Sequence: Synthetic oligonucleotide
guucacaugcaugaagcgc

SEQ ID NO: 1331219 - RNA, 19 nt, Artificial Sequence
  Description of Artificial Sequence: Synthetic oligonucleotide
aguggacgcagcauguugg

SEQ ID NO: 1331220 - RNA, 19 nt, Artificial Sequence
  Description of Artificial Sequence: Synthetic oligonucleotide
aaguggaucugagcacugg

SEQ ID NO: 1331221 - RNA, 19 nt, Artificial Sequence
  Description of Artificial Sequence: Synthetic oligonucleotide
uugagagugaggacucagu

SEQ ID NO: 1331222 - RNA, 19 nt, Artificial Sequence
  Description of Artificial Sequence: Synthetic oligonucleotide
uguuggacacauggcaugc

SEQ ID NO: 1331223 - RNA, 19 nt, Artificial Sequence
  Description of Artificial Sequence: Synthetic oligonucleotide
ccaggguccuuuaugaucc

SEQ ID NO: 1331224 - RNA, 19 nt, Artificial Sequence
  Description of Artificial Sequence: Synthetic oligonucleotide
acuuccgacaagauggucu

SEQ ID NO: 1331225 - RNA, 19 nt, Artificial Sequence
  Description of Artificial Sequence: Synthetic oligonucleotide
gacgcagcauguuggacac

SEQ ID NO: 1331226 - RNA, 19 nt, Artificial Sequence
  Description of Artificial Sequence: Synthetic oligonucleotide
agugacguguccccauaag

SEQ ID NO: 1331227 - RNA, 19 nt, Artificial Sequence
  Description of Artificial Sequence: Synthetic oligonucleotide
gagguuccuguuaauauca

SEQ ID NO: 1331228 - RNA, 19 nt, Artificial Sequence
  Description of Artificial Sequence: Synthetic oligonucleotide
ucagagugaccugggaacc

SEQ ID NO: 1331229 - RNA, 19 nt, Artificial Sequence
  Description of Artificial Sequence: Synthetic oligonucleotide
accuccaacugccgaaauc

SEQ ID NO: 1331230 - RNA, 19 nt, Artificial Sequence
  Description of Artificial Sequence: Synthetic oligonucleotide
auccaccaguuauugaugu

SEQ ID NO: 1331231 - RNA, 19 nt, Artificial Sequence
  Description of Artificial Sequence: Synthetic oligonucleotide
guagcaggagacuucuuga

SEQ ID NO: 1331232 - RNA, 19 nt, Artificial Sequence
  Description of Artificial Sequence: Synthetic oligonucleotide
ccuguuaauaucaaccuga

SEQ ID NO: 1331233 - RNA, 19 nt, Artificial Sequence
  Description of Artificial Sequence: Synthetic oligonucleotide
acaauuggcagcagcagga

SEQ ID NO: 1331234 - RNA, 19 nt, Artificial Sequence
  Description of Artificial Sequence: Synthetic oligonucleotide
auggcagacguguucacau

SEQ ID NO: 1331235 - RNA, 19 nt, Artificial Sequence
  Description of Artificial Sequence: Synthetic oligonucleotide
ucuccuggugagagugacg

SEQ ID NO: 1331236 - RNA, 19 nt, Artificial Sequence
  Description of Artificial Sequence: Synthetic oligonucleotide
aaggcaaggguuugccgaa

SEQ ID NO: 1331237 - RNA, 19 nt, Artificial Sequence
  Description of Artificial Sequence: Synthetic oligonucleotide
agaucacgauguuuccaag

SEQ ID NO: 1331238 - RNA, 19 nt, Artificial Sequence
  Description of Artificial Sequence: Synthetic oligonucleotide
cacuguaguuccgagaauc

SEQ ID NO: 1331239 - RNA, 19 nt, Artificial Sequence
  Description of Artificial Sequence: Synthetic oligonucleotide
ucgucggcggagcagguac

SEQ ID NO: 1331240 - RNA, 19 nt, Artificial Sequence
  Description of Artificial Sequence: Synthetic oligonucleotide
uaguugagcgccagccgcc

SEQ ID NO: 1331241 - RNA, 19 nt, Artificial Sequence
  Description of Artificial Sequence: Synthetic oligonucleotide
aggagacuucuugagagug

SEQ ID NO: 1331242 - RNA, 19 nt, Artificial Sequence
  Description of Artificial Sequence: Synthetic oligonucleotide
ucucuaguacuuccugauc

SEQ ID NO: 1331243 - RNA, 19 nt, Artificial Sequence
  Description of Artificial Sequence: Synthetic oligonucleotide
accagaagaagaguagggu

SEQ ID NO: 1331244 - RNA, 19 nt, Artificial Sequence
  Description of Artificial Sequence: Synthetic oligonucleotide
auauaucauaggguaggug

SEQ ID NO: 1331245 - RNA, 19 nt, Artificial Sequence
  Description of Artificial Sequence: Synthetic oligonucleotide
agaauccucuccaucagga

SEQ ID NO: 1331246 - RNA, 19 nt, Artificial Sequence
  Description of Artificial Sequence: Synthetic oligonucleotide
acaugcaugaagcgcacuu

SEQ ID NO: 1331247 - RNA, 19 nt, Artificial Sequence
  Description of Artificial Sequence: Synthetic oligonucleotide
uggcuugugccauaccggu

SEQ ID NO: 1331248 - RNA, 19 nt, Artificial Sequence
  Description of Artificial Sequence: Synthetic oligonucleotide
agcaggaucuggaagguga

SEQ ID NO: 1331249 - RNA, 19 nt, Artificial Sequence
  Description of Artificial Sequence: Synthetic oligonucleotide
uccucgucggcggagcagg

SEQ ID NO: 1331250 - RNA, 19 nt, Artificial Sequence
  Description of Artificial Sequence: Synthetic oligonucleotide
acauuccacaccaugcucu

SEQ ID NO: 1331251 - RNA, 19 nt, Artificial Sequence
  Description of Artificial Sequence: Synthetic oligonucleotide
guagugguaaaggaagaga

SEQ ID NO: 1331252 - RNA, 19 nt, Artificial Sequence
  Description of Artificial Sequence: Synthetic oligonucleotide
gguaguugagcgccagccg

SEQ ID NO: 1331253 - RNA, 19 nt, Artificial Sequence
  Description of Artificial Sequence: Synthetic oligonucleotide
aagacguuccucagaguga

SEQ ID NO: 1331254 - RNA, 19 nt, Artificial Sequence
  Description of Artificial Sequence: Synthetic oligonucleotide
ggucaugccgugaacaagc

SEQ ID NO: 1331255 - RNA, 19 nt, Artificial Sequence
  Description of Artificial Sequence: Synthetic oligonucleotide
uccccauaaguuaguggac

SEQ ID NO: 1331256 - RNA, 19 nt, Artificial Sequence
  Description of Artificial Sequence: Synthetic oligonucleotide
augaagcgcacuuccgaca

SEQ ID NO: 1331257 - RNA, 19 nt, Artificial Sequence
  Description of Artificial Sequence: Synthetic oligonucleotide
agcaucuuccacuguaguu

SEQ ID NO: 1331258 - RNA, 19 nt, Artificial Sequence
  Description of Artificial Sequence: Synthetic oligonucleotide
gaagcugagguuccuguua

SEQ ID NO: 1331259 - RNA, 19 nt, Artificial Sequence
  Description of Artificial Sequence: Synthetic oligonucleotide
guuuccaagcaaguggauc

SEQ ID NO: 1331260 - RNA, 19 nt, Artificial Sequence
  Description of Artificial Sequence: Synthetic oligonucleotide
uaucauaggguagguguuc

SEQ ID NO: 1331261 - RNA, 19 nt, Artificial Sequence
  Description of Artificial Sequence: Synthetic oligonucleotide
cucgugguggccucgugac

SEQ ID NO: 1331262 - RNA, 19 nt, Artificial Sequence
  Description of Artificial Sequence: Synthetic oligonucleotide
gcauggagauguuauaguc

SEQ ID NO: 1331263 - RNA, 19 nt, Artificial Sequence
  Description of Artificial Sequence: Synthetic oligonucleotide
aggguauauucuucacugu

SEQ ID NO: 1331264 - RNA, 19 nt, Artificial Sequence
  Description of Artificial Sequence: Synthetic oligonucleotide
gacguguccccauaaguua

SEQ ID NO: 1331265 - RNA, 19 nt, Artificial Sequence
  Description of Artificial Sequence: Synthetic oligonucleotide
gaauaccaggcuacaacca

SEQ ID NO: 1331266 - RNA, 19 nt, Artificial Sequence
  Description of Artificial Sequence: Synthetic oligonucleotide
auaccgguguuccuccaca

SEQ ID NO: 1331267 - RNA, 19 nt, Artificial Sequence
  Description of Artificial Sequence: Synthetic oligonucleotide
agcgaagggcccgaaguuc

SEQ ID NO: 1331268 - RNA, 19 nt, Artificial Sequence
  Description of Artificial Sequence: Synthetic oligonucleotide
cacaauuaaucccuggagu

SEQ ID NO: 1331269 - RNA, 19 nt, Artificial Sequence
  Description of Artificial Sequence: Synthetic oligonucleotide
gcugcaggacaauuggcag

SEQ ID NO: 1331270 - RNA, 19 nt, Artificial Sequence
  Description of Artificial Sequence: Synthetic oligonucleotide
ggauguagccaguaggcga

SEQ ID NO: 1331271 - RNA, 19 nt, Artificial Sequence
  Description of Artificial Sequence: Synthetic oligonucleotide
acguuccucagagugaccu

SEQ ID NO: 1331272 - RNA, 19 nt, Artificial Sequence
  Description of Artificial Sequence: Synthetic oligonucleotide
uggucaugccgugaacaag

SEQ ID NO: 1331273 - RNA, 19 nt, Artificial Sequence
  Description of Artificial Sequence: Synthetic oligonucleotide
ccguucucauauaucauag

SEQ ID NO: 1331274 - RNA, 19 nt, Artificial Sequence
  Description of Artificial Sequence: Synthetic oligonucleotide
uccauggcguacaggccug

SEQ ID NO: 1331275 - RNA, 19 nt, Artificial Sequence
  Description of Artificial Sequence: Synthetic oligonucleotide
gaucugagcacugguccug

SEQ ID NO: 1331276 - RNA, 19 nt, Artificial Sequence
  Description of Artificial Sequence: Synthetic oligonucleotide
cagccgccaguacauaggg

SEQ ID NO: 1331277 - RNA, 19 nt, Artificial Sequence
  Description of Artificial Sequence: Synthetic oligonucleotide
agugaccugggaaccaaag

SEQ ID NO: 1331278 - RNA, 19 nt, Artificial Sequence
  Description of Artificial Sequence: Synthetic oligonucleotide
cagaucacgauguuuccaa

SEQ ID NO: 1331279 - RNA, 19 nt, Artificial Sequence
  Description of Artificial Sequence: Synthetic oligonucleotide
ggcugcaacaucaugcgug

SEQ ID NO: 1331280 - RNA, 19 nt, Artificial Sequence
  Description of Artificial Sequence: Synthetic oligonucleotide
aaguuaguggacgcagcau

SEQ ID NO: 1331281 - RNA, 19 nt, Artificial Sequence
  Description of Artificial Sequence: Synthetic oligonucleotide
aggguguaggccacugugg

SEQ ID NO: 1331282 - RNA, 19 nt, Artificial Sequence
  Description of Artificial Sequence: Synthetic oligonucleotide
accugaguaggugaaugca

SEQ ID NO: 1331283 - RNA, 19 nt, Artificial Sequence
  Description of Artificial Sequence: Synthetic oligonucleotide
gauguagcaggagacuucu

SEQ ID NO: 1331284 - RNA, 19 nt, Artificial Sequence
  Description of Artificial Sequence: Synthetic oligonucleotide
aacugccgaaauccccagu

SEQ ID NO: 1331285 - RNA, 19 nt, Artificial Sequence
  Description of Artificial Sequence: Synthetic oligonucleotide
aguccuuacuggacccagc

SEQ ID NO: 1331286 - RNA, 19 nt, Artificial Sequence
  Description of Artificial Sequence: Synthetic oligonucleotide
auagucgauguagcaggag

SEQ ID NO: 1331287 - RNA, 19 nt, Artificial Sequence
  Description of Artificial Sequence: Synthetic oligonucleotide
agaguaggguguaggccac

SEQ ID NO: 1331288 - RNA, 19 nt, Artificial Sequence
  Description of Artificial Sequence: Synthetic oligonucleotide
acguguccccauaaguuag

SEQ ID NO: 1331289 - RNA, 19 nt, Artificial Sequence
  Description of Artificial Sequence: Synthetic oligonucleotide
augauccaccaguuauuga

SEQ ID NO: 1331290 - RNA, 19 nt, Artificial Sequence
  Description of Artificial Sequence: Synthetic oligonucleotide
acuguaguuccgagaaucu

SEQ ID NO: 1331291 - RNA, 19 nt, Artificial Sequence
  Description of Artificial Sequence: Synthetic oligonucleotide
guggccucgugacuucucc

SEQ ID NO: 1331292 - RNA, 19 nt, Artificial Sequence
  Description of Artificial Sequence: Synthetic oligonucleotide
ggugagagugacguguccc

SEQ ID NO: 1331293 - RNA, 19 nt, Artificial Sequence
  Description of Artificial Sequence: Synthetic oligonucleotide
uguaggccacuguggcaag

SEQ ID NO: 1331294 - RNA, 19 nt, Artificial Sequence
  Description of Artificial Sequence: Synthetic oligonucleotide
ugccauaccgguguuccuc

SEQ ID NO: 1331295 - RNA, 19 nt, Artificial Sequence
  Description of Artificial Sequence: Synthetic oligonucleotide
cuguaguuccgagaaucug

SEQ ID NO: 1331296 - RNA, 19 nt, Artificial Sequence
  Description of Artificial Sequence: Synthetic oligonucleotide
uggcagacguguucacaug

SEQ ID NO: 1331297 - RNA, 19 nt, Artificial Sequence
  Description of Artificial Sequence: Synthetic oligonucleotide
caugcaugaagcgcacuuc

SEQ ID NO: 1331298 - RNA, 19 nt, Artificial Sequence
  Description of Artificial Sequence: Synthetic oligonucleotide
ugggugaugcgggcuagcc

SEQ ID NO: 1331299 - RNA, 19 nt, Artificial Sequence
  Description of Artificial Sequence: Synthetic oligonucleotide
aguaggguguaggccacug

SEQ ID NO: 1331300 - RNA, 19 nt, Artificial Sequence
  Description of Artificial Sequence: Synthetic oligonucleotide
gugugaggaggaauaaauc

SEQ ID NO: 1331301 - RNA, 19 nt, Artificial Sequence
  Description of Artificial Sequence: Synthetic oligonucleotide
auggcguacaggccuggga

SEQ ID NO: 1331302 - RNA, 19 nt, Artificial Sequence
  Description of Artificial Sequence: Synthetic oligonucleotide
aucuggaaggugagugccg

SEQ ID NO: 1331303 - RNA, 19 nt, Artificial Sequence
  Description of Artificial Sequence: Synthetic oligonucleotide
uccaccaguuauugauguc

SEQ ID NO: 1331304 - RNA, 19 nt, Artificial Sequence
  Description of Artificial Sequence: Synthetic oligonucleotide
uccaagcaaguggaucuga

SEQ ID NO: 1331305 - RNA, 19 nt, Artificial Sequence
  Description of Artificial Sequence: Synthetic oligonucleotide
agaggaauaccaggcuaca

SEQ ID NO: 1331306 - RNA, 19 nt, Artificial Sequence
  Description of Artificial Sequence: Synthetic oligonucleotide
uguagccaguaggcgaugu

SEQ ID NO: 1331307 - RNA, 19 nt, Artificial Sequence
  Description of Artificial Sequence: Synthetic oligonucleotide
guagguguucuugugggaa

SEQ ID NO: 1331308 - RNA, 19 nt, Artificial Sequence
  Description of Artificial Sequence: Synthetic oligonucleotide
cauaccgguguuccuccac

SEQ ID NO: 1331309 - RNA, 19 nt, Artificial Sequence
  Description of Artificial Sequence: Synthetic oligonucleotide
gggauccucaggugaaacc

SEQ ID NO: 1331310 - RNA, 19 nt, Artificial Sequence
  Description of Artificial Sequence: Synthetic oligonucleotide
cccauaaguuaguggacgc

SEQ ID NO: 1331311 - RNA, 19 nt, Artificial Sequence
  Description of Artificial Sequence: Synthetic oligonucleotide
auaucauaggguagguguu

SEQ ID NO: 1331312 - RNA, 19 nt, Artificial Sequence
  Description of Artificial Sequence: Synthetic oligonucleotide
ggugaugcgggcuagcccu

SEQ ID NO: 1331313 - RNA, 19 nt, Artificial Sequence
  Description of Artificial Sequence: Synthetic oligonucleotide
uggacucucuguucacaau

SEQ ID NO: 1331314 - RNA, 19 nt, Artificial Sequence
  Description of Artificial Sequence: Synthetic oligonucleotide
gaagcgcacuuccgacaag

SEQ ID NO: 1331315 - RNA, 19 nt, Artificial Sequence
  Description of Artificial Sequence: Synthetic oligonucleotide
cuccccaaccaccuccaac

SEQ ID NO: 1331316 - RNA, 19 nt, Artificial Sequence
  Description of Artificial Sequence: Synthetic oligonucleotide
ccccauaaguuaguggacg

SEQ ID NO: 1331317 - RNA, 19 nt, Artificial Sequence
  Description of Artificial Sequence: Synthetic oligonucleotide
gauguagccaguaggcgau

SEQ ID NO: 1331318 - RNA, 19 nt, Artificial Sequence
  Description of Artificial Sequence: Synthetic oligonucleotide
ugagugccggcagguagug

SEQ ID NO: 1331319 - RNA, 19 nt, Artificial Sequence
  Description of Artificial Sequence: Synthetic oligonucleotide
cuuuaugauccaccaguua

SEQ ID NO: 1331320 - RNA, 19 nt, Artificial Sequence
  Description of Artificial Sequence: Synthetic oligonucleotide
gugacguguccccauaagu

SEQ ID NO: 1331321 - RNA, 19 nt, Artificial Sequence
  Description of Artificial Sequence: Synthetic oligonucleotide
uuacuggacccagccaguc

SEQ ID NO: 1331322 - RNA, 19 nt, Artificial Sequence
  Description of Artificial Sequence: Synthetic oligonucleotide
uuaaucccuggaguccuua

SEQ ID NO: 1331323 - RNA, 19 nt, Artificial Sequence
  Description of Artificial Sequence: Synthetic oligonucleotide
gggcccgaaguucuccugg

SEQ ID NO: 1331324 - RNA, 19 nt, Artificial Sequence
  Description of Artificial Sequence: Synthetic oligonucleotide
ggguccuuuaugauccacc

SEQ ID NO: 1331325 - RNA, 19 nt, Artificial Sequence
  Description of Artificial Sequence: Synthetic oligonucleotide
caugcguguuaaggaggcg

SEQ ID NO: 1331326 - RNA, 19 nt, Artificial Sequence
  Description of Artificial Sequence: Synthetic oligonucleotide
gcaugaagcgcacuuccga

SEQ ID NO: 1331327 - RNA, 19 nt, Artificial Sequence
  Description of Artificial Sequence: Synthetic oligonucleotide
agagugacguguccccaua

SEQ ID NO: 1331328 - RNA, 19 nt, Artificial Sequence
  Description of Artificial Sequence: Synthetic oligonucleotide
ccgguguuccuccacauuc

SEQ ID NO: 1331329 - RNA, 19 nt, Artificial Sequence
  Description of Artificial Sequence: Synthetic oligonucleotide
uuuccagcgaagggcccga

SEQ ID NO: 1331330 - RNA, 19 nt, Artificial Sequence
  Description of Artificial Sequence: Synthetic oligonucleotide
cuggacucucuguucacaa

SEQ ID NO: 1331331 - RNA, 19 nt, Artificial Sequence
  Description of Artificial Sequence: Synthetic oligonucleotide
ugagccccgcucagcuuca

SEQ ID NO: 1331332 - RNA, 19 nt, Artificial Sequence
  Description of Artificial Sequence: Synthetic oligonucleotide
ccugaucagaaugucccag

SEQ ID NO: 1331333 - RNA, 19 nt, Artificial Sequence
  Description of Artificial Sequence: Synthetic oligonucleotide
uuaguggacgcagcauguu

SEQ ID NO: 1331334 - RNA, 19 nt, Artificial Sequence
  Description of Artificial Sequence: Synthetic oligonucleotide
agagugaccugggaaccaa

SEQ ID NO: 1331335 - RNA, 19 nt, Artificial Sequence
  Description of Artificial Sequence: Synthetic oligonucleotide
ugacccacuccagcggggu

SEQ ID NO: 1331336 - RNA, 19 nt, Artificial Sequence
  Description of Artificial Sequence: Synthetic oligonucleotide
cacaccaugcucucguggu

SEQ ID NO: 1331337 - RNA, 19 nt, Artificial Sequence
  Description of Artificial Sequence: Synthetic oligonucleotide
cccaggguccuuuaugauc

SEQ ID NO: 1331338 - RNA, 19 nt, Artificial Sequence
  Description of Artificial Sequence: Synthetic oligonucleotide
agcugaugucucccagggu

SEQ ID NO: 1331339 - RNA, 19 nt, Artificial Sequence
  Description of Artificial Sequence: Synthetic oligonucleotide
ugggaaccaaaggccacuc

SEQ ID NO: 1331340 - RNA, 19 nt, Artificial Sequence
  Description of Artificial Sequence: Synthetic oligonucleotide
acauggcaugcagaggaau

SEQ ID NO: 1331341 - RNA, 19 nt, Artificial Sequence
  Description of Artificial Sequence: Synthetic oligonucleotide
gguggucgcugacaugcug

SEQ ID NO: 1331342 - RNA, 19 nt, Artificial Sequence
  Description of Artificial Sequence: Synthetic oligonucleotide
gccgccaguacauagggcu

SEQ ID NO: 1331343 - RNA, 19 nt, Artificial Sequence
  Description of Artificial Sequence: Synthetic oligonucleotide
ggcaugcagaggaauacca

SEQ ID NO: 1331344 - RNA, 19 nt, Artificial Sequence
  Description of Artificial Sequence: Synthetic oligonucleotide
agccgccaguacauagggc

SEQ ID NO: 1331345 - RNA, 19 nt, Artificial Sequence
  Description of Artificial Sequence: Synthetic oligonucleotide
uaccgguguuccuccacau

SEQ ID NO: 1331346 - RNA, 19 nt, Artificial Sequence
  Description of Artificial Sequence: Synthetic oligonucleotide
gccauaccgguguuccucc

SEQ ID NO: 1331347 - RNA, 19 nt, Artificial Sequence
  Description of Artificial Sequence: Synthetic oligonucleotide
uggacgcagcauguuggac

SEQ ID NO: 1331348 - RNA, 19 nt, Artificial Sequence
  Description of Artificial Sequence: Synthetic oligonucleotide
guuaguggacgcagcaugu

SEQ ID NO: 1331349 - RNA, 19 nt, Artificial Sequence
  Description of Artificial Sequence: Synthetic oligonucleotide
ggguuugccgaagacguuc

SEQ ID NO: 1331350 - RNA, 19 nt, Artificial Sequence
  Description of Artificial Sequence: Synthetic oligonucleotide
guggacgcagcauguugga

SEQ ID NO: 1331351 - RNA, 19 nt, Artificial Sequence
  Description of Artificial Sequence: Synthetic oligonucleotide
cauggcguacaggccuggg

SEQ ID NO: 1331352 - RNA, 19 nt, Artificial Sequence
  Description of Artificial Sequence: Synthetic oligonucleotide
gagugacguguccccauaa

SEQ ID NO: 1331353 - RNA, 19 nt, Artificial Sequence
  Description of Artificial Sequence: Synthetic oligonucleotide
gcaaggguuugccgaagac

SEQ ID NO: 1331354 - RNA, 19 nt, Artificial Sequence
  Description of Artificial Sequence: Synthetic oligonucleotide
gcgcacuuccgacaagaug

SEQ ID NO: 1331355 - RNA, 19 nt, Artificial Sequence
  Description of Artificial Sequence: Synthetic oligonucleotide
ugaugcgggcuagcccucc

SEQ ID NO: 1331356 - RNA, 19 nt, Artificial Sequence
  Description of Artificial Sequence: Synthetic oligonucleotide
ugccgugaacaagcuguac

SEQ ID NO: 1331357 - RNA, 19 nt, Artificial Sequence
  Description of Artificial Sequence: Synthetic oligonucleotide
ugggagcugccacggccgu

SEQ ID NO: 1331358 - RNA, 19 nt, Artificial Sequence
  Description of Artificial Sequence: Synthetic oligonucleotide
guugagcgccagccgccag

SEQ ID NO: 1331359 - RNA, 19 nt, Artificial Sequence
  Description of Artificial Sequence: Synthetic oligonucleotide
gacccacuccagcggggug

SEQ ID NO: 1331360 - RNA, 19 nt, Artificial Sequence
  Description of Artificial Sequence: Synthetic oligonucleotide
aguugagcgccagccgcca

SEQ ID NO: 1331361 - RNA, 19 nt, Artificial Sequence
  Description of Artificial Sequence: Synthetic oligonucleotide
gugacccacuccagcgggg

SEQ ID NO: 1331362 - RNA, 19 nt, Artificial Sequence
  Description of Artificial Sequence: Synthetic oligonucleotide
guaggugaaugcagcucca

SEQ ID NO: 1331363 - RNA, 19 nt, Artificial Sequence
  Description of Artificial Sequence: Synthetic oligonucleotide
cuuacuggacccagccagu

SEQ ID NO: 1331364 - RNA, 19 nt, Artificial Sequence
  Description of Artificial Sequence: Synthetic oligonucleotide
ucggcggagcagguaccag

SEQ ID NO: 1331365 - RNA, 19 nt, Artificial Sequence
  Description of Artificial Sequence: Synthetic oligonucleotide
gcaggguauauucuucacu

SEQ ID NO: 1331366 - RNA, 19 nt, Artificial Sequence
  Description of Artificial Sequence: Synthetic oligonucleotide
aggcggguggucaugccgu

SEQ ID NO: 1331367 - RNA, 19 nt, Artificial Sequence
  Description of Artificial Sequence: Synthetic oligonucleotide
cuuccgacaagauggucuu

SEQ ID NO: 1331368 - RNA, 19 nt, Artificial Sequence
  Description of Artificial Sequence: Synthetic oligonucleotide
accgguguuccuccacauu

SEQ ID NO: 1331369 - RNA, 19 nt, Artificial Sequence
  Description of Artificial Sequence: Synthetic oligonucleotide
cuacaaccagggcacugaa

SEQ ID NO: 1331370 - RNA, 19 nt, Artificial Sequence
  Description of Artificial Sequence: Synthetic oligonucleotide
ccgugaacaagcuguacaa

SEQ ID NO: 1331371 - RNA, 19 nt, Artificial Sequence
  Description of Artificial Sequence: Synthetic oligonucleotide
gccccgcucagcuucaaga

SEQ ID NO: 1331372 - RNA, 19 nt, Artificial Sequence
  Description of Artificial Sequence: Synthetic oligonucleotide
uccugggauguagccagua

SEQ ID NO: 1331373 - RNA, 19 nt, Artificial Sequence
  Description of Artificial Sequence: Synthetic oligonucleotide
gagagugacguguccccau

SEQ ID NO: 1331374 - RNA, 19 nt, Artificial Sequence
  Description of Artificial Sequence: Synthetic oligonucleotide
ggguuguuuaccaccagcu

SEQ ID NO: 1331375 - RNA, 19 nt, Artificial Sequence
  Description of Artificial Sequence: Synthetic oligonucleotide
aggcaaggguuugccgaag

SEQ ID NO: 1331376 - RNA, 19 nt, Artificial Sequence
  Description of Artificial Sequence: Synthetic oligonucleotide
guuggacacauggcaugca

SEQ ID NO: 1331377 - RNA, 19 nt, Artificial Sequence
  Description of Artificial Sequence: Synthetic oligonucleotide
caagauggucuuccaggua

SEQ ID NO: 1331378 - RNA, 19 nt, Artificial Sequence
  Description of Artificial Sequence: Synthetic oligonucleotide
uccagguaucccggcugga

SEQ ID NO: 1331379 - RNA, 19 nt, Artificial Sequence
  Description of Artificial Sequence: Synthetic oligonucleotide
guguucuugugggaaugaa

SEQ ID NO: 1331380 - RNA, 19 nt, Artificial Sequence
  Description of Artificial Sequence: Synthetic oligonucleotide
ggcaaggguuugccgaaga

SEQ ID NO: 1331381 - RNA, 19 nt, Artificial Sequence
  Description of Artificial Sequence: Synthetic oligonucleotide
agcccagaucacgauguuu

SEQ ID NO: 1331382 - RNA, 19 nt, Artificial Sequence
  Description of Artificial Sequence: Synthetic oligonucleotide
ggaucugagcacugguccu

SEQ ID NO: 1331383 - RNA, 19 nt, Artificial Sequence
  Description of Artificial Sequence: Synthetic oligonucleotide
caugcucucgugguggccu

SEQ ID NO: 1331384 - RNA, 19 nt, Artificial Sequence
  Description of Artificial Sequence: Synthetic oligonucleotide
auguagccaguaggcgaug

SEQ ID NO: 1331385 - RNA, 19 nt, Artificial Sequence
  Description of Artificial Sequence: Synthetic oligonucleotide
acguguucacaugcaugaa

SEQ ID NO: 1331386 - RNA, 19 nt, Artificial Sequence
  Description of Artificial Sequence: Synthetic oligonucleotide
cguguuaaggaggcgggug

SEQ ID NO: 1331387 - RNA, 19 nt, Artificial Sequence
  Description of Artificial Sequence: Synthetic oligonucleotide
cagguaucccggcuggacu

SEQ ID NO: 1331388 - RNA, 19 nt, Artificial Sequence
  Description of Artificial Sequence: Synthetic oligonucleotide
cgugacuucuccccaacca

SEQ ID NO: 1331389 - RNA, 19 nt, Artificial Sequence
  Description of Artificial Sequence: Synthetic oligonucleotide
gccacggccguucucauau

SEQ ID NO: 1331390 - RNA, 19 nt, Artificial Sequence
  Description of Artificial Sequence: Synthetic oligonucleotide
cacuuccgacaagaugguc

SEQ ID NO: 1331391 - RNA, 19 nt, Artificial Sequence
  Description of Artificial Sequence: Synthetic oligonucleotide
gccgaagacguuccucaga

SEQ ID NO: 1331392 - RNA, 19 nt, Artificial Sequence
  Description of Artificial Sequence: Synthetic oligonucleotide
guaggguguaggccacugu

SEQ ID NO: 1331393 - RNA, 19 nt, Artificial Sequence
  Description of Artificial Sequence: Synthetic oligonucleotide
auuaaucccuggaguccuu

SEQ ID NO: 1331394 - RNA, 19 nt, Artificial Sequence
  Description of Artificial Sequence: Synthetic oligonucleotide
caugcuccucgucggcgga

SEQ ID NO: 1331395 - RNA, 19 nt, Artificial Sequence
  Description of Artificial Sequence: Synthetic oligonucleotide
ugccacggccguucucaua

SEQ ID NO: 1331396 - RNA, 19 nt, Artificial Sequence
  Description of Artificial Sequence: Synthetic oligonucleotide
ggcuggacucucuguucac

SEQ ID NO: 1331397 - RNA, 19 nt, Artificial Sequence
  Description of Artificial Sequence: Synthetic oligonucleotide
ccagguaucccggcuggac

SEQ ID NO: 1331398 - RNA, 19 nt, Artificial Sequence
  Description of Artificial Sequence: Synthetic oligonucleotide
ccaccaguuauugaugucu

SEQ ID NO: 1331399 - RNA, 19 nt, Artificial Sequence
  Description of Artificial Sequence: Synthetic oligonucleotide
ggcuugugccauaccggug

SEQ ID NO: 1331400 - RNA, 19 nt, Artificial Sequence
  Description of Artificial Sequence: Synthetic oligonucleotide
caccaguuauugaugucuu

SEQ ID NO: 1331401 - RNA, 19 nt, Artificial Sequence
  Description of Artificial Sequence: Synthetic oligonucleotide
gucggcggagcagguacca

SEQ ID NO: 1331402 - RNA, 19 nt, Artificial Sequence
  Description of Artificial Sequence: Synthetic oligonucleotide
gcuggacucucuguucaca

SEQ ID NO: 1331403 - RNA, 19 nt, Artificial Sequence
  Description of Artificial Sequence: Synthetic oligonucleotide
ccggcagguagugguaaag

SEQ ID NO: 1331404 - RNA, 19 nt, Artificial Sequence
  Description of Artificial Sequence: Synthetic oligonucleotide
augccgugaacaagcugua

SEQ ID NO: 1331405 - RNA, 19 nt, Artificial Sequence
  Description of Artificial Sequence: Synthetic oligonucleotide
ccagaucacgauguuucca

SEQ ID NO: 1331406 - RNA, 19 nt, Artificial Sequence
  Description of Artificial Sequence: Synthetic oligonucleotide
ccagcgaagggcccgaagu

SEQ ID NO: 1331407 - RNA, 19 nt, Artificial Sequence
  Description of Artificial Sequence: Synthetic oligonucleotide
ccgccaguacauagggcuc

SEQ ID NO: 1331408 - RNA, 19 nt, Artificial Sequence
  Description of Artificial Sequence: Synthetic oligonucleotide
ggaguccuuacuggaccca

SEQ ID NO: 1331409 - RNA, 19 nt, Artificial Sequence
  Description of Artificial Sequence: Synthetic oligonucleotide
guagccaguaggcgauguu

SEQ ID NO: 1331410 - RNA, 19 nt, Artificial Sequence
  Description of Artificial Sequence: Synthetic oligonucleotide
gucaugccgugaacaagcu

SEQ ID NO: 1331411 - RNA, 19 nt, Artificial Sequence
  Description of Artificial Sequence: Synthetic oligonucleotide
gagcgccagccgccaguac

SEQ ID NO: 1331412 - RNA, 19 nt, Artificial Sequence
  Description of Artificial Sequence: Synthetic oligonucleotide
agguggucgcugacaugcu

SEQ ID NO: 1331413 - RNA, 19 nt, Artificial Sequence
  Description of Artificial Sequence: Synthetic oligonucleotide
guaucccggcuggacucuc

SEQ ID NO: 1331414 - RNA, 19 nt, Artificial Sequence
  Description of Artificial Sequence: Synthetic oligonucleotide
aggguuugccgaagacguu

SEQ ID NO: 1331415 - RNA, 19 nt, Artificial Sequence
  Description of Artificial Sequence: Synthetic oligonucleotide
ccgacaagauggucuucca

SEQ ID NO: 1331416 - RNA, 19 nt, Artificial Sequence
  Description of Artificial Sequence: Synthetic oligonucleotide
ggccugggaggguuguuua

SEQ ID NO: 1331417 - RNA, 19 nt, Artificial Sequence
  Description of Artificial Sequence: Synthetic oligonucleotide
ggcuagcugaagcccagau

SEQ ID NO: 1331418 - RNA, 19 nt, Artificial Sequence
  Description of Artificial Sequence: Synthetic oligonucleotide
caauuggcagcagcaggau

SEQ ID NO: 1331419 - RNA, 19 nt, Artificial Sequence
  Description of Artificial Sequence: Synthetic oligonucleotide
uuccagcgaagggcccgaa

SEQ ID NO: 1331420 - RNA, 19 nt, Artificial Sequence
  Description of Artificial Sequence: Synthetic oligonucleotide
guacaggccugggaggguu

SEQ ID NO: 1331421 - RNA, 19 nt, Artificial Sequence
  Description of Artificial Sequence: Synthetic oligonucleotide
cagcgaagggcccgaaguu

SEQ ID NO: 1331422 - RNA, 19 nt, Artificial Sequence
  Description of Artificial Sequence: Synthetic oligonucleotide
gccaguaggcgauguuggu

SEQ ID NO: 1331423 - RNA, 19 nt, Artificial Sequence
  Description of Artificial Sequence: Synthetic oligonucleotide
gcgaagggcccgaaguucu

SEQ ID NO: 1331424 - RNA, 19 nt, Artificial Sequence
  Description of Artificial Sequence: Synthetic oligonucleotide
ccaugcucucgugguggcc

SEQ ID NO: 1331425 - RNA, 19 nt, Artificial Sequence
  Description of Artificial Sequence: Synthetic oligonucleotide
ccauggcguacaggccugg

SEQ ID NO: 1331426 - RNA, 19 nt, Artificial Sequence
  Description of Artificial Sequence: Synthetic oligonucleotide
cgucggcggagcagguacc

SEQ ID NO: 1331427 - RNA, 19 nt, Artificial Sequence
  Description of Artificial Sequence: Synthetic oligonucleotide
ccgagaaucuggccaugaa

SEQ ID NO: 1331428 - RNA, 19 nt, Artificial Sequence
  Description of Artificial Sequence: Synthetic oligonucleotide
ggugaggcuauggcagggu

SEQ ID NO: 1331429 - RNA, 19 nt, Artificial Sequence
  Description of Artificial Sequence: Synthetic oligonucleotide
cacaugcaugaagcgcacu

SEQ ID NO: 1331430 - RNA, 19 nt, Artificial Sequence
  Description of Artificial Sequence: Synthetic oligonucleotide
cucgucggcggagcaggua

SEQ ID NO: 1331431 - RNA, 19 nt, Artificial Sequence
  Description of Artificial Sequence: Synthetic oligonucleotide
ggccguucucauauaucau

SEQ ID NO: 1331432 - RNA, 19 nt, Artificial Sequence
  Description of Artificial Sequence: Synthetic oligonucleotide
gcguguuaaggaggcgggu

SEQ ID NO: 1331433 - RNA, 19 nt, Artificial Sequence
  Description of Artificial Sequence: Synthetic oligonucleotide
cguguccccauaaguuagu

SEQ ID NO: 1331434 - RNA, 19 nt, Artificial Sequence
  Description of Artificial Sequence: Synthetic oligonucleotide
ccugccugccuuugugguu

SEQ ID NO: 1331435 - RNA, 19 nt, Artificial Sequence
  Description of Artificial Sequence: Synthetic oligonucleotide
ccacuccagcgggguggag

SEQ ID NO: 1331436 - RNA, 19 nt, Artificial Sequence
  Description of Artificial Sequence: Synthetic oligonucleotide
ccacggccguucucauaua

SEQ ID NO: 1331437 - RNA, 19 nt, Artificial Sequence
  Description of Artificial Sequence: Synthetic oligonucleotide
ucuuauauaagacaugcag

SEQ ID NO: 1331438 - RNA, 19 nt, Artificial Sequence
  Description of Artificial Sequence: Synthetic oligonucleotide
uguacauaagaaaugaaag

SEQ ID NO: 1331439 - RNA, 19 nt, Artificial Sequence
  Description of Artificial Sequence: Synthetic oligonucleotide
aguacuuagcuucaugugc

SEQ ID NO: 1331440 - RNA, 19 nt, Artificial Sequence
  Description of Artificial Sequence: Synthetic oligonucleotide
uuucuuaacauucauacuc

SEQ ID NO: 1331441 - RNA, 19 nt, Artificial Sequence
  Description of Artificial Sequence: Synthetic oligonucleotide
uguucaauggcaaagacaa

SEQ ID NO: 1331442 - RNA, 19 nt, Artificial Sequence
  Description of Artificial Sequence: Synthetic oligonucleotide
agauagcuggauuagaaac

SEQ ID NO: 1331443 - RNA, 19 nt, Artificial Sequence
  Description of Artificial Sequence: Synthetic oligonucleotide
auauuuaccagauaauuga

SEQ ID NO: 1331444 - RNA, 19 nt, Artificial Sequence
  Description of Artificial Sequence: Synthetic oligonucleotide
uuuaccagauaauugaacu

SEQ ID NO: 1331445 - RNA, 19 nt, Artificial Sequence
  Description of Artificial Sequence: Synthetic oligonucleotide
ugcaaaagggccuaggcag

SEQ ID NO: 1331446 - RNA, 19 nt, Artificial Sequence
  Description of Artificial Sequence: Synthetic oligonucleotide
auauaagacaugcaggcug

SEQ ID NO: 1331447 - RNA, 19 nt, Artificial Sequence
  Description of Artificial Sequence: Synthetic oligonucleotide
aagaauguaaccaguguuc

SEQ ID NO: 1331448 - RNA, 19 nt, Artificial Sequence
  Description of Artificial Sequence: Synthetic oligonucleotide
aacucaggcuuucagaugu

SEQ ID NO: 1331449 - RNA, 19 nt, Artificial Sequence
  Description of Artificial Sequence: Synthetic oligonucleotide
uauauuuuggacagguccu

SEQ ID NO: 1331450 - RNA, 19 nt, Artificial Sequence
  Description of Artificial Sequence: Synthetic oligonucleotide
uaacugaaggcacaguuug

SEQ ID NO: 1331451 - RNA, 19 nt, Artificial Sequence
  Description of Artificial Sequence: Synthetic oligonucleotide
gauaauugaacucaccaaa

SEQ ID NO: 1331452 - RNA, 19 nt, Artificial Sequence
  Description of Artificial Sequence: Synthetic oligonucleotide
ugcuguauauuuuggacag

SEQ ID NO: 1331453 - RNA, 19 nt, Artificial Sequence
  Description of Artificial Sequence: Synthetic oligonucleotide
ugauuaaccagucuacuuc

SEQ ID NO: 1331454 - RNA, 19 nt, Artificial Sequence
  Description of Artificial Sequence: Synthetic oligonucleotide
uaaucuugguugauuaacc

SEQ ID NO: 1331455 - RNA, 19 nt, Artificial Sequence
  Description of Artificial Sequence: Synthetic oligonucleotide
gacaaaugcuguuagggug

SEQ ID NO: 1331456 - RNA, 19 nt, Artificial Sequence
  Description of Artificial Sequence: Synthetic oligonucleotide
uuugcaaaagggccuaggc

SEQ ID NO: 1331457 - RNA, 19 nt, Artificial Sequence
  Description of Artificial Sequence: Synthetic oligonucleotide
uucauccucucgaagaacc

SEQ ID NO: 1331458 - RNA, 19 nt, Artificial Sequence
  Description of Artificial Sequence: Synthetic oligonucleotide
cauacucucauuucugagc

SEQ ID NO: 1331459 - RNA, 19 nt, Artificial Sequence
  Description of Artificial Sequence: Synthetic oligonucleotide
ucauggaagaauguaacca

SEQ ID NO: 1331460 - RNA, 19 nt, Artificial Sequence
  Description of Artificial Sequence: Synthetic oligonucleotide
aaguacuuagcuucaugug

SEQ ID NO: 1331461 - RNA, 19 nt, Artificial Sequence
  Description of Artificial Sequence: Synthetic oligonucleotide
uauaagacaugcaggcuga

SEQ ID NO: 1331462 - RNA, 19 nt, Artificial Sequence
  Description of Artificial Sequence: Synthetic oligonucleotide
ucuaacugaaggcacaguu

SEQ ID NO: 1331463 - RNA, 19 nt, Artificial Sequence
  Description of Artificial Sequence: Synthetic oligonucleotide
ugcacuaauucauggaaga

SEQ ID NO: 1331464 - RNA, 19 nt, Artificial Sequence
  Description of Artificial Sequence: Synthetic oligonucleotide
uuaaucuugguugauuaac

SEQ ID NO: 1331465 - RNA, 19 nt, Artificial Sequence
  Description of Artificial Sequence: Synthetic oligonucleotide
ugaagcacuggauauuuac

SEQ ID NO: 1331466 - RNA, 19 nt, Artificial Sequence
  Description of Artificial Sequence: Synthetic oligonucleotide
auucauggaagaauguaac

SEQ ID NO: 1331467 - RNA, 19 nt, Artificial Sequence
  Description of Artificial Sequence: Synthetic oligonucleotide
ucuuagacguccaggauaa

SEQ ID NO: 1331468 - RNA, 19 nt, Artificial Sequence
  Description of Artificial Sequence: Synthetic oligonucleotide
uuuuagauagcuggauuag

SEQ ID NO: 1331469 - RNA, 19 nt, Artificial Sequence
  Description of Artificial Sequence: Synthetic oligonucleotide
gagagaaucgugaugagca

SEQ ID NO: 1331470 - RNA, 19 nt, Artificial Sequence
  Description of Artificial Sequence: Synthetic oligonucleotide
gaauagguucaucaaacuc

SEQ ID NO: 1331471 - RNA, 19 nt, Artificial Sequence
  Description of Artificial Sequence: Synthetic oligonucleotide
uucagaaccaggaugccaa

SEQ ID NO: 1331472 - RNA, 19 nt, Artificial Sequence
  Description of Artificial Sequence: Synthetic oligonucleotide
gaaugagguauccucccgg

SEQ ID NO: 1331473 - RNA, 19 nt, Artificial Sequence
  Description of Artificial Sequence: Synthetic oligonucleotide
acuguucaauggcaaagac

SEQ ID NO: 1331474 - RNA, 19 nt, Artificial Sequence
  Description of Artificial Sequence: Synthetic oligonucleotide
uagacguccaggauaacac

SEQ ID NO: 1331475 - RNA, 19 nt, Artificial Sequence
  Description of Artificial Sequence: Synthetic oligonucleotide
aauucauggaagaauguaa

SEQ ID NO: 1331476 - RNA, 19 nt, Artificial Sequence
  Description of Artificial Sequence: Synthetic oligonucleotide
aaugcuguuagggugcugu

SEQ ID NO: 1331477 - RNA, 19 nt, Artificial Sequence
  Description of Artificial Sequence: Synthetic oligonucleotide
gucuaugucucccagcugc

SEQ ID NO: 1331478 - RNA, 19 nt, Artificial Sequence
  Description of Artificial Sequence: Synthetic oligonucleotide
ugguugauuaaccagucua

SEQ ID NO: 1331479 - RNA, 19 nt, Artificial Sequence
  Description of Artificial Sequence: Synthetic oligonucleotide
ugacaggacucuuauauaa

SEQ ID NO: 1331480 - RNA, 19 nt, Artificial Sequence
  Description of Artificial Sequence: Synthetic oligonucleotide
ugcagaaugagguauccuc

SEQ ID NO: 1331481 - RNA, 19 nt, Artificial Sequence
  Description of Artificial Sequence: Synthetic oligonucleotide
gguucuaucagccuggaca

SEQ ID NO: 1331482 - RNA, 19 nt, Artificial Sequence
  Description of Artificial Sequence: Synthetic oligonucleotide
uucucgaugagaagauuug

SEQ ID NO: 1331483 - RNA, 19 nt, Artificial Sequence
  Description of Artificial Sequence: Synthetic oligonucleotide
ucggcacaaaacaaagcag

SEQ ID NO: 1331484 - RNA, 19 nt, Artificial Sequence
  Description of Artificial Sequence: Synthetic oligonucleotide
augacgauggcuuucucga

SEQ ID NO: 1331485 - RNA, 19 nt, Artificial Sequence
  Description of Artificial Sequence: Synthetic oligonucleotide
agauaauugaacucaccaa

SEQ ID NO: 1331486 - RNA, 19 nt, Artificial Sequence
  Description of Artificial Sequence: Synthetic oligonucleotide
uugcaaaagggccuaggca

SEQ ID NO: 1331487 - RNA, 19 nt, Artificial Sequence
  Description of Artificial Sequence: Synthetic oligonucleotide
acuuuggguugucauuccc

SEQ ID NO: 1331488 - RNA, 19 nt, Artificial Sequence
  Description of Artificial Sequence: Synthetic oligonucleotide
auauccugggacaagucac

SEQ ID NO: 1331489 - RNA, 19 nt, Artificial Sequence
  Description of Artificial Sequence: Synthetic oligonucleotide
agacguccaggauaacacc

SEQ ID NO: 1331490 - RNA, 19 nt, Artificial Sequence
  Description of Artificial Sequence: Synthetic oligonucleotide
caaaucuuagacguccagg

SEQ ID NO: 1331491 - RNA, 19 nt, Artificial Sequence
  Description of Artificial Sequence: Synthetic oligonucleotide
aaauucaccauugcauagu

SEQ ID NO: 1331492 - RNA, 19 nt, Artificial Sequence
  Description of Artificial Sequence: Synthetic oligonucleotide
gaagaguccuucuaacuga

SEQ ID NO: 1331493 - RNA, 19 nt, Artificial Sequence
  Description of Artificial Sequence: Synthetic oligonucleotide
agucccgagaaguacuuag

SEQ ID NO: 1331494 - RNA, 19 nt, Artificial Sequence
  Description of Artificial Sequence: Synthetic oligonucleotide
gucggcacaaaacaaagca

SEQ ID NO: 1331495 - RNA, 19 nt, Artificial Sequence
  Description of Artificial Sequence: Synthetic oligonucleotide
ugaagucccgagaaguacu

SEQ ID NO: 1331496 - RNA, 19 nt, Artificial Sequence
  Description of Artificial Sequence: Synthetic oligonucleotide
uucauacucucauuucuga

SEQ ID NO: 1331497 - RNA, 19 nt, Artificial Sequence
  Description of Artificial Sequence: Synthetic oligonucleotide
uuaacucaggcauaucuuu

SEQ ID NO: 1331498 - RNA, 19 nt, Artificial Sequence
  Description of Artificial Sequence: Synthetic oligonucleotide
uguuuggaauuccucuggc

SEQ ID NO: 1331499 - RNA, 19 nt, Artificial Sequence
  Description of Artificial Sequence: Synthetic oligonucleotide
aucgugaugagcagcaagg

SEQ ID NO: 1331500 - RNA, 19 nt, Artificial Sequence
  Description of Artificial Sequence: Synthetic oligonucleotide
ucuaucucuacauccuggu

SEQ ID NO: 1331501 - RNA, 19 nt, Artificial Sequence
  Description of Artificial Sequence: Synthetic oligonucleotide
ugcuaagcaaguucaacaa

SEQ ID NO: 1331502 - RNA, 19 nt, Artificial Sequence
  Description of Artificial Sequence: Synthetic oligonucleotide
agaaugagguauccucccg

SEQ ID NO: 1331503 - RNA, 19 nt, Artificial Sequence
  Description of Artificial Sequence: Synthetic oligonucleotide
gaaguacuuagcuucaugu

SEQ ID NO: 1331504 - RNA, 19 nt, Artificial Sequence
  Description of Artificial Sequence: Synthetic oligonucleotide
aaacgaagccagccuggac

SEQ ID NO: 1331505 - RNA, 19 nt, Artificial Sequence
  Description of Artificial Sequence: Synthetic oligonucleotide
ucucgaugagaagauuugg

SEQ ID NO: 1331506 - RNA, 19 nt, Artificial Sequence
  Description of Artificial Sequence: Synthetic oligonucleotide
cucuaucucuacauccugg

SEQ ID NO: 1331507 - RNA, 19 nt, Artificial Sequence
  Description of Artificial Sequence: Synthetic oligonucleotide
aggucacauuaacucaggc

SEQ ID NO: 1331508 - RNA, 19 nt, Artificial Sequence
  Description of Artificial Sequence: Synthetic oligonucleotide
uuagacguccaggauaaca

SEQ ID NO: 1331509 - RNA, 19 nt, Artificial Sequence
  Description of Artificial Sequence: Synthetic oligonucleotide
cuuuggguugucauucccc

SEQ ID NO: 1331510 - RNA, 19 nt, Artificial Sequence
  Description of Artificial Sequence: Synthetic oligonucleotide
agaaacuuuucauacuguu

SEQ ID NO: 1331511 - RNA, 19 nt, Artificial Sequence
  Description of Artificial Sequence: Synthetic oligonucleotide
ucagguuuaccuuggacuu

SEQ ID NO: 1331512 - RNA, 19 nt, Artificial Sequence
  Description of Artificial Sequence: Synthetic oligonucleotide
agaaguacuuagcuucaug

SEQ ID NO: 1331513 - RNA, 19 nt, Artificial Sequence
  Description of Artificial Sequence: Synthetic oligonucleotide
ugaacucaccaaaggcucc

SEQ ID NO: 1331514 - RNA, 19 nt, Artificial Sequence
  Description of Artificial Sequence: Synthetic oligonucleotide
caauaagguguccacgcag

SEQ ID NO: 1331515 - RNA, 19 nt, Artificial Sequence
  Description of Artificial Sequence: Synthetic oligonucleotide
ggacaagucacgaagcagg

SEQ ID NO: 1331516 - RNA, 19 nt, Artificial Sequence
  Description of Artificial Sequence: Synthetic oligonucleotide
uccuaaccgauucccacug

SEQ ID NO: 1331517 - RNA, 19 nt, Artificial Sequence
  Description of Artificial Sequence: Synthetic oligonucleotide
agaagauuuggugggacug

SEQ ID NO: 1331518 - RNA, 19 nt, Artificial Sequence
  Description of Artificial Sequence: Synthetic oligonucleotide
uagaaacuuuucauacugu

SEQ ID NO: 1331519 - RNA, 19 nt, Artificial Sequence
  Description of Artificial Sequence: Synthetic oligonucleotide
uguaugagaagggguacug

SEQ ID NO: 1331520 - RNA, 19 nt, Artificial Sequence
  Description of Artificial Sequence: Synthetic oligonucleotide
uauauaagacaugcaggcu

SEQ ID NO: 1331521 - RNA, 19 nt, Artificial Sequence
  Description of Artificial Sequence: Synthetic oligonucleotide
uuuagauagcuggauuaga

SEQ ID NO: 1331522 - RNA, 19 nt, Artificial Sequence
  Description of Artificial Sequence: Synthetic oligonucleotide
gauaggguuucuugguuuc

SEQ ID NO: 1331523 - RNA, 19 nt, Artificial Sequence
  Description of Artificial Sequence: Synthetic oligonucleotide
uugauuaaccagucuacuu

SEQ ID NO: 1331524 - RNA, 19 nt, Artificial Sequence
  Description of Artificial Sequence: Synthetic oligonucleotide
cagguuccuaaacucaggc

SEQ ID NO: 1331525 - RNA, 19 nt, Artificial Sequence
  Description of Artificial Sequence: Synthetic oligonucleotide
ugucggcacaaaacaaagc

SEQ ID NO: 1331526 - RNA, 19 nt, Artificial Sequence
  Description of Artificial Sequence: Synthetic oligonucleotide
aucuuagacguccaggaua

SEQ ID NO: 1331527 - RNA, 19 nt, Artificial Sequence
  Description of Artificial Sequence: Synthetic oligonucleotide
agagaaucgugaugagcag

SEQ ID NO: 1331528 - RNA, 19 nt, Artificial Sequence
  Description of Artificial Sequence: Synthetic oligonucleotide
uaaccgauucccacugucu

SEQ ID NO: 1331529 - RNA, 19 nt, Artificial Sequence
  Description of Artificial Sequence: Synthetic oligonucleotide
gacaagucacgaagcaggg

SEQ ID NO: 1331530 - RNA, 19 nt, Artificial Sequence
  Description of Artificial Sequence: Synthetic oligonucleotide
uaucagccuggacaaggag

SEQ ID NO: 1331531 - RNA, 19 nt, Artificial Sequence
  Description of Artificial Sequence: Synthetic oligonucleotide
cuugguugauuaaccaguc

SEQ ID NO: 1331532 - RNA, 19 nt, Artificial Sequence
  Description of Artificial Sequence: Synthetic oligonucleotide
ggugcuguauauuuuggac

SEQ ID NO: 1331533 - RNA, 19 nt, Artificial Sequence
  Description of Artificial Sequence: Synthetic oligonucleotide
augagaagggguacugucg

SEQ ID NO: 1331534 - RNA, 19 nt, Artificial Sequence
  Description of Artificial Sequence: Synthetic oligonucleotide
gaggcauccuaaccgauuc

SEQ ID NO: 1331535 - RNA, 19 nt, Artificial Sequence
  Description of Artificial Sequence: Synthetic oligonucleotide
ucuaugucucccagcugcc

SEQ ID NO: 1331536 - RNA, 19 nt, Artificial Sequence
  Description of Artificial Sequence: Synthetic oligonucleotide
caggauaacaccugcacaa

SEQ ID NO: 1331537 - RNA, 19 nt, Artificial Sequence
  Description of Artificial Sequence: Synthetic oligonucleotide
ucuugcagaaugagguauc

SEQ ID NO: 1331538 - RNA, 19 nt, Artificial Sequence
  Description of Artificial Sequence: Synthetic oligonucleotide
uaacaccugcacaaacugu

SEQ ID NO: 1331539 - RNA, 19 nt, Artificial Sequence
  Description of Artificial Sequence: Synthetic oligonucleotide
aaccaugucuaggaugcug

SEQ ID NO: 1331540 - RNA, 19 nt, Artificial Sequence
  Description of Artificial Sequence: Synthetic oligonucleotide
ugcaaaucuuagacgucca

SEQ ID NO: 1331541 - RNA, 19 nt, Artificial Sequence
  Description of Artificial Sequence: Synthetic oligonucleotide
gacaggacucuuauauaag

SEQ ID NO: 1331542 - RNA, 19 nt, Artificial Sequence
  Description of Artificial Sequence: Synthetic oligonucleotide
ucuuaacauucauacucuc

SEQ ID NO: 1331543 - RNA, 19 nt, Artificial Sequence
  Description of Artificial Sequence: Synthetic oligonucleotide
aaguggugcagguuccuaa

SEQ ID NO: 1331544 - RNA, 19 nt, Artificial Sequence
  Description of Artificial Sequence: Synthetic oligonucleotide
uccuucaauaaggugucca

SEQ ID NO: 1331545 - RNA, 19 nt, Artificial Sequence
  Description of Artificial Sequence: Synthetic oligonucleotide
agacaguaggggcagcugu

SEQ ID NO: 1331546 - RNA, 19 nt, Artificial Sequence
  Description of Artificial Sequence: Synthetic oligonucleotide
cauuaacucaggcauaucu

SEQ ID NO: 1331547 - RNA, 19 nt, Artificial Sequence
  Description of Artificial Sequence: Synthetic oligonucleotide
aaccgauucccacugucuu

SEQ ID NO: 1331548 - RNA, 19 nt, Artificial Sequence
  Description of Artificial Sequence: Synthetic oligonucleotide
gagaaucgugaugagcagc

SEQ ID NO: 1331549 - RNA, 19 nt, Artificial Sequence
  Description of Artificial Sequence: Synthetic oligonucleotide
uggggauuggcuugguuuc

SEQ ID NO: 1331550 - RNA, 19 nt, Artificial Sequence
  Description of Artificial Sequence: Synthetic oligonucleotide
uggugggacugcuugagaa

SEQ ID NO: 1331551 - RNA, 19 nt, Artificial Sequence
  Description of Artificial Sequence: Synthetic oligonucleotide
uugguugauuaaccagucu

SEQ ID NO: 1331552 - RNA, 19 nt, Artificial Sequence
  Description of Artificial Sequence: Synthetic oligonucleotide
aggcauccuaaccgauucc

SEQ ID NO: 1331553 - RNA, 19 nt, Artificial Sequence
  Description of Artificial Sequence: Synthetic oligonucleotide
ugauaggguuucuugguuu

SEQ ID NO: 1331554 - RNA, 19 nt, Artificial Sequence
  Description of Artificial Sequence: Synthetic oligonucleotide
agaaucgugaugagcagca

SEQ ID NO: 1331555 - RNA, 19 nt, Artificial Sequence
  Description of Artificial Sequence: Synthetic oligonucleotide
uugcauaguggucugucuu

SEQ ID NO: 1331556 - RNA, 19 nt, Artificial Sequence
  Description of Artificial Sequence: Synthetic oligonucleotide
uacugucggcacaaaacaa

SEQ ID NO: 1331557 - RNA, 19 nt, Artificial Sequence
  Description of Artificial Sequence: Synthetic oligonucleotide
ccgagaaguacuuagcuuc

SEQ ID NO: 1331558 - RNA, 19 nt, Artificial Sequence
  Description of Artificial Sequence: Synthetic oligonucleotide
aagauuuggugggacugcu

SEQ ID NO: 1331559 - RNA, 19 nt, Artificial Sequence
  Description of Artificial Sequence: Synthetic oligonucleotide
cuguauuugcuccugugga

SEQ ID NO: 1331560 - RNA, 19 nt, Artificial Sequence
  Description of Artificial Sequence: Synthetic oligonucleotide
gguggguucuaucagccug

SEQ ID NO: 1331561 - RNA, 19 nt, Artificial Sequence
  Description of Artificial Sequence: Synthetic oligonucleotide
cugcacaaacuguggagag

SEQ ID NO: 1331562 - RNA, 19 nt, Artificial Sequence
  Description of Artificial Sequence: Synthetic oligonucleotide
aaagggccuaggcagccau

SEQ ID NO: 1331563 - RNA, 19 nt, Artificial Sequence
  Description of Artificial Sequence: Synthetic oligonucleotide
cuaaccgauucccacuguc

SEQ ID NO: 1331564 - RNA, 19 nt, Artificial Sequence
  Description of Artificial Sequence: Synthetic oligonucleotide
cugacacaccuggagauag

SEQ ID NO: 1331565 - RNA, 19 nt, Artificial Sequence
  Description of Artificial Sequence: Synthetic oligonucleotide
agccugacucaggacaagc

SEQ ID NO: 1331566 - RNA, 19 nt, Artificial Sequence
  Description of Artificial Sequence: Synthetic oligonucleotide
uuagggugcuguauauuuu

SEQ ID NO: 1331567 - RNA, 19 nt, Artificial Sequence
  Description of Artificial Sequence: Synthetic oligonucleotide
cuucauugaaguggugcag

SEQ ID NO: 1331568 - RNA, 19 nt, Artificial Sequence
  Description of Artificial Sequence: Synthetic oligonucleotide
ucaccauugcauagugguc

SEQ ID NO: 1331569 - RNA, 19 nt, Artificial Sequence
  Description of Artificial Sequence: Synthetic oligonucleotide
ucacugagcucuuaaucuu

SEQ ID NO: 1331570 - RNA, 19 nt, Artificial Sequence
  Description of Artificial Sequence: Synthetic oligonucleotide
cacugagcucuuaaucuug

SEQ ID NO: 1331571 - RNA, 19 nt, Artificial Sequence
  Description of Artificial Sequence: Synthetic oligonucleotide
gguacugucggcacaaaac

SEQ ID NO: 1331572 - RNA, 19 nt, Artificial Sequence
  Description of Artificial Sequence: Synthetic oligonucleotide
cugucugcacuaauucaug

SEQ ID NO: 1331573 - RNA, 19 nt, Artificial Sequence
  Description of Artificial Sequence: Synthetic oligonucleotide
aguucaacaaggaccucug

SEQ ID NO: 1331574 - RNA, 19 nt, Artificial Sequence
  Description of Artificial Sequence: Synthetic oligonucleotide
gcuaagcaaguucaacaag

SEQ ID NO: 1331575 - RNA, 19 nt, Artificial Sequence
  Description of Artificial Sequence: Synthetic oligonucleotide
cagcaaggccucuuuacug

SEQ ID NO: 1331576 - RNA, 19 nt, Artificial Sequence
  Description of Artificial Sequence: Synthetic oligonucleotide
cauucauacucucauuucu

SEQ ID NO: 1331577 - RNA, 19 nt, Artificial Sequence
  Description of Artificial Sequence: Synthetic oligonucleotide
uaacauucauacucucauu

SEQ ID NO: 1331578 - RNA, 19 nt, Artificial Sequence
  Description of Artificial Sequence: Synthetic oligonucleotide
uuccccuuauuuuguacau

SEQ ID NO: 1331579 - RNA, 19 nt, Artificial Sequence
  Description of Artificial Sequence: Synthetic oligonucleotide
agguuccuaaacucaggcu

SEQ ID NO: 1331580 - RNA, 19 nt, Artificial Sequence
  Description of Artificial Sequence: Synthetic oligonucleotide
accgauucccacugucuug

SEQ ID NO: 1331581 - RNA, 19 nt, Artificial Sequence
  Description of Artificial Sequence: Synthetic oligonucleotide
accuggagauaguauuuga

SEQ ID NO: 1331582 - RNA, 19 nt, Artificial Sequence
  Description of Artificial Sequence: Synthetic oligonucleotide
auuaacucaggcauaucuu

SEQ ID NO: 1331583 - RNA, 19 nt, Artificial Sequence
  Description of Artificial Sequence: Synthetic oligonucleotide
guggguucuaucagccugg

SEQ ID NO: 1331584 - RNA, 19 nt, Artificial Sequence
  Description of Artificial Sequence: Synthetic oligonucleotide
auagcuggauuagaaacuu

SEQ ID NO: 1331585 - RNA, 19 nt, Artificial Sequence
  Description of Artificial Sequence: Synthetic oligonucleotide
agaugagagccggacagcu

SEQ ID NO: 1331586 - RNA, 19 nt, Artificial Sequence
  Description of Artificial Sequence: Synthetic oligonucleotide
ucgugaugagcagcaaggc

SEQ ID NO: 1331587 - RNA, 19 nt, Artificial Sequence
  Description of Artificial Sequence: Synthetic oligonucleotide
ggacagguccuucaauaag

SEQ ID NO: 1331588 - RNA, 19 nt, Artificial Sequence
  Description of Artificial Sequence: Synthetic oligonucleotide
gguugauuaaccagucuac

SEQ ID NO: 1331589 - RNA, 19 nt, Artificial Sequence
  Description of Artificial Sequence: Synthetic oligonucleotide
ugcaugacgauggcuuucu

SEQ ID NO: 1331590 - RNA, 19 nt, Artificial Sequence
  Description of Artificial Sequence: Synthetic oligonucleotide
ggacccuagcuccaucugg

SEQ ID NO: 1331591 - RNA, 19 nt, Artificial Sequence
  Description of Artificial Sequence: Synthetic oligonucleotide
agucacgaagcagggugac

SEQ ID NO: 1331592 - RNA, 19 nt, Artificial Sequence
  Description of Artificial Sequence: Synthetic oligonucleotide
acaagguuggggauuggcu

SEQ ID NO: 1331593 - RNA, 19 nt, Artificial Sequence
  Description of Artificial Sequence: Synthetic oligonucleotide
auugugcuggcgccugcag

SEQ ID NO: 1331594 - RNA, 19 nt, Artificial Sequence
  Description of Artificial Sequence: Synthetic oligonucleotide
cuguauuccuugcaaaucu

SEQ ID NO: 1331595 - RNA, 19 nt, Artificial Sequence
  Description of Artificial Sequence: Synthetic oligonucleotide
uggacccuagcuccaucug

SEQ ID NO: 1331596 - RNA, 19 nt, Artificial Sequence
  Description of Artificial Sequence: Synthetic oligonucleotide
cuggucuaugucucccagc

SEQ ID NO: 1331597 - RNA, 19 nt, Artificial Sequence
  Description of Artificial Sequence: Synthetic oligonucleotide
cugacucaggacaagcaaa

SEQ ID NO: 1331598 - RNA, 19 nt, Artificial Sequence
  Description of Artificial Sequence: Synthetic oligonucleotide
cucuuauauaagacaugca

SEQ ID NO: 1331599 - RNA, 19 nt, Artificial Sequence
  Description of Artificial Sequence: Synthetic oligonucleotide
guuagggugcuguauauuu

SEQ ID NO: 1331600 - RNA, 19 nt, Artificial Sequence
  Description of Artificial Sequence: Synthetic oligonucleotide
agcuggauuagaaacuuuu

SEQ ID NO: 1331601 - RNA, 19 nt, Artificial Sequence
  Description of Artificial Sequence: Synthetic oligonucleotide
cuaucucuacauccugguc

SEQ ID NO: 1331602 - RNA, 19 nt, Artificial Sequence
  Description of Artificial Sequence: Synthetic oligonucleotide
ggaggagagaaucgugaug

SEQ ID NO: 1331603 - RNA, 19 nt, Artificial Sequence
  Description of Artificial Sequence: Synthetic oligonucleotide
gcagaaugagguauccucc

SEQ ID NO: 1331604 - RNA, 19 nt, Artificial Sequence
  Description of Artificial Sequence: Synthetic oligonucleotide
ccuggagauaguauuugac

SEQ ID NO: 1331605 - RNA, 19 nt, Artificial Sequence
  Description of Artificial Sequence: Synthetic oligonucleotide
guccuucuaacugaaggca

SEQ ID NO: 1331606 - RNA, 19 nt, Artificial Sequence
  Description of Artificial Sequence: Synthetic oligonucleotide
caaaagggccuaggcagcc

SEQ ID NO: 1331607 - RNA, 19 nt, Artificial Sequence
  Description of Artificial Sequence: Synthetic oligonucleotide
auccucccggcuguauucc

SEQ ID NO: 1331608 - RNA, 19 nt, Artificial Sequence
  Description of Artificial Sequence: Synthetic oligonucleotide
ccuucaauaagguguccac

SEQ ID NO: 1331609 - RNA, 19 nt, Artificial Sequence
  Description of Artificial Sequence: Synthetic oligonucleotide
uuggugggacugcuugaga

SEQ ID NO: 1331610 - RNA, 19 nt, Artificial Sequence
  Description of Artificial Sequence: Synthetic oligonucleotide
agggugcuguauauuuugg

SEQ ID NO: 1331611 - RNA, 19 nt, Artificial Sequence
  Description of Artificial Sequence: Synthetic oligonucleotide
ggagagaaucgugaugagc

SEQ ID NO: 1331612 - RNA, 19 nt, Artificial Sequence
  Description of Artificial Sequence: Synthetic oligonucleotide
ccagauaauugaacucacc

SEQ ID NO: 1331613 - RNA, 19 nt, Artificial Sequence
  Description of Artificial Sequence: Synthetic oligonucleotide
gcaaaucuuagacguccag

SEQ ID NO: 1331614 - RNA, 19 nt, Artificial Sequence
  Description of Artificial Sequence: Synthetic oligonucleotide
gagaagauuuggugggacu

SEQ ID NO: 1331615 - RNA, 19 nt, Artificial Sequence
  Description of Artificial Sequence: Synthetic oligonucleotide
gguuccuaaacucaggcuu

SEQ ID NO: 1331616 - RNA, 19 nt, Artificial Sequence
  Description of Artificial Sequence: Synthetic oligonucleotide
ucauuccccuuauuuugua

SEQ ID NO: 1331617 - RNA, 19 nt, Artificial Sequence
  Description of Artificial Sequence: Synthetic oligonucleotide
cugcuugagaagaggcauc

SEQ ID NO: 1331618 - RNA, 19 nt, Artificial Sequence
  Description of Artificial Sequence: Synthetic oligonucleotide
cuacauccuggucuauguc

SEQ ID NO: 1331619 - RNA, 19 nt, Artificial Sequence
  Description of Artificial Sequence: Synthetic oligonucleotide
uguccacgcagcugccuga

SEQ ID NO: 1331620 - RNA, 19 nt, Artificial Sequence
  Description of Artificial Sequence: Synthetic oligonucleotide
ccuugcaaaucuuagacgu

SEQ ID NO: 1331621 - RNA, 19 nt, Artificial Sequence
  Description of Artificial Sequence: Synthetic oligonucleotide
cacgcagcugccugauggc

SEQ ID NO: 1331622 - RNA, 19 nt, Artificial Sequence
  Description of Artificial Sequence: Synthetic oligonucleotide
ggauuggcuugguuucccg

SEQ ID NO: 1331623 - RNA, 19 nt, Artificial Sequence
  Description of Artificial Sequence: Synthetic oligonucleotide
cucgaugagaagauuuggu

SEQ ID NO: 1331624 - RNA, 19 nt, Artificial Sequence
  Description of Artificial Sequence: Synthetic oligonucleotide
ggcauccuaaccgauuccc

SEQ ID NO: 1331625 - RNA, 19 nt, Artificial Sequence
  Description of Artificial Sequence: Synthetic oligonucleotide
guacuuagcuucaugugcu

SEQ ID NO: 1331626 - RNA, 19 nt, Artificial Sequence
  Description of Artificial Sequence: Synthetic oligonucleotide
gacccuagcuccaucugga

SEQ ID NO: 1331627 - RNA, 19 nt, Artificial Sequence
  Description of Artificial Sequence: Synthetic oligonucleotide
uucuaacugaaggcacagu

SEQ ID NO: 1331628 - RNA, 19 nt, Artificial Sequence
  Description of Artificial Sequence: Synthetic oligonucleotide
uacucucauuucugagcac

SEQ ID NO: 1331629 - RNA, 19 nt, Artificial Sequence
  Description of Artificial Sequence: Synthetic oligonucleotide
uccuaaacucaggcuuuca

SEQ ID NO: 1331630 - RNA, 19 nt, Artificial Sequence
  Description of Artificial Sequence: Synthetic oligonucleotide
cuucauccucucgaagaac

SEQ ID NO: 1331631 - RNA, 19 nt, Artificial Sequence
  Description of Artificial Sequence: Synthetic oligonucleotide
cuaugucucccagcugccc

SEQ ID NO: 1331632 - RNA, 19 nt, Artificial Sequence
  Description of Artificial Sequence: Synthetic oligonucleotide
uguuagggugcuguauauu

SEQ ID NO: 1331633 - RNA, 19 nt, Artificial Sequence
  Description of Artificial Sequence: Synthetic oligonucleotide
ugcuguuagggugcuguau

SEQ ID NO: 1331634 - RNA, 19 nt, Artificial Sequence
  Description of Artificial Sequence: Synthetic oligonucleotide
gggacaagucacgaagcag

SEQ ID NO: 1331635 - RNA, 19 nt, Artificial Sequence
  Description of Artificial Sequence: Synthetic oligonucleotide
ggaagaauguaaccagugu

SEQ ID NO: 1331636 - RNA, 19 nt, Artificial Sequence
  Description of Artificial Sequence: Synthetic oligonucleotide
uccugggacaagucacgaa

SEQ ID NO: 1331637 - RNA, 19 nt, Artificial Sequence
  Description of Artificial Sequence: Synthetic oligonucleotide
guggugcagguuccuaaac

SEQ ID NO: 1331638 - RNA, 19 nt, Artificial Sequence
  Description of Artificial Sequence: Synthetic oligonucleotide
cacaaacuguggagaggug

SEQ ID NO: 1331639 - RNA, 19 nt, Artificial Sequence
  Description of Artificial Sequence: Synthetic oligonucleotide
gacguccaggauaacaccu

SEQ ID NO: 1331640 - RNA, 19 nt, Artificial Sequence
  Description of Artificial Sequence: Synthetic oligonucleotide
ugacgauggcuuucucgau

SEQ ID NO: 1331641 - RNA, 19 nt, Artificial Sequence
  Description of Artificial Sequence: Synthetic oligonucleotide
gaacuuuggccaugauugu

SEQ ID NO: 1331642 - RNA, 19 nt, Artificial Sequence
  Description of Artificial Sequence: Synthetic oligonucleotide
cuaacugaaggcacaguuu

SEQ ID NO: 1331643 - RNA, 19 nt, Artificial Sequence
  Description of Artificial Sequence: Synthetic oligonucleotide
uagcuggauuagaaacuuu

SEQ ID NO: 1331644 - RNA, 19 nt, Artificial Sequence
  Description of Artificial Sequence: Synthetic oligonucleotide
gugacaggacucuuauaua

SEQ ID NO: 1331645 - RNA, 19 nt, Artificial Sequence
  Description of Artificial Sequence: Synthetic oligonucleotide
acaagucacgaagcagggu

SEQ ID NO: 1331646 - RNA, 19 nt, Artificial Sequence
  Description of Artificial Sequence: Synthetic oligonucleotide
ggcaucuggagccauuuua

SEQ ID NO: 1331647 - RNA, 19 nt, Artificial Sequence
  Description of Artificial Sequence: Synthetic oligonucleotide
aggcuguaugagaaggggu

SEQ ID NO: 1331648 - RNA, 19 nt, Artificial Sequence
  Description of Artificial Sequence: Synthetic oligonucleotide
gguuucacugagcucuuaa

SEQ ID NO: 1331649 - RNA, 19 nt, Artificial Sequence
  Description of Artificial Sequence: Synthetic oligonucleotide
agguggguucuaucagccu

SEQ ID NO: 1331650 - RNA, 19 nt, Artificial Sequence
  Description of Artificial Sequence: Synthetic oligonucleotide
ggcugucugcacuaauuca

SEQ ID NO: 1331651 - RNA, 19 nt, Artificial Sequence
  Description of Artificial Sequence: Synthetic oligonucleotide
acguccaggauaacaccug

SEQ ID NO: 1331652 - RNA, 19 nt, Artificial Sequence
  Description of Artificial Sequence: Synthetic oligonucleotide
caccauugcauaguggucu

SEQ ID NO: 1331653 - RNA, 19 nt, Artificial Sequence
  Description of Artificial Sequence: Synthetic oligonucleotide
gauugugcuggcgccugca

SEQ ID NO: 1331654 - RNA, 19 nt, Artificial Sequence
  Description of Artificial Sequence: Synthetic oligonucleotide
gggcugucugcacuaauuc

SEQ ID NO: 1331655 - RNA, 19 nt, Artificial Sequence
  Description of Artificial Sequence: Synthetic oligonucleotide
gaauuccucuggcgcucug

SEQ ID NO: 1331656 - RNA, 19 nt, Artificial Sequence
  Description of Artificial Sequence: Synthetic oligonucleotide
guuucacugagcucuuaau

SEQ ID NO: 1331657 - RNA, 19 nt, Artificial Sequence
  Description of Artificial Sequence: Synthetic oligonucleotide
ucugugcacuuuggguugu

SEQ ID NO: 1331658 - RNA, 19 nt, Artificial Sequence
  Description of Artificial Sequence: Synthetic oligonucleotide
gggugcuguauauuuugga

SEQ ID NO: 1331659 - RNA, 19 nt, Artificial Sequence
  Description of Artificial Sequence: Synthetic oligonucleotide
ccccuuauuuuguacauaa

SEQ ID NO: 1331660 - RNA, 19 nt, Artificial Sequence
  Description of Artificial Sequence: Synthetic oligonucleotide
gcuggauuagaaacuuuuc

SEQ ID NO: 1331661 - RNA, 19 nt, Artificial Sequence
  Description of Artificial Sequence: Synthetic oligonucleotide
gaccugcccagaagagucc

SEQ ID NO: 1331662 - RNA, 19 nt, Artificial Sequence
  Description of Artificial Sequence: Synthetic oligonucleotide
ggccucuuuacuguuaaaa

SEQ ID NO: 1331663 - RNA, 19 nt, Artificial Sequence
  Description of Artificial Sequence: Synthetic oligonucleotide
ucccggcuguauuccuugc

SEQ ID NO: 1331664 - RNA, 19 nt, Artificial Sequence
  Description of Artificial Sequence: Synthetic oligonucleotide
cuguagcaggaccugccca

SEQ ID NO: 1331665 - RNA, 19 nt, Artificial Sequence
  Description of Artificial Sequence: Synthetic oligonucleotide
ccgauucccacugucuugc

SEQ ID NO: 1331666 - RNA, 19 nt, Artificial Sequence
  Description of Artificial Sequence: Synthetic oligonucleotide
caccugcacaaacugugga

SEQ ID NO: 1331667 - RNA, 19 nt, Artificial Sequence
  Description of Artificial Sequence: Synthetic oligonucleotide
cagacaguaggggcagcug

SEQ ID NO: 1331668 - RNA, 19 nt, Artificial Sequence
  Description of Artificial Sequence: Synthetic oligonucleotide
cacaguguuuggaauuccu

SEQ ID NO: 1331669 - RNA, 19 nt, Artificial Sequence
  Description of Artificial Sequence: Synthetic oligonucleotide
uccccuuauuuuguacaua

SEQ ID NO: 1331670 - RNA, 19 nt, Artificial Sequence
  Description of Artificial Sequence: Synthetic oligonucleotide
uggguucuaucagccugga

SEQ ID NO: 1331671 - RNA, 19 nt, Artificial Sequence
  Description of Artificial Sequence: Synthetic oligonucleotide
agggcugucugcacuaauu

SEQ ID NO: 1331672 - RNA, 19 nt, Artificial Sequence
  Description of Artificial Sequence: Synthetic oligonucleotide
uccucccggcuguauuccu

SEQ ID NO: 1331673 - RNA, 19 nt, Artificial Sequence
  Description of Artificial Sequence: Synthetic oligonucleotide
aagucccgagaaguacuua

SEQ ID NO: 1331674 - RNA, 19 nt, Artificial Sequence
  Description of Artificial Sequence: Synthetic oligonucleotide
agacaagguuggggauugg

SEQ ID NO: 1331675 - RNA, 19 nt, Artificial Sequence
  Description of Artificial Sequence: Synthetic oligonucleotide
auuaaccagucuacuucuu

SEQ ID NO: 1331676 - RNA, 19 nt, Artificial Sequence
  Description of Artificial Sequence: Synthetic oligonucleotide
agggccuaggcagccauuu

SEQ ID NO: 1331677 - RNA, 19 nt, Artificial Sequence
  Description of Artificial Sequence: Synthetic oligonucleotide
gguucagaaccaggaugcc

SEQ ID NO: 1331678 - RNA, 19 nt, Artificial Sequence
  Description of Artificial Sequence: Synthetic oligonucleotide
aacucaccaaaggcuccuu

SEQ ID NO: 1331679 - RNA, 19 nt, Artificial Sequence
  Description of Artificial Sequence: Synthetic oligonucleotide
gacaugcaggcugaagaau

SEQ ID NO: 1331680 - RNA, 19 nt, Artificial Sequence
  Description of Artificial Sequence: Synthetic oligonucleotide
ggcuguauuccuugcaaau

SEQ ID NO: 1331681 - RNA, 19 nt, Artificial Sequence
  Description of Artificial Sequence: Synthetic oligonucleotide
auaagacaugcaggcugaa

SEQ ID NO: 1331682 - RNA, 19 nt, Artificial Sequence
  Description of Artificial Sequence: Synthetic oligonucleotide
gaaguggugcagguuccua

SEQ ID NO: 1331683 - RNA, 19 nt, Artificial Sequence
  Description of Artificial Sequence: Synthetic oligonucleotide
gaaucgugaugagcagcaa

SEQ ID NO: 1331684 - RNA, 19 nt, Artificial Sequence
  Description of Artificial Sequence: Synthetic oligonucleotide
augcuguuagggugcugua

SEQ ID NO: 1331685 - RNA, 19 nt, Artificial Sequence
  Description of Artificial Sequence: Synthetic oligonucleotide
guaugagaagggguacugu

SEQ ID NO: 1331686 - RNA, 19 nt, Artificial Sequence
  Description of Artificial Sequence: Synthetic oligonucleotide
cagggugacaggacucuua

SEQ ID NO: 1331687 - RNA, 19 nt, Artificial Sequence
  Description of Artificial Sequence: Synthetic oligonucleotide
guuccuaaacucaggcuuu

SEQ ID NO: 1331688 - RNA, 19 nt, Artificial Sequence
  Description of Artificial Sequence: Synthetic oligonucleotide
gcugucugcacuaauucau

SEQ ID NO: 1331689 - RNA, 19 nt, Artificial Sequence
  Description of Artificial Sequence: Synthetic oligonucleotide
cuuagacguccaggauaac

SEQ ID NO: 1331690 - RNA, 19 nt, Artificial Sequence
  Description of Artificial Sequence: Synthetic oligonucleotide
ggauauccugggacaaguc

SEQ ID NO: 1331691 - RNA, 19 nt, Artificial Sequence
  Description of Artificial Sequence: Synthetic oligonucleotide
ggggauuggcuugguuucc

SEQ ID NO: 1331692 - RNA, 19 nt, Artificial Sequence
  Description of Artificial Sequence: Synthetic oligonucleotide
cuguuagggugcuguauau

SEQ ID NO: 1331693 - RNA, 19 nt, Artificial Sequence
  Description of Artificial Sequence: Synthetic oligonucleotide
cugauaggguuucuugguu

SEQ ID NO: 1331694 - RNA, 19 nt, Artificial Sequence
  Description of Artificial Sequence: Synthetic oligonucleotide
gucacgaagcagggugaca

SEQ ID NO: 1331695 - RNA, 19 nt, Artificial Sequence
  Description of Artificial Sequence: Synthetic oligonucleotide
caugucuaggaugcugccu

SEQ ID NO: 1331696 - RNA, 19 nt, Artificial Sequence
  Description of Artificial Sequence: Synthetic oligonucleotide
ggguacugucggcacaaaa

SEQ ID NO: 1331697 - RNA, 19 nt, Artificial Sequence
  Description of Artificial Sequence: Synthetic oligonucleotide
gaagucccgagaaguacuu

SEQ ID NO: 1331698 - RNA, 19 nt, Artificial Sequence
  Description of Artificial Sequence: Synthetic oligonucleotide
cuguaugagaagggguacu

SEQ ID NO: 1331699 - RNA, 19 nt, Artificial Sequence
  Description of Artificial Sequence: Synthetic oligonucleotide
guauccucccggcuguauu

SEQ ID NO: 1331700 - RNA, 19 nt, Artificial Sequence
  Description of Artificial Sequence: Synthetic oligonucleotide
caugauugugcuggcgccu

SEQ ID NO: 1331701 - RNA, 19 nt, Artificial Sequence
  Description of Artificial Sequence: Synthetic oligonucleotide
gcauccuaaccgauuccca

SEQ ID NO: 1331702 - RNA, 19 nt, Artificial Sequence
  Description of Artificial Sequence: Synthetic oligonucleotide
ccauuuuaucugauagggu

SEQ ID NO: 1331703 - RNA, 19 nt, Artificial Sequence
  Description of Artificial Sequence: Synthetic oligonucleotide
guguucccagcugcaugac

SEQ ID NO: 1331704 - RNA, 19 nt, Artificial Sequence
  Description of Artificial Sequence: Synthetic oligonucleotide
ggguucuaucagccuggac

SEQ ID NO: 1331705 - RNA, 19 nt, Artificial Sequence
  Description of Artificial Sequence: Synthetic oligonucleotide
gccugacucaggacaagca

SEQ ID NO: 1331706 - RNA, 19 nt, Artificial Sequence
  Description of Artificial Sequence: Synthetic oligonucleotide
aagggccuaggcagccauu

SEQ ID NO: 1331707 - RNA, 19 nt, Artificial Sequence
  Description of Artificial Sequence: Synthetic oligonucleotide
gcccauggauauccuggga

SEQ ID NO: 1331708 - RNA, 19 nt, Artificial Sequence
  Description of Artificial Sequence: Synthetic oligonucleotide
gaaccaugucuaggaugcu

SEQ ID NO: 1331709 - RNA, 19 nt, Artificial Sequence
  Description of Artificial Sequence: Synthetic oligonucleotide
ggugcagcgcccuccucau

SEQ ID NO: 1331710 - RNA, 19 nt, Artificial Sequence
  Description of Artificial Sequence: Synthetic oligonucleotide
gggugacaggacucuuaua

SEQ ID NO: 1331711 - RNA, 19 nt, Artificial Sequence
  Description of Artificial Sequence: Synthetic oligonucleotide
cccggcuguauuccuugca

SEQ ID NO: 1331712 - RNA, 19 nt, Artificial Sequence
  Description of Artificial Sequence: Synthetic oligonucleotide
cccgagaaguacuuagcuu

SEQ ID NO: 1331713 - RNA, 19 nt, Artificial Sequence
  Description of Artificial Sequence: Synthetic oligonucleotide
ggguugucauuccccuuau

SEQ ID NO: 1331714 - RNA, 19 nt, Artificial Sequence
  Description of Artificial Sequence: Synthetic oligonucleotide
agguauccucccggcugua

SEQ ID NO: 1331715 - RNA, 19 nt, Artificial Sequence
  Description of Artificial Sequence: Synthetic oligonucleotide
ggaauuccucuggcgcucu

SEQ ID NO: 1331716 - RNA, 19 nt, Artificial Sequence
  Description of Artificial Sequence: Synthetic oligonucleotide
gcucuuaaucuugguugau

SEQ ID NO: 1331717 - RNA, 19 nt, Artificial Sequence
  Description of Artificial Sequence: Synthetic oligonucleotide
cccgaagaacuuuggccau

SEQ ID NO: 1331718 - RNA, 19 nt, Artificial Sequence
  Description of Artificial Sequence: Synthetic oligonucleotide
ccuaaccgauucccacugu

SEQ ID NO: 1331719 - RNA, 19 nt, Artificial Sequence
  Description of Artificial Sequence: Synthetic oligonucleotide
gcgcucugacacaccugga

SEQ ID NO: 1331720 - RNA, 19 nt, Artificial Sequence
  Description of Artificial Sequence: Synthetic oligonucleotide
gguuggggauuggcuuggu

SEQ ID NO: 1331721 - RNA, 19 nt, Artificial Sequence
  Description of Artificial Sequence: Synthetic oligonucleotide
aaauauaccugauucauac

SEQ ID NO: 1331722 - RNA, 19 nt, Artificial Sequence
  Description of Artificial Sequence: Synthetic oligonucleotide
aaacuaacaggcuaagucc

SEQ ID NO: 1331723 - RNA, 19 nt, Artificial Sequence
  Description of Artificial Sequence: Synthetic oligonucleotide
ucuucaguaagcuauaagc

SEQ ID NO: 1331724 - RNA, 19 nt, Artificial Sequence
  Description of Artificial Sequence: Synthetic oligonucleotide
uaagaauacccuaauuugg

SEQ ID NO: 1331725 - RNA, 19 nt, Artificial Sequence
  Description of Artificial Sequence: Synthetic oligonucleotide
uuugaugcaagauagacaa

SEQ ID NO: 1331726 - RNA, 19 nt, Artificial Sequence
  Description of Artificial Sequence: Synthetic oligonucleotide
aaguugaaguacaugaugc

SEQ ID NO: 1331727 - RNA, 19 nt, Artificial Sequence
  Description of Artificial Sequence: Synthetic oligonucleotide
uucaaguugaaguacauga

SEQ ID NO: 1331728 - RNA, 19 nt, Artificial Sequence
  Description of Artificial Sequence: Synthetic oligonucleotide
guaacaauaaaacugguga

SEQ ID NO: 1331729 - RNA, 19 nt, Artificial Sequence
  Description of Artificial Sequence: Synthetic oligonucleotide
aagccaugauucuucaccc

SEQ ID NO: 1331730 - RNA, 19 nt, Artificial Sequence
  Description of Artificial Sequence: Synthetic oligonucleotide
uuugcaacaguuuucugcc

SEQ ID NO: 1331731 - RNA, 19 nt, Artificial Sequence
  Description of Artificial Sequence: Synthetic oligonucleotide
aaacauacacugauugucc

SEQ ID NO: 1331732 - RNA, 19 nt, Artificial Sequence
  Description of Artificial Sequence: Synthetic oligonucleotide
uuuggggugauuugaacgg

SEQ ID NO: 1331733 - RNA, 19 nt, Artificial Sequence
  Description of Artificial Sequence: Synthetic oligonucleotide
aacuauugcauaagaauac

SEQ ID NO: 1331734 - RNA, 19 nt, Artificial Sequence
  Description of Artificial Sequence: Synthetic oligonucleotide
aauucauagaccagguaac

SEQ ID NO: 1331735 - RNA, 19 nt, Artificial Sequence
  Description of Artificial Sequence: Synthetic oligonucleotide
auuuggggugauuugaacg

SEQ ID NO: 1331736 - RNA, 19 nt, Artificial Sequence
  Description of Artificial Sequence: Synthetic oligonucleotide
cagguaacaauaaaacugg

SEQ ID NO: 1331737 - RNA, 19 nt, Artificial Sequence
  Description of Artificial Sequence: Synthetic oligonucleotide
gaagccaugauucuucacc

SEQ ID NO: 1331738 - RNA, 19 nt, Artificial Sequence
  Description of Artificial Sequence: Synthetic oligonucleotide
uguaagauugauuccaacu

SEQ ID NO: 1331739 - RNA, 19 nt, Artificial Sequence
  Description of Artificial Sequence: Synthetic oligonucleotide
uuucguaggcaucagaaga

SEQ ID NO: 1331740 - RNA, 19 nt, Artificial Sequence
  Description of Artificial Sequence: Synthetic oligonucleotide
aauacccuaauuuggggug

SEQ ID NO: 1331741 - RNA, 19 nt, Artificial Sequence
  Description of Artificial Sequence: Synthetic oligonucleotide
aaaacauagaaccacccua

SEQ ID NO: 1331742 - RNA, 19 nt, Artificial Sequence
  Description of Artificial Sequence: Synthetic oligonucleotide
uuugaaaaugacaccagcu

SEQ ID NO: 1331743 - RNA, 19 nt, Artificial Sequence
  Description of Artificial Sequence: Synthetic oligonucleotide
ucagucaucagagauauac

SEQ ID NO: 1331744 - RNA, 19 nt, Artificial Sequence
  Description of Artificial Sequence: Synthetic oligonucleotide
uaucccaggaacaaaguug

SEQ ID NO: 1331745 - RNA, 19 nt, Artificial Sequence
  Description of Artificial Sequence: Synthetic oligonucleotide
guuaucugcaguaagcacg

SEQ ID NO: 1331746 - RNA, 19 nt, Artificial Sequence
  Description of Artificial Sequence: Synthetic oligonucleotide
aguaagcacguccucauac

SEQ ID NO: 1331747 - RNA, 19 nt, Artificial Sequence
  Description of Artificial Sequence: Synthetic oligonucleotide
aagguuugaugcaagauag

SEQ ID NO: 1331748 - RNA, 19 nt, Artificial Sequence
  Description of Artificial Sequence: Synthetic oligonucleotide
uggaauaugccaaugaauu

SEQ ID NO: 1331749 - RNA, 19 nt, Artificial Sequence
  Description of Artificial Sequence: Synthetic oligonucleotide
auuuuaaucaacuggcuaa

SEQ ID NO: 1331750 - RNA, 19 nt, Artificial Sequence
  Description of Artificial Sequence: Synthetic oligonucleotide
ucuacaucgugguagagcu

SEQ ID NO: 1331751 - RNA, 19 nt, Artificial Sequence
  Description of Artificial Sequence: Synthetic oligonucleotide
uaaucuuggagaauuuuga

SEQ ID NO: 1331752 - RNA, 19 nt, Artificial Sequence
  Description of Artificial Sequence: Synthetic oligonucleotide
aacuaacaggcuaaguccc

SEQ ID NO: 1331753 - RNA, 19 nt, Artificial Sequence
  Description of Artificial Sequence: Synthetic oligonucleotide
ucuucacccucucugauag

SEQ ID NO: 1331754 - RNA, 19 nt, Artificial Sequence
  Description of Artificial Sequence: Synthetic oligonucleotide
guaauucucacugaaauac

SEQ ID NO: 1331755 - RNA, 19 nt, Artificial Sequence
  Description of Artificial Sequence: Synthetic oligonucleotide
uuaccaaccaguacuuucc

SEQ ID NO: 1331756 - RNA, 19 nt, Artificial Sequence
  Description of Artificial Sequence: Synthetic oligonucleotide
ugaauuuucuauccuguac

SEQ ID NO: 1331757 - RNA, 19 nt, Artificial Sequence
  Description of Artificial Sequence: Synthetic oligonucleotide
acacugauuguccacuagc

SEQ ID NO: 1331758 - RNA, 19 nt, Artificial Sequence
  Description of Artificial Sequence: Synthetic oligonucleotide
uucaguaagcuauaagcca

SEQ ID NO: 1331759 - RNA, 19 nt, Artificial Sequence
  Description of Artificial Sequence: Synthetic oligonucleotide
auucgugcacauuuuaauc

SEQ ID NO: 1331760 - RNA, 19 nt, Artificial Sequence
  Description of Artificial Sequence: Synthetic oligonucleotide
agauauacauaaggaagcc

SEQ ID NO: 1331761 - RNA, 19 nt, Artificial Sequence
  Description of Artificial Sequence: Synthetic oligonucleotide
gauuaguccgaguaugccc

SEQ ID NO: 1331762 - RNA, 19 nt, Artificial Sequence
  Description of Artificial Sequence: Synthetic oligonucleotide
agaggugaagcuucagggc

SEQ ID NO: 1331763 - RNA, 19 nt, Artificial Sequence
  Description of Artificial Sequence: Synthetic oligonucleotide
acuauugcauaagaauacc

SEQ ID NO: 1331764 - RNA, 19 nt, Artificial Sequence
  Description of Artificial Sequence: Synthetic oligonucleotide
aauaugccaaugaauuuuc

SEQ ID NO: 1331765 - RNA, 19 nt, Artificial Sequence
  Description of Artificial Sequence: Synthetic oligonucleotide
ucuuaaauagaguucugaa

SEQ ID NO: 1331766 - RNA, 19 nt, Artificial Sequence
  Description of Artificial Sequence: Synthetic oligonucleotide
acacaagauugauuagucc

SEQ ID NO: 1331767 - RNA, 19 nt, Artificial Sequence
  Description of Artificial Sequence: Synthetic oligonucleotide
agcaagacugcuuacauau

SEQ ID NO: 1331768 - RNA, 19 nt, Artificial Sequence
  Description of Artificial Sequence: Synthetic oligonucleotide
uuacucuuggaauaugcca

SEQ ID NO: 1331769 - RNA, 19 nt, Artificial Sequence
  Description of Artificial Sequence: Synthetic oligonucleotide
ucaaaguuaaugugguugu

SEQ ID NO: 1331770 - RNA, 19 nt, Artificial Sequence
  Description of Artificial Sequence: Synthetic oligonucleotide
aguacuuucccucuaggga

SEQ ID NO: 1331771 - RNA, 19 nt, Artificial Sequence
  Description of Artificial Sequence: Synthetic oligonucleotide
uccagacugaacaauaauc

SEQ ID NO: 1331772 - RNA, 19 nt, Artificial Sequence
  Description of Artificial Sequence: Synthetic oligonucleotide
aggacagauguucuuugcc

SEQ ID NO: 1331773 - RNA, 19 nt, Artificial Sequence
  Description of Artificial Sequence: Synthetic oligonucleotide
aguuaucugcaguaagcac

SEQ ID NO: 1331774 - RNA, 19 nt, Artificial Sequence
  Description of Artificial Sequence: Synthetic oligonucleotide
uguugaguccaaccuaugc

SEQ ID NO: 1331775 - RNA, 19 nt, Artificial Sequence
  Description of Artificial Sequence: Synthetic oligonucleotide
ugcaauucacacuuuccag

SEQ ID NO: 1331776 - RNA, 19 nt, Artificial Sequence
  Description of Artificial Sequence: Synthetic oligonucleotide
guacuuucccucuagggag

SEQ ID NO: 1331777 - RNA, 19 nt, Artificial Sequence
  Description of Artificial Sequence: Synthetic oligonucleotide
ucuucaagccaaaacuugu

SEQ ID NO: 1331778 - RNA, 19 nt, Artificial Sequence
  Description of Artificial Sequence: Synthetic oligonucleotide
uucgcugcaauucacacuu

SEQ ID NO: 1331779 - RNA, 19 nt, Artificial Sequence
  Description of Artificial Sequence: Synthetic oligonucleotide
agaauacccuaauuugggg

SEQ ID NO: 1331780 - RNA, 19 nt, Artificial Sequence
  Description of Artificial Sequence: Synthetic oligonucleotide
auucuggaggaccuuacuc

SEQ ID NO: 1331781 - RNA, 19 nt, Artificial Sequence
  Description of Artificial Sequence: Synthetic oligonucleotide
uacucuuggaauaugccaa

SEQ ID NO: 1331782 - RNA, 19 nt, Artificial Sequence
  Description of Artificial Sequence: Synthetic oligonucleotide
ugaacgggaaagaaucuga

SEQ ID NO: 1331783 - RNA, 19 nt, Artificial Sequence
  Description of Artificial Sequence: Synthetic oligonucleotide
uuggaaaccaaugucugcc

SEQ ID NO: 1331784 - RNA, 19 nt, Artificial Sequence
  Description of Artificial Sequence: Synthetic oligonucleotide
uaugguaaggacacccuga

SEQ ID NO: 1331785 - RNA, 19 nt, Artificial Sequence
  Description of Artificial Sequence: Synthetic oligonucleotide
cauugccagagucauaggg

SEQ ID NO: 1331786 - RNA, 19 nt, Artificial Sequence
  Description of Artificial Sequence: Synthetic oligonucleotide
uuaaucaacuggcuaaaua

SEQ ID NO: 1331787 - RNA, 19 nt, Artificial Sequence
  Description of Artificial Sequence: Synthetic oligonucleotide
ucaguaagcuauaagccau

SEQ ID NO: 1331788 - RNA, 19 nt, Artificial Sequence
  Description of Artificial Sequence: Synthetic oligonucleotide
cuuuaugguaaggacaccc

SEQ ID NO: 1331789 - RNA, 19 nt, Artificial Sequence
  Description of Artificial Sequence: Synthetic oligonucleotide
aaaauucgcugcaauucac

SEQ ID NO: 1331790 - RNA, 19 nt, Artificial Sequence
  Description of Artificial Sequence: Synthetic oligonucleotide
cuuagcacucaccuggugc

SEQ ID NO: 1331791 - RNA, 19 nt, Artificial Sequence
  Description of Artificial Sequence: Synthetic oligonucleotide
acaguguacaaacaacugu

SEQ ID NO: 1331792 - RNA, 19 nt, Artificial Sequence
  Description of Artificial Sequence: Synthetic oligonucleotide
uccacuagcuuucuuaaau

SEQ ID NO: 1331793 - RNA, 19 nt, Artificial Sequence
  Description of Artificial Sequence: Synthetic oligonucleotide
aacucaaagguuugaugca

SEQ ID NO: 1331794 - RNA, 19 nt, Artificial Sequence
  Description of Artificial Sequence: Synthetic oligonucleotide
auaaauauaccugauucau

SEQ ID NO: 1331795 - RNA, 19 nt, Artificial Sequence
  Description of Artificial Sequence: Synthetic oligonucleotide
accaaugucugcccauugc

SEQ ID NO: 1331796 - RNA, 19 nt, Artificial Sequence
  Description of Artificial Sequence: Synthetic oligonucleotide
auauuuguaaguaauuuaa

SEQ ID NO: 1331797 - RNA, 19 nt, Artificial Sequence
  Description of Artificial Sequence: Synthetic oligonucleotide
uacacaagauugauuaguc

SEQ ID NO: 1331798 - RNA, 19 nt, Artificial Sequence
  Description of Artificial Sequence: Synthetic oligonucleotide
uuauguccgcuacacaucu

SEQ ID NO: 1331799 - RNA, 19 nt, Artificial Sequence
  Description of Artificial Sequence: Synthetic oligonucleotide
auauaccugauucauacuu

SEQ ID NO: 1331800 - RNA, 19 nt, Artificial Sequence
  Description of Artificial Sequence: Synthetic oligonucleotide
cuuacucuuggaauaugcc

SEQ ID NO: 1331801 - RNA, 19 nt, Artificial Sequence
  Description of Artificial Sequence: Synthetic oligonucleotide
uuuggaaggguguggaacu

SEQ ID NO: 1331802 - RNA, 19 nt, Artificial Sequence
  Description of Artificial Sequence: Synthetic oligonucleotide
uuguugguaucccaggaac

SEQ ID NO: 1331803 - RNA, 19 nt, Artificial Sequence
  Description of Artificial Sequence: Synthetic oligonucleotide
uuaucugcaguaagcacgu

SEQ ID NO: 1331804 - RNA, 19 nt, Artificial Sequence
  Description of Artificial Sequence: Synthetic oligonucleotide
aauauaccugauucauacu

SEQ ID NO: 1331805 - RNA, 19 nt, Artificial Sequence
  Description of Artificial Sequence: Synthetic oligonucleotide
augccaaugaauuuucuau

SEQ ID NO: 1331806 - RNA, 19 nt, Artificial Sequence
  Description of Artificial Sequence: Synthetic oligonucleotide
uguuccauuguugguaucc

SEQ ID NO: 1331807 - RNA, 19 nt, Artificial Sequence
  Description of Artificial Sequence: Synthetic oligonucleotide
uucacucucggaaacuugu

SEQ ID NO: 1331808 - RNA, 19 nt, Artificial Sequence
  Description of Artificial Sequence: Synthetic oligonucleotide
uuuaugguaaggacacccu

SEQ ID NO: 1331809 - RNA, 19 nt, Artificial Sequence
  Description of Artificial Sequence: Synthetic oligonucleotide
uuggaauaugccaaugaau

SEQ ID NO: 1331810 - RNA, 19 nt, Artificial Sequence
  Description of Artificial Sequence: Synthetic oligonucleotide
aggaacaaaguuguagagg

SEQ ID NO: 1331811 - RNA, 19 nt, Artificial Sequence
  Description of Artificial Sequence: Synthetic oligonucleotide
ugcuuuuacuugaaacuca

SEQ ID NO: 1331812 - RNA, 19 nt, Artificial Sequence
  Description of Artificial Sequence: Synthetic oligonucleotide
ucauagaccagguaacaau

SEQ ID NO: 1331813 - RNA, 19 nt, Artificial Sequence
  Description of Artificial Sequence: Synthetic oligonucleotide
gaagauuccaaagcuugag

SEQ ID NO: 1331814 - RNA, 19 nt, Artificial Sequence
  Description of Artificial Sequence: Synthetic oligonucleotide
aaaguguuccauuguuggu

SEQ ID NO: 1331815 - RNA, 19 nt, Artificial Sequence
  Description of Artificial Sequence: Synthetic oligonucleotide
uguacguccucugagcacc

SEQ ID NO: 1331816 - RNA, 19 nt, Artificial Sequence
  Description of Artificial Sequence: Synthetic oligonucleotide
uccgcuacacaucugucca

SEQ ID NO: 1331817 - RNA, 19 nt, Artificial Sequence
  Description of Artificial Sequence: Synthetic oligonucleotide
uucauuauguccgcuacac

SEQ ID NO: 1331818 - RNA, 19 nt, Artificial Sequence
  Description of Artificial Sequence: Synthetic oligonucleotide
acccuaucaaaguuaaugu

SEQ ID NO: 1331819 - RNA, 19 nt, Artificial Sequence
  Description of Artificial Sequence: Synthetic oligonucleotide
acugguguccuucucagga

SEQ ID NO: 1331820 - RNA, 19 nt, Artificial Sequence
  Description of Artificial Sequence: Synthetic oligonucleotide
uacaucgugguagagcugc

SEQ ID NO: 1331821 - RNA, 19 nt, Artificial Sequence
  Description of Artificial Sequence: Synthetic oligonucleotide
acacuauugcuuuuacuug

SEQ ID NO: 1331822 - RNA, 19 nt, Artificial Sequence
  Description of Artificial Sequence: Synthetic oligonucleotide
auaaucuuggagaauuuug

SEQ ID NO: 1331823 - RNA, 19 nt, Artificial Sequence
  Description of Artificial Sequence: Synthetic oligonucleotide
uaauucucacugaaauaca

SEQ ID NO: 1331824 - RNA, 19 nt, Artificial Sequence
  Description of Artificial Sequence: Synthetic oligonucleotide
augagauucgugcacauuu

SEQ ID NO: 1331825 - RNA, 19 nt, Artificial Sequence
  Description of Artificial Sequence: Synthetic oligonucleotide
ggugauuugaacgggaaag

SEQ ID NO: 1331826 - RNA, 19 nt, Artificial Sequence
  Description of Artificial Sequence: Synthetic oligonucleotide
gaaguauuucaaguugaag

SEQ ID NO: 1331827 - RNA, 19 nt, Artificial Sequence
  Description of Artificial Sequence: Synthetic oligonucleotide
gagaauuuugaaauuuuga

SEQ ID NO: 1331828 - RNA, 19 nt, Artificial Sequence
  Description of Artificial Sequence: Synthetic oligonucleotide
cacccuaucaaaguuaaug

SEQ ID NO: 1331829 - RNA, 19 nt, Artificial Sequence
  Description of Artificial Sequence: Synthetic oligonucleotide
uaaaagagacaaagcacau

SEQ ID NO: 1331830 - RNA, 19 nt, Artificial Sequence
  Description of Artificial Sequence: Synthetic oligonucleotide
ucgugcugcacauugccag

SEQ ID NO: 1331831 - RNA, 19 nt, Artificial Sequence
  Description of Artificial Sequence: Synthetic oligonucleotide
aggacacccugacaagugc

SEQ ID NO: 1331832 - RNA, 19 nt, Artificial Sequence
  Description of Artificial Sequence: Synthetic oligonucleotide
agaaccacccuaucaaagu

SEQ ID NO: 1331833 - RNA, 19 nt, Artificial Sequence
  Description of Artificial Sequence: Synthetic oligonucleotide
aacaguguacaaacaacug

SEQ ID NO: 1331834 - RNA, 19 nt, Artificial Sequence
  Description of Artificial Sequence: Synthetic oligonucleotide
cauugcuuggagauccggg

SEQ ID NO: 1331835 - RNA, 19 nt, Artificial Sequence
  Description of Artificial Sequence: Synthetic oligonucleotide
guaagauugauuccaacua

SEQ ID NO: 1331836 - RNA, 19 nt, Artificial Sequence
  Description of Artificial Sequence: Synthetic oligonucleotide
uuugaacgggaaagaaucu

SEQ ID NO: 1331837 - RNA, 19 nt, Artificial Sequence
  Description of Artificial Sequence: Synthetic oligonucleotide
ucugucguaagacccauuu

SEQ ID NO: 1331838 - RNA, 19 nt, Artificial Sequence
  Description of Artificial Sequence: Synthetic oligonucleotide
aauucacacuuuccaguca

SEQ ID NO: 1331839 - RNA, 19 nt, Artificial Sequence
  Description of Artificial Sequence: Synthetic oligonucleotide
uguugguaucccaggaaca

SEQ ID NO: 1331840 - RNA, 19 nt, Artificial Sequence
  Description of Artificial Sequence: Synthetic oligonucleotide
uucacccucucugauagag

SEQ ID NO: 1331841 - RNA, 19 nt, Artificial Sequence
  Description of Artificial Sequence: Synthetic oligonucleotide
uaaauauaccugauucaua

SEQ ID NO: 1331842 - RNA, 19 nt, Artificial Sequence
  Description of Artificial Sequence: Synthetic oligonucleotide
cacccucucugauagagcc

SEQ ID NO: 1331843 - RNA, 19 nt, Artificial Sequence
  Description of Artificial Sequence: Synthetic oligonucleotide
auacacaagauugauuagu

SEQ ID NO: 1331844 - RNA, 19 nt, Artificial Sequence
  Description of Artificial Sequence: Synthetic oligonucleotide
guuaccaaccaguacuuuc

SEQ ID NO: 1331845 - RNA, 19 nt, Artificial Sequence
  Description of Artificial Sequence: Synthetic oligonucleotide
aaacauagaaccacccuau

SEQ ID NO: 1331846 - RNA, 19 nt, Artificial Sequence
  Description of Artificial Sequence: Synthetic oligonucleotide
uuucuuaaauagaguucug

SEQ ID NO: 1331847 - RNA, 19 nt, Artificial Sequence
  Description of Artificial Sequence: Synthetic oligonucleotide
caacuauugcauaagaaua

SEQ ID NO: 1331848 - RNA, 19 nt, Artificial Sequence
  Description of Artificial Sequence: Synthetic oligonucleotide
aucugccuagaauaaaaga

SEQ ID NO: 1331849 - RNA, 19 nt, Artificial Sequence
  Description of Artificial Sequence: Synthetic oligonucleotide
cucauacagaucugaaaac

SEQ ID NO: 1331850 - RNA, 19 nt, Artificial Sequence
  Description of Artificial Sequence: Synthetic oligonucleotide
aguuaaugugguuguugag

SEQ ID NO: 1331851 - RNA, 19 nt, Artificial Sequence
  Description of Artificial Sequence: Synthetic oligonucleotide
ucucuguaagauugauucc

SEQ ID NO: 1331852 - RNA, 19 nt, Artificial Sequence
  Description of Artificial Sequence: Synthetic oligonucleotide
uugaguccaaccuaugcua

SEQ ID NO: 1331853 - RNA, 19 nt, Artificial Sequence
  Description of Artificial Sequence: Synthetic oligonucleotide
cuuguggagaacaguguac

SEQ ID NO: 1331854 - RNA, 19 nt, Artificial Sequence
  Description of Artificial Sequence: Synthetic oligonucleotide
cguaagacccauuucaucc

SEQ ID NO: 1331855 - RNA, 19 nt, Artificial Sequence
  Description of Artificial Sequence: Synthetic oligonucleotide
aggcuaagucccaaguucc

SEQ ID NO: 1331856 - RNA, 19 nt, Artificial Sequence
  Description of Artificial Sequence: Synthetic oligonucleotide
uuuccagacugaacaauaa

SEQ ID NO: 1331857 - RNA, 19 nt, Artificial Sequence
  Description of Artificial Sequence: Synthetic oligonucleotide
agcacguccucauacagau

SEQ ID NO: 1331858 - RNA, 19 nt, Artificial Sequence
  Description of Artificial Sequence: Synthetic oligonucleotide
ugcauaagaauacccuaau

SEQ ID NO: 1331859 - RNA, 19 nt, Artificial Sequence
  Description of Artificial Sequence: Synthetic oligonucleotide
ugguguaauucucacugaa

SEQ ID NO: 1331860 - RNA, 19 nt, Artificial Sequence
  Description of Artificial Sequence: Synthetic oligonucleotide
uaauuuggggugauuugaa

SEQ ID NO: 1331861 - RNA, 19 nt, Artificial Sequence
  Description of Artificial Sequence: Synthetic oligonucleotide
uauaccugauucauacuuu

SEQ ID NO: 1331862 - RNA, 19 nt, Artificial Sequence
  Description of Artificial Sequence: Synthetic oligonucleotide
ucuguaagauugauuccaa

SEQ ID NO: 1331863 - RNA, 19 nt, Artificial Sequence
  Description of Artificial Sequence: Synthetic oligonucleotide
uucguaggcaucagaagau

SEQ ID NO: 1331864 - RNA, 19 nt, Artificial Sequence
  Description of Artificial Sequence: Synthetic oligonucleotide
auuauguccgcuacacauc

SEQ ID NO: 1331865 - RNA, 19 nt, Artificial Sequence
  Description of Artificial Sequence: Synthetic oligonucleotide
uugaacgggaaagaaucug

SEQ ID NO: 1331866 - RNA, 19 nt, Artificial Sequence
  Description of Artificial Sequence: Synthetic oligonucleotide
aagauugauuaguccgagu

SEQ ID NO: 1331867 - RNA, 19 nt, Artificial Sequence
  Description of Artificial Sequence: Synthetic oligonucleotide
gggaucaucaccuuggaaa

SEQ ID NO: 1331868 - RNA, 19 nt, Artificial Sequence
  Description of Artificial Sequence: Synthetic oligonucleotide
cauaagaauacccuaauuu

SEQ ID NO: 1331869 - RNA, 19 nt, Artificial Sequence
  Description of Artificial Sequence: Synthetic oligonucleotide
aggaccuuacucuuggaau

SEQ ID NO: 1331870 - RNA, 19 nt, Artificial Sequence
  Description of Artificial Sequence: Synthetic oligonucleotide
acaaaaggaacagcacauc

SEQ ID NO: 1331871 - RNA, 19 nt, Artificial Sequence
  Description of Artificial Sequence: Synthetic oligonucleotide
cagagauauacauaaggaa

SEQ ID NO: 1331872 - RNA, 19 nt, Artificial Sequence
  Description of Artificial Sequence: Synthetic oligonucleotide
uagggagcaagacugcuua

SEQ ID NO: 1331873 - RNA, 19 nt, Artificial Sequence
  Description of Artificial Sequence: Synthetic oligonucleotide
uaaugugguuguugagucc

SEQ ID NO: 1331874 - RNA, 19 nt, Artificial Sequence
  Description of Artificial Sequence: Synthetic oligonucleotide
ugauuaguccgaguaugcc

SEQ ID NO: 1331875 - RNA, 19 nt, Artificial Sequence
  Description of Artificial Sequence: Synthetic oligonucleotide
agcuugagagcuacaacac

SEQ ID NO: 1331876 - RNA, 19 nt, Artificial Sequence
  Description of Artificial Sequence: Synthetic oligonucleotide
auuaguccgaguaugccca

SEQ ID NO: 1331877 - RNA, 19 nt, Artificial Sequence
  Description of Artificial Sequence: Synthetic oligonucleotide
uccaaccuaugcuacauuu

SEQ ID NO: 1331878 - RNA, 19 nt, Artificial Sequence
  Description of Artificial Sequence: Synthetic oligonucleotide
uccuguacguccucugagc

SEQ ID NO: 1331879 - RNA, 19 nt, Artificial Sequence
  Description of Artificial Sequence: Synthetic oligonucleotide
uguccacuagcuuucuuaa

SEQ ID NO: 1331880 - RNA, 19 nt, Artificial Sequence
  Description of Artificial Sequence: Synthetic oligonucleotide
aaauucgcugcaauucaca

SEQ ID NO: 1331881 - RNA, 19 nt, Artificial Sequence
  Description of Artificial Sequence: Synthetic oligonucleotide
gugguuguugaguccaacc

SEQ ID NO: 1331882 - RNA, 19 nt, Artificial Sequence
  Description of Artificial Sequence: Synthetic oligonucleotide
ugcuuacauauuuguaagu

SEQ ID NO: 1331883 - RNA, 19 nt, Artificial Sequence
  Description of Artificial Sequence: Synthetic oligonucleotide
auuccaacuauugcauaag

SEQ ID NO: 1331884 - RNA, 19 nt, Artificial Sequence
  Description of Artificial Sequence: Synthetic oligonucleotide
auguccgcuacacaucugu

SEQ ID NO: 1331885 - RNA, 19 nt, Artificial Sequence
  Description of Artificial Sequence: Synthetic oligonucleotide
gauauacauaaggaagcca

SEQ ID NO: 1331886 - RNA, 19 nt, Artificial Sequence
  Description of Artificial Sequence: Synthetic oligonucleotide
ugauuugaacgggaaagaa

SEQ ID NO: 1331887 - RNA, 19 nt, Artificial Sequence
  Description of Artificial Sequence: Synthetic oligonucleotide
agaaagccuuagcacucac

SEQ ID NO: 1331888 - RNA, 19 nt, Artificial Sequence
  Description of Artificial Sequence: Synthetic oligonucleotide
uggaaaccaaugucugccc

SEQ ID NO: 1331889 - RNA, 19 nt, Artificial Sequence
  Description of Artificial Sequence: Synthetic oligonucleotide
gacagagagaaagccuuag

SEQ ID NO: 1331890 - RNA, 19 nt, Artificial Sequence
  Description of Artificial Sequence: Synthetic oligonucleotide
gaauacccuaauuuggggu

SEQ ID NO: 1331891 - RNA, 19 nt, Artificial Sequence
  Description of Artificial Sequence: Synthetic oligonucleotide
ucauuauguccgcuacaca

SEQ ID NO: 1331892 - RNA, 19 nt, Artificial Sequence
  Description of Artificial Sequence: Synthetic oligonucleotide
aacuggcuaaauauaaaua

SEQ ID NO: 1331893 - RNA, 19 nt, Artificial Sequence
  Description of Artificial Sequence: Synthetic oligonucleotide
aaccaaugucugcccauug

SEQ ID NO: 1331894 - RNA, 19 nt, Artificial Sequence
  Description of Artificial Sequence: Synthetic oligonucleotide
ugcaguaagcacguccuca

SEQ ID NO: 1331895 - RNA, 19 nt, Artificial Sequence
  Description of Artificial Sequence: Synthetic oligonucleotide
cacuauugcuuuuacuuga

SEQ ID NO: 1331896 - RNA, 19 nt, Artificial Sequence
  Description of Artificial Sequence: Synthetic oligonucleotide
uccaaagcuugagaagcag

SEQ ID NO: 1331897 - RNA, 19 nt, Artificial Sequence
  Description of Artificial Sequence: Synthetic oligonucleotide
uuccagacugaacaauaau

SEQ ID NO: 1331898 - RNA, 19 nt, Artificial Sequence
  Description of Artificial Sequence: Synthetic oligonucleotide
uacuuucccucuagggagc

SEQ ID NO: 1331899 - RNA, 19 nt, Artificial Sequence
  Description of Artificial Sequence: Synthetic oligonucleotide
aguuccaaacuggaguuca

SEQ ID NO: 1331900 - RNA, 19 nt, Artificial Sequence
  Description of Artificial Sequence: Synthetic oligonucleotide
ucgugcacauuuuaaucaa

SEQ ID NO: 1331901 - RNA, 19 nt, Artificial Sequence
  Description of Artificial Sequence: Synthetic oligonucleotide
gaacaguguacaaacaacu

SEQ ID NO: 1331902 - RNA, 19 nt, Artificial Sequence
  Description of Artificial Sequence: Synthetic oligonucleotide
uaacaggcuaagucccaag

SEQ ID NO: 1331903 - RNA, 19 nt, Artificial Sequence
  Description of Artificial Sequence: Synthetic oligonucleotide
cucuguaagauugauucca

SEQ ID NO: 1331904 - RNA, 19 nt, Artificial Sequence
  Description of Artificial Sequence: Synthetic oligonucleotide
uaaggacacccugacaagu

SEQ ID NO: 1331905 - RNA, 19 nt, Artificial Sequence
  Description of Artificial Sequence: Synthetic oligonucleotide
acaagauugauuaguccga

SEQ ID NO: 1331906 - RNA, 19 nt, Artificial Sequence
  Description of Artificial Sequence: Synthetic oligonucleotide
ucucugauagagccacacu

SEQ ID NO: 1331907 - RNA, 19 nt, Artificial Sequence
  Description of Artificial Sequence: Synthetic oligonucleotide
ccucuagggagcaagacug

SEQ ID NO: 1331908 - RNA, 19 nt, Artificial Sequence
  Description of Artificial Sequence: Synthetic oligonucleotide
auucgcugcaauucacacu

SEQ ID NO: 1331909 - RNA, 19 nt, Artificial Sequence
  Description of Artificial Sequence: Synthetic oligonucleotide
auugccagagucauagggu

SEQ ID NO: 1331910 - RNA, 19 nt, Artificial Sequence
  Description of Artificial Sequence: Synthetic oligonucleotide
aucaacuggcuaaauauaa

SEQ ID NO: 1331911 - RNA, 19 nt, Artificial Sequence
  Description of Artificial Sequence: Synthetic oligonucleotide
auaccugauucauacuuuu

SEQ ID NO: 1331912 - RNA, 19 nt, Artificial Sequence
  Description of Artificial Sequence: Synthetic oligonucleotide
uugcaacaguuuucugccg

SEQ ID NO: 1331913 - RNA, 19 nt, Artificial Sequence
  Description of Artificial Sequence: Synthetic oligonucleotide
cauuauguccgcuacacau

SEQ ID NO: 1331914 - RNA, 19 nt, Artificial Sequence
  Description of Artificial Sequence: Synthetic oligonucleotide
cacugccccugcuuuaugg

SEQ ID NO: 1331915 - RNA, 19 nt, Artificial Sequence
  Description of Artificial Sequence: Synthetic oligonucleotide
caagauugauuaguccgag

SEQ ID NO: 1331916 - RNA, 19 nt, Artificial Sequence
  Description of Artificial Sequence: Synthetic oligonucleotide
gauucgugcacauuuuaau

SEQ ID NO: 1331917 - RNA, 19 nt, Artificial Sequence
  Description of Artificial Sequence: Synthetic oligonucleotide
uuggggugauuugaacggg

SEQ ID NO: 1331918 - RNA, 19 nt, Artificial Sequence
  Description of Artificial Sequence: Synthetic oligonucleotide
guccgcuacacaucugucc

SEQ ID NO: 1331919 - RNA, 19 nt, Artificial Sequence
  Description of Artificial Sequence: Synthetic oligonucleotide
ugagauucgugcacauuuu

SEQ ID NO: 1331920 - RNA, 19 nt, Artificial Sequence
  Description of Artificial Sequence: Synthetic oligonucleotide
uucauagaccagguaacaa

SEQ ID NO: 1331921 - RNA, 19 nt, Artificial Sequence
  Description of Artificial Sequence: Synthetic oligonucleotide
ucguaagacccauuucauc

SEQ ID NO: 1331922 - RNA, 19 nt, Artificial Sequence
  Description of Artificial Sequence: Synthetic oligonucleotide
ccuuacucuuggaauaugc

SEQ ID NO: 1331923 - RNA, 19 nt, Artificial Sequence
  Description of Artificial Sequence: Synthetic oligonucleotide
guucacgugacugcugaag

SEQ ID NO: 1331924 - RNA, 19 nt, Artificial Sequence
  Description of Artificial Sequence: Synthetic oligonucleotide
guugaguccaaccuaugcu

SEQ ID NO: 1331925 - RNA, 19 nt, Artificial Sequence
  Description of Artificial Sequence: Synthetic oligonucleotide
uagccaguuaucugcagua

SEQ ID NO: 1331926 - RNA, 19 nt, Artificial Sequence
  Description of Artificial Sequence: Synthetic oligonucleotide
gaauaugccaaugaauuuu

SEQ ID NO: 1331927 - RNA, 19 nt, Artificial Sequence
  Description of Artificial Sequence: Synthetic oligonucleotide
uugagagcuacaacacaua

SEQ ID NO: 1331928 - RNA, 19 nt, Artificial Sequence
  Description of Artificial Sequence: Synthetic oligonucleotide
aagagacaaagcacauuca

SEQ ID NO: 1331929 - RNA, 19 nt, Artificial Sequence
  Description of Artificial Sequence: Synthetic oligonucleotide
cugcuuauagccaguuauc

SEQ ID NO: 1331930 - RNA, 19 nt, Artificial Sequence
  Description of Artificial Sequence: Synthetic oligonucleotide
caaccuaugcuacauuuaa

SEQ ID NO: 1331931 - RNA, 19 nt, Artificial Sequence
  Description of Artificial Sequence: Synthetic oligonucleotide
uugccagagucauaggguu

SEQ ID NO: 1331932 - RNA, 19 nt, Artificial Sequence
  Description of Artificial Sequence: Synthetic oligonucleotide
uggggugauuugaacggga

SEQ ID NO: 1331933 - RNA, 19 nt, Artificial Sequence
  Description of Artificial Sequence: Synthetic oligonucleotide
ucugcccauugcuuggaga

SEQ ID NO: 1331934 - RNA, 19 nt, Artificial Sequence
  Description of Artificial Sequence: Synthetic oligonucleotide
agggcuucgcucuucagua

SEQ ID NO: 1331935 - RNA, 19 nt, Artificial Sequence
  Description of Artificial Sequence: Synthetic oligonucleotide
caccuuggaaaccaauguc

SEQ ID NO: 1331936 - RNA, 19 nt, Artificial Sequence
  Description of Artificial Sequence: Synthetic oligonucleotide
ucacccucucugauagagc

SEQ ID NO: 1331937 - RNA, 19 nt, Artificial Sequence
  Description of Artificial Sequence: Synthetic oligonucleotide
guaagcacguccucauaca

SEQ ID NO: 1331938 - RNA, 19 nt, Artificial Sequence
  Description of Artificial Sequence: Synthetic oligonucleotide
aguaagcuauaagccaucu

SEQ ID NO: 1331939 - RNA, 19 nt, Artificial Sequence
  Description of Artificial Sequence: Synthetic oligonucleotide
uguggagaacaguguacaa

SEQ ID NO: 1331940 - RNA, 19 nt, Artificial Sequence
  Description of Artificial Sequence: Synthetic oligonucleotide
aguuguagaggugaagcuu

SEQ ID NO: 1331941 - RNA, 19 nt, Artificial Sequence
  Description of Artificial Sequence: Synthetic oligonucleotide
gaaaacugguguccuucuc

SEQ ID NO: 1331942 - RNA, 19 nt, Artificial Sequence
  Description of Artificial Sequence: Synthetic oligonucleotide
ucuggaggaccuuacucuu

SEQ ID NO: 1331943 - RNA, 19 nt, Artificial Sequence
  Description of Artificial Sequence: Synthetic oligonucleotide
uggaguucacgugacugcu

SEQ ID NO: 1331944 - RNA, 19 nt, Artificial Sequence
  Description of Artificial Sequence: Synthetic oligonucleotide
agcacaucucacacuauug

SEQ ID NO: 1331945 - RNA, 19 nt, Artificial Sequence
  Description of Artificial Sequence: Synthetic oligonucleotide
cacguccucauacagaucu

SEQ ID NO: 1331946 - RNA, 19 nt, Artificial Sequence
  Description of Artificial Sequence: Synthetic oligonucleotide
agggagcaagacugcuuac

SEQ ID NO: 1331947 - RNA, 19 nt, Artificial Sequence
  Description of Artificial Sequence: Synthetic oligonucleotide
ugauuccaacuauugcaua

SEQ ID NO: 1331948 - RNA, 19 nt, Artificial Sequence
  Description of Artificial Sequence: Synthetic oligonucleotide
ugguaaggacacccugaca

SEQ ID NO: 1331949 - RNA, 19 nt, Artificial Sequence
  Description of Artificial Sequence: Synthetic oligonucleotide
ccucauacagaucugaaaa

SEQ ID NO: 1331950 - RNA, 19 nt, Artificial Sequence
  Description of Artificial Sequence: Synthetic oligonucleotide
agaagauuccaaagcuuga

SEQ ID NO: 1331951 - RNA, 19 nt, Artificial Sequence
  Description of Artificial Sequence: Synthetic oligonucleotide
aaugagauucgugcacauu

SEQ ID NO: 1331952 - RNA, 19 nt, Artificial Sequence
  Description of Artificial Sequence: Synthetic oligonucleotide
cucucugauagagccacac

SEQ ID NO: 1331953 - RNA, 19 nt, Artificial Sequence
  Description of Artificial Sequence: Synthetic oligonucleotide
guaagcuauaagccaucuc

SEQ ID NO: 1331954 - RNA, 19 nt, Artificial Sequence
  Description of Artificial Sequence: Synthetic oligonucleotide
ccaaccaguacuuucccuc

SEQ ID NO: 1331955 - RNA, 19 nt, Artificial Sequence
  Description of Artificial Sequence: Synthetic oligonucleotide
gaaucugaugagcuucacu

SEQ ID NO: 1331956 - RNA, 19 nt, Artificial Sequence
  Description of Artificial Sequence: Synthetic oligonucleotide
uucccucuagggagcaaga

SEQ ID NO: 1331957 - RNA, 19 nt, Artificial Sequence
  Description of Artificial Sequence: Synthetic oligonucleotide
guuccauuguugguauccc

SEQ ID NO: 1331958 - RNA, 19 nt, Artificial Sequence
  Description of Artificial Sequence: Synthetic oligonucleotide
aaguuaccaaccaguacuu

SEQ ID NO: 1331959 - RNA, 19 nt, Artificial Sequence
  Description of Artificial Sequence: Synthetic oligonucleotide
cucugagcaccuccauagg

SEQ ID NO: 1331960 - RNA, 19 nt, Artificial Sequence
  Description of Artificial Sequence: Synthetic oligonucleotide
guacaugaugcuuucuggu

SEQ ID NO: 1331961 - RNA, 19 nt, Artificial Sequence
  Description of Artificial Sequence: Synthetic oligonucleotide
gauuugaacgggaaagaau

SEQ ID NO: 1331962 - RNA, 19 nt, Artificial Sequence
  Description of Artificial Sequence: Synthetic oligonucleotide
cccuaucaaaguuaaugug

SEQ ID NO: 1331963 - RNA, 19 nt, Artificial Sequence
  Description of Artificial Sequence: Synthetic oligonucleotide
uauguccgcuacacaucug

SEQ ID NO: 1331964 - RNA, 19 nt, Artificial Sequence
  Description of Artificial Sequence: Synthetic oligonucleotide
cugauuguccacuagcuuu

SEQ ID NO: 1331965 - RNA, 19 nt, Artificial Sequence
  Description of Artificial Sequence: Synthetic oligonucleotide
caguuaucugcaguaagca

SEQ ID NO: 1331966 - RNA, 19 nt, Artificial Sequence
  Description of Artificial Sequence: Synthetic oligonucleotide
caguaagcuauaagccauc

SEQ ID NO: 1331967 - RNA, 19 nt, Artificial Sequence
  Description of Artificial Sequence: Synthetic oligonucleotide
ccaggaacaaaguuguaga

SEQ ID NO: 1331968 - RNA, 19 nt, Artificial Sequence
  Description of Artificial Sequence: Synthetic oligonucleotide
uugaugcaagauagacaaa

SEQ ID NO: 1331969 - RNA, 19 nt, Artificial Sequence
  Description of Artificial Sequence: Synthetic oligonucleotide
caauaaaacuggugaaagu

SEQ ID NO: 1331970 - RNA, 19 nt, Artificial Sequence
  Description of Artificial Sequence: Synthetic oligonucleotide
gagauucgugcacauuuua

SEQ ID NO: 1331971 - RNA, 19 nt, Artificial Sequence
  Description of Artificial Sequence: Synthetic oligonucleotide
aaccuaugcuacauuuaaa

SEQ ID NO: 1331972 - RNA, 19 nt, Artificial Sequence
  Description of Artificial Sequence: Synthetic oligonucleotide
uucgcucuucaguaagcua

SEQ ID NO: 1331973 - RNA, 19 nt, Artificial Sequence
  Description of Artificial Sequence: Synthetic oligonucleotide
agauucgugcacauuuuaa

SEQ ID NO: 1331974 - RNA, 19 nt, Artificial Sequence
  Description of Artificial Sequence: Synthetic oligonucleotide
cuguacguccucugagcac

SEQ ID NO: 1331975 - RNA, 19 nt, Artificial Sequence
  Description of Artificial Sequence: Synthetic oligonucleotide
uguccgcuacacaucuguc

SEQ ID NO: 1331976 - RNA, 19 nt, Artificial Sequence
  Description of Artificial Sequence: Synthetic oligonucleotide
gagauccgggccuucaacu

SEQ ID NO: 1331977 - RNA, 19 nt, Artificial Sequence
  Description of Artificial Sequence: Synthetic oligonucleotide
ggcaucagaagauuccaaa

SEQ ID NO: 1331978 - RNA, 19 nt, Artificial Sequence
  Description of Artificial Sequence: Synthetic oligonucleotide
gagagcuacaacacauaaa

SEQ ID NO: 1331979 - RNA, 19 nt, Artificial Sequence
  Description of Artificial Sequence: Synthetic oligonucleotide
aaccacccuaucaaaguua

SEQ ID NO: 1331980 - RNA, 19 nt, Artificial Sequence
  Description of Artificial Sequence: Synthetic oligonucleotide
cuggaggaccuuacucuug

SEQ ID NO: 1331981 - RNA, 19 nt, Artificial Sequence
  Description of Artificial Sequence: Synthetic oligonucleotide
ggcuucgcucuucaguaag

SEQ ID NO: 1331982 - RNA, 19 nt, Artificial Sequence
  Description of Artificial Sequence: Synthetic oligonucleotide
cuucauuauguccgcuaca

SEQ ID NO: 1331983 - RNA, 19 nt, Artificial Sequence
  Description of Artificial Sequence: Synthetic oligonucleotide
agccaugauucuucacccu

SEQ ID NO: 1331984 - RNA, 19 nt, Artificial Sequence
  Description of Artificial Sequence: Synthetic oligonucleotide
agauccgggccuucaacuu

SEQ ID NO: 1331985 - RNA, 19 nt, Artificial Sequence
  Description of Artificial Sequence: Synthetic oligonucleotide
uugguaucccaggaacaaa

SEQ ID NO: 1331986 - RNA, 19 nt, Artificial Sequence
  Description of Artificial Sequence: Synthetic oligonucleotide
auagaccagguaacaauaa

SEQ ID NO: 1331987 - RNA, 19 nt, Artificial Sequence
  Description of Artificial Sequence: Synthetic oligonucleotide
auacacugauuguccacua

SEQ ID NO: 1331988 - RNA, 19 nt, Artificial Sequence
  Description of Artificial Sequence: Synthetic oligonucleotide
auacccuaauuugggguga

SEQ ID NO: 1331989 - RNA, 19 nt, Artificial Sequence
  Description of Artificial Sequence: Synthetic oligonucleotide
gcuuacauauuuguaagua

SEQ ID NO: 1331990 - RNA, 19 nt, Artificial Sequence
  Description of Artificial Sequence: Synthetic oligonucleotide
uggagauccgggccuucaa

SEQ ID NO: 1331991 - RNA, 19 nt, Artificial Sequence
  Description of Artificial Sequence: Synthetic oligonucleotide
gcaauucacacuuuccagu

SEQ ID NO: 1331992 - RNA, 19 nt, Artificial Sequence
  Description of Artificial Sequence: Synthetic oligonucleotide
agugccagagacagagaga

SEQ ID NO: 1331993 - RNA, 19 nt, Artificial Sequence
  Description of Artificial Sequence: Synthetic oligonucleotide
gaaggguguggaacuugug

SEQ ID NO: 1331994 - RNA, 19 nt, Artificial Sequence
  Description of Artificial Sequence: Synthetic oligonucleotide
accacccuaucaaaguuaa

SEQ ID NO: 1331995 - RNA, 19 nt, Artificial Sequence
  Description of Artificial Sequence: Synthetic oligonucleotide
gaguaugcccaugccucug

SEQ ID NO: 1331996 - RNA, 19 nt, Artificial Sequence
  Description of Artificial Sequence: Synthetic oligonucleotide
acuaacaggcuaaguccca

SEQ ID NO: 1331997 - RNA, 19 nt, Artificial Sequence
  Description of Artificial Sequence: Synthetic oligonucleotide
guuguugaguccaaccuau

SEQ ID NO: 1331998 - RNA, 19 nt, Artificial Sequence
  Description of Artificial Sequence: Synthetic oligonucleotide
gacugcuuacauauuugua

SEQ ID NO: 1331999 - RNA, 19 nt, Artificial Sequence
  Description of Artificial Sequence: Synthetic oligonucleotide
ggaaaccaaugucugccca

SEQ ID NO: 1332000 - RNA, 19 nt, Artificial Sequence
  Description of Artificial Sequence: Synthetic oligonucleotide
auaugccaaugaauuuucu

SEQ ID NO: 1332001 - RNA, 19 nt, Artificial Sequence
  Description of Artificial Sequence: Synthetic oligonucleotide
cauacacugauuguccacu

SEQ ID NO: 1332002 - RNA, 19 nt, Artificial Sequence
  Description of Artificial Sequence: Synthetic oligonucleotide
cuacaucgugguagagcug

SEQ ID NO: 1332003 - RNA, 19 nt, Artificial Sequence
  Description of Artificial Sequence: Synthetic oligonucleotide
ccaaguuccaaacuggagu

SEQ ID NO: 1332004 - RNA, 19 nt, Artificial Sequence
  Description of Artificial Sequence: Synthetic oligonucleotide
ucccucuagggagcaagac

SEQ ID NO: 1332005 - RNA, 19 nt, Artificial Sequence
  Description of Artificial Sequence: Synthetic oligonucleotide
agggcucuuuggaagggug

SEQ ID NO: 1332006 - RNA, 19 nt, Artificial Sequence
  Description of Artificial Sequence: Synthetic oligonucleotide
ggagauccgggccuucaac

SEQ ID NO: 1332007 - RNA, 19 nt, Artificial Sequence
  Description of Artificial Sequence: Synthetic oligonucleotide
ccaguacuuucccucuagg

SEQ ID NO: 1332008 - RNA, 19 nt, Artificial Sequence
  Description of Artificial Sequence: Synthetic oligonucleotide
ucguaggcaucagaagauu

SEQ ID NO: 1332009 - RNA, 19 nt, Artificial Sequence
  Description of Artificial Sequence: Synthetic oligonucleotide
ugucugcccauugcuugga

SEQ ID NO: 1332010 - RNA, 19 nt, Artificial Sequence
  Description of Artificial Sequence: Synthetic oligonucleotide
auuguccacuagcuuucuu

SEQ ID NO: 1332011 - RNA, 19 nt, Artificial Sequence
  Description of Artificial Sequence: Synthetic oligonucleotide
uuaguccgaguaugcccau

SEQ ID NO: 1332012 - RNA, 19 nt, Artificial Sequence
  Description of Artificial Sequence: Synthetic oligonucleotide
ccaguucacucucggaaac

SEQ ID NO: 1332013 - RNA, 19 nt, Artificial Sequence
  Description of Artificial Sequence: Synthetic oligonucleotide
uagcacucaccuggugccc

SEQ ID NO: 1332014 - RNA, 19 nt, Artificial Sequence
  Description of Artificial Sequence: Synthetic oligonucleotide
cucgugcugcacauugcca

SEQ ID NO: 1332015 - RNA, 19 nt, Artificial Sequence
  Description of Artificial Sequence: Synthetic oligonucleotide
cuuggagaauuuugaaauu

SEQ ID NO: 1332016 - RNA, 19 nt, Artificial Sequence
  Description of Artificial Sequence: Synthetic oligonucleotide
ggacacccugacaagugcc

SEQ ID NO: 1332017 - RNA, 19 nt, Artificial Sequence
  Description of Artificial Sequence: Synthetic oligonucleotide
gguguaauucucacugaaa

SEQ ID NO: 1332018 - RNA, 19 nt, Artificial Sequence
  Description of Artificial Sequence: Synthetic oligonucleotide
agguuugaugcaagauaga

SEQ ID NO: 1332019 - RNA, 19 nt, Artificial Sequence
  Description of Artificial Sequence: Synthetic oligonucleotide
ggaauaugccaaugaauuu

SEQ ID NO: 1332020 - RNA, 19 nt, Artificial Sequence
  Description of Artificial Sequence: Synthetic oligonucleotide
gaacgggaaagaaucugau

SEQ ID NO: 1332021 - RNA, 19 nt, Artificial Sequence
  Description of Artificial Sequence: Synthetic oligonucleotide
agcacucaccuggugccca

SEQ ID NO: 1332022 - RNA, 19 nt, Artificial Sequence
  Description of Artificial Sequence: Synthetic oligonucleotide
cccucucugauagagccac

SEQ ID NO: 1332023 - RNA, 19 nt, Artificial Sequence
  Description of Artificial Sequence: Synthetic oligonucleotide
aguuaccaaccaguacuuu

SEQ ID NO: 1332024 - RNA, 19 nt, Artificial Sequence
  Description of Artificial Sequence: Synthetic oligonucleotide
caaagguuugaugcaagau

SEQ ID NO: 1332025 - RNA, 19 nt, Artificial Sequence
  Description of Artificial Sequence: Synthetic oligonucleotide
cacucucggaaacuugugu

SEQ ID NO: 1332026 - RNA, 19 nt, Artificial Sequence
  Description of Artificial Sequence: Synthetic oligonucleotide
ggcuuugcaacaguuuucu

SEQ ID NO: 1332027 - RNA, 19 nt, Artificial Sequence
  Description of Artificial Sequence: Synthetic oligonucleotide
uacccuaauuuggggugau

SEQ ID NO: 1332028 - RNA, 19 nt, Artificial Sequence
  Description of Artificial Sequence: Synthetic oligonucleotide
guccacuagcuuucuuaaa

SEQ ID NO: 1332029 - RNA, 19 nt, Artificial Sequence
  Description of Artificial Sequence: Synthetic oligonucleotide
gauccgggccuucaacuuu

SEQ ID NO: 1332030 - RNA, 19 nt, Artificial Sequence
  Description of Artificial Sequence: Synthetic oligonucleotide
ccuguacguccucugagca

SEQ ID NO: 1332031 - RNA, 19 nt, Artificial Sequence
  Description of Artificial Sequence: Synthetic oligonucleotide
guaugcccaugccucugaa

SEQ ID NO: 1332032 - RNA, 19 nt, Artificial Sequence
  Description of Artificial Sequence: Synthetic oligonucleotide
ccauugcuuggagauccgg

SEQ ID NO: 1332033 - RNA, 19 nt, Artificial Sequence
  Description of Artificial Sequence: Synthetic oligonucleotide
guguuccauuguugguauc

SEQ ID NO: 1332034 - RNA, 19 nt, Artificial Sequence
  Description of Artificial Sequence: Synthetic oligonucleotide
acguccucauacagaucug

SEQ ID NO: 1332035 - RNA, 19 nt, Artificial Sequence
  Description of Artificial Sequence: Synthetic oligonucleotide
gucguaagacccauuucau

SEQ ID NO: 1332036 - RNA, 19 nt, Artificial Sequence
  Description of Artificial Sequence: Synthetic oligonucleotide
ggaguucacgugacugcug

SEQ ID NO: 1332037 - RNA, 19 nt, Artificial Sequence
  Description of Artificial Sequence: Synthetic oligonucleotide
cccauugcuuggagauccg

SEQ ID NO: 1332038 - RNA, 19 nt, Artificial Sequence
  Description of Artificial Sequence: Synthetic oligonucleotide
gccccugcuuuaugguaag

SEQ ID NO: 1332039 - RNA, 19 nt, Artificial Sequence
  Description of Artificial Sequence: Synthetic oligonucleotide
gauuguccacuagcuuucu

SEQ ID NO: 1332040 - RNA, 19 nt, Artificial Sequence
  Description of Artificial Sequence: Synthetic oligonucleotide
cugccccugcuuuauggua

SEQ ID NO: 1332041 - RNA, 19 nt, Artificial Sequence
  Description of Artificial Sequence: Synthetic oligonucleotide
cagcacaucucacacuauu

SEQ ID NO: 1332042 - RNA, 19 nt, Artificial Sequence
  Description of Artificial Sequence: Synthetic oligonucleotide
gcauaagaauacccuaauu

SEQ ID NO: 1332043 - RNA, 19 nt, Artificial Sequence
  Description of Artificial Sequence: Synthetic oligonucleotide
uaucugcaguaagcacguc

SEQ ID NO: 1332044 - RNA, 19 nt, Artificial Sequence
  Description of Artificial Sequence: Synthetic oligonucleotide
acccucucugauagagcca

SEQ ID NO: 1332045 - RNA, 19 nt, Artificial Sequence
  Description of Artificial Sequence: Synthetic oligonucleotide
ccaaccuaugcuacauuua

SEQ ID NO: 1332046 - RNA, 19 nt, Artificial Sequence
  Description of Artificial Sequence: Synthetic oligonucleotide
acaucgugguagagcugcu

SEQ ID NO: 1332047 - RNA, 19 nt, Artificial Sequence
  Description of Artificial Sequence: Synthetic oligonucleotide
ucgcugcaauucacacuuu

SEQ ID NO: 1332048 - RNA, 19 nt, Artificial Sequence
  Description of Artificial Sequence: Synthetic oligonucleotide
ggcuaagucccaaguucca

SEQ ID NO: 1332049 - RNA, 19 nt, Artificial Sequence
  Description of Artificial Sequence: Synthetic oligonucleotide
ggaaggguguggaacuugu

SEQ ID NO: 1332050 - RNA, 19 nt, Artificial Sequence
  Description of Artificial Sequence: Synthetic oligonucleotide
cuucacccucucugauaga

SEQ ID NO: 1332051 - RNA, 19 nt, Artificial Sequence
  Description of Artificial Sequence: Synthetic oligonucleotide
ggggugauuugaacgggaa

SEQ ID NO: 1332052 - RNA, 19 nt, Artificial Sequence
  Description of Artificial Sequence: Synthetic oligonucleotide
gguaucccaggaacaaagu

SEQ ID NO: 1332053 - RNA, 19 nt, Artificial Sequence
  Description of Artificial Sequence: Synthetic oligonucleotide
ggaggaccuuacucuugga

SEQ ID NO: 1332054 - RNA, 19 nt, Artificial Sequence
  Description of Artificial Sequence: Synthetic oligonucleotide
ccgcuacacaucuguccag

SEQ ID NO: 1332055 - RNA, 19 nt, Artificial Sequence
  Description of Artificial Sequence: Synthetic oligonucleotide
uacguccucugagcaccuc

SEQ ID NO: 1332056 - RNA, 19 nt, Artificial Sequence
  Description of Artificial Sequence: Synthetic oligonucleotide
augugguuguugaguccaa

SEQ ID NO: 1332057 - RNA, 19 nt, Artificial Sequence
  Description of Artificial Sequence: Synthetic oligonucleotide
caguucacucucggaaacu

SEQ ID NO: 1332058 - RNA, 19 nt, Artificial Sequence
  Description of Artificial Sequence: Synthetic oligonucleotide
acccuaauuuggggugauu

SEQ ID NO: 1332059 - RNA, 19 nt, Artificial Sequence
  Description of Artificial Sequence: Synthetic oligonucleotide
cccucuagggagcaagacu

SEQ ID NO: 1332060 - RNA, 19 nt, Artificial Sequence
  Description of Artificial Sequence: Synthetic oligonucleotide
gcccaugccucugaagucu

SEQ ID NO: 1332061 - RNA, 19 nt, Artificial Sequence
  Description of Artificial Sequence: Synthetic oligonucleotide
caccagcuugagagcuaca

SEQ ID NO: 1332062 - RNA, 19 nt, Artificial Sequence
  Description of Artificial Sequence: Synthetic oligonucleotide
aucugucguaagacccauu

SEQ ID NO: 1332063 - RNA, 19 nt, Artificial Sequence
  Description of Artificial Sequence: Synthetic oligonucleotide
cacucaccuggugcccauc

SEQ ID NO: 1332064 - RNA, 19 nt, Artificial Sequence
  Description of Artificial Sequence: Synthetic oligonucleotide
gagcugcuuauagccaguu

SEQ ID NO: 1332065 - RNA, 19 nt, Artificial Sequence
  Description of Artificial Sequence: Synthetic oligonucleotide
gcccaucugccuagaauaa

SEQ ID NO: 1332066 - RNA, 19 nt, Artificial Sequence
  Description of Artificial Sequence: Synthetic oligonucleotide
gggcuucgcucuucaguaa

SEQ ID NO: 1332067 - RNA, 19 nt, Artificial Sequence
  Description of Artificial Sequence: Synthetic oligonucleotide
cacacugccccugcuuuau

SEQ ID NO: 1332068 - RNA, 19 nt, Artificial Sequence
  Description of Artificial Sequence: Synthetic oligonucleotide
cgugcugcacauugccaga

SEQ ID NO: 1332069 - RNA, 19 nt, Artificial Sequence
  Description of Artificial Sequence: Synthetic oligonucleotide
cccuaauuuggggugauuu

SEQ ID NO: 1332070 - RNA, 19 nt, Artificial Sequence
  Description of Artificial Sequence: Synthetic oligonucleotide
caccuccauaggugucaaa

SEQ ID NO: 1332071 - RNA, 19 nt, Artificial Sequence
  Description of Artificial Sequence: Synthetic oligonucleotide
guacguccucugagcaccu

SEQ ID NO: 1332072 - RNA, 19 nt, Artificial Sequence
  Description of Artificial Sequence: Synthetic oligonucleotide
caucgugguagagcugcuu

SEQ ID NO: 1332073 - RNA, 19 nt, Artificial Sequence
  Description of Artificial Sequence: Synthetic oligonucleotide
gcaagacugcuuacauauu

SEQ ID NO: 1332074 - RNA, 19 nt, Artificial Sequence
  Description of Artificial Sequence: Synthetic oligonucleotide
ccacccuaucaaaguuaau

SEQ ID NO: 1332075 - RNA, 19 nt, Artificial Sequence
  Description of Artificial Sequence: Synthetic oligonucleotide
aauggagacgacuauauaa

SEQ ID NO: 1332076 - RNA, 19 nt, Artificial Sequence
  Description of Artificial Sequence: Synthetic oligonucleotide
ucuacacucaccaaacucc

SEQ ID NO: 1332077 - RNA, 19 nt, Artificial Sequence
  Description of Artificial Sequence: Synthetic oligonucleotide
aauaagagcacacuuggaa

SEQ ID NO: 1332078 - RNA, 19 nt, Artificial Sequence
  Description of Artificial Sequence: Synthetic oligonucleotide
agcaaaugggaucaucucc

SEQ ID NO: 1332079 - RNA, 19 nt, Artificial Sequence
  Description of Artificial Sequence: Synthetic oligonucleotide
aaugguaccccacuuuguc

SEQ ID NO: 1332080 - RNA, 19 nt, Artificial Sequence
  Description of Artificial Sequence: Synthetic oligonucleotide
uuuauguucugcaugugug

SEQ ID NO: 1332081 - RNA, 19 nt, Artificial Sequence
  Description of Artificial Sequence: Synthetic oligonucleotide
guagacacccaauacaggg

SEQ ID NO: 1332082 - RNA, 19 nt, Artificial Sequence
  Description of Artificial Sequence: Synthetic oligonucleotide
auacagggaaaccacgagc

SEQ ID NO: 1332083 - RNA, 19 nt, Artificial Sequence
  Description of Artificial Sequence: Synthetic oligonucleotide
aauacagggaaaccacgag

SEQ ID NO: 1332084 - RNA, 19 nt, Artificial Sequence
  Description of Artificial Sequence: Synthetic oligonucleotide
aggaugagaagauuugggg

SEQ ID NO: 1332085 - RNA, 19 nt, Artificial Sequence
  Description of Artificial Sequence: Synthetic oligonucleotide
gaaguaaacccucuccucc

SEQ ID NO: 1332086 - RNA, 19 nt, Artificial Sequence
  Description of Artificial Sequence: Synthetic oligonucleotide
acgaacaguuuucaguggc

SEQ ID NO: 1332087 - RNA, 19 nt, Artificial Sequence
  Description of Artificial Sequence: Synthetic oligonucleotide
uguccuaaugaggagaucc

SEQ ID NO: 1332088 - RNA, 19 nt, Artificial Sequence
  Description of Artificial Sequence: Synthetic oligonucleotide
auggugggcaaacagaaag

SEQ ID NO: 1332089 - RNA, 19 nt, Artificial Sequence
  Description of Artificial Sequence: Synthetic oligonucleotide
ugauuggcagcuuugguug

SEQ ID NO: 1332090 - RNA, 19 nt, Artificial Sequence
  Description of Artificial Sequence: Synthetic oligonucleotide
agacgaacaguuuucagug

SEQ ID NO: 1332091 - RNA, 19 nt, Artificial Sequence
  Description of Artificial Sequence: Synthetic oligonucleotide
gacaauguugaccaccuug

SEQ ID NO: 1332092 - RNA, 19 nt, Artificial Sequence
  Description of Artificial Sequence: Synthetic oligonucleotide
uucuccucaaccccguugg

SEQ ID NO: 1332093 - RNA, 19 nt, Artificial Sequence
  Description of Artificial Sequence: Synthetic oligonucleotide
augucuaagugauuggcag

SEQ ID NO: 1332094 - RNA, 19 nt, Artificial Sequence
  Description of Artificial Sequence: Synthetic oligonucleotide
uucucaacuucaaugguac

SEQ ID NO: 1332095 - RNA, 19 nt, Artificial Sequence
  Description of Artificial Sequence: Synthetic oligonucleotide
uaggcuucgaaguggaugc

SEQ ID NO: 1332096 - RNA, 19 nt, Artificial Sequence
  Description of Artificial Sequence: Synthetic oligonucleotide
guugaggcguuucacacgg

SEQ ID NO: 1332097 - RNA, 19 nt, Artificial Sequence
  Description of Artificial Sequence: Synthetic oligonucleotide
aauguccaggggccuaagc

SEQ ID NO: 1332098 - RNA, 19 nt, Artificial Sequence
  Description of Artificial Sequence: Synthetic oligonucleotide
uaugucuaagugauuggca

SEQ ID NO: 1332099 - RNA, 19 nt, Artificial Sequence
  Description of Artificial Sequence: Synthetic oligonucleotide
gaagauaagcccucccuug

SEQ ID NO: 1332100 - RNA, 19 nt, Artificial Sequence
  Description of Artificial Sequence: Synthetic oligonucleotide
gauacucauggucacugcc

SEQ ID NO: 1332101 - RNA, 19 nt, Artificial Sequence
  Description of Artificial Sequence: Synthetic oligonucleotide
aacuguucggcuacagggc

SEQ ID NO: 1332102 - RNA, 19 nt, Artificial Sequence
  Description of Artificial Sequence: Synthetic oligonucleotide
aagcgaacuguucggcuac

SEQ ID NO: 1332103 - RNA, 19 nt, Artificial Sequence
  Description of Artificial Sequence: Synthetic oligonucleotide
ugcaguaauccguuguuug

SEQ ID NO: 1332104 - RNA, 19 nt, Artificial Sequence
  Description of Artificial Sequence: Synthetic oligonucleotide
acgacuauauaaaauaaga

SEQ ID NO: 1332105 - RNA, 19 nt, Artificial Sequence
  Description of Artificial Sequence: Synthetic oligonucleotide
gguguucucaacuucaaug

SEQ ID NO: 1332106 - RNA, 19 nt, Artificial Sequence
  Description of Artificial Sequence: Synthetic oligonucleotide
aaccccguuggccauggcg

SEQ ID NO: 1332107 - RNA, 19 nt, Artificial Sequence
  Description of Artificial Sequence: Synthetic oligonucleotide
cuggcaagcgaacuguucg

SEQ ID NO: 1332108 - RNA, 19 nt, Artificial Sequence
  Description of Artificial Sequence: Synthetic oligonucleotide
ugaauucaauguccagggg

SEQ ID NO: 1332109 - RNA, 19 nt, Artificial Sequence
  Description of Artificial Sequence: Synthetic oligonucleotide
ucaacuucaaugguacccc

SEQ ID NO: 1332110 - RNA, 19 nt, Artificial Sequence
  Description of Artificial Sequence: Synthetic oligonucleotide
uugcuuagacgcuucauga

SEQ ID NO: 1332111 - RNA, 19 nt, Artificial Sequence
  Description of Artificial Sequence: Synthetic oligonucleotide
gacgacuauauaaaauaag

SEQ ID NO: 1332112 - RNA, 19 nt, Artificial Sequence
  Description of Artificial Sequence: Synthetic oligonucleotide
ugacaaauggagacgacua

SEQ ID NO: 1332113 - RNA, 19 nt, Artificial Sequence
  Description of Artificial Sequence: Synthetic oligonucleotide
gaggagaucccgaagguag

SEQ ID NO: 1332114 - RNA, 19 nt, Artificial Sequence
  Description of Artificial Sequence: Synthetic oligonucleotide
uugaccaccuugcuuagac

SEQ ID NO: 1332115 - RNA, 19 nt, Artificial Sequence
  Description of Artificial Sequence: Synthetic oligonucleotide
uugucacuaugucuaagug

SEQ ID NO: 1332116 - RNA, 19 nt, Artificial Sequence
  Description of Artificial Sequence: Synthetic oligonucleotide
auaagcccucccuuguuac

SEQ ID NO: 1332117 - RNA, 19 nt, Artificial Sequence
  Description of Artificial Sequence: Synthetic oligonucleotide
cucaacuucaaugguaccc

SEQ ID NO: 1332118 - RNA, 19 nt, Artificial Sequence
  Description of Artificial Sequence: Synthetic oligonucleotide
acggggacaauguugacca

SEQ ID NO: 1332119 - RNA, 19 nt, Artificial Sequence
  Description of Artificial Sequence: Synthetic oligonucleotide
aaggccgaguggaacagcc

SEQ ID NO: 1332120 - RNA, 19 nt, Artificial Sequence
  Description of Artificial Sequence: Synthetic oligonucleotide
aauguugaccaccuugcuu

SEQ ID NO: 1332121 - RNA, 19 nt, Artificial Sequence
  Description of Artificial Sequence: Synthetic oligonucleotide
cuugcuuagacgcuucaug

SEQ ID NO: 1332122 - RNA, 19 nt, Artificial Sequence
  Description of Artificial Sequence: Synthetic oligonucleotide
acaagaauggugggcaaac

SEQ ID NO: 1332123 - RNA, 19 nt, Artificial Sequence
  Description of Artificial Sequence: Synthetic oligonucleotide
auguugaccaccuugcuua

SEQ ID NO: 1332124 - RNA, 19 nt, Artificial Sequence
  Description of Artificial Sequence: Synthetic oligonucleotide
aagauaagcccucccuugu

SEQ ID NO: 1332125 - RNA, 19 nt, Artificial Sequence
  Description of Artificial Sequence: Synthetic oligonucleotide
aguaauccguuguuugaag

SEQ ID NO: 1332126 - RNA, 19 nt, Artificial Sequence
  Description of Artificial Sequence: Synthetic oligonucleotide
cguuguuugaaguaaaccc

SEQ ID NO: 1332127 - RNA, 19 nt, Artificial Sequence
  Description of Artificial Sequence: Synthetic oligonucleotide
ugcugcugcagccaauaag

SEQ ID NO: 1332128 - RNA, 19 nt, Artificial Sequence
  Description of Artificial Sequence: Synthetic oligonucleotide
cuucuaggcugcaagcuag

SEQ ID NO: 1332129 - RNA, 19 nt, Artificial Sequence
  Description of Artificial Sequence: Synthetic oligonucleotide
uguagucccgcccacccug

SEQ ID NO: 1332130 - RNA, 19 nt, Artificial Sequence
  Description of Artificial Sequence: Synthetic oligonucleotide
uguuacugggcagagugug

SEQ ID NO: 1332131 - RNA, 19 nt, Artificial Sequence
  Description of Artificial Sequence: Synthetic oligonucleotide
acacccaauacagggaaac

SEQ ID NO: 1332132 - RNA, 19 nt, Artificial Sequence
  Description of Artificial Sequence: Synthetic oligonucleotide
aggcguuucacacgguagg

SEQ ID NO: 1332133 - RNA, 19 nt, Artificial Sequence
  Description of Artificial Sequence: Synthetic oligonucleotide
uccuaaugaggagaucccg

SEQ ID NO: 1332134 - RNA, 19 nt, Artificial Sequence
  Description of Artificial Sequence: Synthetic oligonucleotide
gcggggaugaaguagaggc

SEQ ID NO: 1332135 - RNA, 19 nt, Artificial Sequence
  Description of Artificial Sequence: Synthetic oligonucleotide
ucggcuacagggcucguug

SEQ ID NO: 1332136 - RNA, 19 nt, Artificial Sequence
  Description of Artificial Sequence: Synthetic oligonucleotide
cacacgguaggcuucgaag

SEQ ID NO: 1332137 - RNA, 19 nt, Artificial Sequence
  Description of Artificial Sequence: Synthetic oligonucleotide
ugagacgaacaguuuucag

SEQ ID NO: 1332138 - RNA, 19 nt, Artificial Sequence
  Description of Artificial Sequence: Synthetic oligonucleotide
uacagaggcacaugucacc

SEQ ID NO: 1332139 - RNA, 19 nt, Artificial Sequence
  Description of Artificial Sequence: Synthetic oligonucleotide
uuuagcuuccuuggggagc

SEQ ID NO: 1332140 - RNA, 19 nt, Artificial Sequence
  Description of Artificial Sequence: Synthetic oligonucleotide
uucucucugagagaagaug

SEQ ID NO: 1332141 - RNA, 19 nt, Artificial Sequence
  Description of Artificial Sequence: Synthetic oligonucleotide
guaggucugcaguaauccg

SEQ ID NO: 1332142 - RNA, 19 nt, Artificial Sequence
  Description of Artificial Sequence: Synthetic oligonucleotide
aacuucaaugguaccccac

SEQ ID NO: 1332143 - RNA, 19 nt, Artificial Sequence
  Description of Artificial Sequence: Synthetic oligonucleotide
caagcugucuacacucacc

SEQ ID NO: 1332144 - RNA, 19 nt, Artificial Sequence
  Description of Artificial Sequence: Synthetic oligonucleotide
aauucacagugaguggugu

SEQ ID NO: 1332145 - RNA, 19 nt, Artificial Sequence
  Description of Artificial Sequence: Synthetic oligonucleotide
uuucacacgguaggcuucg

SEQ ID NO: 1332146 - RNA, 19 nt, Artificial Sequence
  Description of Artificial Sequence: Synthetic oligonucleotide
uguucggcuacagggcucg

SEQ ID NO: 1332147 - RNA, 19 nt, Artificial Sequence
  Description of Artificial Sequence: Synthetic oligonucleotide
uaauccguuguuugaagua

SEQ ID NO: 1332148 - RNA, 19 nt, Artificial Sequence
  Description of Artificial Sequence: Synthetic oligonucleotide
gagacgaacaguuuucagu

SEQ ID NO: 1332149 - RNA, 19 nt, Artificial Sequence
  Description of Artificial Sequence: Synthetic oligonucleotide
ucguugaggcguuucacac

SEQ ID NO: 1332150 - RNA, 19 nt, Artificial Sequence
  Description of Artificial Sequence: Synthetic oligonucleotide
accacgagcaccccacauc

SEQ ID NO: 1332151 - RNA, 19 nt, Artificial Sequence
  Description of Artificial Sequence: Synthetic oligonucleotide
acacgguaggcuucgaagu

SEQ ID NO: 1332152 - RNA, 19 nt, Artificial Sequence
  Description of Artificial Sequence: Synthetic oligonucleotide
uuggacaguaggucugcag

SEQ ID NO: 1332153 - RNA, 19 nt, Artificial Sequence
  Description of Artificial Sequence: Synthetic oligonucleotide
agcgugucagccuuggcga

SEQ ID NO: 1332154 - RNA, 19 nt, Artificial Sequence
  Description of Artificial Sequence: Synthetic oligonucleotide
uuggaagauaagcccuccc

SEQ ID NO: 1332155 - RNA, 19 nt, Artificial Sequence
  Description of Artificial Sequence: Synthetic oligonucleotide
uggcaagcgaacuguucgg

SEQ ID NO: 1332156 - RNA, 19 nt, Artificial Sequence
  Description of Artificial Sequence: Synthetic oligonucleotide
aggggcgggugacaaaugg

SEQ ID NO: 1332157 - RNA, 19 nt, Artificial Sequence
  Description of Artificial Sequence: Synthetic oligonucleotide
aggacaagaauggugggca

SEQ ID NO: 1332158 - RNA, 19 nt, Artificial Sequence
  Description of Artificial Sequence: Synthetic oligonucleotide
gucuacacucaccaaacuc

SEQ ID NO: 1332159 - RNA, 19 nt, Artificial Sequence
  Description of Artificial Sequence: Synthetic oligonucleotide
acucgcgugucagggaucc

SEQ ID NO: 1332160 - RNA, 19 nt, Artificial Sequence
  Description of Artificial Sequence: Synthetic oligonucleotide
uccguuguuugaaguaaac

SEQ ID NO: 1332161 - RNA, 19 nt, Artificial Sequence
  Description of Artificial Sequence: Synthetic oligonucleotide
uaagcgaguggccgguggc

SEQ ID NO: 1332162 - RNA, 19 nt, Artificial Sequence
  Description of Artificial Sequence: Synthetic oligonucleotide
ugguuguggaugucuuuag

SEQ ID NO: 1332163 - RNA, 19 nt, Artificial Sequence
  Description of Artificial Sequence: Synthetic oligonucleotide
auggucacugcccaccaca

SEQ ID NO: 1332164 - RNA, 19 nt, Artificial Sequence
  Description of Artificial Sequence: Synthetic oligonucleotide
ggaguagacacccaauaca

SEQ ID NO: 1332165 - RNA, 19 nt, Artificial Sequence
  Description of Artificial Sequence: Synthetic oligonucleotide
aguaaacccucuccuccag

SEQ ID NO: 1332166 - RNA, 19 nt, Artificial Sequence
  Description of Artificial Sequence: Synthetic oligonucleotide
uggcgucuacaucuccugg

SEQ ID NO: 1332167 - RNA, 19 nt, Artificial Sequence
  Description of Artificial Sequence: Synthetic oligonucleotide
accccguuggccauggcgc

SEQ ID NO: 1332168 - RNA, 19 nt, Artificial Sequence
  Description of Artificial Sequence: Synthetic oligonucleotide
caauacagggaaaccacga

SEQ ID NO: 1332169 - RNA, 19 nt, Artificial Sequence
  Description of Artificial Sequence: Synthetic oligonucleotide
cucguacuggucauugaug

SEQ ID NO: 1332170 - RNA, 19 nt, Artificial Sequence
  Description of Artificial Sequence: Synthetic oligonucleotide
agaauggugggcaaacaga

SEQ ID NO: 1332171 - RNA, 19 nt, Artificial Sequence
  Description of Artificial Sequence: Synthetic oligonucleotide
agugauuggcagcuuuggu

SEQ ID NO: 1332172 - RNA, 19 nt, Artificial Sequence
  Description of Artificial Sequence: Synthetic oligonucleotide
acuguucggcuacagggcu

SEQ ID NO: 1332173 - RNA, 19 nt, Artificial Sequence
  Description of Artificial Sequence: Synthetic oligonucleotide
agccuggugagacgaacag

SEQ ID NO: 1332174 - RNA, 19 nt, Artificial Sequence
  Description of Artificial Sequence: Synthetic oligonucleotide
gcuagugaugucuuuuaug

SEQ ID NO: 1332175 - RNA, 19 nt, Artificial Sequence
  Description of Artificial Sequence: Synthetic oligonucleotide
acgagcaccccacaucugu

SEQ ID NO: 1332176 - RNA, 19 nt, Artificial Sequence
  Description of Artificial Sequence: Synthetic oligonucleotide
acccaauacagggaaacca

SEQ ID NO: 1332177 - RNA, 19 nt, Artificial Sequence
  Description of Artificial Sequence: Synthetic oligonucleotide
caagcuggcaagcgaacug

SEQ ID NO: 1332178 - RNA, 19 nt, Artificial Sequence
  Description of Artificial Sequence: Synthetic oligonucleotide
cuaagcgaguggccggugg

SEQ ID NO: 1332179 - RNA, 19 nt, Artificial Sequence
  Description of Artificial Sequence: Synthetic oligonucleotide
guaaacccucuccuccagg

SEQ ID NO: 1332180 - RNA, 19 nt, Artificial Sequence
  Description of Artificial Sequence: Synthetic oligonucleotide
uuacugggcagagugugga

SEQ ID NO: 1332181 - RNA, 19 nt, Artificial Sequence
  Description of Artificial Sequence: Synthetic oligonucleotide
agccaauaagagcacacuu

SEQ ID NO: 1332182 - RNA, 19 nt, Artificial Sequence
  Description of Artificial Sequence: Synthetic oligonucleotide
uuggcgaugacggggacaa

SEQ ID NO: 1332183 - RNA, 19 nt, Artificial Sequence
  Description of Artificial Sequence: Synthetic oligonucleotide
acuuggaagauaagcccuc

SEQ ID NO: 1332184 - RNA, 19 nt, Artificial Sequence
  Description of Artificial Sequence: Synthetic oligonucleotide
ucucaacuucaaugguacc

SEQ ID NO: 1332185 - RNA, 19 nt, Artificial Sequence
  Description of Artificial Sequence: Synthetic oligonucleotide
uguugaccaccuugcuuag

SEQ ID NO: 1332186 - RNA, 19 nt, Artificial Sequence
  Description of Artificial Sequence: Synthetic oligonucleotide
augacggggacaauguuga

SEQ ID NO: 1332187 - RNA, 19 nt, Artificial Sequence
  Description of Artificial Sequence: Synthetic oligonucleotide
aagcccucccuuguuacug

SEQ ID NO: 1332188 - RNA, 19 nt, Artificial Sequence
  Description of Artificial Sequence: Synthetic oligonucleotide
ugaggcguuucacacggua

SEQ ID NO: 1332189 - RNA, 19 nt, Artificial Sequence
  Description of Artificial Sequence: Synthetic oligonucleotide
ugagugguguucucaacuu

SEQ ID NO: 1332190 - RNA, 19 nt, Artificial Sequence
  Description of Artificial Sequence: Synthetic oligonucleotide
ucgcgugucagggauccgg

SEQ ID NO: 1332191 - RNA, 19 nt, Artificial Sequence
  Description of Artificial Sequence: Synthetic oligonucleotide
caugauaggcugccagcag

SEQ ID NO: 1332192 - RNA, 19 nt, Artificial Sequence
  Description of Artificial Sequence: Synthetic oligonucleotide
uggcaagcuggcaagcgaa

SEQ ID NO: 1332193 - RNA, 19 nt, Artificial Sequence
  Description of Artificial Sequence: Synthetic oligonucleotide
ugcuuagacgcuucaugaa

SEQ ID NO: 1332194 - RNA, 19 nt, Artificial Sequence
  Description of Artificial Sequence: Synthetic oligonucleotide
uccaagcugucuacacuca

SEQ ID NO: 1332195 - RNA, 19 nt, Artificial Sequence
  Description of Artificial Sequence: Synthetic oligonucleotide
aguggacucgcgugucagg

SEQ ID NO: 1332196 - RNA, 19 nt, Artificial Sequence
  Description of Artificial Sequence: Synthetic oligonucleotide
uucuaggcugcaagcuagc

SEQ ID NO: 1332197 - RNA, 19 nt, Artificial Sequence
  Description of Artificial Sequence: Synthetic oligonucleotide
gaggcguuucacacgguag

SEQ ID NO: 1332198 - RNA, 19 nt, Artificial Sequence
  Description of Artificial Sequence: Synthetic oligonucleotide
ucccaccgcacuucuaggc

SEQ ID NO: 1332199 - RNA, 19 nt, Artificial Sequence
  Description of Artificial Sequence: Synthetic oligonucleotide
ucguugaggggccuuccac

SEQ ID NO: 1332200 - RNA, 19 nt, Artificial Sequence
  Description of Artificial Sequence: Synthetic oligonucleotide
cugcauguguguccuaaug

SEQ ID NO: 1332201 - RNA, 19 nt, Artificial Sequence
  Description of Artificial Sequence: Synthetic oligonucleotide
augguaccccacuuugucu

SEQ ID NO: 1332202 - RNA, 19 nt, Artificial Sequence
  Description of Artificial Sequence: Synthetic oligonucleotide
gcagcuuugguuguggaug

SEQ ID NO: 1332203 - RNA, 19 nt, Artificial Sequence
  Description of Artificial Sequence: Synthetic oligonucleotide
acgguaggcuucgaagugg

SEQ ID NO: 1332204 - RNA, 19 nt, Artificial Sequence
  Description of Artificial Sequence: Synthetic oligonucleotide
ccaauacagggaaaccacg

SEQ ID NO: 1332205 - RNA, 19 nt, Artificial Sequence
  Description of Artificial Sequence: Synthetic oligonucleotide
guuacugggcagagugugg

SEQ ID NO: 1332206 - RNA, 19 nt, Artificial Sequence
  Description of Artificial Sequence: Synthetic oligonucleotide
ggcgucuacaucuccuggg

SEQ ID NO: 1332207 - RNA, 19 nt, Artificial Sequence
  Description of Artificial Sequence: Synthetic oligonucleotide
ugguccaagcugucuacac

SEQ ID NO: 1332208 - RNA, 19 nt, Artificial Sequence
  Description of Artificial Sequence: Synthetic oligonucleotide
ugguaccccacuuugucuu

SEQ ID NO: 1332209 - RNA, 19 nt, Artificial Sequence
  Description of Artificial Sequence: Synthetic oligonucleotide
guaagcgugucagccuugg

SEQ ID NO: 1332210 - RNA, 19 nt, Artificial Sequence
  Description of Artificial Sequence: Synthetic oligonucleotide
cuuggaagauaagcccucc

SEQ ID NO: 1332211 - RNA, 19 nt, Artificial Sequence
  Description of Artificial Sequence: Synthetic oligonucleotide
gucuguagagacaccuucc

SEQ ID NO: 1332212 - RNA, 19 nt, Artificial Sequence
  Description of Artificial Sequence: Synthetic oligonucleotide
gauaagcccucccuuguua

SEQ ID NO: 1332213 - RNA, 19 nt, Artificial Sequence
  Description of Artificial Sequence: Synthetic oligonucleotide
gagcaccccacaucugugc

SEQ ID NO: 1332214 - RNA, 19 nt, Artificial Sequence
  Description of Artificial Sequence: Synthetic oligonucleotide
agacgacuauauaaaauaa

SEQ ID NO: 1332215 - RNA, 19 nt, Artificial Sequence
  Description of Artificial Sequence: Synthetic oligonucleotide
aguuuucauuguugaugug

SEQ ID NO: 1332216 - RNA, 19 nt, Artificial Sequence
  Description of Artificial Sequence: Synthetic oligonucleotide
cuucucguacuggucauug

SEQ ID NO: 1332217 - RNA, 19 nt, Artificial Sequence
  Description of Artificial Sequence: Synthetic oligonucleotide
uagagacaccuuccccaag

SEQ ID NO: 1332218 - RNA, 19 nt, Artificial Sequence
  Description of Artificial Sequence: Synthetic oligonucleotide
gccaauaagagcacacuug

SEQ ID NO: 1332219 - RNA, 19 nt, Artificial Sequence
  Description of Artificial Sequence: Synthetic oligonucleotide
cagcaaaugggaucaucuc

SEQ ID NO: 1332220 - RNA, 19 nt, Artificial Sequence
  Description of Artificial Sequence: Synthetic oligonucleotide
ucuacaucuccugggcuuc

SEQ ID NO: 1332221 - RNA, 19 nt, Artificial Sequence
  Description of Artificial Sequence: Synthetic oligonucleotide
uccccaagcugguccaagc

SEQ ID NO: 1332222 - RNA, 19 nt, Artificial Sequence
  Description of Artificial Sequence: Synthetic oligonucleotide
ucacagugagugguguucu

SEQ ID NO: 1332223 - RNA, 19 nt, Artificial Sequence
  Description of Artificial Sequence: Synthetic oligonucleotide
ucaaccccguuggccaugg

SEQ ID NO: 1332224 - RNA, 19 nt, Artificial Sequence
  Description of Artificial Sequence: Synthetic oligonucleotide
cacgguaggcuucgaagug

SEQ ID NO: 1332225 - RNA, 19 nt, Artificial Sequence
  Description of Artificial Sequence: Synthetic oligonucleotide
aaccacgagcaccccacau

SEQ ID NO: 1332226 - RNA, 19 nt, Artificial Sequence
  Description of Artificial Sequence: Synthetic oligonucleotide
ggucuguagagacaccuuc

SEQ ID NO: 1332227 - RNA, 19 nt, Artificial Sequence
  Description of Artificial Sequence: Synthetic oligonucleotide
gggaguagacacccaauac

SEQ ID NO: 1332228 - RNA, 19 nt, Artificial Sequence
  Description of Artificial Sequence: Synthetic oligonucleotide
aaaccacgagcaccccaca

SEQ ID NO: 1332229 - RNA, 19 nt, Artificial Sequence
  Description of Artificial Sequence: Synthetic oligonucleotide
caguaggucugcaguaauc

SEQ ID NO: 1332230 - RNA, 19 nt, Artificial Sequence
  Description of Artificial Sequence: Synthetic oligonucleotide
gguuguggaugucuuuagc

SEQ ID NO: 1332231 - RNA, 19 nt, Artificial Sequence
  Description of Artificial Sequence: Synthetic oligonucleotide
gcgggugacaaauggagac

SEQ ID NO: 1332232 - RNA, 19 nt, Artificial Sequence
  Description of Artificial Sequence: Synthetic oligonucleotide
uguugcccucguugaggcg

SEQ ID NO: 1332233 - RNA, 19 nt, Artificial Sequence
  Description of Artificial Sequence: Synthetic oligonucleotide
caugguugucacuaugucu

SEQ ID NO: 1332234 - RNA, 19 nt, Artificial Sequence
  Description of Artificial Sequence: Synthetic oligonucleotide
ggaacagccuggugagacg

SEQ ID NO: 1332235 - RNA, 19 nt, Artificial Sequence
  Description of Artificial Sequence: Synthetic oligonucleotide
agcccucccuuguuacugg

SEQ ID NO: 1332236 - RNA, 19 nt, Artificial Sequence
  Description of Artificial Sequence: Synthetic oligonucleotide
guaauccguuguuugaagu

SEQ ID NO: 1332237 - RNA, 19 nt, Artificial Sequence
  Description of Artificial Sequence: Synthetic oligonucleotide
ugaggggccuuccacgcuu

SEQ ID NO: 1332238 - RNA, 19 nt, Artificial Sequence
  Description of Artificial Sequence: Synthetic oligonucleotide
caauaagagcacacuugga

SEQ ID NO: 1332239 - RNA, 19 nt, Artificial Sequence
  Description of Artificial Sequence: Synthetic oligonucleotide
guccuaaugaggagauccc

SEQ ID NO: 1332240 - RNA, 19 nt, Artificial Sequence
  Description of Artificial Sequence: Synthetic oligonucleotide
gugagugguguucucaacu

SEQ ID NO: 1332241 - RNA, 19 nt, Artificial Sequence
  Description of Artificial Sequence: Synthetic oligonucleotide
uaagcgugucagccuuggc

SEQ ID NO: 1332242 - RNA, 19 nt, Artificial Sequence
  Description of Artificial Sequence: Synthetic oligonucleotide
agcaccccacaucugugca

SEQ ID NO: 1332243 - RNA, 19 nt, Artificial Sequence
  Description of Artificial Sequence: Synthetic oligonucleotide
gcagcaguggacucgcgug

SEQ ID NO: 1332244 - RNA, 19 nt, Artificial Sequence
  Description of Artificial Sequence: Synthetic oligonucleotide
cuccucaaccccguuggcc

SEQ ID NO: 1332245 - RNA, 19 nt, Artificial Sequence
  Description of Artificial Sequence: Synthetic oligonucleotide
cuuuuauguucugcaugug

SEQ ID NO: 1332246 - RNA, 19 nt, Artificial Sequence
  Description of Artificial Sequence: Synthetic oligonucleotide
uacacucaccaaacuccuc

SEQ ID NO: 1332247 - RNA, 19 nt, Artificial Sequence
  Description of Artificial Sequence: Synthetic oligonucleotide
ugcagccaauaagagcaca

SEQ ID NO: 1332248 - RNA, 19 nt, Artificial Sequence
  Description of Artificial Sequence: Synthetic oligonucleotide
guaggcaaauucacaguga

SEQ ID NO: 1332249 - RNA, 19 nt, Artificial Sequence
  Description of Artificial Sequence: Synthetic oligonucleotide
ucuccucaaccccguuggc

SEQ ID NO: 1332250 - RNA, 19 nt, Artificial Sequence
  Description of Artificial Sequence: Synthetic oligonucleotide
aggggcaugguugucacua

SEQ ID NO: 1332251 - RNA, 19 nt, Artificial Sequence
  Description of Artificial Sequence: Synthetic oligonucleotide
cacccaauacagggaaacc

SEQ ID NO: 1332252 - RNA, 19 nt, Artificial Sequence
  Description of Artificial Sequence: Synthetic oligonucleotide
caccgcacuucuaggcugc

SEQ ID NO: 1332253 - RNA, 19 nt, Artificial Sequence
  Description of Artificial Sequence: Synthetic oligonucleotide
guguguccuaaugaggaga

SEQ ID NO: 1332254 - RNA, 19 nt, Artificial Sequence
  Description of Artificial Sequence: Synthetic oligonucleotide
gugaaaggccgaguggaac

SEQ ID NO: 1332255 - RNA, 19 nt, Artificial Sequence
  Description of Artificial Sequence: Synthetic oligonucleotide
ugaggagaucccgaaggua

SEQ ID NO: 1332256 - RNA, 19 nt, Artificial Sequence
  Description of Artificial Sequence: Synthetic oligonucleotide
cuaaggggcaugguuguca

SEQ ID NO: 1332257 - RNA, 19 nt, Artificial Sequence
  Description of Artificial Sequence: Synthetic oligonucleotide
cucccaccgcacuucuagg

SEQ ID NO: 1332258 - RNA, 19 nt, Artificial Sequence
  Description of Artificial Sequence: Synthetic oligonucleotide
gauggucccaacaguucuc

SEQ ID NO: 1332259 - RNA, 19 nt, Artificial Sequence
  Description of Artificial Sequence: Synthetic oligonucleotide
gugucagggauccggcuuc

SEQ ID NO: 1332260 - RNA, 19 nt, Artificial Sequence
  Description of Artificial Sequence: Synthetic oligonucleotide
agaaaggggcgggugacaa

SEQ ID NO: 1332261 - RNA, 19 nt, Artificial Sequence
  Description of Artificial Sequence: Synthetic oligonucleotide
ccagugaaaggccgagugg

SEQ ID NO: 1332262 - RNA, 19 nt, Artificial Sequence
  Description of Artificial Sequence: Synthetic oligonucleotide
auggauggucccaacaguu

SEQ ID NO: 1332263 - RNA, 19 nt, Artificial Sequence
  Description of Artificial Sequence: Synthetic oligonucleotide
gucuaagugauuggcagcu

SEQ ID NO: 1332264 - RNA, 19 nt, Artificial Sequence
  Description of Artificial Sequence: Synthetic oligonucleotide
ggugagacgaacaguuuuc

SEQ ID NO: 1332265 - RNA, 19 nt, Artificial Sequence
  Description of Artificial Sequence: Synthetic oligonucleotide
agcaugcugaagauuuccu

SEQ ID NO: 1332266 - RNA, 19 nt, Artificial Sequence
  Description of Artificial Sequence: Synthetic oligonucleotide
agauaagcccucccuuguu

SEQ ID NO: 1332267 - RNA, 19 nt, Artificial Sequence
  Description of Artificial Sequence: Synthetic oligonucleotide
caagcgaacuguucggcua

SEQ ID NO: 1332268 - RNA, 19 nt, Artificial Sequence
  Description of Artificial Sequence: Synthetic oligonucleotide
agcaguggacucgcguguc

SEQ ID NO: 1332269 - RNA, 19 nt, Artificial Sequence
  Description of Artificial Sequence: Synthetic oligonucleotide
ggcgaugacggggacaaug

SEQ ID NO: 1332270 - RNA, 19 nt, Artificial Sequence
  Description of Artificial Sequence: Synthetic oligonucleotide
gcuacagggcucguugagg

SEQ ID NO: 1332271 - RNA, 19 nt, Artificial Sequence
  Description of Artificial Sequence: Synthetic oligonucleotide
uugaggggccuuccacgcu

SEQ ID NO: 1332272 - RNA, 19 nt, Artificial Sequence
  Description of Artificial Sequence: Synthetic oligonucleotide
agcgaguggccgguggcgg

SEQ ID NO: 1332273 - RNA, 19 nt, Artificial Sequence
  Description of Artificial Sequence: Synthetic oligonucleotide
cccagugaaaggccgagug

SEQ ID NO: 1332274 - RNA, 19 nt, Artificial Sequence
  Description of Artificial Sequence: Synthetic oligonucleotide
gcacuucuaggcugcaagc

SEQ ID NO: 1332275 - RNA, 19 nt, Artificial Sequence
  Description of Artificial Sequence: Synthetic oligonucleotide
gugacaaauggagacgacu

SEQ ID NO: 1332276 - RNA, 19 nt, Artificial Sequence
  Description of Artificial Sequence: Synthetic oligonucleotide
cauggcgcuguugcccucg

SEQ ID NO: 1332277 - RNA, 19 nt, Artificial Sequence
  Description of Artificial Sequence: Synthetic oligonucleotide
ccguuguuugaaguaaacc

SEQ ID NO: 1332278 - RNA, 19 nt, Artificial Sequence
  Description of Artificial Sequence: Synthetic oligonucleotide
gggccuaagcgaguggccg

SEQ ID NO: 1332279 - RNA, 19 nt, Artificial Sequence
  Description of Artificial Sequence: Synthetic oligonucleotide
gagggcggcacagaggcaa

SEQ ID NO: 1332280 - RNA, 19 nt, Artificial Sequence
  Description of Artificial Sequence: Synthetic oligonucleotide
gauggcgucuacaucuccu

SEQ ID NO: 1332281 - RNA, 19 nt, Artificial Sequence
  Description of Artificial Sequence: Synthetic oligonucleotide
gagaucccgaagguaggca

SEQ ID NO: 1332282 - RNA, 19 nt, Artificial Sequence
  Description of Artificial Sequence: Synthetic oligonucleotide
auguagucccgcccacccu

SEQ ID NO: 1332283 - RNA, 19 nt, Artificial Sequence
  Description of Artificial Sequence: Synthetic oligonucleotide
cuacacucaccaaacuccu

SEQ ID NO: 1332284 - RNA, 19 nt, Artificial Sequence
  Description of Artificial Sequence: Synthetic oligonucleotide
cguugaggggccuuccacg

SEQ ID NO: 1332285 - RNA, 19 nt, Artificial Sequence
  Description of Artificial Sequence: Synthetic oligonucleotide
cccgaagguaggcaaauuc

SEQ ID NO: 1332286 - RNA, 19 nt, Artificial Sequence
  Description of Artificial Sequence: Synthetic oligonucleotide
ggcuacagggcucguugag

SEQ ID NO: 1332287 - RNA, 19 nt, Artificial Sequence
  Description of Artificial Sequence: Synthetic oligonucleotide
cacagcaaaugggaucauc

SEQ ID NO: 1332288 - RNA, 19 nt, Artificial Sequence
  Description of Artificial Sequence: Synthetic oligonucleotide
ggccuaagcgaguggccgg

SEQ ID NO: 1332289 - RNA, 19 nt, Artificial Sequence
  Description of Artificial Sequence: Synthetic oligonucleotide
gccuuccacgcuugggugg

SEQ ID NO: 1332290 - RNA, 19 nt, Artificial Sequence
  Description of Artificial Sequence: Synthetic oligonucleotide
cagggcucguugaggggcc

SEQ ID NO: 1332291 - RNA, 19 nt, Artificial Sequence
  Description of Artificial Sequence: Synthetic oligonucleotide
ccuaaugaggagaucccga

SEQ ID NO: 1332292 - RNA, 19 nt, Artificial Sequence
  Description of Artificial Sequence: Synthetic oligonucleotide
guggcggggaugaaguaga

SEQ ID NO: 1332293 - RNA, 19 nt, Artificial Sequence
  Description of Artificial Sequence: Synthetic oligonucleotide
agucccgcccacccugcug

SEQ ID NO: 1332294 - RNA, 19 nt, Artificial Sequence
  Description of Artificial Sequence: Synthetic oligonucleotide
caguaauccguuguuugaa

SEQ ID NO: 1332295 - RNA, 19 nt, Artificial Sequence
  Description of Artificial Sequence: Synthetic oligonucleotide
caguucucucugagagaag

SEQ ID NO: 1332296 - RNA, 19 nt, Artificial Sequence
  Description of Artificial Sequence: Synthetic oligonucleotide
cgcacuucuaggcugcaag

SEQ ID NO: 1332297 - RNA, 19 nt, Artificial Sequence
  Description of Artificial Sequence: Synthetic oligonucleotide
cuguucggcuacagggcuc

SEQ ID NO: 1332298 - RNA, 19 nt, Artificial Sequence
  Description of Artificial Sequence: Synthetic oligonucleotide
uccaggggccuaagcgagu

SEQ ID NO: 1332299 - RNA, 19 nt, Artificial Sequence
  Description of Artificial Sequence: Synthetic oligonucleotide
augaggaggccuggcuaag

SEQ ID NO: 1332300 - RNA, 19 nt, Artificial Sequence
  Description of Artificial Sequence: Synthetic oligonucleotide
gcagccaauaagagcacac

SEQ ID NO: 1332301 - RNA, 19 nt, Artificial Sequence
  Description of Artificial Sequence: Synthetic oligonucleotide
caaaagaacuuggcaagcu

SEQ ID NO: 1332302 - RNA, 19 nt, Artificial Sequence
  Description of Artificial Sequence: Synthetic oligonucleotide
gggcagaguguggaaagag

SEQ ID NO: 1332303 - RNA, 19 nt, Artificial Sequence
  Description of Artificial Sequence: Synthetic oligonucleotide
acuucaugauaggcugcca

SEQ ID NO: 1332304 - RNA, 19 nt, Artificial Sequence
  Description of Artificial Sequence: Synthetic oligonucleotide
uccuguugacgcugaccuc

SEQ ID NO: 1332305 - RNA, 19 nt, Artificial Sequence
  Description of Artificial Sequence: Synthetic oligonucleotide
aggcaaauucacagugagu

SEQ ID NO: 1332306 - RNA, 19 nt, Artificial Sequence
  Description of Artificial Sequence: Synthetic oligonucleotide
ggucccaacaguucucucu

SEQ ID NO: 1332307 - RNA, 19 nt, Artificial Sequence
  Description of Artificial Sequence: Synthetic oligonucleotide
ggagaucccgaagguaggc

SEQ ID NO: 1332308 - RNA, 19 nt, Artificial Sequence
  Description of Artificial Sequence: Synthetic oligonucleotide
gauuggcagcuuugguugu

SEQ ID NO: 1332309 - RNA, 19 nt, Artificial Sequence
  Description of Artificial Sequence: Synthetic oligonucleotide
guugcccucguugaggcgu

SEQ ID NO: 1332310 - RNA, 19 nt, Artificial Sequence
  Description of Artificial Sequence: Synthetic oligonucleotide
ucuaagugauuggcagcuu

SEQ ID NO: 1332311 - RNA, 19 nt, Artificial Sequence
  Description of Artificial Sequence: Synthetic oligonucleotide
cguugaggcguuucacacg

SEQ ID NO: 1332312 - RNA, 19 nt, Artificial Sequence
  Description of Artificial Sequence: Synthetic oligonucleotide
ggcguuucacacgguaggc

SEQ ID NO: 1332313 - RNA, 19 nt, Artificial Sequence
  Description of Artificial Sequence: Synthetic oligonucleotide
ugagggcggcacagaggca

SEQ ID NO: 1332314 - RNA, 19 nt, Artificial Sequence
  Description of Artificial Sequence: Synthetic oligonucleotide
ggcaagcgaacuguucggc

SEQ ID NO: 1332315 - RNA, 19 nt, Artificial Sequence
  Description of Artificial Sequence: Synthetic oligonucleotide
aggucugcaguaauccguu

SEQ ID NO: 1332316 - RNA, 19 nt, Artificial Sequence
  Description of Artificial Sequence: Synthetic oligonucleotide
aucccgaagguaggcaaau

SEQ ID NO: 1332317 - RNA, 19 nt, Artificial Sequence
  Description of Artificial Sequence: Synthetic oligonucleotide
aaggggcgggugacaaaug

SEQ ID NO: 1332318 - RNA, 19 nt, Artificial Sequence
  Description of Artificial Sequence: Synthetic oligonucleotide
gguuacagaggcacauguc

SEQ ID NO: 1332319 - RNA, 19 nt, Artificial Sequence
  Description of Artificial Sequence: Synthetic oligonucleotide
ugcugcuagugaugucuuu

SEQ ID NO: 1332320 - RNA, 19 nt, Artificial Sequence
  Description of Artificial Sequence: Synthetic oligonucleotide
ggccuuccacgcuugggug

SEQ ID NO: 1332321 - RNA, 19 nt, Artificial Sequence
  Description of Artificial Sequence: Synthetic oligonucleotide
uugaggcguuucacacggu

SEQ ID NO: 1332322 - RNA, 19 nt, Artificial Sequence
  Description of Artificial Sequence: Synthetic oligonucleotide
gcuuagacgcuucaugaau

SEQ ID NO: 1332323 - RNA, 19 nt, Artificial Sequence
  Description of Artificial Sequence: Synthetic oligonucleotide
auccguuguuugaaguaaa

SEQ ID NO: 1332324 - RNA, 19 nt, Artificial Sequence
  Description of Artificial Sequence: Synthetic oligonucleotide
ggauggcgucuacaucucc

SEQ ID NO: 1332325 - RNA, 19 nt, Artificial Sequence
  Description of Artificial Sequence: Synthetic oligonucleotide
ugucagggauccggcuucu

SEQ ID NO: 1332326 - RNA, 19 nt, Artificial Sequence
  Description of Artificial Sequence: Synthetic oligonucleotide
caaugguaccccacuuugu

SEQ ID NO: 1332327 - RNA, 19 nt, Artificial Sequence
  Description of Artificial Sequence: Synthetic oligonucleotide
ccaagcugucuacacucac

SEQ ID NO: 1332328 - RNA, 19 nt, Artificial Sequence
  Description of Artificial Sequence: Synthetic oligonucleotide
cacgagcaccccacaucug

SEQ ID NO: 1332329 - RNA, 19 nt, Artificial Sequence
  Description of Artificial Sequence: Synthetic oligonucleotide
ggggugucgaucacuguca

SEQ ID NO: 1332330 - RNA, 19 nt, Artificial Sequence
  Description of Artificial Sequence: Synthetic oligonucleotide
cuggcuaaggggcaugguu

SEQ ID NO: 1332331 - RNA, 19 nt, Artificial Sequence
  Description of Artificial Sequence: Synthetic oligonucleotide
guagucccgcccacccugc

SEQ ID NO: 1332332 - RNA, 19 nt, Artificial Sequence
  Description of Artificial Sequence: Synthetic oligonucleotide
cagcuuugguuguggaugu

SEQ ID NO: 1332333 - RNA, 19 nt, Artificial Sequence
  Description of Artificial Sequence: Synthetic oligonucleotide
cugugcauggaugguccca

SEQ ID NO: 1332334 - RNA, 19 nt, Artificial Sequence
  Description of Artificial Sequence: Synthetic oligonucleotide
gugcauggauggucccaac

SEQ ID NO: 1332335 - RNA, 19 nt, Artificial Sequence
  Description of Artificial Sequence: Synthetic oligonucleotide
gguccaagcugucuacacu

SEQ ID NO: 1332336 - RNA, 19 nt, Artificial Sequence
  Description of Artificial Sequence: Synthetic oligonucleotide
ggugacaaauggagacgac

SEQ ID NO: 1332337 - RNA, 19 nt, Artificial Sequence
  Description of Artificial Sequence: Synthetic oligonucleotide
uugcccucguugaggcguu

SEQ ID NO: 1332338 - RNA, 19 nt, Artificial Sequence
  Description of Artificial Sequence: Synthetic oligonucleotide
uucacacgguaggcuucga

SEQ ID NO: 1332339 - RNA, 19 nt, Artificial Sequence
  Description of Artificial Sequence: Synthetic oligonucleotide
acuucucguacuggucauu

SEQ ID NO: 1332340 - RNA, 19 nt, Artificial Sequence
  Description of Artificial Sequence: Synthetic oligonucleotide
gcccucccuuguuacuggg

SEQ ID NO: 1332341 - RNA, 19 nt, Artificial Sequence
  Description of Artificial Sequence: Synthetic oligonucleotide
gcgaguggccgguggcggg

SEQ ID NO: 1332342 - RNA, 19 nt, Artificial Sequence
  Description of Artificial Sequence: Synthetic oligonucleotide
agcgaacuguucggcuaca

SEQ ID NO: 1332343 - RNA, 19 nt, Artificial Sequence
  Description of Artificial Sequence: Synthetic oligonucleotide
ucccgaagguaggcaaauu

SEQ ID NO: 1332344 - RNA, 19 nt, Artificial Sequence
  Description of Artificial Sequence: Synthetic oligonucleotide
guugaccaccuugcuuaga

SEQ ID NO: 1332345 - RNA, 19 nt, Artificial Sequence
  Description of Artificial Sequence: Synthetic oligonucleotide
ggcuaaggggcaugguugu

SEQ ID NO: 1332346 - RNA, 19 nt, Artificial Sequence
  Description of Artificial Sequence: Synthetic oligonucleotide
gguaagcgugucagccuug

SEQ ID NO: 1332347 - RNA, 19 nt, Artificial Sequence
  Description of Artificial Sequence: Synthetic oligonucleotide
accccacuuugucuuccuu

SEQ ID NO: 1332348 - RNA, 19 nt, Artificial Sequence
  Description of Artificial Sequence: Synthetic oligonucleotide
gccuggcuaaggggcaugg

SEQ ID NO: 1332349 - RNA, 19 nt, Artificial Sequence
  Description of Artificial Sequence: Synthetic oligonucleotide
cuuccacgcuugggugggg

SEQ ID NO: 1332350 - RNA, 19 nt, Artificial Sequence
  Description of Artificial Sequence: Synthetic oligonucleotide
cgggauggcgucuacaucu

SEQ ID NO: 1332351 - RNA, 19 nt, Artificial Sequence
  Description of Artificial Sequence: Synthetic oligonucleotide
gacucgcgugucagggauc

SEQ ID NO: 1332352 - RNA, 19 nt, Artificial Sequence
  Description of Artificial Sequence: Synthetic oligonucleotide
cccucccuuguuacugggc

SEQ ID NO: 1332353 - RNA, 19 nt, Artificial Sequence
  Description of Artificial Sequence: Synthetic oligonucleotide
gcuggcaagcgaacuguuc

SEQ ID NO: 1332354 - RNA, 19 nt, Artificial Sequence
  Description of Artificial Sequence: Synthetic oligonucleotide
gcaagcgaacuguucggcu

SEQ ID NO: 1332355 - RNA, 19 nt, Artificial Sequence
  Description of Artificial Sequence: Synthetic oligonucleotide
ggcaagcuggcaagcgaac

SEQ ID NO: 1332356 - RNA, 19 nt, Artificial Sequence
  Description of Artificial Sequence: Synthetic oligonucleotide
ggcgggauggcgucuacau

SEQ ID NO: 1332357 - RNA, 19 nt, Artificial Sequence
  Description of Artificial Sequence: Synthetic oligonucleotide
gauccggcuucuuccuguu

SEQ ID NO: 1332358 - RNA, 19 nt, Artificial Sequence
  Description of Artificial Sequence: Synthetic oligonucleotide
cagcaguggacucgcgugu

SEQ ID NO: 1332359 - RNA, 19 nt, Artificial Sequence
  Description of Artificial Sequence: Synthetic oligonucleotide
cucgcgugucagggauccg

SEQ ID NO: 1332360 - RNA, 19 nt, Artificial Sequence
  Description of Artificial Sequence: Synthetic oligonucleotide
ccaggggccuaagcgagug

SEQ ID NO: 1332361 - RNA, 19 nt, Artificial Sequence
  Description of Artificial Sequence: Synthetic oligonucleotide
ggguacacaucaaugccau

SEQ ID NO: 1332362 - RNA, 19 nt, Artificial Sequence
  Description of Artificial Sequence: Synthetic oligonucleotide
cgcgugucagggauccggc

SEQ ID NO: 1332363 - RNA, 19 nt, Artificial Sequence
  Description of Artificial Sequence: Synthetic oligonucleotide
ggcggcacagaggcaagca

SEQ ID NO: 1332364 - RNA, 19 nt, Artificial Sequence
  Description of Artificial Sequence: Synthetic oligonucleotide
ccacgagcaccccacaucu

SEQ ID NO: 1332365 - RNA, 19 nt, Artificial Sequence
  Description of Artificial Sequence: Synthetic oligonucleotide
gcgggauggcgucuacauc

SEQ ID NO: 1332366 - RNA, 19 nt, Artificial Sequence
  Description of Artificial Sequence: Synthetic oligonucleotide
ggggcgggugacaaaugga

SEQ ID NO: 1332367 - RNA, 19 nt, Artificial Sequence
  Description of Artificial Sequence: Synthetic oligonucleotide
gcaagcuagcccagggucu

SEQ ID NO: 1332368 - RNA, 19 nt, Artificial Sequence
  Description of Artificial Sequence: Synthetic oligonucleotide
gggauggcgucuacaucuc

SEQ ID NO: 1332369 - RNA, 19 nt, Artificial Sequence
  Description of Artificial Sequence: Synthetic oligonucleotide
gcgaugacggggacaaugu

SEQ ID NO: 1332370 - RNA, 19 nt, Artificial Sequence
  Description of Artificial Sequence: Synthetic oligonucleotide
gcaagcuggcaagcgaacu

SEQ ID NO: 1332371 - RNA, 19 nt, Artificial Sequence
  Description of Artificial Sequence: Synthetic oligonucleotide
caaccccguuggccauggc

SEQ ID NO: 1332372 - RNA, 19 nt, Artificial Sequence
  Description of Artificial Sequence: Synthetic oligonucleotide
ggcucguugaggggccuuc

SEQ ID NO: 1332373 - RNA, 19 nt, Artificial Sequence
  Description of Artificial Sequence: Synthetic oligonucleotide
accgcacuucuaggcugca

SEQ ID NO: 1332374 - RNA, 19 nt, Artificial Sequence
  Description of Artificial Sequence: Synthetic oligonucleotide
uggcgcuguugcccucguu

SEQ ID NO: 1332375 - RNA, 19 nt, Artificial Sequence
  Description of Artificial Sequence: Synthetic oligonucleotide
cccucguugaggcguuuca

SEQ ID NO: 1332376 - RNA, 19 nt, Artificial Sequence
  Description of Artificial Sequence: Synthetic oligonucleotide
aggggcgggauggcgucua

SEQ ID NO: 1332377 - RNA, 19 nt, Artificial Sequence
  Description of Artificial Sequence: Synthetic oligonucleotide
cgguaggcuucgaagugga

SEQ ID NO: 1332378 - RNA, 19 nt, Artificial Sequence
  Description of Artificial Sequence: Synthetic oligonucleotide
gcguuucacacgguaggcu

SEQ ID NO: 1332379 - RNA, 19 nt, Artificial Sequence
  Description of Artificial Sequence: Synthetic oligonucleotide
ccuaagcgaguggccggug

SEQ ID NO: 1332380 - RNA, 19 nt, Artificial Sequence
  Description of Artificial Sequence: Synthetic oligonucleotide
cccaccgcacuucuaggcu

SEQ ID NO: 1332381 - RNA, 19 nt, Artificial Sequence
  Description of Artificial Sequence: Synthetic oligonucleotide
uggcgaugacggggacaau

SEQ ID NO: 1332382 - RNA, 19 nt, Artificial Sequence
  Description of Artificial Sequence: Synthetic oligonucleotide
ggggcgggauggcgucuac

SEQ ID NO: 1332383 - RNA, 19 nt, Artificial Sequence
  Description of Artificial Sequence: Synthetic oligonucleotide
gcccucguugaggcguuuc

SEQ ID NO: 1332384 - RNA, 19 nt, Artificial Sequence
  Description of Artificial Sequence: Synthetic oligonucleotide
ugcccucguugaggcguuu

SEQ ID NO: 1332385 - RNA, 19 nt, Artificial Sequence
  Description of Artificial Sequence: Synthetic oligonucleotide
gccuaagcgaguggccggu

SEQ ID NO: 1332386 - RNA, 19 nt, Artificial Sequence
  Description of Artificial Sequence: Synthetic oligonucleotide
cccguuggccauggcgcug

SEQ ID NO: 1332387 - RNA, 19 nt, Artificial Sequence
  Description of Artificial Sequence: Synthetic oligonucleotide
ccccaagcugguccaagcu

SEQ ID NO: 1332388 - RNA, 19 nt, Artificial Sequence
  Description of Artificial Sequence: Synthetic oligonucleotide
ccgaguggaacagccuggu

SEQ ID NO: 1332389 - RNA, 19 nt, Artificial Sequence
  Description of Artificial Sequence: Synthetic oligonucleotide
ccaccuugcuuagacgcuu

SEQ ID NO: 1332390 - RNA, 19 nt, Artificial Sequence
  Description of Artificial Sequence: Synthetic oligonucleotide
ccguuggccauggcgcugu

SEQ ID NO: 1332391 - RNA, 19 nt, Artificial Sequence
  Description of Artificial Sequence: Synthetic oligonucleotide
ccgcacuucuaggcugcaa

SEQ ID NO: 1332392 - RNA, 19 nt, Artificial Sequence
  Description of Artificial Sequence: Synthetic oligonucleotide
cgaugacggggacaauguu

SEQ ID NO: 1332393 - RNA, 19 nt, Artificial Sequence
  Description of Artificial Sequence: Synthetic oligonucleotide
aaaccagaacuccagggac

SEQ ID NO: 1332394 - RNA, 19 nt, Artificial Sequence
  Description of Artificial Sequence: Synthetic oligonucleotide
aggugauuaaaccagaacu

SEQ ID NO: 1332395 - RNA, 19 nt, Artificial Sequence
  Description of Artificial Sequence: Synthetic oligonucleotide
gagagugugacucuuguag

SEQ ID NO: 1332396 - RNA, 19 nt, Artificial Sequence
  Description of Artificial Sequence: Synthetic oligonucleotide
uuaaaccagaacuccaggg

SEQ ID NO: 1332397 - RNA, 19 nt, Artificial Sequence
  Description of Artificial Sequence: Synthetic oligonucleotide
uugggaaggacucuuaggc

SEQ ID NO: 1332398 - RNA, 19 nt, Artificial Sequence
  Description of Artificial Sequence: Synthetic oligonucleotide
uuuguuguagagaccaugc

SEQ ID NO: 1332399 - RNA, 19 nt, Artificial Sequence
  Description of Artificial Sequence: Synthetic oligonucleotide
ugugcuacuagcuggaaca

SEQ ID NO: 1332400 - RNA, 19 nt, Artificial Sequence
  Description of Artificial Sequence: Synthetic oligonucleotide
ucgauguuagaccugggag

SEQ ID NO: 1332401 - RNA, 19 nt, Artificial Sequence
  Description of Artificial Sequence: Synthetic oligonucleotide
aauacugagcacggggagc

SEQ ID NO: 1332402 - RNA, 19 nt, Artificial Sequence
  Description of Artificial Sequence: Synthetic oligonucleotide
aagaccuugguggaugggc

SEQ ID NO: 1332403 - RNA, 19 nt, Artificial Sequence
  Description of Artificial Sequence: Synthetic oligonucleotide
aaggcguuaaagcgcauag

SEQ ID NO: 1332404 - RNA, 19 nt, Artificial Sequence
  Description of Artificial Sequence: Synthetic oligonucleotide
ucgacuacgccucagcuca

SEQ ID NO: 1332405 - RNA, 19 nt, Artificial Sequence
  Description of Artificial Sequence: Synthetic oligonucleotide
ugaaacagcaagucaaggu

SEQ ID NO: 1332406 - RNA, 19 nt, Artificial Sequence
  Description of Artificial Sequence: Synthetic oligonucleotide
gacucuuaggcucugaguc

SEQ ID NO: 1332407 - RNA, 19 nt, Artificial Sequence
  Description of Artificial Sequence: Synthetic oligonucleotide
ugcugaaacagcaagucaa

SEQ ID NO: 1332408 - RNA, 19 nt, Artificial Sequence
  Description of Artificial Sequence: Synthetic oligonucleotide
guagagaccaugcaagacc

SEQ ID NO: 1332409 - RNA, 19 nt, Artificial Sequence
  Description of Artificial Sequence: Synthetic oligonucleotide
agguguccccacuugaugc

SEQ ID NO: 1332410 - RNA, 19 nt, Artificial Sequence
  Description of Artificial Sequence: Synthetic oligonucleotide
ucuacuacaccuucccuug

SEQ ID NO: 1332411 - RNA, 19 nt, Artificial Sequence
  Description of Artificial Sequence: Synthetic oligonucleotide
aggaguacugaauacugag

SEQ ID NO: 1332412 - RNA, 19 nt, Artificial Sequence
  Description of Artificial Sequence: Synthetic oligonucleotide
uguuguagagaccaugcaa

SEQ ID NO: 1332413 - RNA, 19 nt, Artificial Sequence
  Description of Artificial Sequence: Synthetic oligonucleotide
gaguacugaauacugagca

SEQ ID NO: 1332414 - RNA, 19 nt, Artificial Sequence
  Description of Artificial Sequence: Synthetic oligonucleotide
ugauuaaaccagaacucca

SEQ ID NO: 1332415 - RNA, 19 nt, Artificial Sequence
  Description of Artificial Sequence: Synthetic oligonucleotide
aguacugaauacugagcac

SEQ ID NO: 1332416 - RNA, 19 nt, Artificial Sequence
  Description of Artificial Sequence: Synthetic oligonucleotide
gauuaaaccagaacuccag

SEQ ID NO: 1332417 - RNA, 19 nt, Artificial Sequence
  Description of Artificial Sequence: Synthetic oligonucleotide
ugaauacugagcacgggga

SEQ ID NO: 1332418 - RNA, 19 nt, Artificial Sequence
  Description of Artificial Sequence: Synthetic oligonucleotide
guacugaauacugagcacg

SEQ ID NO: 1332419 - RNA, 19 nt, Artificial Sequence
  Description of Artificial Sequence: Synthetic oligonucleotide
ggaugaaggcguuaaagcg

SEQ ID NO: 1332420 - RNA, 19 nt, Artificial Sequence
  Description of Artificial Sequence: Synthetic oligonucleotide
uacugaauacugagcacgg

SEQ ID NO: 1332421 - RNA, 19 nt, Artificial Sequence
  Description of Artificial Sequence: Synthetic oligonucleotide
uuucgggaaccaaagaggu

SEQ ID NO: 1332422 - RNA, 19 nt, Artificial Sequence
  Description of Artificial Sequence: Synthetic oligonucleotide
gauaucuccuuuguggaag

SEQ ID NO: 1332423 - RNA, 19 nt, Artificial Sequence
  Description of Artificial Sequence: Synthetic oligonucleotide
auguugagugugcagacag

SEQ ID NO: 1332424 - RNA, 19 nt, Artificial Sequence
  Description of Artificial Sequence: Synthetic oligonucleotide
aagccuaagggcuugggaa

SEQ ID NO: 1332425 - RNA, 19 nt, Artificial Sequence
  Description of Artificial Sequence: Synthetic oligonucleotide
agagugugacucuuguagg

SEQ ID NO: 1332426 - RNA, 19 nt, Artificial Sequence
  Description of Artificial Sequence: Synthetic oligonucleotide
gaugaaggcguuaaagcgc

SEQ ID NO: 1332427 - RNA, 19 nt, Artificial Sequence
  Description of Artificial Sequence: Synthetic oligonucleotide
ugaacuuggaguugggguc

SEQ ID NO: 1332428 - RNA, 19 nt, Artificial Sequence
  Description of Artificial Sequence: Synthetic oligonucleotide
aacuccagggaccggaugu

SEQ ID NO: 1332429 - RNA, 19 nt, Artificial Sequence
  Description of Artificial Sequence: Synthetic oligonucleotide
auaucuccuuuguggaagc

SEQ ID NO: 1332430 - RNA, 19 nt, Artificial Sequence
  Description of Artificial Sequence: Synthetic oligonucleotide
ucgcauggagguuuggagg

SEQ ID NO: 1332431 - RNA, 19 nt, Artificial Sequence
  Description of Artificial Sequence: Synthetic oligonucleotide
aaagcgcauagugugacug

SEQ ID NO: 1332432 - RNA, 19 nt, Artificial Sequence
  Description of Artificial Sequence: Synthetic oligonucleotide
ccaugcaagaccuuggugg

SEQ ID NO: 1332433 - RNA, 19 nt, Artificial Sequence
  Description of Artificial Sequence: Synthetic oligonucleotide
uagagaccaugcaagaccu

SEQ ID NO: 1332434 - RNA, 19 nt, Artificial Sequence
  Description of Artificial Sequence: Synthetic oligonucleotide
gaguucuggaaacuggcug

SEQ ID NO: 1332435 - RNA, 19 nt, Artificial Sequence
  Description of Artificial Sequence: Synthetic oligonucleotide
ucgggaaccaaagaggugu

SEQ ID NO: 1332436 - RNA, 19 nt, Artificial Sequence
  Description of Artificial Sequence: Synthetic oligonucleotide
ugcgagggaaucuggagcc

SEQ ID NO: 1332437 - RNA, 19 nt, Artificial Sequence
  Description of Artificial Sequence: Synthetic oligonucleotide
gaauacugagcacggggag

SEQ ID NO: 1332438 - RNA, 19 nt, Artificial Sequence
  Description of Artificial Sequence: Synthetic oligonucleotide
auacaggugauuaaaccag

SEQ ID NO: 1332439 - RNA, 19 nt, Artificial Sequence
  Description of Artificial Sequence: Synthetic oligonucleotide
aguucuggaaacuggcuga

SEQ ID NO: 1332440 - RNA, 19 nt, Artificial Sequence
  Description of Artificial Sequence: Synthetic oligonucleotide
ccuuucuuggcuaagggcc

SEQ ID NO: 1332441 - RNA, 19 nt, Artificial Sequence
  Description of Artificial Sequence: Synthetic oligonucleotide
ucauuuuccguuggugggg

SEQ ID NO: 1332442 - RNA, 19 nt, Artificial Sequence
  Description of Artificial Sequence: Synthetic oligonucleotide
guggcauagagccugcacc

SEQ ID NO: 1332443 - RNA, 19 nt, Artificial Sequence
  Description of Artificial Sequence: Synthetic oligonucleotide
ugcacaaggccucaguuuu

SEQ ID NO: 1332444 - RNA, 19 nt, Artificial Sequence
  Description of Artificial Sequence: Synthetic oligonucleotide
agagguaccaagccagugu

SEQ ID NO: 1332445 - RNA, 19 nt, Artificial Sequence
  Description of Artificial Sequence: Synthetic oligonucleotide
acugcaauguugagugugc

SEQ ID NO: 1332446 - RNA, 19 nt, Artificial Sequence
  Description of Artificial Sequence: Synthetic oligonucleotide
cuuuguggaagcugaguug

SEQ ID NO: 1332447 - RNA, 19 nt, Artificial Sequence
  Description of Artificial Sequence: Synthetic oligonucleotide
gaaccaaagaggugucccc

SEQ ID NO: 1332448 - RNA, 19 nt, Artificial Sequence
  Description of Artificial Sequence: Synthetic oligonucleotide
ggcguuaaagcgcauagug

SEQ ID NO: 1332449 - RNA, 19 nt, Artificial Sequence
  Description of Artificial Sequence: Synthetic oligonucleotide
ugguagugggucuggauga

SEQ ID NO: 1332450 - RNA, 19 nt, Artificial Sequence
  Description of Artificial Sequence: Synthetic oligonucleotide
uacaggugauuaaaccaga

SEQ ID NO: 1332451 - RNA, 19 nt, Artificial Sequence
  Description of Artificial Sequence: Synthetic oligonucleotide
agagccugcaccucgcaug

SEQ ID NO: 1332452 - RNA, 19 nt, Artificial Sequence
  Description of Artificial Sequence: Synthetic oligonucleotide
aagagguguccccacuuga

SEQ ID NO: 1332453 - RNA, 19 nt, Artificial Sequence
  Description of Artificial Sequence: Synthetic oligonucleotide
uuaaagcgcauagugugac

SEQ ID NO: 1332454 - RNA, 19 nt, Artificial Sequence
  Description of Artificial Sequence: Synthetic oligonucleotide
ggagguuuggaggacaggg

SEQ ID NO: 1332455 - RNA, 19 nt, Artificial Sequence
  Description of Artificial Sequence: Synthetic oligonucleotide
cuggccaacugcaauguug

SEQ ID NO: 1332456 - RNA, 19 nt, Artificial Sequence
  Description of Artificial Sequence: Synthetic oligonucleotide
uuguuguagagaccaugca

SEQ ID NO: 1332457 - RNA, 19 nt, Artificial Sequence
  Description of Artificial Sequence: Synthetic oligonucleotide
cucgcauggagguuuggag

SEQ ID NO: 1332458 - RNA, 19 nt, Artificial Sequence
  Description of Artificial Sequence: Synthetic oligonucleotide
ucaagguugaagggcagca

SEQ ID NO: 1332459 - RNA, 19 nt, Artificial Sequence
  Description of Artificial Sequence: Synthetic oligonucleotide
acugcgagggaaucuggag

SEQ ID NO: 1332460 - RNA, 19 nt, Artificial Sequence
  Description of Artificial Sequence: Synthetic oligonucleotide
ugcaugagcugguaccacc

SEQ ID NO: 1332461 - RNA, 19 nt, Artificial Sequence
  Description of Artificial Sequence: Synthetic oligonucleotide
gaugggccuaacugcgugg

SEQ ID NO: 1332462 - RNA, 19 nt, Artificial Sequence
  Description of Artificial Sequence: Synthetic oligonucleotide
aucgauguuagaccuggga

SEQ ID NO: 1332463 - RNA, 19 nt, Artificial Sequence
  Description of Artificial Sequence: Synthetic oligonucleotide
ugccaucgauguuagaccu

SEQ ID NO: 1332464 - RNA, 19 nt, Artificial Sequence
  Description of Artificial Sequence: Synthetic oligonucleotide
uguuagaccugggagcucu

SEQ ID NO: 1332465 - RNA, 19 nt, Artificial Sequence
  Description of Artificial Sequence: Synthetic oligonucleotide
cugcguggaagccucaacc

SEQ ID NO: 1332466 - RNA, 19 nt, Artificial Sequence
  Description of Artificial Sequence: Synthetic oligonucleotide
gugagcggcacgcaggaag

SEQ ID NO: 1332467 - RNA, 19 nt, Artificial Sequence
  Description of Artificial Sequence: Synthetic oligonucleotide
ugugacucuuguagguucu

SEQ ID NO: 1332468 - RNA, 19 nt, Artificial Sequence
  Description of Artificial Sequence: Synthetic oligonucleotide
ugagcggcacgcaggaagc

SEQ ID NO: 1332469 - RNA, 19 nt, Artificial Sequence
  Description of Artificial Sequence: Synthetic oligonucleotide
agccuaagggcuugggaag

SEQ ID NO: 1332470 - RNA, 19 nt, Artificial Sequence
  Description of Artificial Sequence: Synthetic oligonucleotide
caauguugagugugcagac

SEQ ID NO: 1332471 - RNA, 19 nt, Artificial Sequence
  Description of Artificial Sequence: Synthetic oligonucleotide
uggcauagagccugcaccu

SEQ ID NO: 1332472 - RNA, 19 nt, Artificial Sequence
  Description of Artificial Sequence: Synthetic oligonucleotide
agggauacauggccccagc

SEQ ID NO: 1332473 - RNA, 19 nt, Artificial Sequence
  Description of Artificial Sequence: Synthetic oligonucleotide
gugccaucgauguuagacc

SEQ ID NO: 1332474 - RNA, 19 nt, Artificial Sequence
  Description of Artificial Sequence: Synthetic oligonucleotide
aauguugagugugcagaca

SEQ ID NO: 1332475 - RNA, 19 nt, Artificial Sequence
  Description of Artificial Sequence: Synthetic oligonucleotide
uguagagaccaugcaagac

SEQ ID NO: 1332476 - RNA, 19 nt, Artificial Sequence
  Description of Artificial Sequence: Synthetic oligonucleotide
augguuauacaggugauua

SEQ ID NO: 1332477 - RNA, 19 nt, Artificial Sequence
  Description of Artificial Sequence: Synthetic oligonucleotide
cuuuguuguagagaccaug

SEQ ID NO: 1332478 - RNA, 19 nt, Artificial Sequence
  Description of Artificial Sequence: Synthetic oligonucleotide
agaccuugguggaugggcc

SEQ ID NO: 1332479 - RNA, 19 nt, Artificial Sequence
  Description of Artificial Sequence: Synthetic oligonucleotide
gagguaccaagccaguguc

SEQ ID NO: 1332480 - RNA, 19 nt, Artificial Sequence
  Description of Artificial Sequence: Synthetic oligonucleotide
ucccgcugagcuuuucggg

SEQ ID NO: 1332481 - RNA, 19 nt, Artificial Sequence
  Description of Artificial Sequence: Synthetic oligonucleotide
ucuuaggcucugagucucg

SEQ ID NO: 1332482 - RNA, 19 nt, Artificial Sequence
  Description of Artificial Sequence: Synthetic oligonucleotide
ugcaagaccuugguggaug

SEQ ID NO: 1332483 - RNA, 19 nt, Artificial Sequence
  Description of Artificial Sequence: Synthetic oligonucleotide
gggucagugucacauaggc

SEQ ID NO: 1332484 - RNA, 19 nt, Artificial Sequence
  Description of Artificial Sequence: Synthetic oligonucleotide
cacgcaggaagccccaggg

SEQ ID NO: 1332485 - RNA, 19 nt, Artificial Sequence
  Description of Artificial Sequence: Synthetic oligonucleotide
ucucgacuacgccucagcu

SEQ ID NO: 1332486 - RNA, 19 nt, Artificial Sequence
  Description of Artificial Sequence: Synthetic oligonucleotide
gaggaggaguacugaauac

SEQ ID NO: 1332487 - RNA, 19 nt, Artificial Sequence
  Description of Artificial Sequence: Synthetic oligonucleotide
cugaaacagcaagucaagg

SEQ ID NO: 1332488 - RNA, 19 nt, Artificial Sequence
  Description of Artificial Sequence: Synthetic oligonucleotide
ugacuggugaguucuggaa

SEQ ID NO: 1332489 - RNA, 19 nt, Artificial Sequence
  Description of Artificial Sequence: Synthetic oligonucleotide
gcuacuagcuggaacacag

SEQ ID NO: 1332490 - RNA, 19 nt, Artificial Sequence
  Description of Artificial Sequence: Synthetic oligonucleotide
caggugauuaaaccagaac

SEQ ID NO: 1332491 - RNA, 19 nt, Artificial Sequence
  Description of Artificial Sequence: Synthetic oligonucleotide
accagaacuccagggaccg

SEQ ID NO: 1332492 - RNA, 19 nt, Artificial Sequence
  Description of Artificial Sequence: Synthetic oligonucleotide
caucgucugugcuacuagc

SEQ ID NO: 1332493 - RNA, 19 nt, Artificial Sequence
  Description of Artificial Sequence: Synthetic oligonucleotide
acuacaccuucccuuggug

SEQ ID NO: 1332494 - RNA, 19 nt, Artificial Sequence
  Description of Artificial Sequence: Synthetic oligonucleotide
ggugauuaaaccagaacuc

SEQ ID NO: 1332495 - RNA, 19 nt, Artificial Sequence
  Description of Artificial Sequence: Synthetic oligonucleotide
agggaccggauguugagca

SEQ ID NO: 1332496 - RNA, 19 nt, Artificial Sequence
  Description of Artificial Sequence: Synthetic oligonucleotide
agcuggaacacagacuugu

SEQ ID NO: 1332497 - RNA, 19 nt, Artificial Sequence
  Description of Artificial Sequence: Synthetic oligonucleotide
uggggcaacagguccuucc

SEQ ID NO: 1332498 - RNA, 19 nt, Artificial Sequence
  Description of Artificial Sequence: Synthetic oligonucleotide
cguuaaagcgcauagugug

SEQ ID NO: 1332499 - RNA, 19 nt, Artificial Sequence
  Description of Artificial Sequence: Synthetic oligonucleotide
guggaugggccuaacugcg

SEQ ID NO: 1332500 - RNA, 19 nt, Artificial Sequence
  Description of Artificial Sequence: Synthetic oligonucleotide
ugggaaggacucuuaggcu

SEQ ID NO: 1332501 - RNA, 19 nt, Artificial Sequence
  Description of Artificial Sequence: Synthetic oligonucleotide
uaauggcugcagcagcaac

SEQ ID NO: 1332502 - RNA, 19 nt, Artificial Sequence
  Description of Artificial Sequence: Synthetic oligonucleotide
agccaaucugaaggcagcc

SEQ ID NO: 1332503 - RNA, 19 nt, Artificial Sequence
  Description of Artificial Sequence: Synthetic oligonucleotide
acucuuaggcucugagucu

SEQ ID NO: 1332504 - RNA, 19 nt, Artificial Sequence
  Description of Artificial Sequence: Synthetic oligonucleotide
ucgggcucuggccaacugc

SEQ ID NO: 1332505 - RNA, 19 nt, Artificial Sequence
  Description of Artificial Sequence: Synthetic oligonucleotide
ggugaguucuggaaacugg

SEQ ID NO: 1332506 - RNA, 19 nt, Artificial Sequence
  Description of Artificial Sequence: Synthetic oligonucleotide
agcuuuucgggaaccaaag

SEQ ID NO: 1332507 - RNA, 19 nt, Artificial Sequence
  Description of Artificial Sequence: Synthetic oligonucleotide
uucgggaaccaaagaggug

SEQ ID NO: 1332508 - RNA, 19 nt, Artificial Sequence
  Description of Artificial Sequence: Synthetic oligonucleotide
cauagagccugcaccucgc

SEQ ID NO: 1332509 - RNA, 19 nt, Artificial Sequence
  Description of Artificial Sequence: Synthetic oligonucleotide
agcaggccgaggaugaagg

SEQ ID NO: 1332510 - RNA, 19 nt, Artificial Sequence
  Description of Artificial Sequence: Synthetic oligonucleotide
ugguuauacaggugauuaa

SEQ ID NO: 1332511 - RNA, 19 nt, Artificial Sequence
  Description of Artificial Sequence: Synthetic oligonucleotide
gagcacggggagcaggugc

SEQ ID NO: 1332512 - RNA, 19 nt, Artificial Sequence
  Description of Artificial Sequence: Synthetic oligonucleotide
cuagcuggaacacagacuu

SEQ ID NO: 1332513 - RNA, 19 nt, Artificial Sequence
  Description of Artificial Sequence: Synthetic oligonucleotide
uaugagggucccugaggcc

SEQ ID NO: 1332514 - RNA, 19 nt, Artificial Sequence
  Description of Artificial Sequence: Synthetic oligonucleotide
uccagggaccggauguuga

SEQ ID NO: 1332515 - RNA, 19 nt, Artificial Sequence
  Description of Artificial Sequence: Synthetic oligonucleotide
aggccucaguuuuggcugc

SEQ ID NO: 1332516 - RNA, 19 nt, Artificial Sequence
  Description of Artificial Sequence: Synthetic oligonucleotide
uccccaguuggccacccug

SEQ ID NO: 1332517 - RNA, 19 nt, Artificial Sequence
  Description of Artificial Sequence: Synthetic oligonucleotide
cugcuaugcucugagcucc

SEQ ID NO: 1332518 - RNA, 19 nt, Artificial Sequence
  Description of Artificial Sequence: Synthetic oligonucleotide
uggcuaagggccuccucag

SEQ ID NO: 1332519 - RNA, 19 nt, Artificial Sequence
  Description of Artificial Sequence: Synthetic oligonucleotide
agugucacauaggccagag

SEQ ID NO: 1332520 - RNA, 19 nt, Artificial Sequence
  Description of Artificial Sequence: Synthetic oligonucleotide
gcuagcacagagucagggg

SEQ ID NO: 1332521 - RNA, 19 nt, Artificial Sequence
  Description of Artificial Sequence: Synthetic oligonucleotide
gauguuagaccugggagcu

SEQ ID NO: 1332522 - RNA, 19 nt, Artificial Sequence
  Description of Artificial Sequence: Synthetic oligonucleotide
cuggcugacuuuguuguag

SEQ ID NO: 1332523 - RNA, 19 nt, Artificial Sequence
  Description of Artificial Sequence: Synthetic oligonucleotide
ugacucuuguagguucucc

SEQ ID NO: 1332524 - RNA, 19 nt, Artificial Sequence
  Description of Artificial Sequence: Synthetic oligonucleotide
uggugaguucuggaaacug

SEQ ID NO: 1332525 - RNA, 19 nt, Artificial Sequence
  Description of Artificial Sequence: Synthetic oligonucleotide
ggaacacagacuuguccag

SEQ ID NO: 1332526 - RNA, 19 nt, Artificial Sequence
  Description of Artificial Sequence: Synthetic oligonucleotide
acugccuaccccuuucuuu

SEQ ID NO: 1332527 - RNA, 19 nt, Artificial Sequence
  Description of Artificial Sequence: Synthetic oligonucleotide
gcauagagccugcaccucg

SEQ ID NO: 1332528 - RNA, 19 nt, Artificial Sequence
  Description of Artificial Sequence: Synthetic oligonucleotide
uaaagcgcauagugugacu

SEQ ID NO: 1332529 - RNA, 19 nt, Artificial Sequence
  Description of Artificial Sequence: Synthetic oligonucleotide
agaccaugcaagaccuugg

SEQ ID NO: 1332530 - RNA, 19 nt, Artificial Sequence
  Description of Artificial Sequence: Synthetic oligonucleotide
ggaaccaaagagguguccc

SEQ ID NO: 1332531 - RNA, 19 nt, Artificial Sequence
  Description of Artificial Sequence: Synthetic oligonucleotide
ugcucugagcuccccacaa

SEQ ID NO: 1332532 - RNA, 19 nt, Artificial Sequence
  Description of Artificial Sequence: Synthetic oligonucleotide
ggacacacgcagcaguucc

SEQ ID NO: 1332533 - RNA, 19 nt, Artificial Sequence
  Description of Artificial Sequence: Synthetic oligonucleotide
caugcaagaccuuggugga

SEQ ID NO: 1332534 - RNA, 19 nt, Artificial Sequence
  Description of Artificial Sequence: Synthetic oligonucleotide
cacugugugagcggcacgc

SEQ ID NO: 1332535 - RNA, 19 nt, Artificial Sequence
  Description of Artificial Sequence: Synthetic oligonucleotide
cuacugcgagggaaucugg

SEQ ID NO: 1332536 - RNA, 19 nt, Artificial Sequence
  Description of Artificial Sequence: Synthetic oligonucleotide
gcacccacacccuucaccc

SEQ ID NO: 1332537 - RNA, 19 nt, Artificial Sequence
  Description of Artificial Sequence: Synthetic oligonucleotide
agguccuucccucucucga

SEQ ID NO: 1332538 - RNA, 19 nt, Artificial Sequence
  Description of Artificial Sequence: Synthetic oligonucleotide
gugugacucuuguagguuc

SEQ ID NO: 1332539 - RNA, 19 nt, Artificial Sequence
  Description of Artificial Sequence: Synthetic oligonucleotide
agcggcacgcaggaagccc

SEQ ID NO: 1332540 - RNA, 19 nt, Artificial Sequence
  Description of Artificial Sequence: Synthetic oligonucleotide
acuagcuggaacacagacu

SEQ ID NO: 1332541 - RNA, 19 nt, Artificial Sequence
  Description of Artificial Sequence: Synthetic oligonucleotide
ugggcucgggcucccgacg

SEQ ID NO: 1332542 - RNA, 19 nt, Artificial Sequence
  Description of Artificial Sequence: Synthetic oligonucleotide
guuaaagcgcauaguguga

SEQ ID NO: 1332543 - RNA, 19 nt, Artificial Sequence
  Description of Artificial Sequence: Synthetic oligonucleotide
cgauguuagaccugggagc

SEQ ID NO: 1332544 - RNA, 19 nt, Artificial Sequence
  Description of Artificial Sequence: Synthetic oligonucleotide
cucgacuacgccucagcuc

SEQ ID NO: 1332545 - RNA, 19 nt, Artificial Sequence
  Description of Artificial Sequence: Synthetic oligonucleotide
cucucgacuacgccucagc

SEQ ID NO: 1332546 - RNA, 19 nt, Artificial Sequence
  Description of Artificial Sequence: Synthetic oligonucleotide
cugugcuacuagcuggaac

SEQ ID NO: 1332547 - RNA, 19 nt, Artificial Sequence
  Description of Artificial Sequence: Synthetic oligonucleotide
cuucccucucucgacuacg

SEQ ID NO: 1332548 - RNA, 19 nt, Artificial Sequence
  Description of Artificial Sequence: Synthetic oligonucleotide
gguuauacaggugauuaaa

SEQ ID NO: 1332549 - RNA, 19 nt, Artificial Sequence
  Description of Artificial Sequence: Synthetic oligonucleotide
cauuuuccguugguggggc

SEQ ID NO: 1332550 - RNA, 19 nt, Artificial Sequence
  Description of Artificial Sequence: Synthetic oligonucleotide
cacauaggccagagguacc

SEQ ID NO: 1332551 - RNA, 19 nt, Artificial Sequence
  Description of Artificial Sequence: Synthetic oligonucleotide
ccggauguugagcaggccg

SEQ ID NO: 1332552 - RNA, 19 nt, Artificial Sequence
  Description of Artificial Sequence: Synthetic oligonucleotide
gcaauguugagugugcaga

SEQ ID NO: 1332553 - RNA, 19 nt, Artificial Sequence
  Description of Artificial Sequence: Synthetic oligonucleotide
cuacuacaccuucccuugg

SEQ ID NO: 1332554 - RNA, 19 nt, Artificial Sequence
  Description of Artificial Sequence: Synthetic oligonucleotide
acuacgccucagcucagcu

SEQ ID NO: 1332555 - RNA, 19 nt, Artificial Sequence
  Description of Artificial Sequence: Synthetic oligonucleotide
ggaaucuggagcccucagc

SEQ ID NO: 1332556 - RNA, 19 nt, Artificial Sequence
  Description of Artificial Sequence: Synthetic oligonucleotide
cuacagcgcagccagucuc

SEQ ID NO: 1332557 - RNA, 19 nt, Artificial Sequence
  Description of Artificial Sequence: Synthetic oligonucleotide
uccuuuguggaagcugagu

SEQ ID NO: 1332558 - RNA, 19 nt, Artificial Sequence
  Description of Artificial Sequence: Synthetic oligonucleotide
gcggcuacagcgcagccag

SEQ ID NO: 1332559 - RNA, 19 nt, Artificial Sequence
  Description of Artificial Sequence: Synthetic oligonucleotide
ugguggggcaacagguccu

SEQ ID NO: 1332560 - RNA, 19 nt, Artificial Sequence
  Description of Artificial Sequence: Synthetic oligonucleotide
uuuuccguugguggggcaa

SEQ ID NO: 1332561 - RNA, 19 nt, Artificial Sequence
  Description of Artificial Sequence: Synthetic oligonucleotide
cucggguccaccugcuaug

SEQ ID NO: 1332562 - RNA, 19 nt, Artificial Sequence
  Description of Artificial Sequence: Synthetic oligonucleotide
gcucagcuagcacagaguc

SEQ ID NO: 1332563 - RNA, 19 nt, Artificial Sequence
  Description of Artificial Sequence: Synthetic oligonucleotide
ggaguacugaauacugagc

SEQ ID NO: 1332564 - RNA, 19 nt, Artificial Sequence
  Description of Artificial Sequence: Synthetic oligonucleotide
ggauacauggccccagcuc

SEQ ID NO: 1332565 - RNA, 19 nt, Artificial Sequence
  Description of Artificial Sequence: Synthetic oligonucleotide
ggugcugaaacagcaaguc

SEQ ID NO: 1332566 - RNA, 19 nt, Artificial Sequence
  Description of Artificial Sequence: Synthetic oligonucleotide
acacugugugagcggcacg

SEQ ID NO: 1332567 - RNA, 19 nt, Artificial Sequence
  Description of Artificial Sequence: Synthetic oligonucleotide
gagugugacucuuguaggu

SEQ ID NO: 1332568 - RNA, 19 nt, Artificial Sequence
  Description of Artificial Sequence: Synthetic oligonucleotide
ccagaugguggcauagagc

SEQ ID NO: 1332569 - RNA, 19 nt, Artificial Sequence
  Description of Artificial Sequence: Synthetic oligonucleotide
cugugugagcggcacgcag

SEQ ID NO: 1332570 - RNA, 19 nt, Artificial Sequence
  Description of Artificial Sequence: Synthetic oligonucleotide
cucgggguauaugaggguc

SEQ ID NO: 1332571 - RNA, 19 nt, Artificial Sequence
  Description of Artificial Sequence: Synthetic oligonucleotide
ggccuaacugcguggaagc

SEQ ID NO: 1332572 - RNA, 19 nt, Artificial Sequence
  Description of Artificial Sequence: Synthetic oligonucleotide
uucacccgcuccccaguug

SEQ ID NO: 1332573 - RNA, 19 nt, Artificial Sequence
  Description of Artificial Sequence: Synthetic oligonucleotide
caagguugaagggcagcag

SEQ ID NO: 1332574 - RNA, 19 nt, Artificial Sequence
  Description of Artificial Sequence: Synthetic oligonucleotide
cuuccagguggugaacuug

SEQ ID NO: 1332575 - RNA, 19 nt, Artificial Sequence
  Description of Artificial Sequence: Synthetic oligonucleotide
ugcuaugcucugagcuccc

SEQ ID NO: 1332576 - RNA, 19 nt, Artificial Sequence
  Description of Artificial Sequence: Synthetic oligonucleotide
ucccucucucgacuacgcc

SEQ ID NO: 1332577 - RNA, 19 nt, Artificial Sequence
  Description of Artificial Sequence: Synthetic oligonucleotide
caucgauguuagaccuggg

SEQ ID NO: 1332578 - RNA, 19 nt, Artificial Sequence
  Description of Artificial Sequence: Synthetic oligonucleotide
auagugugacuggugaguu

SEQ ID NO: 1332579 - RNA, 19 nt, Artificial Sequence
  Description of Artificial Sequence: Synthetic oligonucleotide
ucucgggguauaugagggu

SEQ ID NO: 1332580 - RNA, 19 nt, Artificial Sequence
  Description of Artificial Sequence: Synthetic oligonucleotide
gcucuggccaacugcaaug

SEQ ID NO: 1332581 - RNA, 19 nt, Artificial Sequence
  Description of Artificial Sequence: Synthetic oligonucleotide
uggccagaugguggcauag

SEQ ID NO: 1332582 - RNA, 19 nt, Artificial Sequence
  Description of Artificial Sequence: Synthetic oligonucleotide
cagggcuaauggcugcagc

SEQ ID NO: 1332583 - RNA, 19 nt, Artificial Sequence
  Description of Artificial Sequence: Synthetic oligonucleotide
cuggagagugugacucuug

SEQ ID NO: 1332584 - RNA, 19 nt, Artificial Sequence
  Description of Artificial Sequence: Synthetic oligonucleotide
gaccggauguugagcaggc

SEQ ID NO: 1332585 - RNA, 19 nt, Artificial Sequence
  Description of Artificial Sequence: Synthetic oligonucleotide
gcuacugcgagggaaucug

SEQ ID NO: 1332586 - RNA, 19 nt, Artificial Sequence
  Description of Artificial Sequence: Synthetic oligonucleotide
uagagccugcaccucgcau

SEQ ID NO: 1332587 - RNA, 19 nt, Artificial Sequence
  Description of Artificial Sequence: Synthetic oligonucleotide
uggaugggccuaacugcgu

SEQ ID NO: 1332588 - RNA, 19 nt, Artificial Sequence
  Description of Artificial Sequence: Synthetic oligonucleotide
agcgcauagugugacuggu

SEQ ID NO: 1332589 - RNA, 19 nt, Artificial Sequence
  Description of Artificial Sequence: Synthetic oligonucleotide
ggaccggauguugagcagg

SEQ ID NO: 1332590 - RNA, 19 nt, Artificial Sequence
  Description of Artificial Sequence: Synthetic oligonucleotide
caagccuaagggcuuggga

SEQ ID NO: 1332591 - RNA, 19 nt, Artificial Sequence
  Description of Artificial Sequence: Synthetic oligonucleotide
gcacccgcaggauaucucc

SEQ ID NO: 1332592 - RNA, 19 nt, Artificial Sequence
  Description of Artificial Sequence: Synthetic oligonucleotide
uagugugacuggugaguuc

SEQ ID NO: 1332593 - RNA, 19 nt, Artificial Sequence
  Description of Artificial Sequence: Synthetic oligonucleotide
aggccgaggaugaaggcgu

SEQ ID NO: 1332594 - RNA, 19 nt, Artificial Sequence
  Description of Artificial Sequence: Synthetic oligonucleotide
cagguccuucccucucucg

SEQ ID NO: 1332595 - RNA, 19 nt, Artificial Sequence
  Description of Artificial Sequence: Synthetic oligonucleotide
uuuccguugguggggcaac

SEQ ID NO: 1332596 - RNA, 19 nt, Artificial Sequence
  Description of Artificial Sequence: Synthetic oligonucleotide
ggaugggccuaacugcgug

SEQ ID NO: 1332597 - RNA, 19 nt, Artificial Sequence
  Description of Artificial Sequence: Synthetic oligonucleotide
gcuaagggccuccucagga

SEQ ID NO: 1332598 - RNA, 19 nt, Artificial Sequence
  Description of Artificial Sequence: Synthetic oligonucleotide
gguauaugagggucccuga

SEQ ID NO: 1332599 - RNA, 19 nt, Artificial Sequence
  Description of Artificial Sequence: Synthetic oligonucleotide
uucuuggcuaagggccucc

SEQ ID NO: 1332600 - RNA, 19 nt, Artificial Sequence
  Description of Artificial Sequence: Synthetic oligonucleotide
uccguugguggggcaacag

SEQ ID NO: 1332601 - RNA, 19 nt, Artificial Sequence
  Description of Artificial Sequence: Synthetic oligonucleotide
auagagccugcaccucgca

SEQ ID NO: 1332602 - RNA, 19 nt, Artificial Sequence
  Description of Artificial Sequence: Synthetic oligonucleotide
agugugacucuuguagguu

SEQ ID NO: 1332603 - RNA, 19 nt, Artificial Sequence
  Description of Artificial Sequence: Synthetic oligonucleotide
cccucuacuacaccuuccc

SEQ ID NO: 1332604 - RNA, 19 nt, Artificial Sequence
  Description of Artificial Sequence: Synthetic oligonucleotide
ucggguccaccugcuaugc

SEQ ID NO: 1332605 - RNA, 19 nt, Artificial Sequence
  Description of Artificial Sequence: Synthetic oligonucleotide
auacauggccccagcucuc

SEQ ID NO: 1332606 - RNA, 19 nt, Artificial Sequence
  Description of Artificial Sequence: Synthetic oligonucleotide
gguggcauagagccugcac

SEQ ID NO: 1332607 - RNA, 19 nt, Artificial Sequence
  Description of Artificial Sequence: Synthetic oligonucleotide
ugccguccuuucuucauuu

SEQ ID NO: 1332608 - RNA, 19 nt, Artificial Sequence
  Description of Artificial Sequence: Synthetic oligonucleotide
accggauguugagcaggcc

SEQ ID NO: 1332609 - RNA, 19 nt, Artificial Sequence
  Description of Artificial Sequence: Synthetic oligonucleotide
cagggcacacugugugagc

SEQ ID NO: 1332610 - RNA, 19 nt, Artificial Sequence
  Description of Artificial Sequence: Synthetic oligonucleotide
ggggcaacagguccuuccc

SEQ ID NO: 1332611 - RNA, 19 nt, Artificial Sequence
  Description of Artificial Sequence: Synthetic oligonucleotide
cuguccgcgucuccagggc

SEQ ID NO: 1332612 - RNA, 19 nt, Artificial Sequence
  Description of Artificial Sequence: Synthetic oligonucleotide
ggucccugaggccaccagc

SEQ ID NO: 1332613 - RNA, 19 nt, Artificial Sequence
  Description of Artificial Sequence: Synthetic oligonucleotide
gggccuaacugcguggaag

SEQ ID NO: 1332614 - RNA, 19 nt, Artificial Sequence
  Description of Artificial Sequence: Synthetic oligonucleotide
ucucucgacuacgccucag

SEQ ID NO: 1332615 - RNA, 19 nt, Artificial Sequence
  Description of Artificial Sequence: Synthetic oligonucleotide
ggucccagcacccgcagga

SEQ ID NO: 1332616 - RNA, 19 nt, Artificial Sequence
  Description of Artificial Sequence: Synthetic oligonucleotide
ggguccaccugcuaugcuc

SEQ ID NO: 1332617 - RNA, 19 nt, Artificial Sequence
  Description of Artificial Sequence: Synthetic oligonucleotide
gaaggcguuaaagcgcaua

SEQ ID NO: 1332618 - RNA, 19 nt, Artificial Sequence
  Description of Artificial Sequence: Synthetic oligonucleotide
gugugagcggcacgcagga

SEQ ID NO: 1332619 - RNA, 19 nt, Artificial Sequence
  Description of Artificial Sequence: Synthetic oligonucleotide
ccuggugcgggcucugccg

SEQ ID NO: 1332620 - RNA, 19 nt, Artificial Sequence
  Description of Artificial Sequence: Synthetic oligonucleotide
cuuucuuggcuaagggccu

SEQ ID NO: 1332621 - RNA, 19 nt, Artificial Sequence
  Description of Artificial Sequence: Synthetic oligonucleotide
ggcugacuuuguuguagag

SEQ ID NO: 1332622 - RNA, 19 nt, Artificial Sequence
  Description of Artificial Sequence: Synthetic oligonucleotide
guugguggggcaacagguc

SEQ ID NO: 1332623 - RNA, 19 nt, Artificial Sequence
  Description of Artificial Sequence: Synthetic oligonucleotide
gaccaugcaagaccuuggu

SEQ ID NO: 1332624 - RNA, 19 nt, Artificial Sequence
  Description of Artificial Sequence: Synthetic oligonucleotide
cucuacuacaccuucccuu

SEQ ID NO: 1332625 - RNA, 19 nt, Artificial Sequence
  Description of Artificial Sequence: Synthetic oligonucleotide
cagaacuccagggaccgga

SEQ ID NO: 1332626 - RNA, 19 nt, Artificial Sequence
  Description of Artificial Sequence: Synthetic oligonucleotide
ccggugcugaaacagcaag

SEQ ID NO: 1332627 - RNA, 19 nt, Artificial Sequence
  Description of Artificial Sequence: Synthetic oligonucleotide
caagaccuugguggauggg

SEQ ID NO: 1332628 - RNA, 19 nt, Artificial Sequence
  Description of Artificial Sequence: Synthetic oligonucleotide
ccugcaccucgcauggagg

SEQ ID NO: 1332629 - RNA, 19 nt, Artificial Sequence
  Description of Artificial Sequence: Synthetic oligonucleotide
acccuguccgcgucuccag

SEQ ID NO: 1332630 - RNA, 19 nt, Artificial Sequence
  Description of Artificial Sequence: Synthetic oligonucleotide
auuuuccguugguggggca

SEQ ID NO: 1332631 - RNA, 19 nt, Artificial Sequence
  Description of Artificial Sequence: Synthetic oligonucleotide
agcacccgcaggauaucuc

SEQ ID NO: 1332632 - RNA, 19 nt, Artificial Sequence
  Description of Artificial Sequence: Synthetic oligonucleotide
aacugcguggaagccucaa

SEQ ID NO: 1332633 - RNA, 19 nt, Artificial Sequence
  Description of Artificial Sequence: Synthetic oligonucleotide
gacuacgccucagcucagc

SEQ ID NO: 1332634 - RNA, 19 nt, Artificial Sequence
  Description of Artificial Sequence: Synthetic oligonucleotide
cuacuagcuggaacacaga

SEQ ID NO: 1332635 - RNA, 19 nt, Artificial Sequence
  Description of Artificial Sequence: Synthetic oligonucleotide
acagggauacauggcccca

SEQ ID NO: 1332636 - RNA, 19 nt, Artificial Sequence
  Description of Artificial Sequence: Synthetic oligonucleotide
augggccuaacugcgugga

SEQ ID NO: 1332637 - RNA, 19 nt, Artificial Sequence
  Description of Artificial Sequence: Synthetic oligonucleotide
cagggauacauggccccag

SEQ ID NO: 1332638 - RNA, 19 nt, Artificial Sequence
  Description of Artificial Sequence: Synthetic oligonucleotide
agugucagggccgcggcua

SEQ ID NO: 1332639 - RNA, 19 nt, Artificial Sequence
  Description of Artificial Sequence: Synthetic oligonucleotide
caccugcuaugcucugagc

SEQ ID NO: 1332640 - RNA, 19 nt, Artificial Sequence
  Description of Artificial Sequence: Synthetic oligonucleotide
agagguguccccacuugau

SEQ ID NO: 1332641 - RNA, 19 nt, Artificial Sequence
  Description of Artificial Sequence: Synthetic oligonucleotide
uuggggucagugucacaua

SEQ ID NO: 1332642 - RNA, 19 nt, Artificial Sequence
  Description of Artificial Sequence: Synthetic oligonucleotide
gguccuucccucucucgac

SEQ ID NO: 1332643 - RNA, 19 nt, Artificial Sequence
  Description of Artificial Sequence: Synthetic oligonucleotide
aggcguuaaagcgcauagu

SEQ ID NO: 1332644 - RNA, 19 nt, Artificial Sequence
  Description of Artificial Sequence: Synthetic oligonucleotide
ccccuuucuuggcuaaggg

SEQ ID NO: 1332645 - RNA, 19 nt, Artificial Sequence
  Description of Artificial Sequence: Synthetic oligonucleotide
uggaagccucaaccacacu

SEQ ID NO: 1332646 - RNA, 19 nt, Artificial Sequence
  Description of Artificial Sequence: Synthetic oligonucleotide
ccuguccgcgucuccaggg

SEQ ID NO: 1332647 - RNA, 19 nt, Artificial Sequence
  Description of Artificial Sequence: Synthetic oligonucleotide
cugggcucgggcucccgac

SEQ ID NO: 1332648 - RNA, 19 nt, Artificial Sequence
  Description of Artificial Sequence: Synthetic oligonucleotide
gccuaagggcuugggaagg

SEQ ID NO: 1332649 - RNA, 19 nt, Artificial Sequence
  Description of Artificial Sequence: Synthetic oligonucleotide
ugauaucuucaugguuaua

SEQ ID NO: 1332650 - RNA, 19 nt, Artificial Sequence
  Description of Artificial Sequence: Synthetic oligonucleotide
ucuuggcuaagggccuccu

SEQ ID NO: 1332651 - RNA, 19 nt, Artificial Sequence
  Description of Artificial Sequence: Synthetic oligonucleotide
gcagccuguuugugggccg

SEQ ID NO: 1332652 - RNA, 19 nt, Artificial Sequence
  Description of Artificial Sequence: Synthetic oligonucleotide
gcuaauggcugcagcagca

SEQ ID NO: 1332653 - RNA, 19 nt, Artificial Sequence
  Description of Artificial Sequence: Synthetic oligonucleotide
gucacauaggccagaggua

SEQ ID NO: 1332654 - RNA, 19 nt, Artificial Sequence
  Description of Artificial Sequence: Synthetic oligonucleotide
ugggccuaacugcguggaa

SEQ ID NO: 1332655 - RNA, 19 nt, Artificial Sequence
  Description of Artificial Sequence: Synthetic oligonucleotide
guguccccacuugaugccc

SEQ ID NO: 1332656 - RNA, 19 nt, Artificial Sequence
  Description of Artificial Sequence: Synthetic oligonucleotide
gcguggaagccucaaccac

SEQ ID NO: 1332657 - RNA, 19 nt, Artificial Sequence
  Description of Artificial Sequence: Synthetic oligonucleotide
gugcuacuagcuggaacac

SEQ ID NO: 1332658 - RNA, 19 nt, Artificial Sequence
  Description of Artificial Sequence: Synthetic oligonucleotide
ggggucagugucacauagg

SEQ ID NO: 1332659 - RNA, 19 nt, Artificial Sequence
  Description of Artificial Sequence: Synthetic oligonucleotide
ugaaggcguuaaagcgcau

SEQ ID NO: 1332660 - RNA, 19 nt, Artificial Sequence
  Description of Artificial Sequence: Synthetic oligonucleotide
cagccuguuugugggccgg

SEQ ID NO: 1332661 - RNA, 19 nt, Artificial Sequence
  Description of Artificial Sequence: Synthetic oligonucleotide
agccaagccuaagggcuug

SEQ ID NO: 1332662 - RNA, 19 nt, Artificial Sequence
  Description of Artificial Sequence: Synthetic oligonucleotide
ccagggaccggauguugag

SEQ ID NO: 1332663 - RNA, 19 nt, Artificial Sequence
  Description of Artificial Sequence: Synthetic oligonucleotide
uuccguugguggggcaaca

SEQ ID NO: 1332664 - RNA, 19 nt, Artificial Sequence
  Description of Artificial Sequence: Synthetic oligonucleotide
agggcuugggaaggacucu

SEQ ID NO: 1332665 - RNA, 19 nt, Artificial Sequence
  Description of Artificial Sequence: Synthetic oligonucleotide
ggacaguugaggaggagua

SEQ ID NO: 1332666 - RNA, 19 nt, Artificial Sequence
  Description of Artificial Sequence: Synthetic oligonucleotide
uccuccggcuggucccagc

SEQ ID NO: 1332667 - RNA, 19 nt, Artificial Sequence
  Description of Artificial Sequence: Synthetic oligonucleotide
gaccuugguggaugggccu

SEQ ID NO: 1332668 - RNA, 19 nt, Artificial Sequence
  Description of Artificial Sequence: Synthetic oligonucleotide
caugcacaaggccucaguu

SEQ ID NO: 1332669 - RNA, 19 nt, Artificial Sequence
  Description of Artificial Sequence: Synthetic oligonucleotide
cugggacaguugaggagga

SEQ ID NO: 1332670 - RNA, 19 nt, Artificial Sequence
  Description of Artificial Sequence: Synthetic oligonucleotide
caccucgcauggagguuug

SEQ ID NO: 1332671 - RNA, 19 nt, Artificial Sequence
  Description of Artificial Sequence: Synthetic oligonucleotide
gggaaccaaagaggugucc

SEQ ID NO: 1332672 - RNA, 19 nt, Artificial Sequence
  Description of Artificial Sequence: Synthetic oligonucleotide
cugccuaccccuuucuuuu

SEQ ID NO: 1332673 - RNA, 19 nt, Artificial Sequence
  Description of Artificial Sequence: Synthetic oligonucleotide
cugcaauguugagugugca

SEQ ID NO: 1332674 - RNA, 19 nt, Artificial Sequence
  Description of Artificial Sequence: Synthetic oligonucleotide
agccuguuugugggccggg

SEQ ID NO: 1332675 - RNA, 19 nt, Artificial Sequence
  Description of Artificial Sequence: Synthetic oligonucleotide
cuaauggcugcagcagcaa

SEQ ID NO: 1332676 - RNA, 19 nt, Artificial Sequence
  Description of Artificial Sequence: Synthetic oligonucleotide
gagcggcacgcaggaagcc

SEQ ID NO: 1332677 - RNA, 19 nt, Artificial Sequence
  Description of Artificial Sequence: Synthetic oligonucleotide
acccuucacccgcucccca

SEQ ID NO: 1332678 - RNA, 19 nt, Artificial Sequence
  Description of Artificial Sequence: Synthetic oligonucleotide
cugagcuuuucgggaacca

SEQ ID NO: 1332679 - RNA, 19 nt, Artificial Sequence
  Description of Artificial Sequence: Synthetic oligonucleotide
cucgggcucuggccaacug

SEQ ID NO: 1332680 - RNA, 19 nt, Artificial Sequence
  Description of Artificial Sequence: Synthetic oligonucleotide
gcaugagcugguaccacca

SEQ ID NO: 1332681 - RNA, 19 nt, Artificial Sequence
  Description of Artificial Sequence: Synthetic oligonucleotide
ggacucuuaggcucugagu

SEQ ID NO: 1332682 - RNA, 19 nt, Artificial Sequence
  Description of Artificial Sequence: Synthetic oligonucleotide
cuacgccucagcucagcua

SEQ ID NO: 1332683 - RNA, 19 nt, Artificial Sequence
  Description of Artificial Sequence: Synthetic oligonucleotide
cugcaccucgcauggaggu

SEQ ID NO: 1332684 - RNA, 19 nt, Artificial Sequence
  Description of Artificial Sequence: Synthetic oligonucleotide
cguggaagccucaaccaca

SEQ ID NO: 1332685 - RNA, 19 nt, Artificial Sequence
  Description of Artificial Sequence: Synthetic oligonucleotide
agccccuuucuuggcuaag

SEQ ID NO: 1332686 - RNA, 19 nt, Artificial Sequence
  Description of Artificial Sequence: Synthetic oligonucleotide
ugcaccucgcauggagguu

SEQ ID NO: 1332687 - RNA, 19 nt, Artificial Sequence
  Description of Artificial Sequence: Synthetic oligonucleotide
ccagugucagggccgcggc

SEQ ID NO: 1332688 - RNA, 19 nt, Artificial Sequence
  Description of Artificial Sequence: Synthetic oligonucleotide
uggccacccuguccgcguc

SEQ ID NO: 1332689 - RNA, 19 nt, Artificial Sequence
  Description of Artificial Sequence: Synthetic oligonucleotide
cugcuacugcgagggaauc

SEQ ID NO: 1332690 - RNA, 19 nt, Artificial Sequence
  Description of Artificial Sequence: Synthetic oligonucleotide
uccucggguccaccugcua

SEQ ID NO: 1332691 - RNA, 19 nt, Artificial Sequence
  Description of Artificial Sequence: Synthetic oligonucleotide
ggagagugugacucuugua

SEQ ID NO: 1332692 - RNA, 19 nt, Artificial Sequence
  Description of Artificial Sequence: Synthetic oligonucleotide
caaagagguguccccacuu

SEQ ID NO: 1332693 - RNA, 19 nt, Artificial Sequence
  Description of Artificial Sequence: Synthetic oligonucleotide
accucgcauggagguuugg

SEQ ID NO: 1332694 - RNA, 19 nt, Artificial Sequence
  Description of Artificial Sequence: Synthetic oligonucleotide
gugacucuuguagguucuc

SEQ ID NO: 1332695 - RNA, 19 nt, Artificial Sequence
  Description of Artificial Sequence: Synthetic oligonucleotide
gggacaguugaggaggagu

SEQ ID NO: 1332696 - RNA, 19 nt, Artificial Sequence
  Description of Artificial Sequence: Synthetic oligonucleotide
ccgcaggauaucuccuuug

SEQ ID NO: 1332697 - RNA, 19 nt, Artificial Sequence
  Description of Artificial Sequence: Synthetic oligonucleotide
gcucugagcuccccacaac

SEQ ID NO: 1332698 - RNA, 19 nt, Artificial Sequence
  Description of Artificial Sequence: Synthetic oligonucleotide
ugugagcggcacgcaggaa

SEQ ID NO: 1332699 - RNA, 19 nt, Artificial Sequence
  Description of Artificial Sequence: Synthetic oligonucleotide
ggccccagcucucagucua

SEQ ID NO: 1332700 - RNA, 19 nt, Artificial Sequence
  Description of Artificial Sequence: Synthetic oligonucleotide
ccaagccuaagggcuuggg

SEQ ID NO: 1332701 - RNA, 19 nt, Artificial Sequence
  Description of Artificial Sequence: Synthetic oligonucleotide
gcguuaaagcgcauagugu

SEQ ID NO: 1332702 - RNA, 19 nt, Artificial Sequence
  Description of Artificial Sequence: Synthetic oligonucleotide
ggcucugagucucggggua

SEQ ID NO: 1332703 - RNA, 19 nt, Artificial Sequence
  Description of Artificial Sequence: Synthetic oligonucleotide
uggugcgggcucugccguc

SEQ ID NO: 1332704 - RNA, 19 nt, Artificial Sequence
  Description of Artificial Sequence: Synthetic oligonucleotide
cccacugccuaccccuuuc

SEQ ID NO: 1332705 - RNA, 19 nt, Artificial Sequence
  Description of Artificial Sequence: Synthetic oligonucleotide
cagccagucuccuccggcu

SEQ ID NO: 1332706 - RNA, 19 nt, Artificial Sequence
  Description of Artificial Sequence: Synthetic oligonucleotide
gccaucgauguuagaccug

SEQ ID NO: 1332707 - RNA, 19 nt, Artificial Sequence
  Description of Artificial Sequence: Synthetic oligonucleotide
cucuggccaacugcaaugu

SEQ ID NO: 1332708 - RNA, 19 nt, Artificial Sequence
  Description of Artificial Sequence: Synthetic oligonucleotide
gccuccucggguccaccug

SEQ ID NO: 1332709 - RNA, 19 nt, Artificial Sequence
  Description of Artificial Sequence: Synthetic oligonucleotide
gcuaugcucugagcucccc

SEQ ID NO: 1332710 - RNA, 19 nt, Artificial Sequence
  Description of Artificial Sequence: Synthetic oligonucleotide
ccuucccucucucgacuac

SEQ ID NO: 1332711 - RNA, 19 nt, Artificial Sequence
  Description of Artificial Sequence: Synthetic oligonucleotide
gcgcagccagucuccuccg

SEQ ID NO: 1332712 - RNA, 19 nt, Artificial Sequence
  Description of Artificial Sequence: Synthetic oligonucleotide
cucucucgacuacgccuca

SEQ ID NO: 1332713 - RNA, 19 nt, Artificial Sequence
  Description of Artificial Sequence: Synthetic oligonucleotide
cauaggccagagguaccaa

SEQ ID NO: 1332714 - RNA, 19 nt, Artificial Sequence
  Description of Artificial Sequence: Synthetic oligonucleotide
gcgcauagugugacuggug

SEQ ID NO: 1332715 - RNA, 19 nt, Artificial Sequence
  Description of Artificial Sequence: Synthetic oligonucleotide
gggauacauggccccagcu

SEQ ID NO: 1332716 - RNA, 19 nt, Artificial Sequence
  Description of Artificial Sequence: Synthetic oligonucleotide
cagugucacauaggccaga

SEQ ID NO: 1332717 - RNA, 19 nt, Artificial Sequence
  Description of Artificial Sequence: Synthetic oligonucleotide
gccaagccuaagggcuugg

SEQ ID NO: 1332718 - RNA, 19 nt, Artificial Sequence
  Description of Artificial Sequence: Synthetic oligonucleotide
caacugcaauguugagugu

SEQ ID NO: 1332719 - RNA, 19 nt, Artificial Sequence
  Description of Artificial Sequence: Synthetic oligonucleotide
agccagugucagggccgcg

SEQ ID NO: 1332720 - RNA, 19 nt, Artificial Sequence
  Description of Artificial Sequence: Synthetic oligonucleotide
cgggguauaugaggguccc

SEQ ID NO: 1332721 - RNA, 19 nt, Artificial Sequence
  Description of Artificial Sequence: Synthetic oligonucleotide
agagaccaugcaagaccuu

SEQ ID NO: 1332722 - RNA, 19 nt, Artificial Sequence
  Description of Artificial Sequence: Synthetic oligonucleotide
ggcucuggccaacugcaau

SEQ ID NO: 1332723 - RNA, 19 nt, Artificial Sequence
  Description of Artificial Sequence: Synthetic oligonucleotide
cagccccuuucuuggcuaa

SEQ ID NO: 1332724 - RNA, 19 nt, Artificial Sequence
  Description of Artificial Sequence: Synthetic oligonucleotide
gcgagggaaucuggagccc

SEQ ID NO: 1332725 - RNA, 19 nt, Artificial Sequence
  Description of Artificial Sequence: Synthetic oligonucleotide
ccgaggaugaaggcguuaa

SEQ ID NO: 1332726 - RNA, 19 nt, Artificial Sequence
  Description of Artificial Sequence: Synthetic oligonucleotide
cacccgcaggauaucuccu

SEQ ID NO: 1332727 - RNA, 19 nt, Artificial Sequence
  Description of Artificial Sequence: Synthetic oligonucleotide
cucugagucucgggguaua

SEQ ID NO: 1332728 - RNA, 19 nt, Artificial Sequence
  Description of Artificial Sequence: Synthetic oligonucleotide
ggcacgcaggaagccccag

SEQ ID NO: 1332729 - RNA, 19 nt, Artificial Sequence
  Description of Artificial Sequence: Synthetic oligonucleotide
ccuaacugcguggaagccu

SEQ ID NO: 1332730 - RNA, 19 nt, Artificial Sequence
  Description of Artificial Sequence: Synthetic oligonucleotide
ccucgcauggagguuugga

SEQ ID NO: 1332731 - RNA, 19 nt, Artificial Sequence
  Description of Artificial Sequence: Synthetic oligonucleotide
cccgcuccccaguuggcca

SEQ ID NO: 1332732 - RNA, 19 nt, Artificial Sequence
  Description of Artificial Sequence: Synthetic oligonucleotide
cccagcacccgcaggauau

SEQ ID NO: 1332733 - RNA, 19 nt, Artificial Sequence
  Description of Artificial Sequence: Synthetic oligonucleotide
cagugccaucgauguuaga

SEQ ID NO: 1332734 - RNA, 19 nt, Artificial Sequence
  Description of Artificial Sequence: Synthetic oligonucleotide
gggcaacagguccuucccu

SEQ ID NO: 1332735 - RNA, 19 nt, Artificial Sequence
  Description of Artificial Sequence: Synthetic oligonucleotide
ccgcuccccaguuggccac

SEQ ID NO: 1332736 - RNA, 19 nt, Artificial Sequence
  Description of Artificial Sequence: Synthetic oligonucleotide
gccaaucugaaggcagccu

SEQ ID NO: 1332737 - RNA, 19 nt, Artificial Sequence
  Description of Artificial Sequence: Synthetic oligonucleotide
cugccguccuuucuucauu

SEQ ID NO: 1332738 - RNA, 19 nt, Artificial Sequence
  Description of Artificial Sequence: Synthetic oligonucleotide
ggccgggcuucccgcugag

SEQ ID NO: 1332739 - RNA, 19 nt, Artificial Sequence
  Description of Artificial Sequence: Synthetic oligonucleotide
cagcacccgcaggauaucu

SEQ ID NO: 1332740 - RNA, 19 nt, Artificial Sequence
  Description of Artificial Sequence: Synthetic oligonucleotide
agccugcaccucgcaugga

SEQ ID NO: 1332741 - RNA, 19 nt, Artificial Sequence
  Description of Artificial Sequence: Synthetic oligonucleotide
gggccgcggcuacagcgca

SEQ ID NO: 1332742 - RNA, 19 nt, Artificial Sequence
  Description of Artificial Sequence: Synthetic oligonucleotide
cuucacccgcuccccaguu

SEQ ID NO: 1332743 - RNA, 19 nt, Artificial Sequence
  Description of Artificial Sequence: Synthetic oligonucleotide
gggccgggcuucccgcuga

SEQ ID NO: 1332744 - RNA, 19 nt, Artificial Sequence
  Description of Artificial Sequence: Synthetic oligonucleotide
cagugucagggccgcggcu

SEQ ID NO: 1332745 - RNA, 19 nt, Artificial Sequence
  Description of Artificial Sequence: Synthetic oligonucleotide
gguagugggucuggaugau

SEQ ID NO: 1332746 - RNA, 19 nt, Artificial Sequence
  Description of Artificial Sequence: Synthetic oligonucleotide
cgcgucuccagggcccucc

SEQ ID NO: 1332747 - RNA, 19 nt, Artificial Sequence
  Description of Artificial Sequence: Synthetic oligonucleotide
ccucuacuacaccuucccu

SEQ ID NO: 1332748 - RNA, 19 nt, Artificial Sequence
  Description of Artificial Sequence: Synthetic oligonucleotide
gcaccucgcauggagguuu

SEQ ID NO: 1332749 - RNA, 19 nt, Artificial Sequence
  Description of Artificial Sequence: Synthetic oligonucleotide
cacugccuaccccuuucuu

SEQ ID NO: 1332750 - RNA, 19 nt, Artificial Sequence
  Description of Artificial Sequence: Synthetic oligonucleotide
ggccgcggcuacagcgcag

SEQ ID NO: 1332751 - RNA, 19 nt, Artificial Sequence
  Description of Artificial Sequence: Synthetic oligonucleotide
gcccuccuggccucgggcu

SEQ ID NO: 1332752 - RNA, 19 nt, Artificial Sequence
  Description of Artificial Sequence: Synthetic oligonucleotide
ccucggguccaccugcuau

SEQ ID NO: 1332753 - RNA, 19 nt, Artificial Sequence
  Description of Artificial Sequence: Synthetic oligonucleotide
cgacuacgccucagcucag

SEQ ID NO: 1332754 - RNA, 19 nt, Artificial Sequence
  Description of Artificial Sequence: Synthetic oligonucleotide
ccccaguuggccacccugu

SEQ ID NO: 1332755 - RNA, 19 nt, Artificial Sequence
  Description of Artificial Sequence: Synthetic oligonucleotide
cgaggaugaaggcguuaaa

SEQ ID NO: 1332756 - RNA, 19 nt, Artificial Sequence
  Description of Artificial Sequence: Synthetic oligonucleotide
ccgcggcuacagcgcagcc

SEQ ID NO: 1332757 - RNA, 19 nt, Artificial Sequence
  Description of Artificial Sequence: Synthetic oligonucleotide
gggguauaugagggucccu

SEQ ID NO: 1332758 - RNA, 19 nt, Artificial Sequence
  Description of Artificial Sequence: Synthetic oligonucleotide
gccucgggcucuggccaac

SEQ ID NO: 1332759 - RNA, 19 nt, Artificial Sequence
  Description of Artificial Sequence: Synthetic oligonucleotide
gcucugagucucgggguau

SEQ ID NO: 1332760 - RNA, 19 nt, Artificial Sequence
  Description of Artificial Sequence: Synthetic oligonucleotide
gaagggcagcagggcuaau

SEQ ID NO: 1332761 - RNA, 19 nt, Artificial Sequence
  Description of Artificial Sequence: Synthetic oligonucleotide
cgcggcuacagcgcagcca

SEQ ID NO: 1332762 - RNA, 19 nt, Artificial Sequence
  Description of Artificial Sequence: Synthetic oligonucleotide
cccgcaggauaucuccuuu

SEQ ID NO: 1332763 - RNA, 19 nt, Artificial Sequence
  Description of Artificial Sequence: Synthetic oligonucleotide
cgagggaaucuggagcccu

SEQ ID NO: 1332764 - RNA, 19 nt, Artificial Sequence
  Description of Artificial Sequence: Synthetic oligonucleotide
ccucagcagugccaucgau

SEQ ID NO: 1332765 - RNA, 19 nt, Artificial Sequence
  Description of Artificial Sequence: Synthetic oligonucleotide
cgcuccccaguuggccacc

SEQ ID NO: 1332766 - RNA, 19 nt, Artificial Sequence
  Description of Artificial Sequence: Synthetic oligonucleotide
cggcacgcaggaagcccca

SEQ ID NO: 1332767 - RNA, 19 nt, Artificial Sequence
  Description of Artificial Sequence: Synthetic oligonucleotide
ggccgaggaugaaggcguu

SEQ ID NO: 1332768 - RNA, 19 nt, Artificial Sequence
  Description of Artificial Sequence: Synthetic oligonucleotide
ccgcgucuccagggcccuc

SEQ ID NO: 1332769 - RNA, 19 nt, Artificial Sequence
  Description of Artificial Sequence: Synthetic oligonucleotide
ccccaucgucugugcuacu

SEQ ID NO: 1332770 - RNA, 19 nt, Artificial Sequence
  Description of Artificial Sequence: Synthetic oligonucleotide
aagacgaacucguauacgc

SEQ ID NO: 1332771 - RNA, 19 nt, Artificial Sequence
  Description of Artificial Sequence: Synthetic oligonucleotide
aauuuucucuaauggaggc

SEQ ID NO: 1332772 - RNA, 19 nt, Artificial Sequence
  Description of Artificial Sequence: Synthetic oligonucleotide
uaaagucugauaaaguucc

SEQ ID NO: 1332773 - RNA, 19 nt, Artificial Sequence
  Description of Artificial Sequence: Synthetic oligonucleotide
ugcuaaacaguccagagcc

SEQ ID NO: 1332774 - RNA, 19 nt, Artificial Sequence
  Description of Artificial Sequence: Synthetic oligonucleotide
aaaaggaugugguaccagg

SEQ ID NO: 1332775 - RNA, 19 nt, Artificial Sequence
  Description of Artificial Sequence: Synthetic oligonucleotide
aaacugcaacauuugauac

SEQ ID NO: 1332776 - RNA, 19 nt, Artificial Sequence
  Description of Artificial Sequence: Synthetic oligonucleotide
ugaccuucgacaaugagga

SEQ ID NO: 1332777 - RNA, 19 nt, Artificial Sequence
  Description of Artificial Sequence: Synthetic oligonucleotide
uaugagucgucucauauca

SEQ ID NO: 1332778 - RNA, 19 nt, Artificial Sequence
  Description of Artificial Sequence: Synthetic oligonucleotide
uuuuaacucgaucccaccg

SEQ ID NO: 1332779 - RNA, 19 nt, Artificial Sequence
  Description of Artificial Sequence: Synthetic oligonucleotide
aagacuuuuggcuuuguca

SEQ ID NO: 1332780 - RNA, 19 nt, Artificial Sequence
  Description of Artificial Sequence: Synthetic oligonucleotide
aauuuuagauucccugaag

SEQ ID NO: 1332781 - RNA, 19 nt, Artificial Sequence
  Description of Artificial Sequence: Synthetic oligonucleotide
caaagcaccucuaacaaag

SEQ ID NO: 1332782 - RNA, 19 nt, Artificial Sequence
  Description of Artificial Sequence: Synthetic oligonucleotide
aaucauauagcgaagugca

SEQ ID NO: 1332783 - RNA, 19 nt, Artificial Sequence
  Description of Artificial Sequence: Synthetic oligonucleotide
cuaguguuacaauaggacc

SEQ ID NO: 1332784 - RNA, 19 nt, Artificial Sequence
  Description of Artificial Sequence: Synthetic oligonucleotide
ugcaucuacaucucgaagc

SEQ ID NO: 1332785 - RNA, 19 nt, Artificial Sequence
  Description of Artificial Sequence: Synthetic oligonucleotide
aacucguauacgcuguagg

SEQ ID NO: 1332786 - RNA, 19 nt, Artificial Sequence
  Description of Artificial Sequence: Synthetic oligonucleotide
cuaguaauuccaaucuugg

SEQ ID NO: 1332787 - RNA, 19 nt, Artificial Sequence
  Description of Artificial Sequence: Synthetic oligonucleotide
uaguguuacaauaggacca

SEQ ID NO: 1332788 - RNA, 19 nt, Artificial Sequence
  Description of Artificial Sequence: Synthetic oligonucleotide
uuccaaaucccaaaaggcc

SEQ ID NO: 1332789 - RNA, 19 nt, Artificial Sequence
  Description of Artificial Sequence: Synthetic oligonucleotide
aauaucacaccucggacaa

SEQ ID NO: 1332790 - RNA, 19 nt, Artificial Sequence
  Description of Artificial Sequence: Synthetic oligonucleotide
gacaaugaggacaaagccg

SEQ ID NO: 1332791 - RNA, 19 nt, Artificial Sequence
  Description of Artificial Sequence: Synthetic oligonucleotide
agaauuuucucuaauggag

SEQ ID NO: 1332792 - RNA, 19 nt, Artificial Sequence
  Description of Artificial Sequence: Synthetic oligonucleotide
aaggauuuauuauuccaca

SEQ ID NO: 1332793 - RNA, 19 nt, Artificial Sequence
  Description of Artificial Sequence: Synthetic oligonucleotide
ugcaacauuugauacacac

SEQ ID NO: 1332794 - RNA, 19 nt, Artificial Sequence
  Description of Artificial Sequence: Synthetic oligonucleotide
aaauuuuagauucccugaa

SEQ ID NO: 1332795 - RNA, 19 nt, Artificial Sequence
  Description of Artificial Sequence: Synthetic oligonucleotide
ugaauucucagucaagaau

SEQ ID NO: 1332796 - RNA, 19 nt, Artificial Sequence
  Description of Artificial Sequence: Synthetic oligonucleotide
gaauuuucucuaauggagg

SEQ ID NO: 1332797 - RNA, 19 nt, Artificial Sequence
  Description of Artificial Sequence: Synthetic oligonucleotide
uucaauuuucuuucaagac

SEQ ID NO: 1332798 - RNA, 19 nt, Artificial Sequence
  Description of Artificial Sequence: Synthetic oligonucleotide
cuugguaagaauucaggug

SEQ ID NO: 1332799 - RNA, 19 nt, Artificial Sequence
  Description of Artificial Sequence: Synthetic oligonucleotide
aacaaguucgacgagcgug

SEQ ID NO: 1332800 - RNA, 19 nt, Artificial Sequence
  Description of Artificial Sequence: Synthetic oligonucleotide
aaaacgagcuucuguuguc

SEQ ID NO: 1332801 - RNA, 19 nt, Artificial Sequence
  Description of Artificial Sequence: Synthetic oligonucleotide
auuugauacacacacuuaa

SEQ ID NO: 1332802 - RNA, 19 nt, Artificial Sequence
  Description of Artificial Sequence: Synthetic oligonucleotide
aagaaugccguggucuugc

SEQ ID NO: 1332803 - RNA, 19 nt, Artificial Sequence
  Description of Artificial Sequence: Synthetic oligonucleotide
agugcucugacacuguaag

SEQ ID NO: 1332804 - RNA, 19 nt, Artificial Sequence
  Description of Artificial Sequence: Synthetic oligonucleotide
uguaagcaguucuuguagg

SEQ ID NO: 1332805 - RNA, 19 nt, Artificial Sequence
  Description of Artificial Sequence: Synthetic oligonucleotide
ucguauacgcuguagggag

SEQ ID NO: 1332806 - RNA, 19 nt, Artificial Sequence
  Description of Artificial Sequence: Synthetic oligonucleotide
ugaauauggcgccagcccc

SEQ ID NO: 1332807 - RNA, 19 nt, Artificial Sequence
  Description of Artificial Sequence: Synthetic oligonucleotide
gaucccaccguucacuggg

SEQ ID NO: 1332808 - RNA, 19 nt, Artificial Sequence
  Description of Artificial Sequence: Synthetic oligonucleotide
ugugaaaacgagcuucugu

SEQ ID NO: 1332809 - RNA, 19 nt, Artificial Sequence
  Description of Artificial Sequence: Synthetic oligonucleotide
ucuugguaagaauucaggu

SEQ ID NO: 1332810 - RNA, 19 nt, Artificial Sequence
  Description of Artificial Sequence: Synthetic oligonucleotide
augaggacaaagccgguac

SEQ ID NO: 1332811 - RNA, 19 nt, Artificial Sequence
  Description of Artificial Sequence: Synthetic oligonucleotide
ucaaucauauagcgaagug

SEQ ID NO: 1332812 - RNA, 19 nt, Artificial Sequence
  Description of Artificial Sequence: Synthetic oligonucleotide
accaaggauuuauuauucc

SEQ ID NO: 1332813 - RNA, 19 nt, Artificial Sequence
  Description of Artificial Sequence: Synthetic oligonucleotide
uuccacaauauaaacugca

SEQ ID NO: 1332814 - RNA, 19 nt, Artificial Sequence
  Description of Artificial Sequence: Synthetic oligonucleotide
ucacuacuggcucuaacag

SEQ ID NO: 1332815 - RNA, 19 nt, Artificial Sequence
  Description of Artificial Sequence: Synthetic oligonucleotide
ccucuaacaaagaauaugg

SEQ ID NO: 1332816 - RNA, 19 nt, Artificial Sequence
  Description of Artificial Sequence: Synthetic oligonucleotide
uacucaaagaaugccgugg

SEQ ID NO: 1332817 - RNA, 19 nt, Artificial Sequence
  Description of Artificial Sequence: Synthetic oligonucleotide
agucuaguguuacaauagg

SEQ ID NO: 1332818 - RNA, 19 nt, Artificial Sequence
  Description of Artificial Sequence: Synthetic oligonucleotide
cuauguugccaguucacgg

SEQ ID NO: 1332819 - RNA, 19 nt, Artificial Sequence
  Description of Artificial Sequence: Synthetic oligonucleotide
aauaggaccaaggauuuau

SEQ ID NO: 1332820 - RNA, 19 nt, Artificial Sequence
  Description of Artificial Sequence: Synthetic oligonucleotide
agaaaguagcugcugagcu

SEQ ID NO: 1332821 - RNA, 19 nt, Artificial Sequence
  Description of Artificial Sequence: Synthetic oligonucleotide
cuuucaagacuguugacuc

SEQ ID NO: 1332822 - RNA, 19 nt, Artificial Sequence
  Description of Artificial Sequence: Synthetic oligonucleotide
aaucccaaaaggccaauau

SEQ ID NO: 1332823 - RNA, 19 nt, Artificial Sequence
  Description of Artificial Sequence: Synthetic oligonucleotide
aacuucagcuacuaguaau

SEQ ID NO: 1332824 - RNA, 19 nt, Artificial Sequence
  Description of Artificial Sequence: Synthetic oligonucleotide
aucucguuucccucgaagg

SEQ ID NO: 1332825 - RNA, 19 nt, Artificial Sequence
  Description of Artificial Sequence: Synthetic oligonucleotide
uccaaucuugguaagaauu

SEQ ID NO: 1332826 - RNA, 19 nt, Artificial Sequence
  Description of Artificial Sequence: Synthetic oligonucleotide
aggccaauaucacaccucg

SEQ ID NO: 1332827 - RNA, 19 nt, Artificial Sequence
  Description of Artificial Sequence: Synthetic oligonucleotide
aacaggugagcuucgguca

SEQ ID NO: 1332828 - RNA, 19 nt, Artificial Sequence
  Description of Artificial Sequence: Synthetic oligonucleotide
uuuaacucgaucccaccgu

SEQ ID NO: 1332829 - RNA, 19 nt, Artificial Sequence
  Description of Artificial Sequence: Synthetic oligonucleotide
uauagcgaagugcaucccc

SEQ ID NO: 1332830 - RNA, 19 nt, Artificial Sequence
  Description of Artificial Sequence: Synthetic oligonucleotide
ucuauguugccaguucacg

SEQ ID NO: 1332831 - RNA, 19 nt, Artificial Sequence
  Description of Artificial Sequence: Synthetic oligonucleotide
caaucauauagcgaagugc

SEQ ID NO: 1332832 - RNA, 19 nt, Artificial Sequence
  Description of Artificial Sequence: Synthetic oligonucleotide
ucuaugagucgucucauau

SEQ ID NO: 1332833 - RNA, 19 nt, Artificial Sequence
  Description of Artificial Sequence: Synthetic oligonucleotide
uuucaaucauauagcgaag

SEQ ID NO: 1332834 - RNA, 19 nt, Artificial Sequence
  Description of Artificial Sequence: Synthetic oligonucleotide
guaauuccaaucuugguaa

SEQ ID NO: 1332835 - RNA, 19 nt, Artificial Sequence
  Description of Artificial Sequence: Synthetic oligonucleotide
uucucagucaagaauguuu

SEQ ID NO: 1332836 - RNA, 19 nt, Artificial Sequence
  Description of Artificial Sequence: Synthetic oligonucleotide
aaagccgguacugccacac

SEQ ID NO: 1332837 - RNA, 19 nt, Artificial Sequence
  Description of Artificial Sequence: Synthetic oligonucleotide
gguugagacaccuuguuug

SEQ ID NO: 1332838 - RNA, 19 nt, Artificial Sequence
  Description of Artificial Sequence: Synthetic oligonucleotide
agaagcugcagucuagugu

SEQ ID NO: 1332839 - RNA, 19 nt, Artificial Sequence
  Description of Artificial Sequence: Synthetic oligonucleotide
aaucuugguaagaauucag

SEQ ID NO: 1332840 - RNA, 19 nt, Artificial Sequence
  Description of Artificial Sequence: Synthetic oligonucleotide
uucgacaaugaggacaaag

SEQ ID NO: 1332841 - RNA, 19 nt, Artificial Sequence
  Description of Artificial Sequence: Synthetic oligonucleotide
aacucgaucccaccguuca

SEQ ID NO: 1332842 - RNA, 19 nt, Artificial Sequence
  Description of Artificial Sequence: Synthetic oligonucleotide
uauguugccaguucacggu

SEQ ID NO: 1332843 - RNA, 19 nt, Artificial Sequence
  Description of Artificial Sequence: Synthetic oligonucleotide
aggagguugagacaccuug

SEQ ID NO: 1332844 - RNA, 19 nt, Artificial Sequence
  Description of Artificial Sequence: Synthetic oligonucleotide
ucucguuucccucgaaggc

SEQ ID NO: 1332845 - RNA, 19 nt, Artificial Sequence
  Description of Artificial Sequence: Synthetic oligonucleotide
uaucacaccucggacaaag

SEQ ID NO: 1332846 - RNA, 19 nt, Artificial Sequence
  Description of Artificial Sequence: Synthetic oligonucleotide
uucuuuccaugcuugaacu

SEQ ID NO: 1332847 - RNA, 19 nt, Artificial Sequence
  Description of Artificial Sequence: Synthetic oligonucleotide
acuaguaauuccaaucuug

SEQ ID NO: 1332848 - RNA, 19 nt, Artificial Sequence
  Description of Artificial Sequence: Synthetic oligonucleotide
gugagcuucggucaguuug

SEQ ID NO: 1332849 - RNA, 19 nt, Artificial Sequence
  Description of Artificial Sequence: Synthetic oligonucleotide
caaauuuuagauucccuga

SEQ ID NO: 1332850 - RNA, 19 nt, Artificial Sequence
  Description of Artificial Sequence: Synthetic oligonucleotide
ucuuaggcgagcuucccca

SEQ ID NO: 1332851 - RNA, 19 nt, Artificial Sequence
  Description of Artificial Sequence: Synthetic oligonucleotide
aacuaguguggaaagcauc

SEQ ID NO: 1332852 - RNA, 19 nt, Artificial Sequence
  Description of Artificial Sequence: Synthetic oligonucleotide
uucagguguacugggauag

SEQ ID NO: 1332853 - RNA, 19 nt, Artificial Sequence
  Description of Artificial Sequence: Synthetic oligonucleotide
uucacgguucuuucaauca

SEQ ID NO: 1332854 - RNA, 19 nt, Artificial Sequence
  Description of Artificial Sequence: Synthetic oligonucleotide
aacgagcuucuguugucac

SEQ ID NO: 1332855 - RNA, 19 nt, Artificial Sequence
  Description of Artificial Sequence: Synthetic oligonucleotide
gacgaacucguauacgcug

SEQ ID NO: 1332856 - RNA, 19 nt, Artificial Sequence
  Description of Artificial Sequence: Synthetic oligonucleotide
ugagcuucggucaguuugc

SEQ ID NO: 1332857 - RNA, 19 nt, Artificial Sequence
  Description of Artificial Sequence: Synthetic oligonucleotide
ugaaaacgagcuucuguug

SEQ ID NO: 1332858 - RNA, 19 nt, Artificial Sequence
  Description of Artificial Sequence: Synthetic oligonucleotide
acaaagccgguacugccac

SEQ ID NO: 1332859 - RNA, 19 nt, Artificial Sequence
  Description of Artificial Sequence: Synthetic oligonucleotide
accccuugcaacaaguucg

SEQ ID NO: 1332860 - RNA, 19 nt, Artificial Sequence
  Description of Artificial Sequence: Synthetic oligonucleotide
accccuaagucuaugaguc

SEQ ID NO: 1332861 - RNA, 19 nt, Artificial Sequence
  Description of Artificial Sequence: Synthetic oligonucleotide
cugaauauggcgccagccc

SEQ ID NO: 1332862 - RNA, 19 nt, Artificial Sequence
  Description of Artificial Sequence: Synthetic oligonucleotide
acaacuaguguggaaagca

SEQ ID NO: 1332863 - RNA, 19 nt, Artificial Sequence
  Description of Artificial Sequence: Synthetic oligonucleotide
uggcuuuguaaguaaaguc

SEQ ID NO: 1332864 - RNA, 19 nt, Artificial Sequence
  Description of Artificial Sequence: Synthetic oligonucleotide
ucauauagcgaagugcauc

SEQ ID NO: 1332865 - RNA, 19 nt, Artificial Sequence
  Description of Artificial Sequence: Synthetic oligonucleotide
uucauuggcaagucugaga

SEQ ID NO: 1332866 - RNA, 19 nt, Artificial Sequence
  Description of Artificial Sequence: Synthetic oligonucleotide
aagucugauaaaguuccug

SEQ ID NO: 1332867 - RNA, 19 nt, Artificial Sequence
  Description of Artificial Sequence: Synthetic oligonucleotide
uggaggggaacacaacucu

SEQ ID NO: 1332868 - RNA, 19 nt, Artificial Sequence
  Description of Artificial Sequence: Synthetic oligonucleotide
acugcuguagcaaggcuac

SEQ ID NO: 1332869 - RNA, 19 nt, Artificial Sequence
  Description of Artificial Sequence: Synthetic oligonucleotide
ggcaaugaaaaggaugugg

SEQ ID NO: 1332870 - RNA, 19 nt, Artificial Sequence
  Description of Artificial Sequence: Synthetic oligonucleotide
uggggagaagcaaaggcaa

SEQ ID NO: 1332871 - RNA, 19 nt, Artificial Sequence
  Description of Artificial Sequence: Synthetic oligonucleotide
uucaaucauauagcgaagu

SEQ ID NO: 1332872 - RNA, 19 nt, Artificial Sequence
  Description of Artificial Sequence: Synthetic oligonucleotide
agaguugccuucaacuuuc

SEQ ID NO: 1332873 - RNA, 19 nt, Artificial Sequence
  Description of Artificial Sequence: Synthetic oligonucleotide
agcucuauguugccaguuc

SEQ ID NO: 1332874 - RNA, 19 nt, Artificial Sequence
  Description of Artificial Sequence: Synthetic oligonucleotide
ugagucgucucauaucauc

SEQ ID NO: 1332875 - RNA, 19 nt, Artificial Sequence
  Description of Artificial Sequence: Synthetic oligonucleotide
uacgcuguagggaggcuag

SEQ ID NO: 1332876 - RNA, 19 nt, Artificial Sequence
  Description of Artificial Sequence: Synthetic oligonucleotide
gcuacuaguaauuccaauc

SEQ ID NO: 1332877 - RNA, 19 nt, Artificial Sequence
  Description of Artificial Sequence: Synthetic oligonucleotide
gaagacgaacucguauacg

SEQ ID NO: 1332878 - RNA, 19 nt, Artificial Sequence
  Description of Artificial Sequence: Synthetic oligonucleotide
acacaacuaguguggaaag

SEQ ID NO: 1332879 - RNA, 19 nt, Artificial Sequence
  Description of Artificial Sequence: Synthetic oligonucleotide
aacacaacucuguccggga

SEQ ID NO: 1332880 - RNA, 19 nt, Artificial Sequence
  Description of Artificial Sequence: Synthetic oligonucleotide
uaauggaggcuucucugac

SEQ ID NO: 1332881 - RNA, 19 nt, Artificial Sequence
  Description of Artificial Sequence: Synthetic oligonucleotide
ucgaaggcaaucauucuuu

SEQ ID NO: 1332882 - RNA, 19 nt, Artificial Sequence
  Description of Artificial Sequence: Synthetic oligonucleotide
cacaccucggacaaagcac

SEQ ID NO: 1332883 - RNA, 19 nt, Artificial Sequence
  Description of Artificial Sequence: Synthetic oligonucleotide
aaggccaauaucacaccuc

SEQ ID NO: 1332884 - RNA, 19 nt, Artificial Sequence
  Description of Artificial Sequence: Synthetic oligonucleotide
gagucgucucauaucaucc

SEQ ID NO: 1332885 - RNA, 19 nt, Artificial Sequence
  Description of Artificial Sequence: Synthetic oligonucleotide
uacuggcucuaacagguga

SEQ ID NO: 1332886 - RNA, 19 nt, Artificial Sequence
  Description of Artificial Sequence: Synthetic oligonucleotide
auauaaacugcaacauuug

SEQ ID NO: 1332887 - RNA, 19 nt, Artificial Sequence
  Description of Artificial Sequence: Synthetic oligonucleotide
aggcuacucaaagaaugcc

SEQ ID NO: 1332888 - RNA, 19 nt, Artificial Sequence
  Description of Artificial Sequence: Synthetic oligonucleotide
uucccugaagaaaguagcu

SEQ ID NO: 1332889 - RNA, 19 nt, Artificial Sequence
  Description of Artificial Sequence: Synthetic oligonucleotide
acuaguguggaaagcaucu

SEQ ID NO: 1332890 - RNA, 19 nt, Artificial Sequence
  Description of Artificial Sequence: Synthetic oligonucleotide
uuucaggaagggauaccug

SEQ ID NO: 1332891 - RNA, 19 nt, Artificial Sequence
  Description of Artificial Sequence: Synthetic oligonucleotide
uucuacaucuuggacagau

SEQ ID NO: 1332892 - RNA, 19 nt, Artificial Sequence
  Description of Artificial Sequence: Synthetic oligonucleotide
aggauuuauuauuccacaa

SEQ ID NO: 1332893 - RNA, 19 nt, Artificial Sequence
  Description of Artificial Sequence: Synthetic oligonucleotide
caauaucacaccucggaca

SEQ ID NO: 1332894 - RNA, 19 nt, Artificial Sequence
  Description of Artificial Sequence: Synthetic oligonucleotide
agaagcacauucuuuccau

SEQ ID NO: 1332895 - RNA, 19 nt, Artificial Sequence
  Description of Artificial Sequence: Synthetic oligonucleotide
aagcaccucuaacaaagaa

SEQ ID NO: 1332896 - RNA, 19 nt, Artificial Sequence
  Description of Artificial Sequence: Synthetic oligonucleotide
acucaaagaaugccguggu

SEQ ID NO: 1332897 - RNA, 19 nt, Artificial Sequence
  Description of Artificial Sequence: Synthetic oligonucleotide
uuggacagaugacagcaau

SEQ ID NO: 1332898 - RNA, 19 nt, Artificial Sequence
  Description of Artificial Sequence: Synthetic oligonucleotide
aggggaacacaacucuguc

SEQ ID NO: 1332899 - RNA, 19 nt, Artificial Sequence
  Description of Artificial Sequence: Synthetic oligonucleotide
cugaauuucaggaagggau

SEQ ID NO: 1332900 - RNA, 19 nt, Artificial Sequence
  Description of Artificial Sequence: Synthetic oligonucleotide
gaaaguagcugcugagcuc

SEQ ID NO: 1332901 - RNA, 19 nt, Artificial Sequence
  Description of Artificial Sequence: Synthetic oligonucleotide
aauauggcgccagccccac

SEQ ID NO: 1332902 - RNA, 19 nt, Artificial Sequence
  Description of Artificial Sequence: Synthetic oligonucleotide
aaaggaugugguaccagga

SEQ ID NO: 1332903 - RNA, 19 nt, Artificial Sequence
  Description of Artificial Sequence: Synthetic oligonucleotide
gaagcacauucuuuccaug

SEQ ID NO: 1332904 - RNA, 19 nt, Artificial Sequence
  Description of Artificial Sequence: Synthetic oligonucleotide
aggaagacgaacucguaua

SEQ ID NO: 1332905 - RNA, 19 nt, Artificial Sequence
  Description of Artificial Sequence: Synthetic oligonucleotide
cacuucuggacucacacca

SEQ ID NO: 1332906 - RNA, 19 nt, Artificial Sequence
  Description of Artificial Sequence: Synthetic oligonucleotide
cuuuccaugcuugaacuuc

SEQ ID NO: 1332907 - RNA, 19 nt, Artificial Sequence
  Description of Artificial Sequence: Synthetic oligonucleotide
ucgacgagcgugucuaaca

SEQ ID NO: 1332908 - RNA, 19 nt, Artificial Sequence
  Description of Artificial Sequence: Synthetic oligonucleotide
gaaaacgagcuucuguugu

SEQ ID NO: 1332909 - RNA, 19 nt, Artificial Sequence
  Description of Artificial Sequence: Synthetic oligonucleotide
gacagacuuucauuucuac

SEQ ID NO: 1332910 - RNA, 19 nt, Artificial Sequence
  Description of Artificial Sequence: Synthetic oligonucleotide
ucuaacaggugagcuucgg

SEQ ID NO: 1332911 - RNA, 19 nt, Artificial Sequence
  Description of Artificial Sequence: Synthetic oligonucleotide
uguaggugggccauagcuu

SEQ ID NO: 1332912 - RNA, 19 nt, Artificial Sequence
  Description of Artificial Sequence: Synthetic oligonucleotide
gagcgugucuaacacuggc

SEQ ID NO: 1332913 - RNA, 19 nt, Artificial Sequence
  Description of Artificial Sequence: Synthetic oligonucleotide
ucuuuucacuacuggcucu

SEQ ID NO: 1332914 - RNA, 19 nt, Artificial Sequence
  Description of Artificial Sequence: Synthetic oligonucleotide
ugggcagauaggcaggaau

SEQ ID NO: 1332915 - RNA, 19 nt, Artificial Sequence
  Description of Artificial Sequence: Synthetic oligonucleotide
ggcagaauuuucucuaaug

SEQ ID NO: 1332916 - RNA, 19 nt, Artificial Sequence
  Description of Artificial Sequence: Synthetic oligonucleotide
uuucccucgaaggcaauca

SEQ ID NO: 1332917 - RNA, 19 nt, Artificial Sequence
  Description of Artificial Sequence: Synthetic oligonucleotide
accuucgacaaugaggaca

SEQ ID NO: 1332918 - RNA, 19 nt, Artificial Sequence
  Description of Artificial Sequence: Synthetic oligonucleotide
cuaugagucgucucauauc

SEQ ID NO: 1332919 - RNA, 19 nt, Artificial Sequence
  Description of Artificial Sequence: Synthetic oligonucleotide
ugaaaaggaugugguacca

SEQ ID NO: 1332920 - RNA, 19 nt, Artificial Sequence
  Description of Artificial Sequence: Synthetic oligonucleotide
auaccuggagcaacugggc

SEQ ID NO: 1332921 - RNA, 19 nt, Artificial Sequence
  Description of Artificial Sequence: Synthetic oligonucleotide
cuggacucacaccauggag

SEQ ID NO: 1332922 - RNA, 19 nt, Artificial Sequence
  Description of Artificial Sequence: Synthetic oligonucleotide
aaacgagcuucuguuguca

SEQ ID NO: 1332923 - RNA, 19 nt, Artificial Sequence
  Description of Artificial Sequence: Synthetic oligonucleotide
ugucucugaugccuguccu

SEQ ID NO: 1332924 - RNA, 19 nt, Artificial Sequence
  Description of Artificial Sequence: Synthetic oligonucleotide
aacugcaccauugggcaga

SEQ ID NO: 1332925 - RNA, 19 nt, Artificial Sequence
  Description of Artificial Sequence: Synthetic oligonucleotide
ucacgguucuuucaaucau

SEQ ID NO: 1332926 - RNA, 19 nt, Artificial Sequence
  Description of Artificial Sequence: Synthetic oligonucleotide
ucuguccgggagaauguga

SEQ ID NO: 1332927 - RNA, 19 nt, Artificial Sequence
  Description of Artificial Sequence: Synthetic oligonucleotide
auauagcgaagugcauccc

SEQ ID NO: 1332928 - RNA, 19 nt, Artificial Sequence
  Description of Artificial Sequence: Synthetic oligonucleotide
ggcuacucaaagaaugccg

SEQ ID NO: 1332929 - RNA, 19 nt, Artificial Sequence
  Description of Artificial Sequence: Synthetic oligonucleotide
uuaacucgaucccaccguu

SEQ ID NO: 1332930 - RNA, 19 nt, Artificial Sequence
  Description of Artificial Sequence: Synthetic oligonucleotide
agcaacugggcuuccauua

SEQ ID NO: 1332931 - RNA, 19 nt, Artificial Sequence
  Description of Artificial Sequence: Synthetic oligonucleotide
ugagaagacuuuuggcuuu

SEQ ID NO: 1332932 - RNA, 19 nt, Artificial Sequence
  Description of Artificial Sequence: Synthetic oligonucleotide
gaugaccccuugcaacaag

SEQ ID NO: 1332933 - RNA, 19 nt, Artificial Sequence
  Description of Artificial Sequence: Synthetic oligonucleotide
gcuucggucaguuugcuga

SEQ ID NO: 1332934 - RNA, 19 nt, Artificial Sequence
  Description of Artificial Sequence: Synthetic oligonucleotide
uaggcgagcuuccccaaga

SEQ ID NO: 1332935 - RNA, 19 nt, Artificial Sequence
  Description of Artificial Sequence: Synthetic oligonucleotide
gaccaaggauuuauuauuc

SEQ ID NO: 1332936 - RNA, 19 nt, Artificial Sequence
  Description of Artificial Sequence: Synthetic oligonucleotide
caugggaguggcuggaguc

SEQ ID NO: 1332937 - RNA, 19 nt, Artificial Sequence
  Description of Artificial Sequence: Synthetic oligonucleotide
aacugggcuuccauuaaca

SEQ ID NO: 1332938 - RNA, 19 nt, Artificial Sequence
  Description of Artificial Sequence: Synthetic oligonucleotide
acgagcgugucuaacacug

SEQ ID NO: 1332939 - RNA, 19 nt, Artificial Sequence
  Description of Artificial Sequence: Synthetic oligonucleotide
uuaggcgagcuuccccaag

SEQ ID NO: 1332940 - RNA, 19 nt, Artificial Sequence
  Description of Artificial Sequence: Synthetic oligonucleotide
uguugacuccaucucguuu

SEQ ID NO: 1332941 - RNA, 19 nt, Artificial Sequence
  Description of Artificial Sequence: Synthetic oligonucleotide
cucuauguugccaguucac

SEQ ID NO: 1332942 - RNA, 19 nt, Artificial Sequence
  Description of Artificial Sequence: Synthetic oligonucleotide
ucggacaaagcaccucuaa

SEQ ID NO: 1332943 - RNA, 19 nt, Artificial Sequence
  Description of Artificial Sequence: Synthetic oligonucleotide
cuacucaaagaaugccgug

SEQ ID NO: 1332944 - RNA, 19 nt, Artificial Sequence
  Description of Artificial Sequence: Synthetic oligonucleotide
guucacgguucuuucaauc

SEQ ID NO: 1332945 - RNA, 19 nt, Artificial Sequence
  Description of Artificial Sequence: Synthetic oligonucleotide
aaguucgacgagcgugucu

SEQ ID NO: 1332946 - RNA, 19 nt, Artificial Sequence
  Description of Artificial Sequence: Synthetic oligonucleotide
auggaggggaacacaacuc

SEQ ID NO: 1332947 - RNA, 19 nt, Artificial Sequence
  Description of Artificial Sequence: Synthetic oligonucleotide
caucucguuucccucgaag

SEQ ID NO: 1332948 - RNA, 19 nt, Artificial Sequence
  Description of Artificial Sequence: Synthetic oligonucleotide
ggauagaugaccccuugca

SEQ ID NO: 1332949 - RNA, 19 nt, Artificial Sequence
  Description of Artificial Sequence: Synthetic oligonucleotide
acacaacucuguccgggag

SEQ ID NO: 1332950 - RNA, 19 nt, Artificial Sequence
  Description of Artificial Sequence: Synthetic oligonucleotide
gaccccuugcaacaaguuc

SEQ ID NO: 1332951 - RNA, 19 nt, Artificial Sequence
  Description of Artificial Sequence: Synthetic oligonucleotide
ggagaaugugaaaacgagc

SEQ ID NO: 1332952 - RNA, 19 nt, Artificial Sequence
  Description of Artificial Sequence: Synthetic oligonucleotide
ugucuaacacuggcacacg

SEQ ID NO: 1332953 - RNA, 19 nt, Artificial Sequence
  Description of Artificial Sequence: Synthetic oligonucleotide
ggaucaugggaguggcugg

SEQ ID NO: 1332954 - RNA, 19 nt, Artificial Sequence
  Description of Artificial Sequence: Synthetic oligonucleotide
caugcuugaacuucagcua

SEQ ID NO: 1332955 - RNA, 19 nt, Artificial Sequence
  Description of Artificial Sequence: Synthetic oligonucleotide
guauacgcuguagggaggc

SEQ ID NO: 1332956 - RNA, 19 nt, Artificial Sequence
  Description of Artificial Sequence: Synthetic oligonucleotide
gccaauaucacaccucgga

SEQ ID NO: 1332957 - RNA, 19 nt, Artificial Sequence
  Description of Artificial Sequence: Synthetic oligonucleotide
uacugggauagaugacccc

SEQ ID NO: 1332958 - RNA, 19 nt, Artificial Sequence
  Description of Artificial Sequence: Synthetic oligonucleotide
agcaccucuaacaaagaau

SEQ ID NO: 1332959 - RNA, 19 nt, Artificial Sequence
  Description of Artificial Sequence: Synthetic oligonucleotide
ucguuucccucgaaggcaa

SEQ ID NO: 1332960 - RNA, 19 nt, Artificial Sequence
  Description of Artificial Sequence: Synthetic oligonucleotide
gaacucguauacgcuguag

SEQ ID NO: 1332961 - RNA, 19 nt, Artificial Sequence
  Description of Artificial Sequence: Synthetic oligonucleotide
guacugggauagaugaccc

SEQ ID NO: 1332962 - RNA, 19 nt, Artificial Sequence
  Description of Artificial Sequence: Synthetic oligonucleotide
ugcugaauauggcgccagc

SEQ ID NO: 1332963 - RNA, 19 nt, Artificial Sequence
  Description of Artificial Sequence: Synthetic oligonucleotide
cacuggaucaugggagugg

SEQ ID NO: 1332964 - RNA, 19 nt, Artificial Sequence
  Description of Artificial Sequence: Synthetic oligonucleotide
ggaagacgaacucguauac

SEQ ID NO: 1332965 - RNA, 19 nt, Artificial Sequence
  Description of Artificial Sequence: Synthetic oligonucleotide
cuucggucaguuugcugag

SEQ ID NO: 1332966 - RNA, 19 nt, Artificial Sequence
  Description of Artificial Sequence: Synthetic oligonucleotide
acaaguucgacgagcgugu

SEQ ID NO: 1332967 - RNA, 19 nt, Artificial Sequence
  Description of Artificial Sequence: Synthetic oligonucleotide
uuucucuaauggaggcuuc

SEQ ID NO: 1332968 - RNA, 19 nt, Artificial Sequence
  Description of Artificial Sequence: Synthetic oligonucleotide
aguucgacgagcgugucua

SEQ ID NO: 1332969 - RNA, 19 nt, Artificial Sequence
  Description of Artificial Sequence: Synthetic oligonucleotide
cuaaacaguccagagccca

SEQ ID NO: 1332970 - RNA, 19 nt, Artificial Sequence
  Description of Artificial Sequence: Synthetic oligonucleotide
ugcagucuaguguuacaau

SEQ ID NO: 1332971 - RNA, 19 nt, Artificial Sequence
  Description of Artificial Sequence: Synthetic oligonucleotide
uugcaacaaguucgacgag

SEQ ID NO: 1332972 - RNA, 19 nt, Artificial Sequence
  Description of Artificial Sequence: Synthetic oligonucleotide
cucuuaggcgagcuucccc

SEQ ID NO: 1332973 - RNA, 19 nt, Artificial Sequence
  Description of Artificial Sequence: Synthetic oligonucleotide
ugcuguagcaaggcuacuc

SEQ ID NO: 1332974 - RNA, 19 nt, Artificial Sequence
  Description of Artificial Sequence: Synthetic oligonucleotide
guggucuugcucugagaag

SEQ ID NO: 1332975 - RNA, 19 nt, Artificial Sequence
  Description of Artificial Sequence: Synthetic oligonucleotide
gagaagcaaaggcaagcaa

SEQ ID NO: 1332976 - RNA, 19 nt, Artificial Sequence
  Description of Artificial Sequence: Synthetic oligonucleotide
acuguugacuccaucucgu

SEQ ID NO: 1332977 - RNA, 19 nt, Artificial Sequence
  Description of Artificial Sequence: Synthetic oligonucleotide
cucuaacaggugagcuucg

SEQ ID NO: 1332978 - RNA, 19 nt, Artificial Sequence
  Description of Artificial Sequence: Synthetic oligonucleotide
aaagcaccucuaacaaaga

SEQ ID NO: 1332979 - RNA, 19 nt, Artificial Sequence
  Description of Artificial Sequence: Synthetic oligonucleotide
gucuaguguuacaauagga

SEQ ID NO: 1332980 - RNA, 19 nt, Artificial Sequence
  Description of Artificial Sequence: Synthetic oligonucleotide
uucucuaauggaggcuucu

SEQ ID NO: 1332981 - RNA, 19 nt, Artificial Sequence
  Description of Artificial Sequence: Synthetic oligonucleotide
aaagucugauaaaguuccu

SEQ ID NO: 1332982 - RNA, 19 nt, Artificial Sequence
  Description of Artificial Sequence: Synthetic oligonucleotide
auucagguguacugggaua

SEQ ID NO: 1332983 - RNA, 19 nt, Artificial Sequence
  Description of Artificial Sequence: Synthetic oligonucleotide
uguugccaguucacgguuc

SEQ ID NO: 1332984 - RNA, 19 nt, Artificial Sequence
  Description of Artificial Sequence: Synthetic oligonucleotide
accguucacugggaaggcc

SEQ ID NO: 1332985 - RNA, 19 nt, Artificial Sequence
  Description of Artificial Sequence: Synthetic oligonucleotide
gaauucagguguacuggga

SEQ ID NO: 1332986 - RNA, 19 nt, Artificial Sequence
  Description of Artificial Sequence: Synthetic oligonucleotide
acaauaggaccaaggauuu

SEQ ID NO: 1332987 - RNA, 19 nt, Artificial Sequence
  Description of Artificial Sequence: Synthetic oligonucleotide
uaacucgaucccaccguuc

SEQ ID NO: 1332988 - RNA, 19 nt, Artificial Sequence
  Description of Artificial Sequence: Synthetic oligonucleotide
ccaauaucacaccucggac

SEQ ID NO: 1332989 - RNA, 19 nt, Artificial Sequence
  Description of Artificial Sequence: Synthetic oligonucleotide
ugagcagaguuuggcuuug

SEQ ID NO: 1332990 - RNA, 19 nt, Artificial Sequence
  Description of Artificial Sequence: Synthetic oligonucleotide
cagugcaucuacaucucga

SEQ ID NO: 1332991 - RNA, 19 nt, Artificial Sequence
  Description of Artificial Sequence: Synthetic oligonucleotide
uucugggcgucucuucaau

SEQ ID NO: 1332992 - RNA, 19 nt, Artificial Sequence
  Description of Artificial Sequence: Synthetic oligonucleotide
gcacaaauuuuagauuccc

SEQ ID NO: 1332993 - RNA, 19 nt, Artificial Sequence
  Description of Artificial Sequence: Synthetic oligonucleotide
guaagcaguucuuguaggu

SEQ ID NO: 1332994 - RNA, 19 nt, Artificial Sequence
  Description of Artificial Sequence: Synthetic oligonucleotide
ucgaagccagucucuggcu

SEQ ID NO: 1332995 - RNA, 19 nt, Artificial Sequence
  Description of Artificial Sequence: Synthetic oligonucleotide
ccaaggauuuauuauucca

SEQ ID NO: 1332996 - RNA, 19 nt, Artificial Sequence
  Description of Artificial Sequence: Synthetic oligonucleotide
uggcucuaacaggugagcu

SEQ ID NO: 1332997 - RNA, 19 nt, Artificial Sequence
  Description of Artificial Sequence: Synthetic oligonucleotide
caacugggcuuccauuaac

SEQ ID NO: 1332998 - RNA, 19 nt, Artificial Sequence
  Description of Artificial Sequence: Synthetic oligonucleotide
cucaaagaaugccgugguc

SEQ ID NO: 1332999 - RNA, 19 nt, Artificial Sequence
  Description of Artificial Sequence: Synthetic oligonucleotide
acgagcuucuguugucaca

SEQ ID NO: 1333000 - RNA, 19 nt, Artificial Sequence
  Description of Artificial Sequence: Synthetic oligonucleotide
aucacaccucggacaaagc

SEQ ID NO: 1333001 - RNA, 19 nt, Artificial Sequence
  Description of Artificial Sequence: Synthetic oligonucleotide
gaauauggcgccagcccca

SEQ ID NO: 1333002 - RNA, 19 nt, Artificial Sequence
  Description of Artificial Sequence: Synthetic oligonucleotide
acaacucuguccgggagaa

SEQ ID NO: 1333003 - RNA, 19 nt, Artificial Sequence
  Description of Artificial Sequence: Synthetic oligonucleotide
agguguacugggauagaug

SEQ ID NO: 1333004 - RNA, 19 nt, Artificial Sequence
  Description of Artificial Sequence: Synthetic oligonucleotide
agcaggggcagaauuuucu

SEQ ID NO: 1333005 - RNA, 19 nt, Artificial Sequence
  Description of Artificial Sequence: Synthetic oligonucleotide
ugcugagcucuauguugcc

SEQ ID NO: 1333006 - RNA, 19 nt, Artificial Sequence
  Description of Artificial Sequence: Synthetic oligonucleotide
cuucuguugucacaguccu

SEQ ID NO: 1333007 - RNA, 19 nt, Artificial Sequence
  Description of Artificial Sequence: Synthetic oligonucleotide
agccgguacugccacacaa

SEQ ID NO: 1333008 - RNA, 19 nt, Artificial Sequence
  Description of Artificial Sequence: Synthetic oligonucleotide
guugagacaccuuguuugu

SEQ ID NO: 1333009 - RNA, 19 nt, Artificial Sequence
  Description of Artificial Sequence: Synthetic oligonucleotide
guaagaauucagguguacu

SEQ ID NO: 1333010 - RNA, 19 nt, Artificial Sequence
  Description of Artificial Sequence: Synthetic oligonucleotide
gcgugucuaacacuggcac

SEQ ID NO: 1333011 - RNA, 19 nt, Artificial Sequence
  Description of Artificial Sequence: Synthetic oligonucleotide
cuggcucuaacaggugagc

SEQ ID NO: 1333012 - RNA, 19 nt, Artificial Sequence
  Description of Artificial Sequence: Synthetic oligonucleotide
ggaacacaacucuguccgg

SEQ ID NO: 1333013 - RNA, 19 nt, Artificial Sequence
  Description of Artificial Sequence: Synthetic oligonucleotide
ccaucugcuaaacagucca

SEQ ID NO: 1333014 - RNA, 19 nt, Artificial Sequence
  Description of Artificial Sequence: Synthetic oligonucleotide
uucccucgaaggcaaucau

SEQ ID NO: 1333015 - RNA, 19 nt, Artificial Sequence
  Description of Artificial Sequence: Synthetic oligonucleotide
gcagucuaguguuacaaua

SEQ ID NO: 1333016 - RNA, 19 nt, Artificial Sequence
  Description of Artificial Sequence: Synthetic oligonucleotide
ugaccccuugcaacaaguu

SEQ ID NO: 1333017 - RNA, 19 nt, Artificial Sequence
  Description of Artificial Sequence: Synthetic oligonucleotide
gcugaauauggcgccagcc

SEQ ID NO: 1333018 - RNA, 19 nt, Artificial Sequence
  Description of Artificial Sequence: Synthetic oligonucleotide
acgaacucguauacgcugu

SEQ ID NO: 1333019 - RNA, 19 nt, Artificial Sequence
  Description of Artificial Sequence: Synthetic oligonucleotide
uucuguugucacaguccuc

SEQ ID NO: 1333020 - RNA, 19 nt, Artificial Sequence
  Description of Artificial Sequence: Synthetic oligonucleotide
agacgaacucguauacgcu

SEQ ID NO: 1333021 - RNA, 19 nt, Artificial Sequence
  Description of Artificial Sequence: Synthetic oligonucleotide
guagggaggcuagcagggg

SEQ ID NO: 1333022 - RNA, 19 nt, Artificial Sequence
  Description of Artificial Sequence: Synthetic oligonucleotide
auauggcgccagccccacc

SEQ ID NO: 1333023 - RNA, 19 nt, Artificial Sequence
  Description of Artificial Sequence: Synthetic oligonucleotide
agcuucggucaguuugcug

SEQ ID NO: 1333024 - RNA, 19 nt, Artificial Sequence
  Description of Artificial Sequence: Synthetic oligonucleotide
cuguccgggagaaugugaa

SEQ ID NO: 1333025 - RNA, 19 nt, Artificial Sequence
  Description of Artificial Sequence: Synthetic oligonucleotide
cucguuucccucgaaggca

SEQ ID NO: 1333026 - RNA, 19 nt, Artificial Sequence
  Description of Artificial Sequence: Synthetic oligonucleotide
uucgacgagcgugucuaac

SEQ ID NO: 1333027 - RNA, 19 nt, Artificial Sequence
  Description of Artificial Sequence: Synthetic oligonucleotide
guccgggagaaugugaaaa

SEQ ID NO: 1333028 - RNA, 19 nt, Artificial Sequence
  Description of Artificial Sequence: Synthetic oligonucleotide
acgguucuuucaaucauau

SEQ ID NO: 1333029 - RNA, 19 nt, Artificial Sequence
  Description of Artificial Sequence: Synthetic oligonucleotide
uguccgggagaaugugaaa

SEQ ID NO: 1333030 - RNA, 19 nt, Artificial Sequence
  Description of Artificial Sequence: Synthetic oligonucleotide
agcugcugagcucuauguu

SEQ ID NO: 1333031 - RNA, 19 nt, Artificial Sequence
  Description of Artificial Sequence: Synthetic oligonucleotide
guaccaggagguugagaca

SEQ ID NO: 1333032 - RNA, 19 nt, Artificial Sequence
  Description of Artificial Sequence: Synthetic oligonucleotide
cucuaacaaagaauauggu

SEQ ID NO: 1333033 - RNA, 19 nt, Artificial Sequence
  Description of Artificial Sequence: Synthetic oligonucleotide
accucggacaaagcaccuc

SEQ ID NO: 1333034 - RNA, 19 nt, Artificial Sequence
  Description of Artificial Sequence: Synthetic oligonucleotide
agucuaugagucgucucau

SEQ ID NO: 1333035 - RNA, 19 nt, Artificial Sequence
  Description of Artificial Sequence: Synthetic oligonucleotide
gguaagaauucagguguac

SEQ ID NO: 1333036 - RNA, 19 nt, Artificial Sequence
  Description of Artificial Sequence: Synthetic oligonucleotide
acugcugaauauggcgcca

SEQ ID NO: 1333037 - RNA, 19 nt, Artificial Sequence
  Description of Artificial Sequence: Synthetic oligonucleotide
gacucacaccauggagggg

SEQ ID NO: 1333038 - RNA, 19 nt, Artificial Sequence
  Description of Artificial Sequence: Synthetic oligonucleotide
cacaacucuguccgggaga

SEQ ID NO: 1333039 - RNA, 19 nt, Artificial Sequence
  Description of Artificial Sequence: Synthetic oligonucleotide
aagccgguacugccacaca

SEQ ID NO: 1333040 - RNA, 19 nt, Artificial Sequence
  Description of Artificial Sequence: Synthetic oligonucleotide
ucugggcgucucuucaauu

SEQ ID NO: 1333041 - RNA, 19 nt, Artificial Sequence
  Description of Artificial Sequence: Synthetic oligonucleotide
caaacacacuucugcugca

SEQ ID NO: 1333042 - RNA, 19 nt, Artificial Sequence
  Description of Artificial Sequence: Synthetic oligonucleotide
gaagggauaccuggagcaa

SEQ ID NO: 1333043 - RNA, 19 nt, Artificial Sequence
  Description of Artificial Sequence: Synthetic oligonucleotide
ccgggagaaugugaaaacg

SEQ ID NO: 1333044 - RNA, 19 nt, Artificial Sequence
  Description of Artificial Sequence: Synthetic oligonucleotide
uucccuucauuggcaaguc

SEQ ID NO: 1333045 - RNA, 19 nt, Artificial Sequence
  Description of Artificial Sequence: Synthetic oligonucleotide
ggaccaaggauuuauuauu

SEQ ID NO: 1333046 - RNA, 19 nt, Artificial Sequence
  Description of Artificial Sequence: Synthetic oligonucleotide
ucagguguacugggauaga

SEQ ID NO: 1333047 - RNA, 19 nt, Artificial Sequence
  Description of Artificial Sequence: Synthetic oligonucleotide
cugcugaauauggcgccag

SEQ ID NO: 1333048 - RNA, 19 nt, Artificial Sequence
  Description of Artificial Sequence: Synthetic oligonucleotide
cauucacuucuggacucac

SEQ ID NO: 1333049 - RNA, 19 nt, Artificial Sequence
  Description of Artificial Sequence: Synthetic oligonucleotide
agaguucacacuggaucau

SEQ ID NO: 1333050 - RNA, 19 nt, Artificial Sequence
  Description of Artificial Sequence: Synthetic oligonucleotide
ccuucgacaaugaggacaa

SEQ ID NO: 1333051 - RNA, 19 nt, Artificial Sequence
  Description of Artificial Sequence: Synthetic oligonucleotide
gcaaaggcaagcaagcccu

SEQ ID NO: 1333052 - RNA, 19 nt, Artificial Sequence
  Description of Artificial Sequence: Synthetic oligonucleotide
cacgguucuuucaaucaua

SEQ ID NO: 1333053 - RNA, 19 nt, Artificial Sequence
  Description of Artificial Sequence: Synthetic oligonucleotide
ggaggcuucucugaccuuc

SEQ ID NO: 1333054 - RNA, 19 nt, Artificial Sequence
  Description of Artificial Sequence: Synthetic oligonucleotide
uauacgcuguagggaggcu

SEQ ID NO: 1333055 - RNA, 19 nt, Artificial Sequence
  Description of Artificial Sequence: Synthetic oligonucleotide
auucucagucaagaauguu

SEQ ID NO: 1333056 - RNA, 19 nt, Artificial Sequence
  Description of Artificial Sequence: Synthetic oligonucleotide
aucauauagcgaagugcau

SEQ ID NO: 1333057 - RNA, 19 nt, Artificial Sequence
  Description of Artificial Sequence: Synthetic oligonucleotide
cuuggacagaugacagcaa

SEQ ID NO: 1333058 - RNA, 19 nt, Artificial Sequence
  Description of Artificial Sequence: Synthetic oligonucleotide
auacgcuguagggaggcua

SEQ ID NO: 1333059 - RNA, 19 nt, Artificial Sequence
  Description of Artificial Sequence: Synthetic oligonucleotide
caccccuaagucuaugagu

SEQ ID NO: 1333060 - RNA, 19 nt, Artificial Sequence
  Description of Artificial Sequence: Synthetic oligonucleotide
cucuguccgggagaaugug

SEQ ID NO: 1333061 - RNA, 19 nt, Artificial Sequence
  Description of Artificial Sequence: Synthetic oligonucleotide
ggaggggaacacaacucug

SEQ ID NO: 1333062 - RNA, 19 nt, Artificial Sequence
  Description of Artificial Sequence: Synthetic oligonucleotide
gaccuucgacaaugaggac

SEQ ID NO: 1333063 - RNA, 19 nt, Artificial Sequence
  Description of Artificial Sequence: Synthetic oligonucleotide
agacagacuuucauuucua

SEQ ID NO: 1333064 - RNA, 19 nt, Artificial Sequence
  Description of Artificial Sequence: Synthetic oligonucleotide
cucgaaggcaaucauucuu

SEQ ID NO: 1333065 - RNA, 19 nt, Artificial Sequence
  Description of Artificial Sequence: Synthetic oligonucleotide
augccguggucuugcucug

SEQ ID NO: 1333066 - RNA, 19 nt, Artificial Sequence
  Description of Artificial Sequence: Synthetic oligonucleotide
auaggaccaaggauuuauu

SEQ ID NO: 1333067 - RNA, 19 nt, Artificial Sequence
  Description of Artificial Sequence: Synthetic oligonucleotide
gacgagcgugucuaacacu

SEQ ID NO: 1333068 - RNA, 19 nt, Artificial Sequence
  Description of Artificial Sequence: Synthetic oligonucleotide
gcaggggcagaauuuucuc

SEQ ID NO: 1333069 - RNA, 19 nt, Artificial Sequence
  Description of Artificial Sequence: Synthetic oligonucleotide
aucucucuuaggcgagcuu

SEQ ID NO: 1333070 - RNA, 19 nt, Artificial Sequence
  Description of Artificial Sequence: Synthetic oligonucleotide
gccaguucacgguucuuuc

SEQ ID NO: 1333071 - RNA, 19 nt, Artificial Sequence
  Description of Artificial Sequence: Synthetic oligonucleotide
caggaagacgaacucguau

SEQ ID NO: 1333072 - RNA, 19 nt, Artificial Sequence
  Description of Artificial Sequence: Synthetic oligonucleotide
cguauacgcuguagggagg

SEQ ID NO: 1333073 - RNA, 19 nt, Artificial Sequence
  Description of Artificial Sequence: Synthetic oligonucleotide
gcuacucaaagaaugccgu

SEQ ID NO: 1333074 - RNA, 19 nt, Artificial Sequence
  Description of Artificial Sequence: Synthetic oligonucleotide
ccccuaagucuaugagucg

SEQ ID NO: 1333075 - RNA, 19 nt, Artificial Sequence
  Description of Artificial Sequence: Synthetic oligonucleotide
gucuaugagucgucucaua

SEQ ID NO: 1333076 - RNA, 19 nt, Artificial Sequence
  Description of Artificial Sequence: Synthetic oligonucleotide
agaugaccccuugcaacaa

SEQ ID NO: 1333077 - RNA, 19 nt, Artificial Sequence
  Description of Artificial Sequence: Synthetic oligonucleotide
gccaucugcuaaacagucc

SEQ ID NO: 1333078 - RNA, 19 nt, Artificial Sequence
  Description of Artificial Sequence: Synthetic oligonucleotide
cuuaggcgagcuuccccaa

SEQ ID NO: 1333079 - RNA, 19 nt, Artificial Sequence
  Description of Artificial Sequence: Synthetic oligonucleotide
gcagauaggcaggaaucuc

SEQ ID NO: 1333080 - RNA, 19 nt, Artificial Sequence
  Description of Artificial Sequence: Synthetic oligonucleotide
ggccaauaucacaccucgg

SEQ ID NO: 1333081 - RNA, 19 nt, Artificial Sequence
  Description of Artificial Sequence: Synthetic oligonucleotide
cgggagaaugugaaaacga

SEQ ID NO: 1333082 - RNA, 19 nt, Artificial Sequence
  Description of Artificial Sequence: Synthetic oligonucleotide
ccugaauuucaggaaggga

SEQ ID NO: 1333083 - RNA, 19 nt, Artificial Sequence
  Description of Artificial Sequence: Synthetic oligonucleotide
gagcaacugggcuuccauu

SEQ ID NO: 1333084 - RNA, 19 nt, Artificial Sequence
  Description of Artificial Sequence: Synthetic oligonucleotide
caaguucgacgagcguguc

SEQ ID NO: 1333085 - RNA, 19 nt, Artificial Sequence
  Description of Artificial Sequence: Synthetic oligonucleotide
cgacgagcgugucuaacac

SEQ ID NO: 1333086 - RNA, 19 nt, Artificial Sequence
  Description of Artificial Sequence: Synthetic oligonucleotide
gcugagcagaguuuggcuu

SEQ ID NO: 1333087 - RNA, 19 nt, Artificial Sequence
  Description of Artificial Sequence: Synthetic oligonucleotide
ccaguucacgguucuuuca

SEQ ID NO: 1333088 - RNA, 19 nt, Artificial Sequence
  Description of Artificial Sequence: Synthetic oligonucleotide
augagucgucucauaucau

SEQ ID NO: 1333089 - RNA, 19 nt, Artificial Sequence
  Description of Artificial Sequence: Synthetic oligonucleotide
caaagccgguacugccaca

SEQ ID NO: 1333090 - RNA, 19 nt, Artificial Sequence
  Description of Artificial Sequence: Synthetic oligonucleotide
agcaagcccucugguucug

SEQ ID NO: 1333091 - RNA, 19 nt, Artificial Sequence
  Description of Artificial Sequence: Synthetic oligonucleotide
caagcccucugguucugua

SEQ ID NO: 1333092 - RNA, 19 nt, Artificial Sequence
  Description of Artificial Sequence: Synthetic oligonucleotide
guaggcccacaagguggag

SEQ ID NO: 1333093 - RNA, 19 nt, Artificial Sequence
  Description of Artificial Sequence: Synthetic oligonucleotide
cgagcgugucuaacacugg

SEQ ID NO: 1333094 - RNA, 19 nt, Artificial Sequence
  Description of Artificial Sequence: Synthetic oligonucleotide
gggcgucucuucaauuuuc

SEQ ID NO: 1333095 - RNA, 19 nt, Artificial Sequence
  Description of Artificial Sequence: Synthetic oligonucleotide
uggaggcuucucugaccuu

SEQ ID NO: 1333096 - RNA, 19 nt, Artificial Sequence
  Description of Artificial Sequence: Synthetic oligonucleotide
gggaggcuagcaggggcag

SEQ ID NO: 1333097 - RNA, 19 nt, Artificial Sequence
  Description of Artificial Sequence: Synthetic oligonucleotide
guucgacgagcgugucuaa

SEQ ID NO: 1333098 - RNA, 19 nt, Artificial Sequence
  Description of Artificial Sequence: Synthetic oligonucleotide
ggcucuaacaggugagcuu

SEQ ID NO: 1333099 - RNA, 19 nt, Artificial Sequence
  Description of Artificial Sequence: Synthetic oligonucleotide
caaugaggacaaagccggu

SEQ ID NO: 1333100 - RNA, 19 nt, Artificial Sequence
  Description of Artificial Sequence: Synthetic oligonucleotide
ggagguugagacaccuugu

SEQ ID NO: 1333101 - RNA, 19 nt, Artificial Sequence
  Description of Artificial Sequence: Synthetic oligonucleotide
caacaaguucgacgagcgu

SEQ ID NO: 1333102 - RNA, 19 nt, Artificial Sequence
  Description of Artificial Sequence: Synthetic oligonucleotide
ccucggacaaagcaccucu

SEQ ID NO: 1333103 - RNA, 19 nt, Artificial Sequence
  Description of Artificial Sequence: Synthetic oligonucleotide
ccaucucucuuaggcgagc

SEQ ID NO: 1333104 - RNA, 19 nt, Artificial Sequence
  Description of Artificial Sequence: Synthetic oligonucleotide
caucucucuuaggcgagcu

SEQ ID NO: 1333105 - RNA, 19 nt, Artificial Sequence
  Description of Artificial Sequence: Synthetic oligonucleotide
cagccccaccccuaagucu

SEQ ID NO: 1333106 - RNA, 19 nt, Artificial Sequence
  Description of Artificial Sequence: Synthetic oligonucleotide
cagguguacugggauagau

SEQ ID NO: 1333107 - RNA, 19 nt, Artificial Sequence
  Description of Artificial Sequence: Synthetic oligonucleotide
gccacacaacuagugugga

SEQ ID NO: 1333108 - RNA, 19 nt, Artificial Sequence
  Description of Artificial Sequence: Synthetic oligonucleotide
ggcuugccaucugcuaaac

SEQ ID NO: 1333109 - RNA, 19 nt, Artificial Sequence
  Description of Artificial Sequence: Synthetic oligonucleotide
ggugggccauagcuuucuc

SEQ ID NO: 1333110 - RNA, 19 nt, Artificial Sequence
  Description of Artificial Sequence: Synthetic oligonucleotide
cccacaagguggaggggca

SEQ ID NO: 1333111 - RNA, 19 nt, Artificial Sequence
  Description of Artificial Sequence: Synthetic oligonucleotide
ccccuugcaacaaguucga

SEQ ID NO: 1333112 - RNA, 19 nt, Artificial Sequence
  Description of Artificial Sequence: Synthetic oligonucleotide
ccguucacugggaaggccu

SEQ ID NO: 1333113 - RNA, 19 nt, Artificial Sequence
  Description of Artificial Sequence: Synthetic oligonucleotide
cccuaagucuaugagucgu

SEQ ID NO: 1333114 - RNA, 19 nt, Artificial Sequence
  Description of Artificial Sequence: Synthetic oligonucleotide
ggcgagcuuccccaagagu

SEQ ID NO: 1333115 - RNA, 19 nt, Artificial Sequence
  Description of Artificial Sequence: Synthetic oligonucleotide
gaguugccuucaacuuucu

SEQ ID NO: 1333116 - RNA, 19 nt, Artificial Sequence
  Description of Artificial Sequence: Synthetic oligonucleotide
gagcuucggucaguuugcu

SEQ ID NO: 1333117 - RNA, 19 nt, Artificial Sequence
  Description of Artificial Sequence: Synthetic oligonucleotide
caccucggacaaagcaccu

SEQ ID NO: 1333118 - RNA, 19 nt, Artificial Sequence
  Description of Artificial Sequence: Synthetic oligonucleotide
ccacacaacuaguguggaa

SEQ ID NO: 1333119 - RNA, 19 nt, Artificial Sequence
  Description of Artificial Sequence: Synthetic oligonucleotide
gcaaggcuacucaaagaau

SEQ ID NO: 1333120 - RNA, 19 nt, Artificial Sequence
  Description of Artificial Sequence: Synthetic oligonucleotide
ccgguacugccacacaacu

SEQ ID NO: 1333121 - RNA, 19 nt, Artificial Sequence
  Description of Artificial Sequence: Synthetic oligonucleotide
cacuggcacacguccuccu

SEQ ID NO: 1333122 - RNA, 19 nt, Artificial Sequence
  Description of Artificial Sequence: Synthetic oligonucleotide
gcucucugcacugaaucuu

SEQ ID NO: 1333123 - RNA, 19 nt, Artificial Sequence
  Description of Artificial Sequence: Synthetic oligonucleotide
gagcagaguuuggcuuugu

SEQ ID NO: 1333124 - RNA, 19 nt, Artificial Sequence
  Description of Artificial Sequence: Synthetic oligonucleotide
gcagccugccuggggagaa

SEQ ID NO: 1333125 - RNA, 19 nt, Artificial Sequence
  Description of Artificial Sequence: Synthetic oligonucleotide
cuucgacaaugaggacaaa

SEQ ID NO: 1333126 - RNA, 19 nt, Artificial Sequence
  Description of Artificial Sequence: Synthetic oligonucleotide
cccuugcaacaaguucgac

SEQ ID NO: 1333127 - RNA, 19 nt, Artificial Sequence
  Description of Artificial Sequence: Synthetic oligonucleotide
ccguggucuugcucugaga

SEQ ID NO: 1333128 - RNA, 19 nt, Artificial Sequence
  Description of Artificial Sequence: Synthetic oligonucleotide
gcgccagccccaccccuaa

SEQ ID NO: 1333129 - RNA, 19 nt, Artificial Sequence
  Description of Artificial Sequence: Synthetic oligonucleotide
cgaacucguauacgcugua

SEQ ID NO: 1333130 - RNA, 19 nt, Artificial Sequence
  Description of Artificial Sequence: Synthetic oligonucleotide
cugcuguagcaaggcuacu

SEQ ID NO: 1333131 - RNA, 19 nt, Artificial Sequence
  Description of Artificial Sequence: Synthetic oligonucleotide
cgguucuuucaaucauaua

SEQ ID NO: 1333132 - RNA, 19 nt, Artificial Sequence
  Description of Artificial Sequence: Synthetic oligonucleotide
ccccaccccuaagucuaug

SEQ ID NO: 1333133 - RNA, 19 nt, Artificial Sequence
  Description of Artificial Sequence: Synthetic oligonucleotide
ccaucucguuucccucgaa

SEQ ID NO: 1333134 - RNA, 19 nt, Artificial Sequence
  Description of Artificial Sequence: Synthetic oligonucleotide
ggcgccagccccaccccua

SEQ ID NO: 1333135 - RNA, 19 nt, Artificial Sequence
  Description of Artificial Sequence: Synthetic oligonucleotide
cgaaggcaaucauucuuuu

SEQ ID NO: 1333136 - RNA, 19 nt, Artificial Sequence
  Description of Artificial Sequence: Synthetic oligonucleotide
caacucuguccgggagaau

SEQ ID NO: 1333137 - RNA, 19 nt, Artificial Sequence
  Description of Artificial Sequence: Synthetic oligonucleotide
cguucacugggaaggccuu

SEQ ID NO: 1333138 - RNA, 19 nt, Artificial Sequence
  Description of Artificial Sequence: Synthetic oligonucleotide
cguuucccucgaaggcaau

SEQ ID NO: 1333139 - RNA, 19 nt, Artificial Sequence
  Description of Artificial Sequence: Synthetic oligonucleotide
uauauaaccacacaaauag

SEQ ID NO: 1333140 - RNA, 19 nt, Artificial Sequence
  Description of Artificial Sequence: Synthetic oligonucleotide
aauaaagggcuauauaacc

SEQ ID NO: 1333141 - RNA, 19 nt, Artificial Sequence
  Description of Artificial Sequence: Synthetic oligonucleotide
uuuacuauuguaaugacgc

SEQ ID NO: 1333142 - RNA, 19 nt, Artificial Sequence
  Description of Artificial Sequence: Synthetic oligonucleotide
aaauaggucauguaaacag

SEQ ID NO: 1333143 - RNA, 19 nt, Artificial Sequence
  Description of Artificial Sequence: Synthetic oligonucleotide
uuuaaacuaaguuuuauaa

SEQ ID NO: 1333144 - RNA, 19 nt, Artificial Sequence
  Description of Artificial Sequence: Synthetic oligonucleotide
aaccuagcaaaguuuauac

SEQ ID NO: 1333145 - RNA, 19 nt, Artificial Sequence
  Description of Artificial Sequence: Synthetic oligonucleotide
aaagggcagaccuaagccc

SEQ ID NO: 1333146 - RNA, 19 nt, Artificial Sequence
  Description of Artificial Sequence: Synthetic oligonucleotide
aaguuuuauaaguaauguc

SEQ ID NO: 1333147 - RNA, 19 nt, Artificial Sequence
  Description of Artificial Sequence: Synthetic oligonucleotide
agagaaagcucccaagucc

SEQ ID NO: 1333148 - RNA, 19 nt, Artificial Sequence
  Description of Artificial Sequence: Synthetic oligonucleotide
uuaaacuaaguuuuauaag

SEQ ID NO: 1333149 - RNA, 19 nt, Artificial Sequence
  Description of Artificial Sequence: Synthetic oligonucleotide
uuuauauggucaaauguug

SEQ ID NO: 1333150 - RNA, 19 nt, Artificial Sequence
  Description of Artificial Sequence: Synthetic oligonucleotide
uaaacagugacaccggacc

SEQ ID NO: 1333151 - RNA, 19 nt, Artificial Sequence
  Description of Artificial Sequence: Synthetic oligonucleotide
uuauauggucaaauguugg

SEQ ID NO: 1333152 - RNA, 19 nt, Artificial Sequence
  Description of Artificial Sequence: Synthetic oligonucleotide
aguuuuauaaguaaugucu

SEQ ID NO: 1333153 - RNA, 19 nt, Artificial Sequence
  Description of Artificial Sequence: Synthetic oligonucleotide
uauauggucaaauguuggg

SEQ ID NO: 1333154 - RNA, 19 nt, Artificial Sequence
  Description of Artificial Sequence: Synthetic oligonucleotide
gaacugaccaaucccaacg

SEQ ID NO: 1333155 - RNA, 19 nt, Artificial Sequence
  Description of Artificial Sequence: Synthetic oligonucleotide
caacguacaaaacacacgc

SEQ ID NO: 1333156 - RNA, 19 nt, Artificial Sequence
  Description of Artificial Sequence: Synthetic oligonucleotide
uaaguaaugucugauaacu

SEQ ID NO: 1333157 - RNA, 19 nt, Artificial Sequence
  Description of Artificial Sequence: Synthetic oligonucleotide
aguccuaugaccgagcauc

SEQ ID NO: 1333158 - RNA, 19 nt, Artificial Sequence
  Description of Artificial Sequence: Synthetic oligonucleotide
acuaaacuccaacagccac

SEQ ID NO: 1333159 - RNA, 19 nt, Artificial Sequence
  Description of Artificial Sequence: Synthetic oligonucleotide
uaaccacacaaauagguca

SEQ ID NO: 1333160 - RNA, 19 nt, Artificial Sequence
  Description of Artificial Sequence: Synthetic oligonucleotide
ucucgaaccgacaugguca

SEQ ID NO: 1333161 - RNA, 19 nt, Artificial Sequence
  Description of Artificial Sequence: Synthetic oligonucleotide
ucuuccuucgggaucaagc

SEQ ID NO: 1333162 - RNA, 19 nt, Artificial Sequence
  Description of Artificial Sequence: Synthetic oligonucleotide
aacuaaguuuuauaaguaa

SEQ ID NO: 1333163 - RNA, 19 nt, Artificial Sequence
  Description of Artificial Sequence: Synthetic oligonucleotide
uuauccagugcacugugcc

SEQ ID NO: 1333164 - RNA, 19 nt, Artificial Sequence
  Description of Artificial Sequence: Synthetic oligonucleotide
uuggacuuuacuauuguaa

SEQ ID NO: 1333165 - RNA, 19 nt, Artificial Sequence
  Description of Artificial Sequence: Synthetic oligonucleotide
agcucuuaaacauauaauu

SEQ ID NO: 1333166 - RNA, 19 nt, Artificial Sequence
  Description of Artificial Sequence: Synthetic oligonucleotide
acugacacgccucccaccc

SEQ ID NO: 1333167 - RNA, 19 nt, Artificial Sequence
  Description of Artificial Sequence: Synthetic oligonucleotide
uuaaauaaagggcuauaua

SEQ ID NO: 1333168 - RNA, 19 nt, Artificial Sequence
  Description of Artificial Sequence: Synthetic oligonucleotide
cuuagaaccggcgauuugg

SEQ ID NO: 1333169 - RNA, 19 nt, Artificial Sequence
  Description of Artificial Sequence: Synthetic oligonucleotide
gugacgacaaggaugauag

SEQ ID NO: 1333170 - RNA, 19 nt, Artificial Sequence
  Description of Artificial Sequence: Synthetic oligonucleotide
uuugccacgcacucagugg

SEQ ID NO: 1333171 - RNA, 19 nt, Artificial Sequence
  Description of Artificial Sequence: Synthetic oligonucleotide
gaugauaggggcucagccc

SEQ ID NO: 1333172 - RNA, 19 nt, Artificial Sequence
  Description of Artificial Sequence: Synthetic oligonucleotide
acacaaauaggucauguaa

SEQ ID NO: 1333173 - RNA, 19 nt, Artificial Sequence
  Description of Artificial Sequence: Synthetic oligonucleotide
ucguaaaaggaacuucucu

SEQ ID NO: 1333174 - RNA, 19 nt, Artificial Sequence
  Description of Artificial Sequence: Synthetic oligonucleotide
aaaacacacgcgugacgac

SEQ ID NO: 1333175 - RNA, 19 nt, Artificial Sequence
  Description of Artificial Sequence: Synthetic oligonucleotide
ugcacggugaguccuauga

SEQ ID NO: 1333176 - RNA, 19 nt, Artificial Sequence
  Description of Artificial Sequence: Synthetic oligonucleotide
agaaccggcgauuuggucu

SEQ ID NO: 1333177 - RNA, 19 nt, Artificial Sequence
  Description of Artificial Sequence: Synthetic oligonucleotide
acguacaaaacacacgcgu

SEQ ID NO: 1333178 - RNA, 19 nt, Artificial Sequence
  Description of Artificial Sequence: Synthetic oligonucleotide
uccuucgggaucaagcuga

SEQ ID NO: 1333179 - RNA, 19 nt, Artificial Sequence
  Description of Artificial Sequence: Synthetic oligonucleotide
ucgcaggacacacugacac

SEQ ID NO: 1333180 - RNA, 19 nt, Artificial Sequence
  Description of Artificial Sequence: Synthetic oligonucleotide
cagacuggcagccuguagg

SEQ ID NO: 1333181 - RNA, 19 nt, Artificial Sequence
  Description of Artificial Sequence: Synthetic oligonucleotide
auaaccacacaaauagguc

SEQ ID NO: 1333182 - RNA, 19 nt, Artificial Sequence
  Description of Artificial Sequence: Synthetic oligonucleotide
caugcuggcguuuucggag

SEQ ID NO: 1333183 - RNA, 19 nt, Artificial Sequence
  Description of Artificial Sequence: Synthetic oligonucleotide
aucccaacguacaaaacac

SEQ ID NO: 1333184 - RNA, 19 nt, Artificial Sequence
  Description of Artificial Sequence: Synthetic oligonucleotide
cucaguggccccuaaagac

SEQ ID NO: 1333185 - RNA, 19 nt, Artificial Sequence
  Description of Artificial Sequence: Synthetic oligonucleotide
ugaccaaucccaacguaca

SEQ ID NO: 1333186 - RNA, 19 nt, Artificial Sequence
  Description of Artificial Sequence: Synthetic oligonucleotide
uuaggggcaacccaacauc

SEQ ID NO: 1333187 - RNA, 19 nt, Artificial Sequence
  Description of Artificial Sequence: Synthetic oligonucleotide
aauaggucauguaaacagu

SEQ ID NO: 1333188 - RNA, 19 nt, Artificial Sequence
  Description of Artificial Sequence: Synthetic oligonucleotide
acaaaacacacgcgugacg

SEQ ID NO: 1333189 - RNA, 19 nt, Artificial Sequence
  Description of Artificial Sequence: Synthetic oligonucleotide
aaguaaugucugauaacuc

SEQ ID NO: 1333190 - RNA, 19 nt, Artificial Sequence
  Description of Artificial Sequence: Synthetic oligonucleotide
agcucucgaaccgacaugg

SEQ ID NO: 1333191 - RNA, 19 nt, Artificial Sequence
  Description of Artificial Sequence: Synthetic oligonucleotide
cuaaagacugccuggccac

SEQ ID NO: 1333192 - RNA, 19 nt, Artificial Sequence
  Description of Artificial Sequence: Synthetic oligonucleotide
ucugauaacucuguguaua

SEQ ID NO: 1333193 - RNA, 19 nt, Artificial Sequence
  Description of Artificial Sequence: Synthetic oligonucleotide
ucgggaucaagcugagagg

SEQ ID NO: 1333194 - RNA, 19 nt, Artificial Sequence
  Description of Artificial Sequence: Synthetic oligonucleotide
aagggguuaggggcaaccc

SEQ ID NO: 1333195 - RNA, 19 nt, Artificial Sequence
  Description of Artificial Sequence: Synthetic oligonucleotide
gagaaagcucccaaguccc

SEQ ID NO: 1333196 - RNA, 19 nt, Artificial Sequence
  Description of Artificial Sequence: Synthetic oligonucleotide
cacggugaguccuaugacc

SEQ ID NO: 1333197 - RNA, 19 nt, Artificial Sequence
  Description of Artificial Sequence: Synthetic oligonucleotide
uauuguaaugacgcuggug

SEQ ID NO: 1333198 - RNA, 19 nt, Artificial Sequence
  Description of Artificial Sequence: Synthetic oligonucleotide
uugccacgcacucaguggc

SEQ ID NO: 1333199 - RNA, 19 nt, Artificial Sequence
  Description of Artificial Sequence: Synthetic oligonucleotide
uuaagugugcgccggcgcu

SEQ ID NO: 1333200 - RNA, 19 nt, Artificial Sequence
  Description of Artificial Sequence: Synthetic oligonucleotide
aacguacaaaacacacgcg

SEQ ID NO: 1333201 - RNA, 19 nt, Artificial Sequence
  Description of Artificial Sequence: Synthetic oligonucleotide
uguaaugacgcugguggca

SEQ ID NO: 1333202 - RNA, 19 nt, Artificial Sequence
  Description of Artificial Sequence: Synthetic oligonucleotide
aaacuaaguuuuauaagua

SEQ ID NO: 1333203 - RNA, 19 nt, Artificial Sequence
  Description of Artificial Sequence: Synthetic oligonucleotide
aaaccuagcaaaguuuaua

SEQ ID NO: 1333204 - RNA, 19 nt, Artificial Sequence
  Description of Artificial Sequence: Synthetic oligonucleotide
ccaaguuuacaagaaaggg

SEQ ID NO: 1333205 - RNA, 19 nt, Artificial Sequence
  Description of Artificial Sequence: Synthetic oligonucleotide
ucuuaagugugcgccggcg

SEQ ID NO: 1333206 - RNA, 19 nt, Artificial Sequence
  Description of Artificial Sequence: Synthetic oligonucleotide
cuugguacaaagggguuag

SEQ ID NO: 1333207 - RNA, 19 nt, Artificial Sequence
  Description of Artificial Sequence: Synthetic oligonucleotide
ucagcucucgaaccgacau

SEQ ID NO: 1333208 - RNA, 19 nt, Artificial Sequence
  Description of Artificial Sequence: Synthetic oligonucleotide
acuaaguuuuauaaguaau

SEQ ID NO: 1333209 - RNA, 19 nt, Artificial Sequence
  Description of Artificial Sequence: Synthetic oligonucleotide
aaacacacgcgugacgaca

SEQ ID NO: 1333210 - RNA, 19 nt, Artificial Sequence
  Description of Artificial Sequence: Synthetic oligonucleotide
uuuuaaauaaagggcuaua

SEQ ID NO: 1333211 - RNA, 19 nt, Artificial Sequence
  Description of Artificial Sequence: Synthetic oligonucleotide
ugaguccuaugaccgagca

SEQ ID NO: 1333212 - RNA, 19 nt, Artificial Sequence
  Description of Artificial Sequence: Synthetic oligonucleotide
auauggucaaauguugggu

SEQ ID NO: 1333213 - RNA, 19 nt, Artificial Sequence
  Description of Artificial Sequence: Synthetic oligonucleotide
uucguaaaaggaacuucuc

SEQ ID NO: 1333214 - RNA, 19 nt, Artificial Sequence
  Description of Artificial Sequence: Synthetic oligonucleotide
uuacuauuguaaugacgcu

SEQ ID NO: 1333215 - RNA, 19 nt, Artificial Sequence
  Description of Artificial Sequence: Synthetic oligonucleotide
uaggggcaacccaacauca
